United States Patent Application Publication US 2014/0004565 A1 - sequence listing, part 81

SEQ ID NO: 1988364 - RNA, 19 nt, Artificial Sequence
  Description of Artificial Sequence: Synthetic oligonucleotide
agcgccgucagccccgcuc

SEQ ID NO: 1988365 - RNA, 19 nt, Artificial Sequence
  Description of Artificial Sequence: Synthetic oligonucleotide
gaagccguucagaaaccgc

SEQ ID NO: 1988366 - RNA, 19 nt, Artificial Sequence
  Description of Artificial Sequence: Synthetic oligonucleotide
uggucuccgcuccaguuaa

SEQ ID NO: 1988367 - RNA, 19 nt, Artificial Sequence
  Description of Artificial Sequence: Synthetic oligonucleotide
cuagaauuauuaucaaaau

SEQ ID NO: 1988368 - RNA, 19 nt, Artificial Sequence
  Description of Artificial Sequence: Synthetic oligonucleotide
agguuccacaccugagcuc

SEQ ID NO: 1988369 - RNA, 19 nt, Artificial Sequence
  Description of Artificial Sequence: Synthetic oligonucleotide
uuuggccacggaccuggcc

SEQ ID NO: 1988370 - RNA, 19 nt, Artificial Sequence
  Description of Artificial Sequence: Synthetic oligonucleotide
caauagccuagaauuauua

SEQ ID NO: 1988371 - RNA, 19 nt, Artificial Sequence
  Description of Artificial Sequence: Synthetic oligonucleotide
acggcuuuuccagcugggc

SEQ ID NO: 1988372 - RNA, 19 nt, Artificial Sequence
  Description of Artificial Sequence: Synthetic oligonucleotide
cuaggacggcuuuuccagc

SEQ ID NO: 1988373 - RNA, 19 nt, Artificial Sequence
  Description of Artificial Sequence: Synthetic oligonucleotide
ugcucagguagagagugaa

SEQ ID NO: 1988374 - RNA, 19 nt, Artificial Sequence
  Description of Artificial Sequence: Synthetic oligonucleotide
agcggcuccguagauuccg

SEQ ID NO: 1988375 - RNA, 19 nt, Artificial Sequence
  Description of Artificial Sequence: Synthetic oligonucleotide
agcgacucaggaaguaauc

SEQ ID NO: 1988376 - RNA, 19 nt, Artificial Sequence
  Description of Artificial Sequence: Synthetic oligonucleotide
cgacaauacauuucuauuc

SEQ ID NO: 1988377 - RNA, 19 nt, Artificial Sequence
  Description of Artificial Sequence: Synthetic oligonucleotide
uuccgccauggcuuuacug

SEQ ID NO: 1988378 - RNA, 19 nt, Artificial Sequence
  Description of Artificial Sequence: Synthetic oligonucleotide
uuccaguaugagguaaggu

SEQ ID NO: 1988379 - RNA, 19 nt, Artificial Sequence
  Description of Artificial Sequence: Synthetic oligonucleotide
aucaaaauucugaggcaca

SEQ ID NO: 1988380 - RNA, 19 nt, Artificial Sequence
  Description of Artificial Sequence: Synthetic oligonucleotide
aucguaagacaaagcauga

SEQ ID NO: 1988381 - RNA, 19 nt, Artificial Sequence
  Description of Artificial Sequence: Synthetic oligonucleotide
guaacuaacugccuucuuu

SEQ ID NO: 1988382 - RNA, 19 nt, Artificial Sequence
  Description of Artificial Sequence: Synthetic oligonucleotide
agcucacgacaauacauuu

SEQ ID NO: 1988383 - RNA, 19 nt, Artificial Sequence
  Description of Artificial Sequence: Synthetic oligonucleotide
guaaaagguuuccgccaug

SEQ ID NO: 1988384 - RNA, 19 nt, Artificial Sequence
  Description of Artificial Sequence: Synthetic oligonucleotide
cauuucuauucuauuccaa

SEQ ID NO: 1988385 - RNA, 19 nt, Artificial Sequence
  Description of Artificial Sequence: Synthetic oligonucleotide
guaagguuaagggucccga

SEQ ID NO: 1988386 - RNA, 19 nt, Artificial Sequence
  Description of Artificial Sequence: Synthetic oligonucleotide
gcgacucaggaaguaaucg

SEQ ID NO: 1988387 - RNA, 19 nt, Artificial Sequence
  Description of Artificial Sequence: Synthetic oligonucleotide
uaugugcucaaggacccau

SEQ ID NO: 1988388 - RNA, 19 nt, Artificial Sequence
  Description of Artificial Sequence: Synthetic oligonucleotide
uguuuucuguccgcgucac

SEQ ID NO: 1988389 - RNA, 19 nt, Artificial Sequence
  Description of Artificial Sequence: Synthetic oligonucleotide
aucaccuuguaaagaugag

SEQ ID NO: 1988390 - RNA, 19 nt, Artificial Sequence
  Description of Artificial Sequence: Synthetic oligonucleotide
uauuccggauguugcuggu

SEQ ID NO: 1988391 - RNA, 19 nt, Artificial Sequence
  Description of Artificial Sequence: Synthetic oligonucleotide
gacccaucugggcacccgc

SEQ ID NO: 1988392 - RNA, 19 nt, Artificial Sequence
  Description of Artificial Sequence: Synthetic oligonucleotide
ggcaguauuugguaccaca

SEQ ID NO: 1988393 - RNA, 19 nt, Artificial Sequence
  Description of Artificial Sequence: Synthetic oligonucleotide
uccucaccgaucaccuggu

SEQ ID NO: 1988394 - RNA, 19 nt, Artificial Sequence
  Description of Artificial Sequence: Synthetic oligonucleotide
ccuggaacucaguuaacug

SEQ ID NO: 1988395 - RNA, 19 nt, Artificial Sequence
  Description of Artificial Sequence: Synthetic oligonucleotide
agguaagguuaaggguccc

SEQ ID NO: 1988396 - RNA, 19 nt, Artificial Sequence
  Description of Artificial Sequence: Synthetic oligonucleotide
uaaugccuggucuccgcuc

SEQ ID NO: 1988397 - RNA, 19 nt, Artificial Sequence
  Description of Artificial Sequence: Synthetic oligonucleotide
gucccgacacuauccaaac

SEQ ID NO: 1988398 - RNA, 19 nt, Artificial Sequence
  Description of Artificial Sequence: Synthetic oligonucleotide
ucuguccgcgucaccuaug

SEQ ID NO: 1988399 - RNA, 19 nt, Artificial Sequence
  Description of Artificial Sequence: Synthetic oligonucleotide
ucgugcucagguagagagu

SEQ ID NO: 1988400 - RNA, 19 nt, Artificial Sequence
  Description of Artificial Sequence: Synthetic oligonucleotide
auguguccucgugaccagc

SEQ ID NO: 1988401 - RNA, 19 nt, Artificial Sequence
  Description of Artificial Sequence: Synthetic oligonucleotide
agccuagaauuauuaucaa

SEQ ID NO: 1988402 - RNA, 19 nt, Artificial Sequence
  Description of Artificial Sequence: Synthetic oligonucleotide
auggcaguauuugguacca

SEQ ID NO: 1988403 - RNA, 19 nt, Artificial Sequence
  Description of Artificial Sequence: Synthetic oligonucleotide
gacggcuuuuccagcuggg

SEQ ID NO: 1988404 - RNA, 19 nt, Artificial Sequence
  Description of Artificial Sequence: Synthetic oligonucleotide
gguaagguuaagggucccg

SEQ ID NO: 1988405 - RNA, 19 nt, Artificial Sequence
  Description of Artificial Sequence: Synthetic oligonucleotide
ucccgacacuauccaaaca

SEQ ID NO: 1988406 - RNA, 19 nt, Artificial Sequence
  Description of Artificial Sequence: Synthetic oligonucleotide
uuuccugcuggggccaugu

SEQ ID NO: 1988407 - RNA, 19 nt, Artificial Sequence
  Description of Artificial Sequence: Synthetic oligonucleotide
cacgacaauacauuucuau

SEQ ID NO: 1988408 - RNA, 19 nt, Artificial Sequence
  Description of Artificial Sequence: Synthetic oligonucleotide
caggaaguaaucgucaggu

SEQ ID NO: 1988409 - RNA, 19 nt, Artificial Sequence
  Description of Artificial Sequence: Synthetic oligonucleotide
guguaaugccuggucuccg

SEQ ID NO: 1988410 - RNA, 19 nt, Artificial Sequence
  Description of Artificial Sequence: Synthetic oligonucleotide
ucguaagacaaagcaugau

SEQ ID NO: 1988411 - RNA, 19 nt, Artificial Sequence
  Description of Artificial Sequence: Synthetic oligonucleotide
ggcacaauauuagaaaggu

SEQ ID NO: 1988412 - RNA, 19 nt, Artificial Sequence
  Description of Artificial Sequence: Synthetic oligonucleotide
auagcgacucaggaaguaa

SEQ ID NO: 1988413 - RNA, 19 nt, Artificial Sequence
  Description of Artificial Sequence: Synthetic oligonucleotide
gucuccgcuccaguuaaag

SEQ ID NO: 1988414 - RNA, 19 nt, Artificial Sequence
  Description of Artificial Sequence: Synthetic oligonucleotide
agggucccgacacuaucca

SEQ ID NO: 1988415 - RNA, 19 nt, Artificial Sequence
  Description of Artificial Sequence: Synthetic oligonucleotide
cucaguuaacugggacugg

SEQ ID NO: 1988416 - RNA, 19 nt, Artificial Sequence
  Description of Artificial Sequence: Synthetic oligonucleotide
ggacggcuuuuccagcugg

SEQ ID NO: 1988417 - RNA, 19 nt, Artificial Sequence
  Description of Artificial Sequence: Synthetic oligonucleotide
gaggcccggaagcgggacg

SEQ ID NO: 1988418 - RNA, 19 nt, Artificial Sequence
  Description of Artificial Sequence: Synthetic oligonucleotide
uccucgugcucagguagag

SEQ ID NO: 1988419 - RNA, 19 nt, Artificial Sequence
  Description of Artificial Sequence: Synthetic oligonucleotide
ggagcuuacagguguccac

SEQ ID NO: 1988420 - RNA, 19 nt, Artificial Sequence
  Description of Artificial Sequence: Synthetic oligonucleotide
agguagagagugaacuccu

SEQ ID NO: 1988421 - RNA, 19 nt, Artificial Sequence
  Description of Artificial Sequence: Synthetic oligonucleotide
ccugaucguaagacaaagc

SEQ ID NO: 1988422 - RNA, 19 nt, Artificial Sequence
  Description of Artificial Sequence: Synthetic oligonucleotide
ucacgacaauacauuucua

SEQ ID NO: 1988423 - RNA, 19 nt, Artificial Sequence
  Description of Artificial Sequence: Synthetic oligonucleotide
uccguagauuccgggcucc

SEQ ID NO: 1988424 - RNA, 19 nt, Artificial Sequence
  Description of Artificial Sequence: Synthetic oligonucleotide
uggauucgugcugcuccgg

SEQ ID NO: 1988425 - RNA, 19 nt, Artificial Sequence
  Description of Artificial Sequence: Synthetic oligonucleotide
cuaacugccuucuuuccau

SEQ ID NO: 1988426 - RNA, 19 nt, Artificial Sequence
  Description of Artificial Sequence: Synthetic oligonucleotide
aggaaguaaucgucagguu

SEQ ID NO: 1988427 - RNA, 19 nt, Artificial Sequence
  Description of Artificial Sequence: Synthetic oligonucleotide
gcuccugcgggccacaauc

SEQ ID NO: 1988428 - RNA, 19 nt, Artificial Sequence
  Description of Artificial Sequence: Synthetic oligonucleotide
ggcuccguagauuccgggc

SEQ ID NO: 1988429 - RNA, 19 nt, Artificial Sequence
  Description of Artificial Sequence: Synthetic oligonucleotide
guuaagggucccgacacua

SEQ ID NO: 1988430 - RNA, 19 nt, Artificial Sequence
  Description of Artificial Sequence: Synthetic oligonucleotide
uuuccgccauggcuuuacu

SEQ ID NO: 1988431 - RNA, 19 nt, Artificial Sequence
  Description of Artificial Sequence: Synthetic oligonucleotide
cuccgucgcgucccgacgc

SEQ ID NO: 1988432 - RNA, 19 nt, Artificial Sequence
  Description of Artificial Sequence: Synthetic oligonucleotide
uccuuggauaugugcucaa

SEQ ID NO: 1988433 - RNA, 19 nt, Artificial Sequence
  Description of Artificial Sequence: Synthetic oligonucleotide
guuuccgccauggcuuuac

SEQ ID NO: 1988434 - RNA, 19 nt, Artificial Sequence
  Description of Artificial Sequence: Synthetic oligonucleotide
ggauucgugcugcuccggc

SEQ ID NO: 1988435 - RNA, 19 nt, Artificial Sequence
  Description of Artificial Sequence: Synthetic oligonucleotide
caggagcuuacaggugucc

SEQ ID NO: 1988436 - RNA, 19 nt, Artificial Sequence
  Description of Artificial Sequence: Synthetic oligonucleotide
gauucgugcugcuccggcu

SEQ ID NO: 1988437 - RNA, 19 nt, Artificial Sequence
  Description of Artificial Sequence: Synthetic oligonucleotide
gaagcgggacgcgaagcuc

SEQ ID NO: 1988438 - RNA, 19 nt, Artificial Sequence
  Description of Artificial Sequence: Synthetic oligonucleotide
cuccguagauuccgggcuc

SEQ ID NO: 1988439 - RNA, 19 nt, Artificial Sequence
  Description of Artificial Sequence: Synthetic oligonucleotide
gaucaccugguaacuaacu

SEQ ID NO: 1988440 - RNA, 19 nt, Artificial Sequence
  Description of Artificial Sequence: Synthetic oligonucleotide
uccgucagcucacgacaau

SEQ ID NO: 1988441 - RNA, 19 nt, Artificial Sequence
  Description of Artificial Sequence: Synthetic oligonucleotide
aucucuccgucagcucacg

SEQ ID NO: 1988442 - RNA, 19 nt, Artificial Sequence
  Description of Artificial Sequence: Synthetic oligonucleotide
uucuucccauagcgacuca

SEQ ID NO: 1988443 - RNA, 19 nt, Artificial Sequence
  Description of Artificial Sequence: Synthetic oligonucleotide
cuguccgcgucaccuauga

SEQ ID NO: 1988444 - RNA, 19 nt, Artificial Sequence
  Description of Artificial Sequence: Synthetic oligonucleotide
cugcgggccacaaucaccu

SEQ ID NO: 1988445 - RNA, 19 nt, Artificial Sequence
  Description of Artificial Sequence: Synthetic oligonucleotide
gacacuauccaaacaucuu

SEQ ID NO: 1988446 - RNA, 19 nt, Artificial Sequence
  Description of Artificial Sequence: Synthetic oligonucleotide
agaugagaggggacugcca

SEQ ID NO: 1988447 - RNA, 19 nt, Artificial Sequence
  Description of Artificial Sequence: Synthetic oligonucleotide
gguaaaagguuuccgccau

SEQ ID NO: 1988448 - RNA, 19 nt, Artificial Sequence
  Description of Artificial Sequence: Synthetic oligonucleotide
ccguucagaaaccgccgcg

SEQ ID NO: 1988449 - RNA, 19 nt, Artificial Sequence
  Description of Artificial Sequence: Synthetic oligonucleotide
ggccccgucaaucuuccuc

SEQ ID NO: 1988450 - RNA, 19 nt, Artificial Sequence
  Description of Artificial Sequence: Synthetic oligonucleotide
cgugcucagguagagagug

SEQ ID NO: 1988451 - RNA, 19 nt, Artificial Sequence
  Description of Artificial Sequence: Synthetic oligonucleotide
gguagagagugaacuccug

SEQ ID NO: 1988452 - RNA, 19 nt, Artificial Sequence
  Description of Artificial Sequence: Synthetic oligonucleotide
gccguucagaaaccgccgc

SEQ ID NO: 1988453 - RNA, 19 nt, Artificial Sequence
  Description of Artificial Sequence: Synthetic oligonucleotide
cagaaaccgccgcgaggcc

SEQ ID NO: 1988454 - RNA, 19 nt, Artificial Sequence
  Description of Artificial Sequence: Synthetic oligonucleotide
ucccgacgcgggaggaacu

SEQ ID NO: 1988455 - RNA, 19 nt, Artificial Sequence
  Description of Artificial Sequence: Synthetic oligonucleotide
aggacccaucugggcaccc

SEQ ID NO: 1988456 - RNA, 19 nt, Artificial Sequence
  Description of Artificial Sequence: Synthetic oligonucleotide
ccgacacuauccaaacauc

SEQ ID NO: 1988457 - RNA, 19 nt, Artificial Sequence
  Description of Artificial Sequence: Synthetic oligonucleotide
gcgggccacaaucaccuug

SEQ ID NO: 1988458 - RNA, 19 nt, Artificial Sequence
  Description of Artificial Sequence: Synthetic oligonucleotide
auaugugcucaaggaccca

SEQ ID NO: 1988459 - RNA, 19 nt, Artificial Sequence
  Description of Artificial Sequence: Synthetic oligonucleotide
ggacgcgaagcucuucgca

SEQ ID NO: 1988460 - RNA, 19 nt, Artificial Sequence
  Description of Artificial Sequence: Synthetic oligonucleotide
cggcuuuuccagcugggcg

SEQ ID NO: 1988461 - RNA, 19 nt, Artificial Sequence
  Description of Artificial Sequence: Synthetic oligonucleotide
guaaugccuggucuccgcu

SEQ ID NO: 1988462 - RNA, 19 nt, Artificial Sequence
  Description of Artificial Sequence: Synthetic oligonucleotide
ggcacuaggacggcuuuuc

SEQ ID NO: 1988463 - RNA, 19 nt, Artificial Sequence
  Description of Artificial Sequence: Synthetic oligonucleotide
caauguuuucuguccgcgu

SEQ ID NO: 1988464 - RNA, 19 nt, Artificial Sequence
  Description of Artificial Sequence: Synthetic oligonucleotide
cuauuccaauagccuagaa

SEQ ID NO: 1988465 - RNA, 19 nt, Artificial Sequence
  Description of Artificial Sequence: Synthetic oligonucleotide
acggaccuggccccgucaa

SEQ ID NO: 1988466 - RNA, 19 nt, Artificial Sequence
  Description of Artificial Sequence: Synthetic oligonucleotide
ggggccauguguccucgug

SEQ ID NO: 1988467 - RNA, 19 nt, Artificial Sequence
  Description of Artificial Sequence: Synthetic oligonucleotide
gcacuaggacggcuuuucc

SEQ ID NO: 1988468 - RNA, 19 nt, Artificial Sequence
  Description of Artificial Sequence: Synthetic oligonucleotide
agcaaauauuccggauguu

SEQ ID NO: 1988469 - RNA, 19 nt, Artificial Sequence
  Description of Artificial Sequence: Synthetic oligonucleotide
ucgcgucccgacgcgggag

SEQ ID NO: 1988470 - RNA, 19 nt, Artificial Sequence
  Description of Artificial Sequence: Synthetic oligonucleotide
uguccgcgucaccuaugau

SEQ ID NO: 1988471 - RNA, 19 nt, Artificial Sequence
  Description of Artificial Sequence: Synthetic oligonucleotide
ggucccgacacuauccaaa

SEQ ID NO: 1988472 - RNA, 19 nt, Artificial Sequence
  Description of Artificial Sequence: Synthetic oligonucleotide
cuggucuccgcuccaguua

SEQ ID NO: 1988473 - RNA, 19 nt, Artificial Sequence
  Description of Artificial Sequence: Synthetic oligonucleotide
gaccuggccccgucaaucu

SEQ ID NO: 1988474 - RNA, 19 nt, Artificial Sequence
  Description of Artificial Sequence: Synthetic oligonucleotide
gucccgacgcgggaggaac

SEQ ID NO: 1988475 - RNA, 19 nt, Artificial Sequence
  Description of Artificial Sequence: Synthetic oligonucleotide
uggcaguauuugguaccac

SEQ ID NO: 1988476 - RNA, 19 nt, Artificial Sequence
  Description of Artificial Sequence: Synthetic oligonucleotide
gcuccgucgcgucccgacg

SEQ ID NO: 1988477 - RNA, 19 nt, Artificial Sequence
  Description of Artificial Sequence: Synthetic oligonucleotide
cuagauccuggaggcucac

SEQ ID NO: 1988478 - RNA, 19 nt, Artificial Sequence
  Description of Artificial Sequence: Synthetic oligonucleotide
ggccacaaucaccuuguaa

SEQ ID NO: 1988479 - RNA, 19 nt, Artificial Sequence
  Description of Artificial Sequence: Synthetic oligonucleotide
cgggacgcgaagcucuucg

SEQ ID NO: 1988480 - RNA, 19 nt, Artificial Sequence
  Description of Artificial Sequence: Synthetic oligonucleotide
gggacgcgaagcucuucgc

SEQ ID NO: 1988481 - RNA, 19 nt, Artificial Sequence
  Description of Artificial Sequence: Synthetic oligonucleotide
cagcucacgacaauacauu

SEQ ID NO: 1988482 - RNA, 19 nt, Artificial Sequence
  Description of Artificial Sequence: Synthetic oligonucleotide
ggaaaacuuguuguuuccu

SEQ ID NO: 1988483 - RNA, 19 nt, Artificial Sequence
  Description of Artificial Sequence: Synthetic oligonucleotide
cauagcgacucaggaagua

SEQ ID NO: 1988484 - RNA, 19 nt, Artificial Sequence
  Description of Artificial Sequence: Synthetic oligonucleotide
aaaccgccgcgaggcccgg

SEQ ID NO: 1988485 - RNA, 19 nt, Artificial Sequence
  Description of Artificial Sequence: Synthetic oligonucleotide
cccaauggcaguauuuggu

SEQ ID NO: 1988486 - RNA, 19 nt, Artificial Sequence
  Description of Artificial Sequence: Synthetic oligonucleotide
cgaucaccugguaacuaac

SEQ ID NO: 1988487 - RNA, 19 nt, Artificial Sequence
  Description of Artificial Sequence: Synthetic oligonucleotide
gggccauguguccucguga

SEQ ID NO: 1988488 - RNA, 19 nt, Artificial Sequence
  Description of Artificial Sequence: Synthetic oligonucleotide
cuccgucagcucacgacaa

SEQ ID NO: 1988489 - RNA, 19 nt, Artificial Sequence
  Description of Artificial Sequence: Synthetic oligonucleotide
cagccccggccaagaagcc

SEQ ID NO: 1988490 - RNA, 19 nt, Artificial Sequence
  Description of Artificial Sequence: Synthetic oligonucleotide
accgaucaccugguaacua

SEQ ID NO: 1988491 - RNA, 19 nt, Artificial Sequence
  Description of Artificial Sequence: Synthetic oligonucleotide
cacuuccaauguaguccuc

SEQ ID NO: 1988492 - RNA, 19 nt, Artificial Sequence
  Description of Artificial Sequence: Synthetic oligonucleotide
uccucgugaccagccacuu

SEQ ID NO: 1988493 - RNA, 19 nt, Artificial Sequence
  Description of Artificial Sequence: Synthetic oligonucleotide
auuccggauguugcugguu

SEQ ID NO: 1988494 - RNA, 19 nt, Artificial Sequence
  Description of Artificial Sequence: Synthetic oligonucleotide
cccgacacuauccaaacau

SEQ ID NO: 1988495 - RNA, 19 nt, Artificial Sequence
  Description of Artificial Sequence: Synthetic oligonucleotide
ggacccaucugggcacccg

SEQ ID NO: 1988496 - RNA, 19 nt, Artificial Sequence
  Description of Artificial Sequence: Synthetic oligonucleotide
ggaagcgggacgcgaagcu

SEQ ID NO: 1988497 - RNA, 19 nt, Artificial Sequence
  Description of Artificial Sequence: Synthetic oligonucleotide
ccaagaagccguucagaaa

SEQ ID NO: 1988498 - RNA, 19 nt, Artificial Sequence
  Description of Artificial Sequence: Synthetic oligonucleotide
accgccgcgaggcccggaa

SEQ ID NO: 1988499 - RNA, 19 nt, Artificial Sequence
  Description of Artificial Sequence: Synthetic oligonucleotide
ccgaucaccugguaacuaa

SEQ ID NO: 1988500 - RNA, 19 nt, Artificial Sequence
  Description of Artificial Sequence: Synthetic oligonucleotide
gcgccgucagccccgcucc

SEQ ID NO: 1988501 - RNA, 19 nt, Artificial Sequence
  Description of Artificial Sequence: Synthetic oligonucleotide
ggcuccgucgcgucccgac

SEQ ID NO: 1988502 - RNA, 19 nt, Artificial Sequence
  Description of Artificial Sequence: Synthetic oligonucleotide
cguaagacaaagcaugauu

SEQ ID NO: 1988503 - RNA, 19 nt, Artificial Sequence
  Description of Artificial Sequence: Synthetic oligonucleotide
ccacuuccaauguaguccu

SEQ ID NO: 1988504 - RNA, 19 nt, Artificial Sequence
  Description of Artificial Sequence: Synthetic oligonucleotide
cgacacuauccaaacaucu

SEQ ID NO: 1988505 - RNA, 19 nt, Artificial Sequence
  Description of Artificial Sequence: Synthetic oligonucleotide
ccggccaagaagccguuca

SEQ ID NO: 1988506 - RNA, 19 nt, Artificial Sequence
  Description of Artificial Sequence: Synthetic oligonucleotide
uggggccauguguccucgu

SEQ ID NO: 1988507 - RNA, 19 nt, Artificial Sequence
  Description of Artificial Sequence: Synthetic oligonucleotide
gucgcgucccgacgcggga

SEQ ID NO: 1988508 - RNA, 19 nt, Artificial Sequence
  Description of Artificial Sequence: Synthetic oligonucleotide
gcucagguagagagugaac

SEQ ID NO: 1988509 - RNA, 19 nt, Artificial Sequence
  Description of Artificial Sequence: Synthetic oligonucleotide
cgcgucaccuaugaucuug

SEQ ID NO: 1988510 - RNA, 19 nt, Artificial Sequence
  Description of Artificial Sequence: Synthetic oligonucleotide
ggcuugaauuuacaauguu

SEQ ID NO: 1988511 - RNA, 19 nt, Artificial Sequence
  Description of Artificial Sequence: Synthetic oligonucleotide
gcgcccaccacagccccgg

SEQ ID NO: 1988512 - RNA, 19 nt, Artificial Sequence
  Description of Artificial Sequence: Synthetic oligonucleotide
guuuggccacggaccuggc

SEQ ID NO: 1988513 - RNA, 19 nt, Artificial Sequence
  Description of Artificial Sequence: Synthetic oligonucleotide
ccggaagcgggacgcgaag

SEQ ID NO: 1988514 - RNA, 19 nt, Artificial Sequence
  Description of Artificial Sequence: Synthetic oligonucleotide
guccucgugaccagccacu

SEQ ID NO: 1988515 - RNA, 19 nt, Artificial Sequence
  Description of Artificial Sequence: Synthetic oligonucleotide
ccugguaacuaacugccuu

SEQ ID NO: 1988516 - RNA, 19 nt, Artificial Sequence
  Description of Artificial Sequence: Synthetic oligonucleotide
ggggucaggcuugaauuua

SEQ ID NO: 1988517 - RNA, 19 nt, Artificial Sequence
  Description of Artificial Sequence: Synthetic oligonucleotide
cacggaccuggccccguca

SEQ ID NO: 1988518 - RNA, 19 nt, Artificial Sequence
  Description of Artificial Sequence: Synthetic oligonucleotide
ccgccauggcuuuacugga

SEQ ID NO: 1988519 - RNA, 19 nt, Artificial Sequence
  Description of Artificial Sequence: Synthetic oligonucleotide
gcucaccuggaacucaguu

SEQ ID NO: 1988520 - RNA, 19 nt, Artificial Sequence
  Description of Artificial Sequence: Synthetic oligonucleotide
ccggauguugcugguucug

SEQ ID NO: 1988521 - RNA, 19 nt, Artificial Sequence
  Description of Artificial Sequence: Synthetic oligonucleotide
uggccccgucaaucuuccu

SEQ ID NO: 1988522 - RNA, 19 nt, Artificial Sequence
  Description of Artificial Sequence: Synthetic oligonucleotide
cgucgcgucccgacgcggg

SEQ ID NO: 1988523 - RNA, 19 nt, Artificial Sequence
  Description of Artificial Sequence: Synthetic oligonucleotide
ccaauagccuagaauuauu

SEQ ID NO: 1988524 - RNA, 19 nt, Artificial Sequence
  Description of Artificial Sequence: Synthetic oligonucleotide
cguucagaaaccgccgcga

SEQ ID NO: 1988525 - RNA, 19 nt, Artificial Sequence
  Description of Artificial Sequence: Synthetic oligonucleotide
cgacucaggaaguaaucgu

SEQ ID NO: 1988526 - RNA, 19 nt, Artificial Sequence
  Description of Artificial Sequence: Synthetic oligonucleotide
gggucccgacacuauccaa

SEQ ID NO: 1988527 - RNA, 19 nt, Artificial Sequence
  Description of Artificial Sequence: Synthetic oligonucleotide
caccgaucaccugguaacu

SEQ ID NO: 1988528 - RNA, 19 nt, Artificial Sequence
  Description of Artificial Sequence: Synthetic oligonucleotide
cgccgcgaggcccggaagc

SEQ ID NO: 1988529 - RNA, 19 nt, Artificial Sequence
  Description of Artificial Sequence: Synthetic oligonucleotide
ccucgugaccagccacuuc

SEQ ID NO: 1988530 - RNA, 19 nt, Artificial Sequence
  Description of Artificial Sequence: Synthetic oligonucleotide
cggaagcgggacgcgaagc

SEQ ID NO: 1988531 - RNA, 19 nt, Artificial Sequence
  Description of Artificial Sequence: Synthetic oligonucleotide
gggcacccgcuucuccuga

SEQ ID NO: 1988532 - RNA, 19 nt, Artificial Sequence
  Description of Artificial Sequence: Synthetic oligonucleotide
caccuaugaucuuguccuu

SEQ ID NO: 1988533 - RNA, 19 nt, Artificial Sequence
  Description of Artificial Sequence: Synthetic oligonucleotide
ggcgcccgccugcuccuug

SEQ ID NO: 1988534 - RNA, 19 nt, Artificial Sequence
  Description of Artificial Sequence: Synthetic oligonucleotide
aaccgccgcgaggcccgga

SEQ ID NO: 1988535 - RNA, 19 nt, Artificial Sequence
  Description of Artificial Sequence: Synthetic oligonucleotide
ggcccggaagcgggacgcg

SEQ ID NO: 1988536 - RNA, 19 nt, Artificial Sequence
  Description of Artificial Sequence: Synthetic oligonucleotide
cgucaccuaugaucuuguc

SEQ ID NO: 1988537 - RNA, 19 nt, Artificial Sequence
  Description of Artificial Sequence: Synthetic oligonucleotide
cccgacgcgggaggaacug

SEQ ID NO: 1988538 - RNA, 19 nt, Artificial Sequence
  Description of Artificial Sequence: Synthetic oligonucleotide
ggccacggaccuggccccg

SEQ ID NO: 1988539 - RNA, 19 nt, Artificial Sequence
  Description of Artificial Sequence: Synthetic oligonucleotide
ccgcuccaguuaaaggaaa

SEQ ID NO: 1988540 - RNA, 19 nt, Artificial Sequence
  Description of Artificial Sequence: Synthetic oligonucleotide
ccauagcgacucaggaagu

SEQ ID NO: 1988541 - RNA, 19 nt, Artificial Sequence
  Description of Artificial Sequence: Synthetic oligonucleotide
ccgucagcucacgacaaua

SEQ ID NO: 1988542 - RNA, 19 nt, Artificial Sequence
  Description of Artificial Sequence: Synthetic oligonucleotide
ccgcuucuccugaucguaa

SEQ ID NO: 1988543 - RNA, 19 nt, Artificial Sequence
  Description of Artificial Sequence: Synthetic oligonucleotide
gccccggccaagaagccgu

SEQ ID NO: 1988544 - RNA, 19 nt, Artificial Sequence
  Description of Artificial Sequence: Synthetic oligonucleotide
gcgucaccuaugaucuugu

SEQ ID NO: 1988545 - RNA, 19 nt, Artificial Sequence
  Description of Artificial Sequence: Synthetic oligonucleotide
ccgucgcgucccgacgcgg

SEQ ID NO: 1988546 - RNA, 19 nt, Artificial Sequence
  Description of Artificial Sequence: Synthetic oligonucleotide
ccucgugcucagguagaga

SEQ ID NO: 1988547 - RNA, 19 nt, Artificial Sequence
  Description of Artificial Sequence: Synthetic oligonucleotide
cccgccugcuccuuggcuu

SEQ ID NO: 1988548 - RNA, 19 nt, Artificial Sequence
  Description of Artificial Sequence: Synthetic oligonucleotide
cgcuccaguuaaaggaaau

SEQ ID NO: 1988549 - RNA, 19 nt, Artificial Sequence
  Description of Artificial Sequence: Synthetic oligonucleotide
gccuggucuccgcuccagu

SEQ ID NO: 1988550 - RNA, 19 nt, Artificial Sequence
  Description of Artificial Sequence: Synthetic oligonucleotide
ggucuccgcuccaguuaaa

SEQ ID NO: 1988551 - RNA, 19 nt, Artificial Sequence
  Description of Artificial Sequence: Synthetic oligonucleotide
ggcacccgcuucuccugau

SEQ ID NO: 1988552 - RNA, 19 nt, Artificial Sequence
  Description of Artificial Sequence: Synthetic oligonucleotide
gcgggacgcgaagcucuuc

SEQ ID NO: 1988553 - RNA, 19 nt, Artificial Sequence
  Description of Artificial Sequence: Synthetic oligonucleotide
gcgaggcccggaagcggga

SEQ ID NO: 1988554 - RNA, 19 nt, Artificial Sequence
  Description of Artificial Sequence: Synthetic oligonucleotide
ggcuccugcgggccacaau

SEQ ID NO: 1988555 - RNA, 19 nt, Artificial Sequence
  Description of Artificial Sequence: Synthetic oligonucleotide
cgcccgccugcuccuuggc

SEQ ID NO: 1988556 - RNA, 19 nt, Artificial Sequence
  Description of Artificial Sequence: Synthetic oligonucleotide
ggccagcggcuccguagau

SEQ ID NO: 1988557 - RNA, 19 nt, Artificial Sequence
  Description of Artificial Sequence: Synthetic oligonucleotide
ccccgucaaucuuccucgu

SEQ ID NO: 1988558 - RNA, 19 nt, Artificial Sequence
  Description of Artificial Sequence: Synthetic oligonucleotide
ccguagauuccgggcuccu

SEQ ID NO: 1988559 - RNA, 19 nt, Artificial Sequence
  Description of Artificial Sequence: Synthetic oligonucleotide
cgucccgacgcgggaggaa

SEQ ID NO: 1988560 - RNA, 19 nt, Artificial Sequence
  Description of Artificial Sequence: Synthetic oligonucleotide
cagcgccgucagccccgcu

SEQ ID NO: 1988561 - RNA, 19 nt, Artificial Sequence
  Description of Artificial Sequence: Synthetic oligonucleotide
ccgcgucaccuaugaucuu

SEQ ID NO: 1988562 - RNA, 19 nt, Artificial Sequence
  Description of Artificial Sequence: Synthetic oligonucleotide
ccccggccaagaagccguu

SEQ ID NO: 1988563 - RNA, 19 nt, Artificial Sequence
  Description of Artificial Sequence: Synthetic oligonucleotide
cggcuccgucgcgucccga

SEQ ID NO: 1988564 - RNA, 19 nt, Artificial Sequence
  Description of Artificial Sequence: Synthetic oligonucleotide
aauagaugaauuuucaaac

SEQ ID NO: 1988565 - RNA, 19 nt, Artificial Sequence
  Description of Artificial Sequence: Synthetic oligonucleotide
auaaauuuucuuuagaacg

SEQ ID NO: 1988566 - RNA, 19 nt, Artificial Sequence
  Description of Artificial Sequence: Synthetic oligonucleotide
ugaacaaaggaauagauga

SEQ ID NO: 1988567 - RNA, 19 nt, Artificial Sequence
  Description of Artificial Sequence: Synthetic oligonucleotide
aauguagauuuucacaaac

SEQ ID NO: 1988568 - RNA, 19 nt, Artificial Sequence
  Description of Artificial Sequence: Synthetic oligonucleotide
uuuaaguaaaauuucaacu

SEQ ID NO: 1988569 - RNA, 19 nt, Artificial Sequence
  Description of Artificial Sequence: Synthetic oligonucleotide
aacaacauucccuuacugg

SEQ ID NO: 1988570 - RNA, 19 nt, Artificial Sequence
  Description of Artificial Sequence: Synthetic oligonucleotide
ucauuaaucccucacuagg

SEQ ID NO: 1988571 - RNA, 19 nt, Artificial Sequence
  Description of Artificial Sequence: Synthetic oligonucleotide
uaauuacugauuuucacag

SEQ ID NO: 1988572 - RNA, 19 nt, Artificial Sequence
  Description of Artificial Sequence: Synthetic oligonucleotide
uuuaccaaaagaucaaaug

SEQ ID NO: 1988573 - RNA, 19 nt, Artificial Sequence
  Description of Artificial Sequence: Synthetic oligonucleotide
aagaaauggaguaauuucg

SEQ ID NO: 1988574 - RNA, 19 nt, Artificial Sequence
  Description of Artificial Sequence: Synthetic oligonucleotide
aaggagaaaguuuaauaag

SEQ ID NO: 1988575 - RNA, 19 nt, Artificial Sequence
  Description of Artificial Sequence: Synthetic oligonucleotide
uuuuaaguaaaauuucaac

SEQ ID NO: 1988576 - RNA, 19 nt, Artificial Sequence
  Description of Artificial Sequence: Synthetic oligonucleotide
aauggaguaauuucgccug

SEQ ID NO: 1988577 - RNA, 19 nt, Artificial Sequence
  Description of Artificial Sequence: Synthetic oligonucleotide
uucagugggaaccugauga

SEQ ID NO: 1988578 - RNA, 19 nt, Artificial Sequence
  Description of Artificial Sequence: Synthetic oligonucleotide
uguaagaguaucacgaacu

SEQ ID NO: 1988579 - RNA, 19 nt, Artificial Sequence
  Description of Artificial Sequence: Synthetic oligonucleotide
ucaaacuuuugcaucgugg

SEQ ID NO: 1988580 - RNA, 19 nt, Artificial Sequence
  Description of Artificial Sequence: Synthetic oligonucleotide
aaagucucaaaauuccgug

SEQ ID NO: 1988581 - RNA, 19 nt, Artificial Sequence
  Description of Artificial Sequence: Synthetic oligonucleotide
uguaaauaugugcaguuca

SEQ ID NO: 1988582 - RNA, 19 nt, Artificial Sequence
  Description of Artificial Sequence: Synthetic oligonucleotide
aaguuuaauaagcauauuu

SEQ ID NO: 1988583 - RNA, 19 nt, Artificial Sequence
  Description of Artificial Sequence: Synthetic oligonucleotide
aauuucaacuuuauugaac

SEQ ID NO: 1988584 - RNA, 19 nt, Artificial Sequence
  Description of Artificial Sequence: Synthetic oligonucleotide
uuuagaacguucauuaauc

SEQ ID NO: 1988585 - RNA, 19 nt, Artificial Sequence
  Description of Artificial Sequence: Synthetic oligonucleotide
uccaguuaagguaauguag

SEQ ID NO: 1988586 - RNA, 19 nt, Artificial Sequence
  Description of Artificial Sequence: Synthetic oligonucleotide
ugagcauuccacaucacag

SEQ ID NO: 1988587 - RNA, 19 nt, Artificial Sequence
  Description of Artificial Sequence: Synthetic oligonucleotide
aaaagaucaaaugaccucu

SEQ ID NO: 1988588 - RNA, 19 nt, Artificial Sequence
  Description of Artificial Sequence: Synthetic oligonucleotide
auuacugauuuucacagug

SEQ ID NO: 1988589 - RNA, 19 nt, Artificial Sequence
  Description of Artificial Sequence: Synthetic oligonucleotide
uucuuucuacauaagauga

SEQ ID NO: 1988590 - RNA, 19 nt, Artificial Sequence
  Description of Artificial Sequence: Synthetic oligonucleotide
aagaugauaacuguaucag

SEQ ID NO: 1988591 - RNA, 19 nt, Artificial Sequence
  Description of Artificial Sequence: Synthetic oligonucleotide
uaaauuuucuuuagaacgu

SEQ ID NO: 1988592 - RNA, 19 nt, Artificial Sequence
  Description of Artificial Sequence: Synthetic oligonucleotide
ucauaaauuuucuuuagaa

SEQ ID NO: 1988593 - RNA, 19 nt, Artificial Sequence
  Description of Artificial Sequence: Synthetic oligonucleotide
aaauggaguaauuucgccu

SEQ ID NO: 1988594 - RNA, 19 nt, Artificial Sequence
  Description of Artificial Sequence: Synthetic oligonucleotide
aguaucacgaacucuuuuc

SEQ ID NO: 1988595 - RNA, 19 nt, Artificial Sequence
  Description of Artificial Sequence: Synthetic oligonucleotide
auuuucacaaacuuaucug

SEQ ID NO: 1988596 - RNA, 19 nt, Artificial Sequence
  Description of Artificial Sequence: Synthetic oligonucleotide
cuuacuggaaacaugagca

SEQ ID NO: 1988597 - RNA, 19 nt, Artificial Sequence
  Description of Artificial Sequence: Synthetic oligonucleotide
cuacauaagaugauaacug

SEQ ID NO: 1988598 - RNA, 19 nt, Artificial Sequence
  Description of Artificial Sequence: Synthetic oligonucleotide
aacuuaucugauugauccc

SEQ ID NO: 1988599 - RNA, 19 nt, Artificial Sequence
  Description of Artificial Sequence: Synthetic oligonucleotide
gaguuaaguagucccaucg

SEQ ID NO: 1988600 - RNA, 19 nt, Artificial Sequence
  Description of Artificial Sequence: Synthetic oligonucleotide
aaauccuccaguaagaaau

SEQ ID NO: 1988601 - RNA, 19 nt, Artificial Sequence
  Description of Artificial Sequence: Synthetic oligonucleotide
uaagaaauggaguaauuuc

SEQ ID NO: 1988602 - RNA, 19 nt, Artificial Sequence
  Description of Artificial Sequence: Synthetic oligonucleotide
ucuacauaagaugauaacu

SEQ ID NO: 1988603 - RNA, 19 nt, Artificial Sequence
  Description of Artificial Sequence: Synthetic oligonucleotide
aauuccgugucuucucugg

SEQ ID NO: 1988604 - RNA, 19 nt, Artificial Sequence
  Description of Artificial Sequence: Synthetic oligonucleotide
ugguuauaguuuuauaagc

SEQ ID NO: 1988605 - RNA, 19 nt, Artificial Sequence
  Description of Artificial Sequence: Synthetic oligonucleotide
auuuaaaaucaaauccucc

SEQ ID NO: 1988606 - RNA, 19 nt, Artificial Sequence
  Description of Artificial Sequence: Synthetic oligonucleotide
uaucugauugaucccaucc

SEQ ID NO: 1988607 - RNA, 19 nt, Artificial Sequence
  Description of Artificial Sequence: Synthetic oligonucleotide
uaagccaacugauccaugg

SEQ ID NO: 1988608 - RNA, 19 nt, Artificial Sequence
  Description of Artificial Sequence: Synthetic oligonucleotide
uuugaccucuucuaggucc

SEQ ID NO: 1988609 - RNA, 19 nt, Artificial Sequence
  Description of Artificial Sequence: Synthetic oligonucleotide
aaggaauagaugaauuuuc

SEQ ID NO: 1988610 - RNA, 19 nt, Artificial Sequence
  Description of Artificial Sequence: Synthetic oligonucleotide
uucuuuagaacguucauua

SEQ ID NO: 1988611 - RNA, 19 nt, Artificial Sequence
  Description of Artificial Sequence: Synthetic oligonucleotide
auaagaugauaacuguauc

SEQ ID NO: 1988612 - RNA, 19 nt, Artificial Sequence
  Description of Artificial Sequence: Synthetic oligonucleotide
gaaggagaaaguuuaauaa

SEQ ID NO: 1988613 - RNA, 19 nt, Artificial Sequence
  Description of Artificial Sequence: Synthetic oligonucleotide
uaauucuugccauugagau

SEQ ID NO: 1988614 - RNA, 19 nt, Artificial Sequence
  Description of Artificial Sequence: Synthetic oligonucleotide
ugcaacuccuccaaagcgg

SEQ ID NO: 1988615 - RNA, 19 nt, Artificial Sequence
  Description of Artificial Sequence: Synthetic oligonucleotide
acaaucauggaguaauucu

SEQ ID NO: 1988616 - RNA, 19 nt, Artificial Sequence
  Description of Artificial Sequence: Synthetic oligonucleotide
auaagcauauuuuauuuaa

SEQ ID NO: 1988617 - RNA, 19 nt, Artificial Sequence
  Description of Artificial Sequence: Synthetic oligonucleotide
ugaacuccaguuaagguaa

SEQ ID NO: 1988618 - RNA, 19 nt, Artificial Sequence
  Description of Artificial Sequence: Synthetic oligonucleotide
uaaucccucacuaggaucu

SEQ ID NO: 1988619 - RNA, 19 nt, Artificial Sequence
  Description of Artificial Sequence: Synthetic oligonucleotide
aaaagauuguucacaauca

SEQ ID NO: 1988620 - RNA, 19 nt, Artificial Sequence
  Description of Artificial Sequence: Synthetic oligonucleotide
aucauggaguaauucuugc

SEQ ID NO: 1988621 - RNA, 19 nt, Artificial Sequence
  Description of Artificial Sequence: Synthetic oligonucleotide
augcuaaugaaggagaaag

SEQ ID NO: 1988622 - RNA, 19 nt, Artificial Sequence
  Description of Artificial Sequence: Synthetic oligonucleotide
uuaaguagucccaucgugu

SEQ ID NO: 1988623 - RNA, 19 nt, Artificial Sequence
  Description of Artificial Sequence: Synthetic oligonucleotide
ucuaucucaaucuuggauu

SEQ ID NO: 1988624 - RNA, 19 nt, Artificial Sequence
  Description of Artificial Sequence: Synthetic oligonucleotide
guaauguagauuuucacaa

SEQ ID NO: 1988625 - RNA, 19 nt, Artificial Sequence
  Description of Artificial Sequence: Synthetic oligonucleotide
ugcaguucaacaacauucc

SEQ ID NO: 1988626 - RNA, 19 nt, Artificial Sequence
  Description of Artificial Sequence: Synthetic oligonucleotide
auaggaaggcuuuucuuuc

SEQ ID NO: 1988627 - RNA, 19 nt, Artificial Sequence
  Description of Artificial Sequence: Synthetic oligonucleotide
uuuauugaacaaaggaaua

SEQ ID NO: 1988628 - RNA, 19 nt, Artificial Sequence
  Description of Artificial Sequence: Synthetic oligonucleotide
aucaaaugaccucucagug

SEQ ID NO: 1988629 - RNA, 19 nt, Artificial Sequence
  Description of Artificial Sequence: Synthetic oligonucleotide
ucccuuacuggaaacauga

SEQ ID NO: 1988630 - RNA, 19 nt, Artificial Sequence
  Description of Artificial Sequence: Synthetic oligonucleotide
cauaauuacugauuuucac

SEQ ID NO: 1988631 - RNA, 19 nt, Artificial Sequence
  Description of Artificial Sequence: Synthetic oligonucleotide
acagagauggguuucaaaa

SEQ ID NO: 1988632 - RNA, 19 nt, Artificial Sequence
  Description of Artificial Sequence: Synthetic oligonucleotide
uuagaacguucauuaaucc

SEQ ID NO: 1988633 - RNA, 19 nt, Artificial Sequence
  Description of Artificial Sequence: Synthetic oligonucleotide
agaaauggaguaauuucgc

SEQ ID NO: 1988634 - RNA, 19 nt, Artificial Sequence
  Description of Artificial Sequence: Synthetic oligonucleotide
uuuccuaguggacuuuucc

SEQ ID NO: 1988635 - RNA, 19 nt, Artificial Sequence
  Description of Artificial Sequence: Synthetic oligonucleotide
uuucuacauaagaugauaa

SEQ ID NO: 1988636 - RNA, 19 nt, Artificial Sequence
  Description of Artificial Sequence: Synthetic oligonucleotide
uucauuaaucccucacuag

SEQ ID NO: 1988637 - RNA, 19 nt, Artificial Sequence
  Description of Artificial Sequence: Synthetic oligonucleotide
aagccaacugauccauggc

SEQ ID NO: 1988638 - RNA, 19 nt, Artificial Sequence
  Description of Artificial Sequence: Synthetic oligonucleotide
aacacuuugaccucuucua

SEQ ID NO: 1988639 - RNA, 19 nt, Artificial Sequence
  Description of Artificial Sequence: Synthetic oligonucleotide
acugggaugcuaaugaagg

SEQ ID NO: 1988640 - RNA, 19 nt, Artificial Sequence
  Description of Artificial Sequence: Synthetic oligonucleotide
gaaauggaguaauuucgcc

SEQ ID NO: 1988641 - RNA, 19 nt, Artificial Sequence
  Description of Artificial Sequence: Synthetic oligonucleotide
uuuuauaagccaacugauc

SEQ ID NO: 1988642 - RNA, 19 nt, Artificial Sequence
  Description of Artificial Sequence: Synthetic oligonucleotide
acuuguaagaguaucacga

SEQ ID NO: 1988643 - RNA, 19 nt, Artificial Sequence
  Description of Artificial Sequence: Synthetic oligonucleotide
agaucaaaugaccucucag

SEQ ID NO: 1988644 - RNA, 19 nt, Artificial Sequence
  Description of Artificial Sequence: Synthetic oligonucleotide
acccaugccuuauuaaugg

SEQ ID NO: 1988645 - RNA, 19 nt, Artificial Sequence
  Description of Artificial Sequence: Synthetic oligonucleotide
aaaauuccgugucuucucu

SEQ ID NO: 1988646 - RNA, 19 nt, Artificial Sequence
  Description of Artificial Sequence: Synthetic oligonucleotide
uaguuuuauaagccaacug

SEQ ID NO: 1988647 - RNA, 19 nt, Artificial Sequence
  Description of Artificial Sequence: Synthetic oligonucleotide
aaauuucaacuuuauugaa

SEQ ID NO: 1988648 - RNA, 19 nt, Artificial Sequence
  Description of Artificial Sequence: Synthetic oligonucleotide
aaagauuguucacaaucau

SEQ ID NO: 1988649 - RNA, 19 nt, Artificial Sequence
  Description of Artificial Sequence: Synthetic oligonucleotide
uagaacguucauuaauccc

SEQ ID NO: 1988650 - RNA, 19 nt, Artificial Sequence
  Description of Artificial Sequence: Synthetic oligonucleotide
uucacaaucauggaguaau

SEQ ID NO: 1988651 - RNA, 19 nt, Artificial Sequence
  Description of Artificial Sequence: Synthetic oligonucleotide
ucuguuucagugucauagg

SEQ ID NO: 1988652 - RNA, 19 nt, Artificial Sequence
  Description of Artificial Sequence: Synthetic oligonucleotide
uuuuaccaaaagaucaaau

SEQ ID NO: 1988653 - RNA, 19 nt, Artificial Sequence
  Description of Artificial Sequence: Synthetic oligonucleotide
guuaagguaauguagauuu

SEQ ID NO: 1988654 - RNA, 19 nt, Artificial Sequence
  Description of Artificial Sequence: Synthetic oligonucleotide
guuauaguuuuauaagcca

SEQ ID NO: 1988655 - RNA, 19 nt, Artificial Sequence
  Description of Artificial Sequence: Synthetic oligonucleotide
gaaacaugagcauuccaca

SEQ ID NO: 1988656 - RNA, 19 nt, Artificial Sequence
  Description of Artificial Sequence: Synthetic oligonucleotide
caaaagaucaaaugaccuc

SEQ ID NO: 1988657 - RNA, 19 nt, Artificial Sequence
  Description of Artificial Sequence: Synthetic oligonucleotide
uccuaguggacuuuuccag

SEQ ID NO: 1988658 - RNA, 19 nt, Artificial Sequence
  Description of Artificial Sequence: Synthetic oligonucleotide
uucuaucucaaucuuggau

SEQ ID NO: 1988659 - RNA, 19 nt, Artificial Sequence
  Description of Artificial Sequence: Synthetic oligonucleotide
auugucaaguucugauuuc

SEQ ID NO: 1988660 - RNA, 19 nt, Artificial Sequence
  Description of Artificial Sequence: Synthetic oligonucleotide
aagucucaaaauuccgugu

SEQ ID NO: 1988661 - RNA, 19 nt, Artificial Sequence
  Description of Artificial Sequence: Synthetic oligonucleotide
aacacgccacccgagagcg

SEQ ID NO: 1988662 - RNA, 19 nt, Artificial Sequence
  Description of Artificial Sequence: Synthetic oligonucleotide
guuaaguagucccaucgug

SEQ ID NO: 1988663 - RNA, 19 nt, Artificial Sequence
  Description of Artificial Sequence: Synthetic oligonucleotide
agaacguucauuaaucccu

SEQ ID NO: 1988664 - RNA, 19 nt, Artificial Sequence
  Description of Artificial Sequence: Synthetic oligonucleotide
uuguaagaguaucacgaac

SEQ ID NO: 1988665 - RNA, 19 nt, Artificial Sequence
  Description of Artificial Sequence: Synthetic oligonucleotide
uccauggcaguacuuacca

SEQ ID NO: 1988666 - RNA, 19 nt, Artificial Sequence
  Description of Artificial Sequence: Synthetic oligonucleotide
caugccuuauuaaugguuc

SEQ ID NO: 1988667 - RNA, 19 nt, Artificial Sequence
  Description of Artificial Sequence: Synthetic oligonucleotide
uauccugucguaagaggag

SEQ ID NO: 1988668 - RNA, 19 nt, Artificial Sequence
  Description of Artificial Sequence: Synthetic oligonucleotide
aaacaugagcauuccacau

SEQ ID NO: 1988669 - RNA, 19 nt, Artificial Sequence
  Description of Artificial Sequence: Synthetic oligonucleotide
aauuucgccugucuuuacu

SEQ ID NO: 1988670 - RNA, 19 nt, Artificial Sequence
  Description of Artificial Sequence: Synthetic oligonucleotide
aaacgcggaacacgccacc

SEQ ID NO: 1988671 - RNA, 19 nt, Artificial Sequence
  Description of Artificial Sequence: Synthetic oligonucleotide
uucuacauaagaugauaac

SEQ ID NO: 1988672 - RNA, 19 nt, Artificial Sequence
  Description of Artificial Sequence: Synthetic oligonucleotide
uuacuuagaaggcugugua

SEQ ID NO: 1988673 - RNA, 19 nt, Artificial Sequence
  Description of Artificial Sequence: Synthetic oligonucleotide
aaugaccucucagugaagu

SEQ ID NO: 1988674 - RNA, 19 nt, Artificial Sequence
  Description of Artificial Sequence: Synthetic oligonucleotide
aauuacugauuuucacagu

SEQ ID NO: 1988675 - RNA, 19 nt, Artificial Sequence
  Description of Artificial Sequence: Synthetic oligonucleotide
cugucuuuacuuagaaggc

SEQ ID NO: 1988676 - RNA, 19 nt, Artificial Sequence
  Description of Artificial Sequence: Synthetic oligonucleotide
aaagcggaagccauggugu

SEQ ID NO: 1988677 - RNA, 19 nt, Artificial Sequence
  Description of Artificial Sequence: Synthetic oligonucleotide
aagaguaucacgaacucuu

SEQ ID NO: 1988678 - RNA, 19 nt, Artificial Sequence
  Description of Artificial Sequence: Synthetic oligonucleotide
acguucauuaaucccucac

SEQ ID NO: 1988679 - RNA, 19 nt, Artificial Sequence
  Description of Artificial Sequence: Synthetic oligonucleotide
guuuaauaagcauauuuua

SEQ ID NO: 1988680 - RNA, 19 nt, Artificial Sequence
  Description of Artificial Sequence: Synthetic oligonucleotide
ugggaugcuaaugaaggag

SEQ ID NO: 1988681 - RNA, 19 nt, Artificial Sequence
  Description of Artificial Sequence: Synthetic oligonucleotide
uggcuuuucauugucaagu

SEQ ID NO: 1988682 - RNA, 19 nt, Artificial Sequence
  Description of Artificial Sequence: Synthetic oligonucleotide
auuaaugguucguuucaug

SEQ ID NO: 1988683 - RNA, 19 nt, Artificial Sequence
  Description of Artificial Sequence: Synthetic oligonucleotide
uucaacuuuauugaacaaa

SEQ ID NO: 1988684 - RNA, 19 nt, Artificial Sequence
  Description of Artificial Sequence: Synthetic oligonucleotide
augauaacuguaucagucu

SEQ ID NO: 1988685 - RNA, 19 nt, Artificial Sequence
  Description of Artificial Sequence: Synthetic oligonucleotide
aacuuuugcaucgugguua

SEQ ID NO: 1988686 - RNA, 19 nt, Artificial Sequence
  Description of Artificial Sequence: Synthetic oligonucleotide
aguaauuucgccugucuuu

SEQ ID NO: 1988687 - RNA, 19 nt, Artificial Sequence
  Description of Artificial Sequence: Synthetic oligonucleotide
aacugauccauggcaguac

SEQ ID NO: 1988688 - RNA, 19 nt, Artificial Sequence
  Description of Artificial Sequence: Synthetic oligonucleotide
ucaacaacauucccuuacu

SEQ ID NO: 1988689 - RNA, 19 nt, Artificial Sequence
  Description of Artificial Sequence: Synthetic oligonucleotide
gguaauguagauuuucaca

SEQ ID NO: 1988690 - RNA, 19 nt, Artificial Sequence
  Description of Artificial Sequence: Synthetic oligonucleotide
guuucaugucaucaucucc

SEQ ID NO: 1988691 - RNA, 19 nt, Artificial Sequence
  Description of Artificial Sequence: Synthetic oligonucleotide
cacuuguaagaguaucacg

SEQ ID NO: 1988692 - RNA, 19 nt, Artificial Sequence
  Description of Artificial Sequence: Synthetic oligonucleotide
aguuuaauaagcauauuuu

SEQ ID NO: 1988693 - RNA, 19 nt, Artificial Sequence
  Description of Artificial Sequence: Synthetic oligonucleotide
aacucuuuuccuaguggac

SEQ ID NO: 1988694 - RNA, 19 nt, Artificial Sequence
  Description of Artificial Sequence: Synthetic oligonucleotide
aucacaguucccaaaggac

SEQ ID NO: 1988695 - RNA, 19 nt, Artificial Sequence
  Description of Artificial Sequence: Synthetic oligonucleotide
gaacucuuuuccuagugga

SEQ ID NO: 1988696 - RNA, 19 nt, Artificial Sequence
  Description of Artificial Sequence: Synthetic oligonucleotide
guaucacgaacucuuuucc

SEQ ID NO: 1988697 - RNA, 19 nt, Artificial Sequence
  Description of Artificial Sequence: Synthetic oligonucleotide
uguguaaauaugugcaguu

SEQ ID NO: 1988698 - RNA, 19 nt, Artificial Sequence
  Description of Artificial Sequence: Synthetic oligonucleotide
gguuauaguuuuauaagcc

SEQ ID NO: 1988699 - RNA, 19 nt, Artificial Sequence
  Description of Artificial Sequence: Synthetic oligonucleotide
uuucacaaacuuaucugau

SEQ ID NO: 1988700 - RNA, 19 nt, Artificial Sequence
  Description of Artificial Sequence: Synthetic oligonucleotide
uaagguaauguagauuuuc

SEQ ID NO: 1988701 - RNA, 19 nt, Artificial Sequence
  Description of Artificial Sequence: Synthetic oligonucleotide
caggaaacgcggaacacgc

SEQ ID NO: 1988702 - RNA, 19 nt, Artificial Sequence
  Description of Artificial Sequence: Synthetic oligonucleotide
uucuagguccuucugcaac

SEQ ID NO: 1988703 - RNA, 19 nt, Artificial Sequence
  Description of Artificial Sequence: Synthetic oligonucleotide
aacauucccuuacuggaaa

SEQ ID NO: 1988704 - RNA, 19 nt, Artificial Sequence
  Description of Artificial Sequence: Synthetic oligonucleotide
uuuuccaccugaguuaagu

SEQ ID NO: 1988705 - RNA, 19 nt, Artificial Sequence
  Description of Artificial Sequence: Synthetic oligonucleotide
aaaaugacugggaugcuaa

SEQ ID NO: 1988706 - RNA, 19 nt, Artificial Sequence
  Description of Artificial Sequence: Synthetic oligonucleotide
cagagauggguuucaaaag

SEQ ID NO: 1988707 - RNA, 19 nt, Artificial Sequence
  Description of Artificial Sequence: Synthetic oligonucleotide
ucuuuacuuagaaggcugu

SEQ ID NO: 1988708 - RNA, 19 nt, Artificial Sequence
  Description of Artificial Sequence: Synthetic oligonucleotide
uuacugauuuucacagugu

SEQ ID NO: 1988709 - RNA, 19 nt, Artificial Sequence
  Description of Artificial Sequence: Synthetic oligonucleotide
ucacaguguauccugucgu

SEQ ID NO: 1988710 - RNA, 19 nt, Artificial Sequence
  Description of Artificial Sequence: Synthetic oligonucleotide
acacuuugaccucuucuag

SEQ ID NO: 1988711 - RNA, 19 nt, Artificial Sequence
  Description of Artificial Sequence: Synthetic oligonucleotide
aaagaucaaaugaccucuc

SEQ ID NO: 1988712 - RNA, 19 nt, Artificial Sequence
  Description of Artificial Sequence: Synthetic oligonucleotide
uuccuaguggacuuuucca

SEQ ID NO: 1988713 - RNA, 19 nt, Artificial Sequence
  Description of Artificial Sequence: Synthetic oligonucleotide
gauaacuguaucagucuug

SEQ ID NO: 1988714 - RNA, 19 nt, Artificial Sequence
  Description of Artificial Sequence: Synthetic oligonucleotide
gaucaaaugaccucucagu

SEQ ID NO: 1988715 - RNA, 19 nt, Artificial Sequence
  Description of Artificial Sequence: Synthetic oligonucleotide
ugcuaaugaaggagaaagu

SEQ ID NO: 1988716 - RNA, 19 nt, Artificial Sequence
  Description of Artificial Sequence: Synthetic oligonucleotide
gugcaguucaacaacauuc

SEQ ID NO: 1988717 - RNA, 19 nt, Artificial Sequence
  Description of Artificial Sequence: Synthetic oligonucleotide
uucgccugucuuuacuuag

SEQ ID NO: 1988718 - RNA, 19 nt, Artificial Sequence
  Description of Artificial Sequence: Synthetic oligonucleotide
ugauaacuguaucagucuu

SEQ ID NO: 1988719 - RNA, 19 nt, Artificial Sequence
  Description of Artificial Sequence: Synthetic oligonucleotide
aaauuccgugucuucucug

SEQ ID NO: 1988720 - RNA, 19 nt, Artificial Sequence
  Description of Artificial Sequence: Synthetic oligonucleotide
caaagcggaagccauggug

SEQ ID NO: 1988721 - RNA, 19 nt, Artificial Sequence
  Description of Artificial Sequence: Synthetic oligonucleotide
ugcaucgugguuauaguuu

SEQ ID NO: 1988722 - RNA, 19 nt, Artificial Sequence
  Description of Artificial Sequence: Synthetic oligonucleotide
uuaaucccucacuaggauc

SEQ ID NO: 1988723 - RNA, 19 nt, Artificial Sequence
  Description of Artificial Sequence: Synthetic oligonucleotide
aauucuugccauugagauu

SEQ ID NO: 1988724 - RNA, 19 nt, Artificial Sequence
  Description of Artificial Sequence: Synthetic oligonucleotide
cugcaacuccuccaaagcg

SEQ ID NO: 1988725 - RNA, 19 nt, Artificial Sequence
  Description of Artificial Sequence: Synthetic oligonucleotide
accugcacauuuucagugg

SEQ ID NO: 1988726 - RNA, 19 nt, Artificial Sequence
  Description of Artificial Sequence: Synthetic oligonucleotide
aguuaaguagucccaucgu

SEQ ID NO: 1988727 - RNA, 19 nt, Artificial Sequence
  Description of Artificial Sequence: Synthetic oligonucleotide
ucuuucuacauaagaugau

SEQ ID NO: 1988728 - RNA, 19 nt, Artificial Sequence
  Description of Artificial Sequence: Synthetic oligonucleotide
uuugcaucgugguuauagu

SEQ ID NO: 1988729 - RNA, 19 nt, Artificial Sequence
  Description of Artificial Sequence: Synthetic oligonucleotide
agaugauaacuguaucagu

SEQ ID NO: 1988730 - RNA, 19 nt, Artificial Sequence
  Description of Artificial Sequence: Synthetic oligonucleotide
aacgcggaacacgccaccc

SEQ ID NO: 1988731 - RNA, 19 nt, Artificial Sequence
  Description of Artificial Sequence: Synthetic oligonucleotide
auuaaucccucacuaggau

SEQ ID NO: 1988732 - RNA, 19 nt, Artificial Sequence
  Description of Artificial Sequence: Synthetic oligonucleotide
agucccaucguguguuuuc

SEQ ID NO: 1988733 - RNA, 19 nt, Artificial Sequence
  Description of Artificial Sequence: Synthetic oligonucleotide
ugucuuuacuuagaaggcu

SEQ ID NO: 1988734 - RNA, 19 nt, Artificial Sequence
  Description of Artificial Sequence: Synthetic oligonucleotide
aucugauugaucccaucca

SEQ ID NO: 1988735 - RNA, 19 nt, Artificial Sequence
  Description of Artificial Sequence: Synthetic oligonucleotide
aguguauccugucguaaga

SEQ ID NO: 1988736 - RNA, 19 nt, Artificial Sequence
  Description of Artificial Sequence: Synthetic oligonucleotide
uuucacuuguaagaguauc

SEQ ID NO: 1988737 - RNA, 19 nt, Artificial Sequence
  Description of Artificial Sequence: Synthetic oligonucleotide
uuuucagugggaaccugau

SEQ ID NO: 1988738 - RNA, 19 nt, Artificial Sequence
  Description of Artificial Sequence: Synthetic oligonucleotide
caaaauuccgugucuucuc

SEQ ID NO: 1988739 - RNA, 19 nt, Artificial Sequence
  Description of Artificial Sequence: Synthetic oligonucleotide
uucccuuacuggaaacaug

SEQ ID NO: 1988740 - RNA, 19 nt, Artificial Sequence
  Description of Artificial Sequence: Synthetic oligonucleotide
ugaccucucagugaagugu

SEQ ID NO: 1988741 - RNA, 19 nt, Artificial Sequence
  Description of Artificial Sequence: Synthetic oligonucleotide
uaucacgaacucuuuuccu

SEQ ID NO: 1988742 - RNA, 19 nt, Artificial Sequence
  Description of Artificial Sequence: Synthetic oligonucleotide
cuucucucuggauuccacc

SEQ ID NO: 1988743 - RNA, 19 nt, Artificial Sequence
  Description of Artificial Sequence: Synthetic oligonucleotide
gauccauggcaguacuuac

SEQ ID NO: 1988744 - RNA, 19 nt, Artificial Sequence
  Description of Artificial Sequence: Synthetic oligonucleotide
uugaucccauccauaauua

SEQ ID NO: 1988745 - RNA, 19 nt, Artificial Sequence
  Description of Artificial Sequence: Synthetic oligonucleotide
cauuaaucccucacuagga

SEQ ID NO: 1988746 - RNA, 19 nt, Artificial Sequence
  Description of Artificial Sequence: Synthetic oligonucleotide
aaguagucccaucgugugu

SEQ ID NO: 1988747 - RNA, 19 nt, Artificial Sequence
  Description of Artificial Sequence: Synthetic oligonucleotide
acuccaguuaagguaaugu

SEQ ID NO: 1988748 - RNA, 19 nt, Artificial Sequence
  Description of Artificial Sequence: Synthetic oligonucleotide
gucuuuacuuagaaggcug

SEQ ID NO: 1988749 - RNA, 19 nt, Artificial Sequence
  Description of Artificial Sequence: Synthetic oligonucleotide
acaaacuuaucugauugau

SEQ ID NO: 1988750 - RNA, 19 nt, Artificial Sequence
  Description of Artificial Sequence: Synthetic oligonucleotide
ucguaagaggagcaaccac

SEQ ID NO: 1988751 - RNA, 19 nt, Artificial Sequence
  Description of Artificial Sequence: Synthetic oligonucleotide
acuuagaaggcuguguaaa

SEQ ID NO: 1988752 - RNA, 19 nt, Artificial Sequence
  Description of Artificial Sequence: Synthetic oligonucleotide
guucauuaaucccucacua

SEQ ID NO: 1988753 - RNA, 19 nt, Artificial Sequence
  Description of Artificial Sequence: Synthetic oligonucleotide
caguguauccugucguaag

SEQ ID NO: 1988754 - RNA, 19 nt, Artificial Sequence
  Description of Artificial Sequence: Synthetic oligonucleotide
ugugcaguucaacaacauu

SEQ ID NO: 1988755 - RNA, 19 nt, Artificial Sequence
  Description of Artificial Sequence: Synthetic oligonucleotide
ccuccaguaagaaauggag

SEQ ID NO: 1988756 - RNA, 19 nt, Artificial Sequence
  Description of Artificial Sequence: Synthetic oligonucleotide
acgaacucuuuuccuagug

SEQ ID NO: 1988757 - RNA, 19 nt, Artificial Sequence
  Description of Artificial Sequence: Synthetic oligonucleotide
agugggaaccugaugaacu

SEQ ID NO: 1988758 - RNA, 19 nt, Artificial Sequence
  Description of Artificial Sequence: Synthetic oligonucleotide
uuucaacuuuauugaacaa

SEQ ID NO: 1988759 - RNA, 19 nt, Artificial Sequence
  Description of Artificial Sequence: Synthetic oligonucleotide
acucuuuuccuaguggacu

SEQ ID NO: 1988760 - RNA, 19 nt, Artificial Sequence
  Description of Artificial Sequence: Synthetic oligonucleotide
uuucuaucucaaucuugga

SEQ ID NO: 1988761 - RNA, 19 nt, Artificial Sequence
  Description of Artificial Sequence: Synthetic oligonucleotide
ugauccauggcaguacuua

SEQ ID NO: 1988762 - RNA, 19 nt, Artificial Sequence
  Description of Artificial Sequence: Synthetic oligonucleotide
aggaauagaugaauuuuca

SEQ ID NO: 1988763 - RNA, 19 nt, Artificial Sequence
  Description of Artificial Sequence: Synthetic oligonucleotide
uguucacaaucauggagua

SEQ ID NO: 1988764 - RNA, 19 nt, Artificial Sequence
  Description of Artificial Sequence: Synthetic oligonucleotide
ugaguuaaguagucccauc

SEQ ID NO: 1988765 - RNA, 19 nt, Artificial Sequence
  Description of Artificial Sequence: Synthetic oligonucleotide
cacccaugccuuauuaaug

SEQ ID NO: 1988766 - RNA, 19 nt, Artificial Sequence
  Description of Artificial Sequence: Synthetic oligonucleotide
ccuuacuggaaacaugagc

SEQ ID NO: 1988767 - RNA, 19 nt, Artificial Sequence
  Description of Artificial Sequence: Synthetic oligonucleotide
aaaggacuuaaaagucuca

SEQ ID NO: 1988768 - RNA, 19 nt, Artificial Sequence
  Description of Artificial Sequence: Synthetic oligonucleotide
ucauaggaaggcuuuucuu

SEQ ID NO: 1988769 - RNA, 19 nt, Artificial Sequence
  Description of Artificial Sequence: Synthetic oligonucleotide
aagcggaagccauggugug

SEQ ID NO: 1988770 - RNA, 19 nt, Artificial Sequence
  Description of Artificial Sequence: Synthetic oligonucleotide
ucaaauccuccaguaagaa

SEQ ID NO: 1988771 - RNA, 19 nt, Artificial Sequence
  Description of Artificial Sequence: Synthetic oligonucleotide
uuacuggaaacaugagcau

SEQ ID NO: 1988772 - RNA, 19 nt, Artificial Sequence
  Description of Artificial Sequence: Synthetic oligonucleotide
uacuuagaaggcuguguaa

SEQ ID NO: 1988773 - RNA, 19 nt, Artificial Sequence
  Description of Artificial Sequence: Synthetic oligonucleotide
uuaagguaauguagauuuu

SEQ ID NO: 1988774 - RNA, 19 nt, Artificial Sequence
  Description of Artificial Sequence: Synthetic oligonucleotide
ugaucccauccauaauuac

SEQ ID NO: 1988775 - RNA, 19 nt, Artificial Sequence
  Description of Artificial Sequence: Synthetic oligonucleotide
aacguucauuaaucccuca

SEQ ID NO: 1988776 - RNA, 19 nt, Artificial Sequence
  Description of Artificial Sequence: Synthetic oligonucleotide
agcauuccacaucacaguu

SEQ ID NO: 1988777 - RNA, 19 nt, Artificial Sequence
  Description of Artificial Sequence: Synthetic oligonucleotide
aaaugacugggaugcuaau

SEQ ID NO: 1988778 - RNA, 19 nt, Artificial Sequence
  Description of Artificial Sequence: Synthetic oligonucleotide
augguguggcggucgggcc

SEQ ID NO: 1988779 - RNA, 19 nt, Artificial Sequence
  Description of Artificial Sequence: Synthetic oligonucleotide
guauccugucguaagagga

SEQ ID NO: 1988780 - RNA, 19 nt, Artificial Sequence
  Description of Artificial Sequence: Synthetic oligonucleotide
aaugaaggagaaaguuuaa

SEQ ID NO: 1988781 - RNA, 19 nt, Artificial Sequence
  Description of Artificial Sequence: Synthetic oligonucleotide
cuaguggacuuuuccagca

SEQ ID NO: 1988782 - RNA, 19 nt, Artificial Sequence
  Description of Artificial Sequence: Synthetic oligonucleotide
uccugucguaagaggagca

SEQ ID NO: 1988783 - RNA, 19 nt, Artificial Sequence
  Description of Artificial Sequence: Synthetic oligonucleotide
accggugcggacaggaaac

SEQ ID NO: 1988784 - RNA, 19 nt, Artificial Sequence
  Description of Artificial Sequence: Synthetic oligonucleotide
caaacuuuugcaucguggu

SEQ ID NO: 1988785 - RNA, 19 nt, Artificial Sequence
  Description of Artificial Sequence: Synthetic oligonucleotide
uuaucugauugaucccauc

SEQ ID NO: 1988786 - RNA, 19 nt, Artificial Sequence
  Description of Artificial Sequence: Synthetic oligonucleotide
acaaaggaauagaugaauu

SEQ ID NO: 1988787 - RNA, 19 nt, Artificial Sequence
  Description of Artificial Sequence: Synthetic oligonucleotide
ucacuaggaucuguuucag

SEQ ID NO: 1988788 - RNA, 19 nt, Artificial Sequence
  Description of Artificial Sequence: Synthetic oligonucleotide
caugguguggcggucgggc

SEQ ID NO: 1988789 - RNA, 19 nt, Artificial Sequence
  Description of Artificial Sequence: Synthetic oligonucleotide
acuuuugcaucgugguuau

SEQ ID NO: 1988790 - RNA, 19 nt, Artificial Sequence
  Description of Artificial Sequence: Synthetic oligonucleotide
aguuaagguaauguagauu

SEQ ID NO: 1988791 - RNA, 19 nt, Artificial Sequence
  Description of Artificial Sequence: Synthetic oligonucleotide
gaguaauucuugccauuga

SEQ ID NO: 1988792 - RNA, 19 nt, Artificial Sequence
  Description of Artificial Sequence: Synthetic oligonucleotide
auuuucagugggaaccuga

SEQ ID NO: 1988793 - RNA, 19 nt, Artificial Sequence
  Description of Artificial Sequence: Synthetic oligonucleotide
ucagugucauaggaaggcu

SEQ ID NO: 1988794 - RNA, 19 nt, Artificial Sequence
  Description of Artificial Sequence: Synthetic oligonucleotide
uugcaucgugguuauaguu

SEQ ID NO: 1988795 - RNA, 19 nt, Artificial Sequence
  Description of Artificial Sequence: Synthetic oligonucleotide
augaccucucagugaagug

SEQ ID NO: 1988796 - RNA, 19 nt, Artificial Sequence
  Description of Artificial Sequence: Synthetic oligonucleotide
ucucaaaauuccgugucuu

SEQ ID NO: 1988797 - RNA, 19 nt, Artificial Sequence
  Description of Artificial Sequence: Synthetic oligonucleotide
cuuguaagaguaucacgaa

SEQ ID NO: 1988798 - RNA, 19 nt, Artificial Sequence
  Description of Artificial Sequence: Synthetic oligonucleotide
ggcuguguaaauaugugca

SEQ ID NO: 1988799 - RNA, 19 nt, Artificial Sequence
  Description of Artificial Sequence: Synthetic oligonucleotide
cuuuagaacguucauuaau

SEQ ID NO: 1988800 - RNA, 19 nt, Artificial Sequence
  Description of Artificial Sequence: Synthetic oligonucleotide
ugccuuauuaaugguucgu

SEQ ID NO: 1988801 - RNA, 19 nt, Artificial Sequence
  Description of Artificial Sequence: Synthetic oligonucleotide
uuucaaacuuuugcaucgu

SEQ ID NO: 1988802 - RNA, 19 nt, Artificial Sequence
  Description of Artificial Sequence: Synthetic oligonucleotide
ggugcggacaggaaacgcg

SEQ ID NO: 1988803 - RNA, 19 nt, Artificial Sequence
  Description of Artificial Sequence: Synthetic oligonucleotide
ugguguggcggucgggccc

SEQ ID NO: 1988804 - RNA, 19 nt, Artificial Sequence
  Description of Artificial Sequence: Synthetic oligonucleotide
gaucccauccauaauuacu

SEQ ID NO: 1988805 - RNA, 19 nt, Artificial Sequence
  Description of Artificial Sequence: Synthetic oligonucleotide
ccaguuaagguaauguaga

SEQ ID NO: 1988806 - RNA, 19 nt, Artificial Sequence
  Description of Artificial Sequence: Synthetic oligonucleotide
ugggaaccugaugaacucc

SEQ ID NO: 1988807 - RNA, 19 nt, Artificial Sequence
  Description of Artificial Sequence: Synthetic oligonucleotide
uggcuugcuucucucugga

SEQ ID NO: 1988808 - RNA, 19 nt, Artificial Sequence
  Description of Artificial Sequence: Synthetic oligonucleotide
gugcggacaggaaacgcgg

SEQ ID NO: 1988809 - RNA, 19 nt, Artificial Sequence
  Description of Artificial Sequence: Synthetic oligonucleotide
cccaaaggacuuaaaaguc

SEQ ID NO: 1988810 - RNA, 19 nt, Artificial Sequence
  Description of Artificial Sequence: Synthetic oligonucleotide
ggaaacgcggaacacgcca

SEQ ID NO: 1988811 - RNA, 19 nt, Artificial Sequence
  Description of Artificial Sequence: Synthetic oligonucleotide
uccacccaugccuuauuaa

SEQ ID NO: 1988812 - RNA, 19 nt, Artificial Sequence
  Description of Artificial Sequence: Synthetic oligonucleotide
gaacguucauuaaucccuc

SEQ ID NO: 1988813 - RNA, 19 nt, Artificial Sequence
  Description of Artificial Sequence: Synthetic oligonucleotide
gaaguguaccugcacauuu

SEQ ID NO: 1988814 - RNA, 19 nt, Artificial Sequence
  Description of Artificial Sequence: Synthetic oligonucleotide
ucacaaucauggaguaauu

SEQ ID NO: 1988815 - RNA, 19 nt, Artificial Sequence
  Description of Artificial Sequence: Synthetic oligonucleotide
accugaugaacuccaguua

SEQ ID NO: 1988816 - RNA, 19 nt, Artificial Sequence
  Description of Artificial Sequence: Synthetic oligonucleotide
gaugcuaaugaaggagaaa

SEQ ID NO: 1988817 - RNA, 19 nt, Artificial Sequence
  Description of Artificial Sequence: Synthetic oligonucleotide
agaaggcuguguaaauaug

SEQ ID NO: 1988818 - RNA, 19 nt, Artificial Sequence
  Description of Artificial Sequence: Synthetic oligonucleotide
guguaaauaugugcaguuc

SEQ ID NO: 1988819 - RNA, 19 nt, Artificial Sequence
  Description of Artificial Sequence: Synthetic oligonucleotide
gauuuucacaguguauccu

SEQ ID NO: 1988820 - RNA, 19 nt, Artificial Sequence
  Description of Artificial Sequence: Synthetic oligonucleotide
gaaacgcggaacacgccac

SEQ ID NO: 1988821 - RNA, 19 nt, Artificial Sequence
  Description of Artificial Sequence: Synthetic oligonucleotide
ccuaguggacuuuuccagc

SEQ ID NO: 1988822 - RNA, 19 nt, Artificial Sequence
  Description of Artificial Sequence: Synthetic oligonucleotide
uaauuucgccugucuuuac

SEQ ID NO: 1988823 - RNA, 19 nt, Artificial Sequence
  Description of Artificial Sequence: Synthetic oligonucleotide
cauaggaaggcuuuucuuu

SEQ ID NO: 1988824 - RNA, 19 nt, Artificial Sequence
  Description of Artificial Sequence: Synthetic oligonucleotide
acgcggaacacgccacccg

SEQ ID NO: 1988825 - RNA, 19 nt, Artificial Sequence
  Description of Artificial Sequence: Synthetic oligonucleotide
guaauuucgccugucuuua

SEQ ID NO: 1988826 - RNA, 19 nt, Artificial Sequence
  Description of Artificial Sequence: Synthetic oligonucleotide
aucgugguuauaguuuuau

SEQ ID NO: 1988827 - RNA, 19 nt, Artificial Sequence
  Description of Artificial Sequence: Synthetic oligonucleotide
ggaacacgccacccgagag

SEQ ID NO: 1988828 - RNA, 19 nt, Artificial Sequence
  Description of Artificial Sequence: Synthetic oligonucleotide
gagcauuccacaucacagu

SEQ ID NO: 1988829 - RNA, 19 nt, Artificial Sequence
  Description of Artificial Sequence: Synthetic oligonucleotide
gaagccaugguguggcggu

SEQ ID NO: 1988830 - RNA, 19 nt, Artificial Sequence
  Description of Artificial Sequence: Synthetic oligonucleotide
ugcaccggugcggacagga

SEQ ID NO: 1988831 - RNA, 19 nt, Artificial Sequence
  Description of Artificial Sequence: Synthetic oligonucleotide
cugucguaagaggagcaac

SEQ ID NO: 1988832 - RNA, 19 nt, Artificial Sequence
  Description of Artificial Sequence: Synthetic oligonucleotide
acugauuuucacaguguau

SEQ ID NO: 1988833 - RNA, 19 nt, Artificial Sequence
  Description of Artificial Sequence: Synthetic oligonucleotide
uuccacccaugccuuauua

SEQ ID NO: 1988834 - RNA, 19 nt, Artificial Sequence
  Description of Artificial Sequence: Synthetic oligonucleotide
uaguggacuuuuccagcaa

SEQ ID NO: 1988835 - RNA, 19 nt, Artificial Sequence
  Description of Artificial Sequence: Synthetic oligonucleotide
gguucguuucaugucauca

SEQ ID NO: 1988836 - RNA, 19 nt, Artificial Sequence
  Description of Artificial Sequence: Synthetic oligonucleotide
cgugguuauaguuuuauaa

SEQ ID NO: 1988837 - RNA, 19 nt, Artificial Sequence
  Description of Artificial Sequence: Synthetic oligonucleotide
ucgugguuauaguuuuaua

SEQ ID NO: 1988838 - RNA, 19 nt, Artificial Sequence
  Description of Artificial Sequence: Synthetic oligonucleotide
cuccaguuaagguaaugua

SEQ ID NO: 1988839 - RNA, 19 nt, Artificial Sequence
  Description of Artificial Sequence: Synthetic oligonucleotide
ugcggacaggaaacgcgga

SEQ ID NO: 1988840 - RNA, 19 nt, Artificial Sequence
  Description of Artificial Sequence: Synthetic oligonucleotide
aggaaacgcggaacacgcc

SEQ ID NO: 1988841 - RNA, 19 nt, Artificial Sequence
  Description of Artificial Sequence: Synthetic oligonucleotide
cauccauaauuacugauuu

SEQ ID NO: 1988842 - RNA, 19 nt, Artificial Sequence
  Description of Artificial Sequence: Synthetic oligonucleotide
cccaucguguguuuucugc

SEQ ID NO: 1988843 - RNA, 19 nt, Artificial Sequence
  Description of Artificial Sequence: Synthetic oligonucleotide
ucguguguuuucugcuuuc

SEQ ID NO: 1988844 - RNA, 19 nt, Artificial Sequence
  Description of Artificial Sequence: Synthetic oligonucleotide
aaguguaccugcacauuuu

SEQ ID NO: 1988845 - RNA, 19 nt, Artificial Sequence
  Description of Artificial Sequence: Synthetic oligonucleotide
agcggaagccauggugugg

SEQ ID NO: 1988846 - RNA, 19 nt, Artificial Sequence
  Description of Artificial Sequence: Synthetic oligonucleotide
ccugcacauuuucaguggg

SEQ ID NO: 1988847 - RNA, 19 nt, Artificial Sequence
  Description of Artificial Sequence: Synthetic oligonucleotide
ugaaguguaccugcacauu

SEQ ID NO: 1988848 - RNA, 19 nt, Artificial Sequence
  Description of Artificial Sequence: Synthetic oligonucleotide
gaaccugaugaacuccagu

SEQ ID NO: 1988849 - RNA, 19 nt, Artificial Sequence
  Description of Artificial Sequence: Synthetic oligonucleotide
ucccucacuaggaucuguu

SEQ ID NO: 1988850 - RNA, 19 nt, Artificial Sequence
  Description of Artificial Sequence: Synthetic oligonucleotide
gccaacugauccauggcag

SEQ ID NO: 1988851 - RNA, 19 nt, Artificial Sequence
  Description of Artificial Sequence: Synthetic oligonucleotide
caacauucccuuacuggaa

SEQ ID NO: 1988852 - RNA, 19 nt, Artificial Sequence
  Description of Artificial Sequence: Synthetic oligonucleotide
cguaagaggagcaaccaca

SEQ ID NO: 1988853 - RNA, 19 nt, Artificial Sequence
  Description of Artificial Sequence: Synthetic oligonucleotide
acaguguauccugucguaa

SEQ ID NO: 1988854 - RNA, 19 nt, Artificial Sequence
  Description of Artificial Sequence: Synthetic oligonucleotide
gucguaagaggagcaacca

SEQ ID NO: 1988855 - RNA, 19 nt, Artificial Sequence
  Description of Artificial Sequence: Synthetic oligonucleotide
ccucacuaggaucuguuuc

SEQ ID NO: 1988856 - RNA, 19 nt, Artificial Sequence
  Description of Artificial Sequence: Synthetic oligonucleotide
cugggaugcuaaugaagga

SEQ ID NO: 1988857 - RNA, 19 nt, Artificial Sequence
  Description of Artificial Sequence: Synthetic oligonucleotide
gaguaauuucgccugucuu

SEQ ID NO: 1988858 - RNA, 19 nt, Artificial Sequence
  Description of Artificial Sequence: Synthetic oligonucleotide
uggaguaauuucgccuguc

SEQ ID NO: 1988859 - RNA, 19 nt, Artificial Sequence
  Description of Artificial Sequence: Synthetic oligonucleotide
ucccaucguguguuuucug

SEQ ID NO: 1988860 - RNA, 19 nt, Artificial Sequence
  Description of Artificial Sequence: Synthetic oligonucleotide
ccaaaagaucaaaugaccu

SEQ ID NO: 1988861 - RNA, 19 nt, Artificial Sequence
  Description of Artificial Sequence: Synthetic oligonucleotide
cauucccuuacuggaaaca

SEQ ID NO: 1988862 - RNA, 19 nt, Artificial Sequence
  Description of Artificial Sequence: Synthetic oligonucleotide
cagugggaaccugaugaac

SEQ ID NO: 1988863 - RNA, 19 nt, Artificial Sequence
  Description of Artificial Sequence: Synthetic oligonucleotide
gucucaaaauuccgugucu

SEQ ID NO: 1988864 - RNA, 19 nt, Artificial Sequence
  Description of Artificial Sequence: Synthetic oligonucleotide
ugguucguuucaugucauc

SEQ ID NO: 1988865 - RNA, 19 nt, Artificial Sequence
  Description of Artificial Sequence: Synthetic oligonucleotide
cuaucucaaucuuggauuu

SEQ ID NO: 1988866 - RNA, 19 nt, Artificial Sequence
  Description of Artificial Sequence: Synthetic oligonucleotide
guggcggucgggcccgagg

SEQ ID NO: 1988867 - RNA, 19 nt, Artificial Sequence
  Description of Artificial Sequence: Synthetic oligonucleotide
ggugcaccggugcggacag

SEQ ID NO: 1988868 - RNA, 19 nt, Artificial Sequence
  Description of Artificial Sequence: Synthetic oligonucleotide
cuuagaaggcuguguaaau

SEQ ID NO: 1988869 - RNA, 19 nt, Artificial Sequence
  Description of Artificial Sequence: Synthetic oligonucleotide
auaagccaacugauccaug

SEQ ID NO: 1988870 - RNA, 19 nt, Artificial Sequence
  Description of Artificial Sequence: Synthetic oligonucleotide
accucucagugaaguguac

SEQ ID NO: 1988871 - RNA, 19 nt, Artificial Sequence
  Description of Artificial Sequence: Synthetic oligonucleotide
cugcacauuuucaguggga

SEQ ID NO: 1988872 - RNA, 19 nt, Artificial Sequence
  Description of Artificial Sequence: Synthetic oligonucleotide
ucuuuuccuaguggacuuu

SEQ ID NO: 1988873 - RNA, 19 nt, Artificial Sequence
  Description of Artificial Sequence: Synthetic oligonucleotide
gaggccggagcugcaccgg

SEQ ID NO: 1988874 - RNA, 19 nt, Artificial Sequence
  Description of Artificial Sequence: Synthetic oligonucleotide
gaccucucagugaagugua

SEQ ID NO: 1988875 - RNA, 19 nt, Artificial Sequence
  Description of Artificial Sequence: Synthetic oligonucleotide
cacagagauggguuucaaa

SEQ ID NO: 1988876 - RNA, 19 nt, Artificial Sequence
  Description of Artificial Sequence: Synthetic oligonucleotide
gaguaucacgaacucuuuu

SEQ ID NO: 1988877 - RNA, 19 nt, Artificial Sequence
  Description of Artificial Sequence: Synthetic oligonucleotide
ucgggcccgaggccggagc

SEQ ID NO: 1988878 - RNA, 19 nt, Artificial Sequence
  Description of Artificial Sequence: Synthetic oligonucleotide
gcuaaugaaggagaaaguu

SEQ ID NO: 1988879 - RNA, 19 nt, Artificial Sequence
  Description of Artificial Sequence: Synthetic oligonucleotide
cacaguguauccugucgua

SEQ ID NO: 1988880 - RNA, 19 nt, Artificial Sequence
  Description of Artificial Sequence: Synthetic oligonucleotide
auuccacccaugccuuauu

SEQ ID NO: 1988881 - RNA, 19 nt, Artificial Sequence
  Description of Artificial Sequence: Synthetic oligonucleotide
agaguaucacgaacucuuu

SEQ ID NO: 1988882 - RNA, 19 nt, Artificial Sequence
  Description of Artificial Sequence: Synthetic oligonucleotide
ccucucagugaaguguacc

SEQ ID NO: 1988883 - RNA, 19 nt, Artificial Sequence
  Description of Artificial Sequence: Synthetic oligonucleotide
ggaaccugaugaacuccag

SEQ ID NO: 1988884 - RNA, 19 nt, Artificial Sequence
  Description of Artificial Sequence: Synthetic oligonucleotide
cuuaucugauugaucccau

SEQ ID NO: 1988885 - RNA, 19 nt, Artificial Sequence
  Description of Artificial Sequence: Synthetic oligonucleotide
ggaguaauuucgccugucu

SEQ ID NO: 1988886 - RNA, 19 nt, Artificial Sequence
  Description of Artificial Sequence: Synthetic oligonucleotide
augugcaguucaacaacau

SEQ ID NO: 1988887 - RNA, 19 nt, Artificial Sequence
  Description of Artificial Sequence: Synthetic oligonucleotide
caguuaagguaauguagau

SEQ ID NO: 1988888 - RNA, 19 nt, Artificial Sequence
  Description of Artificial Sequence: Synthetic oligonucleotide
caguaagaaauggaguaau

SEQ ID NO: 1988889 - RNA, 19 nt, Artificial Sequence
  Description of Artificial Sequence: Synthetic oligonucleotide
cacaguucccaaaggacuu

SEQ ID NO: 1988890 - RNA, 19 nt, Artificial Sequence
  Description of Artificial Sequence: Synthetic oligonucleotide
gcaccggugcaccggugcg

SEQ ID NO: 1988891 - RNA, 19 nt, Artificial Sequence
  Description of Artificial Sequence: Synthetic oligonucleotide
gguguggcggucgggcccg

SEQ ID NO: 1988892 - RNA, 19 nt, Artificial Sequence
  Description of Artificial Sequence: Synthetic oligonucleotide
ggaugcuaaugaaggagaa

SEQ ID NO: 1988893 - RNA, 19 nt, Artificial Sequence
  Description of Artificial Sequence: Synthetic oligonucleotide
gauuccacccaugccuuau

SEQ ID NO: 1988894 - RNA, 19 nt, Artificial Sequence
  Description of Artificial Sequence: Synthetic oligonucleotide
caccggugcaccggugcgg

SEQ ID NO: 1988895 - RNA, 19 nt, Artificial Sequence
  Description of Artificial Sequence: Synthetic oligonucleotide
aucccucacuaggaucugu

SEQ ID NO: 1988896 - RNA, 19 nt, Artificial Sequence
  Description of Artificial Sequence: Synthetic oligonucleotide
augguucguuucaugucau

SEQ ID NO: 1988897 - RNA, 19 nt, Artificial Sequence
  Description of Artificial Sequence: Synthetic oligonucleotide
caccggugcggacaggaaa

SEQ ID NO: 1988898 - RNA, 19 nt, Artificial Sequence
  Description of Artificial Sequence: Synthetic oligonucleotide
aguucccaaaggacuuaaa

SEQ ID NO: 1988899 - RNA, 19 nt, Artificial Sequence
  Description of Artificial Sequence: Synthetic oligonucleotide
uagucccaucguguguuuu

SEQ ID NO: 1988900 - RNA, 19 nt, Artificial Sequence
  Description of Artificial Sequence: Synthetic oligonucleotide
gcaucgugguuauaguuuu

SEQ ID NO: 1988901 - RNA, 19 nt, Artificial Sequence
  Description of Artificial Sequence: Synthetic oligonucleotide
ccauccauaauuacugauu

SEQ ID NO: 1988902 - RNA, 19 nt, Artificial Sequence
  Description of Artificial Sequence: Synthetic oligonucleotide
caucgugguuauaguuuua

SEQ ID NO: 1988903 - RNA, 19 nt, Artificial Sequence
  Description of Artificial Sequence: Synthetic oligonucleotide
caucguguguuuucugcuu

SEQ ID NO: 1988904 - RNA, 19 nt, Artificial Sequence
  Description of Artificial Sequence: Synthetic oligonucleotide
cacgaacucuuuuccuagu

SEQ ID NO: 1988905 - RNA, 19 nt, Artificial Sequence
  Description of Artificial Sequence: Synthetic oligonucleotide
cucucuggauuccacccau

SEQ ID NO: 1988906 - RNA, 19 nt, Artificial Sequence
  Description of Artificial Sequence: Synthetic oligonucleotide
agcaacacuuugaccucuu

SEQ ID NO: 1988907 - RNA, 19 nt, Artificial Sequence
  Description of Artificial Sequence: Synthetic oligonucleotide
cacuaggaucuguuucagu

SEQ ID NO: 1988908 - RNA, 19 nt, Artificial Sequence
  Description of Artificial Sequence: Synthetic oligonucleotide
ccuuauuaaugguucguuu

SEQ ID NO: 1988909 - RNA, 19 nt, Artificial Sequence
  Description of Artificial Sequence: Synthetic oligonucleotide
ggcuuuucauugucaaguu

SEQ ID NO: 1988910 - RNA, 19 nt, Artificial Sequence
  Description of Artificial Sequence: Synthetic oligonucleotide
uguggcggucgggcccgag

SEQ ID NO: 1988911 - RNA, 19 nt, Artificial Sequence
  Description of Artificial Sequence: Synthetic oligonucleotide
cguucauuaaucccucacu

SEQ ID NO: 1988912 - RNA, 19 nt, Artificial Sequence
  Description of Artificial Sequence: Synthetic oligonucleotide
cggacaggaaacgcggaac

SEQ ID NO: 1988913 - RNA, 19 nt, Artificial Sequence
  Description of Artificial Sequence: Synthetic oligonucleotide
ccacccaugccuuauuaau

SEQ ID NO: 1988914 - RNA, 19 nt, Artificial Sequence
  Description of Artificial Sequence: Synthetic oligonucleotide
cugcaccggugcaccggug

SEQ ID NO: 1988915 - RNA, 19 nt, Artificial Sequence
  Description of Artificial Sequence: Synthetic oligonucleotide
gcuuuccacagagaugggu

SEQ ID NO: 1988916 - RNA, 19 nt, Artificial Sequence
  Description of Artificial Sequence: Synthetic oligonucleotide
ccaucguguguuuucugcu

SEQ ID NO: 1988917 - RNA, 19 nt, Artificial Sequence
  Description of Artificial Sequence: Synthetic oligonucleotide
ccacaucacaguucccaaa

SEQ ID NO: 1988918 - RNA, 19 nt, Artificial Sequence
  Description of Artificial Sequence: Synthetic oligonucleotide
gcggaacacgccacccgag

SEQ ID NO: 1988919 - RNA, 19 nt, Artificial Sequence
  Description of Artificial Sequence: Synthetic oligonucleotide
ccgaggccggagcugcacc

SEQ ID NO: 1988920 - RNA, 19 nt, Artificial Sequence
  Description of Artificial Sequence: Synthetic oligonucleotide
ccggugcggacaggaaacg

SEQ ID NO: 1988921 - RNA, 19 nt, Artificial Sequence
  Description of Artificial Sequence: Synthetic oligonucleotide
ccaugccuuauuaaugguu

SEQ ID NO: 1988922 - RNA, 19 nt, Artificial Sequence
  Description of Artificial Sequence: Synthetic oligonucleotide
gccuuauuaaugguucguu

SEQ ID NO: 1988923 - RNA, 19 nt, Artificial Sequence
  Description of Artificial Sequence: Synthetic oligonucleotide
cugauccauggcaguacuu

SEQ ID NO: 1988924 - RNA, 19 nt, Artificial Sequence
  Description of Artificial Sequence: Synthetic oligonucleotide
gaacuccaguuaagguaau

SEQ ID NO: 1988925 - RNA, 19 nt, Artificial Sequence
  Description of Artificial Sequence: Synthetic oligonucleotide
guagucccaucguguguuu

SEQ ID NO: 1988926 - RNA, 19 nt, Artificial Sequence
  Description of Artificial Sequence: Synthetic oligonucleotide
gucgggcccgaggccggag

SEQ ID NO: 1988927 - RNA, 19 nt, Artificial Sequence
  Description of Artificial Sequence: Synthetic oligonucleotide
ccugucguaagaggagcaa

SEQ ID NO: 1988928 - RNA, 19 nt, Artificial Sequence
  Description of Artificial Sequence: Synthetic oligonucleotide
ccaugguguggcggucggg

SEQ ID NO: 1988929 - RNA, 19 nt, Artificial Sequence
  Description of Artificial Sequence: Synthetic oligonucleotide
ggccggagcugcaccggug

SEQ ID NO: 1988930 - RNA, 19 nt, Artificial Sequence
  Description of Artificial Sequence: Synthetic oligonucleotide
gugcaccggugcggacagg

SEQ ID NO: 1988931 - RNA, 19 nt, Artificial Sequence
  Description of Artificial Sequence: Synthetic oligonucleotide
cggugcggacaggaaacgc

SEQ ID NO: 1988932 - RNA, 19 nt, Artificial Sequence
  Description of Artificial Sequence: Synthetic oligonucleotide
cuuuugcaucgugguuaua

SEQ ID NO: 1988933 - RNA, 19 nt, Artificial Sequence
  Description of Artificial Sequence: Synthetic oligonucleotide
cgccugucuuuacuuagaa

SEQ ID NO: 1988934 - RNA, 19 nt, Artificial Sequence
  Description of Artificial Sequence: Synthetic oligonucleotide
cggucgggcccgaggccgg

SEQ ID NO: 1988935 - RNA, 19 nt, Artificial Sequence
  Description of Artificial Sequence: Synthetic oligonucleotide
cggugcaccggugcggaca

SEQ ID NO: 1988936 - RNA, 19 nt, Artificial Sequence
  Description of Artificial Sequence: Synthetic oligonucleotide
cccucacuaggaucuguuu

SEQ ID NO: 1988937 - RNA, 19 nt, Artificial Sequence
  Description of Artificial Sequence: Synthetic oligonucleotide
gcaccggugcggacaggaa

SEQ ID NO: 1988938 - RNA, 19 nt, Artificial Sequence
  Description of Artificial Sequence: Synthetic oligonucleotide
ccggugcaccggugcggac

SEQ ID NO: 1988939 - RNA, 19 nt, Artificial Sequence
  Description of Artificial Sequence: Synthetic oligonucleotide
guguggcggucgggcccga

SEQ ID NO: 1988940 - RNA, 19 nt, Artificial Sequence
  Description of Artificial Sequence: Synthetic oligonucleotide
cgggcccgaggccggagcu

SEQ ID NO: 1988941 - RNA, 19 nt, Artificial Sequence
  Description of Artificial Sequence: Synthetic oligonucleotide
ucuugaauaaacacuaugg

SEQ ID NO: 1988942 - RNA, 19 nt, Artificial Sequence
  Description of Artificial Sequence: Synthetic oligonucleotide
ugaauaaacacuaugggug

SEQ ID NO: 1988943 - RNA, 19 nt, Artificial Sequence
  Description of Artificial Sequence: Synthetic oligonucleotide
aaugagucaggucagggac

SEQ ID NO: 1988944 - RNA, 19 nt, Artificial Sequence
  Description of Artificial Sequence: Synthetic oligonucleotide
aaaaggaagcuucuugggg

SEQ ID NO: 1988945 - RNA, 19 nt, Artificial Sequence
  Description of Artificial Sequence: Synthetic oligonucleotide
uuuaagguacuuuucauga

SEQ ID NO: 1988946 - RNA, 19 nt, Artificial Sequence
  Description of Artificial Sequence: Synthetic oligonucleotide
uuugucuugaauaaacacu

SEQ ID NO: 1988947 - RNA, 19 nt, Artificial Sequence
  Description of Artificial Sequence: Synthetic oligonucleotide
uaagguacuuuucaugagg

SEQ ID NO: 1988948 - RNA, 19 nt, Artificial Sequence
  Description of Artificial Sequence: Synthetic oligonucleotide
ugugagucaaaugagaccc

SEQ ID NO: 1988949 - RNA, 19 nt, Artificial Sequence
  Description of Artificial Sequence: Synthetic oligonucleotide
aaacaauccagugccaagc

SEQ ID NO: 1988950 - RNA, 19 nt, Artificial Sequence
  Description of Artificial Sequence: Synthetic oligonucleotide
agucugaagucacagagac

SEQ ID NO: 1988951 - RNA, 19 nt, Artificial Sequence
  Description of Artificial Sequence: Synthetic oligonucleotide
ugaguuaaguucuugcucc

SEQ ID NO: 1988952 - RNA, 19 nt, Artificial Sequence
  Description of Artificial Sequence: Synthetic oligonucleotide
cuugaauaaacacuauggg

SEQ ID NO: 1988953 - RNA, 19 nt, Artificial Sequence
  Description of Artificial Sequence: Synthetic oligonucleotide
uauuugcuuauucagggcc

SEQ ID NO: 1988954 - RNA, 19 nt, Artificial Sequence
  Description of Artificial Sequence: Synthetic oligonucleotide
uuauacuccauuauuugcu

SEQ ID NO: 1988955 - RNA, 19 nt, Artificial Sequence
  Description of Artificial Sequence: Synthetic oligonucleotide
cauuauuugcuuauucagg

SEQ ID NO: 1988956 - RNA, 19 nt, Artificial Sequence
  Description of Artificial Sequence: Synthetic oligonucleotide
uugaauaaacacuaugggu

SEQ ID NO: 1988957 - RNA, 19 nt, Artificial Sequence
  Description of Artificial Sequence: Synthetic oligonucleotide
aaugcuuuguagagaaggc

SEQ ID NO: 1988958 - RNA, 19 nt, Artificial Sequence
  Description of Artificial Sequence: Synthetic oligonucleotide
ucucuuuugccacagggcc

SEQ ID NO: 1988959 - RNA, 19 nt, Artificial Sequence
  Description of Artificial Sequence: Synthetic oligonucleotide
uggcuugugagucaaauga

SEQ ID NO: 1988960 - RNA, 19 nt, Artificial Sequence
  Description of Artificial Sequence: Synthetic oligonucleotide
cuuauucagggccucaugg

SEQ ID NO: 1988961 - RNA, 19 nt, Artificial Sequence
  Description of Artificial Sequence: Synthetic oligonucleotide
cuaucuuccaguacacucg

SEQ ID NO: 1988962 - RNA, 19 nt, Artificial Sequence
  Description of Artificial Sequence: Synthetic oligonucleotide
gagaaggugccuuauguag

SEQ ID NO: 1988963 - RNA, 19 nt, Artificial Sequence
  Description of Artificial Sequence: Synthetic oligonucleotide
agucaaaugagacccgagg

SEQ ID NO: 1988964 - RNA, 19 nt, Artificial Sequence
  Description of Artificial Sequence: Synthetic oligonucleotide
ggaacucaaacuuggaugg

SEQ ID NO: 1988965 - RNA, 19 nt, Artificial Sequence
  Description of Artificial Sequence: Synthetic oligonucleotide
ucuugaguuaaguucuugc

SEQ ID NO: 1988966 - RNA, 19 nt, Artificial Sequence
  Description of Artificial Sequence: Synthetic oligonucleotide
gucaaaugagacccgaggg

SEQ ID NO: 1988967 - RNA, 19 nt, Artificial Sequence
  Description of Artificial Sequence: Synthetic oligonucleotide
guuuauacuccauuauuug

SEQ ID NO: 1988968 - RNA, 19 nt, Artificial Sequence
  Description of Artificial Sequence: Synthetic oligonucleotide
ugcuuuguagagaaggcca

SEQ ID NO: 1988969 - RNA, 19 nt, Artificial Sequence
  Description of Artificial Sequence: Synthetic oligonucleotide
ucaaaugagacccgaggga

SEQ ID NO: 1988970 - RNA, 19 nt, Artificial Sequence
  Description of Artificial Sequence: Synthetic oligonucleotide
uggaacauuucucaggguc

SEQ ID NO: 1988971 - RNA, 19 nt, Artificial Sequence
  Description of Artificial Sequence: Synthetic oligonucleotide
caaugcuuuguagagaagg

SEQ ID NO: 1988972 - RNA, 19 nt, Artificial Sequence
  Description of Artificial Sequence: Synthetic oligonucleotide
aacuuggauggcuugugag

SEQ ID NO: 1988973 - RNA, 19 nt, Artificial Sequence
  Description of Artificial Sequence: Synthetic oligonucleotide
aauucugucaaugcuuugu

SEQ ID NO: 1988974 - RNA, 19 nt, Artificial Sequence
  Description of Artificial Sequence: Synthetic oligonucleotide
aggucauagaccuccuggc

SEQ ID NO: 1988975 - RNA, 19 nt, Artificial Sequence
  Description of Artificial Sequence: Synthetic oligonucleotide
aaaugagucaggucaggga

SEQ ID NO: 1988976 - RNA, 19 nt, Artificial Sequence
  Description of Artificial Sequence: Synthetic oligonucleotide
ucaugaggaacucaaacuu

SEQ ID NO: 1988977 - RNA, 19 nt, Artificial Sequence
  Description of Artificial Sequence: Synthetic oligonucleotide
aaugagacccgagggacgg

SEQ ID NO: 1988978 - RNA, 19 nt, Artificial Sequence
  Description of Artificial Sequence: Synthetic oligonucleotide
cuugugagucaaaugagac

SEQ ID NO: 1988979 - RNA, 19 nt, Artificial Sequence
  Description of Artificial Sequence: Synthetic oligonucleotide
gacucugaggcguacagug

SEQ ID NO: 1988980 - RNA, 19 nt, Artificial Sequence
  Description of Artificial Sequence: Synthetic oligonucleotide
ucuuucugguuuucgaggc

SEQ ID NO: 1988981 - RNA, 19 nt, Artificial Sequence
  Description of Artificial Sequence: Synthetic oligonucleotide
uaucuuccaguacacucgg

SEQ ID NO: 1988982 - RNA, 19 nt, Artificial Sequence
  Description of Artificial Sequence: Synthetic oligonucleotide
uuucgaggcaaauuucuug

SEQ ID NO: 1988983 - RNA, 19 nt, Artificial Sequence
  Description of Artificial Sequence: Synthetic oligonucleotide
uggucaaucccacacagau

SEQ ID NO: 1988984 - RNA, 19 nt, Artificial Sequence
  Description of Artificial Sequence: Synthetic oligonucleotide
acaccuaucuuccaguaca

SEQ ID NO: 1988985 - RNA, 19 nt, Artificial Sequence
  Description of Artificial Sequence: Synthetic oligonucleotide
aaguucuugcucccguggg

SEQ ID NO: 1988986 - RNA, 19 nt, Artificial Sequence
  Description of Artificial Sequence: Synthetic oligonucleotide
ugguucuugggcaucaugu

SEQ ID NO: 1988987 - RNA, 19 nt, Artificial Sequence
  Description of Artificial Sequence: Synthetic oligonucleotide
uaaccggucuaccucagcc

SEQ ID NO: 1988988 - RNA, 19 nt, Artificial Sequence
  Description of Artificial Sequence: Synthetic oligonucleotide
uucgaggcaaauuucuuga

SEQ ID NO: 1988989 - RNA, 19 nt, Artificial Sequence
  Description of Artificial Sequence: Synthetic oligonucleotide
aaagcggccccauggccgc

SEQ ID NO: 1988990 - RNA, 19 nt, Artificial Sequence
  Description of Artificial Sequence: Synthetic oligonucleotide
uugaguuaaguucuugcuc

SEQ ID NO: 1988991 - RNA, 19 nt, Artificial Sequence
  Description of Artificial Sequence: Synthetic oligonucleotide
aucaugugaugacagagcu

SEQ ID NO: 1988992 - RNA, 19 nt, Artificial Sequence
  Description of Artificial Sequence: Synthetic oligonucleotide
uuccaguacacucggcagg

SEQ ID NO: 1988993 - RNA, 19 nt, Artificial Sequence
  Description of Artificial Sequence: Synthetic oligonucleotide
uuaagguacuuuucaugag

SEQ ID NO: 1988994 - RNA, 19 nt, Artificial Sequence
  Description of Artificial Sequence: Synthetic oligonucleotide
uucucuuuugccacagggc

SEQ ID NO: 1988995 - RNA, 19 nt, Artificial Sequence
  Description of Artificial Sequence: Synthetic oligonucleotide
aaaagcggccccauggccg

SEQ ID NO: 1988996 - RNA, 19 nt, Artificial Sequence
  Description of Artificial Sequence: Synthetic oligonucleotide
ucacagagaccuuggagag

SEQ ID NO: 1988997 - RNA, 19 nt, Artificial Sequence
  Description of Artificial Sequence: Synthetic oligonucleotide
ugguuuucgaggcaaauuu

SEQ ID NO: 1988998 - RNA, 19 nt, Artificial Sequence
  Description of Artificial Sequence: Synthetic oligonucleotide
uugugagucaaaugagacc

SEQ ID NO: 1988999 - RNA, 19 nt, Artificial Sequence
  Description of Artificial Sequence: Synthetic oligonucleotide
uuauuugcuuauucagggc

SEQ ID NO: 1989000 - RNA, 19 nt, Artificial Sequence
  Description of Artificial Sequence: Synthetic oligonucleotide
agagacaccuaucuuccag

SEQ ID NO: 1989001 - RNA, 19 nt, Artificial Sequence
  Description of Artificial Sequence: Synthetic oligonucleotide
uggggaaguguccuggugc

SEQ ID NO: 1989002 - RNA, 19 nt, Artificial Sequence
  Description of Artificial Sequence: Synthetic oligonucleotide
uucaggguuccucaaacaa

SEQ ID NO: 1989003 - RNA, 19 nt, Artificial Sequence
  Description of Artificial Sequence: Synthetic oligonucleotide
uaccccaucaccucuggcc

SEQ ID NO: 1989004 - RNA, 19 nt, Artificial Sequence
  Description of Artificial Sequence: Synthetic oligonucleotide
gaaggugccuuauguaggc

SEQ ID NO: 1989005 - RNA, 19 nt, Artificial Sequence
  Description of Artificial Sequence: Synthetic oligonucleotide
caucaugugaugacagagc

SEQ ID NO: 1989006 - RNA, 19 nt, Artificial Sequence
  Description of Artificial Sequence: Synthetic oligonucleotide
aacacuauggguggaacau

SEQ ID NO: 1989007 - RNA, 19 nt, Artificial Sequence
  Description of Artificial Sequence: Synthetic oligonucleotide
cucauggucaaucccacac

SEQ ID NO: 1989008 - RNA, 19 nt, Artificial Sequence
  Description of Artificial Sequence: Synthetic oligonucleotide
ugggaagcaacagaggugu

SEQ ID NO: 1989009 - RNA, 19 nt, Artificial Sequence
  Description of Artificial Sequence: Synthetic oligonucleotide
aguacacagcaauucuguc

SEQ ID NO: 1989010 - RNA, 19 nt, Artificial Sequence
  Description of Artificial Sequence: Synthetic oligonucleotide
ccauucaggacucugaggc

SEQ ID NO: 1989011 - RNA, 19 nt, Artificial Sequence
  Description of Artificial Sequence: Synthetic oligonucleotide
ugcaggaguacacagcaau

SEQ ID NO: 1989012 - RNA, 19 nt, Artificial Sequence
  Description of Artificial Sequence: Synthetic oligonucleotide
ugugccagguucaugcacu

SEQ ID NO: 1989013 - RNA, 19 nt, Artificial Sequence
  Description of Artificial Sequence: Synthetic oligonucleotide
uccuucucagcaaaugagu

SEQ ID NO: 1989014 - RNA, 19 nt, Artificial Sequence
  Description of Artificial Sequence: Synthetic oligonucleotide
uccucacccaaaaggaagc

SEQ ID NO: 1989015 - RNA, 19 nt, Artificial Sequence
  Description of Artificial Sequence: Synthetic oligonucleotide
ucugaccacaggcagggac

SEQ ID NO: 1989016 - RNA, 19 nt, Artificial Sequence
  Description of Artificial Sequence: Synthetic oligonucleotide
ucuuuaagguacuuuucau

SEQ ID NO: 1989017 - RNA, 19 nt, Artificial Sequence
  Description of Artificial Sequence: Synthetic oligonucleotide
ccaaaaggaagcuucuugg

SEQ ID NO: 1989018 - RNA, 19 nt, Artificial Sequence
  Description of Artificial Sequence: Synthetic oligonucleotide
ugaagucacagagaccuug

SEQ ID NO: 1989019 - RNA, 19 nt, Artificial Sequence
  Description of Artificial Sequence: Synthetic oligonucleotide
ucuaccucagccagaagua

SEQ ID NO: 1989020 - RNA, 19 nt, Artificial Sequence
  Description of Artificial Sequence: Synthetic oligonucleotide
aaucccacacagauuuggg

SEQ ID NO: 1989021 - RNA, 19 nt, Artificial Sequence
  Description of Artificial Sequence: Synthetic oligonucleotide
uuaaguucuugcucccgug

SEQ ID NO: 1989022 - RNA, 19 nt, Artificial Sequence
  Description of Artificial Sequence: Synthetic oligonucleotide
gagggacggaccuucauac

SEQ ID NO: 1989023 - RNA, 19 nt, Artificial Sequence
  Description of Artificial Sequence: Synthetic oligonucleotide
ugugaugacagagcuucag

SEQ ID NO: 1989024 - RNA, 19 nt, Artificial Sequence
  Description of Artificial Sequence: Synthetic oligonucleotide
agucaggucagggaccagc

SEQ ID NO: 1989025 - RNA, 19 nt, Artificial Sequence
  Description of Artificial Sequence: Synthetic oligonucleotide
auacucugugguguugucc

SEQ ID NO: 1989026 - RNA, 19 nt, Artificial Sequence
  Description of Artificial Sequence: Synthetic oligonucleotide
cuuuucaugaggaacucaa

SEQ ID NO: 1989027 - RNA, 19 nt, Artificial Sequence
  Description of Artificial Sequence: Synthetic oligonucleotide
gagccuggcauccauacuc

SEQ ID NO: 1989028 - RNA, 19 nt, Artificial Sequence
  Description of Artificial Sequence: Synthetic oligonucleotide
aggcggagaagucugaagu

SEQ ID NO: 1989029 - RNA, 19 nt, Artificial Sequence
  Description of Artificial Sequence: Synthetic oligonucleotide
agagcuucaggguuccuca

SEQ ID NO: 1989030 - RNA, 19 nt, Artificial Sequence
  Description of Artificial Sequence: Synthetic oligonucleotide
uuauucagggccucauggu

SEQ ID NO: 1989031 - RNA, 19 nt, Artificial Sequence
  Description of Artificial Sequence: Synthetic oligonucleotide
cuaguaaccggucuaccuc

SEQ ID NO: 1989032 - RNA, 19 nt, Artificial Sequence
  Description of Artificial Sequence: Synthetic oligonucleotide
aaaugagacccgagggacg

SEQ ID NO: 1989033 - RNA, 19 nt, Artificial Sequence
  Description of Artificial Sequence: Synthetic oligonucleotide
agucugaccacaggcaggg

SEQ ID NO: 1989034 - RNA, 19 nt, Artificial Sequence
  Description of Artificial Sequence: Synthetic oligonucleotide
gucaaugcuuuguagagaa

SEQ ID NO: 1989035 - RNA, 19 nt, Artificial Sequence
  Description of Artificial Sequence: Synthetic oligonucleotide
cugagacaugagaaggugc

SEQ ID NO: 1989036 - RNA, 19 nt, Artificial Sequence
  Description of Artificial Sequence: Synthetic oligonucleotide
uuuguagagaaggccauuc

SEQ ID NO: 1989037 - RNA, 19 nt, Artificial Sequence
  Description of Artificial Sequence: Synthetic oligonucleotide
uaguaaccggucuaccuca

SEQ ID NO: 1989038 - RNA, 19 nt, Artificial Sequence
  Description of Artificial Sequence: Synthetic oligonucleotide
caggguuccucaaacaauc

SEQ ID NO: 1989039 - RNA, 19 nt, Artificial Sequence
  Description of Artificial Sequence: Synthetic oligonucleotide
aggaguacacagcaauucu

SEQ ID NO: 1989040 - RNA, 19 nt, Artificial Sequence
  Description of Artificial Sequence: Synthetic oligonucleotide
aagguacuuuucaugagga

SEQ ID NO: 1989041 - RNA, 19 nt, Artificial Sequence
  Description of Artificial Sequence: Synthetic oligonucleotide
gauuuggguguguggcugg

SEQ ID NO: 1989042 - RNA, 19 nt, Artificial Sequence
  Description of Artificial Sequence: Synthetic oligonucleotide
acuuggauggcuugugagu

SEQ ID NO: 1989043 - RNA, 19 nt, Artificial Sequence
  Description of Artificial Sequence: Synthetic oligonucleotide
caaaugagacccgagggac

SEQ ID NO: 1989044 - RNA, 19 nt, Artificial Sequence
  Description of Artificial Sequence: Synthetic oligonucleotide
ucacugcaggaguacacag

SEQ ID NO: 1989045 - RNA, 19 nt, Artificial Sequence
  Description of Artificial Sequence: Synthetic oligonucleotide
ugcguuuauacuccauuau

SEQ ID NO: 1989046 - RNA, 19 nt, Artificial Sequence
  Description of Artificial Sequence: Synthetic oligonucleotide
accuucauaccagaauuuc

SEQ ID NO: 1989047 - RNA, 19 nt, Artificial Sequence
  Description of Artificial Sequence: Synthetic oligonucleotide
acagagaccuuggagagcu

SEQ ID NO: 1989048 - RNA, 19 nt, Artificial Sequence
  Description of Artificial Sequence: Synthetic oligonucleotide
cugcugagacaugagaagg

SEQ ID NO: 1989049 - RNA, 19 nt, Artificial Sequence
  Description of Artificial Sequence: Synthetic oligonucleotide
auaccagaauuucuuucug

SEQ ID NO: 1989050 - RNA, 19 nt, Artificial Sequence
  Description of Artificial Sequence: Synthetic oligonucleotide
uuuucaugaggaacucaaa

SEQ ID NO: 1989051 - RNA, 19 nt, Artificial Sequence
  Description of Artificial Sequence: Synthetic oligonucleotide
uuucucagggucugcugag

SEQ ID NO: 1989052 - RNA, 19 nt, Artificial Sequence
  Description of Artificial Sequence: Synthetic oligonucleotide
guaggcagcacuccucugc

SEQ ID NO: 1989053 - RNA, 19 nt, Artificial Sequence
  Description of Artificial Sequence: Synthetic oligonucleotide
uccuggucuucuuuaaggu

SEQ ID NO: 1989054 - RNA, 19 nt, Artificial Sequence
  Description of Artificial Sequence: Synthetic oligonucleotide
uguaccccaucaccucugg

SEQ ID NO: 1989055 - RNA, 19 nt, Artificial Sequence
  Description of Artificial Sequence: Synthetic oligonucleotide
aggugccuuauguaggcag

SEQ ID NO: 1989056 - RNA, 19 nt, Artificial Sequence
  Description of Artificial Sequence: Synthetic oligonucleotide
caagccaucccuuucaucu

SEQ ID NO: 1989057 - RNA, 19 nt, Artificial Sequence
  Description of Artificial Sequence: Synthetic oligonucleotide
gguacuuuucaugaggaac

SEQ ID NO: 1989058 - RNA, 19 nt, Artificial Sequence
  Description of Artificial Sequence: Synthetic oligonucleotide
gaggcguacagugucuucc

SEQ ID NO: 1989059 - RNA, 19 nt, Artificial Sequence
  Description of Artificial Sequence: Synthetic oligonucleotide
augacagagcuucaggguu

SEQ ID NO: 1989060 - RNA, 19 nt, Artificial Sequence
  Description of Artificial Sequence: Synthetic oligonucleotide
cuuauguaggcagcacucc

SEQ ID NO: 1989061 - RNA, 19 nt, Artificial Sequence
  Description of Artificial Sequence: Synthetic oligonucleotide
cauucaggacucugaggcg

SEQ ID NO: 1989062 - RNA, 19 nt, Artificial Sequence
  Description of Artificial Sequence: Synthetic oligonucleotide
gguuccucaaacaauccag

SEQ ID NO: 1989063 - RNA, 19 nt, Artificial Sequence
  Description of Artificial Sequence: Synthetic oligonucleotide
ucaaugcuuuguagagaag

SEQ ID NO: 1989064 - RNA, 19 nt, Artificial Sequence
  Description of Artificial Sequence: Synthetic oligonucleotide
agccaucccuuucaucugg

SEQ ID NO: 1989065 - RNA, 19 nt, Artificial Sequence
  Description of Artificial Sequence: Synthetic oligonucleotide
uugcguuuauacuccauua

SEQ ID NO: 1989066 - RNA, 19 nt, Artificial Sequence
  Description of Artificial Sequence: Synthetic oligonucleotide
gaguuaaguucuugcuccc

SEQ ID NO: 1989067 - RNA, 19 nt, Artificial Sequence
  Description of Artificial Sequence: Synthetic oligonucleotide
ugccaagccaucccuuuca

SEQ ID NO: 1989068 - RNA, 19 nt, Artificial Sequence
  Description of Artificial Sequence: Synthetic oligonucleotide
gucaaucccacacagauuu

SEQ ID NO: 1989069 - RNA, 19 nt, Artificial Sequence
  Description of Artificial Sequence: Synthetic oligonucleotide
aaccggucuaccucagcca

SEQ ID NO: 1989070 - RNA, 19 nt, Artificial Sequence
  Description of Artificial Sequence: Synthetic oligonucleotide
ugagaaggugccuuaugua

SEQ ID NO: 1989071 - RNA, 19 nt, Artificial Sequence
  Description of Artificial Sequence: Synthetic oligonucleotide
cuuggauggcuugugaguc

SEQ ID NO: 1989072 - RNA, 19 nt, Artificial Sequence
  Description of Artificial Sequence: Synthetic oligonucleotide
aagccaucccuuucaucug

SEQ ID NO: 1989073 - RNA, 19 nt, Artificial Sequence
  Description of Artificial Sequence: Synthetic oligonucleotide
ucgaggcaaauuucuugag

SEQ ID NO: 1989074 - RNA, 19 nt, Artificial Sequence
  Description of Artificial Sequence: Synthetic oligonucleotide
ugagucaaaugagacccga

SEQ ID NO: 1989075 - RNA, 19 nt, Artificial Sequence
  Description of Artificial Sequence: Synthetic oligonucleotide
accggucuaccucagccag

SEQ ID NO: 1989076 - RNA, 19 nt, Artificial Sequence
  Description of Artificial Sequence: Synthetic oligonucleotide
agggacggaccuucauacc

SEQ ID NO: 1989077 - RNA, 19 nt, Artificial Sequence
  Description of Artificial Sequence: Synthetic oligonucleotide
caguacacucggcaggcgg

SEQ ID NO: 1989078 - RNA, 19 nt, Artificial Sequence
  Description of Artificial Sequence: Synthetic oligonucleotide
auguaggcagcacuccucu

SEQ ID NO: 1989079 - RNA, 19 nt, Artificial Sequence
  Description of Artificial Sequence: Synthetic oligonucleotide
uccaguacacucggcaggc

SEQ ID NO: 1989080 - RNA, 19 nt, Artificial Sequence
  Description of Artificial Sequence: Synthetic oligonucleotide
ucaccccuaccucuguucu

SEQ ID NO: 1989081 - RNA, 19 nt, Artificial Sequence
  Description of Artificial Sequence: Synthetic oligonucleotide
ucugaggcguacagugucu

SEQ ID NO: 1989082 - RNA, 19 nt, Artificial Sequence
  Description of Artificial Sequence: Synthetic oligonucleotide
ugacagagcuucaggguuc

SEQ ID NO: 1989083 - RNA, 19 nt, Artificial Sequence
  Description of Artificial Sequence: Synthetic oligonucleotide
ccacauucaggucauagac

SEQ ID NO: 1989084 - RNA, 19 nt, Artificial Sequence
  Description of Artificial Sequence: Synthetic oligonucleotide
cauaccagaauuucuuucu

SEQ ID NO: 1989085 - RNA, 19 nt, Artificial Sequence
  Description of Artificial Sequence: Synthetic oligonucleotide
cagguucaugcacuggagc

SEQ ID NO: 1989086 - RNA, 19 nt, Artificial Sequence
  Description of Artificial Sequence: Synthetic oligonucleotide
ugucuugaauaaacacuau

SEQ ID NO: 1989087 - RNA, 19 nt, Artificial Sequence
  Description of Artificial Sequence: Synthetic oligonucleotide
acugcuaguaaccggucua

SEQ ID NO: 1989088 - RNA, 19 nt, Artificial Sequence
  Description of Artificial Sequence: Synthetic oligonucleotide
agauuuggguguguggcug

SEQ ID NO: 1989089 - RNA, 19 nt, Artificial Sequence
  Description of Artificial Sequence: Synthetic oligonucleotide
ccuaucuuccaguacacuc

SEQ ID NO: 1989090 - RNA, 19 nt, Artificial Sequence
  Description of Artificial Sequence: Synthetic oligonucleotide
auucaggacucugaggcgu

SEQ ID NO: 1989091 - RNA, 19 nt, Artificial Sequence
  Description of Artificial Sequence: Synthetic oligonucleotide
gacaccuaucuuccaguac

SEQ ID NO: 1989092 - RNA, 19 nt, Artificial Sequence
  Description of Artificial Sequence: Synthetic oligonucleotide
cuugaguuaaguucuugcu

SEQ ID NO: 1989093 - RNA, 19 nt, Artificial Sequence
  Description of Artificial Sequence: Synthetic oligonucleotide
aucaccucuggccucugcu

SEQ ID NO: 1989094 - RNA, 19 nt, Artificial Sequence
  Description of Artificial Sequence: Synthetic oligonucleotide
cagucugaccacaggcagg

SEQ ID NO: 1989095 - RNA, 19 nt, Artificial Sequence
  Description of Artificial Sequence: Synthetic oligonucleotide
agcacgaggccucaccccu

SEQ ID NO: 1989096 - RNA, 19 nt, Artificial Sequence
  Description of Artificial Sequence: Synthetic oligonucleotide
ugggcaucaugugaugaca

SEQ ID NO: 1989097 - RNA, 19 nt, Artificial Sequence
  Description of Artificial Sequence: Synthetic oligonucleotide
ucuugcucccgugggaagc

SEQ ID NO: 1989098 - RNA, 19 nt, Artificial Sequence
  Description of Artificial Sequence: Synthetic oligonucleotide
acagggccccugcuguacc

SEQ ID NO: 1989099 - RNA, 19 nt, Artificial Sequence
  Description of Artificial Sequence: Synthetic oligonucleotide
aggugugcagggccugcgc

SEQ ID NO: 1989100 - RNA, 19 nt, Artificial Sequence
  Description of Artificial Sequence: Synthetic oligonucleotide
cucugaggcguacaguguc

SEQ ID NO: 1989101 - RNA, 19 nt, Artificial Sequence
  Description of Artificial Sequence: Synthetic oligonucleotide
guacuuuucaugaggaacu

SEQ ID NO: 1989102 - RNA, 19 nt, Artificial Sequence
  Description of Artificial Sequence: Synthetic oligonucleotide
agggccugcgcgcggaccg

SEQ ID NO: 1989103 - RNA, 19 nt, Artificial Sequence
  Description of Artificial Sequence: Synthetic oligonucleotide
agcaauucugucaaugcuu

SEQ ID NO: 1989104 - RNA, 19 nt, Artificial Sequence
  Description of Artificial Sequence: Synthetic oligonucleotide
uuggauggcuugugaguca

SEQ ID NO: 1989105 - RNA, 19 nt, Artificial Sequence
  Description of Artificial Sequence: Synthetic oligonucleotide
auuugcuuauucagggccu

SEQ ID NO: 1989106 - RNA, 19 nt, Artificial Sequence
  Description of Artificial Sequence: Synthetic oligonucleotide
gagucaaaugagacccgag

SEQ ID NO: 1989107 - RNA, 19 nt, Artificial Sequence
  Description of Artificial Sequence: Synthetic oligonucleotide
ucaugagccuggcauccau

SEQ ID NO: 1989108 - RNA, 19 nt, Artificial Sequence
  Description of Artificial Sequence: Synthetic oligonucleotide
ucaugugaugacagagcuu

SEQ ID NO: 1989109 - RNA, 19 nt, Artificial Sequence
  Description of Artificial Sequence: Synthetic oligonucleotide
ggaaguguccuggugccgg

SEQ ID NO: 1989110 - RNA, 19 nt, Artificial Sequence
  Description of Artificial Sequence: Synthetic oligonucleotide
uucuugcucccgugggaag

SEQ ID NO: 1989111 - RNA, 19 nt, Artificial Sequence
  Description of Artificial Sequence: Synthetic oligonucleotide
cuucauaccagaauuucuu

SEQ ID NO: 1989112 - RNA, 19 nt, Artificial Sequence
  Description of Artificial Sequence: Synthetic oligonucleotide
gucagccacugcuaguaac

SEQ ID NO: 1989113 - RNA, 19 nt, Artificial Sequence
  Description of Artificial Sequence: Synthetic oligonucleotide
ugagccuggcauccauacu

SEQ ID NO: 1989114 - RNA, 19 nt, Artificial Sequence
  Description of Artificial Sequence: Synthetic oligonucleotide
gaagcuucuuggggaagug

SEQ ID NO: 1989115 - RNA, 19 nt, Artificial Sequence
  Description of Artificial Sequence: Synthetic oligonucleotide
agacccgagggacggaccu

SEQ ID NO: 1989116 - RNA, 19 nt, Artificial Sequence
  Description of Artificial Sequence: Synthetic oligonucleotide
caggcggagaagucugaag

SEQ ID NO: 1989117 - RNA, 19 nt, Artificial Sequence
  Description of Artificial Sequence: Synthetic oligonucleotide
cccgugggaagcaacagag

SEQ ID NO: 1989118 - RNA, 19 nt, Artificial Sequence
  Description of Artificial Sequence: Synthetic oligonucleotide
gaaguguccuggugccggc

SEQ ID NO: 1989119 - RNA, 19 nt, Artificial Sequence
  Description of Artificial Sequence: Synthetic oligonucleotide
cuccgugugccuguucugg

SEQ ID NO: 1989120 - RNA, 19 nt, Artificial Sequence
  Description of Artificial Sequence: Synthetic oligonucleotide
ccuuauguaggcagcacuc

SEQ ID NO: 1989121 - RNA, 19 nt, Artificial Sequence
  Description of Artificial Sequence: Synthetic oligonucleotide
ggaagcaacagaggugugc

SEQ ID NO: 1989122 - RNA, 19 nt, Artificial Sequence
  Description of Artificial Sequence: Synthetic oligonucleotide
caccuaucuuccaguacac

SEQ ID NO: 1989123 - RNA, 19 nt, Artificial Sequence
  Description of Artificial Sequence: Synthetic oligonucleotide
gaacucaaacuuggauggc

SEQ ID NO: 1989124 - RNA, 19 nt, Artificial Sequence
  Description of Artificial Sequence: Synthetic oligonucleotide
agaggugugcagggccugc

SEQ ID NO: 1989125 - RNA, 19 nt, Artificial Sequence
  Description of Artificial Sequence: Synthetic oligonucleotide
acuauggguggaacauuuc

SEQ ID NO: 1989126 - RNA, 19 nt, Artificial Sequence
  Description of Artificial Sequence: Synthetic oligonucleotide
ggaguacacagcaauucug

SEQ ID NO: 1989127 - RNA, 19 nt, Artificial Sequence
  Description of Artificial Sequence: Synthetic oligonucleotide
aaguguccuggugccggcg

SEQ ID NO: 1989128 - RNA, 19 nt, Artificial Sequence
  Description of Artificial Sequence: Synthetic oligonucleotide
ugcuaguaaccggucuacc

SEQ ID NO: 1989129 - RNA, 19 nt, Artificial Sequence
  Description of Artificial Sequence: Synthetic oligonucleotide
ggugugcagggccugcgcg

SEQ ID NO: 1989130 - RNA, 19 nt, Artificial Sequence
  Description of Artificial Sequence: Synthetic oligonucleotide
guuuucgaggcaaauuucu

SEQ ID NO: 1989131 - RNA, 19 nt, Artificial Sequence
  Description of Artificial Sequence: Synthetic oligonucleotide
guguggcugguucuugggc

SEQ ID NO: 1989132 - RNA, 19 nt, Artificial Sequence
  Description of Artificial Sequence: Synthetic oligonucleotide
guuaaguucuugcucccgu

SEQ ID NO: 1989133 - RNA, 19 nt, Artificial Sequence
  Description of Artificial Sequence: Synthetic oligonucleotide
acuuuucaugaggaacuca

SEQ ID NO: 1989134 - RNA, 19 nt, Artificial Sequence
  Description of Artificial Sequence: Synthetic oligonucleotide
ucugguuuucgaggcaaau

SEQ ID NO: 1989135 - RNA, 19 nt, Artificial Sequence
  Description of Artificial Sequence: Synthetic oligonucleotide
uguaggcagcacuccucug

SEQ ID NO: 1989136 - RNA, 19 nt, Artificial Sequence
  Description of Artificial Sequence: Synthetic oligonucleotide
ccuucucagcaaaugaguc

SEQ ID NO: 1989137 - RNA, 19 nt, Artificial Sequence
  Description of Artificial Sequence: Synthetic oligonucleotide
gcuucaggguuccucaaac

SEQ ID NO: 1989138 - RNA, 19 nt, Artificial Sequence
  Description of Artificial Sequence: Synthetic oligonucleotide
auacuccauuauuugcuua

SEQ ID NO: 1989139 - RNA, 19 nt, Artificial Sequence
  Description of Artificial Sequence: Synthetic oligonucleotide
ucggcaggcggagaagucu

SEQ ID NO: 1989140 - RNA, 19 nt, Artificial Sequence
  Description of Artificial Sequence: Synthetic oligonucleotide
cuauggguggaacauuucu

SEQ ID NO: 1989141 - RNA, 19 nt, Artificial Sequence
  Description of Artificial Sequence: Synthetic oligonucleotide
cguacagugucuuccuucc

SEQ ID NO: 1989142 - RNA, 19 nt, Artificial Sequence
  Description of Artificial Sequence: Synthetic oligonucleotide
agggucugcugagacauga

SEQ ID NO: 1989143 - RNA, 19 nt, Artificial Sequence
  Description of Artificial Sequence: Synthetic oligonucleotide
gugagucaaaugagacccg

SEQ ID NO: 1989144 - RNA, 19 nt, Artificial Sequence
  Description of Artificial Sequence: Synthetic oligonucleotide
uggguguguggcugguucu

SEQ ID NO: 1989145 - RNA, 19 nt, Artificial Sequence
  Description of Artificial Sequence: Synthetic oligonucleotide
agacaccuaucuuccagua

SEQ ID NO: 1989146 - RNA, 19 nt, Artificial Sequence
  Description of Artificial Sequence: Synthetic oligonucleotide
acaucccucgcagcgcgcg

SEQ ID NO: 1989147 - RNA, 19 nt, Artificial Sequence
  Description of Artificial Sequence: Synthetic oligonucleotide
gggacggaccuucauacca

SEQ ID NO: 1989148 - RNA, 19 nt, Artificial Sequence
  Description of Artificial Sequence: Synthetic oligonucleotide
agguacuuuucaugaggaa

SEQ ID NO: 1989149 - RNA, 19 nt, Artificial Sequence
  Description of Artificial Sequence: Synthetic oligonucleotide
ugagacccgagggacggac

SEQ ID NO: 1989150 - RNA, 19 nt, Artificial Sequence
  Description of Artificial Sequence: Synthetic oligonucleotide
gauggcugugccagguuca

SEQ ID NO: 1989151 - RNA, 19 nt, Artificial Sequence
  Description of Artificial Sequence: Synthetic oligonucleotide
accccuaccucuguucucu

SEQ ID NO: 1989152 - RNA, 19 nt, Artificial Sequence
  Description of Artificial Sequence: Synthetic oligonucleotide
uccauacucugugguguug

SEQ ID NO: 1989153 - RNA, 19 nt, Artificial Sequence
  Description of Artificial Sequence: Synthetic oligonucleotide
uggauggcuugugagucaa

SEQ ID NO: 1989154 - RNA, 19 nt, Artificial Sequence
  Description of Artificial Sequence: Synthetic oligonucleotide
aggccucaccccuaccucu

SEQ ID NO: 1989155 - RNA, 19 nt, Artificial Sequence
  Description of Artificial Sequence: Synthetic oligonucleotide
cuucaggguuccucaaaca

SEQ ID NO: 1989156 - RNA, 19 nt, Artificial Sequence
  Description of Artificial Sequence: Synthetic oligonucleotide
ggcuugugagucaaaugag

SEQ ID NO: 1989157 - RNA, 19 nt, Artificial Sequence
  Description of Artificial Sequence: Synthetic oligonucleotide
aggcguacagugucuuccu

SEQ ID NO: 1989158 - RNA, 19 nt, Artificial Sequence
  Description of Artificial Sequence: Synthetic oligonucleotide
cugcuaguaaccggucuac

SEQ ID NO: 1989159 - RNA, 19 nt, Artificial Sequence
  Description of Artificial Sequence: Synthetic oligonucleotide
aguacacucggcaggcgga

SEQ ID NO: 1989160 - RNA, 19 nt, Artificial Sequence
  Description of Artificial Sequence: Synthetic oligonucleotide
gaggugugcagggccugcg

SEQ ID NO: 1989161 - RNA, 19 nt, Artificial Sequence
  Description of Artificial Sequence: Synthetic oligonucleotide
guaaccggucuaccucagc

SEQ ID NO: 1989162 - RNA, 19 nt, Artificial Sequence
  Description of Artificial Sequence: Synthetic oligonucleotide
acacucggcaggcggagaa

SEQ ID NO: 1989163 - RNA, 19 nt, Artificial Sequence
  Description of Artificial Sequence: Synthetic oligonucleotide
uccgugugccuguucuggu

SEQ ID NO: 1989164 - RNA, 19 nt, Artificial Sequence
  Description of Artificial Sequence: Synthetic oligonucleotide
ugccagguucaugcacugg

SEQ ID NO: 1989165 - RNA, 19 nt, Artificial Sequence
  Description of Artificial Sequence: Synthetic oligonucleotide
uucaggacucugaggcgua

SEQ ID NO: 1989166 - RNA, 19 nt, Artificial Sequence
  Description of Artificial Sequence: Synthetic oligonucleotide
ugaggcguacagugucuuc

SEQ ID NO: 1989167 - RNA, 19 nt, Artificial Sequence
  Description of Artificial Sequence: Synthetic oligonucleotide
aucccucgcagcgcgcggc

SEQ ID NO: 1989168 - RNA, 19 nt, Artificial Sequence
  Description of Artificial Sequence: Synthetic oligonucleotide
cagagcuucaggguuccuc

SEQ ID NO: 1989169 - RNA, 19 nt, Artificial Sequence
  Description of Artificial Sequence: Synthetic oligonucleotide
ugugccuguucuggucugc

SEQ ID NO: 1989170 - RNA, 19 nt, Artificial Sequence
  Description of Artificial Sequence: Synthetic oligonucleotide
gcaaaugagucaggucagg

SEQ ID NO: 1989171 - RNA, 19 nt, Artificial Sequence
  Description of Artificial Sequence: Synthetic oligonucleotide
acccgagggacggaccuuc

SEQ ID NO: 1989172 - RNA, 19 nt, Artificial Sequence
  Description of Artificial Sequence: Synthetic oligonucleotide
ggucugcugagacaugaga

SEQ ID NO: 1989173 - RNA, 19 nt, Artificial Sequence
  Description of Artificial Sequence: Synthetic oligonucleotide
gcuuauucagggccucaug

SEQ ID NO: 1989174 - RNA, 19 nt, Artificial Sequence
  Description of Artificial Sequence: Synthetic oligonucleotide
gcagcacgaggccucaccc

SEQ ID NO: 1989175 - RNA, 19 nt, Artificial Sequence
  Description of Artificial Sequence: Synthetic oligonucleotide
gggguccaaagucagccac

SEQ ID NO: 1989176 - RNA, 19 nt, Artificial Sequence
  Description of Artificial Sequence: Synthetic oligonucleotide
cucacugcaggaguacaca

SEQ ID NO: 1989177 - RNA, 19 nt, Artificial Sequence
  Description of Artificial Sequence: Synthetic oligonucleotide
ggguuccucaaacaaucca

SEQ ID NO: 1989178 - RNA, 19 nt, Artificial Sequence
  Description of Artificial Sequence: Synthetic oligonucleotide
ggaccuucauaccagaauu

SEQ ID NO: 1989179 - RNA, 19 nt, Artificial Sequence
  Description of Artificial Sequence: Synthetic oligonucleotide
cacagagaccuuggagagc

SEQ ID NO: 1989180 - RNA, 19 nt, Artificial Sequence
  Description of Artificial Sequence: Synthetic oligonucleotide
acgaggccucaccccuacc

SEQ ID NO: 1989181 - RNA, 19 nt, Artificial Sequence
  Description of Artificial Sequence: Synthetic oligonucleotide
acagaggugugcagggccu

SEQ ID NO: 1989182 - RNA, 19 nt, Artificial Sequence
  Description of Artificial Sequence: Synthetic oligonucleotide
cugcccugauggcugugcc

SEQ ID NO: 1989183 - RNA, 19 nt, Artificial Sequence
  Description of Artificial Sequence: Synthetic oligonucleotide
auccauacucugugguguu

SEQ ID NO: 1989184 - RNA, 19 nt, Artificial Sequence
  Description of Artificial Sequence: Synthetic oligonucleotide
guacacucggcaggcggag

SEQ ID NO: 1989185 - RNA, 19 nt, Artificial Sequence
  Description of Artificial Sequence: Synthetic oligonucleotide
gguuuucgaggcaaauuuc

SEQ ID NO: 1989186 - RNA, 19 nt, Artificial Sequence
  Description of Artificial Sequence: Synthetic oligonucleotide
cuugcguuuauacuccauu

SEQ ID NO: 1989187 - RNA, 19 nt, Artificial Sequence
  Description of Artificial Sequence: Synthetic oligonucleotide
guccaaagucagccacugc

SEQ ID NO: 1989188 - RNA, 19 nt, Artificial Sequence
  Description of Artificial Sequence: Synthetic oligonucleotide
cauccauacucuguggugu

SEQ ID NO: 1989189 - RNA, 19 nt, Artificial Sequence
  Description of Artificial Sequence: Synthetic oligonucleotide
ggcggagaagucugaaguc

SEQ ID NO: 1989190 - RNA, 19 nt, Artificial Sequence
  Description of Artificial Sequence: Synthetic oligonucleotide
gugccagguucaugcacug

SEQ ID NO: 1989191 - RNA, 19 nt, Artificial Sequence
  Description of Artificial Sequence: Synthetic oligonucleotide
acaugagaaggugccuuau

SEQ ID NO: 1989192 - RNA, 19 nt, Artificial Sequence
  Description of Artificial Sequence: Synthetic oligonucleotide
gcuaguaaccggucuaccu

SEQ ID NO: 1989193 - RNA, 19 nt, Artificial Sequence
  Description of Artificial Sequence: Synthetic oligonucleotide
ggacggaccuucauaccag

SEQ ID NO: 1989194 - RNA, 19 nt, Artificial Sequence
  Description of Artificial Sequence: Synthetic oligonucleotide
uuuugccacagggccccug

SEQ ID NO: 1989195 - RNA, 19 nt, Artificial Sequence
  Description of Artificial Sequence: Synthetic oligonucleotide
aggccauucaggacucuga

SEQ ID NO: 1989196 - RNA, 19 nt, Artificial Sequence
  Description of Artificial Sequence: Synthetic oligonucleotide
accuaucuuccaguacacu

SEQ ID NO: 1989197 - RNA, 19 nt, Artificial Sequence
  Description of Artificial Sequence: Synthetic oligonucleotide
gcguacagugucuuccuuc

SEQ ID NO: 1989198 - RNA, 19 nt, Artificial Sequence
  Description of Artificial Sequence: Synthetic oligonucleotide
ggcaucaugugaugacaga

SEQ ID NO: 1989199 - RNA, 19 nt, Artificial Sequence
  Description of Artificial Sequence: Synthetic oligonucleotide
guuccucaaacaauccagu

SEQ ID NO: 1989200 - RNA, 19 nt, Artificial Sequence
  Description of Artificial Sequence: Synthetic oligonucleotide
cagggccucauggucaauc

SEQ ID NO: 1989201 - RNA, 19 nt, Artificial Sequence
  Description of Artificial Sequence: Synthetic oligonucleotide
guaccccaucaccucuggc

SEQ ID NO: 1989202 - RNA, 19 nt, Artificial Sequence
  Description of Artificial Sequence: Synthetic oligonucleotide
agucagccacugcuaguaa

SEQ ID NO: 1989203 - RNA, 19 nt, Artificial Sequence
  Description of Artificial Sequence: Synthetic oligonucleotide
cucagcaaaugagucaggu

SEQ ID NO: 1989204 - RNA, 19 nt, Artificial Sequence
  Description of Artificial Sequence: Synthetic oligonucleotide
uccuggugccggcgggaug

SEQ ID NO: 1989205 - RNA, 19 nt, Artificial Sequence
  Description of Artificial Sequence: Synthetic oligonucleotide
cugcuguaccccaucaccu

SEQ ID NO: 1989206 - RNA, 19 nt, Artificial Sequence
  Description of Artificial Sequence: Synthetic oligonucleotide
cacgaggccucaccccuac

SEQ ID NO: 1989207 - RNA, 19 nt, Artificial Sequence
  Description of Artificial Sequence: Synthetic oligonucleotide
cucccgugggaagcaacag

SEQ ID NO: 1989208 - RNA, 19 nt, Artificial Sequence
  Description of Artificial Sequence: Synthetic oligonucleotide
ccacaucccucgcagcgcg

SEQ ID NO: 1989209 - RNA, 19 nt, Artificial Sequence
  Description of Artificial Sequence: Synthetic oligonucleotide
caucccucgcagcgcgcgg

SEQ ID NO: 1989210 - RNA, 19 nt, Artificial Sequence
  Description of Artificial Sequence: Synthetic oligonucleotide
uggcucacugcaggaguac

SEQ ID NO: 1989211 - RNA, 19 nt, Artificial Sequence
  Description of Artificial Sequence: Synthetic oligonucleotide
acuccauuauuugcuuauu

SEQ ID NO: 1989212 - RNA, 19 nt, Artificial Sequence
  Description of Artificial Sequence: Synthetic oligonucleotide
gcggagaagucugaaguca

SEQ ID NO: 1989213 - RNA, 19 nt, Artificial Sequence
  Description of Artificial Sequence: Synthetic oligonucleotide
auggucaaucccacacaga

SEQ ID NO: 1989214 - RNA, 19 nt, Artificial Sequence
  Description of Artificial Sequence: Synthetic oligonucleotide
ccucaugagccuggcaucc

SEQ ID NO: 1989215 - RNA, 19 nt, Artificial Sequence
  Description of Artificial Sequence: Synthetic oligonucleotide
cacuauggguggaacauuu

SEQ ID NO: 1989216 - RNA, 19 nt, Artificial Sequence
  Description of Artificial Sequence: Synthetic oligonucleotide
ucaugcacuggagcccuuu

SEQ ID NO: 1989217 - RNA, 19 nt, Artificial Sequence
  Description of Artificial Sequence: Synthetic oligonucleotide
gugccuuauguaggcagca

SEQ ID NO: 1989218 - RNA, 19 nt, Artificial Sequence
  Description of Artificial Sequence: Synthetic oligonucleotide
cagcgcgcggcccgcaagc

SEQ ID NO: 1989219 - RNA, 19 nt, Artificial Sequence
  Description of Artificial Sequence: Synthetic oligonucleotide
ugcgcgcggaccgggaaaa

SEQ ID NO: 1989220 - RNA, 19 nt, Artificial Sequence
  Description of Artificial Sequence: Synthetic oligonucleotide
acacuauggguggaacauu

SEQ ID NO: 1989221 - RNA, 19 nt, Artificial Sequence
  Description of Artificial Sequence: Synthetic oligonucleotide
ccaucccuuucaucugggg

SEQ ID NO: 1989222 - RNA, 19 nt, Artificial Sequence
  Description of Artificial Sequence: Synthetic oligonucleotide
uacacucggcaggcggaga

SEQ ID NO: 1989223 - RNA, 19 nt, Artificial Sequence
  Description of Artificial Sequence: Synthetic oligonucleotide
guucuggucugcagagaca

SEQ ID NO: 1989224 - RNA, 19 nt, Artificial Sequence
  Description of Artificial Sequence: Synthetic oligonucleotide
aagcggccccauggccgcc

SEQ ID NO: 1989225 - RNA, 19 nt, Artificial Sequence
  Description of Artificial Sequence: Synthetic oligonucleotide
agcggccccauggccgccc

SEQ ID NO: 1989226 - RNA, 19 nt, Artificial Sequence
  Description of Artificial Sequence: Synthetic oligonucleotide
cacagggccccugcuguac

SEQ ID NO: 1989227 - RNA, 19 nt, Artificial Sequence
  Description of Artificial Sequence: Synthetic oligonucleotide
ggcauccauacucuguggu

SEQ ID NO: 1989228 - RNA, 19 nt, Artificial Sequence
  Description of Artificial Sequence: Synthetic oligonucleotide
gagacaugagaaggugccu

SEQ ID NO: 1989229 - RNA, 19 nt, Artificial Sequence
  Description of Artificial Sequence: Synthetic oligonucleotide
cagauuuggguguguggcu

SEQ ID NO: 1989230 - RNA, 19 nt, Artificial Sequence
  Description of Artificial Sequence: Synthetic oligonucleotide
ggucauagaccuccuggcu

SEQ ID NO: 1989231 - RNA, 19 nt, Artificial Sequence
  Description of Artificial Sequence: Synthetic oligonucleotide
gggaccagcuccugcccug

SEQ ID NO: 1989232 - RNA, 19 nt, Artificial Sequence
  Description of Artificial Sequence: Synthetic oligonucleotide
cacaucccucgcagcgcgc

SEQ ID NO: 1989233 - RNA, 19 nt, Artificial Sequence
  Description of Artificial Sequence: Synthetic oligonucleotide
ccgaagggccugcagccgg

SEQ ID NO: 1989234 - RNA, 19 nt, Artificial Sequence
  Description of Artificial Sequence: Synthetic oligonucleotide
ggagaagucugaagucaca

SEQ ID NO: 1989235 - RNA, 19 nt, Artificial Sequence
  Description of Artificial Sequence: Synthetic oligonucleotide
cuggcucacugcaggagua

SEQ ID NO: 1989236 - RNA, 19 nt, Artificial Sequence
  Description of Artificial Sequence: Synthetic oligonucleotide
cuugcucccgugggaagca

SEQ ID NO: 1989237 - RNA, 19 nt, Artificial Sequence
  Description of Artificial Sequence: Synthetic oligonucleotide
cacccaaaaggaagcuucu

SEQ ID NO: 1989238 - RNA, 19 nt, Artificial Sequence
  Description of Artificial Sequence: Synthetic oligonucleotide
caccccuaccucuguucuc

SEQ ID NO: 1989239 - RNA, 19 nt, Artificial Sequence
  Description of Artificial Sequence: Synthetic oligonucleotide
gcguuuauacuccauuauu

SEQ ID NO: 1989240 - RNA, 19 nt, Artificial Sequence
  Description of Artificial Sequence: Synthetic oligonucleotide
gccuuauguaggcagcacu

SEQ ID NO: 1989241 - RNA, 19 nt, Artificial Sequence
  Description of Artificial Sequence: Synthetic oligonucleotide
ccuucauaccagaauuucu

SEQ ID NO: 1989242 - RNA, 19 nt, Artificial Sequence
  Description of Artificial Sequence: Synthetic oligonucleotide
acccaaaaggaagcuucuu

SEQ ID NO: 1989243 - RNA, 19 nt, Artificial Sequence
  Description of Artificial Sequence: Synthetic oligonucleotide
gggaaguguccuggugccg

SEQ ID NO: 1989244 - RNA, 19 nt, Artificial Sequence
  Description of Artificial Sequence: Synthetic oligonucleotide
uuuggguguguggcugguu

SEQ ID NO: 1989245 - RNA, 19 nt, Artificial Sequence
  Description of Artificial Sequence: Synthetic oligonucleotide
cacucggcaggcggagaag

SEQ ID NO: 1989246 - RNA, 19 nt, Artificial Sequence
  Description of Artificial Sequence: Synthetic oligonucleotide
augugaugacagagcuuca

SEQ ID NO: 1989247 - RNA, 19 nt, Artificial Sequence
  Description of Artificial Sequence: Synthetic oligonucleotide
uggcugugccagguucaug

SEQ ID NO: 1989248 - RNA, 19 nt, Artificial Sequence
  Description of Artificial Sequence: Synthetic oligonucleotide
gguguguggcugguucuug

SEQ ID NO: 1989249 - RNA, 19 nt, Artificial Sequence
  Description of Artificial Sequence: Synthetic oligonucleotide
gcucacugcaggaguacac

SEQ ID NO: 1989250 - RNA, 19 nt, Artificial Sequence
  Description of Artificial Sequence: Synthetic oligonucleotide
cagcacuccucugcaggac

SEQ ID NO: 1989251 - RNA, 19 nt, Artificial Sequence
  Description of Artificial Sequence: Synthetic oligonucleotide
auagaccuccuggcucacu

SEQ ID NO: 1989252 - RNA, 19 nt, Artificial Sequence
  Description of Artificial Sequence: Synthetic oligonucleotide
agccuccgugugccuguuc

SEQ ID NO: 1989253 - RNA, 19 nt, Artificial Sequence
  Description of Artificial Sequence: Synthetic oligonucleotide
gaccuucauaccagaauuu

SEQ ID NO: 1989254 - RNA, 19 nt, Artificial Sequence
  Description of Artificial Sequence: Synthetic oligonucleotide
cguuuauacuccauuauuu

SEQ ID NO: 1989255 - RNA, 19 nt, Artificial Sequence
  Description of Artificial Sequence: Synthetic oligonucleotide
cagaggugugcagggccug

SEQ ID NO: 1989256 - RNA, 19 nt, Artificial Sequence
  Description of Artificial Sequence: Synthetic oligonucleotide
gccaucccuuucaucuggg

SEQ ID NO: 1989257 - RNA, 19 nt, Artificial Sequence
  Description of Artificial Sequence: Synthetic oligonucleotide
gcacuccucugcaggacag

SEQ ID NO: 1989258 - RNA, 19 nt, Artificial Sequence
  Description of Artificial Sequence: Synthetic oligonucleotide
ggugccggcgggaugaugu

SEQ ID NO: 1989259 - RNA, 19 nt, Artificial Sequence
  Description of Artificial Sequence: Synthetic oligonucleotide
ccaaagucagccacugcua

SEQ ID NO: 1989260 - RNA, 19 nt, Artificial Sequence
  Description of Artificial Sequence: Synthetic oligonucleotide
gggucugcugagacaugag

SEQ ID NO: 1989261 - RNA, 19 nt, Artificial Sequence
  Description of Artificial Sequence: Synthetic oligonucleotide
cugcaggaguacacagcaa

SEQ ID NO: 1989262 - RNA, 19 nt, Artificial Sequence
  Description of Artificial Sequence: Synthetic oligonucleotide
gccucauggucaaucccac

SEQ ID NO: 1989263 - RNA, 19 nt, Artificial Sequence
  Description of Artificial Sequence: Synthetic oligonucleotide
ccuggucuucuuuaaggua

SEQ ID NO: 1989264 - RNA, 19 nt, Artificial Sequence
  Description of Artificial Sequence: Synthetic oligonucleotide
guacagugucuuccuuccu

SEQ ID NO: 1989265 - RNA, 19 nt, Artificial Sequence
  Description of Artificial Sequence: Synthetic oligonucleotide
ggucuaccucagccagaag

SEQ ID NO: 1989266 - RNA, 19 nt, Artificial Sequence
  Description of Artificial Sequence: Synthetic oligonucleotide
gugccuguucuggucugca

SEQ ID NO: 1989267 - RNA, 19 nt, Artificial Sequence
  Description of Artificial Sequence: Synthetic oligonucleotide
cugguuuucgaggcaaauu

SEQ ID NO: 1989268 - RNA, 19 nt, Artificial Sequence
  Description of Artificial Sequence: Synthetic oligonucleotide
uggccgccccgaagggccu

SEQ ID NO: 1989269 - RNA, 19 nt, Artificial Sequence
  Description of Artificial Sequence: Synthetic oligonucleotide
gcucccgugggaagcaaca

SEQ ID NO: 1989270 - RNA, 19 nt, Artificial Sequence
  Description of Artificial Sequence: Synthetic oligonucleotide
gugccggcgggaugauguc

SEQ ID NO: 1989271 - RNA, 19 nt, Artificial Sequence
  Description of Artificial Sequence: Synthetic oligonucleotide
uggugccggcgggaugaug

SEQ ID NO: 1989272 - RNA, 19 nt, Artificial Sequence
  Description of Artificial Sequence: Synthetic oligonucleotide
ccucgcagcgcgcggcccg

SEQ ID NO: 1989273 - RNA, 19 nt, Artificial Sequence
  Description of Artificial Sequence: Synthetic oligonucleotide
ccuggugccggcgggauga

SEQ ID NO: 1989274 - RNA, 19 nt, Artificial Sequence
  Description of Artificial Sequence: Synthetic oligonucleotide
ggcucacugcaggaguaca

SEQ ID NO: 1989275 - RNA, 19 nt, Artificial Sequence
  Description of Artificial Sequence: Synthetic oligonucleotide
gccuccgugugccuguucu

SEQ ID NO: 1989276 - RNA, 19 nt, Artificial Sequence
  Description of Artificial Sequence: Synthetic oligonucleotide
uccugcccugauggcugug

SEQ ID NO: 1989277 - RNA, 19 nt, Artificial Sequence
  Description of Artificial Sequence: Synthetic oligonucleotide
ggcccacaucccucgcagc

SEQ ID NO: 1989278 - RNA, 19 nt, Artificial Sequence
  Description of Artificial Sequence: Synthetic oligonucleotide
ccgugugccuguucugguc

SEQ ID NO: 1989279 - RNA, 19 nt, Artificial Sequence
  Description of Artificial Sequence: Synthetic oligonucleotide
cccacaucccucgcagcgc

SEQ ID NO: 1989280 - RNA, 19 nt, Artificial Sequence
  Description of Artificial Sequence: Synthetic oligonucleotide
augagacccgagggacgga

SEQ ID NO: 1989281 - RNA, 19 nt, Artificial Sequence
  Description of Artificial Sequence: Synthetic oligonucleotide
uugcucccgugggaagcaa

SEQ ID NO: 1989282 - RNA, 19 nt, Artificial Sequence
  Description of Artificial Sequence: Synthetic oligonucleotide
cucgcagcgcgcggcccgc

SEQ ID NO: 1989283 - RNA, 19 nt, Artificial Sequence
  Description of Artificial Sequence: Synthetic oligonucleotide
ggccucaccccuaccucug

SEQ ID NO: 1989284 - RNA, 19 nt, Artificial Sequence
  Description of Artificial Sequence: Synthetic oligonucleotide
ccccggcccacaucccucg

SEQ ID NO: 1989285 - RNA, 19 nt, Artificial Sequence
  Description of Artificial Sequence: Synthetic oligonucleotide
cccugcuguaccccaucac

SEQ ID NO: 1989286 - RNA, 19 nt, Artificial Sequence
  Description of Artificial Sequence: Synthetic oligonucleotide
ccuccgugugccuguucug

SEQ ID NO: 1989287 - RNA, 19 nt, Artificial Sequence
  Description of Artificial Sequence: Synthetic oligonucleotide
gcuuuguagagaaggccau

SEQ ID NO: 1989288 - RNA, 19 nt, Artificial Sequence
  Description of Artificial Sequence: Synthetic oligonucleotide
cggcaggcggagaagucug

SEQ ID NO: 1989289 - RNA, 19 nt, Artificial Sequence
  Description of Artificial Sequence: Synthetic oligonucleotide
cagugucuuccuuccuggu

SEQ ID NO: 1989290 - RNA, 19 nt, Artificial Sequence
  Description of Artificial Sequence: Synthetic oligonucleotide
cggcccacaucccucgcag

SEQ ID NO: 1989291 - RNA, 19 nt, Artificial Sequence
  Description of Artificial Sequence: Synthetic oligonucleotide
gggaagcaacagaggugug

SEQ ID NO: 1989292 - RNA, 19 nt, Artificial Sequence
  Description of Artificial Sequence: Synthetic oligonucleotide
cccgaagggccugcagccg

SEQ ID NO: 1989293 - RNA, 19 nt, Artificial Sequence
  Description of Artificial Sequence: Synthetic oligonucleotide
agcgcgcggcccgcaagca

SEQ ID NO: 1989294 - RNA, 19 nt, Artificial Sequence
  Description of Artificial Sequence: Synthetic oligonucleotide
cugcgcgcggaccgggaaa

SEQ ID NO: 1989295 - RNA, 19 nt, Artificial Sequence
  Description of Artificial Sequence: Synthetic oligonucleotide
ccuaccucuguucucuuuu

SEQ ID NO: 1989296 - RNA, 19 nt, Artificial Sequence
  Description of Artificial Sequence: Synthetic oligonucleotide
ccaguccucuucugccuca

SEQ ID NO: 1989297 - RNA, 19 nt, Artificial Sequence
  Description of Artificial Sequence: Synthetic oligonucleotide
cgaggcaaauuucuugagu

SEQ ID NO: 1989298 - RNA, 19 nt, Artificial Sequence
  Description of Artificial Sequence: Synthetic oligonucleotide
gaaggccauucaggacucu

SEQ ID NO: 1989299 - RNA, 19 nt, Artificial Sequence
  Description of Artificial Sequence: Synthetic oligonucleotide
cguccucagccuccucacc

SEQ ID NO: 1989300 - RNA, 19 nt, Artificial Sequence
  Description of Artificial Sequence: Synthetic oligonucleotide
ggguccaaagucagccacu

SEQ ID NO: 1989301 - RNA, 19 nt, Artificial Sequence
  Description of Artificial Sequence: Synthetic oligonucleotide
ccagugccaagccaucccu

SEQ ID NO: 1989302 - RNA, 19 nt, Artificial Sequence
  Description of Artificial Sequence: Synthetic oligonucleotide
gcaggcggagaagucugaa

SEQ ID NO: 1989303 - RNA, 19 nt, Artificial Sequence
  Description of Artificial Sequence: Synthetic oligonucleotide
ccccauggccgccccgaag

SEQ ID NO: 1989304 - RNA, 19 nt, Artificial Sequence
  Description of Artificial Sequence: Synthetic oligonucleotide
ggacucugaggcguacagu

SEQ ID NO: 1989305 - RNA, 19 nt, Artificial Sequence
  Description of Artificial Sequence: Synthetic oligonucleotide
cacacagauuugggugugu

SEQ ID NO: 1989306 - RNA, 19 nt, Artificial Sequence
  Description of Artificial Sequence: Synthetic oligonucleotide
ggucaaucccacacagauu

SEQ ID NO: 1989307 - RNA, 19 nt, Artificial Sequence
  Description of Artificial Sequence: Synthetic oligonucleotide
gucugaccacaggcaggga

SEQ ID NO: 1989308 - RNA, 19 nt, Artificial Sequence
  Description of Artificial Sequence: Synthetic oligonucleotide
cagugccaagccaucccuu

SEQ ID NO: 1989309 - RNA, 19 nt, Artificial Sequence
  Description of Artificial Sequence: Synthetic oligonucleotide
ggccccauggccgccccga

SEQ ID NO: 1989310 - RNA, 19 nt, Artificial Sequence
  Description of Artificial Sequence: Synthetic oligonucleotide
cccuuucuccuucuugcgu

SEQ ID NO: 1989311 - RNA, 19 nt, Artificial Sequence
  Description of Artificial Sequence: Synthetic oligonucleotide
cugaggcguacagugucuu

SEQ ID NO: 1989312 - RNA, 19 nt, Artificial Sequence
  Description of Artificial Sequence: Synthetic oligonucleotide
cgugugccuguucuggucu

SEQ ID NO: 1989313 - RNA, 19 nt, Artificial Sequence
  Description of Artificial Sequence: Synthetic oligonucleotide
ccggucuaccucagccaga

SEQ ID NO: 1989314 - RNA, 19 nt, Artificial Sequence
  Description of Artificial Sequence: Synthetic oligonucleotide
ccugauggcugugccaggu

SEQ ID NO: 1989315 - RNA, 19 nt, Artificial Sequence
  Description of Artificial Sequence: Synthetic oligonucleotide
ccccugcuguaccccauca

SEQ ID NO: 1989316 - RNA, 19 nt, Artificial Sequence
  Description of Artificial Sequence: Synthetic oligonucleotide
ccggcgggaugaugucuuc

SEQ ID NO: 1989317 - RNA, 19 nt, Artificial Sequence
  Description of Artificial Sequence: Synthetic oligonucleotide
gcgcgcggcccgcaagcac

SEQ ID NO: 1989318 - RNA, 19 nt, Artificial Sequence
  Description of Artificial Sequence: Synthetic oligonucleotide
cggaccuucauaccagaau

SEQ ID NO: 1989319 - RNA, 19 nt, Artificial Sequence
  Description of Artificial Sequence: Synthetic oligonucleotide
ccggcccacaucccucgca

SEQ ID NO: 1989320 - RNA, 19 nt, Artificial Sequence
  Description of Artificial Sequence: Synthetic oligonucleotide
gacccgagggacggaccuu

SEQ ID NO: 1989321 - RNA, 19 nt, Artificial Sequence
  Description of Artificial Sequence: Synthetic oligonucleotide
gcggccccauggccgcccc

SEQ ID NO: 1989322 - RNA, 19 nt, Artificial Sequence
  Description of Artificial Sequence: Synthetic oligonucleotide
gccccggcccacaucccuc

SEQ ID NO: 1989323 - RNA, 19 nt, Artificial Sequence
  Description of Artificial Sequence: Synthetic oligonucleotide
ccucacccaaaaggaagcu

SEQ ID NO: 1989324 - RNA, 19 nt, Artificial Sequence
  Description of Artificial Sequence: Synthetic oligonucleotide
guccuggugccggcgggau

SEQ ID NO: 1989325 - RNA, 19 nt, Artificial Sequence
  Description of Artificial Sequence: Synthetic oligonucleotide
gccgccccgaagggccugc

SEQ ID NO: 1989326 - RNA, 19 nt, Artificial Sequence
  Description of Artificial Sequence: Synthetic oligonucleotide
cccgagggacggaccuuca

SEQ ID NO: 1989327 - RNA, 19 nt, Artificial Sequence
  Description of Artificial Sequence: Synthetic oligonucleotide
ggguguguggcugguucuu

SEQ ID NO: 1989328 - RNA, 19 nt, Artificial Sequence
  Description of Artificial Sequence: Synthetic oligonucleotide
ccugcgcgcggaccgggaa

SEQ ID NO: 1989329 - RNA, 19 nt, Artificial Sequence
  Description of Artificial Sequence: Synthetic oligonucleotide
cccucgcagcgcgcggccc

SEQ ID NO: 1989330 - RNA, 19 nt, Artificial Sequence
  Description of Artificial Sequence: Synthetic oligonucleotide
gccucaccccuaccucugu

SEQ ID NO: 1989331 - RNA, 19 nt, Artificial Sequence
  Description of Artificial Sequence: Synthetic oligonucleotide
gccggcgggaugaugucuu

SEQ ID NO: 1989332 - RNA, 19 nt, Artificial Sequence
  Description of Artificial Sequence: Synthetic oligonucleotide
cccuaccucuguucucuuu

SEQ ID NO: 1989333 - RNA, 19 nt, Artificial Sequence
  Description of Artificial Sequence: Synthetic oligonucleotide
gccugcgcgcggaccggga

SEQ ID NO: 1989334 - RNA, 19 nt, Artificial Sequence
  Description of Artificial Sequence: Synthetic oligonucleotide
gcuccacauucaggucaua

SEQ ID NO: 1989335 - RNA, 19 nt, Artificial Sequence
  Description of Artificial Sequence: Synthetic oligonucleotide
ccgagggacggaccuucau

SEQ ID NO: 1989336 - RNA, 19 nt, Artificial Sequence
  Description of Artificial Sequence: Synthetic oligonucleotide
ccucaccccuaccucuguu

SEQ ID NO: 1989337 - RNA, 19 nt, Artificial Sequence
  Description of Artificial Sequence: Synthetic oligonucleotide
cuggugccggcgggaugau

SEQ ID NO: 1989338 - RNA, 19 nt, Artificial Sequence
  Description of Artificial Sequence: Synthetic oligonucleotide
ccccuaccucuguucucuu

SEQ ID NO: 1989339 - RNA, 19 nt, Artificial Sequence
  Description of Artificial Sequence: Synthetic oligonucleotide
aaacaaaguacgcuuuucc

SEQ ID NO: 1989340 - RNA, 19 nt, Artificial Sequence
  Description of Artificial Sequence: Synthetic oligonucleotide
auuggaacgagauccagcc

SEQ ID NO: 1989341 - RNA, 19 nt, Artificial Sequence
  Description of Artificial Sequence: Synthetic oligonucleotide
uguuccuugaccaagagaa

SEQ ID NO: 1989342 - RNA, 19 nt, Artificial Sequence
  Description of Artificial Sequence: Synthetic oligonucleotide
uaagcgaagaaacucaggc

SEQ ID NO: 1989343 - RNA, 19 nt, Artificial Sequence
  Description of Artificial Sequence: Synthetic oligonucleotide
aaaacccggacuuuacagc

SEQ ID NO: 1989344 - RNA, 19 nt, Artificial Sequence
  Description of Artificial Sequence: Synthetic oligonucleotide
ugauauaggggcaccaagg

SEQ ID NO: 1989345 - RNA, 19 nt, Artificial Sequence
  Description of Artificial Sequence: Synthetic oligonucleotide
aacgagauccagccgaaac

SEQ ID NO: 1989346 - RNA, 19 nt, Artificial Sequence
  Description of Artificial Sequence: Synthetic oligonucleotide
aaaguacgcuuuuccaagc

SEQ ID NO: 1989347 - RNA, 19 nt, Artificial Sequence
  Description of Artificial Sequence: Synthetic oligonucleotide
uguggcaugacagaggugc

SEQ ID NO: 1989348 - RNA, 19 nt, Artificial Sequence
  Description of Artificial Sequence: Synthetic oligonucleotide
agcgaagaaacucaggcag

SEQ ID NO: 1989349 - RNA, 19 nt, Artificial Sequence
  Description of Artificial Sequence: Synthetic oligonucleotide
aagguaagcgaagaaacuc

SEQ ID NO: 1989350 - RNA, 19 nt, Artificial Sequence
  Description of Artificial Sequence: Synthetic oligonucleotide
ugaccgguuaauuggaacg

SEQ ID NO: 1989351 - RNA, 19 nt, Artificial Sequence
  Description of Artificial Sequence: Synthetic oligonucleotide
agaagguaagcgaagaaac

SEQ ID NO: 1989352 - RNA, 19 nt, Artificial Sequence
  Description of Artificial Sequence: Synthetic oligonucleotide
uuagccuugagucccacug

SEQ ID NO: 1989353 - RNA, 19 nt, Artificial Sequence
  Description of Artificial Sequence: Synthetic oligonucleotide
aauuggaacgagauccagc

SEQ ID NO: 1989354 - RNA, 19 nt, Artificial Sequence
  Description of Artificial Sequence: Synthetic oligonucleotide
gaaaacccggacuuuacag

SEQ ID NO: 1989355 - RNA, 19 nt, Artificial Sequence
  Description of Artificial Sequence: Synthetic oligonucleotide
aacaaaguacgcuuuucca

SEQ ID NO: 1989356 - RNA, 19 nt, Artificial Sequence
  Description of Artificial Sequence: Synthetic oligonucleotide
uugcuaaagcccuugacug

SEQ ID NO: 1989357 - RNA, 19 nt, Artificial Sequence
  Description of Artificial Sequence: Synthetic oligonucleotide
auccagacuugauauaggg

SEQ ID NO: 1989358 - RNA, 19 nt, Artificial Sequence
  Description of Artificial Sequence: Synthetic oligonucleotide
agcaguguuuggucgagcc

SEQ ID NO: 1989359 - RNA, 19 nt, Artificial Sequence
  Description of Artificial Sequence: Synthetic oligonucleotide
ucucuuugauggaaaaccc

SEQ ID NO: 1989360 - RNA, 19 nt, Artificial Sequence
  Description of Artificial Sequence: Synthetic oligonucleotide
caaaguacgcuuuuccaag

SEQ ID NO: 1989361 - RNA, 19 nt, Artificial Sequence
  Description of Artificial Sequence: Synthetic oligonucleotide
ucugcaaggaucccucucc

SEQ ID NO: 1989362 - RNA, 19 nt, Artificial Sequence
  Description of Artificial Sequence: Synthetic oligonucleotide
aaguacgcuuuuccaagcg

SEQ ID NO: 1989363 - RNA, 19 nt, Artificial Sequence
  Description of Artificial Sequence: Synthetic oligonucleotide
uggaacgagauccagccga

SEQ ID NO: 1989364 - RNA, 19 nt, Artificial Sequence
  Description of Artificial Sequence: Synthetic oligonucleotide
aaacccggacuuuacagca

SEQ ID NO: 1989365 - RNA, 19 nt, Artificial Sequence
  Description of Artificial Sequence: Synthetic oligonucleotide
caagcaugcacgcagggcc

SEQ ID NO: 1989366 - RNA, 19 nt, Artificial Sequence
  Description of Artificial Sequence: Synthetic oligonucleotide
aguacgcuuuuccaagcgc

SEQ ID NO: 1989367 - RNA, 19 nt, Artificial Sequence
  Description of Artificial Sequence: Synthetic oligonucleotide
gacaaggcgaguucugagg

SEQ ID NO: 1989368 - RNA, 19 nt, Artificial Sequence
  Description of Artificial Sequence: Synthetic oligonucleotide
uuugauggaaaacccggac

SEQ ID NO: 1989369 - RNA, 19 nt, Artificial Sequence
  Description of Artificial Sequence: Synthetic oligonucleotide
auacuuggcuaccaccggc

SEQ ID NO: 1989370 - RNA, 19 nt, Artificial Sequence
  Description of Artificial Sequence: Synthetic oligonucleotide
uccagacuugauauagggg

SEQ ID NO: 1989371 - RNA, 19 nt, Artificial Sequence
  Description of Artificial Sequence: Synthetic oligonucleotide
uucuuagcagcccacgcug

SEQ ID NO: 1989372 - RNA, 19 nt, Artificial Sequence
  Description of Artificial Sequence: Synthetic oligonucleotide
uuaauuggaacgagaucca

SEQ ID NO: 1989373 - RNA, 19 nt, Artificial Sequence
  Description of Artificial Sequence: Synthetic oligonucleotide
agcaccagaggcuugucuc

SEQ ID NO: 1989374 - RNA, 19 nt, Artificial Sequence
  Description of Artificial Sequence: Synthetic oligonucleotide
gaugccaugccgcucacac

SEQ ID NO: 1989375 - RNA, 19 nt, Artificial Sequence
  Description of Artificial Sequence: Synthetic oligonucleotide
cuugucuccgcccaccagg

SEQ ID NO: 1989376 - RNA, 19 nt, Artificial Sequence
  Description of Artificial Sequence: Synthetic oligonucleotide
aagcgaagaaacucaggca

SEQ ID NO: 1989377 - RNA, 19 nt, Artificial Sequence
  Description of Artificial Sequence: Synthetic oligonucleotide
uuucuuagcagcccacgcu

SEQ ID NO: 1989378 - RNA, 19 nt, Artificial Sequence
  Description of Artificial Sequence: Synthetic oligonucleotide
auauaggggcaccaagguc

SEQ ID NO: 1989379 - RNA, 19 nt, Artificial Sequence
  Description of Artificial Sequence: Synthetic oligonucleotide
ugucccaucugggaggugg

SEQ ID NO: 1989380 - RNA, 19 nt, Artificial Sequence
  Description of Artificial Sequence: Synthetic oligonucleotide
cagaguuagacuugccuag

SEQ ID NO: 1989381 - RNA, 19 nt, Artificial Sequence
  Description of Artificial Sequence: Synthetic oligonucleotide
ugcuaaagcccuugacugg

SEQ ID NO: 1989382 - RNA, 19 nt, Artificial Sequence
  Description of Artificial Sequence: Synthetic oligonucleotide
uuuuccaagcgcagguccc

SEQ ID NO: 1989383 - RNA, 19 nt, Artificial Sequence
  Description of Artificial Sequence: Synthetic oligonucleotide
acaaaguacgcuuuuccaa

SEQ ID NO: 1989384 - RNA, 19 nt, Artificial Sequence
  Description of Artificial Sequence: Synthetic oligonucleotide
ugcccaagcaugcacgcag

SEQ ID NO: 1989385 - RNA, 19 nt, Artificial Sequence
  Description of Artificial Sequence: Synthetic oligonucleotide
acuguaguucuccucuguc

SEQ ID NO: 1989386 - RNA, 19 nt, Artificial Sequence
  Description of Artificial Sequence: Synthetic oligonucleotide
ucuguggacacuuucccuc

SEQ ID NO: 1989387 - RNA, 19 nt, Artificial Sequence
  Description of Artificial Sequence: Synthetic oligonucleotide
cuuuuccaagcgcaggucc

SEQ ID NO: 1989388 - RNA, 19 nt, Artificial Sequence
  Description of Artificial Sequence: Synthetic oligonucleotide
uucugaggaaccagaaggu

SEQ ID NO: 1989389 - RNA, 19 nt, Artificial Sequence
  Description of Artificial Sequence: Synthetic oligonucleotide
ugccaugccgcucacacaa

SEQ ID NO: 1989390 - RNA, 19 nt, Artificial Sequence
  Description of Artificial Sequence: Synthetic oligonucleotide
acaggucuaggcucccugc

SEQ ID NO: 1989391 - RNA, 19 nt, Artificial Sequence
  Description of Artificial Sequence: Synthetic oligonucleotide
uuagacuugccuaguguuc

SEQ ID NO: 1989392 - RNA, 19 nt, Artificial Sequence
  Description of Artificial Sequence: Synthetic oligonucleotide
acgacagaggccuccauug

SEQ ID NO: 1989393 - RNA, 19 nt, Artificial Sequence
  Description of Artificial Sequence: Synthetic oligonucleotide
aguuagacuugccuagugu

SEQ ID NO: 1989394 - RNA, 19 nt, Artificial Sequence
  Description of Artificial Sequence: Synthetic oligonucleotide
acacagcaguguuuggucg

SEQ ID NO: 1989395 - RNA, 19 nt, Artificial Sequence
  Description of Artificial Sequence: Synthetic oligonucleotide
uuugucuguggacacuuuc

SEQ ID NO: 1989396 - RNA, 19 nt, Artificial Sequence
  Description of Artificial Sequence: Synthetic oligonucleotide
ggcaugaagggcaucaugg

SEQ ID NO: 1989397 - RNA, 19 nt, Artificial Sequence
  Description of Artificial Sequence: Synthetic oligonucleotide
ugaugcagcaccagaggcu

SEQ ID NO: 1989398 - RNA, 19 nt, Artificial Sequence
  Description of Artificial Sequence: Synthetic oligonucleotide
auagccgagugguuucugg

SEQ ID NO: 1989399 - RNA, 19 nt, Artificial Sequence
  Description of Artificial Sequence: Synthetic oligonucleotide
cauggcacgcuaugggugg

SEQ ID NO: 1989400 - RNA, 19 nt, Artificial Sequence
  Description of Artificial Sequence: Synthetic oligonucleotide
ucuuagcagcccacgcugg

SEQ ID NO: 1989401 - RNA, 19 nt, Artificial Sequence
  Description of Artificial Sequence: Synthetic oligonucleotide
uggaugaggccuguaacag

SEQ ID NO: 1989402 - RNA, 19 nt, Artificial Sequence
  Description of Artificial Sequence: Synthetic oligonucleotide
aggcuuagccuugaguccc

SEQ ID NO: 1989403 - RNA, 19 nt, Artificial Sequence
  Description of Artificial Sequence: Synthetic oligonucleotide
uaggcuuagccuugagucc

SEQ ID NO: 1989404 - RNA, 19 nt, Artificial Sequence
  Description of Artificial Sequence: Synthetic oligonucleotide
cuaguguucucuccucucc

SEQ ID NO: 1989405 - RNA, 19 nt, Artificial Sequence
  Description of Artificial Sequence: Synthetic oligonucleotide
uccagccgaaacaaaguac

SEQ ID NO: 1989406 - RNA, 19 nt, Artificial Sequence
  Description of Artificial Sequence: Synthetic oligonucleotide
cuuucuuagcagcccacgc

SEQ ID NO: 1989407 - RNA, 19 nt, Artificial Sequence
  Description of Artificial Sequence: Synthetic oligonucleotide
ucccugguggccaggaugc

SEQ ID NO: 1989408 - RNA, 19 nt, Artificial Sequence
  Description of Artificial Sequence: Synthetic oligonucleotide
cuuaguaggcuuagccuug

SEQ ID NO: 1989409 - RNA, 19 nt, Artificial Sequence
  Description of Artificial Sequence: Synthetic oligonucleotide
agccuugagucccacugac

SEQ ID NO: 1989410 - RNA, 19 nt, Artificial Sequence
  Description of Artificial Sequence: Synthetic oligonucleotide
ucacacaauccagacagga

SEQ ID NO: 1989411 - RNA, 19 nt, Artificial Sequence
  Description of Artificial Sequence: Synthetic oligonucleotide
uacgcuuuuccaagcgcag

SEQ ID NO: 1989412 - RNA, 19 nt, Artificial Sequence
  Description of Artificial Sequence: Synthetic oligonucleotide
uacuuggcuaccaccggcc

SEQ ID NO: 1989413 - RNA, 19 nt, Artificial Sequence
  Description of Artificial Sequence: Synthetic oligonucleotide
uuggucgagccuuaucucu

SEQ ID NO: 1989414 - RNA, 19 nt, Artificial Sequence
  Description of Artificial Sequence: Synthetic oligonucleotide
agucucaccagcaggcuac

SEQ ID NO: 1989415 - RNA, 19 nt, Artificial Sequence
  Description of Artificial Sequence: Synthetic oligonucleotide
agccuuaucucucucuagu

SEQ ID NO: 1989416 - RNA, 19 nt, Artificial Sequence
  Description of Artificial Sequence: Synthetic oligonucleotide
agccccauugaugccaugc

SEQ ID NO: 1989417 - RNA, 19 nt, Artificial Sequence
  Description of Artificial Sequence: Synthetic oligonucleotide
uggggcuaugggcugaggc

SEQ ID NO: 1989418 - RNA, 19 nt, Artificial Sequence
  Description of Artificial Sequence: Synthetic oligonucleotide
acgagauccagccgaaaca

SEQ ID NO: 1989419 - RNA, 19 nt, Artificial Sequence
  Description of Artificial Sequence: Synthetic oligonucleotide
uggacuguaggcugagcug

SEQ ID NO: 1989420 - RNA, 19 nt, Artificial Sequence
  Description of Artificial Sequence: Synthetic oligonucleotide
uagccgagugguuucuggg

SEQ ID NO: 1989421 - RNA, 19 nt, Artificial Sequence
  Description of Artificial Sequence: Synthetic oligonucleotide
aggaaccagaagguaagcg

SEQ ID NO: 1989422 - RNA, 19 nt, Artificial Sequence
  Description of Artificial Sequence: Synthetic oligonucleotide
uuggaacgagauccagccg

SEQ ID NO: 1989423 - RNA, 19 nt, Artificial Sequence
  Description of Artificial Sequence: Synthetic oligonucleotide
aguaggcuuagccuugagu

SEQ ID NO: 1989424 - RNA, 19 nt, Artificial Sequence
  Description of Artificial Sequence: Synthetic oligonucleotide
ccuugagucccacugaccg

SEQ ID NO: 1989425 - RNA, 19 nt, Artificial Sequence
  Description of Artificial Sequence: Synthetic oligonucleotide
acuucauggcacgcuaugg

SEQ ID NO: 1989426 - RNA, 19 nt, Artificial Sequence
  Description of Artificial Sequence: Synthetic oligonucleotide
cagcucucuugcuaaagcc

SEQ ID NO: 1989427 - RNA, 19 nt, Artificial Sequence
  Description of Artificial Sequence: Synthetic oligonucleotide
cauccagacuugauauagg

SEQ ID NO: 1989428 - RNA, 19 nt, Artificial Sequence
  Description of Artificial Sequence: Synthetic oligonucleotide
gacagaggccuccauuggc

SEQ ID NO: 1989429 - RNA, 19 nt, Artificial Sequence
  Description of Artificial Sequence: Synthetic oligonucleotide
ggcaccaagguccaggggc

SEQ ID NO: 1989430 - RNA, 19 nt, Artificial Sequence
  Description of Artificial Sequence: Synthetic oligonucleotide
guuuggucgagccuuaucu

SEQ ID NO: 1989431 - RNA, 19 nt, Artificial Sequence
  Description of Artificial Sequence: Synthetic oligonucleotide
agacuugauauaggggcac

SEQ ID NO: 1989432 - RNA, 19 nt, Artificial Sequence
  Description of Artificial Sequence: Synthetic oligonucleotide
acgcagggccacuucaugg

SEQ ID NO: 1989433 - RNA, 19 nt, Artificial Sequence
  Description of Artificial Sequence: Synthetic oligonucleotide
cauacuuggcuaccaccgg

SEQ ID NO: 1989434 - RNA, 19 nt, Artificial Sequence
  Description of Artificial Sequence: Synthetic oligonucleotide
uaauuggaacgagauccag

SEQ ID NO: 1989435 - RNA, 19 nt, Artificial Sequence
  Description of Artificial Sequence: Synthetic oligonucleotide
uagacuugccuaguguucu

SEQ ID NO: 1989436 - RNA, 19 nt, Artificial Sequence
  Description of Artificial Sequence: Synthetic oligonucleotide
caaccacacaggauguccc

SEQ ID NO: 1989437 - RNA, 19 nt, Artificial Sequence
  Description of Artificial Sequence: Synthetic oligonucleotide
ugacccgcuguccauccag

SEQ ID NO: 1989438 - RNA, 19 nt, Artificial Sequence
  Description of Artificial Sequence: Synthetic oligonucleotide
acccggacuuuacagcaac

SEQ ID NO: 1989439 - RNA, 19 nt, Artificial Sequence
  Description of Artificial Sequence: Synthetic oligonucleotide
agcaccuuucuguuugucu

SEQ ID NO: 1989440 - RNA, 19 nt, Artificial Sequence
  Description of Artificial Sequence: Synthetic oligonucleotide
uccaggaugacccgcuguc

SEQ ID NO: 1989441 - RNA, 19 nt, Artificial Sequence
  Description of Artificial Sequence: Synthetic oligonucleotide
gaaacaaaguacgcuuuuc

SEQ ID NO: 1989442 - RNA, 19 nt, Artificial Sequence
  Description of Artificial Sequence: Synthetic oligonucleotide
uccacagcagccccauuga

SEQ ID NO: 1989443 - RNA, 19 nt, Artificial Sequence
  Description of Artificial Sequence: Synthetic oligonucleotide
cuugagucccacugaccgg

SEQ ID NO: 1989444 - RNA, 19 nt, Artificial Sequence
  Description of Artificial Sequence: Synthetic oligonucleotide
agccgagugguuucugggg

SEQ ID NO: 1989445 - RNA, 19 nt, Artificial Sequence
  Description of Artificial Sequence: Synthetic oligonucleotide
uggaaaacccggacuuuac

SEQ ID NO: 1989446 - RNA, 19 nt, Artificial Sequence
  Description of Artificial Sequence: Synthetic oligonucleotide
gccuccauuggcaugaagg

SEQ ID NO: 1989447 - RNA, 19 nt, Artificial Sequence
  Description of Artificial Sequence: Synthetic oligonucleotide
aggcuacccagguccaggc

SEQ ID NO: 1989448 - RNA, 19 nt, Artificial Sequence
  Description of Artificial Sequence: Synthetic oligonucleotide
acuugccuaguguucucuc

SEQ ID NO: 1989449 - RNA, 19 nt, Artificial Sequence
  Description of Artificial Sequence: Synthetic oligonucleotide
gauauaggggcaccaaggu

SEQ ID NO: 1989450 - RNA, 19 nt, Artificial Sequence
  Description of Artificial Sequence: Synthetic oligonucleotide
uuuggucgagccuuaucuc

SEQ ID NO: 1989451 - RNA, 19 nt, Artificial Sequence
  Description of Artificial Sequence: Synthetic oligonucleotide
cuugcuaaagcccuugacu

SEQ ID NO: 1989452 - RNA, 19 nt, Artificial Sequence
  Description of Artificial Sequence: Synthetic oligonucleotide
guaagcgaagaaacucagg

SEQ ID NO: 1989453 - RNA, 19 nt, Artificial Sequence
  Description of Artificial Sequence: Synthetic oligonucleotide
gacucccgacgacagaggc

SEQ ID NO: 1989454 - RNA, 19 nt, Artificial Sequence
  Description of Artificial Sequence: Synthetic oligonucleotide
ggaugucccaucugggagg

SEQ ID NO: 1989455 - RNA, 19 nt, Artificial Sequence
  Description of Artificial Sequence: Synthetic oligonucleotide
guggacacagcaguguuug

SEQ ID NO: 1989456 - RNA, 19 nt, Artificial Sequence
  Description of Artificial Sequence: Synthetic oligonucleotide
ccacugaccgguuaauugg

SEQ ID NO: 1989457 - RNA, 19 nt, Artificial Sequence
  Description of Artificial Sequence: Synthetic oligonucleotide
acagaggugcccaagcaug

SEQ ID NO: 1989458 - RNA, 19 nt, Artificial Sequence
  Description of Artificial Sequence: Synthetic oligonucleotide
gaucucuuugauggaaaac

SEQ ID NO: 1989459 - RNA, 19 nt, Artificial Sequence
  Description of Artificial Sequence: Synthetic oligonucleotide
gucuccgcccaccaggaag

SEQ ID NO: 1989460 - RNA, 19 nt, Artificial Sequence
  Description of Artificial Sequence: Synthetic oligonucleotide
uugagucccacugaccggu

SEQ ID NO: 1989461 - RNA, 19 nt, Artificial Sequence
  Description of Artificial Sequence: Synthetic oligonucleotide
agggccacuucauggcacg

SEQ ID NO: 1989462 - RNA, 19 nt, Artificial Sequence
  Description of Artificial Sequence: Synthetic oligonucleotide
cuugacuggggcugggcug

SEQ ID NO: 1989463 - RNA, 19 nt, Artificial Sequence
  Description of Artificial Sequence: Synthetic oligonucleotide
cugaccgguuaauuggaac

SEQ ID NO: 1989464 - RNA, 19 nt, Artificial Sequence
  Description of Artificial Sequence: Synthetic oligonucleotide
cucugacaggucuaggcuc

SEQ ID NO: 1989465 - RNA, 19 nt, Artificial Sequence
  Description of Artificial Sequence: Synthetic oligonucleotide
cuucuucugggaccgcccg

SEQ ID NO: 1989466 - RNA, 19 nt, Artificial Sequence
  Description of Artificial Sequence: Synthetic oligonucleotide
gacaggucuaggcucccug

SEQ ID NO: 1989467 - RNA, 19 nt, Artificial Sequence
  Description of Artificial Sequence: Synthetic oligonucleotide
ugccgcucacacaauccag

SEQ ID NO: 1989468 - RNA, 19 nt, Artificial Sequence
  Description of Artificial Sequence: Synthetic oligonucleotide
gagccuuaucucucucuag

SEQ ID NO: 1989469 - RNA, 19 nt, Artificial Sequence
  Description of Artificial Sequence: Synthetic oligonucleotide
cuggaguucacagcugagc

SEQ ID NO: 1989470 - RNA, 19 nt, Artificial Sequence
  Description of Artificial Sequence: Synthetic oligonucleotide
agaaacucaggcagcacca

SEQ ID NO: 1989471 - RNA, 19 nt, Artificial Sequence
  Description of Artificial Sequence: Synthetic oligonucleotide
uggucagaguuagacuugc

SEQ ID NO: 1989472 - RNA, 19 nt, Artificial Sequence
  Description of Artificial Sequence: Synthetic oligonucleotide
agguaagcgaagaaacuca

SEQ ID NO: 1989473 - RNA, 19 nt, Artificial Sequence
  Description of Artificial Sequence: Synthetic oligonucleotide
gaugaggccuguaacagcu

SEQ ID NO: 1989474 - RNA, 19 nt, Artificial Sequence
  Description of Artificial Sequence: Synthetic oligonucleotide
acagcugagcuuuguuuga

SEQ ID NO: 1989475 - RNA, 19 nt, Artificial Sequence
  Description of Artificial Sequence: Synthetic oligonucleotide
cugaggaaccagaagguaa

SEQ ID NO: 1989476 - RNA, 19 nt, Artificial Sequence
  Description of Artificial Sequence: Synthetic oligonucleotide
uguuuggucgagccuuauc

SEQ ID NO: 1989477 - RNA, 19 nt, Artificial Sequence
  Description of Artificial Sequence: Synthetic oligonucleotide
gcaugaagggcaucauggg

SEQ ID NO: 1989478 - RNA, 19 nt, Artificial Sequence
  Description of Artificial Sequence: Synthetic oligonucleotide
accagaggcuugucuccgc

SEQ ID NO: 1989479 - RNA, 19 nt, Artificial Sequence
  Description of Artificial Sequence: Synthetic oligonucleotide
uucucacaauccucauccc

SEQ ID NO: 1989480 - RNA, 19 nt, Artificial Sequence
  Description of Artificial Sequence: Synthetic oligonucleotide
uccaagcgcaggucccugg

SEQ ID NO: 1989481 - RNA, 19 nt, Artificial Sequence
  Description of Artificial Sequence: Synthetic oligonucleotide
uugucuccgcccaccagga

SEQ ID NO: 1989482 - RNA, 19 nt, Artificial Sequence
  Description of Artificial Sequence: Synthetic oligonucleotide
guaacacuucugugacagg

SEQ ID NO: 1989483 - RNA, 19 nt, Artificial Sequence
  Description of Artificial Sequence: Synthetic oligonucleotide
aggucuaggcucccugcag

SEQ ID NO: 1989484 - RNA, 19 nt, Artificial Sequence
  Description of Artificial Sequence: Synthetic oligonucleotide
gaaacucaggcagcaccag

SEQ ID NO: 1989485 - RNA, 19 nt, Artificial Sequence
  Description of Artificial Sequence: Synthetic oligonucleotide
uagccuugagucccacuga

SEQ ID NO: 1989486 - RNA, 19 nt, Artificial Sequence
  Description of Artificial Sequence: Synthetic oligonucleotide
cagccgaaacaaaguacgc

SEQ ID NO: 1989487 - RNA, 19 nt, Artificial Sequence
  Description of Artificial Sequence: Synthetic oligonucleotide
aauccagacaggaucucuu

SEQ ID NO: 1989488 - RNA, 19 nt, Artificial Sequence
  Description of Artificial Sequence: Synthetic oligonucleotide
augccgcucacacaaucca

SEQ ID NO: 1989489 - RNA, 19 nt, Artificial Sequence
  Description of Artificial Sequence: Synthetic oligonucleotide
ucgagccuuaucucucucu

SEQ ID NO: 1989490 - RNA, 19 nt, Artificial Sequence
  Description of Artificial Sequence: Synthetic oligonucleotide
uggucgagccuuaucucuc

SEQ ID NO: 1989491 - RNA, 19 nt, Artificial Sequence
  Description of Artificial Sequence: Synthetic oligonucleotide
agacuugccuaguguucuc

SEQ ID NO: 1989492 - RNA, 19 nt, Artificial Sequence
  Description of Artificial Sequence: Synthetic oligonucleotide
agccgaaacaaaguacgcu

SEQ ID NO: 1989493 - RNA, 19 nt, Artificial Sequence
  Description of Artificial Sequence: Synthetic oligonucleotide
cccauugaugccaugccgc

SEQ ID NO: 1989494 - RNA, 19 nt, Artificial Sequence
  Description of Artificial Sequence: Synthetic oligonucleotide
gguuaauuggaacgagauc

SEQ ID NO: 1989495 - RNA, 19 nt, Artificial Sequence
  Description of Artificial Sequence: Synthetic oligonucleotide
cagggcuauggguggagcc

SEQ ID NO: 1989496 - RNA, 19 nt, Artificial Sequence
  Description of Artificial Sequence: Synthetic oligonucleotide
uccuuucuuagcagcccac

SEQ ID NO: 1989497 - RNA, 19 nt, Artificial Sequence
  Description of Artificial Sequence: Synthetic oligonucleotide
gguaagcgaagaaacucag

SEQ ID NO: 1989498 - RNA, 19 nt, Artificial Sequence
  Description of Artificial Sequence: Synthetic oligonucleotide
gccuguaacagcucucuug

SEQ ID NO: 1989499 - RNA, 19 nt, Artificial Sequence
  Description of Artificial Sequence: Synthetic oligonucleotide
cuauggguggagccagggc

SEQ ID NO: 1989500 - RNA, 19 nt, Artificial Sequence
  Description of Artificial Sequence: Synthetic oligonucleotide
cagacuugauauaggggca

SEQ ID NO: 1989501 - RNA, 19 nt, Artificial Sequence
  Description of Artificial Sequence: Synthetic oligonucleotide
uguggacacuuucccucug

SEQ ID NO: 1989502 - RNA, 19 nt, Artificial Sequence
  Description of Artificial Sequence: Synthetic oligonucleotide
gacuugauauaggggcacc

SEQ ID NO: 1989503 - RNA, 19 nt, Artificial Sequence
  Description of Artificial Sequence: Synthetic oligonucleotide
aaaaggccccuuugcguuu

SEQ ID NO: 1989504 - RNA, 19 nt, Artificial Sequence
  Description of Artificial Sequence: Synthetic oligonucleotide
cacuucauggcacgcuaug

SEQ ID NO: 1989505 - RNA, 19 nt, Artificial Sequence
  Description of Artificial Sequence: Synthetic oligonucleotide
cguaacacuucugugacag

SEQ ID NO: 1989506 - RNA, 19 nt, Artificial Sequence
  Description of Artificial Sequence: Synthetic oligonucleotide
acuugauauaggggcacca

SEQ ID NO: 1989507 - RNA, 19 nt, Artificial Sequence
  Description of Artificial Sequence: Synthetic oligonucleotide
acucccgacgacagaggcc

SEQ ID NO: 1989508 - RNA, 19 nt, Artificial Sequence
  Description of Artificial Sequence: Synthetic oligonucleotide
uuaguaggcuuagccuuga

SEQ ID NO: 1989509 - RNA, 19 nt, Artificial Sequence
  Description of Artificial Sequence: Synthetic oligonucleotide
guuagacuugccuaguguu

SEQ ID NO: 1989510 - RNA, 19 nt, Artificial Sequence
  Description of Artificial Sequence: Synthetic oligonucleotide
aggugcccaagcaugcacg

SEQ ID NO: 1989511 - RNA, 19 nt, Artificial Sequence
  Description of Artificial Sequence: Synthetic oligonucleotide
uaggcucccugcagaagac

SEQ ID NO: 1989512 - RNA, 19 nt, Artificial Sequence
  Description of Artificial Sequence: Synthetic oligonucleotide
gaagguaagcgaagaaacu

SEQ ID NO: 1989513 - RNA, 19 nt, Artificial Sequence
  Description of Artificial Sequence: Synthetic oligonucleotide
guacgcuuuuccaagcgca

SEQ ID NO: 1989514 - RNA, 19 nt, Artificial Sequence
  Description of Artificial Sequence: Synthetic oligonucleotide
cagaagguaagcgaagaaa

SEQ ID NO: 1989515 - RNA, 19 nt, Artificial Sequence
  Description of Artificial Sequence: Synthetic oligonucleotide
cugggacucccgacgacag

SEQ ID NO: 1989516 - RNA, 19 nt, Artificial Sequence
  Description of Artificial Sequence: Synthetic oligonucleotide
gccucugacaggucuaggc

SEQ ID NO: 1989517 - RNA, 19 nt, Artificial Sequence
  Description of Artificial Sequence: Synthetic oligonucleotide
caugacagaggugcccaag

SEQ ID NO: 1989518 - RNA, 19 nt, Artificial Sequence
  Description of Artificial Sequence: Synthetic oligonucleotide
gaagaaacucaggcagcac

SEQ ID NO: 1989519 - RNA, 19 nt, Artificial Sequence
  Description of Artificial Sequence: Synthetic oligonucleotide
uaguaggcuuagccuugag

SEQ ID NO: 1989520 - RNA, 19 nt, Artificial Sequence
  Description of Artificial Sequence: Synthetic oligonucleotide
accgguuaauuggaacgag

SEQ ID NO: 1989521 - RNA, 19 nt, Artificial Sequence
  Description of Artificial Sequence: Synthetic oligonucleotide
acccgcuguccauccagac

SEQ ID NO: 1989522 - RNA, 19 nt, Artificial Sequence
  Description of Artificial Sequence: Synthetic oligonucleotide
uguccugaugcagcaccag

SEQ ID NO: 1989523 - RNA, 19 nt, Artificial Sequence
  Description of Artificial Sequence: Synthetic oligonucleotide
gaccgguuaauuggaacga

SEQ ID NO: 1989524 - RNA, 19 nt, Artificial Sequence
  Description of Artificial Sequence: Synthetic oligonucleotide
acgcuuuuccaagcgcagg

SEQ ID NO: 1989525 - RNA, 19 nt, Artificial Sequence
  Description of Artificial Sequence: Synthetic oligonucleotide
gaggaaccagaagguaagc

SEQ ID NO: 1989526 - RNA, 19 nt, Artificial Sequence
  Description of Artificial Sequence: Synthetic oligonucleotide
ggacaaggcgaguucugag

SEQ ID NO: 1989527 - RNA, 19 nt, Artificial Sequence
  Description of Artificial Sequence: Synthetic oligonucleotide
uggcaugacagaggugccc

SEQ ID NO: 1989528 - RNA, 19 nt, Artificial Sequence
  Description of Artificial Sequence: Synthetic oligonucleotide
cuauggguggagccuggac

SEQ ID NO: 1989529 - RNA, 19 nt, Artificial Sequence
  Description of Artificial Sequence: Synthetic oligonucleotide
gccguaacacuucugugac

SEQ ID NO: 1989530 - RNA, 19 nt, Artificial Sequence
  Description of Artificial Sequence: Synthetic oligonucleotide
uuuccaagcgcaggucccu

SEQ ID NO: 1989531 - RNA, 19 nt, Artificial Sequence
  Description of Artificial Sequence: Synthetic oligonucleotide
agaguuagacuugccuagu

SEQ ID NO: 1989532 - RNA, 19 nt, Artificial Sequence
  Description of Artificial Sequence: Synthetic oligonucleotide
gccauacuuggcuaccacc

SEQ ID NO: 1989533 - RNA, 19 nt, Artificial Sequence
  Description of Artificial Sequence: Synthetic oligonucleotide
uguucucuccucucccaua

SEQ ID NO: 1989534 - RNA, 19 nt, Artificial Sequence
  Description of Artificial Sequence: Synthetic oligonucleotide
ucucucuagugcugagauc

SEQ ID NO: 1989535 - RNA, 19 nt, Artificial Sequence
  Description of Artificial Sequence: Synthetic oligonucleotide
gcaaccacacaggaugucc

SEQ ID NO: 1989536 - RNA, 19 nt, Artificial Sequence
  Description of Artificial Sequence: Synthetic oligonucleotide
cugagauccugcaggccuc

SEQ ID NO: 1989537 - RNA, 19 nt, Artificial Sequence
  Description of Artificial Sequence: Synthetic oligonucleotide
cucucccauagccgagugg

SEQ ID NO: 1989538 - RNA, 19 nt, Artificial Sequence
  Description of Artificial Sequence: Synthetic oligonucleotide
cccacugaccgguuaauug

SEQ ID NO: 1989539 - RNA, 19 nt, Artificial Sequence
  Description of Artificial Sequence: Synthetic oligonucleotide
gggacucccgacgacagag

SEQ ID NO: 1989540 - RNA, 19 nt, Artificial Sequence
  Description of Artificial Sequence: Synthetic oligonucleotide
acagcaguguuuggucgag

SEQ ID NO: 1989541 - RNA, 19 nt, Artificial Sequence
  Description of Artificial Sequence: Synthetic oligonucleotide
gacacagagcccugggacu

SEQ ID NO: 1989542 - RNA, 19 nt, Artificial Sequence
  Description of Artificial Sequence: Synthetic oligonucleotide
acuuuacagcaaccacaca

SEQ ID NO: 1989543 - RNA, 19 nt, Artificial Sequence
  Description of Artificial Sequence: Synthetic oligonucleotide
uccaggccauacuuggcua

SEQ ID NO: 1989544 - RNA, 19 nt, Artificial Sequence
  Description of Artificial Sequence: Synthetic oligonucleotide
auggaaaacccggacuuua

SEQ ID NO: 1989545 - RNA, 19 nt, Artificial Sequence
  Description of Artificial Sequence: Synthetic oligonucleotide
ggaaaacccggacuuuaca

SEQ ID NO: 1989546 - RNA, 19 nt, Artificial Sequence
  Description of Artificial Sequence: Synthetic oligonucleotide
agguggacacagcaguguu

SEQ ID NO: 1989547 - RNA, 19 nt, Artificial Sequence
  Description of Artificial Sequence: Synthetic oligonucleotide
aagcaugcacgcagggcca

SEQ ID NO: 1989548 - RNA, 19 nt, Artificial Sequence
  Description of Artificial Sequence: Synthetic oligonucleotide
agggcuauggguggagccu

SEQ ID NO: 1989549 - RNA, 19 nt, Artificial Sequence
  Description of Artificial Sequence: Synthetic oligonucleotide
ucccauagccgagugguuu

SEQ ID NO: 1989550 - RNA, 19 nt, Artificial Sequence
  Description of Artificial Sequence: Synthetic oligonucleotide
cagaagacacagagcccug

SEQ ID NO: 1989551 - RNA, 19 nt, Artificial Sequence
  Description of Artificial Sequence: Synthetic oligonucleotide
accuuucuguuugucugug

SEQ ID NO: 1989552 - RNA, 19 nt, Artificial Sequence
  Description of Artificial Sequence: Synthetic oligonucleotide
cacugaccgguuaauugga

SEQ ID NO: 1989553 - RNA, 19 nt, Artificial Sequence
  Description of Artificial Sequence: Synthetic oligonucleotide
caccagaggcuugucuccg

SEQ ID NO: 1989554 - RNA, 19 nt, Artificial Sequence
  Description of Artificial Sequence: Synthetic oligonucleotide
ugccuaguguucucuccuc

SEQ ID NO: 1989555 - RNA, 19 nt, Artificial Sequence
  Description of Artificial Sequence: Synthetic oligonucleotide
cacagcaguguuuggucga

SEQ ID NO: 1989556 - RNA, 19 nt, Artificial Sequence
  Description of Artificial Sequence: Synthetic oligonucleotide
uuagcagcccacgcugguc

SEQ ID NO: 1989557 - RNA, 19 nt, Artificial Sequence
  Description of Artificial Sequence: Synthetic oligonucleotide
ggugcccaagcaugcacgc

SEQ ID NO: 1989558 - RNA, 19 nt, Artificial Sequence
  Description of Artificial Sequence: Synthetic oligonucleotide
acgcuauggguggagccag

SEQ ID NO: 1989559 - RNA, 19 nt, Artificial Sequence
  Description of Artificial Sequence: Synthetic oligonucleotide
acccagguccaggccauac

SEQ ID NO: 1989560 - RNA, 19 nt, Artificial Sequence
  Description of Artificial Sequence: Synthetic oligonucleotide
cuggacuguaggcugagcu

SEQ ID NO: 1989561 - RNA, 19 nt, Artificial Sequence
  Description of Artificial Sequence: Synthetic oligonucleotide
ccuggaugaggccuguaac

SEQ ID NO: 1989562 - RNA, 19 nt, Artificial Sequence
  Description of Artificial Sequence: Synthetic oligonucleotide
cuugauauaggggcaccaa

SEQ ID NO: 1989563 - RNA, 19 nt, Artificial Sequence
  Description of Artificial Sequence: Synthetic oligonucleotide
gaguucugaggaaccagaa

SEQ ID NO: 1989564 - RNA, 19 nt, Artificial Sequence
  Description of Artificial Sequence: Synthetic oligonucleotide
cuguaguucuccucugucu

SEQ ID NO: 1989565 - RNA, 19 nt, Artificial Sequence
  Description of Artificial Sequence: Synthetic oligonucleotide
cacgcagggccacuucaug

SEQ ID NO: 1989566 - RNA, 19 nt, Artificial Sequence
  Description of Artificial Sequence: Synthetic oligonucleotide
agcaugcacgcagggccac

SEQ ID NO: 1989567 - RNA, 19 nt, Artificial Sequence
  Description of Artificial Sequence: Synthetic oligonucleotide
gcaccagaggcuugucucc

SEQ ID NO: 1989568 - RNA, 19 nt, Artificial Sequence
  Description of Artificial Sequence: Synthetic oligonucleotide
cuccucucccauagccgag

SEQ ID NO: 1989569 - RNA, 19 nt, Artificial Sequence
  Description of Artificial Sequence: Synthetic oligonucleotide
aggaucucuuugauggaaa

SEQ ID NO: 1989570 - RNA, 19 nt, Artificial Sequence
  Description of Artificial Sequence: Synthetic oligonucleotide
uccucucccauagccgagu

SEQ ID NO: 1989571 - RNA, 19 nt, Artificial Sequence
  Description of Artificial Sequence: Synthetic oligonucleotide
ggcuuaguaggcuuagccu

SEQ ID NO: 1989572 - RNA, 19 nt, Artificial Sequence
  Description of Artificial Sequence: Synthetic oligonucleotide
caucaugggcauggucacc

SEQ ID NO: 1989573 - RNA, 19 nt, Artificial Sequence
  Description of Artificial Sequence: Synthetic oligonucleotide
ccuuucuuagcagcccacg

SEQ ID NO: 1989574 - RNA, 19 nt, Artificial Sequence
  Description of Artificial Sequence: Synthetic oligonucleotide
gcuuaguaggcuuagccuu

SEQ ID NO: 1989575 - RNA, 19 nt, Artificial Sequence
  Description of Artificial Sequence: Synthetic oligonucleotide
gcuauggguggagccaggg

SEQ ID NO: 1989576 - RNA, 19 nt, Artificial Sequence
  Description of Artificial Sequence: Synthetic oligonucleotide
ggcuggaguucacagcuga

SEQ ID NO: 1989577 - RNA, 19 nt, Artificial Sequence
  Description of Artificial Sequence: Synthetic oligonucleotide
ugguugcugggcugucacu

SEQ ID NO: 1989578 - RNA, 19 nt, Artificial Sequence
  Description of Artificial Sequence: Synthetic oligonucleotide
augccaugccgcucacaca

SEQ ID NO: 1989579 - RNA, 19 nt, Artificial Sequence
  Description of Artificial Sequence: Synthetic oligonucleotide
caagcgcaggucccuggug

SEQ ID NO: 1989580 - RNA, 19 nt, Artificial Sequence
  Description of Artificial Sequence: Synthetic oligonucleotide
uugaugccaugccgcucac

SEQ ID NO: 1989581 - RNA, 19 nt, Artificial Sequence
  Description of Artificial Sequence: Synthetic oligonucleotide
cagcccacgcuggucagag

SEQ ID NO: 1989582 - RNA, 19 nt, Artificial Sequence
  Description of Artificial Sequence: Synthetic oligonucleotide
ggucuaggcucccugcaga

SEQ ID NO: 1989583 - RNA, 19 nt, Artificial Sequence
  Description of Artificial Sequence: Synthetic oligonucleotide
uuccaagcgcaggucccug

SEQ ID NO: 1989584 - RNA, 19 nt, Artificial Sequence
  Description of Artificial Sequence: Synthetic oligonucleotide
cauugaugccaugccgcuc

SEQ ID NO: 1989585 - RNA, 19 nt, Artificial Sequence
  Description of Artificial Sequence: Synthetic oligonucleotide
gcacgcuauggguggagcc

SEQ ID NO: 1989586 - RNA, 19 nt, Artificial Sequence
  Description of Artificial Sequence: Synthetic oligonucleotide
cacgcuauggguggagcca

SEQ ID NO: 1989587 - RNA, 19 nt, Artificial Sequence
  Description of Artificial Sequence: Synthetic oligonucleotide
aaaggccccuuugcguuuu

SEQ ID NO: 1989588 - RNA, 19 nt, Artificial Sequence
  Description of Artificial Sequence: Synthetic oligonucleotide
caggcuuaguaggcuuagc

SEQ ID NO: 1989589 - RNA, 19 nt, Artificial Sequence
  Description of Artificial Sequence: Synthetic oligonucleotide
agugguuucuggggcugga

SEQ ID NO: 1989590 - RNA, 19 nt, Artificial Sequence
  Description of Artificial Sequence: Synthetic oligonucleotide
gucuaggcucccugcagaa

SEQ ID NO: 1989591 - RNA, 19 nt, Artificial Sequence
  Description of Artificial Sequence: Synthetic oligonucleotide
uaccaccggccguaacacu

SEQ ID NO: 1989592 - RNA, 19 nt, Artificial Sequence
  Description of Artificial Sequence: Synthetic oligonucleotide
gccccauugaugccaugcc

SEQ ID NO: 1989593 - RNA, 19 nt, Artificial Sequence
  Description of Artificial Sequence: Synthetic oligonucleotide
gcgaagaaacucaggcagc

SEQ ID NO: 1989594 - RNA, 19 nt, Artificial Sequence
  Description of Artificial Sequence: Synthetic oligonucleotide
auaggggcaccaaggucca

SEQ ID NO: 1989595 - RNA, 19 nt, Artificial Sequence
  Description of Artificial Sequence: Synthetic oligonucleotide
gcuaugggcugaggcaggg

SEQ ID NO: 1989596 - RNA, 19 nt, Artificial Sequence
  Description of Artificial Sequence: Synthetic oligonucleotide
ccuaguguucucuccucuc

SEQ ID NO: 1989597 - RNA, 19 nt, Artificial Sequence
  Description of Artificial Sequence: Synthetic oligonucleotide
cuaugggcugaggcagggc

SEQ ID NO: 1989598 - RNA, 19 nt, Artificial Sequence
  Description of Artificial Sequence: Synthetic oligonucleotide
guggcaugacagaggugcc

SEQ ID NO: 1989599 - RNA, 19 nt, Artificial Sequence
  Description of Artificial Sequence: Synthetic oligonucleotide
cucuugcuaaagcccuuga

SEQ ID NO: 1989600 - RNA, 19 nt, Artificial Sequence
  Description of Artificial Sequence: Synthetic oligonucleotide
cucccgacgacagaggccu

SEQ ID NO: 1989601 - RNA, 19 nt, Artificial Sequence
  Description of Artificial Sequence: Synthetic oligonucleotide
caggucuaggcucccugca

SEQ ID NO: 1989602 - RNA, 19 nt, Artificial Sequence
  Description of Artificial Sequence: Synthetic oligonucleotide
gacgacagaggccuccauu

SEQ ID NO: 1989603 - RNA, 19 nt, Artificial Sequence
  Description of Artificial Sequence: Synthetic oligonucleotide
ggcaugacagaggugccca

SEQ ID NO: 1989604 - RNA, 19 nt, Artificial Sequence
  Description of Artificial Sequence: Synthetic oligonucleotide
aacccggacuuuacagcaa

SEQ ID NO: 1989605 - RNA, 19 nt, Artificial Sequence
  Description of Artificial Sequence: Synthetic oligonucleotide
uggcacgcuauggguggag

SEQ ID NO: 1989606 - RNA, 19 nt, Artificial Sequence
  Description of Artificial Sequence: Synthetic oligonucleotide
agcccuugacuggggcugg

SEQ ID NO: 1989607 - RNA, 19 nt, Artificial Sequence
  Description of Artificial Sequence: Synthetic oligonucleotide
gcgaguucugaggaaccag

SEQ ID NO: 1989608 - RNA, 19 nt, Artificial Sequence
  Description of Artificial Sequence: Synthetic oligonucleotide
cauagccgagugguuucug

SEQ ID NO: 1989609 - RNA, 19 nt, Artificial Sequence
  Description of Artificial Sequence: Synthetic oligonucleotide
cacacaauccagacaggau

SEQ ID NO: 1989610 - RNA, 19 nt, Artificial Sequence
  Description of Artificial Sequence: Synthetic oligonucleotide
ugacaggucuaggcucccu

SEQ ID NO: 1989611 - RNA, 19 nt, Artificial Sequence
  Description of Artificial Sequence: Synthetic oligonucleotide
gaugucccaucugggaggu

SEQ ID NO: 1989612 - RNA, 19 nt, Artificial Sequence
  Description of Artificial Sequence: Synthetic oligonucleotide
ugaugccaugccgcucaca

SEQ ID NO: 1989613 - RNA, 19 nt, Artificial Sequence
  Description of Artificial Sequence: Synthetic oligonucleotide
cggacuuuacagcaaccac

SEQ ID NO: 1989614 - RNA, 19 nt, Artificial Sequence
  Description of Artificial Sequence: Synthetic oligonucleotide
ccugcaggccucugacagg

SEQ ID NO: 1989615 - RNA, 19 nt, Artificial Sequence
  Description of Artificial Sequence: Synthetic oligonucleotide
ugucuccgcccaccaggaa

SEQ ID NO: 1989616 - RNA, 19 nt, Artificial Sequence
  Description of Artificial Sequence: Synthetic oligonucleotide
ucccacugaccgguuaauu

SEQ ID NO: 1989617 - RNA, 19 nt, Artificial Sequence
  Description of Artificial Sequence: Synthetic oligonucleotide
augacccgcuguccaucca

SEQ ID NO: 1989618 - RNA, 19 nt, Artificial Sequence
  Description of Artificial Sequence: Synthetic oligonucleotide
gagauccagccgaaacaaa

SEQ ID NO: 1989619 - RNA, 19 nt, Artificial Sequence
  Description of Artificial Sequence: Synthetic oligonucleotide
acugaccgguuaauuggaa

SEQ ID NO: 1989620 - RNA, 19 nt, Artificial Sequence
  Description of Artificial Sequence: Synthetic oligonucleotide
gucgagccuuaucucucuc

SEQ ID NO: 1989621 - RNA, 19 nt, Artificial Sequence
  Description of Artificial Sequence: Synthetic oligonucleotide
ugggaccgcccggugcucc

SEQ ID NO: 1989622 - RNA, 19 nt, Artificial Sequence
  Description of Artificial Sequence: Synthetic oligonucleotide
ggcuggacaaggcgaguuc

SEQ ID NO: 1989623 - RNA, 19 nt, Artificial Sequence
  Description of Artificial Sequence: Synthetic oligonucleotide
cugacaggucuaggcuccc

SEQ ID NO: 1989624 - RNA, 19 nt, Artificial Sequence
  Description of Artificial Sequence: Synthetic oligonucleotide
gcugggcuggacaaggcga

SEQ ID NO: 1989625 - RNA, 19 nt, Artificial Sequence
  Description of Artificial Sequence: Synthetic oligonucleotide
gacuugccuaguguucucu

SEQ ID NO: 1989626 - RNA, 19 nt, Artificial Sequence
  Description of Artificial Sequence: Synthetic oligonucleotide
ucccaucugggagguggac

SEQ ID NO: 1989627 - RNA, 19 nt, Artificial Sequence
  Description of Artificial Sequence: Synthetic oligonucleotide
ccgguuaauuggaacgaga

SEQ ID NO: 1989628 - RNA, 19 nt, Artificial Sequence
  Description of Artificial Sequence: Synthetic oligonucleotide
ccgcucacacaauccagac

SEQ ID NO: 1989629 - RNA, 19 nt, Artificial Sequence
  Description of Artificial Sequence: Synthetic oligonucleotide
cuggggcugggcuggacaa

SEQ ID NO: 1989630 - RNA, 19 nt, Artificial Sequence
  Description of Artificial Sequence: Synthetic oligonucleotide
gauggaaaacccggacuuu

SEQ ID NO: 1989631 - RNA, 19 nt, Artificial Sequence
  Description of Artificial Sequence: Synthetic oligonucleotide
gcuugucuccgcccaccag

SEQ ID NO: 1989632 - RNA, 19 nt, Artificial Sequence
  Description of Artificial Sequence: Synthetic oligonucleotide
cuguggacacuuucccucu

SEQ ID NO: 1989633 - RNA, 19 nt, Artificial Sequence
  Description of Artificial Sequence: Synthetic oligonucleotide
ugagucccacugaccgguu

SEQ ID NO: 1989634 - RNA, 19 nt, Artificial Sequence
  Description of Artificial Sequence: Synthetic oligonucleotide
ggcuaugggcugaggcagg

SEQ ID NO: 1989635 - RNA, 19 nt, Artificial Sequence
  Description of Artificial Sequence: Synthetic oligonucleotide
cagcaguguuuggucgagc

SEQ ID NO: 1989636 - RNA, 19 nt, Artificial Sequence
  Description of Artificial Sequence: Synthetic oligonucleotide
gcuggaguucacagcugag

SEQ ID NO: 1989637 - RNA, 19 nt, Artificial Sequence
  Description of Artificial Sequence: Synthetic oligonucleotide
ggacucccgacgacagagg

SEQ ID NO: 1989638 - RNA, 19 nt, Artificial Sequence
  Description of Artificial Sequence: Synthetic oligonucleotide
uggguggagccuggacugu

SEQ ID NO: 1989639 - RNA, 19 nt, Artificial Sequence
  Description of Artificial Sequence: Synthetic oligonucleotide
gucucaccagcaggcuacc

SEQ ID NO: 1989640 - RNA, 19 nt, Artificial Sequence
  Description of Artificial Sequence: Synthetic oligonucleotide
ccacacaggaugucccauc

SEQ ID NO: 1989641 - RNA, 19 nt, Artificial Sequence
  Description of Artificial Sequence: Synthetic oligonucleotide
gugacaggcuuaguaggcu

SEQ ID NO: 1989642 - RNA, 19 nt, Artificial Sequence
  Description of Artificial Sequence: Synthetic oligonucleotide
gagucccacugaccgguua

SEQ ID NO: 1989643 - RNA, 19 nt, Artificial Sequence
  Description of Artificial Sequence: Synthetic oligonucleotide
ggucagaguuagacuugcc

SEQ ID NO: 1989644 - RNA, 19 nt, Artificial Sequence
  Description of Artificial Sequence: Synthetic oligonucleotide
cagucucaccagcaggcua

SEQ ID NO: 1989645 - RNA, 19 nt, Artificial Sequence
  Description of Artificial Sequence: Synthetic oligonucleotide
gacccgcuguccauccaga

SEQ ID NO: 1989646 - RNA, 19 nt, Artificial Sequence
  Description of Artificial Sequence: Synthetic oligonucleotide
gcccaagcaugcacgcagg

SEQ ID NO: 1989647 - RNA, 19 nt, Artificial Sequence
  Description of Artificial Sequence: Synthetic oligonucleotide
gaacgagauccagccgaaa

SEQ ID NO: 1989648 - RNA, 19 nt, Artificial Sequence
  Description of Artificial Sequence: Synthetic oligonucleotide
cacuguaguucuccucugu

SEQ ID NO: 1989649 - RNA, 19 nt, Artificial Sequence
  Description of Artificial Sequence: Synthetic oligonucleotide
ggcacgcuauggguggagc

SEQ ID NO: 1989650 - RNA, 19 nt, Artificial Sequence
  Description of Artificial Sequence: Synthetic oligonucleotide
ugcaggccucugacagguc

SEQ ID NO: 1989651 - RNA, 19 nt, Artificial Sequence
  Description of Artificial Sequence: Synthetic oligonucleotide
ggcuauggguggagccugg

SEQ ID NO: 1989652 - RNA, 19 nt, Artificial Sequence
  Description of Artificial Sequence: Synthetic oligonucleotide
ccaggaugacccgcugucc

SEQ ID NO: 1989653 - RNA, 19 nt, Artificial Sequence
  Description of Artificial Sequence: Synthetic oligonucleotide
cuuagccuugagucccacu

SEQ ID NO: 1989654 - RNA, 19 nt, Artificial Sequence
  Description of Artificial Sequence: Synthetic oligonucleotide
gcucucuugcuaaagcccu

SEQ ID NO: 1989655 - RNA, 19 nt, Artificial Sequence
  Description of Artificial Sequence: Synthetic oligonucleotide
ggcgaguucugaggaacca

SEQ ID NO: 1989656 - RNA, 19 nt, Artificial Sequence
  Description of Artificial Sequence: Synthetic oligonucleotide
ccggacuuuacagcaacca

SEQ ID NO: 1989657 - RNA, 19 nt, Artificial Sequence
  Description of Artificial Sequence: Synthetic oligonucleotide
gcaggccucugacaggucu

SEQ ID NO: 1989658 - RNA, 19 nt, Artificial Sequence
  Description of Artificial Sequence: Synthetic oligonucleotide
ggaugacccgcuguccauc

SEQ ID NO: 1989659 - RNA, 19 nt, Artificial Sequence
  Description of Artificial Sequence: Synthetic oligonucleotide
cugcaggccucugacaggu

SEQ ID NO: 1989660 - RNA, 19 nt, Artificial Sequence
  Description of Artificial Sequence: Synthetic oligonucleotide
caggccucugacaggucua

SEQ ID NO: 1989661 - RNA, 19 nt, Artificial Sequence
  Description of Artificial Sequence: Synthetic oligonucleotide
auggcacgcuaugggugga

SEQ ID NO: 1989662 - RNA, 19 nt, Artificial Sequence
  Description of Artificial Sequence: Synthetic oligonucleotide
ggaacgagauccagccgaa

SEQ ID NO: 1989663 - RNA, 19 nt, Artificial Sequence
  Description of Artificial Sequence: Synthetic oligonucleotide
cugcaaggaucccucuccu

SEQ ID NO: 1989664 - RNA, 19 nt, Artificial Sequence
  Description of Artificial Sequence: Synthetic oligonucleotide
cuggggcuaugggcugagg

SEQ ID NO: 1989665 - RNA, 19 nt, Artificial Sequence
  Description of Artificial Sequence: Synthetic oligonucleotide
gugcccaagcaugcacgca

SEQ ID NO: 1989666 - RNA, 19 nt, Artificial Sequence
  Description of Artificial Sequence: Synthetic oligonucleotide
ggucgagccuuaucucucu

SEQ ID NO: 1989667 - RNA, 19 nt, Artificial Sequence
  Description of Artificial Sequence: Synthetic oligonucleotide
ccucugacaggucuaggcu

SEQ ID NO: 1989668 - RNA, 19 nt, Artificial Sequence
  Description of Artificial Sequence: Synthetic oligonucleotide
agcccacgcuggucagagu

SEQ ID NO: 1989669 - RNA, 19 nt, Artificial Sequence
  Description of Artificial Sequence: Synthetic oligonucleotide
ggaguucacagcugagcuu

SEQ ID NO: 1989670 - RNA, 19 nt, Artificial Sequence
  Description of Artificial Sequence: Synthetic oligonucleotide
accggccguaacacuucug

SEQ ID NO: 1989671 - RNA, 19 nt, Artificial Sequence
  Description of Artificial Sequence: Synthetic oligonucleotide
cgguuaauuggaacgagau

SEQ ID NO: 1989672 - RNA, 19 nt, Artificial Sequence
  Description of Artificial Sequence: Synthetic oligonucleotide
cccgacgacagaggccucc

SEQ ID NO: 1989673 - RNA, 19 nt, Artificial Sequence
  Description of Artificial Sequence: Synthetic oligonucleotide
cuccgcccaccaggaagag

SEQ ID NO: 1989674 - RNA, 19 nt, Artificial Sequence
  Description of Artificial Sequence: Synthetic oligonucleotide
cgagauccagccgaaacaa

SEQ ID NO: 1989675 - RNA, 19 nt, Artificial Sequence
  Description of Artificial Sequence: Synthetic oligonucleotide
gcauggucaccaugguccu

SEQ ID NO: 1989676 - RNA, 19 nt, Artificial Sequence
  Description of Artificial Sequence: Synthetic oligonucleotide
ccugggacucccgacgaca

SEQ ID NO: 1989677 - RNA, 19 nt, Artificial Sequence
  Description of Artificial Sequence: Synthetic oligonucleotide
gcaggcuacccagguccag

SEQ ID NO: 1989678 - RNA, 19 nt, Artificial Sequence
  Description of Artificial Sequence: Synthetic oligonucleotide
ugacuggggcugggcugga

SEQ ID NO: 1989679 - RNA, 19 nt, Artificial Sequence
  Description of Artificial Sequence: Synthetic oligonucleotide
ucccgacgacagaggccuc

SEQ ID NO: 1989680 - RNA, 19 nt, Artificial Sequence
  Description of Artificial Sequence: Synthetic oligonucleotide
ccggugcuccuguuccuug

SEQ ID NO: 1989681 - RNA, 19 nt, Artificial Sequence
  Description of Artificial Sequence: Synthetic oligonucleotide
gcuguccauccagacuuga

SEQ ID NO: 1989682 - RNA, 19 nt, Artificial Sequence
  Description of Artificial Sequence: Synthetic oligonucleotide
ccgcuguccauccagacuu

SEQ ID NO: 1989683 - RNA, 19 nt, Artificial Sequence
  Description of Artificial Sequence: Synthetic oligonucleotide
gccagggcuauggguggag

SEQ ID NO: 1989684 - RNA, 19 nt, Artificial Sequence
  Description of Artificial Sequence: Synthetic oligonucleotide
ccggccguaacacuucugu

SEQ ID NO: 1989685 - RNA, 19 nt, Artificial Sequence
  Description of Artificial Sequence: Synthetic oligonucleotide
cggccguaacacuucugug

SEQ ID NO: 1989686 - RNA, 19 nt, Artificial Sequence
  Description of Artificial Sequence: Synthetic oligonucleotide
gcccacgcuggucagaguu

SEQ ID NO: 1989687 - RNA, 19 nt, Artificial Sequence
  Description of Artificial Sequence: Synthetic oligonucleotide
ccauugaugccaugccgcu

SEQ ID NO: 1989688 - RNA, 19 nt, Artificial Sequence
  Description of Artificial Sequence: Synthetic oligonucleotide
cucucuugcuaaagcccuu

SEQ ID NO: 1989689 - RNA, 19 nt, Artificial Sequence
  Description of Artificial Sequence: Synthetic oligonucleotide
gcaugacagaggugcccaa

SEQ ID NO: 1989690 - RNA, 19 nt, Artificial Sequence
  Description of Artificial Sequence: Synthetic oligonucleotide
ggcuaccaccggccguaac

SEQ ID NO: 1989691 - RNA, 19 nt, Artificial Sequence
  Description of Artificial Sequence: Synthetic oligonucleotide
ccgaaacaaaguacgcuuu

SEQ ID NO: 1989692 - RNA, 19 nt, Artificial Sequence
  Description of Artificial Sequence: Synthetic oligonucleotide
ccguaacacuucugugaca

SEQ ID NO: 1989693 - RNA, 19 nt, Artificial Sequence
  Description of Artificial Sequence: Synthetic oligonucleotide
augucccaucugggaggug

SEQ ID NO: 1989694 - RNA, 19 nt, Artificial Sequence
  Description of Artificial Sequence: Synthetic oligonucleotide
gcuuagccuugagucccac

SEQ ID NO: 1989695 - RNA, 19 nt, Artificial Sequence
  Description of Artificial Sequence: Synthetic oligonucleotide
gaccgcccggugcuccugu

SEQ ID NO: 1989696 - RNA, 19 nt, Artificial Sequence
  Description of Artificial Sequence: Synthetic oligonucleotide
gcuauggguggagccugga

SEQ ID NO: 1989697 - RNA, 19 nt, Artificial Sequence
  Description of Artificial Sequence: Synthetic oligonucleotide
guuugucuguggacacuuu

SEQ ID NO: 1989698 - RNA, 19 nt, Artificial Sequence
  Description of Artificial Sequence: Synthetic oligonucleotide
accgcccggugcuccuguu

SEQ ID NO: 1989699 - RNA, 19 nt, Artificial Sequence
  Description of Artificial Sequence: Synthetic oligonucleotide
caccggccguaacacuucu

SEQ ID NO: 1989700 - RNA, 19 nt, Artificial Sequence
  Description of Artificial Sequence: Synthetic oligonucleotide
gcccuugacuggggcuggg

SEQ ID NO: 1989701 - RNA, 19 nt, Artificial Sequence
  Description of Artificial Sequence: Synthetic oligonucleotide
cugggaccgcccggugcuc

SEQ ID NO: 1989702 - RNA, 19 nt, Artificial Sequence
  Description of Artificial Sequence: Synthetic oligonucleotide
cgcuguccauccagacuug

SEQ ID NO: 1989703 - RNA, 19 nt, Artificial Sequence
  Description of Artificial Sequence: Synthetic oligonucleotide
cccugggacucccgacgac

SEQ ID NO: 1989704 - RNA, 19 nt, Artificial Sequence
  Description of Artificial Sequence: Synthetic oligonucleotide
cucccauagccgagugguu

SEQ ID NO: 1989705 - RNA, 19 nt, Artificial Sequence
  Description of Artificial Sequence: Synthetic oligonucleotide
cccgcuguccauccagacu

SEQ ID NO: 1989706 - RNA, 19 nt, Artificial Sequence
  Description of Artificial Sequence: Synthetic oligonucleotide
cuucugugacaggcuuagu

SEQ ID NO: 1989707 - RNA, 19 nt, Artificial Sequence
  Description of Artificial Sequence: Synthetic oligonucleotide
ccgagugguuucuggggcu

SEQ ID NO: 1989708 - RNA, 19 nt, Artificial Sequence
  Description of Artificial Sequence: Synthetic oligonucleotide
guguuuggucgagccuuau

SEQ ID NO: 1989709 - RNA, 19 nt, Artificial Sequence
  Description of Artificial Sequence: Synthetic oligonucleotide
aggccuccauuggcaugaa

SEQ ID NO: 1989710 - RNA, 19 nt, Artificial Sequence
  Description of Artificial Sequence: Synthetic oligonucleotide
ggaccgcccggugcuccug

SEQ ID NO: 1989711 - RNA, 19 nt, Artificial Sequence
  Description of Artificial Sequence: Synthetic oligonucleotide
cgcuggucagaguuagacu

SEQ ID NO: 1989712 - RNA, 19 nt, Artificial Sequence
  Description of Artificial Sequence: Synthetic oligonucleotide
ccaagcgcaggucccuggu

SEQ ID NO: 1989713 - RNA, 19 nt, Artificial Sequence
  Description of Artificial Sequence: Synthetic oligonucleotide
ccgcccggugcuccuguuc

SEQ ID NO: 1989714 - RNA, 19 nt, Artificial Sequence
  Description of Artificial Sequence: Synthetic oligonucleotide
gggcuggacaaggcgaguu

SEQ ID NO: 1989715 - RNA, 19 nt, Artificial Sequence
  Description of Artificial Sequence: Synthetic oligonucleotide
ccgacgacagaggccucca

SEQ ID NO: 1989716 - RNA, 19 nt, Artificial Sequence
  Description of Artificial Sequence: Synthetic oligonucleotide
cauggucaccaugguccuu

SEQ ID NO: 1989717 - RNA, 19 nt, Artificial Sequence
  Description of Artificial Sequence: Synthetic oligonucleotide
gggaccgcccggugcuccu

SEQ ID NO: 1989718 - RNA, 19 nt, Artificial Sequence
  Description of Artificial Sequence: Synthetic oligonucleotide
ggucaccaugguccuucuu

SEQ ID NO: 1989719 - RNA, 19 nt, Artificial Sequence
  Description of Artificial Sequence: Synthetic oligonucleotide
ccauagccgagugguuucu

SEQ ID NO: 1989720 - RNA, 19 nt, Artificial Sequence
  Description of Artificial Sequence: Synthetic oligonucleotide
gcaugcacgcagggccacu

SEQ ID NO: 1989721 - RNA, 19 nt, Artificial Sequence
  Description of Artificial Sequence: Synthetic oligonucleotide
gccaugccgcucacacaau

SEQ ID NO: 1989722 - RNA, 19 nt, Artificial Sequence
  Description of Artificial Sequence: Synthetic oligonucleotide
cccggugcuccuguuccuu

SEQ ID NO: 1989723 - RNA, 19 nt, Artificial Sequence
  Description of Artificial Sequence: Synthetic oligonucleotide
cgacgacagaggccuccau

SEQ ID NO: 1989724 - RNA, 19 nt, Artificial Sequence
  Description of Artificial Sequence: Synthetic oligonucleotide
aaaacuuuaucuuaagugc

SEQ ID NO: 1989725 - RNA, 19 nt, Artificial Sequence
  Description of Artificial Sequence: Synthetic oligonucleotide
ugaaaauuggacauagucg

SEQ ID NO: 1989726 - RNA, 19 nt, Artificial Sequence
  Description of Artificial Sequence: Synthetic oligonucleotide
uaauuuaagucgaacaugc

SEQ ID NO: 1989727 - RNA, 19 nt, Artificial Sequence
  Description of Artificial Sequence: Synthetic oligonucleotide
aaugucauuaucauacagc

SEQ ID NO: 1989728 - RNA, 19 nt, Artificial Sequence
  Description of Artificial Sequence: Synthetic oligonucleotide
augaaaauuggacauaguc

SEQ ID NO: 1989729 - RNA, 19 nt, Artificial Sequence
  Description of Artificial Sequence: Synthetic oligonucleotide
aaucuaauugcauucguug

SEQ ID NO: 1989730 - RNA, 19 nt, Artificial Sequence
  Description of Artificial Sequence: Synthetic oligonucleotide
aaaauaacccguaagacca

SEQ ID NO: 1989731 - RNA, 19 nt, Artificial Sequence
  Description of Artificial Sequence: Synthetic oligonucleotide
cucuguauaauauaugacc

SEQ ID NO: 1989732 - RNA, 19 nt, Artificial Sequence
  Description of Artificial Sequence: Synthetic oligonucleotide
uaguuugucgcucaaagcc

SEQ ID NO: 1989733 - RNA, 19 nt, Artificial Sequence
  Description of Artificial Sequence: Synthetic oligonucleotide
uauaauuuaagucgaacau

SEQ ID NO: 1989734 - RNA, 19 nt, Artificial Sequence
  Description of Artificial Sequence: Synthetic oligonucleotide
ucuguauaauauaugaccu

SEQ ID NO: 1989735 - RNA, 19 nt, Artificial Sequence
  Description of Artificial Sequence: Synthetic oligonucleotide
uguaguuugucgcucaaag

SEQ ID NO: 1989736 - RNA, 19 nt, Artificial Sequence
  Description of Artificial Sequence: Synthetic oligonucleotide
ugaauugggaaaauuauau

SEQ ID NO: 1989737 - RNA, 19 nt, Artificial Sequence
  Description of Artificial Sequence: Synthetic oligonucleotide
auaacaaucacucuguaua

SEQ ID NO: 1989738 - RNA, 19 nt, Artificial Sequence
  Description of Artificial Sequence: Synthetic oligonucleotide
uucacauggagaaugggag

SEQ ID NO: 1989739 - RNA, 19 nt, Artificial Sequence
  Description of Artificial Sequence: Synthetic oligonucleotide
uguacugugacaagugucc

SEQ ID NO: 1989740 - RNA, 19 nt, Artificial Sequence
  Description of Artificial Sequence: Synthetic oligonucleotide
aacaaagguagucaacaag

SEQ ID NO: 1989741 - RNA, 19 nt, Artificial Sequence
  Description of Artificial Sequence: Synthetic oligonucleotide
aacauuaacaugcaguauu

SEQ ID NO: 1989742 - RNA, 19 nt, Artificial Sequence
  Description of Artificial Sequence: Synthetic oligonucleotide
uaaauguaauucaagucug

SEQ ID NO: 1989743 - RNA, 19 nt, Artificial Sequence
  Description of Artificial Sequence: Synthetic oligonucleotide
aguuuugcaucaucaaccc

SEQ ID NO: 1989744 - RNA, 19 nt, Artificial Sequence
  Description of Artificial Sequence: Synthetic oligonucleotide
aaugggagcguacuaacug

SEQ ID NO: 1989745 - RNA, 19 nt, Artificial Sequence
  Description of Artificial Sequence: Synthetic oligonucleotide
uaagaaaucuucugcauga

SEQ ID NO: 1989746 - RNA, 19 nt, Artificial Sequence
  Description of Artificial Sequence: Synthetic oligonucleotide
uguaaaucuaauugcauuc

SEQ ID NO: 1989747 - RNA, 19 nt, Artificial Sequence
  Description of Artificial Sequence: Synthetic oligonucleotide
uuuaagucgaacaugccau

SEQ ID NO: 1989748 - RNA, 19 nt, Artificial Sequence
  Description of Artificial Sequence: Synthetic oligonucleotide
uaaggcuuuaucuugagau

SEQ ID NO: 1989749 - RNA, 19 nt, Artificial Sequence
  Description of Artificial Sequence: Synthetic oligonucleotide
aagucgaacaugccaugcc

SEQ ID NO: 1989750 - RNA, 19 nt, Artificial Sequence
  Description of Artificial Sequence: Synthetic oligonucleotide
aagucggguaaauaaguag

SEQ ID NO: 1989751 - RNA, 19 nt, Artificial Sequence
  Description of Artificial Sequence: Synthetic oligonucleotide
auaacgaaugccuucucuc

SEQ ID NO: 1989752 - RNA, 19 nt, Artificial Sequence
  Description of Artificial Sequence: Synthetic oligonucleotide
uauuuguguguaacaaagg

SEQ ID NO: 1989753 - RNA, 19 nt, Artificial Sequence
  Description of Artificial Sequence: Synthetic oligonucleotide
uuauucacauggagaaugg

SEQ ID NO: 1989754 - RNA, 19 nt, Artificial Sequence
  Description of Artificial Sequence: Synthetic oligonucleotide
accuuauuaaaacuuuauc

SEQ ID NO: 1989755 - RNA, 19 nt, Artificial Sequence
  Description of Artificial Sequence: Synthetic oligonucleotide
gaaaauuggacauagucgu

SEQ ID NO: 1989756 - RNA, 19 nt, Artificial Sequence
  Description of Artificial Sequence: Synthetic oligonucleotide
cauaaauguaauucaaguc

SEQ ID NO: 1989757 - RNA, 19 nt, Artificial Sequence
  Description of Artificial Sequence: Synthetic oligonucleotide
augucauuaucauacagcu

SEQ ID NO: 1989758 - RNA, 19 nt, Artificial Sequence
  Description of Artificial Sequence: Synthetic oligonucleotide
uaccaugagaauauguucu

SEQ ID NO: 1989759 - RNA, 19 nt, Artificial Sequence
  Description of Artificial Sequence: Synthetic oligonucleotide
aauucaagucuguaaggcu

SEQ ID NO: 1989760 - RNA, 19 nt, Artificial Sequence
  Description of Artificial Sequence: Synthetic oligonucleotide
aagcuuaccugucgcaugg

SEQ ID NO: 1989761 - RNA, 19 nt, Artificial Sequence
  Description of Artificial Sequence: Synthetic oligonucleotide
agucggguaaauaaguagc

SEQ ID NO: 1989762 - RNA, 19 nt, Artificial Sequence
  Description of Artificial Sequence: Synthetic oligonucleotide
guauuuguguguaacaaag

SEQ ID NO: 1989763 - RNA, 19 nt, Artificial Sequence
  Description of Artificial Sequence: Synthetic oligonucleotide
ucggaauaaaauaaauguc

SEQ ID NO: 1989764 - RNA, 19 nt, Artificial Sequence
  Description of Artificial Sequence: Synthetic oligonucleotide
uaauucaagucuguaaggc

SEQ ID NO: 1989765 - RNA, 19 nt, Artificial Sequence
  Description of Artificial Sequence: Synthetic oligonucleotide
ucucagauggcaucugagg

SEQ ID NO: 1989766 - RNA, 19 nt, Artificial Sequence
  Description of Artificial Sequence: Synthetic oligonucleotide
guaauucaagucuguaagg

SEQ ID NO: 1989767 - RNA, 19 nt, Artificial Sequence
  Description of Artificial Sequence: Synthetic oligonucleotide
aauuacaucuguugucagu

SEQ ID NO: 1989768 - RNA, 19 nt, Artificial Sequence
  Description of Artificial Sequence: Synthetic oligonucleotide
guaugcauuugucagauca

SEQ ID NO: 1989769 - RNA, 19 nt, Artificial Sequence
  Description of Artificial Sequence: Synthetic oligonucleotide
aaauuggacauagucguug

SEQ ID NO: 1989770 - RNA, 19 nt, Artificial Sequence
  Description of Artificial Sequence: Synthetic oligonucleotide
uauucgagguugaucaggc

SEQ ID NO: 1989771 - RNA, 19 nt, Artificial Sequence
  Description of Artificial Sequence: Synthetic oligonucleotide
acaaguguccuccucugcg

SEQ ID NO: 1989772 - RNA, 19 nt, Artificial Sequence
  Description of Artificial Sequence: Synthetic oligonucleotide
guagucaacaaguucucag

SEQ ID NO: 1989773 - RNA, 19 nt, Artificial Sequence
  Description of Artificial Sequence: Synthetic oligonucleotide
gguuauucgagguugauca

SEQ ID NO: 1989774 - RNA, 19 nt, Artificial Sequence
  Description of Artificial Sequence: Synthetic oligonucleotide
aauuuaagucgaacaugcc

SEQ ID NO: 1989775 - RNA, 19 nt, Artificial Sequence
  Description of Artificial Sequence: Synthetic oligonucleotide
uguguaacaaagguaguca

SEQ ID NO: 1989776 - RNA, 19 nt, Artificial Sequence
  Description of Artificial Sequence: Synthetic oligonucleotide
auaauuuaagucgaacaug

SEQ ID NO: 1989777 - RNA, 19 nt, Artificial Sequence
  Description of Artificial Sequence: Synthetic oligonucleotide
ucuccauuuucacugguga

SEQ ID NO: 1989778 - RNA, 19 nt, Artificial Sequence
  Description of Artificial Sequence: Synthetic oligonucleotide
agaaugggagcguacuaac

SEQ ID NO: 1989779 - RNA, 19 nt, Artificial Sequence
  Description of Artificial Sequence: Synthetic oligonucleotide
augaugugggaccugauga

SEQ ID NO: 1989780 - RNA, 19 nt, Artificial Sequence
  Description of Artificial Sequence: Synthetic oligonucleotide
uaagaauggugacuccucc

SEQ ID NO: 1989781 - RNA, 19 nt, Artificial Sequence
  Description of Artificial Sequence: Synthetic oligonucleotide
guaaaucuaauugcauucg

SEQ ID NO: 1989782 - RNA, 19 nt, Artificial Sequence
  Description of Artificial Sequence: Synthetic oligonucleotide
aacaacauuccucggaaua

SEQ ID NO: 1989783 - RNA, 19 nt, Artificial Sequence
  Description of Artificial Sequence: Synthetic oligonucleotide
uguauaauauaugaccuua

SEQ ID NO: 1989784 - RNA, 19 nt, Artificial Sequence
  Description of Artificial Sequence: Synthetic oligonucleotide
aagaccagggccauaaaug

SEQ ID NO: 1989785 - RNA, 19 nt, Artificial Sequence
  Description of Artificial Sequence: Synthetic oligonucleotide
uguaaguaccaugagaaua

SEQ ID NO: 1989786 - RNA, 19 nt, Artificial Sequence
  Description of Artificial Sequence: Synthetic oligonucleotide
cucggaauaaaauaaaugu

SEQ ID NO: 1989787 - RNA, 19 nt, Artificial Sequence
  Description of Artificial Sequence: Synthetic oligonucleotide
ucaucaacccacuggacac

SEQ ID NO: 1989788 - RNA, 19 nt, Artificial Sequence
  Description of Artificial Sequence: Synthetic oligonucleotide
uauaauauaugaccuuauu

SEQ ID NO: 1989789 - RNA, 19 nt, Artificial Sequence
  Description of Artificial Sequence: Synthetic oligonucleotide
uuaccugucgcauggggcc

SEQ ID NO: 1989790 - RNA, 19 nt, Artificial Sequence
  Description of Artificial Sequence: Synthetic oligonucleotide
cauuugucagaucaauuac

SEQ ID NO: 1989791 - RNA, 19 nt, Artificial Sequence
  Description of Artificial Sequence: Synthetic oligonucleotide
uugaacuacuucuaagaaa

SEQ ID NO: 1989792 - RNA, 19 nt, Artificial Sequence
  Description of Artificial Sequence: Synthetic oligonucleotide
uggugaauugggaaaauua

SEQ ID NO: 1989793 - RNA, 19 nt, Artificial Sequence
  Description of Artificial Sequence: Synthetic oligonucleotide
cugaugaacaacauuccuc

SEQ ID NO: 1989794 - RNA, 19 nt, Artificial Sequence
  Description of Artificial Sequence: Synthetic oligonucleotide
caugccaaacugcauacag

SEQ ID NO: 1989795 - RNA, 19 nt, Artificial Sequence
  Description of Artificial Sequence: Synthetic oligonucleotide
uacuucuaagaaaucuucu

SEQ ID NO: 1989796 - RNA, 19 nt, Artificial Sequence
  Description of Artificial Sequence: Synthetic oligonucleotide
aguauuaaaauagguauuu

SEQ ID NO: 1989797 - RNA, 19 nt, Artificial Sequence
  Description of Artificial Sequence: Synthetic oligonucleotide
agucguugucucuauaucu

SEQ ID NO: 1989798 - RNA, 19 nt, Artificial Sequence
  Description of Artificial Sequence: Synthetic oligonucleotide
aauaacccguaagaccagg

SEQ ID NO: 1989799 - RNA, 19 nt, Artificial Sequence
  Description of Artificial Sequence: Synthetic oligonucleotide
gucucuauaucuuucuuuc

SEQ ID NO: 1989800 - RNA, 19 nt, Artificial Sequence
  Description of Artificial Sequence: Synthetic oligonucleotide
uuaagaauggugacuccuc

SEQ ID NO: 1989801 - RNA, 19 nt, Artificial Sequence
  Description of Artificial Sequence: Synthetic oligonucleotide
auguaaaucuaauugcauu

SEQ ID NO: 1989802 - RNA, 19 nt, Artificial Sequence
  Description of Artificial Sequence: Synthetic oligonucleotide
aucuaauugcauucguuga

SEQ ID NO: 1989803 - RNA, 19 nt, Artificial Sequence
  Description of Artificial Sequence: Synthetic oligonucleotide
agcugauuaaguuuugcau

SEQ ID NO: 1989804 - RNA, 19 nt, Artificial Sequence
  Description of Artificial Sequence: Synthetic oligonucleotide
cacacugcgacaguggagg

SEQ ID NO: 1989805 - RNA, 19 nt, Artificial Sequence
  Description of Artificial Sequence: Synthetic oligonucleotide
uuauuguucugguccaaga

SEQ ID NO: 1989806 - RNA, 19 nt, Artificial Sequence
  Description of Artificial Sequence: Synthetic oligonucleotide
uucacuggugaauugggaa

SEQ ID NO: 1989807 - RNA, 19 nt, Artificial Sequence
  Description of Artificial Sequence: Synthetic oligonucleotide
cuuaccugucgcauggggc

SEQ ID NO: 1989808 - RNA, 19 nt, Artificial Sequence
  Description of Artificial Sequence: Synthetic oligonucleotide
uucaucaacggcucccacc

SEQ ID NO: 1989809 - RNA, 19 nt, Artificial Sequence
  Description of Artificial Sequence: Synthetic oligonucleotide
ucacucuguauaauauaug

SEQ ID NO: 1989810 - RNA, 19 nt, Artificial Sequence
  Description of Artificial Sequence: Synthetic oligonucleotide
agugcuuuauuguucuggu

SEQ ID NO: 1989811 - RNA, 19 nt, Artificial Sequence
  Description of Artificial Sequence: Synthetic oligonucleotide
ucagaucaauuacaucugu

SEQ ID NO: 1989812 - RNA, 19 nt, Artificial Sequence
  Description of Artificial Sequence: Synthetic oligonucleotide
ugcgugguauaauuuaagu

SEQ ID NO: 1989813 - RNA, 19 nt, Artificial Sequence
  Description of Artificial Sequence: Synthetic oligonucleotide
uuggacauagucguugucu

SEQ ID NO: 1989814 - RNA, 19 nt, Artificial Sequence
  Description of Artificial Sequence: Synthetic oligonucleotide
agaaacuuguacugugaca

SEQ ID NO: 1989815 - RNA, 19 nt, Artificial Sequence
  Description of Artificial Sequence: Synthetic oligonucleotide
uaacaaucacucuguauaa

SEQ ID NO: 1989816 - RNA, 19 nt, Artificial Sequence
  Description of Artificial Sequence: Synthetic oligonucleotide
ugucauuaucauacagcug

SEQ ID NO: 1989817 - RNA, 19 nt, Artificial Sequence
  Description of Artificial Sequence: Synthetic oligonucleotide
uuaucuuaagugcuuuauu

SEQ ID NO: 1989818 - RNA, 19 nt, Artificial Sequence
  Description of Artificial Sequence: Synthetic oligonucleotide
gauuaaguuuugcaucauc

SEQ ID NO: 1989819 - RNA, 19 nt, Artificial Sequence
  Description of Artificial Sequence: Synthetic oligonucleotide
uaacccguaagaccagggc

SEQ ID NO: 1989820 - RNA, 19 nt, Artificial Sequence
  Description of Artificial Sequence: Synthetic oligonucleotide
auagucguugucucuauau

SEQ ID NO: 1989821 - RNA, 19 nt, Artificial Sequence
  Description of Artificial Sequence: Synthetic oligonucleotide
uaauugcauucguugaacu

SEQ ID NO: 1989822 - RNA, 19 nt, Artificial Sequence
  Description of Artificial Sequence: Synthetic oligonucleotide
gcugaauccuggcauaacg

SEQ ID NO: 1989823 - RNA, 19 nt, Artificial Sequence
  Description of Artificial Sequence: Synthetic oligonucleotide
ugaauccuggcauaacgaa

SEQ ID NO: 1989824 - RNA, 19 nt, Artificial Sequence
  Description of Artificial Sequence: Synthetic oligonucleotide
acaaucacucuguauaaua

SEQ ID NO: 1989825 - RNA, 19 nt, Artificial Sequence
  Description of Artificial Sequence: Synthetic oligonucleotide
ucugcgugguauaauuuaa

SEQ ID NO: 1989826 - RNA, 19 nt, Artificial Sequence
  Description of Artificial Sequence: Synthetic oligonucleotide
uguaaggcuuuaucuugag

SEQ ID NO: 1989827 - RNA, 19 nt, Artificial Sequence
  Description of Artificial Sequence: Synthetic oligonucleotide
uuaagucgaacaugccaug

SEQ ID NO: 1989828 - RNA, 19 nt, Artificial Sequence
  Description of Artificial Sequence: Synthetic oligonucleotide
guaccaugagaauauguuc

SEQ ID NO: 1989829 - RNA, 19 nt, Artificial Sequence
  Description of Artificial Sequence: Synthetic oligonucleotide
gaugcaugcuucaugagaa

SEQ ID NO: 1989830 - RNA, 19 nt, Artificial Sequence
  Description of Artificial Sequence: Synthetic oligonucleotide
ugugaucugcaugagcucu

SEQ ID NO: 1989831 - RNA, 19 nt, Artificial Sequence
  Description of Artificial Sequence: Synthetic oligonucleotide
ucacauggagaaugggagc

SEQ ID NO: 1989832 - RNA, 19 nt, Artificial Sequence
  Description of Artificial Sequence: Synthetic oligonucleotide
uccaacggcaagcuguagu

SEQ ID NO: 1989833 - RNA, 19 nt, Artificial Sequence
  Description of Artificial Sequence: Synthetic oligonucleotide
agugugaggcccgagaacu

SEQ ID NO: 1989834 - RNA, 19 nt, Artificial Sequence
  Description of Artificial Sequence: Synthetic oligonucleotide
guaguuugucgcucaaagc

SEQ ID NO: 1989835 - RNA, 19 nt, Artificial Sequence
  Description of Artificial Sequence: Synthetic oligonucleotide
uccucggaauaaaauaaau

SEQ ID NO: 1989836 - RNA, 19 nt, Artificial Sequence
  Description of Artificial Sequence: Synthetic oligonucleotide
cauucguugaacuacuucu

SEQ ID NO: 1989837 - RNA, 19 nt, Artificial Sequence
  Description of Artificial Sequence: Synthetic oligonucleotide
agucgaacaugccaugcca

SEQ ID NO: 1989838 - RNA, 19 nt, Artificial Sequence
  Description of Artificial Sequence: Synthetic oligonucleotide
ucagugugaggcccgagaa

SEQ ID NO: 1989839 - RNA, 19 nt, Artificial Sequence
  Description of Artificial Sequence: Synthetic oligonucleotide
uucguugaacuacuucuaa

SEQ ID NO: 1989840 - RNA, 19 nt, Artificial Sequence
  Description of Artificial Sequence: Synthetic oligonucleotide
aucaacggcucccaccaag

SEQ ID NO: 1989841 - RNA, 19 nt, Artificial Sequence
  Description of Artificial Sequence: Synthetic oligonucleotide
acaguggagguucauguaa

SEQ ID NO: 1989842 - RNA, 19 nt, Artificial Sequence
  Description of Artificial Sequence: Synthetic oligonucleotide
auuugucagaucaauuaca

SEQ ID NO: 1989843 - RNA, 19 nt, Artificial Sequence
  Description of Artificial Sequence: Synthetic oligonucleotide
gucgcucaaagccuugucc

SEQ ID NO: 1989844 - RNA, 19 nt, Artificial Sequence
  Description of Artificial Sequence: Synthetic oligonucleotide
aguagcugccccaugaaca

SEQ ID NO: 1989845 - RNA, 19 nt, Artificial Sequence
  Description of Artificial Sequence: Synthetic oligonucleotide
gucaacaaguucucagaug

SEQ ID NO: 1989846 - RNA, 19 nt, Artificial Sequence
  Description of Artificial Sequence: Synthetic oligonucleotide
ugguuacucacaccucacc

SEQ ID NO: 1989847 - RNA, 19 nt, Artificial Sequence
  Description of Artificial Sequence: Synthetic oligonucleotide
agcucuguaaguaccauga

SEQ ID NO: 1989848 - RNA, 19 nt, Artificial Sequence
  Description of Artificial Sequence: Synthetic oligonucleotide
uaagucgaacaugccaugc

SEQ ID NO: 1989849 - RNA, 19 nt, Artificial Sequence
  Description of Artificial Sequence: Synthetic oligonucleotide
ugccaugccaaacugcaua

SEQ ID NO: 1989850 - RNA, 19 nt, Artificial Sequence
  Description of Artificial Sequence: Synthetic oligonucleotide
cauuccucggaauaaaaua

SEQ ID NO: 1989851 - RNA, 19 nt, Artificial Sequence
  Description of Artificial Sequence: Synthetic oligonucleotide
uguguguaacaaagguagu

SEQ ID NO: 1989852 - RNA, 19 nt, Artificial Sequence
  Description of Artificial Sequence: Synthetic oligonucleotide
uuccucggaauaaaauaaa

SEQ ID NO: 1989853 - RNA, 19 nt, Artificial Sequence
  Description of Artificial Sequence: Synthetic oligonucleotide
augccaaacugcauacagc

SEQ ID NO: 1989854 - RNA, 19 nt, Artificial Sequence
  Description of Artificial Sequence: Synthetic oligonucleotide
acuggacacacugcgacag

SEQ ID NO: 1989855 - RNA, 19 nt, Artificial Sequence
  Description of Artificial Sequence: Synthetic oligonucleotide
auuccucggaauaaaauaa

SEQ ID NO: 1989856 - RNA, 19 nt, Artificial Sequence
  Description of Artificial Sequence: Synthetic oligonucleotide
uagucguugucucuauauc

SEQ ID NO: 1989857 - RNA, 19 nt, Artificial Sequence
  Description of Artificial Sequence: Synthetic oligonucleotide
aggcuuuaucuugagaucu

SEQ ID NO: 1989858 - RNA, 19 nt, Artificial Sequence
  Description of Artificial Sequence: Synthetic oligonucleotide
ucuugagccuguugguuac

SEQ ID NO: 1989859 - RNA, 19 nt, Artificial Sequence
  Description of Artificial Sequence: Synthetic oligonucleotide
ugacaaguguccuccucug

SEQ ID NO: 1989860 - RNA, 19 nt, Artificial Sequence
  Description of Artificial Sequence: Synthetic oligonucleotide
uccucagcugauuaaguuu

SEQ ID NO: 1989861 - RNA, 19 nt, Artificial Sequence
  Description of Artificial Sequence: Synthetic oligonucleotide
agaucuugagccuguuggu

SEQ ID NO: 1989862 - RNA, 19 nt, Artificial Sequence
  Description of Artificial Sequence: Synthetic oligonucleotide
aaguaccaugagaauaugu

SEQ ID NO: 1989863 - RNA, 19 nt, Artificial Sequence
  Description of Artificial Sequence: Synthetic oligonucleotide
cucagauggcaucugagga

SEQ ID NO: 1989864 - RNA, 19 nt, Artificial Sequence
  Description of Artificial Sequence: Synthetic oligonucleotide
agaaaucuucugcaugaaa

SEQ ID NO: 1989865 - RNA, 19 nt, Artificial Sequence
  Description of Artificial Sequence: Synthetic oligonucleotide
gcaagcuguaguuugucgc

SEQ ID NO: 1989866 - RNA, 19 nt, Artificial Sequence
  Description of Artificial Sequence: Synthetic oligonucleotide
agguugaucaggccugugu

SEQ ID NO: 1989867 - RNA, 19 nt, Artificial Sequence
  Description of Artificial Sequence: Synthetic oligonucleotide
augggagcguacuaacuga

SEQ ID NO: 1989868 - RNA, 19 nt, Artificial Sequence
  Description of Artificial Sequence: Synthetic oligonucleotide
ucggguaaauaaguagcug

SEQ ID NO: 1989869 - RNA, 19 nt, Artificial Sequence
  Description of Artificial Sequence: Synthetic oligonucleotide
uuaccugagcaugaaaauu

SEQ ID NO: 1989870 - RNA, 19 nt, Artificial Sequence
  Description of Artificial Sequence: Synthetic oligonucleotide
gcaugaaaauuggacauag

SEQ ID NO: 1989871 - RNA, 19 nt, Artificial Sequence
  Description of Artificial Sequence: Synthetic oligonucleotide
aaauaacccguaagaccag

SEQ ID NO: 1989872 - RNA, 19 nt, Artificial Sequence
  Description of Artificial Sequence: Synthetic oligonucleotide
gucagaucaauuacaucug

SEQ ID NO: 1989873 - RNA, 19 nt, Artificial Sequence
  Description of Artificial Sequence: Synthetic oligonucleotide
caauuacaucuguugucag

SEQ ID NO: 1989874 - RNA, 19 nt, Artificial Sequence
  Description of Artificial Sequence: Synthetic oligonucleotide
gagguaugcauuugucaga

SEQ ID NO: 1989875 - RNA, 19 nt, Artificial Sequence
  Description of Artificial Sequence: Synthetic oligonucleotide
aaagucggguaaauaagua

SEQ ID NO: 1989876 - RNA, 19 nt, Artificial Sequence
  Description of Artificial Sequence: Synthetic oligonucleotide
agguauuuguguguaacaa

SEQ ID NO: 1989877 - RNA, 19 nt, Artificial Sequence
  Description of Artificial Sequence: Synthetic oligonucleotide
ccucggaauaaaauaaaug

SEQ ID NO: 1989878 - RNA, 19 nt, Artificial Sequence
  Description of Artificial Sequence: Synthetic oligonucleotide
cugcgugguauaauuuaag

SEQ ID NO: 1989879 - RNA, 19 nt, Artificial Sequence
  Description of Artificial Sequence: Synthetic oligonucleotide
caagcuuaccugucgcaug

SEQ ID NO: 1989880 - RNA, 19 nt, Artificial Sequence
  Description of Artificial Sequence: Synthetic oligonucleotide
ugguauaauuuaagucgaa

SEQ ID NO: 1989881 - RNA, 19 nt, Artificial Sequence
  Description of Artificial Sequence: Synthetic oligonucleotide
auucaagucuguaaggcuu

SEQ ID NO: 1989882 - RNA, 19 nt, Artificial Sequence
  Description of Artificial Sequence: Synthetic oligonucleotide
uggagaaugggagcguacu

SEQ ID NO: 1989883 - RNA, 19 nt, Artificial Sequence
  Description of Artificial Sequence: Synthetic oligonucleotide
aacaaucacucuguauaau

SEQ ID NO: 1989884 - RNA, 19 nt, Artificial Sequence
  Description of Artificial Sequence: Synthetic oligonucleotide
gugguauaauuuaagucga

SEQ ID NO: 1989885 - RNA, 19 nt, Artificial Sequence
  Description of Artificial Sequence: Synthetic oligonucleotide
aggaacuccgggaagaaau

SEQ ID NO: 1989886 - RNA, 19 nt, Artificial Sequence
  Description of Artificial Sequence: Synthetic oligonucleotide
aucaacccacuggacacac

SEQ ID NO: 1989887 - RNA, 19 nt, Artificial Sequence
  Description of Artificial Sequence: Synthetic oligonucleotide
acaacauuccucggaauaa

SEQ ID NO: 1989888 - RNA, 19 nt, Artificial Sequence
  Description of Artificial Sequence: Synthetic oligonucleotide
uggugacuccuccaacaug

SEQ ID NO: 1989889 - RNA, 19 nt, Artificial Sequence
  Description of Artificial Sequence: Synthetic oligonucleotide
gaacaugccaugccaaacu

SEQ ID NO: 1989890 - RNA, 19 nt, Artificial Sequence
  Description of Artificial Sequence: Synthetic oligonucleotide
uguugguuacucacaccuc

SEQ ID NO: 1989891 - RNA, 19 nt, Artificial Sequence
  Description of Artificial Sequence: Synthetic oligonucleotide
uggcauaacgaaugccuuc

SEQ ID NO: 1989892 - RNA, 19 nt, Artificial Sequence
  Description of Artificial Sequence: Synthetic oligonucleotide
auaacccguaagaccaggg

SEQ ID NO: 1989893 - RNA, 19 nt, Artificial Sequence
  Description of Artificial Sequence: Synthetic oligonucleotide
agaaacugucuugaacuga

SEQ ID NO: 1989894 - RNA, 19 nt, Artificial Sequence
  Description of Artificial Sequence: Synthetic oligonucleotide
guguguaacaaagguaguc

SEQ ID NO: 1989895 - RNA, 19 nt, Artificial Sequence
  Description of Artificial Sequence: Synthetic oligonucleotide
cggguaaauaaguagcugc

SEQ ID NO: 1989896 - RNA, 19 nt, Artificial Sequence
  Description of Artificial Sequence: Synthetic oligonucleotide
cucuccucagcugauuaag

SEQ ID NO: 1989897 - RNA, 19 nt, Artificial Sequence
  Description of Artificial Sequence: Synthetic oligonucleotide
gguaaauaaguagcugccc

SEQ ID NO: 1989898 - RNA, 19 nt, Artificial Sequence
  Description of Artificial Sequence: Synthetic oligonucleotide
uaaguaccaugagaauaug

SEQ ID NO: 1989899 - RNA, 19 nt, Artificial Sequence
  Description of Artificial Sequence: Synthetic oligonucleotide
gugggaccugaugagaugc

SEQ ID NO: 1989900 - RNA, 19 nt, Artificial Sequence
  Description of Artificial Sequence: Synthetic oligonucleotide
ggguaaauaaguagcugcc

SEQ ID NO: 1989901 - RNA, 19 nt, Artificial Sequence
  Description of Artificial Sequence: Synthetic oligonucleotide
aguuugucgcucaaagccu

SEQ ID NO: 1989902 - RNA, 19 nt, Artificial Sequence
  Description of Artificial Sequence: Synthetic oligonucleotide
cuguugguuacucacaccu

SEQ ID NO: 1989903 - RNA, 19 nt, Artificial Sequence
  Description of Artificial Sequence: Synthetic oligonucleotide
gaggcccgagaacugauga

SEQ ID NO: 1989904 - RNA, 19 nt, Artificial Sequence
  Description of Artificial Sequence: Synthetic oligonucleotide
gagaaugggagcguacuaa

SEQ ID NO: 1989905 - RNA, 19 nt, Artificial Sequence
  Description of Artificial Sequence: Synthetic oligonucleotide
ugguuauucgagguugauc

SEQ ID NO: 1989906 - RNA, 19 nt, Artificial Sequence
  Description of Artificial Sequence: Synthetic oligonucleotide
ugaggcccgagaacugaug

SEQ ID NO: 1989907 - RNA, 19 nt, Artificial Sequence
  Description of Artificial Sequence: Synthetic oligonucleotide
ugggagcguacuaacugaa

SEQ ID NO: 1989908 - RNA, 19 nt, Artificial Sequence
  Description of Artificial Sequence: Synthetic oligonucleotide
ucccaccaagcuuaccugu

SEQ ID NO: 1989909 - RNA, 19 nt, Artificial Sequence
  Description of Artificial Sequence: Synthetic oligonucleotide
cagcugauuaaguuuugca

SEQ ID NO: 1989910 - RNA, 19 nt, Artificial Sequence
  Description of Artificial Sequence: Synthetic oligonucleotide
cuguugucagugugaggcc

SEQ ID NO: 1989911 - RNA, 19 nt, Artificial Sequence
  Description of Artificial Sequence: Synthetic oligonucleotide
guugucagugugaggcccg

SEQ ID NO: 1989912 - RNA, 19 nt, Artificial Sequence
  Description of Artificial Sequence: Synthetic oligonucleotide
uacugugacaaguguccuc

SEQ ID NO: 1989913 - RNA, 19 nt, Artificial Sequence
  Description of Artificial Sequence: Synthetic oligonucleotide
agguaugcauuugucagau

SEQ ID NO: 1989914 - RNA, 19 nt, Artificial Sequence
  Description of Artificial Sequence: Synthetic oligonucleotide
caccaagcuuaccugucgc

SEQ ID NO: 1989915 - RNA, 19 nt, Artificial Sequence
  Description of Artificial Sequence: Synthetic oligonucleotide
agcuguaguuugucgcuca

SEQ ID NO: 1989916 - RNA, 19 nt, Artificial Sequence
  Description of Artificial Sequence: Synthetic oligonucleotide
aaaauuggacauagucguu

SEQ ID NO: 1989917 - RNA, 19 nt, Artificial Sequence
  Description of Artificial Sequence: Synthetic oligonucleotide
ggagcguacuaacugaaaa

SEQ ID NO: 1989918 - RNA, 19 nt, Artificial Sequence
  Description of Artificial Sequence: Synthetic oligonucleotide
accaagcuuaccugucgca

SEQ ID NO: 1989919 - RNA, 19 nt, Artificial Sequence
  Description of Artificial Sequence: Synthetic oligonucleotide
aguggagguucauguaaau

SEQ ID NO: 1989920 - RNA, 19 nt, Artificial Sequence
  Description of Artificial Sequence: Synthetic oligonucleotide
uacucacaccucaccuuca

SEQ ID NO: 1989921 - RNA, 19 nt, Artificial Sequence
  Description of Artificial Sequence: Synthetic oligonucleotide
ccgagaacugaugaugugg

SEQ ID NO: 1989922 - RNA, 19 nt, Artificial Sequence
  Description of Artificial Sequence: Synthetic oligonucleotide
gggccauaaauguaauuca

SEQ ID NO: 1989923 - RNA, 19 nt, Artificial Sequence
  Description of Artificial Sequence: Synthetic oligonucleotide
gacauagucguugucucua

SEQ ID NO: 1989924 - RNA, 19 nt, Artificial Sequence
  Description of Artificial Sequence: Synthetic oligonucleotide
ugucgcucaaagccuuguc

SEQ ID NO: 1989925 - RNA, 19 nt, Artificial Sequence
  Description of Artificial Sequence: Synthetic oligonucleotide
ccaaacugcauacagcaga

SEQ ID NO: 1989926 - RNA, 19 nt, Artificial Sequence
  Description of Artificial Sequence: Synthetic oligonucleotide
auggagaaugggagcguac

SEQ ID NO: 1989927 - RNA, 19 nt, Artificial Sequence
  Description of Artificial Sequence: Synthetic oligonucleotide
acauuccucggaauaaaau

SEQ ID NO: 1989928 - RNA, 19 nt, Artificial Sequence
  Description of Artificial Sequence: Synthetic oligonucleotide
gcuuaccugucgcaugggg

SEQ ID NO: 1989929 - RNA, 19 nt, Artificial Sequence
  Description of Artificial Sequence: Synthetic oligonucleotide
cacuccaacggcaagcugu

SEQ ID NO: 1989930 - RNA, 19 nt, Artificial Sequence
  Description of Artificial Sequence: Synthetic oligonucleotide
acaaguucucagauggcau

SEQ ID NO: 1989931 - RNA, 19 nt, Artificial Sequence
  Description of Artificial Sequence: Synthetic oligonucleotide
gucagugugaggcccgaga

SEQ ID NO: 1989932 - RNA, 19 nt, Artificial Sequence
  Description of Artificial Sequence: Synthetic oligonucleotide
cucagcugauuaaguuuug

SEQ ID NO: 1989933 - RNA, 19 nt, Artificial Sequence
  Description of Artificial Sequence: Synthetic oligonucleotide
acagagagguaugcauuug

SEQ ID NO: 1989934 - RNA, 19 nt, Artificial Sequence
  Description of Artificial Sequence: Synthetic oligonucleotide
ugggaccugaugagaugca

SEQ ID NO: 1989935 - RNA, 19 nt, Artificial Sequence
  Description of Artificial Sequence: Synthetic oligonucleotide
ugucgcauggggccagcuc

SEQ ID NO: 1989936 - RNA, 19 nt, Artificial Sequence
  Description of Artificial Sequence: Synthetic oligonucleotide
cauguaaaucuaauugcau

SEQ ID NO: 1989937 - RNA, 19 nt, Artificial Sequence
  Description of Artificial Sequence: Synthetic oligonucleotide
cucugcgugguauaauuua

SEQ ID NO: 1989938 - RNA, 19 nt, Artificial Sequence
  Description of Artificial Sequence: Synthetic oligonucleotide
gugacaaguguccuccucu

SEQ ID NO: 1989939 - RNA, 19 nt, Artificial Sequence
  Description of Artificial Sequence: Synthetic oligonucleotide
cauaacgaaugccuucucu

SEQ ID NO: 1989940 - RNA, 19 nt, Artificial Sequence
  Description of Artificial Sequence: Synthetic oligonucleotide
gaccuuauuaaaacuuuau

SEQ ID NO: 1989941 - RNA, 19 nt, Artificial Sequence
  Description of Artificial Sequence: Synthetic oligonucleotide
agguucauguaaaucuaau

SEQ ID NO: 1989942 - RNA, 19 nt, Artificial Sequence
  Description of Artificial Sequence: Synthetic oligonucleotide
ucgcauggggccagcucug

SEQ ID NO: 1989943 - RNA, 19 nt, Artificial Sequence
  Description of Artificial Sequence: Synthetic oligonucleotide
agcaugaaaauuggacaua

SEQ ID NO: 1989944 - RNA, 19 nt, Artificial Sequence
  Description of Artificial Sequence: Synthetic oligonucleotide
auucguugaacuacuucua

SEQ ID NO: 1989945 - RNA, 19 nt, Artificial Sequence
  Description of Artificial Sequence: Synthetic oligonucleotide
gucgcauggggccagcucu

SEQ ID NO: 1989946 - RNA, 19 nt, Artificial Sequence
  Description of Artificial Sequence: Synthetic oligonucleotide
gguuacucacaccucaccu

SEQ ID NO: 1989947 - RNA, 19 nt, Artificial Sequence
  Description of Artificial Sequence: Synthetic oligonucleotide
cuuguacugugacaagugu

SEQ ID NO: 1989948 - RNA, 19 nt, Artificial Sequence
  Description of Artificial Sequence: Synthetic oligonucleotide
caguauuaaaauagguauu

SEQ ID NO: 1989949 - RNA, 19 nt, Artificial Sequence
  Description of Artificial Sequence: Synthetic oligonucleotide
gcauucguugaacuacuuc

SEQ ID NO: 1989950 - RNA, 19 nt, Artificial Sequence
  Description of Artificial Sequence: Synthetic oligonucleotide
uugucgcucaaagccuugu

SEQ ID NO: 1989951 - RNA, 19 nt, Artificial Sequence
  Description of Artificial Sequence: Synthetic oligonucleotide
cugccccaugaacaauacc

SEQ ID NO: 1989952 - RNA, 19 nt, Artificial Sequence
  Description of Artificial Sequence: Synthetic oligonucleotide
acacacugcgacaguggag

SEQ ID NO: 1989953 - RNA, 19 nt, Artificial Sequence
  Description of Artificial Sequence: Synthetic oligonucleotide
gccuguugguuacucacac

SEQ ID NO: 1989954 - RNA, 19 nt, Artificial Sequence
  Description of Artificial Sequence: Synthetic oligonucleotide
augugggaccugaugagau

SEQ ID NO: 1989955 - RNA, 19 nt, Artificial Sequence
  Description of Artificial Sequence: Synthetic oligonucleotide
ccgggaagaaaucucccac

SEQ ID NO: 1989956 - RNA, 19 nt, Artificial Sequence
  Description of Artificial Sequence: Synthetic oligonucleotide
cuucacagagagguaugca

SEQ ID NO: 1989957 - RNA, 19 nt, Artificial Sequence
  Description of Artificial Sequence: Synthetic oligonucleotide
acauggagaaugggagcgu

SEQ ID NO: 1989958 - RNA, 19 nt, Artificial Sequence
  Description of Artificial Sequence: Synthetic oligonucleotide
acugaugaugugggaccug

SEQ ID NO: 1989959 - RNA, 19 nt, Artificial Sequence
  Description of Artificial Sequence: Synthetic oligonucleotide
guauaauauaugaccuuau

SEQ ID NO: 1989960 - RNA, 19 nt, Artificial Sequence
  Description of Artificial Sequence: Synthetic oligonucleotide
cugguccaagauauuggaa

SEQ ID NO: 1989961 - RNA, 19 nt, Artificial Sequence
  Description of Artificial Sequence: Synthetic oligonucleotide
gaaugggagcguacuaacu

SEQ ID NO: 1989962 - RNA, 19 nt, Artificial Sequence
  Description of Artificial Sequence: Synthetic oligonucleotide
cuguauaauauaugaccuu

SEQ ID NO: 1989963 - RNA, 19 nt, Artificial Sequence
  Description of Artificial Sequence: Synthetic oligonucleotide
gucggguaaauaaguagcu

SEQ ID NO: 1989964 - RNA, 19 nt, Artificial Sequence
  Description of Artificial Sequence: Synthetic oligonucleotide
acuggugaauugggaaaau

SEQ ID NO: 1989965 - RNA, 19 nt, Artificial Sequence
  Description of Artificial Sequence: Synthetic oligonucleotide
gcucccaccaagcuuaccu

SEQ ID NO: 1989966 - RNA, 19 nt, Artificial Sequence
  Description of Artificial Sequence: Synthetic oligonucleotide
gaugagaugcaugcuucau

SEQ ID NO: 1989967 - RNA, 19 nt, Artificial Sequence
  Description of Artificial Sequence: Synthetic oligonucleotide
ccuucacagagagguaugc

SEQ ID NO: 1989968 - RNA, 19 nt, Artificial Sequence
  Description of Artificial Sequence: Synthetic oligonucleotide
agcuuaccugucgcauggg

SEQ ID NO: 1989969 - RNA, 19 nt, Artificial Sequence
  Description of Artificial Sequence: Synthetic oligonucleotide
aggcccgagaacugaugau

SEQ ID NO: 1989970 - RNA, 19 nt, Artificial Sequence
  Description of Artificial Sequence: Synthetic oligonucleotide
cagagagguaugcauuugu

SEQ ID NO: 1989971 - RNA, 19 nt, Artificial Sequence
  Description of Artificial Sequence: Synthetic oligonucleotide
uaccugucgcauggggcca

SEQ ID NO: 1989972 - RNA, 19 nt, Artificial Sequence
  Description of Artificial Sequence: Synthetic oligonucleotide
gaacaacauuccucggaau

SEQ ID NO: 1989973 - RNA, 19 nt, Artificial Sequence
  Description of Artificial Sequence: Synthetic oligonucleotide
gucgaacaugccaugccaa

SEQ ID NO: 1989974 - RNA, 19 nt, Artificial Sequence
  Description of Artificial Sequence: Synthetic oligonucleotide
gguagucaacaaguucuca

SEQ ID NO: 1989975 - RNA, 19 nt, Artificial Sequence
  Description of Artificial Sequence: Synthetic oligonucleotide
ggcauaacgaaugccuucu

SEQ ID NO: 1989976 - RNA, 19 nt, Artificial Sequence
  Description of Artificial Sequence: Synthetic oligonucleotide
ggaacuccgggaagaaauc

SEQ ID NO: 1989977 - RNA, 19 nt, Artificial Sequence
  Description of Artificial Sequence: Synthetic oligonucleotide
ggccagcucuguaaguacc

SEQ ID NO: 1989978 - RNA, 19 nt, Artificial Sequence
  Description of Artificial Sequence: Synthetic oligonucleotide
gaucuugagccuguugguu

SEQ ID NO: 1989979 - RNA, 19 nt, Artificial Sequence
  Description of Artificial Sequence: Synthetic oligonucleotide
gagguugaucaggccugug

SEQ ID NO: 1989980 - RNA, 19 nt, Artificial Sequence
  Description of Artificial Sequence: Synthetic oligonucleotide
caaguguccuccucugcgu

SEQ ID NO: 1989981 - RNA, 19 nt, Artificial Sequence
  Description of Artificial Sequence: Synthetic oligonucleotide
acggccuucagcacuccaa

SEQ ID NO: 1989982 - RNA, 19 nt, Artificial Sequence
  Description of Artificial Sequence: Synthetic oligonucleotide
ggagaaugggagcguacua

SEQ ID NO: 1989983 - RNA, 19 nt, Artificial Sequence
  Description of Artificial Sequence: Synthetic oligonucleotide
acuccaacggcaagcugua

SEQ ID NO: 1989984 - RNA, 19 nt, Artificial Sequence
  Description of Artificial Sequence: Synthetic oligonucleotide
uugagaucuugagccuguu

SEQ ID NO: 1989985 - RNA, 19 nt, Artificial Sequence
  Description of Artificial Sequence: Synthetic oligonucleotide
gugugaggcccgagaacug

SEQ ID NO: 1989986 - RNA, 19 nt, Artificial Sequence
  Description of Artificial Sequence: Synthetic oligonucleotide
gcgacaguggagguucaug

SEQ ID NO: 1989987 - RNA, 19 nt, Artificial Sequence
  Description of Artificial Sequence: Synthetic oligonucleotide
cauagucguugucucuaua

SEQ ID NO: 1989988 - RNA, 19 nt, Artificial Sequence
  Description of Artificial Sequence: Synthetic oligonucleotide
cauggagaaugggagcgua

SEQ ID NO: 1989989 - RNA, 19 nt, Artificial Sequence
  Description of Artificial Sequence: Synthetic oligonucleotide
caucaacccacuggacaca

SEQ ID NO: 1989990 - RNA, 19 nt, Artificial Sequence
  Description of Artificial Sequence: Synthetic oligonucleotide
gucguugucucuauaucuu

SEQ ID NO: 1989991 - RNA, 19 nt, Artificial Sequence
  Description of Artificial Sequence: Synthetic oligonucleotide
cuggcauaacgaaugccuu

SEQ ID NO: 1989992 - RNA, 19 nt, Artificial Sequence
  Description of Artificial Sequence: Synthetic oligonucleotide
gauggcaucugaggaggau

SEQ ID NO: 1989993 - RNA, 19 nt, Artificial Sequence
  Description of Artificial Sequence: Synthetic oligonucleotide
accugucgcauggggccag

SEQ ID NO: 1989994 - RNA, 19 nt, Artificial Sequence
  Description of Artificial Sequence: Synthetic oligonucleotide
gccccaugaacaauaccca

SEQ ID NO: 1989995 - RNA, 19 nt, Artificial Sequence
  Description of Artificial Sequence: Synthetic oligonucleotide
cccgagaacugaugaugug

SEQ ID NO: 1989996 - RNA, 19 nt, Artificial Sequence
  Description of Artificial Sequence: Synthetic oligonucleotide
ugcgacaguggagguucau

SEQ ID NO: 1989997 - RNA, 19 nt, Artificial Sequence
  Description of Artificial Sequence: Synthetic oligonucleotide
gcauaacgaaugccuucuc

SEQ ID NO: 1989998 - RNA, 19 nt, Artificial Sequence
  Description of Artificial Sequence: Synthetic oligonucleotide
ggacauagucguugucucu

SEQ ID NO: 1989999 - RNA, 19 nt, Artificial Sequence
  Description of Artificial Sequence: Synthetic oligonucleotide
guuugucgcucaaagccuu

SEQ ID NO: 1990000 - RNA, 19 nt, Artificial Sequence
  Description of Artificial Sequence: Synthetic oligonucleotide
cuccaacggcaagcuguag

SEQ ID NO: 1990001 - RNA, 19 nt, Artificial Sequence
  Description of Artificial Sequence: Synthetic oligonucleotide
gcugccccaugaacaauac

SEQ ID NO: 1990002 - RNA, 19 nt, Artificial Sequence
  Description of Artificial Sequence: Synthetic oligonucleotide
gcacuccaacggcaagcug

SEQ ID NO: 1990003 - RNA, 19 nt, Artificial Sequence
  Description of Artificial Sequence: Synthetic oligonucleotide
cacggccuucagcacucca

SEQ ID NO: 1990004 - RNA, 19 nt, Artificial Sequence
  Description of Artificial Sequence: Synthetic oligonucleotide
ccaacggcaagcuguaguu

SEQ ID NO: 1990005 - RNA, 19 nt, Artificial Sequence
  Description of Artificial Sequence: Synthetic oligonucleotide
cugcgacaguggagguuca

SEQ ID NO: 1990006 - RNA, 19 nt, Artificial Sequence
  Description of Artificial Sequence: Synthetic oligonucleotide
gggagcguacuaacugaaa

SEQ ID NO: 1990007 - RNA, 19 nt, Artificial Sequence
  Description of Artificial Sequence: Synthetic oligonucleotide
gcccgagaacugaugaugu

SEQ ID NO: 1990008 - RNA, 19 nt, Artificial Sequence
  Description of Artificial Sequence: Synthetic oligonucleotide
cugugacaaguguccuccu

SEQ ID NO: 1990009 - RNA, 19 nt, Artificial Sequence
  Description of Artificial Sequence: Synthetic oligonucleotide
gcucaaagccuuguccuau

SEQ ID NO: 1990010 - RNA, 19 nt, Artificial Sequence
  Description of Artificial Sequence: Synthetic oligonucleotide
ggcucccaccaagcuuacc

SEQ ID NO: 1990011 - RNA, 19 nt, Artificial Sequence
  Description of Artificial Sequence: Synthetic oligonucleotide
gggaccugaugagaugcau

SEQ ID NO: 1990012 - RNA, 19 nt, Artificial Sequence
  Description of Artificial Sequence: Synthetic oligonucleotide
ccaagcuuaccugucgcau

SEQ ID NO: 1990013 - RNA, 19 nt, Artificial Sequence
  Description of Artificial Sequence: Synthetic oligonucleotide
caacggcaagcuguaguuu

SEQ ID NO: 1990014 - RNA, 19 nt, Artificial Sequence
  Description of Artificial Sequence: Synthetic oligonucleotide
ccugucgcauggggccagc

SEQ ID NO: 1990015 - RNA, 19 nt, Artificial Sequence
  Description of Artificial Sequence: Synthetic oligonucleotide
cacugcgacaguggagguu

SEQ ID NO: 1990016 - RNA, 19 nt, Artificial Sequence
  Description of Artificial Sequence: Synthetic oligonucleotide
ccuccucugcgugguauaa

SEQ ID NO: 1990017 - RNA, 19 nt, Artificial Sequence
  Description of Artificial Sequence: Synthetic oligonucleotide
cugucgcauggggccagcu

SEQ ID NO: 1990018 - RNA, 19 nt, Artificial Sequence
  Description of Artificial Sequence: Synthetic oligonucleotide
ccguaagaccagggccaua

SEQ ID NO: 1990019 - RNA, 19 nt, Artificial Sequence
  Description of Artificial Sequence: Synthetic oligonucleotide
acuagaaaauaucugaggc

SEQ ID NO: 1990020 - RNA, 19 nt, Artificial Sequence
  Description of Artificial Sequence: Synthetic oligonucleotide
auuuaacugguacagaccc

SEQ ID NO: 1990021 - RNA, 19 nt, Artificial Sequence
  Description of Artificial Sequence: Synthetic oligonucleotide
auaauuguguaucggaacc

SEQ ID NO: 1990022 - RNA, 19 nt, Artificial Sequence
  Description of Artificial Sequence: Synthetic oligonucleotide
auuuuaacaaucgaugccc

SEQ ID NO: 1990023 - RNA, 19 nt, Artificial Sequence
  Description of Artificial Sequence: Synthetic oligonucleotide
acauuuuaacaaucgaugc

SEQ ID NO: 1990024 - RNA, 19 nt, Artificial Sequence
  Description of Artificial Sequence: Synthetic oligonucleotide
auagguggaauucuguucc

SEQ ID NO: 1990025 - RNA, 19 nt, Artificial Sequence
  Description of Artificial Sequence: Synthetic oligonucleotide
aucacuuuaauacacaugu

SEQ ID NO: 1990026 - RNA, 19 nt, Artificial Sequence
  Description of Artificial Sequence: Synthetic oligonucleotide
uucuacauuauauggaggg

SEQ ID NO: 1990027 - RNA, 19 nt, Artificial Sequence
  Description of Artificial Sequence: Synthetic oligonucleotide
acauuuaacugguacagac

SEQ ID NO: 1990028 - RNA, 19 nt, Artificial Sequence
  Description of Artificial Sequence: Synthetic oligonucleotide
uucccuaauacucucaucc

SEQ ID NO: 1990029 - RNA, 19 nt, Artificial Sequence
  Description of Artificial Sequence: Synthetic oligonucleotide
aaacaaauacccaagagcu

SEQ ID NO: 1990030 - RNA, 19 nt, Artificial Sequence
  Description of Artificial Sequence: Synthetic oligonucleotide
accaauuaccuucuuauac

SEQ ID NO: 1990031 - RNA, 19 nt, Artificial Sequence
  Description of Artificial Sequence: Synthetic oligonucleotide
aaggaugacaggcagaacu

SEQ ID NO: 1990032 - RNA, 19 nt, Artificial Sequence
  Description of Artificial Sequence: Synthetic oligonucleotide
auguucaccauucaauagc

SEQ ID NO: 1990033 - RNA, 19 nt, Artificial Sequence
  Description of Artificial Sequence: Synthetic oligonucleotide
uuuaaagcaggucuuuucc

SEQ ID NO: 1990034 - RNA, 19 nt, Artificial Sequence
  Description of Artificial Sequence: Synthetic oligonucleotide
auaaaaggcagagauggcc

SEQ ID NO: 1990035 - RNA, 19 nt, Artificial Sequence
  Description of Artificial Sequence: Synthetic oligonucleotide
cacuuuaauacacaugugg

SEQ ID NO: 1990036 - RNA, 19 nt, Artificial Sequence
  Description of Artificial Sequence: Synthetic oligonucleotide
aaagcucaaauuuacagua

SEQ ID NO: 1990037 - RNA, 19 nt, Artificial Sequence
  Description of Artificial Sequence: Synthetic oligonucleotide
auuauggucugcuucacuc

SEQ ID NO: 1990038 - RNA, 19 nt, Artificial Sequence
  Description of Artificial Sequence: Synthetic oligonucleotide
aaaggagacuccuucagug

SEQ ID NO: 1990039 - RNA, 19 nt, Artificial Sequence
  Description of Artificial Sequence: Synthetic oligonucleotide
aaagcggcagagcauaauc

SEQ ID NO: 1990040 - RNA, 19 nt, Artificial Sequence
  Description of Artificial Sequence: Synthetic oligonucleotide
uuaagcaagcgagagacgg

SEQ ID NO: 1990041 - RNA, 19 nt, Artificial Sequence
  Description of Artificial Sequence: Synthetic oligonucleotide
ugucgggugacuauaaaag

SEQ ID NO: 1990042 - RNA, 19 nt, Artificial Sequence
  Description of Artificial Sequence: Synthetic oligonucleotide
agaacuacgaacauuuaac

SEQ ID NO: 1990043 - RNA, 19 nt, Artificial Sequence
  Description of Artificial Sequence: Synthetic oligonucleotide
uguaucggaaccaaguacu

SEQ ID NO: 1990044 - RNA, 19 nt, Artificial Sequence
  Description of Artificial Sequence: Synthetic oligonucleotide
uacuagaaaauaucugagg

SEQ ID NO: 1990045 - RNA, 19 nt, Artificial Sequence
  Description of Artificial Sequence: Synthetic oligonucleotide
aacuuuaccauaucuuuga

SEQ ID NO: 1990046 - RNA, 19 nt, Artificial Sequence
  Description of Artificial Sequence: Synthetic oligonucleotide
agacauggcaauuacuuuc

SEQ ID NO: 1990047 - RNA, 19 nt, Artificial Sequence
  Description of Artificial Sequence: Synthetic oligonucleotide
aagagagugggucucacug

SEQ ID NO: 1990048 - RNA, 19 nt, Artificial Sequence
  Description of Artificial Sequence: Synthetic oligonucleotide
aaacaagaacauuuuccuc

SEQ ID NO: 1990049 - RNA, 19 nt, Artificial Sequence
  Description of Artificial Sequence: Synthetic oligonucleotide
acgaacauuuaacugguac

SEQ ID NO: 1990050 - RNA, 19 nt, Artificial Sequence
  Description of Artificial Sequence: Synthetic oligonucleotide
uacuuaaccaauuaccuuc

SEQ ID NO: 1990051 - RNA, 19 nt, Artificial Sequence
  Description of Artificial Sequence: Synthetic oligonucleotide
uuugcaaccacacuuuaaa

SEQ ID NO: 1990052 - RNA, 19 nt, Artificial Sequence
  Description of Artificial Sequence: Synthetic oligonucleotide
uggaauacgucaauggugu

SEQ ID NO: 1990053 - RNA, 19 nt, Artificial Sequence
  Description of Artificial Sequence: Synthetic oligonucleotide
aacuacgaacauuuaacug

SEQ ID NO: 1990054 - RNA, 19 nt, Artificial Sequence
  Description of Artificial Sequence: Synthetic oligonucleotide
uagaaaauaucugaggcca

SEQ ID NO: 1990055 - RNA, 19 nt, Artificial Sequence
  Description of Artificial Sequence: Synthetic oligonucleotide
auuaccuucuuauacagaa

SEQ ID NO: 1990056 - RNA, 19 nt, Artificial Sequence
  Description of Artificial Sequence: Synthetic oligonucleotide
uacagaaaccauaauugug

SEQ ID NO: 1990057 - RNA, 19 nt, Artificial Sequence
  Description of Artificial Sequence: Synthetic oligonucleotide
gauuaggacaagucaaacc

SEQ ID NO: 1990058 - RNA, 19 nt, Artificial Sequence
  Description of Artificial Sequence: Synthetic oligonucleotide
cuagaaaauaucugaggcc

SEQ ID NO: 1990059 - RNA, 19 nt, Artificial Sequence
  Description of Artificial Sequence: Synthetic oligonucleotide
cauucaauagcaaauguca

SEQ ID NO: 1990060 - RNA, 19 nt, Artificial Sequence
  Description of Artificial Sequence: Synthetic oligonucleotide
uguggaaagcggcagagca

SEQ ID NO: 1990061 - RNA, 19 nt, Artificial Sequence
  Description of Artificial Sequence: Synthetic oligonucleotide
uaccauaucuuugacaaag

SEQ ID NO: 1990062 - RNA, 19 nt, Artificial Sequence
  Description of Artificial Sequence: Synthetic oligonucleotide
guaacuacaguuaacaaga

SEQ ID NO: 1990063 - RNA, 19 nt, Artificial Sequence
  Description of Artificial Sequence: Synthetic oligonucleotide
cauuuuaacaaucgaugcc

SEQ ID NO: 1990064 - RNA, 19 nt, Artificial Sequence
  Description of Artificial Sequence: Synthetic oligonucleotide
ucacauuuuaacaaucgau

SEQ ID NO: 1990065 - RNA, 19 nt, Artificial Sequence
  Description of Artificial Sequence: Synthetic oligonucleotide
acuacaguuaacaagaaau

SEQ ID NO: 1990066 - RNA, 19 nt, Artificial Sequence
  Description of Artificial Sequence: Synthetic oligonucleotide
uacauuauauggagggaag

SEQ ID NO: 1990067 - RNA, 19 nt, Artificial Sequence
  Description of Artificial Sequence: Synthetic oligonucleotide
ugagacauggcaauuacuu

SEQ ID NO: 1990068 - RNA, 19 nt, Artificial Sequence
  Description of Artificial Sequence: Synthetic oligonucleotide
uaaccaauuaccuucuuau

SEQ ID NO: 1990069 - RNA, 19 nt, Artificial Sequence
  Description of Artificial Sequence: Synthetic oligonucleotide
aauccuuacagaaggauga

SEQ ID NO: 1990070 - RNA, 19 nt, Artificial Sequence
  Description of Artificial Sequence: Synthetic oligonucleotide
uaaaaggcagagauggcca

SEQ ID NO: 1990071 - RNA, 19 nt, Artificial Sequence
  Description of Artificial Sequence: Synthetic oligonucleotide
uugauacuuaaccaauuac

SEQ ID NO: 1990072 - RNA, 19 nt, Artificial Sequence
  Description of Artificial Sequence: Synthetic oligonucleotide
uaacuuuaccauaucuuug

SEQ ID NO: 1990073 - RNA, 19 nt, Artificial Sequence
  Description of Artificial Sequence: Synthetic oligonucleotide
augaccagguaccaaguac

SEQ ID NO: 1990074 - RNA, 19 nt, Artificial Sequence
  Description of Artificial Sequence: Synthetic oligonucleotide
ucucucaacauccguaggc

SEQ ID NO: 1990075 - RNA, 19 nt, Artificial Sequence
  Description of Artificial Sequence: Synthetic oligonucleotide
ucgggugacuauaaaaggc

SEQ ID NO: 1990076 - RNA, 19 nt, Artificial Sequence
  Description of Artificial Sequence: Synthetic oligonucleotide
aauccaugagaaugagguc

SEQ ID NO: 1990077 - RNA, 19 nt, Artificial Sequence
  Description of Artificial Sequence: Synthetic oligonucleotide
ugcaugaccagguaccaag

SEQ ID NO: 1990078 - RNA, 19 nt, Artificial Sequence
  Description of Artificial Sequence: Synthetic oligonucleotide
gacaagucaaaccagaggu

SEQ ID NO: 1990079 - RNA, 19 nt, Artificial Sequence
  Description of Artificial Sequence: Synthetic oligonucleotide
uacacauguggaaagcggc

SEQ ID NO: 1990080 - RNA, 19 nt, Artificial Sequence
  Description of Artificial Sequence: Synthetic oligonucleotide
uguucaccauucaauagca

SEQ ID NO: 1990081 - RNA, 19 nt, Artificial Sequence
  Description of Artificial Sequence: Synthetic oligonucleotide
aauacgucaaugguguccu

SEQ ID NO: 1990082 - RNA, 19 nt, Artificial Sequence
  Description of Artificial Sequence: Synthetic oligonucleotide
acuaaggacuccuuucauc

SEQ ID NO: 1990083 - RNA, 19 nt, Artificial Sequence
  Description of Artificial Sequence: Synthetic oligonucleotide
uuguguaucggaaccaagu

SEQ ID NO: 1990084 - RNA, 19 nt, Artificial Sequence
  Description of Artificial Sequence: Synthetic oligonucleotide
acaaucgaugcccacaaca

SEQ ID NO: 1990085 - RNA, 19 nt, Artificial Sequence
  Description of Artificial Sequence: Synthetic oligonucleotide
aggacuaaggacuccuuuc

SEQ ID NO: 1990086 - RNA, 19 nt, Artificial Sequence
  Description of Artificial Sequence: Synthetic oligonucleotide
ugcauuauggucugcuuca

SEQ ID NO: 1990087 - RNA, 19 nt, Artificial Sequence
  Description of Artificial Sequence: Synthetic oligonucleotide
agcucuacuugauuaggac

SEQ ID NO: 1990088 - RNA, 19 nt, Artificial Sequence
  Description of Artificial Sequence: Synthetic oligonucleotide
ugaccagguaccaaguaca

SEQ ID NO: 1990089 - RNA, 19 nt, Artificial Sequence
  Description of Artificial Sequence: Synthetic oligonucleotide
cauaauuguguaucggaac

SEQ ID NO: 1990090 - RNA, 19 nt, Artificial Sequence
  Description of Artificial Sequence: Synthetic oligonucleotide
uguaugcaugaccagguac

SEQ ID NO: 1990091 - RNA, 19 nt, Artificial Sequence
  Description of Artificial Sequence: Synthetic oligonucleotide
gacuauaaaaggcagagau

SEQ ID NO: 1990092 - RNA, 19 nt, Artificial Sequence
  Description of Artificial Sequence: Synthetic oligonucleotide
aaauagguggaauucuguu

SEQ ID NO: 1990093 - RNA, 19 nt, Artificial Sequence
  Description of Artificial Sequence: Synthetic oligonucleotide
gugacuauaaaaggcagag

SEQ ID NO: 1990094 - RNA, 19 nt, Artificial Sequence
  Description of Artificial Sequence: Synthetic oligonucleotide
acaaauacccaagagcuca

SEQ ID NO: 1990095 - RNA, 19 nt, Artificial Sequence
  Description of Artificial Sequence: Synthetic oligonucleotide
cauuuaacugguacagacc

SEQ ID NO: 1990096 - RNA, 19 nt, Artificial Sequence
  Description of Artificial Sequence: Synthetic oligonucleotide
ucaccauucaauagcaaau

SEQ ID NO: 1990097 - RNA, 19 nt, Artificial Sequence
  Description of Artificial Sequence: Synthetic oligonucleotide
ugcauguucaccauucaau

SEQ ID NO: 1990098 - RNA, 19 nt, Artificial Sequence
  Description of Artificial Sequence: Synthetic oligonucleotide
ugaguaaugugaccacaag

SEQ ID NO: 1990099 - RNA, 19 nt, Artificial Sequence
  Description of Artificial Sequence: Synthetic oligonucleotide
caauuaccuucuuauacag

SEQ ID NO: 1990100 - RNA, 19 nt, Artificial Sequence
  Description of Artificial Sequence: Synthetic oligonucleotide
ucucucucaacauccguag

SEQ ID NO: 1990101 - RNA, 19 nt, Artificial Sequence
  Description of Artificial Sequence: Synthetic oligonucleotide
guaccaaguacaaaggggc

SEQ ID NO: 1990102 - RNA, 19 nt, Artificial Sequence
  Description of Artificial Sequence: Synthetic oligonucleotide
ggaaacaagaacauuuucc

SEQ ID NO: 1990103 - RNA, 19 nt, Artificial Sequence
  Description of Artificial Sequence: Synthetic oligonucleotide
gcccacaacaaauaggugg

SEQ ID NO: 1990104 - RNA, 19 nt, Artificial Sequence
  Description of Artificial Sequence: Synthetic oligonucleotide
cuggaauacgucaauggug

SEQ ID NO: 1990105 - RNA, 19 nt, Artificial Sequence
  Description of Artificial Sequence: Synthetic oligonucleotide
uuuaagcaagcgagagacg

SEQ ID NO: 1990106 - RNA, 19 nt, Artificial Sequence
  Description of Artificial Sequence: Synthetic oligonucleotide
caguuaacaagaaauagaa

SEQ ID NO: 1990107 - RNA, 19 nt, Artificial Sequence
  Description of Artificial Sequence: Synthetic oligonucleotide
accauaauuguguaucgga

SEQ ID NO: 1990108 - RNA, 19 nt, Artificial Sequence
  Description of Artificial Sequence: Synthetic oligonucleotide
aaguacuagaaaauaucug

SEQ ID NO: 1990109 - RNA, 19 nt, Artificial Sequence
  Description of Artificial Sequence: Synthetic oligonucleotide
uuaacugguacagacccca

SEQ ID NO: 1990110 - RNA, 19 nt, Artificial Sequence
  Description of Artificial Sequence: Synthetic oligonucleotide
cuugauuaggacaagucaa

SEQ ID NO: 1990111 - RNA, 19 nt, Artificial Sequence
  Description of Artificial Sequence: Synthetic oligonucleotide
cuuacagaaggaugacagg

SEQ ID NO: 1990112 - RNA, 19 nt, Artificial Sequence
  Description of Artificial Sequence: Synthetic oligonucleotide
uuaaccaauuaccuucuua

SEQ ID NO: 1990113 - RNA, 19 nt, Artificial Sequence
  Description of Artificial Sequence: Synthetic oligonucleotide
ucaggauuuuaagcaagcg

SEQ ID NO: 1990114 - RNA, 19 nt, Artificial Sequence
  Description of Artificial Sequence: Synthetic oligonucleotide
aucggaaccaaguacuaga

SEQ ID NO: 1990115 - RNA, 19 nt, Artificial Sequence
  Description of Artificial Sequence: Synthetic oligonucleotide
uugauuaggacaagucaaa

SEQ ID NO: 1990116 - RNA, 19 nt, Artificial Sequence
  Description of Artificial Sequence: Synthetic oligonucleotide
gaauccuuacagaaggaug

SEQ ID NO: 1990117 - RNA, 19 nt, Artificial Sequence
  Description of Artificial Sequence: Synthetic oligonucleotide
gaauacgucaauggugucc

SEQ ID NO: 1990118 - RNA, 19 nt, Artificial Sequence
  Description of Artificial Sequence: Synthetic oligonucleotide
auacccaagagcucacauc

SEQ ID NO: 1990119 - RNA, 19 nt, Artificial Sequence
  Description of Artificial Sequence: Synthetic oligonucleotide
cagcaaugaauccuuacag

SEQ ID NO: 1990120 - RNA, 19 nt, Artificial Sequence
  Description of Artificial Sequence: Synthetic oligonucleotide
aauacccaagagcucacau

SEQ ID NO: 1990121 - RNA, 19 nt, Artificial Sequence
  Description of Artificial Sequence: Synthetic oligonucleotide
aaugguuggggugugggga

SEQ ID NO: 1990122 - RNA, 19 nt, Artificial Sequence
  Description of Artificial Sequence: Synthetic oligonucleotide
uacuugauuaggacaaguc

SEQ ID NO: 1990123 - RNA, 19 nt, Artificial Sequence
  Description of Artificial Sequence: Synthetic oligonucleotide
cauuauauggagggaagag

SEQ ID NO: 1990124 - RNA, 19 nt, Artificial Sequence
  Description of Artificial Sequence: Synthetic oligonucleotide
uccacaacgucacuguaaa

SEQ ID NO: 1990125 - RNA, 19 nt, Artificial Sequence
  Description of Artificial Sequence: Synthetic oligonucleotide
agcagcaaugaauccuuac

SEQ ID NO: 1990126 - RNA, 19 nt, Artificial Sequence
  Description of Artificial Sequence: Synthetic oligonucleotide
gucgggugacuauaaaagg

SEQ ID NO: 1990127 - RNA, 19 nt, Artificial Sequence
  Description of Artificial Sequence: Synthetic oligonucleotide
acaguuaacaagaaauaga

SEQ ID NO: 1990128 - RNA, 19 nt, Artificial Sequence
  Description of Artificial Sequence: Synthetic oligonucleotide
gagguaacuacaguuaaca

SEQ ID NO: 1990129 - RNA, 19 nt, Artificial Sequence
  Description of Artificial Sequence: Synthetic oligonucleotide
ugggguguggggauggucc

SEQ ID NO: 1990130 - RNA, 19 nt, Artificial Sequence
  Description of Artificial Sequence: Synthetic oligonucleotide
ucaacauccguaggcaugc

SEQ ID NO: 1990131 - RNA, 19 nt, Artificial Sequence
  Description of Artificial Sequence: Synthetic oligonucleotide
cauguucaccauucaauag

SEQ ID NO: 1990132 - RNA, 19 nt, Artificial Sequence
  Description of Artificial Sequence: Synthetic oligonucleotide
aagcccaucggaaaaggag

SEQ ID NO: 1990133 - RNA, 19 nt, Artificial Sequence
  Description of Artificial Sequence: Synthetic oligonucleotide
uuuaacugguacagacccc

SEQ ID NO: 1990134 - RNA, 19 nt, Artificial Sequence
  Description of Artificial Sequence: Synthetic oligonucleotide
uggucuucucccuuuaacu

SEQ ID NO: 1990135 - RNA, 19 nt, Artificial Sequence
  Description of Artificial Sequence: Synthetic oligonucleotide
guacuagaaaauaucugag

SEQ ID NO: 1990136 - RNA, 19 nt, Artificial Sequence
  Description of Artificial Sequence: Synthetic oligonucleotide
uaacaaucgaugcccacaa

SEQ ID NO: 1990137 - RNA, 19 nt, Artificial Sequence
  Description of Artificial Sequence: Synthetic oligonucleotide
aacaaauacccaagagcuc

SEQ ID NO: 1990138 - RNA, 19 nt, Artificial Sequence
  Description of Artificial Sequence: Synthetic oligonucleotide
uuauggucugcuucacucc

SEQ ID NO: 1990139 - RNA, 19 nt, Artificial Sequence
  Description of Artificial Sequence: Synthetic oligonucleotide
acugguacagaccccacga

SEQ ID NO: 1990140 - RNA, 19 nt, Artificial Sequence
  Description of Artificial Sequence: Synthetic oligonucleotide
auuuuaagcaagcgagaga

SEQ ID NO: 1990141 - RNA, 19 nt, Artificial Sequence
  Description of Artificial Sequence: Synthetic oligonucleotide
ggaaccaaguacuagaaaa

SEQ ID NO: 1990142 - RNA, 19 nt, Artificial Sequence
  Description of Artificial Sequence: Synthetic oligonucleotide
uguguaucggaaccaagua

SEQ ID NO: 1990143 - RNA, 19 nt, Artificial Sequence
  Description of Artificial Sequence: Synthetic oligonucleotide
uuuccaaaugagacauggc

SEQ ID NO: 1990144 - RNA, 19 nt, Artificial Sequence
  Description of Artificial Sequence: Synthetic oligonucleotide
ugcaucacuuuaauacaca

SEQ ID NO: 1990145 - RNA, 19 nt, Artificial Sequence
  Description of Artificial Sequence: Synthetic oligonucleotide
gguaccaaguacaaagggg

SEQ ID NO: 1990146 - RNA, 19 nt, Artificial Sequence
  Description of Artificial Sequence: Synthetic oligonucleotide
aacaaucgaugcccacaac

SEQ ID NO: 1990147 - RNA, 19 nt, Artificial Sequence
  Description of Artificial Sequence: Synthetic oligonucleotide
uacgucaaugguguccucg

SEQ ID NO: 1990148 - RNA, 19 nt, Artificial Sequence
  Description of Artificial Sequence: Synthetic oligonucleotide
gagacgguaggucaguguc

SEQ ID NO: 1990149 - RNA, 19 nt, Artificial Sequence
  Description of Artificial Sequence: Synthetic oligonucleotide
ugguacagaccccacgaug

SEQ ID NO: 1990150 - RNA, 19 nt, Artificial Sequence
  Description of Artificial Sequence: Synthetic oligonucleotide
uugcaaccacacuuuaaag

SEQ ID NO: 1990151 - RNA, 19 nt, Artificial Sequence
  Description of Artificial Sequence: Synthetic oligonucleotide
agcaaacacuuuuguuggc

SEQ ID NO: 1990152 - RNA, 19 nt, Artificial Sequence
  Description of Artificial Sequence: Synthetic oligonucleotide
cagguaccaaguacaaagg

SEQ ID NO: 1990153 - RNA, 19 nt, Artificial Sequence
  Description of Artificial Sequence: Synthetic oligonucleotide
ucacuuuaauacacaugug

SEQ ID NO: 1990154 - RNA, 19 nt, Artificial Sequence
  Description of Artificial Sequence: Synthetic oligonucleotide
auacacauguggaaagcgg

SEQ ID NO: 1990155 - RNA, 19 nt, Artificial Sequence
  Description of Artificial Sequence: Synthetic oligonucleotide
accagagguaacuacaguu

SEQ ID NO: 1990156 - RNA, 19 nt, Artificial Sequence
  Description of Artificial Sequence: Synthetic oligonucleotide
accuucuuauacagaaacc

SEQ ID NO: 1990157 - RNA, 19 nt, Artificial Sequence
  Description of Artificial Sequence: Synthetic oligonucleotide
aacgucacuguaaacuuga

SEQ ID NO: 1990158 - RNA, 19 nt, Artificial Sequence
  Description of Artificial Sequence: Synthetic oligonucleotide
agagcauaauccaugagaa

SEQ ID NO: 1990159 - RNA, 19 nt, Artificial Sequence
  Description of Artificial Sequence: Synthetic oligonucleotide
uauauggagggaagagagu

SEQ ID NO: 1990160 - RNA, 19 nt, Artificial Sequence
  Description of Artificial Sequence: Synthetic oligonucleotide
cacacuuuaaagcaggucu

SEQ ID NO: 1990161 - RNA, 19 nt, Artificial Sequence
  Description of Artificial Sequence: Synthetic oligonucleotide
aacuugauacuuaaccaau

SEQ ID NO: 1990162 - RNA, 19 nt, Artificial Sequence
  Description of Artificial Sequence: Synthetic oligonucleotide
aaucgaugcccacaacaaa

SEQ ID NO: 1990163 - RNA, 19 nt, Artificial Sequence
  Description of Artificial Sequence: Synthetic oligonucleotide
acaggcagaacuacgaaca

SEQ ID NO: 1990164 - RNA, 19 nt, Artificial Sequence
  Description of Artificial Sequence: Synthetic oligonucleotide
ucacuguaaacuugauacu

SEQ ID NO: 1990165 - RNA, 19 nt, Artificial Sequence
  Description of Artificial Sequence: Synthetic oligonucleotide
uaggcaugcccacugagua

SEQ ID NO: 1990166 - RNA, 19 nt, Artificial Sequence
  Description of Artificial Sequence: Synthetic oligonucleotide
ucuacauuauauggaggga

SEQ ID NO: 1990167 - RNA, 19 nt, Artificial Sequence
  Description of Artificial Sequence: Synthetic oligonucleotide
cucuacuugauuaggacaa

SEQ ID NO: 1990168 - RNA, 19 nt, Artificial Sequence
  Description of Artificial Sequence: Synthetic oligonucleotide
ugaccacaagcucuacuug

SEQ ID NO: 1990169 - RNA, 19 nt, Artificial Sequence
  Description of Artificial Sequence: Synthetic oligonucleotide
ggacaagucaaaccagagg

SEQ ID NO: 1990170 - RNA, 19 nt, Artificial Sequence
  Description of Artificial Sequence: Synthetic oligonucleotide
gagugggucucacuguacc

SEQ ID NO: 1990171 - RNA, 19 nt, Artificial Sequence
  Description of Artificial Sequence: Synthetic oligonucleotide
gacgguaggucagugucgg

SEQ ID NO: 1990172 - RNA, 19 nt, Artificial Sequence
  Description of Artificial Sequence: Synthetic oligonucleotide
acuauaaaaggcagagaug

SEQ ID NO: 1990173 - RNA, 19 nt, Artificial Sequence
  Description of Artificial Sequence: Synthetic oligonucleotide
ucaaggacuaaggacuccu

SEQ ID NO: 1990174 - RNA, 19 nt, Artificial Sequence
  Description of Artificial Sequence: Synthetic oligonucleotide
aauuguguaucggaaccaa

SEQ ID NO: 1990175 - RNA, 19 nt, Artificial Sequence
  Description of Artificial Sequence: Synthetic oligonucleotide
aaggacuaaggacuccuuu

SEQ ID NO: 1990176 - RNA, 19 nt, Artificial Sequence
  Description of Artificial Sequence: Synthetic oligonucleotide
auacuuaaccaauuaccuu

SEQ ID NO: 1990177 - RNA, 19 nt, Artificial Sequence
  Description of Artificial Sequence: Synthetic oligonucleotide
caaguacuagaaaauaucu

SEQ ID NO: 1990178 - RNA, 19 nt, Artificial Sequence
  Description of Artificial Sequence: Synthetic oligonucleotide
guguaucggaaccaaguac

SEQ ID NO: 1990179 - RNA, 19 nt, Artificial Sequence
  Description of Artificial Sequence: Synthetic oligonucleotide
accauaucuuugacaaagc

SEQ ID NO: 1990180 - RNA, 19 nt, Artificial Sequence
  Description of Artificial Sequence: Synthetic oligonucleotide
agucaaaccagagguaacu

SEQ ID NO: 1990181 - RNA, 19 nt, Artificial Sequence
  Description of Artificial Sequence: Synthetic oligonucleotide
auaauccaugagaaugagg

SEQ ID NO: 1990182 - RNA, 19 nt, Artificial Sequence
  Description of Artificial Sequence: Synthetic oligonucleotide
ugauuaggacaagucaaac

SEQ ID NO: 1990183 - RNA, 19 nt, Artificial Sequence
  Description of Artificial Sequence: Synthetic oligonucleotide
auggccaccaagcagcaau

SEQ ID NO: 1990184 - RNA, 19 nt, Artificial Sequence
  Description of Artificial Sequence: Synthetic oligonucleotide
ucccuaauacucucauccc

SEQ ID NO: 1990185 - RNA, 19 nt, Artificial Sequence
  Description of Artificial Sequence: Synthetic oligonucleotide
uaccaaguacaaaggggca

SEQ ID NO: 1990186 - RNA, 19 nt, Artificial Sequence
  Description of Artificial Sequence: Synthetic oligonucleotide
agcgagagacgguagguca

SEQ ID NO: 1990187 - RNA, 19 nt, Artificial Sequence
  Description of Artificial Sequence: Synthetic oligonucleotide
gaacuacgaacauuuaacu

SEQ ID NO: 1990188 - RNA, 19 nt, Artificial Sequence
  Description of Artificial Sequence: Synthetic oligonucleotide
aagcgagagacgguagguc

SEQ ID NO: 1990189 - RNA, 19 nt, Artificial Sequence
  Description of Artificial Sequence: Synthetic oligonucleotide
acaaugguugggguguggg

SEQ ID NO: 1990190 - RNA, 19 nt, Artificial Sequence
  Description of Artificial Sequence: Synthetic oligonucleotide
gaaugaggucaccuuuccc

SEQ ID NO: 1990191 - RNA, 19 nt, Artificial Sequence
  Description of Artificial Sequence: Synthetic oligonucleotide
uaucggaaccaaguacuag

SEQ ID NO: 1990192 - RNA, 19 nt, Artificial Sequence
  Description of Artificial Sequence: Synthetic oligonucleotide
cuuuaccauaucuuugaca

SEQ ID NO: 1990193 - RNA, 19 nt, Artificial Sequence
  Description of Artificial Sequence: Synthetic oligonucleotide
ccaaguacuagaaaauauc

SEQ ID NO: 1990194 - RNA, 19 nt, Artificial Sequence
  Description of Artificial Sequence: Synthetic oligonucleotide
agagguaacuacaguuaac

SEQ ID NO: 1990195 - RNA, 19 nt, Artificial Sequence
  Description of Artificial Sequence: Synthetic oligonucleotide
guaaugugaccacaagcuc

SEQ ID NO: 1990196 - RNA, 19 nt, Artificial Sequence
  Description of Artificial Sequence: Synthetic oligonucleotide
uuccacaacgucacuguaa

SEQ ID NO: 1990197 - RNA, 19 nt, Artificial Sequence
  Description of Artificial Sequence: Synthetic oligonucleotide
gaaaauaucugaggccaca

SEQ ID NO: 1990198 - RNA, 19 nt, Artificial Sequence
  Description of Artificial Sequence: Synthetic oligonucleotide
cuaaggacuccuuucaucu

SEQ ID NO: 1990199 - RNA, 19 nt, Artificial Sequence
  Description of Artificial Sequence: Synthetic oligonucleotide
ucggaaccaaguacuagaa

SEQ ID NO: 1990200 - RNA, 19 nt, Artificial Sequence
  Description of Artificial Sequence: Synthetic oligonucleotide
ugaauccuuacagaaggau

SEQ ID NO: 1990201 - RNA, 19 nt, Artificial Sequence
  Description of Artificial Sequence: Synthetic oligonucleotide
caggauuuuaagcaagcga

SEQ ID NO: 1990202 - RNA, 19 nt, Artificial Sequence
  Description of Artificial Sequence: Synthetic oligonucleotide
uccguaggcaugcccacug

SEQ ID NO: 1990203 - RNA, 19 nt, Artificial Sequence
  Description of Artificial Sequence: Synthetic oligonucleotide
uuaccuucuuauacagaaa

SEQ ID NO: 1990204 - RNA, 19 nt, Artificial Sequence
  Description of Artificial Sequence: Synthetic oligonucleotide
caucggaaaaggagacucc

SEQ ID NO: 1990205 - RNA, 19 nt, Artificial Sequence
  Description of Artificial Sequence: Synthetic oligonucleotide
agcggcagagcauaaucca

SEQ ID NO: 1990206 - RNA, 19 nt, Artificial Sequence
  Description of Artificial Sequence: Synthetic oligonucleotide
agaaaccauaauuguguau

SEQ ID NO: 1990207 - RNA, 19 nt, Artificial Sequence
  Description of Artificial Sequence: Synthetic oligonucleotide
ucccucgggaagcuguucc

SEQ ID NO: 1990208 - RNA, 19 nt, Artificial Sequence
  Description of Artificial Sequence: Synthetic oligonucleotide
acgaugcaggaccaauguc

SEQ ID NO: 1990209 - RNA, 19 nt, Artificial Sequence
  Description of Artificial Sequence: Synthetic oligonucleotide
ucaucccugcauuaugguc

SEQ ID NO: 1990210 - RNA, 19 nt, Artificial Sequence
  Description of Artificial Sequence: Synthetic oligonucleotide
uccucaggauuuuaagcaa

SEQ ID NO: 1990211 - RNA, 19 nt, Artificial Sequence
  Description of Artificial Sequence: Synthetic oligonucleotide
gaugcaggaccaaugucac

SEQ ID NO: 1990212 - RNA, 19 nt, Artificial Sequence
  Description of Artificial Sequence: Synthetic oligonucleotide
cauaauccaugagaaugag

SEQ ID NO: 1990213 - RNA, 19 nt, Artificial Sequence
  Description of Artificial Sequence: Synthetic oligonucleotide
ugacucuucugugaguggu

SEQ ID NO: 1990214 - RNA, 19 nt, Artificial Sequence
  Description of Artificial Sequence: Synthetic oligonucleotide
ucuacuugauuaggacaag

SEQ ID NO: 1990215 - RNA, 19 nt, Artificial Sequence
  Description of Artificial Sequence: Synthetic oligonucleotide
aauuaccuucuuauacaga

SEQ ID NO: 1990216 - RNA, 19 nt, Artificial Sequence
  Description of Artificial Sequence: Synthetic oligonucleotide
cugcauuauggucugcuuc

SEQ ID NO: 1990217 - RNA, 19 nt, Artificial Sequence
  Description of Artificial Sequence: Synthetic oligonucleotide
gaacauuuuccucaggauu

SEQ ID NO: 1990218 - RNA, 19 nt, Artificial Sequence
  Description of Artificial Sequence: Synthetic oligonucleotide
aaugugaccacaagcucua

SEQ ID NO: 1990219 - RNA, 19 nt, Artificial Sequence
  Description of Artificial Sequence: Synthetic oligonucleotide
uaugcaugaccagguacca

SEQ ID NO: 1990220 - RNA, 19 nt, Artificial Sequence
  Description of Artificial Sequence: Synthetic oligonucleotide
augagaaugaggucaccuu

SEQ ID NO: 1990221 - RNA, 19 nt, Artificial Sequence
  Description of Artificial Sequence: Synthetic oligonucleotide
cauguggaaagcggcagag

SEQ ID NO: 1990222 - RNA, 19 nt, Artificial Sequence
  Description of Artificial Sequence: Synthetic oligonucleotide
caaagcucaaauuuacagu

SEQ ID NO: 1990223 - RNA, 19 nt, Artificial Sequence
  Description of Artificial Sequence: Synthetic oligonucleotide
acauuauauggagggaaga

SEQ ID NO: 1990224 - RNA, 19 nt, Artificial Sequence
  Description of Artificial Sequence: Synthetic oligonucleotide
uaacuacaguuaacaagaa

SEQ ID NO: 1990225 - RNA, 19 nt, Artificial Sequence
  Description of Artificial Sequence: Synthetic oligonucleotide
caccauucaauagcaaaug

SEQ ID NO: 1990226 - RNA, 19 nt, Artificial Sequence
  Description of Artificial Sequence: Synthetic oligonucleotide
accaaguacuagaaaauau

SEQ ID NO: 1990227 - RNA, 19 nt, Artificial Sequence
  Description of Artificial Sequence: Synthetic oligonucleotide
caauagcaaaugucaggac

SEQ ID NO: 1990228 - RNA, 19 nt, Artificial Sequence
  Description of Artificial Sequence: Synthetic oligonucleotide
ccauucaauagcaaauguc

SEQ ID NO: 1990229 - RNA, 19 nt, Artificial Sequence
  Description of Artificial Sequence: Synthetic oligonucleotide
cacaagcucuacuugauua

SEQ ID NO: 1990230 - RNA, 19 nt, Artificial Sequence
  Description of Artificial Sequence: Synthetic oligonucleotide
auaucugaggccacauuca

SEQ ID NO: 1990231 - RNA, 19 nt, Artificial Sequence
  Description of Artificial Sequence: Synthetic oligonucleotide
uggaaagcggcagagcaua

SEQ ID NO: 1990232 - RNA, 19 nt, Artificial Sequence
  Description of Artificial Sequence: Synthetic oligonucleotide
auccuuacagaaggaugac

SEQ ID NO: 1990233 - RNA, 19 nt, Artificial Sequence
  Description of Artificial Sequence: Synthetic oligonucleotide
ccuaauacucucaucccug

SEQ ID NO: 1990234 - RNA, 19 nt, Artificial Sequence
  Description of Artificial Sequence: Synthetic oligonucleotide
aucggaaaaggagacuccu

SEQ ID NO: 1990235 - RNA, 19 nt, Artificial Sequence
  Description of Artificial Sequence: Synthetic oligonucleotide
caacgucacuguaaacuug

SEQ ID NO: 1990236 - RNA, 19 nt, Artificial Sequence
  Description of Artificial Sequence: Synthetic oligonucleotide
caaucgaugcccacaacaa

SEQ ID NO: 1990237 - RNA, 19 nt, Artificial Sequence
  Description of Artificial Sequence: Synthetic oligonucleotide
auguggaaagcggcagagc

SEQ ID NO: 1990238 - RNA, 19 nt, Artificial Sequence
  Description of Artificial Sequence: Synthetic oligonucleotide
cuacauuauauggagggaa

SEQ ID NO: 1990239 - RNA, 19 nt, Artificial Sequence
  Description of Artificial Sequence: Synthetic oligonucleotide
aggacaagucaaaccagag

SEQ ID NO: 1990240 - RNA, 19 nt, Artificial Sequence
  Description of Artificial Sequence: Synthetic oligonucleotide
agugggucucacuguacca

SEQ ID NO: 1990241 - RNA, 19 nt, Artificial Sequence
  Description of Artificial Sequence: Synthetic oligonucleotide
uccuuacagaaggaugaca

SEQ ID NO: 1990242 - RNA, 19 nt, Artificial Sequence
  Description of Artificial Sequence: Synthetic oligonucleotide
acugaguaaugugaccaca

SEQ ID NO: 1990243 - RNA, 19 nt, Artificial Sequence
  Description of Artificial Sequence: Synthetic oligonucleotide
caucccugcauuauggucu

SEQ ID NO: 1990244 - RNA, 19 nt, Artificial Sequence
  Description of Artificial Sequence: Synthetic oligonucleotide
gcagcaaugaauccuuaca

SEQ ID NO: 1990245 - RNA, 19 nt, Artificial Sequence
  Description of Artificial Sequence: Synthetic oligonucleotide
acauguggaaagcggcaga

SEQ ID NO: 1990246 - RNA, 19 nt, Artificial Sequence
  Description of Artificial Sequence: Synthetic oligonucleotide
aagcaagcgagagacggua

SEQ ID NO: 1990247 - RNA, 19 nt, Artificial Sequence
  Description of Artificial Sequence: Synthetic oligonucleotide
agagacgguaggucagugu

SEQ ID NO: 1990248 - RNA, 19 nt, Artificial Sequence
  Description of Artificial Sequence: Synthetic oligonucleotide
cacauguggaaagcggcag

SEQ ID NO: 1990249 - RNA, 19 nt, Artificial Sequence
  Description of Artificial Sequence: Synthetic oligonucleotide
acuuaaccaauuaccuucu

SEQ ID NO: 1990250 - RNA, 19 nt, Artificial Sequence
  Description of Artificial Sequence: Synthetic oligonucleotide
caagucaaaccagagguaa

SEQ ID NO: 1990251 - RNA, 19 nt, Artificial Sequence
  Description of Artificial Sequence: Synthetic oligonucleotide
cucucucaacauccguagg

SEQ ID NO: 1990252 - RNA, 19 nt, Artificial Sequence
  Description of Artificial Sequence: Synthetic oligonucleotide
acauccguaggcaugccca

SEQ ID NO: 1990253 - RNA, 19 nt, Artificial Sequence
  Description of Artificial Sequence: Synthetic oligonucleotide
uacagaccccacgaugcag

SEQ ID NO: 1990254 - RNA, 19 nt, Artificial Sequence
  Description of Artificial Sequence: Synthetic oligonucleotide
cacugaguaaugugaccac

SEQ ID NO: 1990255 - RNA, 19 nt, Artificial Sequence
  Description of Artificial Sequence: Synthetic oligonucleotide
cucucaucccugcauuaug

SEQ ID NO: 1990256 - RNA, 19 nt, Artificial Sequence
  Description of Artificial Sequence: Synthetic oligonucleotide
ccauguaugcaugaccagg

SEQ ID NO: 1990257 - RNA, 19 nt, Artificial Sequence
  Description of Artificial Sequence: Synthetic oligonucleotide
ccaauuaccuucuuauaca

SEQ ID NO: 1990258 - RNA, 19 nt, Artificial Sequence
  Description of Artificial Sequence: Synthetic oligonucleotide
uuuccacaacgucacugua

SEQ ID NO: 1990259 - RNA, 19 nt, Artificial Sequence
  Description of Artificial Sequence: Synthetic oligonucleotide
uuaccauaucuuugacaaa

SEQ ID NO: 1990260 - RNA, 19 nt, Artificial Sequence
  Description of Artificial Sequence: Synthetic oligonucleotide
aguuaacaagaaauagaaa

SEQ ID NO: 1990261 - RNA, 19 nt, Artificial Sequence
  Description of Artificial Sequence: Synthetic oligonucleotide
aaaggggcacgugcaggag

SEQ ID NO: 1990262 - RNA, 19 nt, Artificial Sequence
  Description of Artificial Sequence: Synthetic oligonucleotide
cugaguaaugugaccacaa

SEQ ID NO: 1990263 - RNA, 19 nt, Artificial Sequence
  Description of Artificial Sequence: Synthetic oligonucleotide
gugcaucacuuuaauacac

SEQ ID NO: 1990264 - RNA, 19 nt, Artificial Sequence
  Description of Artificial Sequence: Synthetic oligonucleotide
gccacauucaguuuccaaa

SEQ ID NO: 1990265 - RNA, 19 nt, Artificial Sequence
  Description of Artificial Sequence: Synthetic oligonucleotide
agcccaucggaaaaggaga

SEQ ID NO: 1990266 - RNA, 19 nt, Artificial Sequence
  Description of Artificial Sequence: Synthetic oligonucleotide
gaauucuguuccucuccuc

SEQ ID NO: 1990267 - RNA, 19 nt, Artificial Sequence
  Description of Artificial Sequence: Synthetic oligonucleotide
gugucgggugacuauaaaa

SEQ ID NO: 1990268 - RNA, 19 nt, Artificial Sequence
  Description of Artificial Sequence: Synthetic oligonucleotide
guggaauucuguuccucuc

SEQ ID NO: 1990269 - RNA, 19 nt, Artificial Sequence
  Description of Artificial Sequence: Synthetic oligonucleotide
cauguaugcaugaccaggu

SEQ ID NO: 1990270 - RNA, 19 nt, Artificial Sequence
  Description of Artificial Sequence: Synthetic oligonucleotide
ucccauaagcaaacacuuu

SEQ ID NO: 1990271 - RNA, 19 nt, Artificial Sequence
  Description of Artificial Sequence: Synthetic oligonucleotide
ccagccuucccauguaugc

SEQ ID NO: 1990272 - RNA, 19 nt, Artificial Sequence
  Description of Artificial Sequence: Synthetic oligonucleotide
aucccugcauuauggucug

SEQ ID NO: 1990273 - RNA, 19 nt, Artificial Sequence
  Description of Artificial Sequence: Synthetic oligonucleotide
agacgguaggucagugucg

SEQ ID NO: 1990274 - RNA, 19 nt, Artificial Sequence
  Description of Artificial Sequence: Synthetic oligonucleotide
ggacuaaggacuccuuuca

SEQ ID NO: 1990275 - RNA, 19 nt, Artificial Sequence
  Description of Artificial Sequence: Synthetic oligonucleotide
ucagugucgggugacuaua

SEQ ID NO: 1990276 - RNA, 19 nt, Artificial Sequence
  Description of Artificial Sequence: Synthetic oligonucleotide
ucugugaguggugggcgug

SEQ ID NO: 1990277 - RNA, 19 nt, Artificial Sequence
  Description of Artificial Sequence: Synthetic oligonucleotide
ggcagagauggccaccaag

SEQ ID NO: 1990278 - RNA, 19 nt, Artificial Sequence
  Description of Artificial Sequence: Synthetic oligonucleotide
cuacgaacauuuaacuggu

SEQ ID NO: 1990279 - RNA, 19 nt, Artificial Sequence
  Description of Artificial Sequence: Synthetic oligonucleotide
agccuucccauguaugcau

SEQ ID NO: 1990280 - RNA, 19 nt, Artificial Sequence
  Description of Artificial Sequence: Synthetic oligonucleotide
acuguaaacuugauacuua

SEQ ID NO: 1990281 - RNA, 19 nt, Artificial Sequence
  Description of Artificial Sequence: Synthetic oligonucleotide
gacaaugguuggggugugg

SEQ ID NO: 1990282 - RNA, 19 nt, Artificial Sequence
  Description of Artificial Sequence: Synthetic oligonucleotide
uucugugaguggugggcgu

SEQ ID NO: 1990283 - RNA, 19 nt, Artificial Sequence
  Description of Artificial Sequence: Synthetic oligonucleotide
ucggaaaaggagacuccuu

SEQ ID NO: 1990284 - RNA, 19 nt, Artificial Sequence
  Description of Artificial Sequence: Synthetic oligonucleotide
cagagguaacuacaguuaa

SEQ ID NO: 1990285 - RNA, 19 nt, Artificial Sequence
  Description of Artificial Sequence: Synthetic oligonucleotide
uggcaauuacuuucuucua

SEQ ID NO: 1990286 - RNA, 19 nt, Artificial Sequence
  Description of Artificial Sequence: Synthetic oligonucleotide
caaaugucaggacaauggu

SEQ ID NO: 1990287 - RNA, 19 nt, Artificial Sequence
  Description of Artificial Sequence: Synthetic oligonucleotide
uaacugguacagaccccac

SEQ ID NO: 1990288 - RNA, 19 nt, Artificial Sequence
  Description of Artificial Sequence: Synthetic oligonucleotide
gcugggucaaggacuaagg

SEQ ID NO: 1990289 - RNA, 19 nt, Artificial Sequence
  Description of Artificial Sequence: Synthetic oligonucleotide
ucgggaagcuguuccuccu

SEQ ID NO: 1990290 - RNA, 19 nt, Artificial Sequence
  Description of Artificial Sequence: Synthetic oligonucleotide
gcauaauccaugagaauga

SEQ ID NO: 1990291 - RNA, 19 nt, Artificial Sequence
  Description of Artificial Sequence: Synthetic oligonucleotide
guacaaaggggcacgugca

SEQ ID NO: 1990292 - RNA, 19 nt, Artificial Sequence
  Description of Artificial Sequence: Synthetic oligonucleotide
caaauagguggaauucugu

SEQ ID NO: 1990293 - RNA, 19 nt, Artificial Sequence
  Description of Artificial Sequence: Synthetic oligonucleotide
cucucucucaacauccgua

SEQ ID NO: 1990294 - RNA, 19 nt, Artificial Sequence
  Description of Artificial Sequence: Synthetic oligonucleotide
uacucucaucccugcauua

SEQ ID NO: 1990295 - RNA, 19 nt, Artificial Sequence
  Description of Artificial Sequence: Synthetic oligonucleotide
uagguggaauucuguuccu

SEQ ID NO: 1990296 - RNA, 19 nt, Artificial Sequence
  Description of Artificial Sequence: Synthetic oligonucleotide
cuucccauguaugcaugac

SEQ ID NO: 1990297 - RNA, 19 nt, Artificial Sequence
  Description of Artificial Sequence: Synthetic oligonucleotide
agagugggucucacuguac

SEQ ID NO: 1990298 - RNA, 19 nt, Artificial Sequence
  Description of Artificial Sequence: Synthetic oligonucleotide
cucucaacauccguaggca

SEQ ID NO: 1990299 - RNA, 19 nt, Artificial Sequence
  Description of Artificial Sequence: Synthetic oligonucleotide
cauccguaggcaugcccac

SEQ ID NO: 1990300 - RNA, 19 nt, Artificial Sequence
  Description of Artificial Sequence: Synthetic oligonucleotide
acacauguggaaagcggca

SEQ ID NO: 1990301 - RNA, 19 nt, Artificial Sequence
  Description of Artificial Sequence: Synthetic oligonucleotide
gggucaaggacuaaggacu

SEQ ID NO: 1990302 - RNA, 19 nt, Artificial Sequence
  Description of Artificial Sequence: Synthetic oligonucleotide
agugucgggugacuauaaa

SEQ ID NO: 1990303 - RNA, 19 nt, Artificial Sequence
  Description of Artificial Sequence: Synthetic oligonucleotide
cugggucaaggacuaagga

SEQ ID NO: 1990304 - RNA, 19 nt, Artificial Sequence
  Description of Artificial Sequence: Synthetic oligonucleotide
uggugggcguggcugcaug

SEQ ID NO: 1990305 - RNA, 19 nt, Artificial Sequence
  Description of Artificial Sequence: Synthetic oligonucleotide
gagggaagagagugggucu

SEQ ID NO: 1990306 - RNA, 19 nt, Artificial Sequence
  Description of Artificial Sequence: Synthetic oligonucleotide
ccaucggaaaaggagacuc

SEQ ID NO: 1990307 - RNA, 19 nt, Artificial Sequence
  Description of Artificial Sequence: Synthetic oligonucleotide
augagacauggcaauuacu

SEQ ID NO: 1990308 - RNA, 19 nt, Artificial Sequence
  Description of Artificial Sequence: Synthetic oligonucleotide
gggauggucccucgggaag

SEQ ID NO: 1990309 - RNA, 19 nt, Artificial Sequence
  Description of Artificial Sequence: Synthetic oligonucleotide
cccacaacaaauaggugga

SEQ ID NO: 1990310 - RNA, 19 nt, Artificial Sequence
  Description of Artificial Sequence: Synthetic oligonucleotide
uaccagccuucccauguau

SEQ ID NO: 1990311 - RNA, 19 nt, Artificial Sequence
  Description of Artificial Sequence: Synthetic oligonucleotide
cugcuucacuccaagccca

SEQ ID NO: 1990312 - RNA, 19 nt, Artificial Sequence
  Description of Artificial Sequence: Synthetic oligonucleotide
cacgugcaggaguggcugg

SEQ ID NO: 1990313 - RNA, 19 nt, Artificial Sequence
  Description of Artificial Sequence: Synthetic oligonucleotide
auacgucaaugguguccuc

SEQ ID NO: 1990314 - RNA, 19 nt, Artificial Sequence
  Description of Artificial Sequence: Synthetic oligonucleotide
augaauccuuacagaagga

SEQ ID NO: 1990315 - RNA, 19 nt, Artificial Sequence
  Description of Artificial Sequence: Synthetic oligonucleotide
gagagacgguaggucagug

SEQ ID NO: 1990316 - RNA, 19 nt, Artificial Sequence
  Description of Artificial Sequence: Synthetic oligonucleotide
cgaugcaggaccaauguca

SEQ ID NO: 1990317 - RNA, 19 nt, Artificial Sequence
  Description of Artificial Sequence: Synthetic oligonucleotide
cagagauggccaccaagca

SEQ ID NO: 1990318 - RNA, 19 nt, Artificial Sequence
  Description of Artificial Sequence: Synthetic oligonucleotide
uacgaacauuuaacuggua

SEQ ID NO: 1990319 - RNA, 19 nt, Artificial Sequence
  Description of Artificial Sequence: Synthetic oligonucleotide
ccauaauuguguaucggaa

SEQ ID NO: 1990320 - RNA, 19 nt, Artificial Sequence
  Description of Artificial Sequence: Synthetic oligonucleotide
ggugacuauaaaaggcaga

SEQ ID NO: 1990321 - RNA, 19 nt, Artificial Sequence
  Description of Artificial Sequence: Synthetic oligonucleotide
gucaaggacuaaggacucc

SEQ ID NO: 1990322 - RNA, 19 nt, Artificial Sequence
  Description of Artificial Sequence: Synthetic oligonucleotide
caugagaaugaggucaccu

SEQ ID NO: 1990323 - RNA, 19 nt, Artificial Sequence
  Description of Artificial Sequence: Synthetic oligonucleotide
guacagaccccacgaugca

SEQ ID NO: 1990324 - RNA, 19 nt, Artificial Sequence
  Description of Artificial Sequence: Synthetic oligonucleotide
caggaccaaugucacccac

SEQ ID NO: 1990325 - RNA, 19 nt, Artificial Sequence
  Description of Artificial Sequence: Synthetic oligonucleotide
acgguaggucagugucggg

SEQ ID NO: 1990326 - RNA, 19 nt, Artificial Sequence
  Description of Artificial Sequence: Synthetic oligonucleotide
agcaagcgagagacgguag

SEQ ID NO: 1990327 - RNA, 19 nt, Artificial Sequence
  Description of Artificial Sequence: Synthetic oligonucleotide
accacaagcucuacuugau

SEQ ID NO: 1990328 - RNA, 19 nt, Artificial Sequence
  Description of Artificial Sequence: Synthetic oligonucleotide
cacgaugcaggaccaaugu

SEQ ID NO: 1990329 - RNA, 19 nt, Artificial Sequence
  Description of Artificial Sequence: Synthetic oligonucleotide
ccacugaguaaugugacca

SEQ ID NO: 1990330 - RNA, 19 nt, Artificial Sequence
  Description of Artificial Sequence: Synthetic oligonucleotide
accagccuucccauguaug

SEQ ID NO: 1990331 - RNA, 19 nt, Artificial Sequence
  Description of Artificial Sequence: Synthetic oligonucleotide
cuccaagcccaucggaaaa

SEQ ID NO: 1990332 - RNA, 19 nt, Artificial Sequence
  Description of Artificial Sequence: Synthetic oligonucleotide
gacuaaggacuccuuucau

SEQ ID NO: 1990333 - RNA, 19 nt, Artificial Sequence
  Description of Artificial Sequence: Synthetic oligonucleotide
ccacgaugcaggaccaaug

SEQ ID NO: 1990334 - RNA, 19 nt, Artificial Sequence
  Description of Artificial Sequence: Synthetic oligonucleotide
gaccagguaccaaguacaa

SEQ ID NO: 1990335 - RNA, 19 nt, Artificial Sequence
  Description of Artificial Sequence: Synthetic oligonucleotide
gucacccacuggugcauca

SEQ ID NO: 1990336 - RNA, 19 nt, Artificial Sequence
  Description of Artificial Sequence: Synthetic oligonucleotide
caggucuuuuccacaacgu

SEQ ID NO: 1990337 - RNA, 19 nt, Artificial Sequence
  Description of Artificial Sequence: Synthetic oligonucleotide
aggcagaacuacgaacauu

SEQ ID NO: 1990338 - RNA, 19 nt, Artificial Sequence
  Description of Artificial Sequence: Synthetic oligonucleotide
ccuuuaacuuuaccauauc

SEQ ID NO: 1990339 - RNA, 19 nt, Artificial Sequence
  Description of Artificial Sequence: Synthetic oligonucleotide
accagguaccaaguacaaa

SEQ ID NO: 1990340 - RNA, 19 nt, Artificial Sequence
  Description of Artificial Sequence: Synthetic oligonucleotide
ccaagcccaucggaaaagg

SEQ ID NO: 1990341 - RNA, 19 nt, Artificial Sequence
  Description of Artificial Sequence: Synthetic oligonucleotide
cuacuugauuaggacaagu

SEQ ID NO: 1990342 - RNA, 19 nt, Artificial Sequence
  Description of Artificial Sequence: Synthetic oligonucleotide
cgggugacuauaaaaggca

SEQ ID NO: 1990343 - RNA, 19 nt, Artificial Sequence
  Description of Artificial Sequence: Synthetic oligonucleotide
guaucggaaccaaguacua

SEQ ID NO: 1990344 - RNA, 19 nt, Artificial Sequence
  Description of Artificial Sequence: Synthetic oligonucleotide
ggaguggcugggucaagga

SEQ ID NO: 1990345 - RNA, 19 nt, Artificial Sequence
  Description of Artificial Sequence: Synthetic oligonucleotide
ggucaaggacuaaggacuc

SEQ ID NO: 1990346 - RNA, 19 nt, Artificial Sequence
  Description of Artificial Sequence: Synthetic oligonucleotide
guaggcaugcccacugagu

SEQ ID NO: 1990347 - RNA, 19 nt, Artificial Sequence
  Description of Artificial Sequence: Synthetic oligonucleotide
gcgagagacgguaggucag

SEQ ID NO: 1990348 - RNA, 19 nt, Artificial Sequence
  Description of Artificial Sequence: Synthetic oligonucleotide
ggaauacgucaaugguguc

SEQ ID NO: 1990349 - RNA, 19 nt, Artificial Sequence
  Description of Artificial Sequence: Synthetic oligonucleotide
cacaacaaauagguggaau

SEQ ID NO: 1990350 - RNA, 19 nt, Artificial Sequence
  Description of Artificial Sequence: Synthetic oligonucleotide
aagcagcaaugaauccuua

SEQ ID NO: 1990351 - RNA, 19 nt, Artificial Sequence
  Description of Artificial Sequence: Synthetic oligonucleotide
ggccaaguucccuaauacu

SEQ ID NO: 1990352 - RNA, 19 nt, Artificial Sequence
  Description of Artificial Sequence: Synthetic oligonucleotide
auccguaggcaugcccacu

SEQ ID NO: 1990353 - RNA, 19 nt, Artificial Sequence
  Description of Artificial Sequence: Synthetic oligonucleotide
gucagugucgggugacuau

SEQ ID NO: 1990354 - RNA, 19 nt, Artificial Sequence
  Description of Artificial Sequence: Synthetic oligonucleotide
cagccuucccauguaugca

SEQ ID NO: 1990355 - RNA, 19 nt, Artificial Sequence
  Description of Artificial Sequence: Synthetic oligonucleotide
caacauccguaggcaugcc

SEQ ID NO: 1990356 - RNA, 19 nt, Artificial Sequence
  Description of Artificial Sequence: Synthetic oligonucleotide
cagugucgggugacuauaa

SEQ ID NO: 1990357 - RNA, 19 nt, Artificial Sequence
  Description of Artificial Sequence: Synthetic oligonucleotide
augcaugaccagguaccaa

SEQ ID NO: 1990358 - RNA, 19 nt, Artificial Sequence
  Description of Artificial Sequence: Synthetic oligonucleotide
gaaagcggcagagcauaau

SEQ ID NO: 1990359 - RNA, 19 nt, Artificial Sequence
  Description of Artificial Sequence: Synthetic oligonucleotide
gcccacugaguaaugugac

SEQ ID NO: 1990360 - RNA, 19 nt, Artificial Sequence
  Description of Artificial Sequence: Synthetic oligonucleotide
caagcgagagacgguaggu

SEQ ID NO: 1990361 - RNA, 19 nt, Artificial Sequence
  Description of Artificial Sequence: Synthetic oligonucleotide
ccaccaagcagcaaugaau

SEQ ID NO: 1990362 - RNA, 19 nt, Artificial Sequence
  Description of Artificial Sequence: Synthetic oligonucleotide
guaccagccuucccaugua

SEQ ID NO: 1990363 - RNA, 19 nt, Artificial Sequence
  Description of Artificial Sequence: Synthetic oligonucleotide
gcccaucggaaaaggagac

SEQ ID NO: 1990364 - RNA, 19 nt, Artificial Sequence
  Description of Artificial Sequence: Synthetic oligonucleotide
ccacacuuuaaagcagguc

SEQ ID NO: 1990365 - RNA, 19 nt, Artificial Sequence
  Description of Artificial Sequence: Synthetic oligonucleotide
gggcacgugcaggaguggc

SEQ ID NO: 1990366 - RNA, 19 nt, Artificial Sequence
  Description of Artificial Sequence: Synthetic oligonucleotide
cauuuuccucaggauuuua

SEQ ID NO: 1990367 - RNA, 19 nt, Artificial Sequence
  Description of Artificial Sequence: Synthetic oligonucleotide
ggggauggucccucgggaa

SEQ ID NO: 1990368 - RNA, 19 nt, Artificial Sequence
  Description of Artificial Sequence: Synthetic oligonucleotide
gcaggaccaaugucaccca

SEQ ID NO: 1990369 - RNA, 19 nt, Artificial Sequence
  Description of Artificial Sequence: Synthetic oligonucleotide
ccuucccauguaugcauga

SEQ ID NO: 1990370 - RNA, 19 nt, Artificial Sequence
  Description of Artificial Sequence: Synthetic oligonucleotide
ccacaacgucacuguaaac

SEQ ID NO: 1990371 - RNA, 19 nt, Artificial Sequence
  Description of Artificial Sequence: Synthetic oligonucleotide
cccuaauacucucaucccu

SEQ ID NO: 1990372 - RNA, 19 nt, Artificial Sequence
  Description of Artificial Sequence: Synthetic oligonucleotide
ggacaaugguuggggugug

SEQ ID NO: 1990373 - RNA, 19 nt, Artificial Sequence
  Description of Artificial Sequence: Synthetic oligonucleotide
gccuucccauguaugcaug

SEQ ID NO: 1990374 - RNA, 19 nt, Artificial Sequence
  Description of Artificial Sequence: Synthetic oligonucleotide
acgucacuguaaacuugau

SEQ ID NO: 1990375 - RNA, 19 nt, Artificial Sequence
  Description of Artificial Sequence: Synthetic oligonucleotide
caaguacaaaggggcacgu

SEQ ID NO: 1990376 - RNA, 19 nt, Artificial Sequence
  Description of Artificial Sequence: Synthetic oligonucleotide
accccacgaugcaggacca

SEQ ID NO: 1990377 - RNA, 19 nt, Artificial Sequence
  Description of Artificial Sequence: Synthetic oligonucleotide
guggaaagcggcagagcau

SEQ ID NO: 1990378 - RNA, 19 nt, Artificial Sequence
  Description of Artificial Sequence: Synthetic oligonucleotide
ggcaugcccacugaguaau

SEQ ID NO: 1990379 - RNA, 19 nt, Artificial Sequence
  Description of Artificial Sequence: Synthetic oligonucleotide
caggcagaacuacgaacau

SEQ ID NO: 1990380 - RNA, 19 nt, Artificial Sequence
  Description of Artificial Sequence: Synthetic oligonucleotide
caaggacuaaggacuccuu

SEQ ID NO: 1990381 - RNA, 19 nt, Artificial Sequence
  Description of Artificial Sequence: Synthetic oligonucleotide
cuuaaccaauuaccuucuu

SEQ ID NO: 1990382 - RNA, 19 nt, Artificial Sequence
  Description of Artificial Sequence: Synthetic oligonucleotide
cacccacuggugcaucacu

SEQ ID NO: 1990383 - RNA, 19 nt, Artificial Sequence
  Description of Artificial Sequence: Synthetic oligonucleotide
cugguacagaccccacgau

SEQ ID NO: 1990384 - RNA, 19 nt, Artificial Sequence
  Description of Artificial Sequence: Synthetic oligonucleotide
ccacuggugcaucacuuua

SEQ ID NO: 1990385 - RNA, 19 nt, Artificial Sequence
  Description of Artificial Sequence: Synthetic oligonucleotide
ggggcacgugcaggagugg

SEQ ID NO: 1990386 - RNA, 19 nt, Artificial Sequence
  Description of Artificial Sequence: Synthetic oligonucleotide
ggucagugucgggugacua

SEQ ID NO: 1990387 - RNA, 19 nt, Artificial Sequence
  Description of Artificial Sequence: Synthetic oligonucleotide
gucccucgggaagcuguuc

SEQ ID NO: 1990388 - RNA, 19 nt, Artificial Sequence
  Description of Artificial Sequence: Synthetic oligonucleotide
ggaaagcggcagagcauaa

SEQ ID NO: 1990389 - RNA, 19 nt, Artificial Sequence
  Description of Artificial Sequence: Synthetic oligonucleotide
ggucaccuuucccuggcuu

SEQ ID NO: 1990390 - RNA, 19 nt, Artificial Sequence
  Description of Artificial Sequence: Synthetic oligonucleotide
gcagaacuacgaacauuua

SEQ ID NO: 1990391 - RNA, 19 nt, Artificial Sequence
  Description of Artificial Sequence: Synthetic oligonucleotide
cuggagugucuguuucguu

SEQ ID NO: 1990392 - RNA, 19 nt, Artificial Sequence
  Description of Artificial Sequence: Synthetic oligonucleotide
cggaaccaaguacuagaaa

SEQ ID NO: 1990393 - RNA, 19 nt, Artificial Sequence
  Description of Artificial Sequence: Synthetic oligonucleotide
ccugcauuauggucugcuu

SEQ ID NO: 1990394 - RNA, 19 nt, Artificial Sequence
  Description of Artificial Sequence: Synthetic oligonucleotide
ccacaacaaauagguggaa

SEQ ID NO: 1990395 - RNA, 19 nt, Artificial Sequence
  Description of Artificial Sequence: Synthetic oligonucleotide
cgguaggucagugucgggu

SEQ ID NO: 1990396 - RNA, 19 nt, Artificial Sequence
  Description of Artificial Sequence: Synthetic oligonucleotide
ccacaagcucuacuugauu

SEQ ID NO: 1990397 - RNA, 19 nt, Artificial Sequence
  Description of Artificial Sequence: Synthetic oligonucleotide
cccaucggaaaaggagacu

SEQ ID NO: 1990398 - RNA, 19 nt, Artificial Sequence
  Description of Artificial Sequence: Synthetic oligonucleotide
cccacgaugcaggaccaau

SEQ ID NO: 1990399 - RNA, 19 nt, Artificial Sequence
  Description of Artificial Sequence: Synthetic oligonucleotide
guggugggcguggcugcau

SEQ ID NO: 1990400 - RNA, 19 nt, Artificial Sequence
  Description of Artificial Sequence: Synthetic oligonucleotide
ggucccucgggaagcuguu

SEQ ID NO: 1990401 - RNA, 19 nt, Artificial Sequence
  Description of Artificial Sequence: Synthetic oligonucleotide
cgagagacgguaggucagu

SEQ ID NO: 1990402 - RNA, 19 nt, Artificial Sequence
  Description of Artificial Sequence: Synthetic oligonucleotide
ccccacgaugcaggaccaa

SEQ ID NO: 1990403 - RNA, 19 nt, Artificial Sequence
  Description of Artificial Sequence: Synthetic oligonucleotide
aaguauacauguuacaagc

SEQ ID NO: 1990404 - RNA, 19 nt, Artificial Sequence
  Description of Artificial Sequence: Synthetic oligonucleotide
uuuaaucucaguacaaugg

SEQ ID NO: 1990405 - RNA, 19 nt, Artificial Sequence
  Description of Artificial Sequence: Synthetic oligonucleotide
aacauuucaauggaaaagc

SEQ ID NO: 1990406 - RNA, 19 nt, Artificial Sequence
  Description of Artificial Sequence: Synthetic oligonucleotide
agaagugaaagacuggucc

SEQ ID NO: 1990407 - RNA, 19 nt, Artificial Sequence
  Description of Artificial Sequence: Synthetic oligonucleotide
aguacaauggauucaagac

SEQ ID NO: 1990408 - RNA, 19 nt, Artificial Sequence
  Description of Artificial Sequence: Synthetic oligonucleotide
auuacaaauuaucauaguc

SEQ ID NO: 1990409 - RNA, 19 nt, Artificial Sequence
  Description of Artificial Sequence: Synthetic oligonucleotide
uuaaacaguaccuaucagg

SEQ ID NO: 1990410 - RNA, 19 nt, Artificial Sequence
  Description of Artificial Sequence: Synthetic oligonucleotide
uaaaucacccacauuaacg

SEQ ID NO: 1990411 - RNA, 19 nt, Artificial Sequence
  Description of Artificial Sequence: Synthetic oligonucleotide
ugaaccaacacuuaaccgg

SEQ ID NO: 1990412 - RNA, 19 nt, Artificial Sequence
  Description of Artificial Sequence: Synthetic oligonucleotide
uuuagcaucaucuagaauu

SEQ ID NO: 1990413 - RNA, 19 nt, Artificial Sequence
  Description of Artificial Sequence: Synthetic oligonucleotide
aaauacaagcuuuaaaaca

SEQ ID NO: 1990414 - RNA, 19 nt, Artificial Sequence
  Description of Artificial Sequence: Synthetic oligonucleotide
uaugcauaaagguagauga

SEQ ID NO: 1990415 - RNA, 19 nt, Artificial Sequence
  Description of Artificial Sequence: Synthetic oligonucleotide
uuaguugagacagacaugg

SEQ ID NO: 1990416 - RNA, 19 nt, Artificial Sequence
  Description of Artificial Sequence: Synthetic oligonucleotide
ugauuuauaacucucggcu

SEQ ID NO: 1990417 - RNA, 19 nt, Artificial Sequence
  Description of Artificial Sequence: Synthetic oligonucleotide
aauggaaaagcauauuaug

SEQ ID NO: 1990418 - RNA, 19 nt, Artificial Sequence
  Description of Artificial Sequence: Synthetic oligonucleotide
uuugcaaagacuuaagccu

SEQ ID NO: 1990419 - RNA, 19 nt, Artificial Sequence
  Description of Artificial Sequence: Synthetic oligonucleotide
uuuugcaaagacuuaagcc

SEQ ID NO: 1990420 - RNA, 19 nt, Artificial Sequence
  Description of Artificial Sequence: Synthetic oligonucleotide
aucaucaucaucaucaucg

SEQ ID NO: 1990421 - RNA, 19 nt, Artificial Sequence
  Description of Artificial Sequence: Synthetic oligonucleotide
ugaucaauggcaaaggggu

SEQ ID NO: 1990422 - RNA, 19 nt, Artificial Sequence
  Description of Artificial Sequence: Synthetic oligonucleotide
ucugauuuauaacucucgg

SEQ ID NO: 1990423 - RNA, 19 nt, Artificial Sequence
  Description of Artificial Sequence: Synthetic oligonucleotide
gaauuguggucacauaucg

SEQ ID NO: 1990424 - RNA, 19 nt, Artificial Sequence
  Description of Artificial Sequence: Synthetic oligonucleotide
auaaauuuuagcaucaucu

SEQ ID NO: 1990425 - RNA, 19 nt, Artificial Sequence
  Description of Artificial Sequence: Synthetic oligonucleotide
aaaccauuacuacuucuac

SEQ ID NO: 1990426 - RNA, 19 nt, Artificial Sequence
  Description of Artificial Sequence: Synthetic oligonucleotide
aaaacaucuaacaugcuug

SEQ ID NO: 1990427 - RNA, 19 nt, Artificial Sequence
  Description of Artificial Sequence: Synthetic oligonucleotide
guuacaagcauccaggcug

SEQ ID NO: 1990428 - RNA, 19 nt, Artificial Sequence
  Description of Artificial Sequence: Synthetic oligonucleotide
acauuaacguacuucaguc

SEQ ID NO: 1990429 - RNA, 19 nt, Artificial Sequence
  Description of Artificial Sequence: Synthetic oligonucleotide
uacaauggauucaagacca

SEQ ID NO: 1990430 - RNA, 19 nt, Artificial Sequence
  Description of Artificial Sequence: Synthetic oligonucleotide
cauguuacaagcauccagg

SEQ ID NO: 1990431 - RNA, 19 nt, Artificial Sequence
  Description of Artificial Sequence: Synthetic oligonucleotide
uugaucaauggcaaagggg

SEQ ID NO: 1990432 - RNA, 19 nt, Artificial Sequence
  Description of Artificial Sequence: Synthetic oligonucleotide
aaaucacccacauuaacgu

SEQ ID NO: 1990433 - RNA, 19 nt, Artificial Sequence
  Description of Artificial Sequence: Synthetic oligonucleotide
uuaguaguaauaagaaugu

SEQ ID NO: 1990434 - RNA, 19 nt, Artificial Sequence
  Description of Artificial Sequence: Synthetic oligonucleotide
cauauuaguaguaauaaga

SEQ ID NO: 1990435 - RNA, 19 nt, Artificial Sequence
  Description of Artificial Sequence: Synthetic oligonucleotide
ucaguccugaucuugaugc

SEQ ID NO: 1990436 - RNA, 19 nt, Artificial Sequence
  Description of Artificial Sequence: Synthetic oligonucleotide
gacuucuugagcuaaauca

SEQ ID NO: 1990437 - RNA, 19 nt, Artificial Sequence
  Description of Artificial Sequence: Synthetic oligonucleotide
aagcauauuauguauacuu

SEQ ID NO: 1990438 - RNA, 19 nt, Artificial Sequence
  Description of Artificial Sequence: Synthetic oligonucleotide
aagccuauaguuuggagca

SEQ ID NO: 1990439 - RNA, 19 nt, Artificial Sequence
  Description of Artificial Sequence: Synthetic oligonucleotide
agcuaaaucacccacauua

SEQ ID NO: 1990440 - RNA, 19 nt, Artificial Sequence
  Description of Artificial Sequence: Synthetic oligonucleotide
uguacuguaaaccuuuguc

SEQ ID NO: 1990441 - RNA, 19 nt, Artificial Sequence
  Description of Artificial Sequence: Synthetic oligonucleotide
ucacguuuucuuuucaggg

SEQ ID NO: 1990442 - RNA, 19 nt, Artificial Sequence
  Description of Artificial Sequence: Synthetic oligonucleotide
uuuugggauaccauauuag

SEQ ID NO: 1990443 - RNA, 19 nt, Artificial Sequence
  Description of Artificial Sequence: Synthetic oligonucleotide
ucaucuagaauugugguca

SEQ ID NO: 1990444 - RNA, 19 nt, Artificial Sequence
  Description of Artificial Sequence: Synthetic oligonucleotide
acuaaaacugaacauuuca

SEQ ID NO: 1990445 - RNA, 19 nt, Artificial Sequence
  Description of Artificial Sequence: Synthetic oligonucleotide
auacauguuacaagcaucc

SEQ ID NO: 1990446 - RNA, 19 nt, Artificial Sequence
  Description of Artificial Sequence: Synthetic oligonucleotide
aaaccuuuguccugugagg

SEQ ID NO: 1990447 - RNA, 19 nt, Artificial Sequence
  Description of Artificial Sequence: Synthetic oligonucleotide
ucugcuagaaacugaacca

SEQ ID NO: 1990448 - RNA, 19 nt, Artificial Sequence
  Description of Artificial Sequence: Synthetic oligonucleotide
ugaaagacugguccgcacg

SEQ ID NO: 1990449 - RNA, 19 nt, Artificial Sequence
  Description of Artificial Sequence: Synthetic oligonucleotide
uggauuacaaauuaucaua

SEQ ID NO: 1990450 - RNA, 19 nt, Artificial Sequence
  Description of Artificial Sequence: Synthetic oligonucleotide
ggaauugaagcuuucacag

SEQ ID NO: 1990451 - RNA, 19 nt, Artificial Sequence
  Description of Artificial Sequence: Synthetic oligonucleotide
auuaacguacuucaguccu

SEQ ID NO: 1990452 - RNA, 19 nt, Artificial Sequence
  Description of Artificial Sequence: Synthetic oligonucleotide
uaucagguggcaaucuagg

SEQ ID NO: 1990453 - RNA, 19 nt, Artificial Sequence
  Description of Artificial Sequence: Synthetic oligonucleotide
auuguggucacauaucgga

SEQ ID NO: 1990454 - RNA, 19 nt, Artificial Sequence
  Description of Artificial Sequence: Synthetic oligonucleotide
uucacguuuucuuuucagg

SEQ ID NO: 1990455 - RNA, 19 nt, Artificial Sequence
  Description of Artificial Sequence: Synthetic oligonucleotide
gacuuaagccuauaguuug

SEQ ID NO: 1990456 - RNA, 19 nt, Artificial Sequence
  Description of Artificial Sequence: Synthetic oligonucleotide
cuugaugcaaguucuuugc

SEQ ID NO: 1990457 - RNA, 19 nt, Artificial Sequence
  Description of Artificial Sequence: Synthetic oligonucleotide
aaggcaaacuccaacaucu

SEQ ID NO: 1990458 - RNA, 19 nt, Artificial Sequence
  Description of Artificial Sequence: Synthetic oligonucleotide
uguauuuugggauaccaua

SEQ ID NO: 1990459 - RNA, 19 nt, Artificial Sequence
  Description of Artificial Sequence: Synthetic oligonucleotide
uguauacuucuuaaauacc

SEQ ID NO: 1990460 - RNA, 19 nt, Artificial Sequence
  Description of Artificial Sequence: Synthetic oligonucleotide
guacuguaaaccuuugucc

SEQ ID NO: 1990461 - RNA, 19 nt, Artificial Sequence
  Description of Artificial Sequence: Synthetic oligonucleotide
uucuugagcuaaaucaccc

SEQ ID NO: 1990462 - RNA, 19 nt, Artificial Sequence
  Description of Artificial Sequence: Synthetic oligonucleotide
gcuugaauaaauuuuagca

SEQ ID NO: 1990463 - RNA, 19 nt, Artificial Sequence
  Description of Artificial Sequence: Synthetic oligonucleotide
auuuauaacucucggcuca

SEQ ID NO: 1990464 - RNA, 19 nt, Artificial Sequence
  Description of Artificial Sequence: Synthetic oligonucleotide
gaagcuuucacagcagggg

SEQ ID NO: 1990465 - RNA, 19 nt, Artificial Sequence
  Description of Artificial Sequence: Synthetic oligonucleotide
uauacauguuacaagcauc

SEQ ID NO: 1990466 - RNA, 19 nt, Artificial Sequence
  Description of Artificial Sequence: Synthetic oligonucleotide
uaacucucggcucauauuc

SEQ ID NO: 1990467 - RNA, 19 nt, Artificial Sequence
  Description of Artificial Sequence: Synthetic oligonucleotide
acauguuacaagcauccag

SEQ ID NO: 1990468 - RNA, 19 nt, Artificial Sequence
  Description of Artificial Sequence: Synthetic oligonucleotide
uuugggauaccauauuagu

SEQ ID NO: 1990469 - RNA, 19 nt, Artificial Sequence
  Description of Artificial Sequence: Synthetic oligonucleotide
gucugcuagaaacugaacc

SEQ ID NO: 1990470 - RNA, 19 nt, Artificial Sequence
  Description of Artificial Sequence: Synthetic oligonucleotide
caaguauacauguuacaag

SEQ ID NO: 1990471 - RNA, 19 nt, Artificial Sequence
  Description of Artificial Sequence: Synthetic oligonucleotide
gucaucaucaucaucauca

SEQ ID NO: 1990472 - RNA, 19 nt, Artificial Sequence
  Description of Artificial Sequence: Synthetic oligonucleotide
aagugaaagacugguccgc

SEQ ID NO: 1990473 - RNA, 19 nt, Artificial Sequence
  Description of Artificial Sequence: Synthetic oligonucleotide
ucuuucggcaugcucuugg

SEQ ID NO: 1990474 - RNA, 19 nt, Artificial Sequence
  Description of Artificial Sequence: Synthetic oligonucleotide
auguugcgggaauugaagc

SEQ ID NO: 1990475 - RNA, 19 nt, Artificial Sequence
  Description of Artificial Sequence: Synthetic oligonucleotide
aacugaaccaacacuuaac

SEQ ID NO: 1990476 - RNA, 19 nt, Artificial Sequence
  Description of Artificial Sequence: Synthetic oligonucleotide
aauuagugauggauuaauc

SEQ ID NO: 1990477 - RNA, 19 nt, Artificial Sequence
  Description of Artificial Sequence: Synthetic oligonucleotide
aagggguuugauuucuuug

SEQ ID NO: 1990478 - RNA, 19 nt, Artificial Sequence
  Description of Artificial Sequence: Synthetic oligonucleotide
uuuggagcaguuaaacagu

SEQ ID NO: 1990479 - RNA, 19 nt, Artificial Sequence
  Description of Artificial Sequence: Synthetic oligonucleotide
uucuuuucagggcauuugc

SEQ ID NO: 1990480 - RNA, 19 nt, Artificial Sequence
  Description of Artificial Sequence: Synthetic oligonucleotide
aauggauucaagaccaagu

SEQ ID NO: 1990481 - RNA, 19 nt, Artificial Sequence
  Description of Artificial Sequence: Synthetic oligonucleotide
uuuuggacccaauuaguga

SEQ ID NO: 1990482 - RNA, 19 nt, Artificial Sequence
  Description of Artificial Sequence: Synthetic oligonucleotide
aguauggcuugaucaaugg

SEQ ID NO: 1990483 - RNA, 19 nt, Artificial Sequence
  Description of Artificial Sequence: Synthetic oligonucleotide
aaacaucuaacaugcuugu

SEQ ID NO: 1990484 - RNA, 19 nt, Artificial Sequence
  Description of Artificial Sequence: Synthetic oligonucleotide
aaccuuuguccugugaggg

SEQ ID NO: 1990485 - RNA, 19 nt, Artificial Sequence
  Description of Artificial Sequence: Synthetic oligonucleotide
auaucggaaggcaaacucc

SEQ ID NO: 1990486 - RNA, 19 nt, Artificial Sequence
  Description of Artificial Sequence: Synthetic oligonucleotide
uaaauuuuagcaucaucua

SEQ ID NO: 1990487 - RNA, 19 nt, Artificial Sequence
  Description of Artificial Sequence: Synthetic oligonucleotide
ucaagaccaaguauacaug

SEQ ID NO: 1990488 - RNA, 19 nt, Artificial Sequence
  Description of Artificial Sequence: Synthetic oligonucleotide
uuuggacccaauuagugau

SEQ ID NO: 1990489 - RNA, 19 nt, Artificial Sequence
  Description of Artificial Sequence: Synthetic oligonucleotide
uuuaguugagacagacaug

SEQ ID NO: 1990490 - RNA, 19 nt, Artificial Sequence
  Description of Artificial Sequence: Synthetic oligonucleotide
uguggucacauaucggaag

SEQ ID NO: 1990491 - RNA, 19 nt, Artificial Sequence
  Description of Artificial Sequence: Synthetic oligonucleotide
gaacuguuauucuuccugc

SEQ ID NO: 1990492 - RNA, 19 nt, Artificial Sequence
  Description of Artificial Sequence: Synthetic oligonucleotide
gaaccaacacuuaaccggg

SEQ ID NO: 1990493 - RNA, 19 nt, Artificial Sequence
  Description of Artificial Sequence: Synthetic oligonucleotide
uggaaaagcauauuaugua

SEQ ID NO: 1990494 - RNA, 19 nt, Artificial Sequence
  Description of Artificial Sequence: Synthetic oligonucleotide
acuucuacuaaaacugaac

SEQ ID NO: 1990495 - RNA, 19 nt, Artificial Sequence
  Description of Artificial Sequence: Synthetic oligonucleotide
gaaagacugguccgcacgg

SEQ ID NO: 1990496 - RNA, 19 nt, Artificial Sequence
  Description of Artificial Sequence: Synthetic oligonucleotide
uguuauucuuccugcagga

SEQ ID NO: 1990497 - RNA, 19 nt, Artificial Sequence
  Description of Artificial Sequence: Synthetic oligonucleotide
uaucggaaggcaaacucca

SEQ ID NO: 1990498 - RNA, 19 nt, Artificial Sequence
  Description of Artificial Sequence: Synthetic oligonucleotide
aaacugaaccaacacuuaa

SEQ ID NO: 1990499 - RNA, 19 nt, Artificial Sequence
  Description of Artificial Sequence: Synthetic oligonucleotide
acuguuauucuuccugcag

SEQ ID NO: 1990500 - RNA, 19 nt, Artificial Sequence
  Description of Artificial Sequence: Synthetic oligonucleotide
cuagugugggaguacuugg

SEQ ID NO: 1990501 - RNA, 19 nt, Artificial Sequence
  Description of Artificial Sequence: Synthetic oligonucleotide
acugaauugccaaucgcac

SEQ ID NO: 1990502 - RNA, 19 nt, Artificial Sequence
  Description of Artificial Sequence: Synthetic oligonucleotide
ugguuuguggaguuggugu

SEQ ID NO: 1990503 - RNA, 19 nt, Artificial Sequence
  Description of Artificial Sequence: Synthetic oligonucleotide
aaccggggaacuguuauuc

SEQ ID NO: 1990504 - RNA, 19 nt, Artificial Sequence
  Description of Artificial Sequence: Synthetic oligonucleotide
acaucuaacaugcuuguuu

SEQ ID NO: 1990505 - RNA, 19 nt, Artificial Sequence
  Description of Artificial Sequence: Synthetic oligonucleotide
auuauguauacuucuuaaa

SEQ ID NO: 1990506 - RNA, 19 nt, Artificial Sequence
  Description of Artificial Sequence: Synthetic oligonucleotide
cugaaccaacacuuaaccg

SEQ ID NO: 1990507 - RNA, 19 nt, Artificial Sequence
  Description of Artificial Sequence: Synthetic oligonucleotide
gauuuauaacucucggcuc

SEQ ID NO: 1990508 - RNA, 19 nt, Artificial Sequence
  Description of Artificial Sequence: Synthetic oligonucleotide
cuucuacuaaaacugaaca

SEQ ID NO: 1990509 - RNA, 19 nt, Artificial Sequence
  Description of Artificial Sequence: Synthetic oligonucleotide
ugauauccggugaucagac

SEQ ID NO: 1990510 - RNA, 19 nt, Artificial Sequence
  Description of Artificial Sequence: Synthetic oligonucleotide
cuugggagaagccaucuug

SEQ ID NO: 1990511 - RNA, 19 nt, Artificial Sequence
  Description of Artificial Sequence: Synthetic oligonucleotide
uauaacucucggcucauau

SEQ ID NO: 1990512 - RNA, 19 nt, Artificial Sequence
  Description of Artificial Sequence: Synthetic oligonucleotide
uucuacuaaaacugaacau

SEQ ID NO: 1990513 - RNA, 19 nt, Artificial Sequence
  Description of Artificial Sequence: Synthetic oligonucleotide
ugagcuaaaucacccacau

SEQ ID NO: 1990514 - RNA, 19 nt, Artificial Sequence
  Description of Artificial Sequence: Synthetic oligonucleotide
uucugaacugcugauguug

SEQ ID NO: 1990515 - RNA, 19 nt, Artificial Sequence
  Description of Artificial Sequence: Synthetic oligonucleotide
aucacccacauuaacguac

SEQ ID NO: 1990516 - RNA, 19 nt, Artificial Sequence
  Description of Artificial Sequence: Synthetic oligonucleotide
aaacaguaccuaucaggug

SEQ ID NO: 1990517 - RNA, 19 nt, Artificial Sequence
  Description of Artificial Sequence: Synthetic oligonucleotide
cauuaacguacuucagucc

SEQ ID NO: 1990518 - RNA, 19 nt, Artificial Sequence
  Description of Artificial Sequence: Synthetic oligonucleotide
uuaagccuauaguuuggag

SEQ ID NO: 1990519 - RNA, 19 nt, Artificial Sequence
  Description of Artificial Sequence: Synthetic oligonucleotide
uuaaccggggaacuguuau

SEQ ID NO: 1990520 - RNA, 19 nt, Artificial Sequence
  Description of Artificial Sequence: Synthetic oligonucleotide
aauuguggucacauaucgg

SEQ ID NO: 1990521 - RNA, 19 nt, Artificial Sequence
  Description of Artificial Sequence: Synthetic oligonucleotide
cauaucggaaggcaaacuc

SEQ ID NO: 1990522 - RNA, 19 nt, Artificial Sequence
  Description of Artificial Sequence: Synthetic oligonucleotide
auuucaauggaaaagcaua

SEQ ID NO: 1990523 - RNA, 19 nt, Artificial Sequence
  Description of Artificial Sequence: Synthetic oligonucleotide
agcauauuauguauacuuc

SEQ ID NO: 1990524 - RNA, 19 nt, Artificial Sequence
  Description of Artificial Sequence: Synthetic oligonucleotide
ugccaaucgcacaucaucu

SEQ ID NO: 1990525 - RNA, 19 nt, Artificial Sequence
  Description of Artificial Sequence: Synthetic oligonucleotide
uugccaaucgcacaucauc

SEQ ID NO: 1990526 - RNA, 19 nt, Artificial Sequence
  Description of Artificial Sequence: Synthetic oligonucleotide
cuaucagguggcaaucuag

SEQ ID NO: 1990527 - RNA, 19 nt, Artificial Sequence
  Description of Artificial Sequence: Synthetic oligonucleotide
acguacuucaguccugauc

SEQ ID NO: 1990528 - RNA, 19 nt, Artificial Sequence
  Description of Artificial Sequence: Synthetic oligonucleotide
cuugagcuaaaucacccac

SEQ ID NO: 1990529 - RNA, 19 nt, Artificial Sequence
  Description of Artificial Sequence: Synthetic oligonucleotide
ucacauaucggaaggcaaa

SEQ ID NO: 1990530 - RNA, 19 nt, Artificial Sequence
  Description of Artificial Sequence: Synthetic oligonucleotide
ggauuacaaauuaucauag

SEQ ID NO: 1990531 - RNA, 19 nt, Artificial Sequence
  Description of Artificial Sequence: Synthetic oligonucleotide
guggucacauaucggaagg

SEQ ID NO: 1990532 - RNA, 19 nt, Artificial Sequence
  Description of Artificial Sequence: Synthetic oligonucleotide
aaucuaggaccugaguaug

SEQ ID NO: 1990533 - RNA, 19 nt, Artificial Sequence
  Description of Artificial Sequence: Synthetic oligonucleotide
uugagcuaaaucacccaca

SEQ ID NO: 1990534 - RNA, 19 nt, Artificial Sequence
  Description of Artificial Sequence: Synthetic oligonucleotide
caaagacuuaagccuauag

SEQ ID NO: 1990535 - RNA, 19 nt, Artificial Sequence
  Description of Artificial Sequence: Synthetic oligonucleotide
ucuagaauuguggucacau

SEQ ID NO: 1990536 - RNA, 19 nt, Artificial Sequence
  Description of Artificial Sequence: Synthetic oligonucleotide
uugggauaccauauuagua

SEQ ID NO: 1990537 - RNA, 19 nt, Artificial Sequence
  Description of Artificial Sequence: Synthetic oligonucleotide
uguaauccccauauccuuc

SEQ ID NO: 1990538 - RNA, 19 nt, Artificial Sequence
  Description of Artificial Sequence: Synthetic oligonucleotide
aguaguaauaagaauguuu

SEQ ID NO: 1990539 - RNA, 19 nt, Artificial Sequence
  Description of Artificial Sequence: Synthetic oligonucleotide
ugugagggacauuggagug

SEQ ID NO: 1990540 - RNA, 19 nt, Artificial Sequence
  Description of Artificial Sequence: Synthetic oligonucleotide
gauucaagaccaaguauac

SEQ ID NO: 1990541 - RNA, 19 nt, Artificial Sequence
  Description of Artificial Sequence: Synthetic oligonucleotide
agugugggaguacuugguc

SEQ ID NO: 1990542 - RNA, 19 nt, Artificial Sequence
  Description of Artificial Sequence: Synthetic oligonucleotide
gucaucaucaucaucaucu

SEQ ID NO: 1990543 - RNA, 19 nt, Artificial Sequence
  Description of Artificial Sequence: Synthetic oligonucleotide
uguugcgggaauugaagcu

SEQ ID NO: 1990544 - RNA, 19 nt, Artificial Sequence
  Description of Artificial Sequence: Synthetic oligonucleotide
aaacuccaacaucugauuu

SEQ ID NO: 1990545 - RNA, 19 nt, Artificial Sequence
  Description of Artificial Sequence: Synthetic oligonucleotide
agggguuugauuucuuugu

SEQ ID NO: 1990546 - RNA, 19 nt, Artificial Sequence
  Description of Artificial Sequence: Synthetic oligonucleotide
aacuguuauucuuccugca

SEQ ID NO: 1990547 - RNA, 19 nt, Artificial Sequence
  Description of Artificial Sequence: Synthetic oligonucleotide
cacguuuucuuuucagggc

SEQ ID NO: 1990548 - RNA, 19 nt, Artificial Sequence
  Description of Artificial Sequence: Synthetic oligonucleotide
aucugauuuauaacucucg

SEQ ID NO: 1990549 - RNA, 19 nt, Artificial Sequence
  Description of Artificial Sequence: Synthetic oligonucleotide
agaagcaggcaucuguacu

SEQ ID NO: 1990550 - RNA, 19 nt, Artificial Sequence
  Description of Artificial Sequence: Synthetic oligonucleotide
uugagacagacaugguuug

SEQ ID NO: 1990551 - RNA, 19 nt, Artificial Sequence
  Description of Artificial Sequence: Synthetic oligonucleotide
uuguuuaaucucaguacaa

SEQ ID NO: 1990552 - RNA, 19 nt, Artificial Sequence
  Description of Artificial Sequence: Synthetic oligonucleotide
uuaacguacuucaguccug

SEQ ID NO: 1990553 - RNA, 19 nt, Artificial Sequence
  Description of Artificial Sequence: Synthetic oligonucleotide
aguuuggagcaguuaaaca

SEQ ID NO: 1990554 - RNA, 19 nt, Artificial Sequence
  Description of Artificial Sequence: Synthetic oligonucleotide
aaagacugguccgcacggc

SEQ ID NO: 1990555 - RNA, 19 nt, Artificial Sequence
  Description of Artificial Sequence: Synthetic oligonucleotide
uggauucaagaccaaguau

SEQ ID NO: 1990556 - RNA, 19 nt, Artificial Sequence
  Description of Artificial Sequence: Synthetic oligonucleotide
uaaucucaguacaauggau

SEQ ID NO: 1990557 - RNA, 19 nt, Artificial Sequence
  Description of Artificial Sequence: Synthetic oligonucleotide
acaugguuuguggaguugg

SEQ ID NO: 1990558 - RNA, 19 nt, Artificial Sequence
  Description of Artificial Sequence: Synthetic oligonucleotide
uacuuuaguugagacagac

SEQ ID NO: 1990559 - RNA, 19 nt, Artificial Sequence
  Description of Artificial Sequence: Synthetic oligonucleotide
auauccggugaucagacuu

SEQ ID NO: 1990560 - RNA, 19 nt, Artificial Sequence
  Description of Artificial Sequence: Synthetic oligonucleotide
agaccaaguauacauguua

SEQ ID NO: 1990561 - RNA, 19 nt, Artificial Sequence
  Description of Artificial Sequence: Synthetic oligonucleotide
gauaccauauuaguaguaa

SEQ ID NO: 1990562 - RNA, 19 nt, Artificial Sequence
  Description of Artificial Sequence: Synthetic oligonucleotide
aacacuuaaccggggaacu

SEQ ID NO: 1990563 - RNA, 19 nt, Artificial Sequence
  Description of Artificial Sequence: Synthetic oligonucleotide
ucuugagcuaaaucaccca

SEQ ID NO: 1990564 - RNA, 19 nt, Artificial Sequence
  Description of Artificial Sequence: Synthetic oligonucleotide
auuacuacuucuacuaaaa

SEQ ID NO: 1990565 - RNA, 19 nt, Artificial Sequence
  Description of Artificial Sequence: Synthetic oligonucleotide
uguuuaaucucaguacaau

SEQ ID NO: 1990566 - RNA, 19 nt, Artificial Sequence
  Description of Artificial Sequence: Synthetic oligonucleotide
caugcuuguuuaaucucag

SEQ ID NO: 1990567 - RNA, 19 nt, Artificial Sequence
  Description of Artificial Sequence: Synthetic oligonucleotide
ucuuagcauggcuugaaua

SEQ ID NO: 1990568 - RNA, 19 nt, Artificial Sequence
  Description of Artificial Sequence: Synthetic oligonucleotide
uugcaaagacuuaagccua

SEQ ID NO: 1990569 - RNA, 19 nt, Artificial Sequence
  Description of Artificial Sequence: Synthetic oligonucleotide
ugauguugcgggaauugaa

SEQ ID NO: 1990570 - RNA, 19 nt, Artificial Sequence
  Description of Artificial Sequence: Synthetic oligonucleotide
gcuuguuuaaucucaguac

SEQ ID NO: 1990571 - RNA, 19 nt, Artificial Sequence
  Description of Artificial Sequence: Synthetic oligonucleotide
ugcuagaaacugaaccaac

SEQ ID NO: 1990572 - RNA, 19 nt, Artificial Sequence
  Description of Artificial Sequence: Synthetic oligonucleotide
aagacugguccgcacggca

SEQ ID NO: 1990573 - RNA, 19 nt, Artificial Sequence
  Description of Artificial Sequence: Synthetic oligonucleotide
agucaucaucaucaucauc

SEQ ID NO: 1990574 - RNA, 19 nt, Artificial Sequence
  Description of Artificial Sequence: Synthetic oligonucleotide
uccaggcuggauuacaaau

SEQ ID NO: 1990575 - RNA, 19 nt, Artificial Sequence
  Description of Artificial Sequence: Synthetic oligonucleotide
uauuuugggauaccauauu

SEQ ID NO: 1990576 - RNA, 19 nt, Artificial Sequence
  Description of Artificial Sequence: Synthetic oligonucleotide
acccacauuaacguacuuc

SEQ ID NO: 1990577 - RNA, 19 nt, Artificial Sequence
  Description of Artificial Sequence: Synthetic oligonucleotide
ucuguacuguaaaccuuug

SEQ ID NO: 1990578 - RNA, 19 nt, Artificial Sequence
  Description of Artificial Sequence: Synthetic oligonucleotide
auucuguaauccccauauc

SEQ ID NO: 1990579 - RNA, 19 nt, Artificial Sequence
  Description of Artificial Sequence: Synthetic oligonucleotide
aggcaucuguacuguaaac

SEQ ID NO: 1990580 - RNA, 19 nt, Artificial Sequence
  Description of Artificial Sequence: Synthetic oligonucleotide
aaucgcacaucaucugcau

SEQ ID NO: 1990581 - RNA, 19 nt, Artificial Sequence
  Description of Artificial Sequence: Synthetic oligonucleotide
gauuucuuugucuugcaau

SEQ ID NO: 1990582 - RNA, 19 nt, Artificial Sequence
  Description of Artificial Sequence: Synthetic oligonucleotide
ucuaggaccugaguauggc

SEQ ID NO: 1990583 - RNA, 19 nt, Artificial Sequence
  Description of Artificial Sequence: Synthetic oligonucleotide
accaaguauacauguuaca

SEQ ID NO: 1990584 - RNA, 19 nt, Artificial Sequence
  Description of Artificial Sequence: Synthetic oligonucleotide
ucaucaucaucaucaucgu

SEQ ID NO: 1990585 - RNA, 19 nt, Artificial Sequence
  Description of Artificial Sequence: Synthetic oligonucleotide
uauccggugaucagacuuc

SEQ ID NO: 1990586 - RNA, 19 nt, Artificial Sequence
  Description of Artificial Sequence: Synthetic oligonucleotide
uaggaccugaguauggcuu

SEQ ID NO: 1990587 - RNA, 19 nt, Artificial Sequence
  Description of Artificial Sequence: Synthetic oligonucleotide
gagacagacaugguuugug

SEQ ID NO: 1990588 - RNA, 19 nt, Artificial Sequence
  Description of Artificial Sequence: Synthetic oligonucleotide
ugcucuugggagaagccau

SEQ ID NO: 1990589 - RNA, 19 nt, Artificial Sequence
  Description of Artificial Sequence: Synthetic oligonucleotide
uagcauggcuugaauaaau

SEQ ID NO: 1990590 - RNA, 19 nt, Artificial Sequence
  Description of Artificial Sequence: Synthetic oligonucleotide
ucuuccugcaggaguagau

SEQ ID NO: 1990591 - RNA, 19 nt, Artificial Sequence
  Description of Artificial Sequence: Synthetic oligonucleotide
uuucagggcauuugcugac

SEQ ID NO: 1990592 - RNA, 19 nt, Artificial Sequence
  Description of Artificial Sequence: Synthetic oligonucleotide
acuuaagccuauaguuugg

SEQ ID NO: 1990593 - RNA, 19 nt, Artificial Sequence
  Description of Artificial Sequence: Synthetic oligonucleotide
ugugcaucuuucggcaugc

SEQ ID NO: 1990594 - RNA, 19 nt, Artificial Sequence
  Description of Artificial Sequence: Synthetic oligonucleotide
ucacccacauuaacguacu

SEQ ID NO: 1990595 - RNA, 19 nt, Artificial Sequence
  Description of Artificial Sequence: Synthetic oligonucleotide
acaguaccuaucagguggc

SEQ ID NO: 1990596 - RNA, 19 nt, Artificial Sequence
  Description of Artificial Sequence: Synthetic oligonucleotide
caugcucuugggagaagcc

SEQ ID NO: 1990597 - RNA, 19 nt, Artificial Sequence
  Description of Artificial Sequence: Synthetic oligonucleotide
ucggcucauauucuguaau

SEQ ID NO: 1990598 - RNA, 19 nt, Artificial Sequence
  Description of Artificial Sequence: Synthetic oligonucleotide
cuuucggcaugcucuuggg

SEQ ID NO: 1990599 - RNA, 19 nt, Artificial Sequence
  Description of Artificial Sequence: Synthetic oligonucleotide
gcucauauucuguaauccc

SEQ ID NO: 1990600 - RNA, 19 nt, Artificial Sequence
  Description of Artificial Sequence: Synthetic oligonucleotide
accugaguauggcuugauc

SEQ ID NO: 1990601 - RNA, 19 nt, Artificial Sequence
  Description of Artificial Sequence: Synthetic oligonucleotide
ggcacugaauugccaaucg

SEQ ID NO: 1990602 - RNA, 19 nt, Artificial Sequence
  Description of Artificial Sequence: Synthetic oligonucleotide
uuguggucacauaucggaa

SEQ ID NO: 1990603 - RNA, 19 nt, Artificial Sequence
  Description of Artificial Sequence: Synthetic oligonucleotide
cauuacuacuucuacuaaa

SEQ ID NO: 1990604 - RNA, 19 nt, Artificial Sequence
  Description of Artificial Sequence: Synthetic oligonucleotide
aaucacccacauuaacgua

SEQ ID NO: 1990605 - RNA, 19 nt, Artificial Sequence
  Description of Artificial Sequence: Synthetic oligonucleotide
uuggugugccuaguguggg

SEQ ID NO: 1990606 - RNA, 19 nt, Artificial Sequence
  Description of Artificial Sequence: Synthetic oligonucleotide
uagugugggaguacuuggu

SEQ ID NO: 1990607 - RNA, 19 nt, Artificial Sequence
  Description of Artificial Sequence: Synthetic oligonucleotide
gacagacaugguuugugga

SEQ ID NO: 1990608 - RNA, 19 nt, Artificial Sequence
  Description of Artificial Sequence: Synthetic oligonucleotide
uuggcuguauuuugggaua

SEQ ID NO: 1990609 - RNA, 19 nt, Artificial Sequence
  Description of Artificial Sequence: Synthetic oligonucleotide
gagugccuacuuuaguuga

SEQ ID NO: 1990610 - RNA, 19 nt, Artificial Sequence
  Description of Artificial Sequence: Synthetic oligonucleotide
auuggagugccuacuuuag

SEQ ID NO: 1990611 - RNA, 19 nt, Artificial Sequence
  Description of Artificial Sequence: Synthetic oligonucleotide
uaacguacuucaguccuga

SEQ ID NO: 1990612 - RNA, 19 nt, Artificial Sequence
  Description of Artificial Sequence: Synthetic oligonucleotide
ccauauuaguaguaauaag

SEQ ID NO: 1990613 - RNA, 19 nt, Artificial Sequence
  Description of Artificial Sequence: Synthetic oligonucleotide
caguagcuuucuuagcaug

SEQ ID NO: 1990614 - RNA, 19 nt, Artificial Sequence
  Description of Artificial Sequence: Synthetic oligonucleotide
gauggauuaaucagaacau

SEQ ID NO: 1990615 - RNA, 19 nt, Artificial Sequence
  Description of Artificial Sequence: Synthetic oligonucleotide
aauggcaaagggguuugau

SEQ ID NO: 1990616 - RNA, 19 nt, Artificial Sequence
  Description of Artificial Sequence: Synthetic oligonucleotide
gauuacaaauuaucauagu

SEQ ID NO: 1990617 - RNA, 19 nt, Artificial Sequence
  Description of Artificial Sequence: Synthetic oligonucleotide
ugcaucuuucggcaugcuc

SEQ ID NO: 1990618 - RNA, 19 nt, Artificial Sequence
  Description of Artificial Sequence: Synthetic oligonucleotide
caacacuuaaccggggaac

SEQ ID NO: 1990619 - RNA, 19 nt, Artificial Sequence
  Description of Artificial Sequence: Synthetic oligonucleotide
ggcaucuguacuguaaacc

SEQ ID NO: 1990620 - RNA, 19 nt, Artificial Sequence
  Description of Artificial Sequence: Synthetic oligonucleotide
ucaucaucaucaucaucau

SEQ ID NO: 1990621 - RNA, 19 nt, Artificial Sequence
  Description of Artificial Sequence: Synthetic oligonucleotide
acaguagcuuucuuagcau

SEQ ID NO: 1990622 - RNA, 19 nt, Artificial Sequence
  Description of Artificial Sequence: Synthetic oligonucleotide
accaacacuuaaccgggga

SEQ ID NO: 1990623 - RNA, 19 nt, Artificial Sequence
  Description of Artificial Sequence: Synthetic oligonucleotide
uuuaugcauaaagguagau

SEQ ID NO: 1990624 - RNA, 19 nt, Artificial Sequence
  Description of Artificial Sequence: Synthetic oligonucleotide
acauucugaacugcugaug

SEQ ID NO: 1990625 - RNA, 19 nt, Artificial Sequence
  Description of Artificial Sequence: Synthetic oligonucleotide
aguacuuggucugcuagaa

SEQ ID NO: 1990626 - RNA, 19 nt, Artificial Sequence
  Description of Artificial Sequence: Synthetic oligonucleotide
ggagugccuacuuuaguug

SEQ ID NO: 1990627 - RNA, 19 nt, Artificial Sequence
  Description of Artificial Sequence: Synthetic oligonucleotide
auaacucucggcucauauu

SEQ ID NO: 1990628 - RNA, 19 nt, Artificial Sequence
  Description of Artificial Sequence: Synthetic oligonucleotide
ugcaaagacuuaagccuau

SEQ ID NO: 1990629 - RNA, 19 nt, Artificial Sequence
  Description of Artificial Sequence: Synthetic oligonucleotide
gguuuguggaguuggugug

SEQ ID NO: 1990630 - RNA, 19 nt, Artificial Sequence
  Description of Artificial Sequence: Synthetic oligonucleotide
ucggcaugcucuugggaga

SEQ ID NO: 1990631 - RNA, 19 nt, Artificial Sequence
  Description of Artificial Sequence: Synthetic oligonucleotide
gaguacuuggucugcuaga

SEQ ID NO: 1990632 - RNA, 19 nt, Artificial Sequence
  Description of Artificial Sequence: Synthetic oligonucleotide
uucuuagcauggcuugaau

SEQ ID NO: 1990633 - RNA, 19 nt, Artificial Sequence
  Description of Artificial Sequence: Synthetic oligonucleotide
uuuccaaccccugguguac

SEQ ID NO: 1990634 - RNA, 19 nt, Artificial Sequence
  Description of Artificial Sequence: Synthetic oligonucleotide
acuccaacaucugauuuau

SEQ ID NO: 1990635 - RNA, 19 nt, Artificial Sequence
  Description of Artificial Sequence: Synthetic oligonucleotide
ggauucaagaccaaguaua

SEQ ID NO: 1990636 - RNA, 19 nt, Artificial Sequence
  Description of Artificial Sequence: Synthetic oligonucleotide
ggcucauauucuguaaucc

SEQ ID NO: 1990637 - RNA, 19 nt, Artificial Sequence
  Description of Artificial Sequence: Synthetic oligonucleotide
caagaccaaguauacaugu

SEQ ID NO: 1990638 - RNA, 19 nt, Artificial Sequence
  Description of Artificial Sequence: Synthetic oligonucleotide
gcuggauuacaaauuauca

SEQ ID NO: 1990639 - RNA, 19 nt, Artificial Sequence
  Description of Artificial Sequence: Synthetic oligonucleotide
cugaauugccaaucgcaca

SEQ ID NO: 1990640 - RNA, 19 nt, Artificial Sequence
  Description of Artificial Sequence: Synthetic oligonucleotide
cacauaucggaaggcaaac

SEQ ID NO: 1990641 - RNA, 19 nt, Artificial Sequence
  Description of Artificial Sequence: Synthetic oligonucleotide
ucaucaucaucaucaucuu

SEQ ID NO: 1990642 - RNA, 19 nt, Artificial Sequence
  Description of Artificial Sequence: Synthetic oligonucleotide
aggagaagugaaagacugg

SEQ ID NO: 1990643 - RNA, 19 nt, Artificial Sequence
  Description of Artificial Sequence: Synthetic oligonucleotide
agcaguuaaacaguaccua

SEQ ID NO: 1990644 - RNA, 19 nt, Artificial Sequence
  Description of Artificial Sequence: Synthetic oligonucleotide
caaucgcacaucaucugca

SEQ ID NO: 1990645 - RNA, 19 nt, Artificial Sequence
  Description of Artificial Sequence: Synthetic oligonucleotide
guggaguuggugugccuag

SEQ ID NO: 1990646 - RNA, 19 nt, Artificial Sequence
  Description of Artificial Sequence: Synthetic oligonucleotide
uacauguuacaagcaucca

SEQ ID NO: 1990647 - RNA, 19 nt, Artificial Sequence
  Description of Artificial Sequence: Synthetic oligonucleotide
aucuaggaccugaguaugg

SEQ ID NO: 1990648 - RNA, 19 nt, Artificial Sequence
  Description of Artificial Sequence: Synthetic oligonucleotide
cauuggagugccuacuuua

SEQ ID NO: 1990649 - RNA, 19 nt, Artificial Sequence
  Description of Artificial Sequence: Synthetic oligonucleotide
uuuauaacucucggcucau

SEQ ID NO: 1990650 - RNA, 19 nt, Artificial Sequence
  Description of Artificial Sequence: Synthetic oligonucleotide
cuggauuacaaauuaucau

SEQ ID NO: 1990651 - RNA, 19 nt, Artificial Sequence
  Description of Artificial Sequence: Synthetic oligonucleotide
ggauuugugccaucaucug

SEQ ID NO: 1990652 - RNA, 19 nt, Artificial Sequence
  Description of Artificial Sequence: Synthetic oligonucleotide
auuugcugacucauuggcu

SEQ ID NO: 1990653 - RNA, 19 nt, Artificial Sequence
  Description of Artificial Sequence: Synthetic oligonucleotide
aaccaacacuuaaccgggg

SEQ ID NO: 1990654 - RNA, 19 nt, Artificial Sequence
  Description of Artificial Sequence: Synthetic oligonucleotide
gcauauuauguauacuucu

SEQ ID NO: 1990655 - RNA, 19 nt, Artificial Sequence
  Description of Artificial Sequence: Synthetic oligonucleotide
cacauuaacguacuucagu

SEQ ID NO: 1990656 - RNA, 19 nt, Artificial Sequence
  Description of Artificial Sequence: Synthetic oligonucleotide
ucuugccagacuccaugau

SEQ ID NO: 1990657 - RNA, 19 nt, Artificial Sequence
  Description of Artificial Sequence: Synthetic oligonucleotide
caucuagaauuguggucac

SEQ ID NO: 1990658 - RNA, 19 nt, Artificial Sequence
  Description of Artificial Sequence: Synthetic oligonucleotide
aucuguacuguaaaccuuu

SEQ ID NO: 1990659 - RNA, 19 nt, Artificial Sequence
  Description of Artificial Sequence: Synthetic oligonucleotide
ccaaucgcacaucaucugc

SEQ ID NO: 1990660 - RNA, 19 nt, Artificial Sequence
  Description of Artificial Sequence: Synthetic oligonucleotide
ucuuugccuagugugguuu

SEQ ID NO: 1990661 - RNA, 19 nt, Artificial Sequence
  Description of Artificial Sequence: Synthetic oligonucleotide
caucaucaucaucaucauc

SEQ ID NO: 1990662 - RNA, 19 nt, Artificial Sequence
  Description of Artificial Sequence: Synthetic oligonucleotide
caucaucuagaauuguggu

SEQ ID NO: 1990663 - RNA, 19 nt, Artificial Sequence
  Description of Artificial Sequence: Synthetic oligonucleotide
ugcaaguucuuugccuagu

SEQ ID NO: 1990664 - RNA, 19 nt, Artificial Sequence
  Description of Artificial Sequence: Synthetic oligonucleotide
cauuucaauggaaaagcau

SEQ ID NO: 1990665 - RNA, 19 nt, Artificial Sequence
  Description of Artificial Sequence: Synthetic oligonucleotide
acuuggucugcuagaaacu

SEQ ID NO: 1990666 - RNA, 19 nt, Artificial Sequence
  Description of Artificial Sequence: Synthetic oligonucleotide
gaaacugaaccaacacuua

SEQ ID NO: 1990667 - RNA, 19 nt, Artificial Sequence
  Description of Artificial Sequence: Synthetic oligonucleotide
auggauuaaucagaacauu

SEQ ID NO: 1990668 - RNA, 19 nt, Artificial Sequence
  Description of Artificial Sequence: Synthetic oligonucleotide
uccaugauauccggugauc

SEQ ID NO: 1990669 - RNA, 19 nt, Artificial Sequence
  Description of Artificial Sequence: Synthetic oligonucleotide
ggggaacuguuauucuucc

SEQ ID NO: 1990670 - RNA, 19 nt, Artificial Sequence
  Description of Artificial Sequence: Synthetic oligonucleotide
agugccuacuuuaguugag

SEQ ID NO: 1990671 - RNA, 19 nt, Artificial Sequence
  Description of Artificial Sequence: Synthetic oligonucleotide
agacugguccgcacggcac

SEQ ID NO: 1990672 - RNA, 19 nt, Artificial Sequence
  Description of Artificial Sequence: Synthetic oligonucleotide
ggcuggauuacaaauuauc

SEQ ID NO: 1990673 - RNA, 19 nt, Artificial Sequence
  Description of Artificial Sequence: Synthetic oligonucleotide
uaguaguaauaagaauguu

SEQ ID NO: 1990674 - RNA, 19 nt, Artificial Sequence
  Description of Artificial Sequence: Synthetic oligonucleotide
acuuuaguugagacagaca

SEQ ID NO: 1990675 - RNA, 19 nt, Artificial Sequence
  Description of Artificial Sequence: Synthetic oligonucleotide
gacccaauuagugauggau

SEQ ID NO: 1990676 - RNA, 19 nt, Artificial Sequence
  Description of Artificial Sequence: Synthetic oligonucleotide
gagcaguuaaacaguaccu

SEQ ID NO: 1990677 - RNA, 19 nt, Artificial Sequence
  Description of Artificial Sequence: Synthetic oligonucleotide
acauuggagugccuacuuu

SEQ ID NO: 1990678 - RNA, 19 nt, Artificial Sequence
  Description of Artificial Sequence: Synthetic oligonucleotide
aucuaacaugcuuguuuaa

SEQ ID NO: 1990679 - RNA, 19 nt, Artificial Sequence
  Description of Artificial Sequence: Synthetic oligonucleotide
uccgcacggcacugaauug

SEQ ID NO: 1990680 - RNA, 19 nt, Artificial Sequence
  Description of Artificial Sequence: Synthetic oligonucleotide
gacaugguuuguggaguug

SEQ ID NO: 1990681 - RNA, 19 nt, Artificial Sequence
  Description of Artificial Sequence: Synthetic oligonucleotide
augcucuugggagaagcca

SEQ ID NO: 1990682 - RNA, 19 nt, Artificial Sequence
  Description of Artificial Sequence: Synthetic oligonucleotide
accuuuguccugugaggga

SEQ ID NO: 1990683 - RNA, 19 nt, Artificial Sequence
  Description of Artificial Sequence: Synthetic oligonucleotide
guauuuugggauaccauau

SEQ ID NO: 1990684 - RNA, 19 nt, Artificial Sequence
  Description of Artificial Sequence: Synthetic oligonucleotide
gugaaagacugguccgcac

SEQ ID NO: 1990685 - RNA, 19 nt, Artificial Sequence
  Description of Artificial Sequence: Synthetic oligonucleotide
gaucagacuucuugagcua

SEQ ID NO: 1990686 - RNA, 19 nt, Artificial Sequence
  Description of Artificial Sequence: Synthetic oligonucleotide
ugcaggaguagaugccuuu

SEQ ID NO: 1990687 - RNA, 19 nt, Artificial Sequence
  Description of Artificial Sequence: Synthetic oligonucleotide
ggauuaaucagaacauucu

SEQ ID NO: 1990688 - RNA, 19 nt, Artificial Sequence
  Description of Artificial Sequence: Synthetic oligonucleotide
gcaucuguacuguaaaccu

SEQ ID NO: 1990689 - RNA, 19 nt, Artificial Sequence
  Description of Artificial Sequence: Synthetic oligonucleotide
uugcgggaauugaagcuuu

SEQ ID NO: 1990690 - RNA, 19 nt, Artificial Sequence
  Description of Artificial Sequence: Synthetic oligonucleotide
agacaugguuuguggaguu

SEQ ID NO: 1990691 - RNA, 19 nt, Artificial Sequence
  Description of Artificial Sequence: Synthetic oligonucleotide
guaccuaucagguggcaau

SEQ ID NO: 1990692 - RNA, 19 nt, Artificial Sequence
  Description of Artificial Sequence: Synthetic oligonucleotide
aguaccuaucagguggcaa

SEQ ID NO: 1990693 - RNA, 19 nt, Artificial Sequence
  Description of Artificial Sequence: Synthetic oligonucleotide
guggcaaucuaggaccuga

SEQ ID NO: 1990694 - RNA, 19 nt, Artificial Sequence
  Description of Artificial Sequence: Synthetic oligonucleotide
cuuaagccuauaguuugga

SEQ ID NO: 1990695 - RNA, 19 nt, Artificial Sequence
  Description of Artificial Sequence: Synthetic oligonucleotide
uaccuaucagguggcaauc

SEQ ID NO: 1990696 - RNA, 19 nt, Artificial Sequence
  Description of Artificial Sequence: Synthetic oligonucleotide
uggcuguauuuugggauac

SEQ ID NO: 1990697 - RNA, 19 nt, Artificial Sequence
  Description of Artificial Sequence: Synthetic oligonucleotide
acacuuaaccggggaacug

SEQ ID NO: 1990698 - RNA, 19 nt, Artificial Sequence
  Description of Artificial Sequence: Synthetic oligonucleotide
ggaguuggugugccuagug

SEQ ID NO: 1990699 - RNA, 19 nt, Artificial Sequence
  Description of Artificial Sequence: Synthetic oligonucleotide
aacguacuucaguccugau

SEQ ID NO: 1990700 - RNA, 19 nt, Artificial Sequence
  Description of Artificial Sequence: Synthetic oligonucleotide
cagaacauucugaacugcu

SEQ ID NO: 1990701 - RNA, 19 nt, Artificial Sequence
  Description of Artificial Sequence: Synthetic oligonucleotide
cacggcacugaauugccaa

SEQ ID NO: 1990702 - RNA, 19 nt, Artificial Sequence
  Description of Artificial Sequence: Synthetic oligonucleotide
gucacauaucggaaggcaa

SEQ ID NO: 1990703 - RNA, 19 nt, Artificial Sequence
  Description of Artificial Sequence: Synthetic oligonucleotide
acccaauuagugauggauu

SEQ ID NO: 1990704 - RNA, 19 nt, Artificial Sequence
  Description of Artificial Sequence: Synthetic oligonucleotide
ggugugccuagugugggag

SEQ ID NO: 1990705 - RNA, 19 nt, Artificial Sequence
  Description of Artificial Sequence: Synthetic oligonucleotide
uaaccggggaacuguuauu

SEQ ID NO: 1990706 - RNA, 19 nt, Artificial Sequence
  Description of Artificial Sequence: Synthetic oligonucleotide
auccaggcuggauuacaaa

SEQ ID NO: 1990707 - RNA, 19 nt, Artificial Sequence
  Description of Artificial Sequence: Synthetic oligonucleotide
uccccauauccuucaggau

SEQ ID NO: 1990708 - RNA, 19 nt, Artificial Sequence
  Description of Artificial Sequence: Synthetic oligonucleotide
acggcacugaauugccaau

SEQ ID NO: 1990709 - RNA, 19 nt, Artificial Sequence
  Description of Artificial Sequence: Synthetic oligonucleotide
caggcaucuguacuguaaa

SEQ ID NO: 1990710 - RNA, 19 nt, Artificial Sequence
  Description of Artificial Sequence: Synthetic oligonucleotide
gggacauuggagugccuac

SEQ ID NO: 1990711 - RNA, 19 nt, Artificial Sequence
  Description of Artificial Sequence: Synthetic oligonucleotide
ggagaagugaaagacuggu

SEQ ID NO: 1990712 - RNA, 19 nt, Artificial Sequence
  Description of Artificial Sequence: Synthetic oligonucleotide
cuagaauuguggucacaua

SEQ ID NO: 1990713 - RNA, 19 nt, Artificial Sequence
  Description of Artificial Sequence: Synthetic oligonucleotide
ccuagugugggaguacuug

SEQ ID NO: 1990714 - RNA, 19 nt, Artificial Sequence
  Description of Artificial Sequence: Synthetic oligonucleotide
augcauaaagguagaugaa

SEQ ID NO: 1990715 - RNA, 19 nt, Artificial Sequence
  Description of Artificial Sequence: Synthetic oligonucleotide
agggacauuggagugccua

SEQ ID NO: 1990716 - RNA, 19 nt, Artificial Sequence
  Description of Artificial Sequence: Synthetic oligonucleotide
gacucauuggcuguauuuu

SEQ ID NO: 1990717 - RNA, 19 nt, Artificial Sequence
  Description of Artificial Sequence: Synthetic oligonucleotide
uuccaaccccugguguacc

SEQ ID NO: 1990718 - RNA, 19 nt, Artificial Sequence
  Description of Artificial Sequence: Synthetic oligonucleotide
gccaaucgcacaucaucug

SEQ ID NO: 1990719 - RNA, 19 nt, Artificial Sequence
  Description of Artificial Sequence: Synthetic oligonucleotide
ccacauuaacguacuucag

SEQ ID NO: 1990720 - RNA, 19 nt, Artificial Sequence
  Description of Artificial Sequence: Synthetic oligonucleotide
accuaucagguggcaaucu

SEQ ID NO: 1990721 - RNA, 19 nt, Artificial Sequence
  Description of Artificial Sequence: Synthetic oligonucleotide
ugguccgcacggcacugaa

SEQ ID NO: 1990722 - RNA, 19 nt, Artificial Sequence
  Description of Artificial Sequence: Synthetic oligonucleotide
caauuagugauggauuaau

SEQ ID NO: 1990723 - RNA, 19 nt, Artificial Sequence
  Description of Artificial Sequence: Synthetic oligonucleotide
agccuauaguuuggagcag

SEQ ID NO: 1990724 - RNA, 19 nt, Artificial Sequence
  Description of Artificial Sequence: Synthetic oligonucleotide
gggacugagaagcaggcau

SEQ ID NO: 1990725 - RNA, 19 nt, Artificial Sequence
  Description of Artificial Sequence: Synthetic oligonucleotide
uuguggaguuggugugccu

SEQ ID NO: 1990726 - RNA, 19 nt, Artificial Sequence
  Description of Artificial Sequence: Synthetic oligonucleotide
acaagcauccaggcuggau

SEQ ID NO: 1990727 - RNA, 19 nt, Artificial Sequence
  Description of Artificial Sequence: Synthetic oligonucleotide
gacauuggagugccuacuu

SEQ ID NO: 1990728 - RNA, 19 nt, Artificial Sequence
  Description of Artificial Sequence: Synthetic oligonucleotide
uggaguuggugugccuagu

SEQ ID NO: 1990729 - RNA, 19 nt, Artificial Sequence
  Description of Artificial Sequence: Synthetic oligonucleotide
uuauaacucucggcucaua

SEQ ID NO: 1990730 - RNA, 19 nt, Artificial Sequence
  Description of Artificial Sequence: Synthetic oligonucleotide
cucggcucauauucuguaa

SEQ ID NO: 1990731 - RNA, 19 nt, Artificial Sequence
  Description of Artificial Sequence: Synthetic oligonucleotide
auccggugaucagacuucu

SEQ ID NO: 1990732 - RNA, 19 nt, Artificial Sequence
  Description of Artificial Sequence: Synthetic oligonucleotide
gauauccggugaucagacu

SEQ ID NO: 1990733 - RNA, 19 nt, Artificial Sequence
  Description of Artificial Sequence: Synthetic oligonucleotide
gugccuacuuuaguugaga

SEQ ID NO: 1990734 - RNA, 19 nt, Artificial Sequence
  Description of Artificial Sequence: Synthetic oligonucleotide
gggauaccauauuaguagu

SEQ ID NO: 1990735 - RNA, 19 nt, Artificial Sequence
  Description of Artificial Sequence: Synthetic oligonucleotide
ggguuugauuucuuugucu

SEQ ID NO: 1990736 - RNA, 19 nt, Artificial Sequence
  Description of Artificial Sequence: Synthetic oligonucleotide
gugggaguacuuggucugc

SEQ ID NO: 1990737 - RNA, 19 nt, Artificial Sequence
  Description of Artificial Sequence: Synthetic oligonucleotide
cccaauuagugauggauua

SEQ ID NO: 1990738 - RNA, 19 nt, Artificial Sequence
  Description of Artificial Sequence: Synthetic oligonucleotide
auugccaaucgcacaucau

SEQ ID NO: 1990739 - RNA, 19 nt, Artificial Sequence
  Description of Artificial Sequence: Synthetic oligonucleotide
guccgcacggcacugaauu

SEQ ID NO: 1990740 - RNA, 19 nt, Artificial Sequence
  Description of Artificial Sequence: Synthetic oligonucleotide
cuguaaaccuuuguccugu

SEQ ID NO: 1990741 - RNA, 19 nt, Artificial Sequence
  Description of Artificial Sequence: Synthetic oligonucleotide
cuuaaccggggaacuguua

SEQ ID NO: 1990742 - RNA, 19 nt, Artificial Sequence
  Description of Artificial Sequence: Synthetic oligonucleotide
cuauaguuuggagcaguua

SEQ ID NO: 1990743 - RNA, 19 nt, Artificial Sequence
  Description of Artificial Sequence: Synthetic oligonucleotide
cuaggaccugaguauggcu

SEQ ID NO: 1990744 - RNA, 19 nt, Artificial Sequence
  Description of Artificial Sequence: Synthetic oligonucleotide
gcuaaaucacccacauuaa

SEQ ID NO: 1990745 - RNA, 19 nt, Artificial Sequence
  Description of Artificial Sequence: Synthetic oligonucleotide
acuuaaccggggaacuguu

SEQ ID NO: 1990746 - RNA, 19 nt, Artificial Sequence
  Description of Artificial Sequence: Synthetic oligonucleotide
agacuccaugauauccggu

SEQ ID NO: 1990747 - RNA, 19 nt, Artificial Sequence
  Description of Artificial Sequence: Synthetic oligonucleotide
gacugguccgcacggcacu

SEQ ID NO: 1990748 - RNA, 19 nt, Artificial Sequence
  Description of Artificial Sequence: Synthetic oligonucleotide
cauauucuguaauccccau

SEQ ID NO: 1990749 - RNA, 19 nt, Artificial Sequence
  Description of Artificial Sequence: Synthetic oligonucleotide
guugcgggaauugaagcuu

SEQ ID NO: 1990750 - RNA, 19 nt, Artificial Sequence
  Description of Artificial Sequence: Synthetic oligonucleotide
aucuuucggcaugcucuug

SEQ ID NO: 1990751 - RNA, 19 nt, Artificial Sequence
  Description of Artificial Sequence: Synthetic oligonucleotide
ggacugagaagcaggcauc

SEQ ID NO: 1990752 - RNA, 19 nt, Artificial Sequence
  Description of Artificial Sequence: Synthetic oligonucleotide
cuguacuguaaaccuuugu

SEQ ID NO: 1990753 - RNA, 19 nt, Artificial Sequence
  Description of Artificial Sequence: Synthetic oligonucleotide
caucuguacuguaaaccuu

SEQ ID NO: 1990754 - RNA, 19 nt, Artificial Sequence
  Description of Artificial Sequence: Synthetic oligonucleotide
aggcuggauuacaaauuau

SEQ ID NO: 1990755 - RNA, 19 nt, Artificial Sequence
  Description of Artificial Sequence: Synthetic oligonucleotide
caugguuuguggaguuggu

SEQ ID NO: 1990756 - RNA, 19 nt, Artificial Sequence
  Description of Artificial Sequence: Synthetic oligonucleotide
cacuuaaccggggaacugu

SEQ ID NO: 1990757 - RNA, 19 nt, Artificial Sequence
  Description of Artificial Sequence: Synthetic oligonucleotide
ccgcacggcacugaauugc

SEQ ID NO: 1990758 - RNA, 19 nt, Artificial Sequence
  Description of Artificial Sequence: Synthetic oligonucleotide
uacaagcauccaggcugga

SEQ ID NO: 1990759 - RNA, 19 nt, Artificial Sequence
  Description of Artificial Sequence: Synthetic oligonucleotide
ggauaccauauuaguagua

SEQ ID NO: 1990760 - RNA, 19 nt, Artificial Sequence
  Description of Artificial Sequence: Synthetic oligonucleotide
aucggaaggcaaacuccaa

SEQ ID NO: 1990761 - RNA, 19 nt, Artificial Sequence
  Description of Artificial Sequence: Synthetic oligonucleotide
ccaacacuuaaccggggaa

SEQ ID NO: 1990762 - RNA, 19 nt, Artificial Sequence
  Description of Artificial Sequence: Synthetic oligonucleotide
cgcacggcacugaauugcc

SEQ ID NO: 1990763 - RNA, 19 nt, Artificial Sequence
  Description of Artificial Sequence: Synthetic oligonucleotide
cuccaugauauccggugau

SEQ ID NO: 1990764 - RNA, 19 nt, Artificial Sequence
  Description of Artificial Sequence: Synthetic oligonucleotide
gugccuagugugggaguac

SEQ ID NO: 1990765 - RNA, 19 nt, Artificial Sequence
  Description of Artificial Sequence: Synthetic oligonucleotide
ggucugcuagaaacugaac

SEQ ID NO: 1990766 - RNA, 19 nt, Artificial Sequence
  Description of Artificial Sequence: Synthetic oligonucleotide
cggcucauauucuguaauc

SEQ ID NO: 1990767 - RNA, 19 nt, Artificial Sequence
  Description of Artificial Sequence: Synthetic oligonucleotide
ccauuacuacuucuacuaa

SEQ ID NO: 1990768 - RNA, 19 nt, Artificial Sequence
  Description of Artificial Sequence: Synthetic oligonucleotide
ggcaaucuaggaccugagu

SEQ ID NO: 1990769 - RNA, 19 nt, Artificial Sequence
  Description of Artificial Sequence: Synthetic oligonucleotide
gcaaagggguuugauuucu

SEQ ID NO: 1990770 - RNA, 19 nt, Artificial Sequence
  Description of Artificial Sequence: Synthetic oligonucleotide
cuucaguccugaucuugau

SEQ ID NO: 1990771 - RNA, 19 nt, Artificial Sequence
  Description of Artificial Sequence: Synthetic oligonucleotide
gagcuaaaucacccacauu

SEQ ID NO: 1990772 - RNA, 19 nt, Artificial Sequence
  Description of Artificial Sequence: Synthetic oligonucleotide
gcgggaauugaagcuuuca

SEQ ID NO: 1990773 - RNA, 19 nt, Artificial Sequence
  Description of Artificial Sequence: Synthetic oligonucleotide
cucuugggagaagccaucu

SEQ ID NO: 1990774 - RNA, 19 nt, Artificial Sequence
  Description of Artificial Sequence: Synthetic oligonucleotide
ccaauuagugauggauuaa

SEQ ID NO: 1990775 - RNA, 19 nt, Artificial Sequence
  Description of Artificial Sequence: Synthetic oligonucleotide
cuuugccuagugugguuuu

SEQ ID NO: 1990776 - RNA, 19 nt, Artificial Sequence
  Description of Artificial Sequence: Synthetic oligonucleotide
cgucaucaucaucaucauc

SEQ ID NO: 1990777 - RNA, 19 nt, Artificial Sequence
  Description of Artificial Sequence: Synthetic oligonucleotide
gugugccuagugugggagu

SEQ ID NO: 1990778 - RNA, 19 nt, Artificial Sequence
  Description of Artificial Sequence: Synthetic oligonucleotide
caauggcaaagggguuuga

SEQ ID NO: 1990779 - RNA, 19 nt, Artificial Sequence
  Description of Artificial Sequence: Synthetic oligonucleotide
caguaccuaucagguggca

SEQ ID NO: 1990780 - RNA, 19 nt, Artificial Sequence
  Description of Artificial Sequence: Synthetic oligonucleotide
gccuauaguuuggagcagu

SEQ ID NO: 1990781 - RNA, 19 nt, Artificial Sequence
  Description of Artificial Sequence: Synthetic oligonucleotide
uuguccugugagggacauu

SEQ ID NO: 1990782 - RNA, 19 nt, Artificial Sequence
  Description of Artificial Sequence: Synthetic oligonucleotide
gcaaagacuuaagccuaua

SEQ ID NO: 1990783 - RNA, 19 nt, Artificial Sequence
  Description of Artificial Sequence: Synthetic oligonucleotide
ggcaugcucuugggagaag

SEQ ID NO: 1990784 - RNA, 19 nt, Artificial Sequence
  Description of Artificial Sequence: Synthetic oligonucleotide
gaccugaguauggcuugau

SEQ ID NO: 1990785 - RNA, 19 nt, Artificial Sequence
  Description of Artificial Sequence: Synthetic oligonucleotide
caucaacaguagcuuucuu

SEQ ID NO: 1990786 - RNA, 19 nt, Artificial Sequence
  Description of Artificial Sequence: Synthetic oligonucleotide
gcacggcacugaauugcca

SEQ ID NO: 1990787 - RNA, 19 nt, Artificial Sequence
  Description of Artificial Sequence: Synthetic oligonucleotide
ccggggaacuguuauucuu

SEQ ID NO: 1990788 - RNA, 19 nt, Artificial Sequence
  Description of Artificial Sequence: Synthetic oligonucleotide
gcugacucauuggcuguau

SEQ ID NO: 1990789 - RNA, 19 nt, Artificial Sequence
  Description of Artificial Sequence: Synthetic oligonucleotide
gguccgcacggcacugaau

SEQ ID NO: 1990790 - RNA, 19 nt, Artificial Sequence
  Description of Artificial Sequence: Synthetic oligonucleotide
auauauauauauuucaaac

SEQ ID NO: 1990791 - RNA, 19 nt, Artificial Sequence
  Description of Artificial Sequence: Synthetic oligonucleotide
aauaaauauauauauauuu

SEQ ID NO: 1990792 - RNA, 19 nt, Artificial Sequence
  Description of Artificial Sequence: Synthetic oligonucleotide
uuuauugccagauggaugg

SEQ ID NO: 1990793 - RNA, 19 nt, Artificial Sequence
  Description of Artificial Sequence: Synthetic oligonucleotide
aacaucaugaccugcaagg

SEQ ID NO: 1990794 - RNA, 19 nt, Artificial Sequence
  Description of Artificial Sequence: Synthetic oligonucleotide
aacugaaccguuuaggcgg

SEQ ID NO: 1990795 - RNA, 19 nt, Artificial Sequence
  Description of Artificial Sequence: Synthetic oligonucleotide
uggaugggaauaaagagcg

SEQ ID NO: 1990796 - RNA, 19 nt, Artificial Sequence
  Description of Artificial Sequence: Synthetic oligonucleotide
uaaauauauauauauuuca

SEQ ID NO: 1990797 - RNA, 19 nt, Artificial Sequence
  Description of Artificial Sequence: Synthetic oligonucleotide
uuuuaacugauucgaaacg

SEQ ID NO: 1990798 - RNA, 19 nt, Artificial Sequence
  Description of Artificial Sequence: Synthetic oligonucleotide
ugacuuguaacccagugag

SEQ ID NO: 1990799 - RNA, 19 nt, Artificial Sequence
  Description of Artificial Sequence: Synthetic oligonucleotide
aaaccaacaccaauaaacc

SEQ ID NO: 1990800 - RNA, 19 nt, Artificial Sequence
  Description of Artificial Sequence: Synthetic oligonucleotide
aauauauauauauuucaaa

SEQ ID NO: 1990801 - RNA, 19 nt, Artificial Sequence
  Description of Artificial Sequence: Synthetic oligonucleotide
auaaauauauauauauuuc

SEQ ID NO: 1990802 - RNA, 19 nt, Artificial Sequence
  Description of Artificial Sequence: Synthetic oligonucleotide
aauaaagagcgaaaguuuc

SEQ ID NO: 1990803 - RNA, 19 nt, Artificial Sequence
  Description of Artificial Sequence: Synthetic oligonucleotide
aaaugcuccucccacuccc

SEQ ID NO: 1990804 - RNA, 19 nt, Artificial Sequence
  Description of Artificial Sequence: Synthetic oligonucleotide
gaugaccucacucugaggc

SEQ ID NO: 1990805 - RNA, 19 nt, Artificial Sequence
  Description of Artificial Sequence: Synthetic oligonucleotide
aaacugaaccguuuaggcg

SEQ ID NO: 1990806 - RNA, 19 nt, Artificial Sequence
  Description of Artificial Sequence: Synthetic oligonucleotide
aacagacuggaaaacaagc

SEQ ID NO: 1990807 - RNA, 19 nt, Artificial Sequence
  Description of Artificial Sequence: Synthetic oligonucleotide
agggcuuuaaaccucugcc

SEQ ID NO: 1990808 - RNA, 19 nt, Artificial Sequence
  Description of Artificial Sequence: Synthetic oligonucleotide
aaacguuuuccccucuccc

SEQ ID NO: 1990809 - RNA, 19 nt, Artificial Sequence
  Description of Artificial Sequence: Synthetic oligonucleotide
ugugauggaggucagauuc

SEQ ID NO: 1990810 - RNA, 19 nt, Artificial Sequence
  Description of Artificial Sequence: Synthetic oligonucleotide
accaauaaaccacaaaaug

SEQ ID NO: 1990811 - RNA, 19 nt, Artificial Sequence
  Description of Artificial Sequence: Synthetic oligonucleotide
uguccaggaacccagugcg

SEQ ID NO: 1990812 - RNA, 19 nt, Artificial Sequence
  Description of Artificial Sequence: Synthetic oligonucleotide
cucuuuuauugccagaugg

SEQ ID NO: 1990813 - RNA, 19 nt, Artificial Sequence
  Description of Artificial Sequence: Synthetic oligonucleotide
auaaaccacaaaaugcucc

SEQ ID NO: 1990814 - RNA, 19 nt, Artificial Sequence
  Description of Artificial Sequence: Synthetic oligonucleotide
gaggcuagggcuuuaaacc

SEQ ID NO: 1990815 - RNA, 19 nt, Artificial Sequence
  Description of Artificial Sequence: Synthetic oligonucleotide
ucaauggaugggaauaaag

SEQ ID NO: 1990816 - RNA, 19 nt, Artificial Sequence
  Description of Artificial Sequence: Synthetic oligonucleotide
uccauaaagcaauaaauau

SEQ ID NO: 1990817 - RNA, 19 nt, Artificial Sequence
  Description of Artificial Sequence: Synthetic oligonucleotide
uuuuauugccagauggaug

SEQ ID NO: 1990818 - RNA, 19 nt, Artificial Sequence
  Description of Artificial Sequence: Synthetic oligonucleotide
aaaaugcuccucccacucc

SEQ ID NO: 1990819 - RNA, 19 nt, Artificial Sequence
  Description of Artificial Sequence: Synthetic oligonucleotide
ucucuguugacuuguaacc

SEQ ID NO: 1990820 - RNA, 19 nt, Artificial Sequence
  Description of Artificial Sequence: Synthetic oligonucleotide
gaaaacugaaccguuuagg

SEQ ID NO: 1990821 - RNA, 19 nt, Artificial Sequence
  Description of Artificial Sequence: Synthetic oligonucleotide
aaagcaauaaauauauaua

SEQ ID NO: 1990822 - RNA, 19 nt, Artificial Sequence
  Description of Artificial Sequence: Synthetic oligonucleotide
aaauauauauauauuucaa

SEQ ID NO: 1990823 - RNA, 19 nt, Artificial Sequence
  Description of Artificial Sequence: Synthetic oligonucleotide
auggaugggaauaaagagc

SEQ ID NO: 1990824 - RNA, 19 nt, Artificial Sequence
  Description of Artificial Sequence: Synthetic oligonucleotide
auauauuucaaacucugua

SEQ ID NO: 1990825 - RNA, 19 nt, Artificial Sequence
  Description of Artificial Sequence: Synthetic oligonucleotide
ccaauaaaccacaaaaugc

SEQ ID NO: 1990826 - RNA, 19 nt, Artificial Sequence
  Description of Artificial Sequence: Synthetic oligonucleotide
ugcagggaaaacugaaccg

SEQ ID NO: 1990827 - RNA, 19 nt, Artificial Sequence
  Description of Artificial Sequence: Synthetic oligonucleotide
caaacucuguacaacagac

SEQ ID NO: 1990828 - RNA, 19 nt, Artificial Sequence
  Description of Artificial Sequence: Synthetic oligonucleotide
accagcaagggcuggaucg

SEQ ID NO: 1990829 - RNA, 19 nt, Artificial Sequence
  Description of Artificial Sequence: Synthetic oligonucleotide
aaauuaacccacacuaucu

SEQ ID NO: 1990830 - RNA, 19 nt, Artificial Sequence
  Description of Artificial Sequence: Synthetic oligonucleotide
acugauucgaaacguuuuc

SEQ ID NO: 1990831 - RNA, 19 nt, Artificial Sequence
  Description of Artificial Sequence: Synthetic oligonucleotide
gauucgaaacguuuucccc

SEQ ID NO: 1990832 - RNA, 19 nt, Artificial Sequence
  Description of Artificial Sequence: Synthetic oligonucleotide
uggucugugaaacccaccc

SEQ ID NO: 1990833 - RNA, 19 nt, Artificial Sequence
  Description of Artificial Sequence: Synthetic oligonucleotide
aaguagguggcucacacuu

SEQ ID NO: 1990834 - RNA, 19 nt, Artificial Sequence
  Description of Artificial Sequence: Synthetic oligonucleotide
ugauucgaaacguuuuccc

SEQ ID NO: 1990835 - RNA, 19 nt, Artificial Sequence
  Description of Artificial Sequence: Synthetic oligonucleotide
agagcgaaaguuucuuuuc

SEQ ID NO: 1990836 - RNA, 19 nt, Artificial Sequence
  Description of Artificial Sequence: Synthetic oligonucleotide
aaggccgucuugccaaagc

SEQ ID NO: 1990837 - RNA, 19 nt, Artificial Sequence
  Description of Artificial Sequence: Synthetic oligonucleotide
cacucaagaaaccaacacc

SEQ ID NO: 1990838 - RNA, 19 nt, Artificial Sequence
  Description of Artificial Sequence: Synthetic oligonucleotide
gccaaagcgguucagagcg

SEQ ID NO: 1990839 - RNA, 19 nt, Artificial Sequence
  Description of Artificial Sequence: Synthetic oligonucleotide
agugcgagcugcaucaugc

SEQ ID NO: 1990840 - RNA, 19 nt, Artificial Sequence
  Description of Artificial Sequence: Synthetic oligonucleotide
ugggaauaaagagcgaaag

SEQ ID NO: 1990841 - RNA, 19 nt, Artificial Sequence
  Description of Artificial Sequence: Synthetic oligonucleotide
uccaggagcaucgugacgc

SEQ ID NO: 1990842 - RNA, 19 nt, Artificial Sequence
  Description of Artificial Sequence: Synthetic oligonucleotide
agcgucaggaugcaccagc

SEQ ID NO: 1990843 - RNA, 19 nt, Artificial Sequence
  Description of Artificial Sequence: Synthetic oligonucleotide
uugacuuguaacccaguga

SEQ ID NO: 1990844 - RNA, 19 nt, Artificial Sequence
  Description of Artificial Sequence: Synthetic oligonucleotide
ugaggcuagggcuuuaaac

SEQ ID NO: 1990845 - RNA, 19 nt, Artificial Sequence
  Description of Artificial Sequence: Synthetic oligonucleotide
ucaugcacuggacugguac

SEQ ID NO: 1990846 - RNA, 19 nt, Artificial Sequence
  Description of Artificial Sequence: Synthetic oligonucleotide
aggucaaggcuguggaacc

SEQ ID NO: 1990847 - RNA, 19 nt, Artificial Sequence
  Description of Artificial Sequence: Synthetic oligonucleotide
aauuaacccacacuaucuu

SEQ ID NO: 1990848 - RNA, 19 nt, Artificial Sequence
  Description of Artificial Sequence: Synthetic oligonucleotide
auucgaaacguuuuccccu

SEQ ID NO: 1990849 - RNA, 19 nt, Artificial Sequence
  Description of Artificial Sequence: Synthetic oligonucleotide
aaggcggcgcaccucuugc

SEQ ID NO: 1990850 - RNA, 19 nt, Artificial Sequence
  Description of Artificial Sequence: Synthetic oligonucleotide
ugugaaacccacccagccc

SEQ ID NO: 1990851 - RNA, 19 nt, Artificial Sequence
  Description of Artificial Sequence: Synthetic oligonucleotide
aacacaugagaaagucccc

SEQ ID NO: 1990852 - RNA, 19 nt, Artificial Sequence
  Description of Artificial Sequence: Synthetic oligonucleotide
aagagcgaaaguuucuuuu

SEQ ID NO: 1990853 - RNA, 19 nt, Artificial Sequence
  Description of Artificial Sequence: Synthetic oligonucleotide
auggcccucuuuuauugcc

SEQ ID NO: 1990854 - RNA, 19 nt, Artificial Sequence
  Description of Artificial Sequence: Synthetic oligonucleotide
gauggauggggagugaccc

SEQ ID NO: 1990855 - RNA, 19 nt, Artificial Sequence
  Description of Artificial Sequence: Synthetic oligonucleotide
acuuagggcucucugagca

SEQ ID NO: 1990856 - RNA, 19 nt, Artificial Sequence
  Description of Artificial Sequence: Synthetic oligonucleotide
cuggaucggaacacgaggg

SEQ ID NO: 1990857 - RNA, 19 nt, Artificial Sequence
  Description of Artificial Sequence: Synthetic oligonucleotide
acacuuagggcucucugag

SEQ ID NO: 1990858 - RNA, 19 nt, Artificial Sequence
  Description of Artificial Sequence: Synthetic oligonucleotide
aacguuuuccccucucccu

SEQ ID NO: 1990859 - RNA, 19 nt, Artificial Sequence
  Description of Artificial Sequence: Synthetic oligonucleotide
agcaucgugacgcgggugg

SEQ ID NO: 1990860 - RNA, 19 nt, Artificial Sequence
  Description of Artificial Sequence: Synthetic oligonucleotide
ucuguugacuuguaaccca

SEQ ID NO: 1990861 - RNA, 19 nt, Artificial Sequence
  Description of Artificial Sequence: Synthetic oligonucleotide
gaaacguuuuccccucucc

SEQ ID NO: 1990862 - RNA, 19 nt, Artificial Sequence
  Description of Artificial Sequence: Synthetic oligonucleotide
cuuuaggaguuccagagca

SEQ ID NO: 1990863 - RNA, 19 nt, Artificial Sequence
  Description of Artificial Sequence: Synthetic oligonucleotide
auaagguucugaucuccuc

SEQ ID NO: 1990864 - RNA, 19 nt, Artificial Sequence
  Description of Artificial Sequence: Synthetic oligonucleotide
uugccaaagcgguucagag

SEQ ID NO: 1990865 - RNA, 19 nt, Artificial Sequence
  Description of Artificial Sequence: Synthetic oligonucleotide
aacccagugaggcuccuug

SEQ ID NO: 1990866 - RNA, 19 nt, Artificial Sequence
  Description of Artificial Sequence: Synthetic oligonucleotide
agagcuauggcccucuuuu

SEQ ID NO: 1990867 - RNA, 19 nt, Artificial Sequence
  Description of Artificial Sequence: Synthetic oligonucleotide
guugacuuguaacccagug

SEQ ID NO: 1990868 - RNA, 19 nt, Artificial Sequence
  Description of Artificial Sequence: Synthetic oligonucleotide
accucuugcacgucgccac

SEQ ID NO: 1990869 - RNA, 19 nt, Artificial Sequence
  Description of Artificial Sequence: Synthetic oligonucleotide
caacagacuggaaaacaag

SEQ ID NO: 1990870 - RNA, 19 nt, Artificial Sequence
  Description of Artificial Sequence: Synthetic oligonucleotide
gcaauaaauauauauauau

SEQ ID NO: 1990871 - RNA, 19 nt, Artificial Sequence
  Description of Artificial Sequence: Synthetic oligonucleotide
ucaggaugcaccagcuccc

SEQ ID NO: 1990872 - RNA, 19 nt, Artificial Sequence
  Description of Artificial Sequence: Synthetic oligonucleotide
cagagcgucaggaugcacc

SEQ ID NO: 1990873 - RNA, 19 nt, Artificial Sequence
  Description of Artificial Sequence: Synthetic oligonucleotide
cacaaaaugcuccucccac

SEQ ID NO: 1990874 - RNA, 19 nt, Artificial Sequence
  Description of Artificial Sequence: Synthetic oligonucleotide
ucugugaaacccacccagc

SEQ ID NO: 1990875 - RNA, 19 nt, Artificial Sequence
  Description of Artificial Sequence: Synthetic oligonucleotide
cuugcuuuaggaguuccag

SEQ ID NO: 1990876 - RNA, 19 nt, Artificial Sequence
  Description of Artificial Sequence: Synthetic oligonucleotide
uagggcuuuaaaccucugc

SEQ ID NO: 1990877 - RNA, 19 nt, Artificial Sequence
  Description of Artificial Sequence: Synthetic oligonucleotide
agaggcaucuuggacauug

SEQ ID NO: 1990878 - RNA, 19 nt, Artificial Sequence
  Description of Artificial Sequence: Synthetic oligonucleotide
uauugccagauggaugggg

SEQ ID NO: 1990879 - RNA, 19 nt, Artificial Sequence
  Description of Artificial Sequence: Synthetic oligonucleotide
aaaguagguggcucacacu

SEQ ID NO: 1990880 - RNA, 19 nt, Artificial Sequence
  Description of Artificial Sequence: Synthetic oligonucleotide
agcucaggagacgaugacc

SEQ ID NO: 1990881 - RNA, 19 nt, Artificial Sequence
  Description of Artificial Sequence: Synthetic oligonucleotide
guagguggcucacacuuag

SEQ ID NO: 1990882 - RNA, 19 nt, Artificial Sequence
  Description of Artificial Sequence: Synthetic oligonucleotide
ugauggaggucagauucgg

SEQ ID NO: 1990883 - RNA, 19 nt, Artificial Sequence
  Description of Artificial Sequence: Synthetic oligonucleotide
cucccaugcccaaaguagg

SEQ ID NO: 1990884 - RNA, 19 nt, Artificial Sequence
  Description of Artificial Sequence: Synthetic oligonucleotide
cuauggcccucuuuuauug

SEQ ID NO: 1990885 - RNA, 19 nt, Artificial Sequence
  Description of Artificial Sequence: Synthetic oligonucleotide
agugaggcuccuuggcugg

SEQ ID NO: 1990886 - RNA, 19 nt, Artificial Sequence
  Description of Artificial Sequence: Synthetic oligonucleotide
acgaugaccucacucugag

SEQ ID NO: 1990887 - RNA, 19 nt, Artificial Sequence
  Description of Artificial Sequence: Synthetic oligonucleotide
uggggagugacccggugcc

SEQ ID NO: 1990888 - RNA, 19 nt, Artificial Sequence
  Description of Artificial Sequence: Synthetic oligonucleotide
auguccauaagguucugau

SEQ ID NO: 1990889 - RNA, 19 nt, Artificial Sequence
  Description of Artificial Sequence: Synthetic oligonucleotide
gaugggaauaaagagcgaa

SEQ ID NO: 1990890 - RNA, 19 nt, Artificial Sequence
  Description of Artificial Sequence: Synthetic oligonucleotide
caucaugaccugcaaggcc

SEQ ID NO: 1990891 - RNA, 19 nt, Artificial Sequence
  Description of Artificial Sequence: Synthetic oligonucleotide
gacgcggacuucuuccagg

SEQ ID NO: 1990892 - RNA, 19 nt, Artificial Sequence
  Description of Artificial Sequence: Synthetic oligonucleotide
aaagagcgaaaguuucuuu

SEQ ID NO: 1990893 - RNA, 19 nt, Artificial Sequence
  Description of Artificial Sequence: Synthetic oligonucleotide
gauucgggagccaggaagc

SEQ ID NO: 1990894 - RNA, 19 nt, Artificial Sequence
  Description of Artificial Sequence: Synthetic oligonucleotide
guucagagcgucaggaugc

SEQ ID NO: 1990895 - RNA, 19 nt, Artificial Sequence
  Description of Artificial Sequence: Synthetic oligonucleotide
acguuuuccccucucccuc

SEQ ID NO: 1990896 - RNA, 19 nt, Artificial Sequence
  Description of Artificial Sequence: Synthetic oligonucleotide
gagacagcggcccuggguc

SEQ ID NO: 1990897 - RNA, 19 nt, Artificial Sequence
  Description of Artificial Sequence: Synthetic oligonucleotide
uuaggaguuccagagcaac

SEQ ID NO: 1990898 - RNA, 19 nt, Artificial Sequence
  Description of Artificial Sequence: Synthetic oligonucleotide
cugugaaacccacccagcc

SEQ ID NO: 1990899 - RNA, 19 nt, Artificial Sequence
  Description of Artificial Sequence: Synthetic oligonucleotide
gacuggaaaacaagcuucc

SEQ ID NO: 1990900 - RNA, 19 nt, Artificial Sequence
  Description of Artificial Sequence: Synthetic oligonucleotide
caacacaccaaacggggug

SEQ ID NO: 1990901 - RNA, 19 nt, Artificial Sequence
  Description of Artificial Sequence: Synthetic oligonucleotide
aggccgucuugccaaagcg

SEQ ID NO: 1990902 - RNA, 19 nt, Artificial Sequence
  Description of Artificial Sequence: Synthetic oligonucleotide
caugcacuggacugguacc

SEQ ID NO: 1990903 - RNA, 19 nt, Artificial Sequence
  Description of Artificial Sequence: Synthetic oligonucleotide
uggauggggagugacccgg

SEQ ID NO: 1990904 - RNA, 19 nt, Artificial Sequence
  Description of Artificial Sequence: Synthetic oligonucleotide
gagacgaugaccucacucu

SEQ ID NO: 1990905 - RNA, 19 nt, Artificial Sequence
  Description of Artificial Sequence: Synthetic oligonucleotide
ucuugcacgucgccacggg

SEQ ID NO: 1990906 - RNA, 19 nt, Artificial Sequence
  Description of Artificial Sequence: Synthetic oligonucleotide
uugcuuuaggaguuccaga

SEQ ID NO: 1990907 - RNA, 19 nt, Artificial Sequence
  Description of Artificial Sequence: Synthetic oligonucleotide
gguaccagaggcaucuugg

SEQ ID NO: 1990908 - RNA, 19 nt, Artificial Sequence
  Description of Artificial Sequence: Synthetic oligonucleotide
gcuggaucggaacacgagg

SEQ ID NO: 1990909 - RNA, 19 nt, Artificial Sequence
  Description of Artificial Sequence: Synthetic oligonucleotide
cucuguugacuuguaaccc

SEQ ID NO: 1990910 - RNA, 19 nt, Artificial Sequence
  Description of Artificial Sequence: Synthetic oligonucleotide
cugauucgaaacguuuucc

SEQ ID NO: 1990911 - RNA, 19 nt, Artificial Sequence
  Description of Artificial Sequence: Synthetic oligonucleotide
cacacucacucaagaaacc

SEQ ID NO: 1990912 - RNA, 19 nt, Artificial Sequence
  Description of Artificial Sequence: Synthetic oligonucleotide
auuggggcuagcaccuugc

SEQ ID NO: 1990913 - RNA, 19 nt, Artificial Sequence
  Description of Artificial Sequence: Synthetic oligonucleotide
uguccauaagguucugauc

SEQ ID NO: 1990914 - RNA, 19 nt, Artificial Sequence
  Description of Artificial Sequence: Synthetic oligonucleotide
uccaggaacccagugcgag

SEQ ID NO: 1990915 - RNA, 19 nt, Artificial Sequence
  Description of Artificial Sequence: Synthetic oligonucleotide
aacacaccaaacgggguga

SEQ ID NO: 1990916 - RNA, 19 nt, Artificial Sequence
  Description of Artificial Sequence: Synthetic oligonucleotide
agauggauggggagugacc

SEQ ID NO: 1990917 - RNA, 19 nt, Artificial Sequence
  Description of Artificial Sequence: Synthetic oligonucleotide
ucaccaugugucucugcag

SEQ ID NO: 1990918 - RNA, 19 nt, Artificial Sequence
  Description of Artificial Sequence: Synthetic oligonucleotide
uuuaggaguuccagagcaa

SEQ ID NO: 1990919 - RNA, 19 nt, Artificial Sequence
  Description of Artificial Sequence: Synthetic oligonucleotide
auuaacccacacuaucuuu

SEQ ID NO: 1990920 - RNA, 19 nt, Artificial Sequence
  Description of Artificial Sequence: Synthetic oligonucleotide
ggcaucuuggacauugggg

SEQ ID NO: 1990921 - RNA, 19 nt, Artificial Sequence
  Description of Artificial Sequence: Synthetic oligonucleotide
aggcuagggcuuuaaaccu

SEQ ID NO: 1990922 - RNA, 19 nt, Artificial Sequence
  Description of Artificial Sequence: Synthetic oligonucleotide
uuguaacccagugaggcuc

SEQ ID NO: 1990923 - RNA, 19 nt, Artificial Sequence
  Description of Artificial Sequence: Synthetic oligonucleotide
uaaagagcgaaaguuucuu

SEQ ID NO: 1990924 - RNA, 19 nt, Artificial Sequence
  Description of Artificial Sequence: Synthetic oligonucleotide
uuuaaaccucugcccugag

SEQ ID NO: 1990925 - RNA, 19 nt, Artificial Sequence
  Description of Artificial Sequence: Synthetic oligonucleotide
agagcgucaggaugcacca

SEQ ID NO: 1990926 - RNA, 19 nt, Artificial Sequence
  Description of Artificial Sequence: Synthetic oligonucleotide
ugguaccagaggcaucuug

SEQ ID NO: 1990927 - RNA, 19 nt, Artificial Sequence
  Description of Artificial Sequence: Synthetic oligonucleotide
gguucagagcgucaggaug

SEQ ID NO: 1990928 - RNA, 19 nt, Artificial Sequence
  Description of Artificial Sequence: Synthetic oligonucleotide
cacuggacugguaccagag

SEQ ID NO: 1990929 - RNA, 19 nt, Artificial Sequence
  Description of Artificial Sequence: Synthetic oligonucleotide
uauggcccucuuuuauugc

SEQ ID NO: 1990930 - RNA, 19 nt, Artificial Sequence
  Description of Artificial Sequence: Synthetic oligonucleotide
aaccucugcccugaggucu

SEQ ID NO: 1990931 - RNA, 19 nt, Artificial Sequence
  Description of Artificial Sequence: Synthetic oligonucleotide
uucgaaacguuuuccccuc

SEQ ID NO: 1990932 - RNA, 19 nt, Artificial Sequence
  Description of Artificial Sequence: Synthetic oligonucleotide
agacgaugaccucacucug

SEQ ID NO: 1990933 - RNA, 19 nt, Artificial Sequence
  Description of Artificial Sequence: Synthetic oligonucleotide
uuggcuggagacagcggcc

SEQ ID NO: 1990934 - RNA, 19 nt, Artificial Sequence
  Description of Artificial Sequence: Synthetic oligonucleotide
aacugauucgaaacguuuu

SEQ ID NO: 1990935 - RNA, 19 nt, Artificial Sequence
  Description of Artificial Sequence: Synthetic oligonucleotide
agagcaacugcuggacuuc

SEQ ID NO: 1990936 - RNA, 19 nt, Artificial Sequence
  Description of Artificial Sequence: Synthetic oligonucleotide
ugcuggacuuccaaacauc

SEQ ID NO: 1990937 - RNA, 19 nt, Artificial Sequence
  Description of Artificial Sequence: Synthetic oligonucleotide
aggaccuucaaggugucca

SEQ ID NO: 1990938 - RNA, 19 nt, Artificial Sequence
  Description of Artificial Sequence: Synthetic oligonucleotide
cgaagugucccugugaugg

SEQ ID NO: 1990939 - RNA, 19 nt, Artificial Sequence
  Description of Artificial Sequence: Synthetic oligonucleotide
uugccagauggauggggag

SEQ ID NO: 1990940 - RNA, 19 nt, Artificial Sequence
  Description of Artificial Sequence: Synthetic oligonucleotide
cuguggaaccagcaagggc

SEQ ID NO: 1990941 - RNA, 19 nt, Artificial Sequence
  Description of Artificial Sequence: Synthetic oligonucleotide
gaugcaccagcucccggug

SEQ ID NO: 1990942 - RNA, 19 nt, Artificial Sequence
  Description of Artificial Sequence: Synthetic oligonucleotide
gacuuguaacccagugagg

SEQ ID NO: 1990943 - RNA, 19 nt, Artificial Sequence
  Description of Artificial Sequence: Synthetic oligonucleotide
acaacagacuggaaaacaa

SEQ ID NO: 1990944 - RNA, 19 nt, Artificial Sequence
  Description of Artificial Sequence: Synthetic oligonucleotide
auggauggggagugacccg

SEQ ID NO: 1990945 - RNA, 19 nt, Artificial Sequence
  Description of Artificial Sequence: Synthetic oligonucleotide
guggcucacacuuagggcu

SEQ ID NO: 1990946 - RNA, 19 nt, Artificial Sequence
  Description of Artificial Sequence: Synthetic oligonucleotide
gauggaggucagauucggg

SEQ ID NO: 1990947 - RNA, 19 nt, Artificial Sequence
  Description of Artificial Sequence: Synthetic oligonucleotide
gacuuccaaacaucaugac

SEQ ID NO: 1990948 - RNA, 19 nt, Artificial Sequence
  Description of Artificial Sequence: Synthetic oligonucleotide
ugcgagcugcaucaugcac

SEQ ID NO: 1990949 - RNA, 19 nt, Artificial Sequence
  Description of Artificial Sequence: Synthetic oligonucleotide
uuuaggcggcuguugccug

SEQ ID NO: 1990950 - RNA, 19 nt, Artificial Sequence
  Description of Artificial Sequence: Synthetic oligonucleotide
acaccaaacggggugagaa

SEQ ID NO: 1990951 - RNA, 19 nt, Artificial Sequence
  Description of Artificial Sequence: Synthetic oligonucleotide
gaauaaagagcgaaaguuu

SEQ ID NO: 1990952 - RNA, 19 nt, Artificial Sequence
  Description of Artificial Sequence: Synthetic oligonucleotide
aggcuccuuggcuggagac

SEQ ID NO: 1990953 - RNA, 19 nt, Artificial Sequence
  Description of Artificial Sequence: Synthetic oligonucleotide
uguugacuuguaacccagu

SEQ ID NO: 1990954 - RNA, 19 nt, Artificial Sequence
  Description of Artificial Sequence: Synthetic oligonucleotide
aggagcaucgugacgcggg

SEQ ID NO: 1990955 - RNA, 19 nt, Artificial Sequence
  Description of Artificial Sequence: Synthetic oligonucleotide
caauaaauauauauauauu

SEQ ID NO: 1990956 - RNA, 19 nt, Artificial Sequence
  Description of Artificial Sequence: Synthetic oligonucleotide
acugaaccguuuaggcggc

SEQ ID NO: 1990957 - RNA, 19 nt, Artificial Sequence
  Description of Artificial Sequence: Synthetic oligonucleotide
ccucccaugcccaaaguag

SEQ ID NO: 1990958 - RNA, 19 nt, Artificial Sequence
  Description of Artificial Sequence: Synthetic oligonucleotide
uccauaagguucugaucuc

SEQ ID NO: 1990959 - RNA, 19 nt, Artificial Sequence
  Description of Artificial Sequence: Synthetic oligonucleotide
agcuauggcccucuuuuau

SEQ ID NO: 1990960 - RNA, 19 nt, Artificial Sequence
  Description of Artificial Sequence: Synthetic oligonucleotide
uuauugccagauggauggg

SEQ ID NO: 1990961 - RNA, 19 nt, Artificial Sequence
  Description of Artificial Sequence: Synthetic oligonucleotide
gugauggaggucagauucg

SEQ ID NO: 1990962 - RNA, 19 nt, Artificial Sequence
  Description of Artificial Sequence: Synthetic oligonucleotide
gucccugugauggagguca

SEQ ID NO: 1990963 - RNA, 19 nt, Artificial Sequence
  Description of Artificial Sequence: Synthetic oligonucleotide
ucuuggacauuggggcuag

SEQ ID NO: 1990964 - RNA, 19 nt, Artificial Sequence
  Description of Artificial Sequence: Synthetic oligonucleotide
uggcccucuuuuauugcca

SEQ ID NO: 1990965 - RNA, 19 nt, Artificial Sequence
  Description of Artificial Sequence: Synthetic oligonucleotide
gcggacuucuuccaggagc

SEQ ID NO: 1990966 - RNA, 19 nt, Artificial Sequence
  Description of Artificial Sequence: Synthetic oligonucleotide
auugccagauggaugggga

SEQ ID NO: 1990967 - RNA, 19 nt, Artificial Sequence
  Description of Artificial Sequence: Synthetic oligonucleotide
acccagugaggcuccuugg

SEQ ID NO: 1990968 - RNA, 19 nt, Artificial Sequence
  Description of Artificial Sequence: Synthetic oligonucleotide
ggaauaaagagcgaaaguu

SEQ ID NO: 1990969 - RNA, 19 nt, Artificial Sequence
  Description of Artificial Sequence: Synthetic oligonucleotide
cacacuuagggcucucuga

SEQ ID NO: 1990970 - RNA, 19 nt, Artificial Sequence
  Description of Artificial Sequence: Synthetic oligonucleotide
agcgaaaguuucuuuucuu

SEQ ID NO: 1990971 - RNA, 19 nt, Artificial Sequence
  Description of Artificial Sequence: Synthetic oligonucleotide
caggagacgaugaccucac

SEQ ID NO: 1990972 - RNA, 19 nt, Artificial Sequence
  Description of Artificial Sequence: Synthetic oligonucleotide
accaaacggggugagaaaa

SEQ ID NO: 1990973 - RNA, 19 nt, Artificial Sequence
  Description of Artificial Sequence: Synthetic oligonucleotide
uucaauggaugggaauaaa

SEQ ID NO: 1990974 - RNA, 19 nt, Artificial Sequence
  Description of Artificial Sequence: Synthetic oligonucleotide
agugucccugugauggagg

SEQ ID NO: 1990975 - RNA, 19 nt, Artificial Sequence
  Description of Artificial Sequence: Synthetic oligonucleotide
cacuuagggcucucugagc

SEQ ID NO: 1990976 - RNA, 19 nt, Artificial Sequence
  Description of Artificial Sequence: Synthetic oligonucleotide
ggagacgaugaccucacuc

SEQ ID NO: 1990977 - RNA, 19 nt, Artificial Sequence
  Description of Artificial Sequence: Synthetic oligonucleotide
uagggcucucugagcacag

SEQ ID NO: 1990978 - RNA, 19 nt, Artificial Sequence
  Description of Artificial Sequence: Synthetic oligonucleotide
guacaacagacuggaaaac

SEQ ID NO: 1990979 - RNA, 19 nt, Artificial Sequence
  Description of Artificial Sequence: Synthetic oligonucleotide
uguugccuguaggagcccc

SEQ ID NO: 1990980 - RNA, 19 nt, Artificial Sequence
  Description of Artificial Sequence: Synthetic oligonucleotide
ugaaccguuuaggcggcug

SEQ ID NO: 1990981 - RNA, 19 nt, Artificial Sequence
  Description of Artificial Sequence: Synthetic oligonucleotide
aggagcucaggagacgaug

SEQ ID NO: 1990982 - RNA, 19 nt, Artificial Sequence
  Description of Artificial Sequence: Synthetic oligonucleotide
gcgaaaguuucuuuucuuc

SEQ ID NO: 1990983 - RNA, 19 nt, Artificial Sequence
  Description of Artificial Sequence: Synthetic oligonucleotide
ucagcgccaugcuccacca

SEQ ID NO: 1990984 - RNA, 19 nt, Artificial Sequence
  Description of Artificial Sequence: Synthetic oligonucleotide
ggaggucagauucgggagc

SEQ ID NO: 1990985 - RNA, 19 nt, Artificial Sequence
  Description of Artificial Sequence: Synthetic oligonucleotide
cuugcacgucgccacgggc

SEQ ID NO: 1990986 - RNA, 19 nt, Artificial Sequence
  Description of Artificial Sequence: Synthetic oligonucleotide
ugccagauggauggggagu

SEQ ID NO: 1990987 - RNA, 19 nt, Artificial Sequence
  Description of Artificial Sequence: Synthetic oligonucleotide
gagcgaaaguuucuuuucu

SEQ ID NO: 1990988 - RNA, 19 nt, Artificial Sequence
  Description of Artificial Sequence: Synthetic oligonucleotide
gaggcaucuuggacauugg

SEQ ID NO: 1990989 - RNA, 19 nt, Artificial Sequence
  Description of Artificial Sequence: Synthetic oligonucleotide
cauuggggcuagcaccuug

SEQ ID NO: 1990990 - RNA, 19 nt, Artificial Sequence
  Description of Artificial Sequence: Synthetic oligonucleotide
ugcacuggacugguaccag

SEQ ID NO: 1990991 - RNA, 19 nt, Artificial Sequence
  Description of Artificial Sequence: Synthetic oligonucleotide
uggcucacacuuagggcuc

SEQ ID NO: 1990992 - RNA, 19 nt, Artificial Sequence
  Description of Artificial Sequence: Synthetic oligonucleotide
gucgccacgggccgcugcg

SEQ ID NO: 1990993 - RNA, 19 nt, Artificial Sequence
  Description of Artificial Sequence: Synthetic oligonucleotide
gcuuuaggaguuccagagc

SEQ ID NO: 1990994 - RNA, 19 nt, Artificial Sequence
  Description of Artificial Sequence: Synthetic oligonucleotide
augggaauaaagagcgaaa

SEQ ID NO: 1990995 - RNA, 19 nt, Artificial Sequence
  Description of Artificial Sequence: Synthetic oligonucleotide
ugacccggugccguccagg

SEQ ID NO: 1990996 - RNA, 19 nt, Artificial Sequence
  Description of Artificial Sequence: Synthetic oligonucleotide
aggaugcaccagcucccgg

SEQ ID NO: 1990997 - RNA, 19 nt, Artificial Sequence
  Description of Artificial Sequence: Synthetic oligonucleotide
uuaggcggcuguugccugu

SEQ ID NO: 1990998 - RNA, 19 nt, Artificial Sequence
  Description of Artificial Sequence: Synthetic oligonucleotide
ccaaacaucaugaccugca

SEQ ID NO: 1990999 - RNA, 19 nt, Artificial Sequence
  Description of Artificial Sequence: Synthetic oligonucleotide
ugagacccgaagugucccu

SEQ ID NO: 1991000 - RNA, 19 nt, Artificial Sequence
  Description of Artificial Sequence: Synthetic oligonucleotide
gucaaggcuguggaaccag

SEQ ID NO: 1991001 - RNA, 19 nt, Artificial Sequence
  Description of Artificial Sequence: Synthetic oligonucleotide
ucagccggucgccgacgcg

SEQ ID NO: 1991002 - RNA, 19 nt, Artificial Sequence
  Description of Artificial Sequence: Synthetic oligonucleotide
ucgaaacguuuuccccucu

SEQ ID NO: 1991003 - RNA, 19 nt, Artificial Sequence
  Description of Artificial Sequence: Synthetic oligonucleotide
acgcggacuucuuccagga

SEQ ID NO: 1991004 - RNA, 19 nt, Artificial Sequence
  Description of Artificial Sequence: Synthetic oligonucleotide
ugccuguaggagccccugc

SEQ ID NO: 1991005 - RNA, 19 nt, Artificial Sequence
  Description of Artificial Sequence: Synthetic oligonucleotide
gaagugucccugugaugga

SEQ ID NO: 1991006 - RNA, 19 nt, Artificial Sequence
  Description of Artificial Sequence: Synthetic oligonucleotide
augcacuggacugguacca

SEQ ID NO: 1991007 - RNA, 19 nt, Artificial Sequence
  Description of Artificial Sequence: Synthetic oligonucleotide
gacccgaagugucccugug

SEQ ID NO: 1991008 - RNA, 19 nt, Artificial Sequence
  Description of Artificial Sequence: Synthetic oligonucleotide
aucgugacgcggguggucu

SEQ ID NO: 1991009 - RNA, 19 nt, Artificial Sequence
  Description of Artificial Sequence: Synthetic oligonucleotide
gacgaugaccucacucuga

SEQ ID NO: 1991010 - RNA, 19 nt, Artificial Sequence
  Description of Artificial Sequence: Synthetic oligonucleotide
uuggggcuagcaccuugcu

SEQ ID NO: 1991011 - RNA, 19 nt, Artificial Sequence
  Description of Artificial Sequence: Synthetic oligonucleotide
cagauggauggggagugac

SEQ ID NO: 1991012 - RNA, 19 nt, Artificial Sequence
  Description of Artificial Sequence: Synthetic oligonucleotide
gagacccgaagugucccug

SEQ ID NO: 1991013 - RNA, 19 nt, Artificial Sequence
  Description of Artificial Sequence: Synthetic oligonucleotide
accguuuaggcggcuguug

SEQ ID NO: 1991014 - RNA, 19 nt, Artificial Sequence
  Description of Artificial Sequence: Synthetic oligonucleotide
ggcuuuaaaccucugcccu

SEQ ID NO: 1991015 - RNA, 19 nt, Artificial Sequence
  Description of Artificial Sequence: Synthetic oligonucleotide
cuuuuauugccagauggau

SEQ ID NO: 1991016 - RNA, 19 nt, Artificial Sequence
  Description of Artificial Sequence: Synthetic oligonucleotide
uucagagcgucaggaugca

SEQ ID NO: 1991017 - RNA, 19 nt, Artificial Sequence
  Description of Artificial Sequence: Synthetic oligonucleotide
gccgacgcggacuucuucc

SEQ ID NO: 1991018 - RNA, 19 nt, Artificial Sequence
  Description of Artificial Sequence: Synthetic oligonucleotide
acccgaagugucccuguga

SEQ ID NO: 1991019 - RNA, 19 nt, Artificial Sequence
  Description of Artificial Sequence: Synthetic oligonucleotide
ugggaucaccaugugucuc

SEQ ID NO: 1991020 - RNA, 19 nt, Artificial Sequence
  Description of Artificial Sequence: Synthetic oligonucleotide
uggggcuagcaccuugcuu

SEQ ID NO: 1991021 - RNA, 19 nt, Artificial Sequence
  Description of Artificial Sequence: Synthetic oligonucleotide
ggucagauucgggagccag

SEQ ID NO: 1991022 - RNA, 19 nt, Artificial Sequence
  Description of Artificial Sequence: Synthetic oligonucleotide
cccacucccuucuucaaug

SEQ ID NO: 1991023 - RNA, 19 nt, Artificial Sequence
  Description of Artificial Sequence: Synthetic oligonucleotide
gggaauaaagagcgaaagu

SEQ ID NO: 1991024 - RNA, 19 nt, Artificial Sequence
  Description of Artificial Sequence: Synthetic oligonucleotide
ccauaagguucugaucucc

SEQ ID NO: 1991025 - RNA, 19 nt, Artificial Sequence
  Description of Artificial Sequence: Synthetic oligonucleotide
cauaagguucugaucuccu

SEQ ID NO: 1991026 - RNA, 19 nt, Artificial Sequence
  Description of Artificial Sequence: Synthetic oligonucleotide
gaaccguuuaggcggcugu

SEQ ID NO: 1991027 - RNA, 19 nt, Artificial Sequence
  Description of Artificial Sequence: Synthetic oligonucleotide
gggaaaacugaaccguuua

SEQ ID NO: 1991028 - RNA, 19 nt, Artificial Sequence
  Description of Artificial Sequence: Synthetic oligonucleotide
gacgcggguggucugugaa

SEQ ID NO: 1991029 - RNA, 19 nt, Artificial Sequence
  Description of Artificial Sequence: Synthetic oligonucleotide
caggaugcaccagcucccg

SEQ ID NO: 1991030 - RNA, 19 nt, Artificial Sequence
  Description of Artificial Sequence: Synthetic oligonucleotide
ggcccucuuuuauugccag

SEQ ID NO: 1991031 - RNA, 19 nt, Artificial Sequence
  Description of Artificial Sequence: Synthetic oligonucleotide
gcggcccugggucacauug

SEQ ID NO: 1991032 - RNA, 19 nt, Artificial Sequence
  Description of Artificial Sequence: Synthetic oligonucleotide
agugacccggugccgucca

SEQ ID NO: 1991033 - RNA, 19 nt, Artificial Sequence
  Description of Artificial Sequence: Synthetic oligonucleotide
ggcggcuguugccuguagg

SEQ ID NO: 1991034 - RNA, 19 nt, Artificial Sequence
  Description of Artificial Sequence: Synthetic oligonucleotide
guuuaggcggcuguugccu

SEQ ID NO: 1991035 - RNA, 19 nt, Artificial Sequence
  Description of Artificial Sequence: Synthetic oligonucleotide
ccguuuaggcggcuguugc

SEQ ID NO: 1991036 - RNA, 19 nt, Artificial Sequence
  Description of Artificial Sequence: Synthetic oligonucleotide
cugcucuguccaacacacc

SEQ ID NO: 1991037 - RNA, 19 nt, Artificial Sequence
  Description of Artificial Sequence: Synthetic oligonucleotide
cgcugcgccacucagccgg

SEQ ID NO: 1991038 - RNA, 19 nt, Artificial Sequence
  Description of Artificial Sequence: Synthetic oligonucleotide
agggaaaacugaaccguuu

SEQ ID NO: 1991039 - RNA, 19 nt, Artificial Sequence
  Description of Artificial Sequence: Synthetic oligonucleotide
aaccguuuaggcggcuguu

SEQ ID NO: 1991040 - RNA, 19 nt, Artificial Sequence
  Description of Artificial Sequence: Synthetic oligonucleotide
cagugcgagcugcaucaug

SEQ ID NO: 1991041 - RNA, 19 nt, Artificial Sequence
  Description of Artificial Sequence: Synthetic oligonucleotide
acacaccaaacggggugag

SEQ ID NO: 1991042 - RNA, 19 nt, Artificial Sequence
  Description of Artificial Sequence: Synthetic oligonucleotide
cauugggaucaccaugugu

SEQ ID NO: 1991043 - RNA, 19 nt, Artificial Sequence
  Description of Artificial Sequence: Synthetic oligonucleotide
gucucugcggccaggugca

SEQ ID NO: 1991044 - RNA, 19 nt, Artificial Sequence
  Description of Artificial Sequence: Synthetic oligonucleotide
gagugacccggugccgucc

SEQ ID NO: 1991045 - RNA, 19 nt, Artificial Sequence
  Description of Artificial Sequence: Synthetic oligonucleotide
cccuucuucaauggauggg

SEQ ID NO: 1991046 - RNA, 19 nt, Artificial Sequence
  Description of Artificial Sequence: Synthetic oligonucleotide
gcggcuguugccuguagga

SEQ ID NO: 1991047 - RNA, 19 nt, Artificial Sequence
  Description of Artificial Sequence: Synthetic oligonucleotide
ccugcaaggccgucuugcc

SEQ ID NO: 1991048 - RNA, 19 nt, Artificial Sequence
  Description of Artificial Sequence: Synthetic oligonucleotide
caggagcaucgugacgcgg

SEQ ID NO: 1991049 - RNA, 19 nt, Artificial Sequence
  Description of Artificial Sequence: Synthetic oligonucleotide
gugcagaaggcggcgcacc

SEQ ID NO: 1991050 - RNA, 19 nt, Artificial Sequence
  Description of Artificial Sequence: Synthetic oligonucleotide
caucuuggacauuggggcu

SEQ ID NO: 1991051 - RNA, 19 nt, Artificial Sequence
  Description of Artificial Sequence: Synthetic oligonucleotide
gagcuauggcccucuuuua

SEQ ID NO: 1991052 - RNA, 19 nt, Artificial Sequence
  Description of Artificial Sequence: Synthetic oligonucleotide
cucugcggccaggugcagg

SEQ ID NO: 1991053 - RNA, 19 nt, Artificial Sequence
  Description of Artificial Sequence: Synthetic oligonucleotide
aacccagugcgagcugcau

SEQ ID NO: 1991054 - RNA, 19 nt, Artificial Sequence
  Description of Artificial Sequence: Synthetic oligonucleotide
gaccugcaaggccgucuug

SEQ ID NO: 1991055 - RNA, 19 nt, Artificial Sequence
  Description of Artificial Sequence: Synthetic oligonucleotide
ucagagcgucaggaugcac

SEQ ID NO: 1991056 - RNA, 19 nt, Artificial Sequence
  Description of Artificial Sequence: Synthetic oligonucleotide
ccaagcccaguccagguca

SEQ ID NO: 1991057 - RNA, 19 nt, Artificial Sequence
  Description of Artificial Sequence: Synthetic oligonucleotide
gcgcaccucuugcacgucg

SEQ ID NO: 1991058 - RNA, 19 nt, Artificial Sequence
  Description of Artificial Sequence: Synthetic oligonucleotide
gagcaucgugacgcgggug

SEQ ID NO: 1991059 - RNA, 19 nt, Artificial Sequence
  Description of Artificial Sequence: Synthetic oligonucleotide
ucgugacgcggguggucug

SEQ ID NO: 1991060 - RNA, 19 nt, Artificial Sequence
  Description of Artificial Sequence: Synthetic oligonucleotide
gcagggaaaacugaaccgu

SEQ ID NO: 1991061 - RNA, 19 nt, Artificial Sequence
  Description of Artificial Sequence: Synthetic oligonucleotide
gggaucaccaugugucucu

SEQ ID NO: 1991062 - RNA, 19 nt, Artificial Sequence
  Description of Artificial Sequence: Synthetic oligonucleotide
gugcgagcugcaucaugca

SEQ ID NO: 1991063 - RNA, 19 nt, Artificial Sequence
  Description of Artificial Sequence: Synthetic oligonucleotide
ggagccccugcucugucca

SEQ ID NO: 1991064 - RNA, 19 nt, Artificial Sequence
  Description of Artificial Sequence: Synthetic oligonucleotide
ggaugcaccagcucccggu

SEQ ID NO: 1991065 - RNA, 19 nt, Artificial Sequence
  Description of Artificial Sequence: Synthetic oligonucleotide
caccaaacggggugagaaa

SEQ ID NO: 1991066 - RNA, 19 nt, Artificial Sequence
  Description of Artificial Sequence: Synthetic oligonucleotide
gacugguaccagaggcauc

SEQ ID NO: 1991067 - RNA, 19 nt, Artificial Sequence
  Description of Artificial Sequence: Synthetic oligonucleotide
gaacccagugcgagcugca

SEQ ID NO: 1991068 - RNA, 19 nt, Artificial Sequence
  Description of Artificial Sequence: Synthetic oligonucleotide
cguuuaggcggcuguugcc

SEQ ID NO: 1991069 - RNA, 19 nt, Artificial Sequence
  Description of Artificial Sequence: Synthetic oligonucleotide
acgcggguggucugugaaa

SEQ ID NO: 1991070 - RNA, 19 nt, Artificial Sequence
  Description of Artificial Sequence: Synthetic oligonucleotide
ccaggagcaucgugacgcg

SEQ ID NO: 1991071 - RNA, 19 nt, Artificial Sequence
  Description of Artificial Sequence: Synthetic oligonucleotide
aguagguggcucacacuua

SEQ ID NO: 1991072 - RNA, 19 nt, Artificial Sequence
  Description of Artificial Sequence: Synthetic oligonucleotide
gacagcggcccugggucac

SEQ ID NO: 1991073 - RNA, 19 nt, Artificial Sequence
  Description of Artificial Sequence: Synthetic oligonucleotide
cagccccaagcccagucca

SEQ ID NO: 1991074 - RNA, 19 nt, Artificial Sequence
  Description of Artificial Sequence: Synthetic oligonucleotide
gcccaaaguagguggcuca

SEQ ID NO: 1991075 - RNA, 19 nt, Artificial Sequence
  Description of Artificial Sequence: Synthetic oligonucleotide
gagcugcaucaugcacugg

SEQ ID NO: 1991076 - RNA, 19 nt, Artificial Sequence
  Description of Artificial Sequence: Synthetic oligonucleotide
cugcaucaugcacuggacu

SEQ ID NO: 1991077 - RNA, 19 nt, Artificial Sequence
  Description of Artificial Sequence: Synthetic oligonucleotide
ugggucacauugggaucac

SEQ ID NO: 1991078 - RNA, 19 nt, Artificial Sequence
  Description of Artificial Sequence: Synthetic oligonucleotide
aggcggcgcaccucuugca

SEQ ID NO: 1991079 - RNA, 19 nt, Artificial Sequence
  Description of Artificial Sequence: Synthetic oligonucleotide
caggaccuucaaggugucc

SEQ ID NO: 1991080 - RNA, 19 nt, Artificial Sequence
  Description of Artificial Sequence: Synthetic oligonucleotide
gugucccugugauggaggu

SEQ ID NO: 1991081 - RNA, 19 nt, Artificial Sequence
  Description of Artificial Sequence: Synthetic oligonucleotide
aggcggcuguugccuguag

SEQ ID NO: 1991082 - RNA, 19 nt, Artificial Sequence
  Description of Artificial Sequence: Synthetic oligonucleotide
ggcggcgcaccucuugcac

SEQ ID NO: 1991083 - RNA, 19 nt, Artificial Sequence
  Description of Artificial Sequence: Synthetic oligonucleotide
caucgugacgcgggugguc

SEQ ID NO: 1991084 - RNA, 19 nt, Artificial Sequence
  Description of Artificial Sequence: Synthetic oligonucleotide
cugcuggacuuccaaacau

SEQ ID NO: 1991085 - RNA, 19 nt, Artificial Sequence
  Description of Artificial Sequence: Synthetic oligonucleotide
ccucuugcacgucgccacg

SEQ ID NO: 1991086 - RNA, 19 nt, Artificial Sequence
  Description of Artificial Sequence: Synthetic oligonucleotide
gggugagacccgaaguguc

SEQ ID NO: 1991087 - RNA, 19 nt, Artificial Sequence
  Description of Artificial Sequence: Synthetic oligonucleotide
cccggugccguccagggca

SEQ ID NO: 1991088 - RNA, 19 nt, Artificial Sequence
  Description of Artificial Sequence: Synthetic oligonucleotide
ggaaccagcaagggcugga

SEQ ID NO: 1991089 - RNA, 19 nt, Artificial Sequence
  Description of Artificial Sequence: Synthetic oligonucleotide
caccucuugcacgucgcca

SEQ ID NO: 1991090 - RNA, 19 nt, Artificial Sequence
  Description of Artificial Sequence: Synthetic oligonucleotide
caagcccaguccaggucaa

SEQ ID NO: 1991091 - RNA, 19 nt, Artificial Sequence
  Description of Artificial Sequence: Synthetic oligonucleotide
gcggguggucugugaaacc

SEQ ID NO: 1991092 - RNA, 19 nt, Artificial Sequence
  Description of Artificial Sequence: Synthetic oligonucleotide
gcacuggacugguaccaga

SEQ ID NO: 1991093 - RNA, 19 nt, Artificial Sequence
  Description of Artificial Sequence: Synthetic oligonucleotide
cuguugccuguaggagccc

SEQ ID NO: 1991094 - RNA, 19 nt, Artificial Sequence
  Description of Artificial Sequence: Synthetic oligonucleotide
acagagcuauggcccucuu

SEQ ID NO: 1991095 - RNA, 19 nt, Artificial Sequence
  Description of Artificial Sequence: Synthetic oligonucleotide
ucucugcggccaggugcag

SEQ ID NO: 1991096 - RNA, 19 nt, Artificial Sequence
  Description of Artificial Sequence: Synthetic oligonucleotide
cuggacuuccaaacaucau

SEQ ID NO: 1991097 - RNA, 19 nt, Artificial Sequence
  Description of Artificial Sequence: Synthetic oligonucleotide
gccacucagccggucgccg

SEQ ID NO: 1991098 - RNA, 19 nt, Artificial Sequence
  Description of Artificial Sequence: Synthetic oligonucleotide
ggucaaggcuguggaacca

SEQ ID NO: 1991099 - RNA, 19 nt, Artificial Sequence
  Description of Artificial Sequence: Synthetic oligonucleotide
gcgagcugcaucaugcacu

SEQ ID NO: 1991100 - RNA, 19 nt, Artificial Sequence
  Description of Artificial Sequence: Synthetic oligonucleotide
cccaaaguagguggcucac

SEQ ID NO: 1991101 - RNA, 19 nt, Artificial Sequence
  Description of Artificial Sequence: Synthetic oligonucleotide
cuuggacauuggggcuagc

SEQ ID NO: 1991102 - RNA, 19 nt, Artificial Sequence
  Description of Artificial Sequence: Synthetic oligonucleotide
ggagugacccggugccguc

SEQ ID NO: 1991103 - RNA, 19 nt, Artificial Sequence
  Description of Artificial Sequence: Synthetic oligonucleotide
uaggcggcuguugccugua

SEQ ID NO: 1991104 - RNA, 19 nt, Artificial Sequence
  Description of Artificial Sequence: Synthetic oligonucleotide
gugacccggugccguccag

SEQ ID NO: 1991105 - RNA, 19 nt, Artificial Sequence
  Description of Artificial Sequence: Synthetic oligonucleotide
ccgaagugucccugugaug

SEQ ID NO: 1991106 - RNA, 19 nt, Artificial Sequence
  Description of Artificial Sequence: Synthetic oligonucleotide
gaaccagcaagggcuggau

SEQ ID NO: 1991107 - RNA, 19 nt, Artificial Sequence
  Description of Artificial Sequence: Synthetic oligonucleotide
aggucagauucgggagcca

SEQ ID NO: 1991108 - RNA, 19 nt, Artificial Sequence
  Description of Artificial Sequence: Synthetic oligonucleotide
gcgccacucagccggucgc

SEQ ID NO: 1991109 - RNA, 19 nt, Artificial Sequence
  Description of Artificial Sequence: Synthetic oligonucleotide
gugacgcggguggucugug

SEQ ID NO: 1991110 - RNA, 19 nt, Artificial Sequence
  Description of Artificial Sequence: Synthetic oligonucleotide
ggggagugacccggugccg

SEQ ID NO: 1991111 - RNA, 19 nt, Artificial Sequence
  Description of Artificial Sequence: Synthetic oligonucleotide
ggcuccuuggcuggagaca

SEQ ID NO: 1991112 - RNA, 19 nt, Artificial Sequence
  Description of Artificial Sequence: Synthetic oligonucleotide
gcuauggcccucuuuuauu

SEQ ID NO: 1991113 - RNA, 19 nt, Artificial Sequence
  Description of Artificial Sequence: Synthetic oligonucleotide
ggaugggaauaaagagcga

SEQ ID NO: 1991114 - RNA, 19 nt, Artificial Sequence
  Description of Artificial Sequence: Synthetic oligonucleotide
gcuagggcuuuaaaccucu

SEQ ID NO: 1991115 - RNA, 19 nt, Artificial Sequence
  Description of Artificial Sequence: Synthetic oligonucleotide
cgcaccucuugcacgucgc

SEQ ID NO: 1991116 - RNA, 19 nt, Artificial Sequence
  Description of Artificial Sequence: Synthetic oligonucleotide
gucgccgacgcggacuucu

SEQ ID NO: 1991117 - RNA, 19 nt, Artificial Sequence
  Description of Artificial Sequence: Synthetic oligonucleotide
cacaccaaacggggugaga

SEQ ID NO: 1991118 - RNA, 19 nt, Artificial Sequence
  Description of Artificial Sequence: Synthetic oligonucleotide
ucgccgacgcggacuucuu

SEQ ID NO: 1991119 - RNA, 19 nt, Artificial Sequence
  Description of Artificial Sequence: Synthetic oligonucleotide
cagcgccaugcuccaccag

SEQ ID NO: 1991120 - RNA, 19 nt, Artificial Sequence
  Description of Artificial Sequence: Synthetic oligonucleotide
cgaaacguuuuccccucuc

SEQ ID NO: 1991121 - RNA, 19 nt, Artificial Sequence
  Description of Artificial Sequence: Synthetic oligonucleotide
guccaggaacccagugcga

SEQ ID NO: 1991122 - RNA, 19 nt, Artificial Sequence
  Description of Artificial Sequence: Synthetic oligonucleotide
cccaagcccaguccagguc

SEQ ID NO: 1991123 - RNA, 19 nt, Artificial Sequence
  Description of Artificial Sequence: Synthetic oligonucleotide
cuuccaaggucaccagcuu

SEQ ID NO: 1991124 - RNA, 19 nt, Artificial Sequence
  Description of Artificial Sequence: Synthetic oligonucleotide
gccgucuugccaaagcggu

SEQ ID NO: 1991125 - RNA, 19 nt, Artificial Sequence
  Description of Artificial Sequence: Synthetic oligonucleotide
ggcuagcaccuugcuuuag

SEQ ID NO: 1991126 - RNA, 19 nt, Artificial Sequence
  Description of Artificial Sequence: Synthetic oligonucleotide
cgcggguggucugugaaac

SEQ ID NO: 1991127 - RNA, 19 nt, Artificial Sequence
  Description of Artificial Sequence: Synthetic oligonucleotide
ggacugguaccagaggcau

SEQ ID NO: 1991128 - RNA, 19 nt, Artificial Sequence
  Description of Artificial Sequence: Synthetic oligonucleotide
ggggugagacccgaagugu

SEQ ID NO: 1991129 - RNA, 19 nt, Artificial Sequence
  Description of Artificial Sequence: Synthetic oligonucleotide
caucagcgccaugcuccac

SEQ ID NO: 1991130 - RNA, 19 nt, Artificial Sequence
  Description of Artificial Sequence: Synthetic oligonucleotide
guugccuguaggagccccu

SEQ ID NO: 1991131 - RNA, 19 nt, Artificial Sequence
  Description of Artificial Sequence: Synthetic oligonucleotide
ggagcaucgugacgcgggu

SEQ ID NO: 1991132 - RNA, 19 nt, Artificial Sequence
  Description of Artificial Sequence: Synthetic oligonucleotide
acagcggcccugggucaca

SEQ ID NO: 1991133 - RNA, 19 nt, Artificial Sequence
  Description of Artificial Sequence: Synthetic oligonucleotide
cucacacuuagggcucucu

SEQ ID NO: 1991134 - RNA, 19 nt, Artificial Sequence
  Description of Artificial Sequence: Synthetic oligonucleotide
acauuggggcuagcaccuu

SEQ ID NO: 1991135 - RNA, 19 nt, Artificial Sequence
  Description of Artificial Sequence: Synthetic oligonucleotide
cagcaagggcuggaucgga

SEQ ID NO: 1991136 - RNA, 19 nt, Artificial Sequence
  Description of Artificial Sequence: Synthetic oligonucleotide
ccaggaccuucaagguguc

SEQ ID NO: 1991137 - RNA, 19 nt, Artificial Sequence
  Description of Artificial Sequence: Synthetic oligonucleotide
ggcucucugagcacagccu

SEQ ID NO: 1991138 - RNA, 19 nt, Artificial Sequence
  Description of Artificial Sequence: Synthetic oligonucleotide
ccagugaggcuccuuggcu

SEQ ID NO: 1991139 - RNA, 19 nt, Artificial Sequence
  Description of Artificial Sequence: Synthetic oligonucleotide
ccaacacaccaaacggggu

SEQ ID NO: 1991140 - RNA, 19 nt, Artificial Sequence
  Description of Artificial Sequence: Synthetic oligonucleotide
ccccucucccucccaugcc

SEQ ID NO: 1991141 - RNA, 19 nt, Artificial Sequence
  Description of Artificial Sequence: Synthetic oligonucleotide
gggcuagcaccuugcuuua

SEQ ID NO: 1991142 - RNA, 19 nt, Artificial Sequence
  Description of Artificial Sequence: Synthetic oligonucleotide
cccgaagugucccugugau

SEQ ID NO: 1991143 - RNA, 19 nt, Artificial Sequence
  Description of Artificial Sequence: Synthetic oligonucleotide
cgacgcggacuucuuccag

SEQ ID NO: 1991144 - RNA, 19 nt, Artificial Sequence
  Description of Artificial Sequence: Synthetic oligonucleotide
ccgacgcggacuucuucca

SEQ ID NO: 1991145 - RNA, 19 nt, Artificial Sequence
  Description of Artificial Sequence: Synthetic oligonucleotide
agccggucgccgacgcgga

SEQ ID NO: 1991146 - RNA, 19 nt, Artificial Sequence
  Description of Artificial Sequence: Synthetic oligonucleotide
cagagcuauggcccucuuu

SEQ ID NO: 1991147 - RNA, 19 nt, Artificial Sequence
  Description of Artificial Sequence: Synthetic oligonucleotide
gcaccuugcuuuaggaguu

SEQ ID NO: 1991148 - RNA, 19 nt, Artificial Sequence
  Description of Artificial Sequence: Synthetic oligonucleotide
cccucccaugcccaaagua

SEQ ID NO: 1991149 - RNA, 19 nt, Artificial Sequence
  Description of Artificial Sequence: Synthetic oligonucleotide
gggagugacccggugccgu

SEQ ID NO: 1991150 - RNA, 19 nt, Artificial Sequence
  Description of Artificial Sequence: Synthetic oligonucleotide
caggagcucaggagacgau

SEQ ID NO: 1991151 - RNA, 19 nt, Artificial Sequence
  Description of Artificial Sequence: Synthetic oligonucleotide
agcggcccugggucacauu

SEQ ID NO: 1991152 - RNA, 19 nt, Artificial Sequence
  Description of Artificial Sequence: Synthetic oligonucleotide
gccacgggccgcugcgcca

SEQ ID NO: 1991153 - RNA, 19 nt, Artificial Sequence
  Description of Artificial Sequence: Synthetic oligonucleotide
guaacccagugaggcuccu

SEQ ID NO: 1991154 - RNA, 19 nt, Artificial Sequence
  Description of Artificial Sequence: Synthetic oligonucleotide
ccacucagccggucgccga

SEQ ID NO: 1991155 - RNA, 19 nt, Artificial Sequence
  Description of Artificial Sequence: Synthetic oligonucleotide
cgcggacuucuuccaggag

SEQ ID NO: 1991156 - RNA, 19 nt, Artificial Sequence
  Description of Artificial Sequence: Synthetic oligonucleotide
gcgucaggaugcaccagcu

SEQ ID NO: 1991157 - RNA, 19 nt, Artificial Sequence
  Description of Artificial Sequence: Synthetic oligonucleotide
ccagagcaacugcuggacu

SEQ ID NO: 1991158 - RNA, 19 nt, Artificial Sequence
  Description of Artificial Sequence: Synthetic oligonucleotide
cugcgccacucagccgguc

SEQ ID NO: 1991159 - RNA, 19 nt, Artificial Sequence
  Description of Artificial Sequence: Synthetic oligonucleotide
acgucgccacgggccgcug

SEQ ID NO: 1991160 - RNA, 19 nt, Artificial Sequence
  Description of Artificial Sequence: Synthetic oligonucleotide
cacgucgccacgggccgcu

SEQ ID NO: 1991161 - RNA, 19 nt, Artificial Sequence
  Description of Artificial Sequence: Synthetic oligonucleotide
cggugcagaaggcggcgca

SEQ ID NO: 1991162 - RNA, 19 nt, Artificial Sequence
  Description of Artificial Sequence: Synthetic oligonucleotide
cgucgccacgggccgcugc

SEQ ID NO: 1991163 - RNA, 19 nt, Artificial Sequence
  Description of Artificial Sequence: Synthetic oligonucleotide
ccaugugucucugcaggau

SEQ ID NO: 1991164 - RNA, 19 nt, Artificial Sequence
  Description of Artificial Sequence: Synthetic oligonucleotide
ggcucacacuuagggcucu

SEQ ID NO: 1991165 - RNA, 19 nt, Artificial Sequence
  Description of Artificial Sequence: Synthetic oligonucleotide
gccggucgccgacgcggac

SEQ ID NO: 1991166 - RNA, 19 nt, Artificial Sequence
  Description of Artificial Sequence: Synthetic oligonucleotide
ccaaagcgguucagagcgu

SEQ ID NO: 1991167 - RNA, 19 nt, Artificial Sequence
  Description of Artificial Sequence: Synthetic oligonucleotide
cugaaccguuuaggcggcu

SEQ ID NO: 1991168 - RNA, 19 nt, Artificial Sequence
  Description of Artificial Sequence: Synthetic oligonucleotide
ggcgcaccucuugcacguc

SEQ ID NO: 1991169 - RNA, 19 nt, Artificial Sequence
  Description of Artificial Sequence: Synthetic oligonucleotide
gcaucgugacgcggguggu

SEQ ID NO: 1991170 - RNA, 19 nt, Artificial Sequence
  Description of Artificial Sequence: Synthetic oligonucleotide
cgccgacgcggacuucuuc

SEQ ID NO: 1991171 - RNA, 19 nt, Artificial Sequence
  Description of Artificial Sequence: Synthetic oligonucleotide
cccugugauggaggucaga

SEQ ID NO: 1991172 - RNA, 19 nt, Artificial Sequence
  Description of Artificial Sequence: Synthetic oligonucleotide
ggacuucuuccaggagcau

SEQ ID NO: 1991173 - RNA, 19 nt, Artificial Sequence
  Description of Artificial Sequence: Synthetic oligonucleotide
ccgucuugccaaagcgguu

SEQ ID NO: 1991174 - RNA, 19 nt, Artificial Sequence
  Description of Artificial Sequence: Synthetic oligonucleotide
cugguaccagaggcaucuu

SEQ ID NO: 1991175 - RNA, 19 nt, Artificial Sequence
  Description of Artificial Sequence: Synthetic oligonucleotide
ggucgccgacgcggacuuc

SEQ ID NO: 1991176 - RNA, 19 nt, Artificial Sequence
  Description of Artificial Sequence: Synthetic oligonucleotide
gcugcgccacucagccggu

SEQ ID NO: 1991177 - RNA, 19 nt, Artificial Sequence
  Description of Artificial Sequence: Synthetic oligonucleotide
cgugacgcggguggucugu

SEQ ID NO: 1991178 - RNA, 19 nt, Artificial Sequence
  Description of Artificial Sequence: Synthetic oligonucleotide
cacgggccgcugcgccacu

SEQ ID NO: 1991179 - RNA, 19 nt, Artificial Sequence
  Description of Artificial Sequence: Synthetic oligonucleotide
ccggugccguccagggcau

SEQ ID NO: 1991180 - RNA, 19 nt, Artificial Sequence
  Description of Artificial Sequence: Synthetic oligonucleotide
cggucgccgacgcggacuu

SEQ ID NO: 1991181 - RNA, 19 nt, Artificial Sequence
  Description of Artificial Sequence: Synthetic oligonucleotide
cggugccguccagggcauu

SEQ ID NO: 1991182 - RNA, 19 nt, Artificial Sequence
  Description of Artificial Sequence: Synthetic oligonucleotide
ucauugagaaauuucaacc

SEQ ID NO: 1991183 - RNA, 19 nt, Artificial Sequence
  Description of Artificial Sequence: Synthetic oligonucleotide
agaaauuucaaccguagca

SEQ ID NO: 1991184 - RNA, 19 nt, Artificial Sequence
  Description of Artificial Sequence: Synthetic oligonucleotide
cauugagaaauuucaaccg

SEQ ID NO: 1991185 - RNA, 19 nt, Artificial Sequence
  Description of Artificial Sequence: Synthetic oligonucleotide
ucaaccguagcacuagggg

SEQ ID NO: 1991186 - RNA, 19 nt, Artificial Sequence
  Description of Artificial Sequence: Synthetic oligonucleotide
uguguugagacccaggcaa

SEQ ID NO: 1991187 - RNA, 19 nt, Artificial Sequence
  Description of Artificial Sequence: Synthetic oligonucleotide
uauguguugagacccaggc

SEQ ID NO: 1991188 - RNA, 19 nt, Artificial Sequence
  Description of Artificial Sequence: Synthetic oligonucleotide
ugagaaauuucaaccguag

SEQ ID NO: 1991189 - RNA, 19 nt, Artificial Sequence
  Description of Artificial Sequence: Synthetic oligonucleotide
uccacuagcuccaucgcgg

SEQ ID NO: 1991190 - RNA, 19 nt, Artificial Sequence
  Description of Artificial Sequence: Synthetic oligonucleotide
aaauuucaaccguagcacu

SEQ ID NO: 1991191 - RNA, 19 nt, Artificial Sequence
  Description of Artificial Sequence: Synthetic oligonucleotide
agcuccacuagcuccaucg

SEQ ID NO: 1991192 - RNA, 19 nt, Artificial Sequence
  Description of Artificial Sequence: Synthetic oligonucleotide
aggacaaaggcacaggcca

SEQ ID NO: 1991193 - RNA, 19 nt, Artificial Sequence
  Description of Artificial Sequence: Synthetic oligonucleotide
agcgggaaaaggcaggccg

SEQ ID NO: 1991194 - RNA, 19 nt, Artificial Sequence
  Description of Artificial Sequence: Synthetic oligonucleotide
auugagaaauuucaaccgu

SEQ ID NO: 1991195 - RNA, 19 nt, Artificial Sequence
  Description of Artificial Sequence: Synthetic oligonucleotide
cuaccaagcgcccagcucc

SEQ ID NO: 1991196 - RNA, 19 nt, Artificial Sequence
  Description of Artificial Sequence: Synthetic oligonucleotide
gucauugagaaauuucaac

SEQ ID NO: 1991197 - RNA, 19 nt, Artificial Sequence
  Description of Artificial Sequence: Synthetic oligonucleotide
uuuuaggacaaaggcacag

SEQ ID NO: 1991198 - RNA, 19 nt, Artificial Sequence
  Description of Artificial Sequence: Synthetic oligonucleotide
uucaaccguagcacuaggg

SEQ ID NO: 1991199 - RNA, 19 nt, Artificial Sequence
  Description of Artificial Sequence: Synthetic oligonucleotide
aaggcagcgacagcaaggg

SEQ ID NO: 1991200 - RNA, 19 nt, Artificial Sequence
  Description of Artificial Sequence: Synthetic oligonucleotide
uacuggaucuggcaguacc

SEQ ID NO: 1991201 - RNA, 19 nt, Artificial Sequence
  Description of Artificial Sequence: Synthetic oligonucleotide
uuuaggacaaaggcacagg

SEQ ID NO: 1991202 - RNA, 19 nt, Artificial Sequence
  Description of Artificial Sequence: Synthetic oligonucleotide
gagucauugagaaauuuca

SEQ ID NO: 1991203 - RNA, 19 nt, Artificial Sequence
  Description of Artificial Sequence: Synthetic oligonucleotide
uugguagaugagucgaacc

SEQ ID NO: 1991204 - RNA, 19 nt, Artificial Sequence
  Description of Artificial Sequence: Synthetic oligonucleotide
gagaaauuucaaccguagc

SEQ ID NO: 1991205 - RNA, 19 nt, Artificial Sequence
  Description of Artificial Sequence: Synthetic oligonucleotide
ucgguacuggaucuggcag

SEQ ID NO: 1991206 - RNA, 19 nt, Artificial Sequence
  Description of Artificial Sequence: Synthetic oligonucleotide
uagggguuccuguagggag

SEQ ID NO: 1991207 - RNA, 19 nt, Artificial Sequence
  Description of Artificial Sequence: Synthetic oligonucleotide
cacuacgggcgauacaugg

SEQ ID NO: 1991208 - RNA, 19 nt, Artificial Sequence
  Description of Artificial Sequence: Synthetic oligonucleotide
aaugguauccugaggccag

SEQ ID NO: 1991209 - RNA, 19 nt, Artificial Sequence
  Description of Artificial Sequence: Synthetic oligonucleotide
guauccugaggccaggccc

SEQ ID NO: 1991210 - RNA, 19 nt, Artificial Sequence
  Description of Artificial Sequence: Synthetic oligonucleotide
uuucaaccguagcacuagg

SEQ ID NO: 1991211 - RNA, 19 nt, Artificial Sequence
  Description of Artificial Sequence: Synthetic oligonucleotide
uugagaaauuucaaccgua

SEQ ID NO: 1991212 - RNA, 19 nt, Artificial Sequence
  Description of Artificial Sequence: Synthetic oligonucleotide
uccucugcgacgcaaggcu

SEQ ID NO: 1991213 - RNA, 19 nt, Artificial Sequence
  Description of Artificial Sequence: Synthetic oligonucleotide
gaugagucgaaccugcugu

SEQ ID NO: 1991214 - RNA, 19 nt, Artificial Sequence
  Description of Artificial Sequence: Synthetic oligonucleotide
guagggagucugcaggugg

SEQ ID NO: 1991215 - RNA, 19 nt, Artificial Sequence
  Description of Artificial Sequence: Synthetic oligonucleotide
gccaaugguauccugaggc

SEQ ID NO: 1991216 - RNA, 19 nt, Artificial Sequence
  Description of Artificial Sequence: Synthetic oligonucleotide
cugugaagaugacagggag

SEQ ID NO: 1991217 - RNA, 19 nt, Artificial Sequence
  Description of Artificial Sequence: Synthetic oligonucleotide
gcugucaggggaaagaagg

SEQ ID NO: 1991218 - RNA, 19 nt, Artificial Sequence
  Description of Artificial Sequence: Synthetic oligonucleotide
gaccuugguagaugagucg

SEQ ID NO: 1991219 - RNA, 19 nt, Artificial Sequence
  Description of Artificial Sequence: Synthetic oligonucleotide
uccuagaaguugaccuugg

SEQ ID NO: 1991220 - RNA, 19 nt, Artificial Sequence
  Description of Artificial Sequence: Synthetic oligonucleotide
gacagcagccccuuugcgc

SEQ ID NO: 1991221 - RNA, 19 nt, Artificial Sequence
  Description of Artificial Sequence: Synthetic oligonucleotide
gagucgaaccugcuguucc

SEQ ID NO: 1991222 - RNA, 19 nt, Artificial Sequence
  Description of Artificial Sequence: Synthetic oligonucleotide
aguuaccagaggugcuacc

SEQ ID NO: 1991223 - RNA, 19 nt, Artificial Sequence
  Description of Artificial Sequence: Synthetic oligonucleotide
aguugaccuugguagauga

SEQ ID NO: 1991224 - RNA, 19 nt, Artificial Sequence
  Description of Artificial Sequence: Synthetic oligonucleotide
acuagggguuccuguaggg

SEQ ID NO: 1991225 - RNA, 19 nt, Artificial Sequence
  Description of Artificial Sequence: Synthetic oligonucleotide
auuucaaccguagcacuag

SEQ ID NO: 1991226 - RNA, 19 nt, Artificial Sequence
  Description of Artificial Sequence: Synthetic oligonucleotide
uguauucucggugguaugu

SEQ ID NO: 1991227 - RNA, 19 nt, Artificial Sequence
  Description of Artificial Sequence: Synthetic oligonucleotide
agaaguugaccuugguaga

SEQ ID NO: 1991228 - RNA, 19 nt, Artificial Sequence
  Description of Artificial Sequence: Synthetic oligonucleotide
uguugagacccaggcaacg

SEQ ID NO: 1991229 - RNA, 19 nt, Artificial Sequence
  Description of Artificial Sequence: Synthetic oligonucleotide
uaccagaggugcuaccaag

SEQ ID NO: 1991230 - RNA, 19 nt, Artificial Sequence
  Description of Artificial Sequence: Synthetic oligonucleotide
agaugagucgaaccugcug

SEQ ID NO: 1991231 - RNA, 19 nt, Artificial Sequence
  Description of Artificial Sequence: Synthetic oligonucleotide
gaagccuccgccccuggag

SEQ ID NO: 1991232 - RNA, 19 nt, Artificial Sequence
  Description of Artificial Sequence: Synthetic oligonucleotide
ugugucucaggcuggggcu

SEQ ID NO: 1991233 - RNA, 19 nt, Artificial Sequence
  Description of Artificial Sequence: Synthetic oligonucleotide
ggugaagccggccaggccc

SEQ ID NO: 1991234 - RNA, 19 nt, Artificial Sequence
  Description of Artificial Sequence: Synthetic oligonucleotide
ugcgacgcaaggcugggcu

SEQ ID NO: 1991235 - RNA, 19 nt, Artificial Sequence
  Description of Artificial Sequence: Synthetic oligonucleotide
cagggcagcgggaaaaggc

SEQ ID NO: 1991236 - RNA, 19 nt, Artificial Sequence
  Description of Artificial Sequence: Synthetic oligonucleotide
uucucggugguauguguug

SEQ ID NO: 1991237 - RNA, 19 nt, Artificial Sequence
  Description of Artificial Sequence: Synthetic oligonucleotide
ggcgauacauggcaaaggc

SEQ ID NO: 1991238 - RNA, 19 nt, Artificial Sequence
  Description of Artificial Sequence: Synthetic oligonucleotide
gaaggcugccgauuuccag

SEQ ID NO: 1991239 - RNA, 19 nt, Artificial Sequence
  Description of Artificial Sequence: Synthetic oligonucleotide
uucccggccgggaaacugg

SEQ ID NO: 1991240 - RNA, 19 nt, Artificial Sequence
  Description of Artificial Sequence: Synthetic oligonucleotide
agaagaccccgcugucugc

SEQ ID NO: 1991241 - RNA, 19 nt, Artificial Sequence
  Description of Artificial Sequence: Synthetic oligonucleotide
uauucucggugguaugugu

SEQ ID NO: 1991242 - RNA, 19 nt, Artificial Sequence
  Description of Artificial Sequence: Synthetic oligonucleotide
uaccagagcaggagcagca

SEQ ID NO: 1991243 - RNA, 19 nt, Artificial Sequence
  Description of Artificial Sequence: Synthetic oligonucleotide
cacguggcaguggagaacg

SEQ ID NO: 1991244 - RNA, 19 nt, Artificial Sequence
  Description of Artificial Sequence: Synthetic oligonucleotide
cugugucucaggcuggggc

SEQ ID NO: 1991245 - RNA, 19 nt, Artificial Sequence
  Description of Artificial Sequence: Synthetic oligonucleotide
accccuucaaucaaggcca

SEQ ID NO: 1991246 - RNA, 19 nt, Artificial Sequence
  Description of Artificial Sequence: Synthetic oligonucleotide
ggugcuguggucccugacg

SEQ ID NO: 1991247 - RNA, 19 nt, Artificial Sequence
  Description of Artificial Sequence: Synthetic oligonucleotide
uccuguagggagucugcag

SEQ ID NO: 1991248 - RNA, 19 nt, Artificial Sequence
  Description of Artificial Sequence: Synthetic oligonucleotide
cucugaugcugucuguggc

SEQ ID NO: 1991249 - RNA, 19 nt, Artificial Sequence
  Description of Artificial Sequence: Synthetic oligonucleotide
ggugguauguguugagacc

SEQ ID NO: 1991250 - RNA, 19 nt, Artificial Sequence
  Description of Artificial Sequence: Synthetic oligonucleotide
acuacgggcgauacauggc

SEQ ID NO: 1991251 - RNA, 19 nt, Artificial Sequence
  Description of Artificial Sequence: Synthetic oligonucleotide
gucuccuagaaguugaccu

SEQ ID NO: 1991252 - RNA, 19 nt, Artificial Sequence
  Description of Artificial Sequence: Synthetic oligonucleotide
gaagaccccgcugucugcg

SEQ ID NO: 1991253 - RNA, 19 nt, Artificial Sequence
  Description of Artificial Sequence: Synthetic oligonucleotide
aaguugaccuugguagaug

SEQ ID NO: 1991254 - RNA, 19 nt, Artificial Sequence
  Description of Artificial Sequence: Synthetic oligonucleotide
cuccacuagcuccaucgcg

SEQ ID NO: 1991255 - RNA, 19 nt, Artificial Sequence
  Description of Artificial Sequence: Synthetic oligonucleotide
guugagacccaggcaacgg

SEQ ID NO: 1991256 - RNA, 19 nt, Artificial Sequence
  Description of Artificial Sequence: Synthetic oligonucleotide
uggcaccugaguuaccaga

SEQ ID NO: 1991257 - RNA, 19 nt, Artificial Sequence
  Description of Artificial Sequence: Synthetic oligonucleotide
cacuagggguuccuguagg

SEQ ID NO: 1991258 - RNA, 19 nt, Artificial Sequence
  Description of Artificial Sequence: Synthetic oligonucleotide
cucugcgacgcaaggcugg

SEQ ID NO: 1991259 - RNA, 19 nt, Artificial Sequence
  Description of Artificial Sequence: Synthetic oligonucleotide
gacaaaggcacaggccaag

SEQ ID NO: 1991260 - RNA, 19 nt, Artificial Sequence
  Description of Artificial Sequence: Synthetic oligonucleotide
uuaccagaggugcuaccaa

SEQ ID NO: 1991261 - RNA, 19 nt, Artificial Sequence
  Description of Artificial Sequence: Synthetic oligonucleotide
agccaaugguauccugagg

SEQ ID NO: 1991262 - RNA, 19 nt, Artificial Sequence
  Description of Artificial Sequence: Synthetic oligonucleotide
cuugguagaugagucgaac

SEQ ID NO: 1991263 - RNA, 19 nt, Artificial Sequence
  Description of Artificial Sequence: Synthetic oligonucleotide
aguaguugcugugaccccu

SEQ ID NO: 1991264 - RNA, 19 nt, Artificial Sequence
  Description of Artificial Sequence: Synthetic oligonucleotide
ggugucgucuccuagaagu

SEQ ID NO: 1991265 - RNA, 19 nt, Artificial Sequence
  Description of Artificial Sequence: Synthetic oligonucleotide
cagaagaccccgcugucug

SEQ ID NO: 1991266 - RNA, 19 nt, Artificial Sequence
  Description of Artificial Sequence: Synthetic oligonucleotide
ucccugacgucuguggcag

SEQ ID NO: 1991267 - RNA, 19 nt, Artificial Sequence
  Description of Artificial Sequence: Synthetic oligonucleotide
ugucgucuccuagaaguug

SEQ ID NO: 1991268 - RNA, 19 nt, Artificial Sequence
  Description of Artificial Sequence: Synthetic oligonucleotide
aguaccagagcaggagcag

SEQ ID NO: 1991269 - RNA, 19 nt, Artificial Sequence
  Description of Artificial Sequence: Synthetic oligonucleotide
uagggagucugcaggugga

SEQ ID NO: 1991270 - RNA, 19 nt, Artificial Sequence
  Description of Artificial Sequence: Synthetic oligonucleotide
guauguguugagacccagg

SEQ ID NO: 1991271 - RNA, 19 nt, Artificial Sequence
  Description of Artificial Sequence: Synthetic oligonucleotide
guuaccagaggugcuacca

SEQ ID NO: 1991272 - RNA, 19 nt, Artificial Sequence
  Description of Artificial Sequence: Synthetic oligonucleotide
agcgcccagcuccacuagc

SEQ ID NO: 1991273 - RNA, 19 nt, Artificial Sequence
  Description of Artificial Sequence: Synthetic oligonucleotide
ugucugcgaaggcugcgug

SEQ ID NO: 1991274 - RNA, 19 nt, Artificial Sequence
  Description of Artificial Sequence: Synthetic oligonucleotide
ugggugucgucuccuagaa

SEQ ID NO: 1991275 - RNA, 19 nt, Artificial Sequence
  Description of Artificial Sequence: Synthetic oligonucleotide
aagccuccgccccuggagu

SEQ ID NO: 1991276 - RNA, 19 nt, Artificial Sequence
  Description of Artificial Sequence: Synthetic oligonucleotide
accuugguagaugagucga

SEQ ID NO: 1991277 - RNA, 19 nt, Artificial Sequence
  Description of Artificial Sequence: Synthetic oligonucleotide
gaggcugcccagugucugg

SEQ ID NO: 1991278 - RNA, 19 nt, Artificial Sequence
  Description of Artificial Sequence: Synthetic oligonucleotide
aaccguagcacuagggguu

SEQ ID NO: 1991279 - RNA, 19 nt, Artificial Sequence
  Description of Artificial Sequence: Synthetic oligonucleotide
cuagaaguugaccuuggua

SEQ ID NO: 1991280 - RNA, 19 nt, Artificial Sequence
  Description of Artificial Sequence: Synthetic oligonucleotide
cuggguccuuuucagggag

SEQ ID NO: 1991281 - RNA, 19 nt, Artificial Sequence
  Description of Artificial Sequence: Synthetic oligonucleotide
gaguaguugcugugacccc

SEQ ID NO: 1991282 - RNA, 19 nt, Artificial Sequence
  Description of Artificial Sequence: Synthetic oligonucleotide
cuaccccuucaaucaaggc

SEQ ID NO: 1991283 - RNA, 19 nt, Artificial Sequence
  Description of Artificial Sequence: Synthetic oligonucleotide
uagaugagucgaaccugcu

SEQ ID NO: 1991284 - RNA, 19 nt, Artificial Sequence
  Description of Artificial Sequence: Synthetic oligonucleotide
uagcacuagggguuccugu

SEQ ID NO: 1991285 - RNA, 19 nt, Artificial Sequence
  Description of Artificial Sequence: Synthetic oligonucleotide
ucaaggccauggcaccuga

SEQ ID NO: 1991286 - RNA, 19 nt, Artificial Sequence
  Description of Artificial Sequence: Synthetic oligonucleotide
aucgcggccccucgggcac

SEQ ID NO: 1991287 - RNA, 19 nt, Artificial Sequence
  Description of Artificial Sequence: Synthetic oligonucleotide
agcagaaggcugccgauuu

SEQ ID NO: 1991288 - RNA, 19 nt, Artificial Sequence
  Description of Artificial Sequence: Synthetic oligonucleotide
cuacgggcgauacauggca

SEQ ID NO: 1991289 - RNA, 19 nt, Artificial Sequence
  Description of Artificial Sequence: Synthetic oligonucleotide
ggccugauccagaagaccc

SEQ ID NO: 1991290 - RNA, 19 nt, Artificial Sequence
  Description of Artificial Sequence: Synthetic oligonucleotide
agaggggcuggcugcacug

SEQ ID NO: 1991291 - RNA, 19 nt, Artificial Sequence
  Description of Artificial Sequence: Synthetic oligonucleotide
cugggcagacagcagcccc

SEQ ID NO: 1991292 - RNA, 19 nt, Artificial Sequence
  Description of Artificial Sequence: Synthetic oligonucleotide
gucaggggaaagaaggguc

SEQ ID NO: 1991293 - RNA, 19 nt, Artificial Sequence
  Description of Artificial Sequence: Synthetic oligonucleotide
cuccuagaaguugaccuug

SEQ ID NO: 1991294 - RNA, 19 nt, Artificial Sequence
  Description of Artificial Sequence: Synthetic oligonucleotide
agcacuagggguuccugua

SEQ ID NO: 1991295 - RNA, 19 nt, Artificial Sequence
  Description of Artificial Sequence: Synthetic oligonucleotide
ucucggugguauguguuga

SEQ ID NO: 1991296 - RNA, 19 nt, Artificial Sequence
  Description of Artificial Sequence: Synthetic oligonucleotide
gcugugaccccuguguccg

SEQ ID NO: 1991297 - RNA, 19 nt, Artificial Sequence
  Description of Artificial Sequence: Synthetic oligonucleotide
caggcaacggccagcacca

SEQ ID NO: 1991298 - RNA, 19 nt, Artificial Sequence
  Description of Artificial Sequence: Synthetic oligonucleotide
acacguggcaguggagaac

SEQ ID NO: 1991299 - RNA, 19 nt, Artificial Sequence
  Description of Artificial Sequence: Synthetic oligonucleotide
caggccgcgggugaggagg

SEQ ID NO: 1991300 - RNA, 19 nt, Artificial Sequence
  Description of Artificial Sequence: Synthetic oligonucleotide
cugcacugccagcagcccg

SEQ ID NO: 1991301 - RNA, 19 nt, Artificial Sequence
  Description of Artificial Sequence: Synthetic oligonucleotide
ccuaccccuucaaucaagg

SEQ ID NO: 1991302 - RNA, 19 nt, Artificial Sequence
  Description of Artificial Sequence: Synthetic oligonucleotide
aguugcugugaccccugug

SEQ ID NO: 1991303 - RNA, 19 nt, Artificial Sequence
  Description of Artificial Sequence: Synthetic oligonucleotide
gggaaagaagggucgguac

SEQ ID NO: 1991304 - RNA, 19 nt, Artificial Sequence
  Description of Artificial Sequence: Synthetic oligonucleotide
gucgguacuggaucuggca

SEQ ID NO: 1991305 - RNA, 19 nt, Artificial Sequence
  Description of Artificial Sequence: Synthetic oligonucleotide
acauggcaaaggccaggag

SEQ ID NO: 1991306 - RNA, 19 nt, Artificial Sequence
  Description of Artificial Sequence: Synthetic oligonucleotide
ugcuaccaagcgcccagcu

SEQ ID NO: 1991307 - RNA, 19 nt, Artificial Sequence
  Description of Artificial Sequence: Synthetic oligonucleotide
ucggugguauguguugaga

SEQ ID NO: 1991308 - RNA, 19 nt, Artificial Sequence
  Description of Artificial Sequence: Synthetic oligonucleotide
ggcaguaccagagcaggag

SEQ ID NO: 1991309 - RNA, 19 nt, Artificial Sequence
  Description of Artificial Sequence: Synthetic oligonucleotide
cucggugguauguguugag

SEQ ID NO: 1991310 - RNA, 19 nt, Artificial Sequence
  Description of Artificial Sequence: Synthetic oligonucleotide
cacaggccaaggcagcgac

SEQ ID NO: 1991311 - RNA, 19 nt, Artificial Sequence
  Description of Artificial Sequence: Synthetic oligonucleotide
aggccauggcaccugaguu

SEQ ID NO: 1991312 - RNA, 19 nt, Artificial Sequence
  Description of Artificial Sequence: Synthetic oligonucleotide
ccaaugguauccugaggcc

SEQ ID NO: 1991313 - RNA, 19 nt, Artificial Sequence
  Description of Artificial Sequence: Synthetic oligonucleotide
uggacacguggcaguggag

SEQ ID NO: 1991314 - RNA, 19 nt, Artificial Sequence
  Description of Artificial Sequence: Synthetic oligonucleotide
caguaccagagcaggagca

SEQ ID NO: 1991315 - RNA, 19 nt, Artificial Sequence
  Description of Artificial Sequence: Synthetic oligonucleotide
cugcucagagucauugaga

SEQ ID NO: 1991316 - RNA, 19 nt, Artificial Sequence
  Description of Artificial Sequence: Synthetic oligonucleotide
gcaguaccagagcaggagc

SEQ ID NO: 1991317 - RNA, 19 nt, Artificial Sequence
  Description of Artificial Sequence: Synthetic oligonucleotide
aguggagaacgcaguuggg

SEQ ID NO: 1991318 - RNA, 19 nt, Artificial Sequence
  Description of Artificial Sequence: Synthetic oligonucleotide
cugaugcugucuguggcug

SEQ ID NO: 1991319 - RNA, 19 nt, Artificial Sequence
  Description of Artificial Sequence: Synthetic oligonucleotide
caaugguauccugaggcca

SEQ ID NO: 1991320 - RNA, 19 nt, Artificial Sequence
  Description of Artificial Sequence: Synthetic oligonucleotide
ucgucuccuagaaguugac

SEQ ID NO: 1991321 - RNA, 19 nt, Artificial Sequence
  Description of Artificial Sequence: Synthetic oligonucleotide
gucugcgaaggcugcgugc

SEQ ID NO: 1991322 - RNA, 19 nt, Artificial Sequence
  Description of Artificial Sequence: Synthetic oligonucleotide
ggcaccugaguuaccagag

SEQ ID NO: 1991323 - RNA, 19 nt, Artificial Sequence
  Description of Artificial Sequence: Synthetic oligonucleotide
agccccuuugcgccuuggg

SEQ ID NO: 1991324 - RNA, 19 nt, Artificial Sequence
  Description of Artificial Sequence: Synthetic oligonucleotide
guuccuguagggagucugc

SEQ ID NO: 1991325 - RNA, 19 nt, Artificial Sequence
  Description of Artificial Sequence: Synthetic oligonucleotide
gaguuaccagaggugcuac

SEQ ID NO: 1991326 - RNA, 19 nt, Artificial Sequence
  Description of Artificial Sequence: Synthetic oligonucleotide
uacgggcgauacauggcaa

SEQ ID NO: 1991327 - RNA, 19 nt, Artificial Sequence
  Description of Artificial Sequence: Synthetic oligonucleotide
gguagguggaggcugccca

SEQ ID NO: 1991328 - RNA, 19 nt, Artificial Sequence
  Description of Artificial Sequence: Synthetic oligonucleotide
uaccaagcgcccagcucca

SEQ ID NO: 1991329 - RNA, 19 nt, Artificial Sequence
  Description of Artificial Sequence: Synthetic oligonucleotide
gucgucuccuagaaguuga

SEQ ID NO: 1991330 - RNA, 19 nt, Artificial Sequence
  Description of Artificial Sequence: Synthetic oligonucleotide
ggcucucguggacacgugg

SEQ ID NO: 1991331 - RNA, 19 nt, Artificial Sequence
  Description of Artificial Sequence: Synthetic oligonucleotide
ugagucgaaccugcuguuc

SEQ ID NO: 1991332 - RNA, 19 nt, Artificial Sequence
  Description of Artificial Sequence: Synthetic oligonucleotide
guugaccuugguagaugag

SEQ ID NO: 1991333 - RNA, 19 nt, Artificial Sequence
  Description of Artificial Sequence: Synthetic oligonucleotide
ugugaccccuguguccggc

SEQ ID NO: 1991334 - RNA, 19 nt, Artificial Sequence
  Description of Artificial Sequence: Synthetic oligonucleotide
gaccccgcugucugcgaag

SEQ ID NO: 1991335 - RNA, 19 nt, Artificial Sequence
  Description of Artificial Sequence: Synthetic oligonucleotide
cagucaccucaucaccuac

SEQ ID NO: 1991336 - RNA, 19 nt, Artificial Sequence
  Description of Artificial Sequence: Synthetic oligonucleotide
caaccguagcacuaggggu

SEQ ID NO: 1991337 - RNA, 19 nt, Artificial Sequence
  Description of Artificial Sequence: Synthetic oligonucleotide
augguauccugaggccagg

SEQ ID NO: 1991338 - RNA, 19 nt, Artificial Sequence
  Description of Artificial Sequence: Synthetic oligonucleotide
aagaccccgcugucugcga

SEQ ID NO: 1991339 - RNA, 19 nt, Artificial Sequence
  Description of Artificial Sequence: Synthetic oligonucleotide
gguuccuguagggagucug

SEQ ID NO: 1991340 - RNA, 19 nt, Artificial Sequence
  Description of Artificial Sequence: Synthetic oligonucleotide
agcccgcggaggcacuacg

SEQ ID NO: 1991341 - RNA, 19 nt, Artificial Sequence
  Description of Artificial Sequence: Synthetic oligonucleotide
gacagucaccucaucaccu

SEQ ID NO: 1991342 - RNA, 19 nt, Artificial Sequence
  Description of Artificial Sequence: Synthetic oligonucleotide
gguauguguugagacccag

SEQ ID NO: 1991343 - RNA, 19 nt, Artificial Sequence
  Description of Artificial Sequence: Synthetic oligonucleotide
accugcuguucccggccgg

SEQ ID NO: 1991344 - RNA, 19 nt, Artificial Sequence
  Description of Artificial Sequence: Synthetic oligonucleotide
cuagcuccaucgcggcccc

SEQ ID NO: 1991345 - RNA, 19 nt, Artificial Sequence
  Description of Artificial Sequence: Synthetic oligonucleotide
ccuggaguccucugcgacg

SEQ ID NO: 1991346 - RNA, 19 nt, Artificial Sequence
  Description of Artificial Sequence: Synthetic oligonucleotide
augagucgaaccugcuguu

SEQ ID NO: 1991347 - RNA, 19 nt, Artificial Sequence
  Description of Artificial Sequence: Synthetic oligonucleotide
gagaagccuccgccccugg

SEQ ID NO: 1991348 - RNA, 19 nt, Artificial Sequence
  Description of Artificial Sequence: Synthetic oligonucleotide
agccuccgccccuggaguc

SEQ ID NO: 1991349 - RNA, 19 nt, Artificial Sequence
  Description of Artificial Sequence: Synthetic oligonucleotide
uuggggacugagguccaga

SEQ ID NO: 1991350 - RNA, 19 nt, Artificial Sequence
  Description of Artificial Sequence: Synthetic oligonucleotide
gggcgauacauggcaaagg

SEQ ID NO: 1991351 - RNA, 19 nt, Artificial Sequence
  Description of Artificial Sequence: Synthetic oligonucleotide
acgggcgauacauggcaaa

SEQ ID NO: 1991352 - RNA, 19 nt, Artificial Sequence
  Description of Artificial Sequence: Synthetic oligonucleotide
agcuccaucgcggccccuc

SEQ ID NO: 1991353 - RNA, 19 nt, Artificial Sequence
  Description of Artificial Sequence: Synthetic oligonucleotide
uaguugcugugaccccugu

SEQ ID NO: 1991354 - RNA, 19 nt, Artificial Sequence
  Description of Artificial Sequence: Synthetic oligonucleotide
ggaaagaagggucgguacu

SEQ ID NO: 1991355 - RNA, 19 nt, Artificial Sequence
  Description of Artificial Sequence: Synthetic oligonucleotide
guaguugcugugaccccug

SEQ ID NO: 1991356 - RNA, 19 nt, Artificial Sequence
  Description of Artificial Sequence: Synthetic oligonucleotide
guagcacuagggguuccug

SEQ ID NO: 1991357 - RNA, 19 nt, Artificial Sequence
  Description of Artificial Sequence: Synthetic oligonucleotide
ggcagcagaaggcugccga

SEQ ID NO: 1991358 - RNA, 19 nt, Artificial Sequence
  Description of Artificial Sequence: Synthetic oligonucleotide
cgauuuccagcccggaggg

SEQ ID NO: 1991359 - RNA, 19 nt, Artificial Sequence
  Description of Artificial Sequence: Synthetic oligonucleotide
gucccugacgucuguggca

SEQ ID NO: 1991360 - RNA, 19 nt, Artificial Sequence
  Description of Artificial Sequence: Synthetic oligonucleotide
gaggcacuacgggcgauac

SEQ ID NO: 1991361 - RNA, 19 nt, Artificial Sequence
  Description of Artificial Sequence: Synthetic oligonucleotide
cacuagcuccaucgcggcc

SEQ ID NO: 1991362 - RNA, 19 nt, Artificial Sequence
  Description of Artificial Sequence: Synthetic oligonucleotide
cuuugcgccuuggggacug

SEQ ID NO: 1991363 - RNA, 19 nt, Artificial Sequence
  Description of Artificial Sequence: Synthetic oligonucleotide
cugacgucuguggcagggg

SEQ ID NO: 1991364 - RNA, 19 nt, Artificial Sequence
  Description of Artificial Sequence: Synthetic oligonucleotide
uggugcuguggucccugac

SEQ ID NO: 1991365 - RNA, 19 nt, Artificial Sequence
  Description of Artificial Sequence: Synthetic oligonucleotide
gaaguugaccuugguagau

SEQ ID NO: 1991366 - RNA, 19 nt, Artificial Sequence
  Description of Artificial Sequence: Synthetic oligonucleotide
caaggccauggcaccugag

SEQ ID NO: 1991367 - RNA, 19 nt, Artificial Sequence
  Description of Artificial Sequence: Synthetic oligonucleotide
caccugaguuaccagaggu

SEQ ID NO: 1991368 - RNA, 19 nt, Artificial Sequence
  Description of Artificial Sequence: Synthetic oligonucleotide
ggcagcgggaaaaggcagg

SEQ ID NO: 1991369 - RNA, 19 nt, Artificial Sequence
  Description of Artificial Sequence: Synthetic oligonucleotide
agaagccuccgccccugga

SEQ ID NO: 1991370 - RNA, 19 nt, Artificial Sequence
  Description of Artificial Sequence: Synthetic oligonucleotide
gccccuggaguccucugcg

SEQ ID NO: 1991371 - RNA, 19 nt, Artificial Sequence
  Description of Artificial Sequence: Synthetic oligonucleotide
guccucugcgacgcaaggc

SEQ ID NO: 1991372 - RNA, 19 nt, Artificial Sequence
  Description of Artificial Sequence: Synthetic oligonucleotide
gccgauuuccagcccggag

SEQ ID NO: 1991373 - RNA, 19 nt, Artificial Sequence
  Description of Artificial Sequence: Synthetic oligonucleotide
guucccggccgggaaacug

SEQ ID NO: 1991374 - RNA, 19 nt, Artificial Sequence
  Description of Artificial Sequence: Synthetic oligonucleotide
gcgauacauggcaaaggcc

SEQ ID NO: 1991375 - RNA, 19 nt, Artificial Sequence
  Description of Artificial Sequence: Synthetic oligonucleotide
auucucggugguauguguu

SEQ ID NO: 1991376 - RNA, 19 nt, Artificial Sequence
  Description of Artificial Sequence: Synthetic oligonucleotide
cuagggguuccuguaggga

SEQ ID NO: 1991377 - RNA, 19 nt, Artificial Sequence
  Description of Artificial Sequence: Synthetic oligonucleotide
guguugagacccaggcaac

SEQ ID NO: 1991378 - RNA, 19 nt, Artificial Sequence
  Description of Artificial Sequence: Synthetic oligonucleotide
cgcggaggcacuacgggcg

SEQ ID NO: 1991379 - RNA, 19 nt, Artificial Sequence
  Description of Artificial Sequence: Synthetic oligonucleotide
uuccagcccggaggggccg

SEQ ID NO: 1991380 - RNA, 19 nt, Artificial Sequence
  Description of Artificial Sequence: Synthetic oligonucleotide
agggguuccuguagggagu

SEQ ID NO: 1991381 - RNA, 19 nt, Artificial Sequence
  Description of Artificial Sequence: Synthetic oligonucleotide
ggacacguggcaguggaga

SEQ ID NO: 1991382 - RNA, 19 nt, Artificial Sequence
  Description of Artificial Sequence: Synthetic oligonucleotide
uccgaccccggugggcagg

SEQ ID NO: 1991383 - RNA, 19 nt, Artificial Sequence
  Description of Artificial Sequence: Synthetic oligonucleotide
gggucgguacuggaucugg

SEQ ID NO: 1991384 - RNA, 19 nt, Artificial Sequence
  Description of Artificial Sequence: Synthetic oligonucleotide
gcaguggagaacgcaguug

SEQ ID NO: 1991385 - RNA, 19 nt, Artificial Sequence
  Description of Artificial Sequence: Synthetic oligonucleotide
agaaggcugccgauuucca

SEQ ID NO: 1991386 - RNA, 19 nt, Artificial Sequence
  Description of Artificial Sequence: Synthetic oligonucleotide
gauggaccucugugucuca

SEQ ID NO: 1991387 - RNA, 19 nt, Artificial Sequence
  Description of Artificial Sequence: Synthetic oligonucleotide
gaggggccgggcuccgacc

SEQ ID NO: 1991388 - RNA, 19 nt, Artificial Sequence
  Description of Artificial Sequence: Synthetic oligonucleotide
gccauggcaccugaguuac

SEQ ID NO: 1991389 - RNA, 19 nt, Artificial Sequence
  Description of Artificial Sequence: Synthetic oligonucleotide
ccugacgucuguggcaggg

SEQ ID NO: 1991390 - RNA, 19 nt, Artificial Sequence
  Description of Artificial Sequence: Synthetic oligonucleotide
cuagccaccugcucagagu

SEQ ID NO: 1991391 - RNA, 19 nt, Artificial Sequence
  Description of Artificial Sequence: Synthetic oligonucleotide
agcgacagcaagggccuga

SEQ ID NO: 1991392 - RNA, 19 nt, Artificial Sequence
  Description of Artificial Sequence: Synthetic oligonucleotide
caacggccagcaccagaag

SEQ ID NO: 1991393 - RNA, 19 nt, Artificial Sequence
  Description of Artificial Sequence: Synthetic oligonucleotide
ggcacuacgggcgauacau

SEQ ID NO: 1991394 - RNA, 19 nt, Artificial Sequence
  Description of Artificial Sequence: Synthetic oligonucleotide
cggugguauguguugagac

SEQ ID NO: 1991395 - RNA, 19 nt, Artificial Sequence
  Description of Artificial Sequence: Synthetic oligonucleotide
gaagccggccaggcccagg

SEQ ID NO: 1991396 - RNA, 19 nt, Artificial Sequence
  Description of Artificial Sequence: Synthetic oligonucleotide
cuguucccggccgggaaac

SEQ ID NO: 1991397 - RNA, 19 nt, Artificial Sequence
  Description of Artificial Sequence: Synthetic oligonucleotide
cuccaucgcggccccucgg

SEQ ID NO: 1991398 - RNA, 19 nt, Artificial Sequence
  Description of Artificial Sequence: Synthetic oligonucleotide
ccuagccaccugcucagag

SEQ ID NO: 1991399 - RNA, 19 nt, Artificial Sequence
  Description of Artificial Sequence: Synthetic oligonucleotide
ggcugugcuggugcugugg

SEQ ID NO: 1991400 - RNA, 19 nt, Artificial Sequence
  Description of Artificial Sequence: Synthetic oligonucleotide
gcuaccaagcgcccagcuc

SEQ ID NO: 1991401 - RNA, 19 nt, Artificial Sequence
  Description of Artificial Sequence: Synthetic oligonucleotide
gggaaaaggcaggccgcgg

SEQ ID NO: 1991402 - RNA, 19 nt, Artificial Sequence
  Description of Artificial Sequence: Synthetic oligonucleotide
ggcugucaggggaaagaag

SEQ ID NO: 1991403 - RNA, 19 nt, Artificial Sequence
  Description of Artificial Sequence: Synthetic oligonucleotide
gcucucguggacacguggc

SEQ ID NO: 1991404 - RNA, 19 nt, Artificial Sequence
  Description of Artificial Sequence: Synthetic oligonucleotide
gcagcgggaaaaggcaggc

SEQ ID NO: 1991405 - RNA, 19 nt, Artificial Sequence
  Description of Artificial Sequence: Synthetic oligonucleotide
ugcccagugucuggguguc

SEQ ID NO: 1991406 - RNA, 19 nt, Artificial Sequence
  Description of Artificial Sequence: Synthetic oligonucleotide
agaccccgcugucugcgaa

SEQ ID NO: 1991407 - RNA, 19 nt, Artificial Sequence
  Description of Artificial Sequence: Synthetic oligonucleotide
aggcacuacgggcgauaca

SEQ ID NO: 1991408 - RNA, 19 nt, Artificial Sequence
  Description of Artificial Sequence: Synthetic oligonucleotide
gcaacggccagcaccagaa

SEQ ID NO: 1991409 - RNA, 19 nt, Artificial Sequence
  Description of Artificial Sequence: Synthetic oligonucleotide
cuuggggacugagguccag

SEQ ID NO: 1991410 - RNA, 19 nt, Artificial Sequence
  Description of Artificial Sequence: Synthetic oligonucleotide
cccuuugcgccuuggggac

SEQ ID NO: 1991411 - RNA, 19 nt, Artificial Sequence
  Description of Artificial Sequence: Synthetic oligonucleotide
ccaggcccuagccaccugc

SEQ ID NO: 1991412 - RNA, 19 nt, Artificial Sequence
  Description of Artificial Sequence: Synthetic oligonucleotide
ccacuagcuccaucgcggc

SEQ ID NO: 1991413 - RNA, 19 nt, Artificial Sequence
  Description of Artificial Sequence: Synthetic oligonucleotide
caucgcggccccucgggca

SEQ ID NO: 1991414 - RNA, 19 nt, Artificial Sequence
  Description of Artificial Sequence: Synthetic oligonucleotide
ugccgauuuccagcccgga

SEQ ID NO: 1991415 - RNA, 19 nt, Artificial Sequence
  Description of Artificial Sequence: Synthetic oligonucleotide
acguggcaguggagaacgc

SEQ ID NO: 1991416 - RNA, 19 nt, Artificial Sequence
  Description of Artificial Sequence: Synthetic oligonucleotide
cagcgggaaaaggcaggcc

SEQ ID NO: 1991417 - RNA, 19 nt, Artificial Sequence
  Description of Artificial Sequence: Synthetic oligonucleotide
uguccggcucuggcugugc

SEQ ID NO: 1991418 - RNA, 19 nt, Artificial Sequence
  Description of Artificial Sequence: Synthetic oligonucleotide
cccgcggaggcacuacggg

SEQ ID NO: 1991419 - RNA, 19 nt, Artificial Sequence
  Description of Artificial Sequence: Synthetic oligonucleotide
gggccugauccagaagacc

SEQ ID NO: 1991420 - RNA, 19 nt, Artificial Sequence
  Description of Artificial Sequence: Synthetic oligonucleotide
cagguggaguaguugcugu

SEQ ID NO: 1991421 - RNA, 19 nt, Artificial Sequence
  Description of Artificial Sequence: Synthetic oligonucleotide
caaaggccaggaggcugag

SEQ ID NO: 1991422 - RNA, 19 nt, Artificial Sequence
  Description of Artificial Sequence: Synthetic oligonucleotide
gcuccaucgcggccccucg

SEQ ID NO: 1991423 - RNA, 19 nt, Artificial Sequence
  Description of Artificial Sequence: Synthetic oligonucleotide
gggugucgucuccuagaag

SEQ ID NO: 1991424 - RNA, 19 nt, Artificial Sequence
  Description of Artificial Sequence: Synthetic oligonucleotide
gggagccaaugguauccug

SEQ ID NO: 1991425 - RNA, 19 nt, Artificial Sequence
  Description of Artificial Sequence: Synthetic oligonucleotide
uccagcccggaggggccgg

SEQ ID NO: 1991426 - RNA, 19 nt, Artificial Sequence
  Description of Artificial Sequence: Synthetic oligonucleotide
cucguggacacguggcagu

SEQ ID NO: 1991427 - RNA, 19 nt, Artificial Sequence
  Description of Artificial Sequence: Synthetic oligonucleotide
gcgggaaaaggcaggccgc

SEQ ID NO: 1991428 - RNA, 19 nt, Artificial Sequence
  Description of Artificial Sequence: Synthetic oligonucleotide
gccggccaggcccagggug

SEQ ID NO: 1991429 - RNA, 19 nt, Artificial Sequence
  Description of Artificial Sequence: Synthetic oligonucleotide
ggucgguacuggaucuggc

SEQ ID NO: 1991430 - RNA, 19 nt, Artificial Sequence
  Description of Artificial Sequence: Synthetic oligonucleotide
uguucccggccgggaaacu

SEQ ID NO: 1991431 - RNA, 19 nt, Artificial Sequence
  Description of Artificial Sequence: Synthetic oligonucleotide
ccggccgggaaacuggguc

SEQ ID NO: 1991432 - RNA, 19 nt, Artificial Sequence
  Description of Artificial Sequence: Synthetic oligonucleotide
ugaagccggccaggcccag

SEQ ID NO: 1991433 - RNA, 19 nt, Artificial Sequence
  Description of Artificial Sequence: Synthetic oligonucleotide
gucuguauucucgguggua

SEQ ID NO: 1991434 - RNA, 19 nt, Artificial Sequence
  Description of Artificial Sequence: Synthetic oligonucleotide
ggcaacggccagcaccaga

SEQ ID NO: 1991435 - RNA, 19 nt, Artificial Sequence
  Description of Artificial Sequence: Synthetic oligonucleotide
cgggcuccgaccccggugg

SEQ ID NO: 1991436 - RNA, 19 nt, Artificial Sequence
  Description of Artificial Sequence: Synthetic oligonucleotide
gugcuaccaagcgcccagc

SEQ ID NO: 1991437 - RNA, 19 nt, Artificial Sequence
  Description of Artificial Sequence: Synthetic oligonucleotide
gugaagccggccaggccca

SEQ ID NO: 1991438 - RNA, 19 nt, Artificial Sequence
  Description of Artificial Sequence: Synthetic oligonucleotide
gcgccuuggggacugaggu

SEQ ID NO: 1991439 - RNA, 19 nt, Artificial Sequence
  Description of Artificial Sequence: Synthetic oligonucleotide
ccucugcgacgcaaggcug

SEQ ID NO: 1991440 - RNA, 19 nt, Artificial Sequence
  Description of Artificial Sequence: Synthetic oligonucleotide
gccccucgggcacuuccgg

SEQ ID NO: 1991441 - RNA, 19 nt, Artificial Sequence
  Description of Artificial Sequence: Synthetic oligonucleotide
guacuggaucuggcaguac

SEQ ID NO: 1991442 - RNA, 19 nt, Artificial Sequence
  Description of Artificial Sequence: Synthetic oligonucleotide
caccuaccccuucaaucaa

SEQ ID NO: 1991443 - RNA, 19 nt, Artificial Sequence
  Description of Artificial Sequence: Synthetic oligonucleotide
gacgcaaggcugggcucca

SEQ ID NO: 1991444 - RNA, 19 nt, Artificial Sequence
  Description of Artificial Sequence: Synthetic oligonucleotide
ggguagguggaggcugccc

SEQ ID NO: 1991445 - RNA, 19 nt, Artificial Sequence
  Description of Artificial Sequence: Synthetic oligonucleotide
uuugcgccuuggggacuga

SEQ ID NO: 1991446 - RNA, 19 nt, Artificial Sequence
  Description of Artificial Sequence: Synthetic oligonucleotide
cggccgggaaacugggucc

SEQ ID NO: 1991447 - RNA, 19 nt, Artificial Sequence
  Description of Artificial Sequence: Synthetic oligonucleotide
gggaccggcucucguggac

SEQ ID NO: 1991448 - RNA, 19 nt, Artificial Sequence
  Description of Artificial Sequence: Synthetic oligonucleotide
ggacaaaggcacaggccaa

SEQ ID NO: 1991449 - RNA, 19 nt, Artificial Sequence
  Description of Artificial Sequence: Synthetic oligonucleotide
cugcgacgcaaggcugggc

SEQ ID NO: 1991450 - RNA, 19 nt, Artificial Sequence
  Description of Artificial Sequence: Synthetic oligonucleotide
cgucuccuagaaguugacc

SEQ ID NO: 1991451 - RNA, 19 nt, Artificial Sequence
  Description of Artificial Sequence: Synthetic oligonucleotide
cgggaaaaggcaggccgcg

SEQ ID NO: 1991452 - RNA, 19 nt, Artificial Sequence
  Description of Artificial Sequence: Synthetic oligonucleotide
cgggcgauacauggcaaag

SEQ ID NO: 1991453 - RNA, 19 nt, Artificial Sequence
  Description of Artificial Sequence: Synthetic oligonucleotide
ggucuguauucucgguggu

SEQ ID NO: 1991454 - RNA, 19 nt, Artificial Sequence
  Description of Artificial Sequence: Synthetic oligonucleotide
caucaccuaccccuucaau

SEQ ID NO: 1991455 - RNA, 19 nt, Artificial Sequence
  Description of Artificial Sequence: Synthetic oligonucleotide
gcuccgaccccggugggca

SEQ ID NO: 1991456 - RNA, 19 nt, Artificial Sequence
  Description of Artificial Sequence: Synthetic oligonucleotide
cgacgcaaggcugggcucc

SEQ ID NO: 1991457 - RNA, 19 nt, Artificial Sequence
  Description of Artificial Sequence: Synthetic oligonucleotide
gcccgcggaggcacuacgg

SEQ ID NO: 1991458 - RNA, 19 nt, Artificial Sequence
  Description of Artificial Sequence: Synthetic oligonucleotide
gccgcgggugaggagggcc

SEQ ID NO: 1991459 - RNA, 19 nt, Artificial Sequence
  Description of Artificial Sequence: Synthetic oligonucleotide
ccaucgcggccccucgggc

SEQ ID NO: 1991460 - RNA, 19 nt, Artificial Sequence
  Description of Artificial Sequence: Synthetic oligonucleotide
gggccgggcuccgaccccg

SEQ ID NO: 1991461 - RNA, 19 nt, Artificial Sequence
  Description of Artificial Sequence: Synthetic oligonucleotide
cagccccuuugcgccuugg

SEQ ID NO: 1991462 - RNA, 19 nt, Artificial Sequence
  Description of Artificial Sequence: Synthetic oligonucleotide
gcacuacgggcgauacaug

SEQ ID NO: 1991463 - RNA, 19 nt, Artificial Sequence
  Description of Artificial Sequence: Synthetic oligonucleotide
gcgacgcaaggcugggcuc

SEQ ID NO: 1991464 - RNA, 19 nt, Artificial Sequence
  Description of Artificial Sequence: Synthetic oligonucleotide
cugcgaaggcugcgugcca

SEQ ID NO: 1991465 - RNA, 19 nt, Artificial Sequence
  Description of Artificial Sequence: Synthetic oligonucleotide
ggcaguggagaacgcaguu

SEQ ID NO: 1991466 - RNA, 19 nt, Artificial Sequence
  Description of Artificial Sequence: Synthetic oligonucleotide
cugucugcgaaggcugcgu

SEQ ID NO: 1991467 - RNA, 19 nt, Artificial Sequence
  Description of Artificial Sequence: Synthetic oligonucleotide
acgcaaggcugggcuccag

SEQ ID NO: 1991468 - RNA, 19 nt, Artificial Sequence
  Description of Artificial Sequence: Synthetic oligonucleotide
aggcaacggccagcaccag

SEQ ID NO: 1991469 - RNA, 19 nt, Artificial Sequence
  Description of Artificial Sequence: Synthetic oligonucleotide
caggcccuagccaccugcu

SEQ ID NO: 1991470 - RNA, 19 nt, Artificial Sequence
  Description of Artificial Sequence: Synthetic oligonucleotide
cucagccccuggggccucc

SEQ ID NO: 1991471 - RNA, 19 nt, Artificial Sequence
  Description of Artificial Sequence: Synthetic oligonucleotide
ccauggcaccugaguuacc

SEQ ID NO: 1991472 - RNA, 19 nt, Artificial Sequence
  Description of Artificial Sequence: Synthetic oligonucleotide
ccuguguccggcucuggcu

SEQ ID NO: 1991473 - RNA, 19 nt, Artificial Sequence
  Description of Artificial Sequence: Synthetic oligonucleotide
gugucgucuccuagaaguu

SEQ ID NO: 1991474 - RNA, 19 nt, Artificial Sequence
  Description of Artificial Sequence: Synthetic oligonucleotide
gcaggccgcgggugaggag

SEQ ID NO: 1991475 - RNA, 19 nt, Artificial Sequence
  Description of Artificial Sequence: Synthetic oligonucleotide
gggcuccgaccccgguggg

SEQ ID NO: 1991476 - RNA, 19 nt, Artificial Sequence
  Description of Artificial Sequence: Synthetic oligonucleotide
cagcccgcggaggcacuac

SEQ ID NO: 1991477 - RNA, 19 nt, Artificial Sequence
  Description of Artificial Sequence: Synthetic oligonucleotide
ccgggcuccgaccccggug

SEQ ID NO: 1991478 - RNA, 19 nt, Artificial Sequence
  Description of Artificial Sequence: Synthetic oligonucleotide
gccuccgccccuggagucc

SEQ ID NO: 1991479 - RNA, 19 nt, Artificial Sequence
  Description of Artificial Sequence: Synthetic oligonucleotide
ggaggcacuacgggcgaua

SEQ ID NO: 1991480 - RNA, 19 nt, Artificial Sequence
  Description of Artificial Sequence: Synthetic oligonucleotide
ggggaccggcucucgugga

SEQ ID NO: 1991481 - RNA, 19 nt, Artificial Sequence
  Description of Artificial Sequence: Synthetic oligonucleotide
auccugaggccaggcccua

SEQ ID NO: 1991482 - RNA, 19 nt, Artificial Sequence
  Description of Artificial Sequence: Synthetic oligonucleotide
ggggccgggcuccgacccc

SEQ ID NO: 1991483 - RNA, 19 nt, Artificial Sequence
  Description of Artificial Sequence: Synthetic oligonucleotide
cccugacgucuguggcagg

SEQ ID NO: 1991484 - RNA, 19 nt, Artificial Sequence
  Description of Artificial Sequence: Synthetic oligonucleotide
agcagcccgcggaggcacu

SEQ ID NO: 1991485 - RNA, 19 nt, Artificial Sequence
  Description of Artificial Sequence: Synthetic oligonucleotide
gcccagugucugggugucg

SEQ ID NO: 1991486 - RNA, 19 nt, Artificial Sequence
  Description of Artificial Sequence: Synthetic oligonucleotide
ccgaccccggugggcaggg

SEQ ID NO: 1991487 - RNA, 19 nt, Artificial Sequence
  Description of Artificial Sequence: Synthetic oligonucleotide
gcagccccuuugcgccuug

SEQ ID NO: 1991488 - RNA, 19 nt, Artificial Sequence
  Description of Artificial Sequence: Synthetic oligonucleotide
cagcagaaggcugccgauu

SEQ ID NO: 1991489 - RNA, 19 nt, Artificial Sequence
  Description of Artificial Sequence: Synthetic oligonucleotide
cccgcugucugcgaaggcu

SEQ ID NO: 1991490 - RNA, 19 nt, Artificial Sequence
  Description of Artificial Sequence: Synthetic oligonucleotide
ccccgcugucugcgaaggc

SEQ ID NO: 1991491 - RNA, 19 nt, Artificial Sequence
  Description of Artificial Sequence: Synthetic oligonucleotide
ccccuggaguccucugcga

SEQ ID NO: 1991492 - RNA, 19 nt, Artificial Sequence
  Description of Artificial Sequence: Synthetic oligonucleotide
gccaggcccuagccaccug

SEQ ID NO: 1991493 - RNA, 19 nt, Artificial Sequence
  Description of Artificial Sequence: Synthetic oligonucleotide
cuccgccccuggaguccuc

SEQ ID NO: 1991494 - RNA, 19 nt, Artificial Sequence
  Description of Artificial Sequence: Synthetic oligonucleotide
ggccgggaaacuggguccu

SEQ ID NO: 1991495 - RNA, 19 nt, Artificial Sequence
  Description of Artificial Sequence: Synthetic oligonucleotide
cccagugucugggugucgu

SEQ ID NO: 1991496 - RNA, 19 nt, Artificial Sequence
  Description of Artificial Sequence: Synthetic oligonucleotide
ccggcucucguggacacgu

SEQ ID NO: 1991497 - RNA, 19 nt, Artificial Sequence
  Description of Artificial Sequence: Synthetic oligonucleotide
ccucucugaugcugucugu

SEQ ID NO: 1991498 - RNA, 19 nt, Artificial Sequence
  Description of Artificial Sequence: Synthetic oligonucleotide
ccgccccuggaguccucug

SEQ ID NO: 1991499 - RNA, 19 nt, Artificial Sequence
  Description of Artificial Sequence: Synthetic oligonucleotide
cggcucucguggacacgug

SEQ ID NO: 1991500 - RNA, 19 nt, Artificial Sequence
  Description of Artificial Sequence: Synthetic oligonucleotide
gggccuccucucugaugcu

SEQ ID NO: 1991501 - RNA, 19 nt, Artificial Sequence
  Description of Artificial Sequence: Synthetic oligonucleotide
gcagcccgcggaggcacua

SEQ ID NO: 1991502 - RNA, 19 nt, Artificial Sequence
  Description of Artificial Sequence: Synthetic oligonucleotide
ggguuccuguagggagucu

SEQ ID NO: 1991503 - RNA, 19 nt, Artificial Sequence
  Description of Artificial Sequence: Synthetic oligonucleotide
ccccuucaaucaaggccau

SEQ ID NO: 1991504 - RNA, 19 nt, Artificial Sequence
  Description of Artificial Sequence: Synthetic oligonucleotide
cccuagccaccugcucaga

SEQ ID NO: 1991505 - RNA, 19 nt, Artificial Sequence
  Description of Artificial Sequence: Synthetic oligonucleotide
ccuuugcgccuuggggacu

SEQ ID NO: 1991506 - RNA, 19 nt, Artificial Sequence
  Description of Artificial Sequence: Synthetic oligonucleotide
gccgggcuccgaccccggu

SEQ ID NO: 1991507 - RNA, 19 nt, Artificial Sequence
  Description of Artificial Sequence: Synthetic oligonucleotide
ccuccgccccuggaguccu

SEQ ID NO: 1991508 - RNA, 19 nt, Artificial Sequence
  Description of Artificial Sequence: Synthetic oligonucleotide
gccgggaaacuggguccuu

SEQ ID NO: 1991509 - RNA, 19 nt, Artificial Sequence
  Description of Artificial Sequence: Synthetic oligonucleotide
cgcggccccucgggcacuu

SEQ ID NO: 1991510 - RNA, 19 nt, Artificial Sequence
  Description of Artificial Sequence: Synthetic oligonucleotide
aacaaguuuacauuuguac

SEQ ID NO: 1991511 - RNA, 19 nt, Artificial Sequence
  Description of Artificial Sequence: Synthetic oligonucleotide
aagcauaggaccuuacacc

SEQ ID NO: 1991512 - RNA, 19 nt, Artificial Sequence
  Description of Artificial Sequence: Synthetic oligonucleotide
aaaaucaacaaguuuacau

SEQ ID NO: 1991513 - RNA, 19 nt, Artificial Sequence
  Description of Artificial Sequence: Synthetic oligonucleotide
aacuauguccauuuuagug

SEQ ID NO: 1991514 - RNA, 19 nt, Artificial Sequence
  Description of Artificial Sequence: Synthetic oligonucleotide
aaaacuauguccauuuuag

SEQ ID NO: 1991515 - RNA, 19 nt, Artificial Sequence
  Description of Artificial Sequence: Synthetic oligonucleotide
ucaagcauggcucaugaag

SEQ ID NO: 1991516 - RNA, 19 nt, Artificial Sequence
  Description of Artificial Sequence: Synthetic oligonucleotide
uuaucauauguguaaauca

SEQ ID NO: 1991517 - RNA, 19 nt, Artificial Sequence
  Description of Artificial Sequence: Synthetic oligonucleotide
accauuucagcauccagcc

SEQ ID NO: 1991518 - RNA, 19 nt, Artificial Sequence
  Description of Artificial Sequence: Synthetic oligonucleotide
uuugggacccauuaagagg

SEQ ID NO: 1991519 - RNA, 19 nt, Artificial Sequence
  Description of Artificial Sequence: Synthetic oligonucleotide
uuuggaaaagaacucagaa

SEQ ID NO: 1991520 - RNA, 19 nt, Artificial Sequence
  Description of Artificial Sequence: Synthetic oligonucleotide
aaaucaacaaguuuacauu

SEQ ID NO: 1991521 - RNA, 19 nt, Artificial Sequence
  Description of Artificial Sequence: Synthetic oligonucleotide
uucuaaauagcucuccaug

SEQ ID NO: 1991522 - RNA, 19 nt, Artificial Sequence
  Description of Artificial Sequence: Synthetic oligonucleotide
auauguguaaaucagguuu

SEQ ID NO: 1991523 - RNA, 19 nt, Artificial Sequence
  Description of Artificial Sequence: Synthetic oligonucleotide
ucauauguguaaaucaggu

SEQ ID NO: 1991524 - RNA, 19 nt, Artificial Sequence
  Description of Artificial Sequence: Synthetic oligonucleotide
aacucagaauccccguugc

SEQ ID NO: 1991525 - RNA, 19 nt, Artificial Sequence
  Description of Artificial Sequence: Synthetic oligonucleotide
uaaauagcucuccaugugc

SEQ ID NO: 1991526 - RNA, 19 nt, Artificial Sequence
  Description of Artificial Sequence: Synthetic oligonucleotide
uuggguaucugacaaacac

SEQ ID NO: 1991527 - RNA, 19 nt, Artificial Sequence
  Description of Artificial Sequence: Synthetic oligonucleotide
aaucaacaaguuuacauuu

SEQ ID NO: 1991528 - RNA, 19 nt, Artificial Sequence
  Description of Artificial Sequence: Synthetic oligonucleotide
auaaaaucaacaaguuuac

SEQ ID NO: 1991529 - RNA, 19 nt, Artificial Sequence
  Description of Artificial Sequence: Synthetic oligonucleotide
aagcauggcucaugaagcc

SEQ ID NO: 1991530 - RNA, 19 nt, Artificial Sequence
  Description of Artificial Sequence: Synthetic oligonucleotide
aaagaacucagaauccccg

SEQ ID NO: 1991531 - RNA, 19 nt, Artificial Sequence
  Description of Artificial Sequence: Synthetic oligonucleotide
uucaucuuaucauaugugu

SEQ ID NO: 1991532 - RNA, 19 nt, Artificial Sequence
  Description of Artificial Sequence: Synthetic oligonucleotide
uccaguagcgucaagcaug

SEQ ID NO: 1991533 - RNA, 19 nt, Artificial Sequence
  Description of Artificial Sequence: Synthetic oligonucleotide
aucuuguggauuugggacc

SEQ ID NO: 1991534 - RNA, 19 nt, Artificial Sequence
  Description of Artificial Sequence: Synthetic oligonucleotide
ucuaaauagcucuccaugu

SEQ ID NO: 1991535 - RNA, 19 nt, Artificial Sequence
  Description of Artificial Sequence: Synthetic oligonucleotide
gaagcauaggaccuuacac

SEQ ID NO: 1991536 - RNA, 19 nt, Artificial Sequence
  Description of Artificial Sequence: Synthetic oligonucleotide
agugcuuaagugaacaagg

SEQ ID NO: 1991537 - RNA, 19 nt, Artificial Sequence
  Description of Artificial Sequence: Synthetic oligonucleotide
uuacauuuguacaucuugu

SEQ ID NO: 1991538 - RNA, 19 nt, Artificial Sequence
  Description of Artificial Sequence: Synthetic oligonucleotide
uucaaguccgaguaccagg

SEQ ID NO: 1991539 - RNA, 19 nt, Artificial Sequence
  Description of Artificial Sequence: Synthetic oligonucleotide
uaagugaacaaggcaaagg

SEQ ID NO: 1991540 - RNA, 19 nt, Artificial Sequence
  Description of Artificial Sequence: Synthetic oligonucleotide
auuuuaguggcagaugcgg

SEQ ID NO: 1991541 - RNA, 19 nt, Artificial Sequence
  Description of Artificial Sequence: Synthetic oligonucleotide
agcauaccgccucagaagg

SEQ ID NO: 1991542 - RNA, 19 nt, Artificial Sequence
  Description of Artificial Sequence: Synthetic oligonucleotide
auuugggacccauuaagag

SEQ ID NO: 1991543 - RNA, 19 nt, Artificial Sequence
  Description of Artificial Sequence: Synthetic oligonucleotide
caagcauggcucaugaagc

SEQ ID NO: 1991544 - RNA, 19 nt, Artificial Sequence
  Description of Artificial Sequence: Synthetic oligonucleotide
caucuuguggauuugggac

SEQ ID NO: 1991545 - RNA, 19 nt, Artificial Sequence
  Description of Artificial Sequence: Synthetic oligonucleotide
ucaacaaguuuacauuugu

SEQ ID NO: 1991546 - RNA, 19 nt, Artificial Sequence
  Description of Artificial Sequence: Synthetic oligonucleotide
uuuaguggcagaugcggag

SEQ ID NO: 1991547 - RNA, 19 nt, Artificial Sequence
  Description of Artificial Sequence: Synthetic oligonucleotide
gaaaagaacucagaauccc

SEQ ID NO: 1991548 - RNA, 19 nt, Artificial Sequence
  Description of Artificial Sequence: Synthetic oligonucleotide
uuagaagaauuuuaauaaa

SEQ ID NO: 1991549 - RNA, 19 nt, Artificial Sequence
  Description of Artificial Sequence: Synthetic oligonucleotide
aucugacaaacacaggcuc

SEQ ID NO: 1991550 - RNA, 19 nt, Artificial Sequence
  Description of Artificial Sequence: Synthetic oligonucleotide
aaguuuacauuuguacauc

SEQ ID NO: 1991551 - RNA, 19 nt, Artificial Sequence
  Description of Artificial Sequence: Synthetic oligonucleotide
cagucagaagcauaggacc

SEQ ID NO: 1991552 - RNA, 19 nt, Artificial Sequence
  Description of Artificial Sequence: Synthetic oligonucleotide
aacuguuucuaaauagcuc

SEQ ID NO: 1991553 - RNA, 19 nt, Artificial Sequence
  Description of Artificial Sequence: Synthetic oligonucleotide
agugggugugcacaagccc

SEQ ID NO: 1991554 - RNA, 19 nt, Artificial Sequence
  Description of Artificial Sequence: Synthetic oligonucleotide
aguagcgucaagcauggcu

SEQ ID NO: 1991555 - RNA, 19 nt, Artificial Sequence
  Description of Artificial Sequence: Synthetic oligonucleotide
acauccggugcccacagac

SEQ ID NO: 1991556 - RNA, 19 nt, Artificial Sequence
  Description of Artificial Sequence: Synthetic oligonucleotide
acagugggugugcacaagc

SEQ ID NO: 1991557 - RNA, 19 nt, Artificial Sequence
  Description of Artificial Sequence: Synthetic oligonucleotide
ucuuucaaguccgaguacc

SEQ ID NO: 1991558 - RNA, 19 nt, Artificial Sequence
  Description of Artificial Sequence: Synthetic oligonucleotide
uaucugacaaacacaggcu

SEQ ID NO: 1991559 - RNA, 19 nt, Artificial Sequence
  Description of Artificial Sequence: Synthetic oligonucleotide
ugcuuaagugaacaaggca

SEQ ID NO: 1991560 - RNA, 19 nt, Artificial Sequence
  Description of Artificial Sequence: Synthetic oligonucleotide
cuuaucauauguguaaauc

SEQ ID NO: 1991561 - RNA, 19 nt, Artificial Sequence
  Description of Artificial Sequence: Synthetic oligonucleotide
ugaauucagguugucaggc

SEQ ID NO: 1991562 - RNA, 19 nt, Artificial Sequence
  Description of Artificial Sequence: Synthetic oligonucleotide
aacaaggcaaaggguuucc

SEQ ID NO: 1991563 - RNA, 19 nt, Artificial Sequence
  Description of Artificial Sequence: Synthetic oligonucleotide
ugcacuucccuucagcuuc

SEQ ID NO: 1991564 - RNA, 19 nt, Artificial Sequence
  Description of Artificial Sequence: Synthetic oligonucleotide
agcauaggaccuuacacca

SEQ ID NO: 1991565 - RNA, 19 nt, Artificial Sequence
  Description of Artificial Sequence: Synthetic oligonucleotide
cauuuguacaucuugugga

SEQ ID NO: 1991566 - RNA, 19 nt, Artificial Sequence
  Description of Artificial Sequence: Synthetic oligonucleotide
ggagugaugguucagcaag

SEQ ID NO: 1991567 - RNA, 19 nt, Artificial Sequence
  Description of Artificial Sequence: Synthetic oligonucleotide
gugcuaggcagucagaagc

SEQ ID NO: 1991568 - RNA, 19 nt, Artificial Sequence
  Description of Artificial Sequence: Synthetic oligonucleotide
uggaugcugucccucauag

SEQ ID NO: 1991569 - RNA, 19 nt, Artificial Sequence
  Description of Artificial Sequence: Synthetic oligonucleotide
aagaggcaaaggaagcuac

SEQ ID NO: 1991570 - RNA, 19 nt, Artificial Sequence
  Description of Artificial Sequence: Synthetic oligonucleotide
gugacagugugaccgagcg

SEQ ID NO: 1991571 - RNA, 19 nt, Artificial Sequence
  Description of Artificial Sequence: Synthetic oligonucleotide
gaggucgacagcugggugg

SEQ ID NO: 1991572 - RNA, 19 nt, Artificial Sequence
  Description of Artificial Sequence: Synthetic oligonucleotide
cagacuaggugacaggccc

SEQ ID NO: 1991573 - RNA, 19 nt, Artificial Sequence
  Description of Artificial Sequence: Synthetic oligonucleotide
caaaggguuuccgaggucg

SEQ ID NO: 1991574 - RNA, 19 nt, Artificial Sequence
  Description of Artificial Sequence: Synthetic oligonucleotide
uguucuagcuggcuggcac

SEQ ID NO: 1991575 - RNA, 19 nt, Artificial Sequence
  Description of Artificial Sequence: Synthetic oligonucleotide
uaaaucagguuuucugacu

SEQ ID NO: 1991576 - RNA, 19 nt, Artificial Sequence
  Description of Artificial Sequence: Synthetic oligonucleotide
aaacuauguccauuuuagu

SEQ ID NO: 1991577 - RNA, 19 nt, Artificial Sequence
  Description of Artificial Sequence: Synthetic oligonucleotide
agaauuagaagaauuuuaa

SEQ ID NO: 1991578 - RNA, 19 nt, Artificial Sequence
  Description of Artificial Sequence: Synthetic oligonucleotide
cauuuuaguggcagaugcg

SEQ ID NO: 1991579 - RNA, 19 nt, Artificial Sequence
  Description of Artificial Sequence: Synthetic oligonucleotide
ucaucuuaucauaugugua

SEQ ID NO: 1991580 - RNA, 19 nt, Artificial Sequence
  Description of Artificial Sequence: Synthetic oligonucleotide
guaaaucagguuuucugac

SEQ ID NO: 1991581 - RNA, 19 nt, Artificial Sequence
  Description of Artificial Sequence: Synthetic oligonucleotide
gacagcauuucccuggcac

SEQ ID NO: 1991582 - RNA, 19 nt, Artificial Sequence
  Description of Artificial Sequence: Synthetic oligonucleotide
uucagcaaguccacagcag

SEQ ID NO: 1991583 - RNA, 19 nt, Artificial Sequence
  Description of Artificial Sequence: Synthetic oligonucleotide
ugaggaacgggcagagaag

SEQ ID NO: 1991584 - RNA, 19 nt, Artificial Sequence
  Description of Artificial Sequence: Synthetic oligonucleotide
gagcauaccgccucagaag

SEQ ID NO: 1991585 - RNA, 19 nt, Artificial Sequence
  Description of Artificial Sequence: Synthetic oligonucleotide
uuuuaguggcagaugcgga

SEQ ID NO: 1991586 - RNA, 19 nt, Artificial Sequence
  Description of Artificial Sequence: Synthetic oligonucleotide
uggguaucugacaaacaca

SEQ ID NO: 1991587 - RNA, 19 nt, Artificial Sequence
  Description of Artificial Sequence: Synthetic oligonucleotide
ugcuucaagcuuuaacugu

SEQ ID NO: 1991588 - RNA, 19 nt, Artificial Sequence
  Description of Artificial Sequence: Synthetic oligonucleotide
cuaaauagcucuccaugug

SEQ ID NO: 1991589 - RNA, 19 nt, Artificial Sequence
  Description of Artificial Sequence: Synthetic oligonucleotide
uuaagugaacaaggcaaag

SEQ ID NO: 1991590 - RNA, 19 nt, Artificial Sequence
  Description of Artificial Sequence: Synthetic oligonucleotide
cacaggcucacugaaaggg

SEQ ID NO: 1991591 - RNA, 19 nt, Artificial Sequence
  Description of Artificial Sequence: Synthetic oligonucleotide
ugugcucacauccggugcc

SEQ ID NO: 1991592 - RNA, 19 nt, Artificial Sequence
  Description of Artificial Sequence: Synthetic oligonucleotide
ugcgacaggugccagguga

SEQ ID NO: 1991593 - RNA, 19 nt, Artificial Sequence
  Description of Artificial Sequence: Synthetic oligonucleotide
caucaaacucccuggagug

SEQ ID NO: 1991594 - RNA, 19 nt, Artificial Sequence
  Description of Artificial Sequence: Synthetic oligonucleotide
aagaacucagaauccccgu

SEQ ID NO: 1991595 - RNA, 19 nt, Artificial Sequence
  Description of Artificial Sequence: Synthetic oligonucleotide
ugcacaagcccuccguuug

SEQ ID NO: 1991596 - RNA, 19 nt, Artificial Sequence
  Description of Artificial Sequence: Synthetic oligonucleotide
gagugcuuaagugaacaag

SEQ ID NO: 1991597 - RNA, 19 nt, Artificial Sequence
  Description of Artificial Sequence: Synthetic oligonucleotide
cugaccagguaucaggcag

SEQ ID NO: 1991598 - RNA, 19 nt, Artificial Sequence
  Description of Artificial Sequence: Synthetic oligonucleotide
uguuucuaaauagcucucc

SEQ ID NO: 1991599 - RNA, 19 nt, Artificial Sequence
  Description of Artificial Sequence: Synthetic oligonucleotide
ugaccgagcgcucacuucu

SEQ ID NO: 1991600 - RNA, 19 nt, Artificial Sequence
  Description of Artificial Sequence: Synthetic oligonucleotide
gcuacgaggacaaaguucc

SEQ ID NO: 1991601 - RNA, 19 nt, Artificial Sequence
  Description of Artificial Sequence: Synthetic oligonucleotide
aaucagguuuucugacuug

SEQ ID NO: 1991602 - RNA, 19 nt, Artificial Sequence
  Description of Artificial Sequence: Synthetic oligonucleotide
cagguuuucugacuuggcc

SEQ ID NO: 1991603 - RNA, 19 nt, Artificial Sequence
  Description of Artificial Sequence: Synthetic oligonucleotide
cauaggaccuuacaccaac

SEQ ID NO: 1991604 - RNA, 19 nt, Artificial Sequence
  Description of Artificial Sequence: Synthetic oligonucleotide
ugacaggcccgcauuaaca

SEQ ID NO: 1991605 - RNA, 19 nt, Artificial Sequence
  Description of Artificial Sequence: Synthetic oligonucleotide
auuuguacaucuuguggau

SEQ ID NO: 1991606 - RNA, 19 nt, Artificial Sequence
  Description of Artificial Sequence: Synthetic oligonucleotide
caucuuaucauauguguaa

SEQ ID NO: 1991607 - RNA, 19 nt, Artificial Sequence
  Description of Artificial Sequence: Synthetic oligonucleotide
ucacugaaaggguucuggc

SEQ ID NO: 1991608 - RNA, 19 nt, Artificial Sequence
  Description of Artificial Sequence: Synthetic oligonucleotide
agaagcauaggaccuuaca

SEQ ID NO: 1991609 - RNA, 19 nt, Artificial Sequence
  Description of Artificial Sequence: Synthetic oligonucleotide
uuguacaucuuguggauuu

SEQ ID NO: 1991610 - RNA, 19 nt, Artificial Sequence
  Description of Artificial Sequence: Synthetic oligonucleotide
ccauuuuaguggcagaugc

SEQ ID NO: 1991611 - RNA, 19 nt, Artificial Sequence
  Description of Artificial Sequence: Synthetic oligonucleotide
ucugugcucacauccggug

SEQ ID NO: 1991612 - RNA, 19 nt, Artificial Sequence
  Description of Artificial Sequence: Synthetic oligonucleotide
acugcacuucccuucagcu

SEQ ID NO: 1991613 - RNA, 19 nt, Artificial Sequence
  Description of Artificial Sequence: Synthetic oligonucleotide
aggcaaaggguuuccgagg

SEQ ID NO: 1991614 - RNA, 19 nt, Artificial Sequence
  Description of Artificial Sequence: Synthetic oligonucleotide
ugaacaaggcaaaggguuu

SEQ ID NO: 1991615 - RNA, 19 nt, Artificial Sequence
  Description of Artificial Sequence: Synthetic oligonucleotide
aggaccuuacaccaacuga

SEQ ID NO: 1991616 - RNA, 19 nt, Artificial Sequence
  Description of Artificial Sequence: Synthetic oligonucleotide
uuuggguaucugacaaaca

SEQ ID NO: 1991617 - RNA, 19 nt, Artificial Sequence
  Description of Artificial Sequence: Synthetic oligonucleotide
guggcaagugccuuugccc

SEQ ID NO: 1991618 - RNA, 19 nt, Artificial Sequence
  Description of Artificial Sequence: Synthetic oligonucleotide
ugcuccaguagcgucaagc

SEQ ID NO: 1991619 - RNA, 19 nt, Artificial Sequence
  Description of Artificial Sequence: Synthetic oligonucleotide
ggguaucugacaaacacag

SEQ ID NO: 1991620 - RNA, 19 nt, Artificial Sequence
  Description of Artificial Sequence: Synthetic oligonucleotide
uucaagcuuuaacuguuuc

SEQ ID NO: 1991621 - RNA, 19 nt, Artificial Sequence
  Description of Artificial Sequence: Synthetic oligonucleotide
uuccgaggucgacagcugg

SEQ ID NO: 1991622 - RNA, 19 nt, Artificial Sequence
  Description of Artificial Sequence: Synthetic oligonucleotide
aacugagugcuuaagugaa

SEQ ID NO: 1991623 - RNA, 19 nt, Artificial Sequence
  Description of Artificial Sequence: Synthetic oligonucleotide
ucuuaucauauguguaaau

SEQ ID NO: 1991624 - RNA, 19 nt, Artificial Sequence
  Description of Artificial Sequence: Synthetic oligonucleotide
auagcucuccaugugcuag

SEQ ID NO: 1991625 - RNA, 19 nt, Artificial Sequence
  Description of Artificial Sequence: Synthetic oligonucleotide
accuuacaccaacugagug

SEQ ID NO: 1991626 - RNA, 19 nt, Artificial Sequence
  Description of Artificial Sequence: Synthetic oligonucleotide
gacccauuaagaggcaaag

SEQ ID NO: 1991627 - RNA, 19 nt, Artificial Sequence
  Description of Artificial Sequence: Synthetic oligonucleotide
agcuacgaggacaaaguuc

SEQ ID NO: 1991628 - RNA, 19 nt, Artificial Sequence
  Description of Artificial Sequence: Synthetic oligonucleotide
ugcuaggcagucagaagca

SEQ ID NO: 1991629 - RNA, 19 nt, Artificial Sequence
  Description of Artificial Sequence: Synthetic oligonucleotide
uuucaaguccgaguaccag

SEQ ID NO: 1991630 - RNA, 19 nt, Artificial Sequence
  Description of Artificial Sequence: Synthetic oligonucleotide
agcgcucacuucucugugc

SEQ ID NO: 1991631 - RNA, 19 nt, Artificial Sequence
  Description of Artificial Sequence: Synthetic oligonucleotide
cucagaauccccguugcag

SEQ ID NO: 1991632 - RNA, 19 nt, Artificial Sequence
  Description of Artificial Sequence: Synthetic oligonucleotide
uccgaggucgacagcuggg

SEQ ID NO: 1991633 - RNA, 19 nt, Artificial Sequence
  Description of Artificial Sequence: Synthetic oligonucleotide
ucuuguggauuugggaccc

SEQ ID NO: 1991634 - RNA, 19 nt, Artificial Sequence
  Description of Artificial Sequence: Synthetic oligonucleotide
agugccuuugcccacugaa

SEQ ID NO: 1991635 - RNA, 19 nt, Artificial Sequence
  Description of Artificial Sequence: Synthetic oligonucleotide
cacagacuaggugacaggc

SEQ ID NO: 1991636 - RNA, 19 nt, Artificial Sequence
  Description of Artificial Sequence: Synthetic oligonucleotide
ggaccuuacaccaacugag

SEQ ID NO: 1991637 - RNA, 19 nt, Artificial Sequence
  Description of Artificial Sequence: Synthetic oligonucleotide
agcugcacugaccagguau

SEQ ID NO: 1991638 - RNA, 19 nt, Artificial Sequence
  Description of Artificial Sequence: Synthetic oligonucleotide
ucccucauagccccuguga

SEQ ID NO: 1991639 - RNA, 19 nt, Artificial Sequence
  Description of Artificial Sequence: Synthetic oligonucleotide
ugcugucccucauagcccc

SEQ ID NO: 1991640 - RNA, 19 nt, Artificial Sequence
  Description of Artificial Sequence: Synthetic oligonucleotide
agcuucaucuuaucauaug

SEQ ID NO: 1991641 - RNA, 19 nt, Artificial Sequence
  Description of Artificial Sequence: Synthetic oligonucleotide
caacugagugcuuaaguga

SEQ ID NO: 1991642 - RNA, 19 nt, Artificial Sequence
  Description of Artificial Sequence: Synthetic oligonucleotide
ccaggugacagugugaccg

SEQ ID NO: 1991643 - RNA, 19 nt, Artificial Sequence
  Description of Artificial Sequence: Synthetic oligonucleotide
uuaguggcagaugcggagc

SEQ ID NO: 1991644 - RNA, 19 nt, Artificial Sequence
  Description of Artificial Sequence: Synthetic oligonucleotide
aagagcauaccgccucaga

SEQ ID NO: 1991645 - RNA, 19 nt, Artificial Sequence
  Description of Artificial Sequence: Synthetic oligonucleotide
cacaaagcagguuuggaaa

SEQ ID NO: 1991646 - RNA, 19 nt, Artificial Sequence
  Description of Artificial Sequence: Synthetic oligonucleotide
gauuugggacccauuaaga

SEQ ID NO: 1991647 - RNA, 19 nt, Artificial Sequence
  Description of Artificial Sequence: Synthetic oligonucleotide
ccuuacaccaacugagugc

SEQ ID NO: 1991648 - RNA, 19 nt, Artificial Sequence
  Description of Artificial Sequence: Synthetic oligonucleotide
uggauuugggacccauuaa

SEQ ID NO: 1991649 - RNA, 19 nt, Artificial Sequence
  Description of Artificial Sequence: Synthetic oligonucleotide
auuaacacucuggggacug

SEQ ID NO: 1991650 - RNA, 19 nt, Artificial Sequence
  Description of Artificial Sequence: Synthetic oligonucleotide
uccuuugggaaagcaagca

SEQ ID NO: 1991651 - RNA, 19 nt, Artificial Sequence
  Description of Artificial Sequence: Synthetic oligonucleotide
uccguuuggguaucugaca

SEQ ID NO: 1991652 - RNA, 19 nt, Artificial Sequence
  Description of Artificial Sequence: Synthetic oligonucleotide
guagcgucaagcauggcuc

SEQ ID NO: 1991653 - RNA, 19 nt, Artificial Sequence
  Description of Artificial Sequence: Synthetic oligonucleotide
ggaaaagaacucagaaucc

SEQ ID NO: 1991654 - RNA, 19 nt, Artificial Sequence
  Description of Artificial Sequence: Synthetic oligonucleotide
gacagugugaccgagcgcu

SEQ ID NO: 1991655 - RNA, 19 nt, Artificial Sequence
  Description of Artificial Sequence: Synthetic oligonucleotide
gacugcacuucccuucagc

SEQ ID NO: 1991656 - RNA, 19 nt, Artificial Sequence
  Description of Artificial Sequence: Synthetic oligonucleotide
agguuuggaaaagaacuca

SEQ ID NO: 1991657 - RNA, 19 nt, Artificial Sequence
  Description of Artificial Sequence: Synthetic oligonucleotide
uggacugcacuucccuuca

SEQ ID NO: 1991658 - RNA, 19 nt, Artificial Sequence
  Description of Artificial Sequence: Synthetic oligonucleotide
ugcggagccucugugaaga

SEQ ID NO: 1991659 - RNA, 19 nt, Artificial Sequence
  Description of Artificial Sequence: Synthetic oligonucleotide
ccaacugagugcuuaagug

SEQ ID NO: 1991660 - RNA, 19 nt, Artificial Sequence
  Description of Artificial Sequence: Synthetic oligonucleotide
aauagcucuccaugugcua

SEQ ID NO: 1991661 - RNA, 19 nt, Artificial Sequence
  Description of Artificial Sequence: Synthetic oligonucleotide
aagcccuccguuuggguau

SEQ ID NO: 1991662 - RNA, 19 nt, Artificial Sequence
  Description of Artificial Sequence: Synthetic oligonucleotide
ugaaaggguucuggcagag

SEQ ID NO: 1991663 - RNA, 19 nt, Artificial Sequence
  Description of Artificial Sequence: Synthetic oligonucleotide
aaggaagcuacgaggacaa

SEQ ID NO: 1991664 - RNA, 19 nt, Artificial Sequence
  Description of Artificial Sequence: Synthetic oligonucleotide
uuuguucuagcuggcuggc

SEQ ID NO: 1991665 - RNA, 19 nt, Artificial Sequence
  Description of Artificial Sequence: Synthetic oligonucleotide
ucacauccggugcccacag

SEQ ID NO: 1991666 - RNA, 19 nt, Artificial Sequence
  Description of Artificial Sequence: Synthetic oligonucleotide
aggacucugcacccuggac

SEQ ID NO: 1991667 - RNA, 19 nt, Artificial Sequence
  Description of Artificial Sequence: Synthetic oligonucleotide
gcuuaagugaacaaggcaa

SEQ ID NO: 1991668 - RNA, 19 nt, Artificial Sequence
  Description of Artificial Sequence: Synthetic oligonucleotide
ugugcgacaggugccaggu

SEQ ID NO: 1991669 - RNA, 19 nt, Artificial Sequence
  Description of Artificial Sequence: Synthetic oligonucleotide
cagaauccccguugcagcc

SEQ ID NO: 1991670 - RNA, 19 nt, Artificial Sequence
  Description of Artificial Sequence: Synthetic oligonucleotide
ggaagcuacgaggacaaag

SEQ ID NO: 1991671 - RNA, 19 nt, Artificial Sequence
  Description of Artificial Sequence: Synthetic oligonucleotide
acgaggacaaaguuccuuu

SEQ ID NO: 1991672 - RNA, 19 nt, Artificial Sequence
  Description of Artificial Sequence: Synthetic oligonucleotide
ucuccaugugcuaggcagu

SEQ ID NO: 1991673 - RNA, 19 nt, Artificial Sequence
  Description of Artificial Sequence: Synthetic oligonucleotide
aagcuacgaggacaaaguu

SEQ ID NO: 1991674 - RNA, 19 nt, Artificial Sequence
  Description of Artificial Sequence: Synthetic oligonucleotide
ugaccagguaucaggcagu

SEQ ID NO: 1991675 - RNA, 19 nt, Artificial Sequence
  Description of Artificial Sequence: Synthetic oligonucleotide
gaagcuacgaggacaaagu

SEQ ID NO: 1991676 - RNA, 19 nt, Artificial Sequence
  Description of Artificial Sequence: Synthetic oligonucleotide
ucaugaagccucucagcuc

SEQ ID NO: 1991677 - RNA, 19 nt, Artificial Sequence
  Description of Artificial Sequence: Synthetic oligonucleotide
ugagugcuuaagugaacaa

SEQ ID NO: 1991678 - RNA, 19 nt, Artificial Sequence
  Description of Artificial Sequence: Synthetic oligonucleotide
cccgcauuaacacucuggg

SEQ ID NO: 1991679 - RNA, 19 nt, Artificial Sequence
  Description of Artificial Sequence: Synthetic oligonucleotide
ugccaggugacagugugac

SEQ ID NO: 1991680 - RNA, 19 nt, Artificial Sequence
  Description of Artificial Sequence: Synthetic oligonucleotide
ucaaacucccuggagugau

SEQ ID NO: 1991681 - RNA, 19 nt, Artificial Sequence
  Description of Artificial Sequence: Synthetic oligonucleotide
ucgacagcugggugggaag

SEQ ID NO: 1991682 - RNA, 19 nt, Artificial Sequence
  Description of Artificial Sequence: Synthetic oligonucleotide
agucagaagcauaggaccu

SEQ ID NO: 1991683 - RNA, 19 nt, Artificial Sequence
  Description of Artificial Sequence: Synthetic oligonucleotide
cacucuggggacugaauuc

SEQ ID NO: 1991684 - RNA, 19 nt, Artificial Sequence
  Description of Artificial Sequence: Synthetic oligonucleotide
cagugggugugcacaagcc

SEQ ID NO: 1991685 - RNA, 19 nt, Artificial Sequence
  Description of Artificial Sequence: Synthetic oligonucleotide
cuguuucuaaauagcucuc

SEQ ID NO: 1991686 - RNA, 19 nt, Artificial Sequence
  Description of Artificial Sequence: Synthetic oligonucleotide
cucauagccccugugagga

SEQ ID NO: 1991687 - RNA, 19 nt, Artificial Sequence
  Description of Artificial Sequence: Synthetic oligonucleotide
caaaggaagcuacgaggac

SEQ ID NO: 1991688 - RNA, 19 nt, Artificial Sequence
  Description of Artificial Sequence: Synthetic oligonucleotide
ugugguccuccuggcaugg

SEQ ID NO: 1991689 - RNA, 19 nt, Artificial Sequence
  Description of Artificial Sequence: Synthetic oligonucleotide
uggagugaugguucagcaa

SEQ ID NO: 1991690 - RNA, 19 nt, Artificial Sequence
  Description of Artificial Sequence: Synthetic oligonucleotide
caaggugcccaccucagga

SEQ ID NO: 1991691 - RNA, 19 nt, Artificial Sequence
  Description of Artificial Sequence: Synthetic oligonucleotide
agaacucagaauccccguu

SEQ ID NO: 1991692 - RNA, 19 nt, Artificial Sequence
  Description of Artificial Sequence: Synthetic oligonucleotide
aucuuaucauauguguaaa

SEQ ID NO: 1991693 - RNA, 19 nt, Artificial Sequence
  Description of Artificial Sequence: Synthetic oligonucleotide
gaauccccguugcagccug

SEQ ID NO: 1991694 - RNA, 19 nt, Artificial Sequence
  Description of Artificial Sequence: Synthetic oligonucleotide
cuggcacaaagcagguuug

SEQ ID NO: 1991695 - RNA, 19 nt, Artificial Sequence
  Description of Artificial Sequence: Synthetic oligonucleotide
ugacagugugaccgagcgc

SEQ ID NO: 1991696 - RNA, 19 nt, Artificial Sequence
  Description of Artificial Sequence: Synthetic oligonucleotide
guuuggaaaagaacucaga

SEQ ID NO: 1991697 - RNA, 19 nt, Artificial Sequence
  Description of Artificial Sequence: Synthetic oligonucleotide
uccggugcccacagacuag

SEQ ID NO: 1991698 - RNA, 19 nt, Artificial Sequence
  Description of Artificial Sequence: Synthetic oligonucleotide
agcuggacugcacuucccu

SEQ ID NO: 1991699 - RNA, 19 nt, Artificial Sequence
  Description of Artificial Sequence: Synthetic oligonucleotide
ggggucgugugucugcugg

SEQ ID NO: 1991700 - RNA, 19 nt, Artificial Sequence
  Description of Artificial Sequence: Synthetic oligonucleotide
uaccgccucagaaggcaag

SEQ ID NO: 1991701 - RNA, 19 nt, Artificial Sequence
  Description of Artificial Sequence: Synthetic oligonucleotide
cuuucaaguccgaguacca

SEQ ID NO: 1991702 - RNA, 19 nt, Artificial Sequence
  Description of Artificial Sequence: Synthetic oligonucleotide
uguaggaccuggguggcau

SEQ ID NO: 1991703 - RNA, 19 nt, Artificial Sequence
  Description of Artificial Sequence: Synthetic oligonucleotide
cacugaaaggguucuggca

SEQ ID NO: 1991704 - RNA, 19 nt, Artificial Sequence
  Description of Artificial Sequence: Synthetic oligonucleotide
aggucgacagcuggguggg

SEQ ID NO: 1991705 - RNA, 19 nt, Artificial Sequence
  Description of Artificial Sequence: Synthetic oligonucleotide
aagcagguuuggaaaagaa

SEQ ID NO: 1991706 - RNA, 19 nt, Artificial Sequence
  Description of Artificial Sequence: Synthetic oligonucleotide
gcauuaacacucuggggac

SEQ ID NO: 1991707 - RNA, 19 nt, Artificial Sequence
  Description of Artificial Sequence: Synthetic oligonucleotide
ccaguagcgucaagcaugg

SEQ ID NO: 1991708 - RNA, 19 nt, Artificial Sequence
  Description of Artificial Sequence: Synthetic oligonucleotide
cuuacaccaacugagugcu

SEQ ID NO: 1991709 - RNA, 19 nt, Artificial Sequence
  Description of Artificial Sequence: Synthetic oligonucleotide
cugagugcuuaagugaaca

SEQ ID NO: 1991710 - RNA, 19 nt, Artificial Sequence
  Description of Artificial Sequence: Synthetic oligonucleotide
cgcauuaacacucugggga

SEQ ID NO: 1991711 - RNA, 19 nt, Artificial Sequence
  Description of Artificial Sequence: Synthetic oligonucleotide
caaggcaaaggguuuccga

SEQ ID NO: 1991712 - RNA, 19 nt, Artificial Sequence
  Description of Artificial Sequence: Synthetic oligonucleotide
acaggugccaggugacagu

SEQ ID NO: 1991713 - RNA, 19 nt, Artificial Sequence
  Description of Artificial Sequence: Synthetic oligonucleotide
caaacacaggcucacugaa

SEQ ID NO: 1991714 - RNA, 19 nt, Artificial Sequence
  Description of Artificial Sequence: Synthetic oligonucleotide
guugcagccuggaaccagc

SEQ ID NO: 1991715 - RNA, 19 nt, Artificial Sequence
  Description of Artificial Sequence: Synthetic oligonucleotide
ggacucugcacccuggaca

SEQ ID NO: 1991716 - RNA, 19 nt, Artificial Sequence
  Description of Artificial Sequence: Synthetic oligonucleotide
gacuaggugacaggcccgc

SEQ ID NO: 1991717 - RNA, 19 nt, Artificial Sequence
  Description of Artificial Sequence: Synthetic oligonucleotide
ucccuuuguucuagcuggc

SEQ ID NO: 1991718 - RNA, 19 nt, Artificial Sequence
  Description of Artificial Sequence: Synthetic oligonucleotide
cccguugcagccuggaacc

SEQ ID NO: 1991719 - RNA, 19 nt, Artificial Sequence
  Description of Artificial Sequence: Synthetic oligonucleotide
agcucugugcucacauccg

SEQ ID NO: 1991720 - RNA, 19 nt, Artificial Sequence
  Description of Artificial Sequence: Synthetic oligonucleotide
ggguuuccgaggucgacag

SEQ ID NO: 1991721 - RNA, 19 nt, Artificial Sequence
  Description of Artificial Sequence: Synthetic oligonucleotide
gaagagcauaccgccucag

SEQ ID NO: 1991722 - RNA, 19 nt, Artificial Sequence
  Description of Artificial Sequence: Synthetic oligonucleotide
uagcgucaagcauggcuca

SEQ ID NO: 1991723 - RNA, 19 nt, Artificial Sequence
  Description of Artificial Sequence: Synthetic oligonucleotide
uuuguacaucuuguggauu

SEQ ID NO: 1991724 - RNA, 19 nt, Artificial Sequence
  Description of Artificial Sequence: Synthetic oligonucleotide
gcaaaggaagcuacgagga

SEQ ID NO: 1991725 - RNA, 19 nt, Artificial Sequence
  Description of Artificial Sequence: Synthetic oligonucleotide
auagccccugugaggaacg

SEQ ID NO: 1991726 - RNA, 19 nt, Artificial Sequence
  Description of Artificial Sequence: Synthetic oligonucleotide
ggcaucaaacucccuggag

SEQ ID NO: 1991727 - RNA, 19 nt, Artificial Sequence
  Description of Artificial Sequence: Synthetic oligonucleotide
ggaaagcaagcagaaagca

SEQ ID NO: 1991728 - RNA, 19 nt, Artificial Sequence
  Description of Artificial Sequence: Synthetic oligonucleotide
cucuuucaaguccgaguac

SEQ ID NO: 1991729 - RNA, 19 nt, Artificial Sequence
  Description of Artificial Sequence: Synthetic oligonucleotide
uguggauuugggacccauu

SEQ ID NO: 1991730 - RNA, 19 nt, Artificial Sequence
  Description of Artificial Sequence: Synthetic oligonucleotide
accgccucagaaggcaagg

SEQ ID NO: 1991731 - RNA, 19 nt, Artificial Sequence
  Description of Artificial Sequence: Synthetic oligonucleotide
ccugcuucaagcuuuaacu

SEQ ID NO: 1991732 - RNA, 19 nt, Artificial Sequence
  Description of Artificial Sequence: Synthetic oligonucleotide
aguccgaguaccagggcug

SEQ ID NO: 1991733 - RNA, 19 nt, Artificial Sequence
  Description of Artificial Sequence: Synthetic oligonucleotide
cuggagugaugguucagca

SEQ ID NO: 1991734 - RNA, 19 nt, Artificial Sequence
  Description of Artificial Sequence: Synthetic oligonucleotide
acaggcccgcauuaacacu

SEQ ID NO: 1991735 - RNA, 19 nt, Artificial Sequence
  Description of Artificial Sequence: Synthetic oligonucleotide
auccggugcccacagacua

SEQ ID NO: 1991736 - RNA, 19 nt, Artificial Sequence
  Description of Artificial Sequence: Synthetic oligonucleotide
ccaugugcuaggcagucag

SEQ ID NO: 1991737 - RNA, 19 nt, Artificial Sequence
  Description of Artificial Sequence: Synthetic oligonucleotide
gagcgcucacuucucugug

SEQ ID NO: 1991738 - RNA, 19 nt, Artificial Sequence
  Description of Artificial Sequence: Synthetic oligonucleotide
aaaggguuuccgaggucga

SEQ ID NO: 1991739 - RNA, 19 nt, Artificial Sequence
  Description of Artificial Sequence: Synthetic oligonucleotide
aaacacaggcucacugaaa

SEQ ID NO: 1991740 - RNA, 19 nt, Artificial Sequence
  Description of Artificial Sequence: Synthetic oligonucleotide
cugugcgacaggugccagg

SEQ ID NO: 1991741 - RNA, 19 nt, Artificial Sequence
  Description of Artificial Sequence: Synthetic oligonucleotide
gcucuuucaaguccgagua

SEQ ID NO: 1991742 - RNA, 19 nt, Artificial Sequence
  Description of Artificial Sequence: Synthetic oligonucleotide
gugacaggcccgcauuaac

SEQ ID NO: 1991743 - RNA, 19 nt, Artificial Sequence
  Description of Artificial Sequence: Synthetic oligonucleotide
uacgaggacaaaguuccuu

SEQ ID NO: 1991744 - RNA, 19 nt, Artificial Sequence
  Description of Artificial Sequence: Synthetic oligonucleotide
acucagaauccccguugca

SEQ ID NO: 1991745 - RNA, 19 nt, Artificial Sequence
  Description of Artificial Sequence: Synthetic oligonucleotide
ggaacgggcagagaagcug

SEQ ID NO: 1991746 - RNA, 19 nt, Artificial Sequence
  Description of Artificial Sequence: Synthetic oligonucleotide
guuuucugacuuggccagg

SEQ ID NO: 1991747 - RNA, 19 nt, Artificial Sequence
  Description of Artificial Sequence: Synthetic oligonucleotide
aggugcccaccucaggacu

SEQ ID NO: 1991748 - RNA, 19 nt, Artificial Sequence
  Description of Artificial Sequence: Synthetic oligonucleotide
cucuggggacugaauucag

SEQ ID NO: 1991749 - RNA, 19 nt, Artificial Sequence
  Description of Artificial Sequence: Synthetic oligonucleotide
gccaagagccaccugugug

SEQ ID NO: 1991750 - RNA, 19 nt, Artificial Sequence
  Description of Artificial Sequence: Synthetic oligonucleotide
cauaccgccucagaaggca

SEQ ID NO: 1991751 - RNA, 19 nt, Artificial Sequence
  Description of Artificial Sequence: Synthetic oligonucleotide
agacuaggugacaggcccg

SEQ ID NO: 1991752 - RNA, 19 nt, Artificial Sequence
  Description of Artificial Sequence: Synthetic oligonucleotide
ugggugugcacaagcccuc

SEQ ID NO: 1991753 - RNA, 19 nt, Artificial Sequence
  Description of Artificial Sequence: Synthetic oligonucleotide
gugucugcuggcagcacag

SEQ ID NO: 1991754 - RNA, 19 nt, Artificial Sequence
  Description of Artificial Sequence: Synthetic oligonucleotide
gguaucaggcaguagcugu

SEQ ID NO: 1991755 - RNA, 19 nt, Artificial Sequence
  Description of Artificial Sequence: Synthetic oligonucleotide
uaggaccuggguggcauca

SEQ ID NO: 1991756 - RNA, 19 nt, Artificial Sequence
  Description of Artificial Sequence: Synthetic oligonucleotide
caacaaguuuacauuugua

SEQ ID NO: 1991757 - RNA, 19 nt, Artificial Sequence
  Description of Artificial Sequence: Synthetic oligonucleotide
guucuagcuggcuggcaca

SEQ ID NO: 1991758 - RNA, 19 nt, Artificial Sequence
  Description of Artificial Sequence: Synthetic oligonucleotide
acaccaacugagugcuuaa

SEQ ID NO: 1991759 - RNA, 19 nt, Artificial Sequence
  Description of Artificial Sequence: Synthetic oligonucleotide
ugccuucccuuuguucuag

SEQ ID NO: 1991760 - RNA, 19 nt, Artificial Sequence
  Description of Artificial Sequence: Synthetic oligonucleotide
gaccuggguggcaucaaac

SEQ ID NO: 1991761 - RNA, 19 nt, Artificial Sequence
  Description of Artificial Sequence: Synthetic oligonucleotide
uucuggcagagcuggcaaa

SEQ ID NO: 1991762 - RNA, 19 nt, Artificial Sequence
  Description of Artificial Sequence: Synthetic oligonucleotide
agcauggcucaugaagccu

SEQ ID NO: 1991763 - RNA, 19 nt, Artificial Sequence
  Description of Artificial Sequence: Synthetic oligonucleotide
caaacucccuggagugaug

SEQ ID NO: 1991764 - RNA, 19 nt, Artificial Sequence
  Description of Artificial Sequence: Synthetic oligonucleotide
cagaagcauaggaccuuac

SEQ ID NO: 1991765 - RNA, 19 nt, Artificial Sequence
  Description of Artificial Sequence: Synthetic oligonucleotide
ccauuaagaggcaaaggaa

SEQ ID NO: 1991766 - RNA, 19 nt, Artificial Sequence
  Description of Artificial Sequence: Synthetic oligonucleotide
uuaacacucuggggacuga

SEQ ID NO: 1991767 - RNA, 19 nt, Artificial Sequence
  Description of Artificial Sequence: Synthetic oligonucleotide
cugaaaggguucuggcaga

SEQ ID NO: 1991768 - RNA, 19 nt, Artificial Sequence
  Description of Artificial Sequence: Synthetic oligonucleotide
cagaugcggagccucugug

SEQ ID NO: 1991769 - RNA, 19 nt, Artificial Sequence
  Description of Artificial Sequence: Synthetic oligonucleotide
gugugguccuccuggcaug

SEQ ID NO: 1991770 - RNA, 19 nt, Artificial Sequence
  Description of Artificial Sequence: Synthetic oligonucleotide
ugacaaacacaggcucacu

SEQ ID NO: 1991771 - RNA, 19 nt, Artificial Sequence
  Description of Artificial Sequence: Synthetic oligonucleotide
caaguccgaguaccagggc

SEQ ID NO: 1991772 - RNA, 19 nt, Artificial Sequence
  Description of Artificial Sequence: Synthetic oligonucleotide
uucuagcuggcuggcacaa

SEQ ID NO: 1991773 - RNA, 19 nt, Artificial Sequence
  Description of Artificial Sequence: Synthetic oligonucleotide
acaagcccuccguuugggu

SEQ ID NO: 1991774 - RNA, 19 nt, Artificial Sequence
  Description of Artificial Sequence: Synthetic oligonucleotide
ccuggaaccagcucuuuca

SEQ ID NO: 1991775 - RNA, 19 nt, Artificial Sequence
  Description of Artificial Sequence: Synthetic oligonucleotide
acgggcagagaagcugcac

SEQ ID NO: 1991776 - RNA, 19 nt, Artificial Sequence
  Description of Artificial Sequence: Synthetic oligonucleotide
gcuuuaacuguuucuaaau

SEQ ID NO: 1991777 - RNA, 19 nt, Artificial Sequence
  Description of Artificial Sequence: Synthetic oligonucleotide
cagcugggugggaagaaca

SEQ ID NO: 1991778 - RNA, 19 nt, Artificial Sequence
  Description of Artificial Sequence: Synthetic oligonucleotide
ugugcuccaguagcgucaa

SEQ ID NO: 1991779 - RNA, 19 nt, Artificial Sequence
  Description of Artificial Sequence: Synthetic oligonucleotide
caggugccaggugacagug

SEQ ID NO: 1991780 - RNA, 19 nt, Artificial Sequence
  Description of Artificial Sequence: Synthetic oligonucleotide
acccagaugccuucccuuu

SEQ ID NO: 1991781 - RNA, 19 nt, Artificial Sequence
  Description of Artificial Sequence: Synthetic oligonucleotide
gccugcuucaagcuuuaac

SEQ ID NO: 1991782 - RNA, 19 nt, Artificial Sequence
  Description of Artificial Sequence: Synthetic oligonucleotide
cacugaaccauuucagcau

SEQ ID NO: 1991783 - RNA, 19 nt, Artificial Sequence
  Description of Artificial Sequence: Synthetic oligonucleotide
ugggacccauuaagaggca

SEQ ID NO: 1991784 - RNA, 19 nt, Artificial Sequence
  Description of Artificial Sequence: Synthetic oligonucleotide
auaggaccuuacaccaacu

SEQ ID NO: 1991785 - RNA, 19 nt, Artificial Sequence
  Description of Artificial Sequence: Synthetic oligonucleotide
auggaugcugucccucaua

SEQ ID NO: 1991786 - RNA, 19 nt, Artificial Sequence
  Description of Artificial Sequence: Synthetic oligonucleotide
cccucauagccccugugag

SEQ ID NO: 1991787 - RNA, 19 nt, Artificial Sequence
  Description of Artificial Sequence: Synthetic oligonucleotide
guccgaguaccagggcugg

SEQ ID NO: 1991788 - RNA, 19 nt, Artificial Sequence
  Description of Artificial Sequence: Synthetic oligonucleotide
uccaugugcuaggcaguca

SEQ ID NO: 1991789 - RNA, 19 nt, Artificial Sequence
  Description of Artificial Sequence: Synthetic oligonucleotide
cauauguguaaaucagguu

SEQ ID NO: 1991790 - RNA, 19 nt, Artificial Sequence
  Description of Artificial Sequence: Synthetic oligonucleotide
ccgcauuaacacucugggg

SEQ ID NO: 1991791 - RNA, 19 nt, Artificial Sequence
  Description of Artificial Sequence: Synthetic oligonucleotide
caccaacugagugcuuaag

SEQ ID NO: 1991792 - RNA, 19 nt, Artificial Sequence
  Description of Artificial Sequence: Synthetic oligonucleotide
agcugugcgacaggugcca

SEQ ID NO: 1991793 - RNA, 19 nt, Artificial Sequence
  Description of Artificial Sequence: Synthetic oligonucleotide
ccuggagugaugguucagc

SEQ ID NO: 1991794 - RNA, 19 nt, Artificial Sequence
  Description of Artificial Sequence: Synthetic oligonucleotide
caagcccuccguuugggua

SEQ ID NO: 1991795 - RNA, 19 nt, Artificial Sequence
  Description of Artificial Sequence: Synthetic oligonucleotide
gcccgcauuaacacucugg

SEQ ID NO: 1991796 - RNA, 19 nt, Artificial Sequence
  Description of Artificial Sequence: Synthetic oligonucleotide
cagguaucaggcaguagcu

SEQ ID NO: 1991797 - RNA, 19 nt, Artificial Sequence
  Description of Artificial Sequence: Synthetic oligonucleotide
uuguucuagcuggcuggca

SEQ ID NO: 1991798 - RNA, 19 nt, Artificial Sequence
  Description of Artificial Sequence: Synthetic oligonucleotide
uccgaguaccagggcuggg

SEQ ID NO: 1991799 - RNA, 19 nt, Artificial Sequence
  Description of Artificial Sequence: Synthetic oligonucleotide
gcaaggugcccaccucagg

SEQ ID NO: 1991800 - RNA, 19 nt, Artificial Sequence
  Description of Artificial Sequence: Synthetic oligonucleotide
accgagcgcucacuucucu

SEQ ID NO: 1991801 - RNA, 19 nt, Artificial Sequence
  Description of Artificial Sequence: Synthetic oligonucleotide
gaagcugcacugaccaggu

SEQ ID NO: 1991802 - RNA, 19 nt, Artificial Sequence
  Description of Artificial Sequence: Synthetic oligonucleotide
gugaccgagcgcucacuuc

SEQ ID NO: 1991803 - RNA, 19 nt, Artificial Sequence
  Description of Artificial Sequence: Synthetic oligonucleotide
gcuggcacaaagcagguuu

SEQ ID NO: 1991804 - RNA, 19 nt, Artificial Sequence
  Description of Artificial Sequence: Synthetic oligonucleotide
aauccccguugcagccugg

SEQ ID NO: 1991805 - RNA, 19 nt, Artificial Sequence
  Description of Artificial Sequence: Synthetic oligonucleotide
aggugacaggcccgcauua

SEQ ID NO: 1991806 - RNA, 19 nt, Artificial Sequence
  Description of Artificial Sequence: Synthetic oligonucleotide
cagcucuuucaaguccgag

SEQ ID NO: 1991807 - RNA, 19 nt, Artificial Sequence
  Description of Artificial Sequence: Synthetic oligonucleotide
gugggugugcacaagcccu

SEQ ID NO: 1991808 - RNA, 19 nt, Artificial Sequence
  Description of Artificial Sequence: Synthetic oligonucleotide
caugugcuaggcagucaga

SEQ ID NO: 1991809 - RNA, 19 nt, Artificial Sequence
  Description of Artificial Sequence: Synthetic oligonucleotide
ccccguugcagccuggaac

SEQ ID NO: 1991810 - RNA, 19 nt, Artificial Sequence
  Description of Artificial Sequence: Synthetic oligonucleotide
cuggacacuuucccaggga

SEQ ID NO: 1991811 - RNA, 19 nt, Artificial Sequence
  Description of Artificial Sequence: Synthetic oligonucleotide
gcauuucccuggcacccag

SEQ ID NO: 1991812 - RNA, 19 nt, Artificial Sequence
  Description of Artificial Sequence: Synthetic oligonucleotide
augguucagcaaguccaca

SEQ ID NO: 1991813 - RNA, 19 nt, Artificial Sequence
  Description of Artificial Sequence: Synthetic oligonucleotide
acagugugaccgagcgcuc

SEQ ID NO: 1991814 - RNA, 19 nt, Artificial Sequence
  Description of Artificial Sequence: Synthetic oligonucleotide
ggcaaaggguuuccgaggu

SEQ ID NO: 1991815 - RNA, 19 nt, Artificial Sequence
  Description of Artificial Sequence: Synthetic oligonucleotide
agcauuucccuggcaccca

SEQ ID NO: 1991816 - RNA, 19 nt, Artificial Sequence
  Description of Artificial Sequence: Synthetic oligonucleotide
gaccuuacaccaacugagu

SEQ ID NO: 1991817 - RNA, 19 nt, Artificial Sequence
  Description of Artificial Sequence: Synthetic oligonucleotide
uggcagcacagugggugug

SEQ ID NO: 1991818 - RNA, 19 nt, Artificial Sequence
  Description of Artificial Sequence: Synthetic oligonucleotide
cucacauccggugcccaca

SEQ ID NO: 1991819 - RNA, 19 nt, Artificial Sequence
  Description of Artificial Sequence: Synthetic oligonucleotide
gccuuugcccacugaacca

SEQ ID NO: 1991820 - RNA, 19 nt, Artificial Sequence
  Description of Artificial Sequence: Synthetic oligonucleotide
ugcucacauccggugccca

SEQ ID NO: 1991821 - RNA, 19 nt, Artificial Sequence
  Description of Artificial Sequence: Synthetic oligonucleotide
cugcacccuggacacuuuc

SEQ ID NO: 1991822 - RNA, 19 nt, Artificial Sequence
  Description of Artificial Sequence: Synthetic oligonucleotide
agcugggugggaagaacaa

SEQ ID NO: 1991823 - RNA, 19 nt, Artificial Sequence
  Description of Artificial Sequence: Synthetic oligonucleotide
aggaacgggcagagaagcu

SEQ ID NO: 1991824 - RNA, 19 nt, Artificial Sequence
  Description of Artificial Sequence: Synthetic oligonucleotide
gucaagcauggcucaugaa

SEQ ID NO: 1991825 - RNA, 19 nt, Artificial Sequence
  Description of Artificial Sequence: Synthetic oligonucleotide
uuacaccaacugagugcuu

SEQ ID NO: 1991826 - RNA, 19 nt, Artificial Sequence
  Description of Artificial Sequence: Synthetic oligonucleotide
cugucccucauagccccug

SEQ ID NO: 1991827 - RNA, 19 nt, Artificial Sequence
  Description of Artificial Sequence: Synthetic oligonucleotide
cagcauccagccugcuuca

SEQ ID NO: 1991828 - RNA, 19 nt, Artificial Sequence
  Description of Artificial Sequence: Synthetic oligonucleotide
caagggcugccccagcugu

SEQ ID NO: 1991829 - RNA, 19 nt, Artificial Sequence
  Description of Artificial Sequence: Synthetic oligonucleotide
cgaggacaaaguuccuuug

SEQ ID NO: 1991830 - RNA, 19 nt, Artificial Sequence
  Description of Artificial Sequence: Synthetic oligonucleotide
gucgacagcugggugggaa

SEQ ID NO: 1991831 - RNA, 19 nt, Artificial Sequence
  Description of Artificial Sequence: Synthetic oligonucleotide
caggacucugcacccugga

SEQ ID NO: 1991832 - RNA, 19 nt, Artificial Sequence
  Description of Artificial Sequence: Synthetic oligonucleotide
cauuucccuggcacccaga

SEQ ID NO: 1991833 - RNA, 19 nt, Artificial Sequence
  Description of Artificial Sequence: Synthetic oligonucleotide
ccguuuggguaucugacaa

SEQ ID NO: 1991834 - RNA, 19 nt, Artificial Sequence
  Description of Artificial Sequence: Synthetic oligonucleotide
ggacacuuucccagggaca

SEQ ID NO: 1991835 - RNA, 19 nt, Artificial Sequence
  Description of Artificial Sequence: Synthetic oligonucleotide
gaccagguaucaggcagua

SEQ ID NO: 1991836 - RNA, 19 nt, Artificial Sequence
  Description of Artificial Sequence: Synthetic oligonucleotide
agcccuccguuuggguauc

SEQ ID NO: 1991837 - RNA, 19 nt, Artificial Sequence
  Description of Artificial Sequence: Synthetic oligonucleotide
gguuuccgaggucgacagc

SEQ ID NO: 1991838 - RNA, 19 nt, Artificial Sequence
  Description of Artificial Sequence: Synthetic oligonucleotide
gggucgugugucugcuggc

SEQ ID NO: 1991839 - RNA, 19 nt, Artificial Sequence
  Description of Artificial Sequence: Synthetic oligonucleotide
cagcuucaucuuaucauau

SEQ ID NO: 1991840 - RNA, 19 nt, Artificial Sequence
  Description of Artificial Sequence: Synthetic oligonucleotide
ggacccauuaagaggcaaa

SEQ ID NO: 1991841 - RNA, 19 nt, Artificial Sequence
  Description of Artificial Sequence: Synthetic oligonucleotide
cauggcucaugaagccucu

SEQ ID NO: 1991842 - RNA, 19 nt, Artificial Sequence
  Description of Artificial Sequence: Synthetic oligonucleotide
cuuucccagggacagcauu

SEQ ID NO: 1991843 - RNA, 19 nt, Artificial Sequence
  Description of Artificial Sequence: Synthetic oligonucleotide
cauccggugcccacagacu

SEQ ID NO: 1991844 - RNA, 19 nt, Artificial Sequence
  Description of Artificial Sequence: Synthetic oligonucleotide
auaccgccucagaaggcaa

SEQ ID NO: 1991845 - RNA, 19 nt, Artificial Sequence
  Description of Artificial Sequence: Synthetic oligonucleotide
agcgucaagcauggcucau

SEQ ID NO: 1991846 - RNA, 19 nt, Artificial Sequence
  Description of Artificial Sequence: Synthetic oligonucleotide
gcucacauccggugcccac

SEQ ID NO: 1991847 - RNA, 19 nt, Artificial Sequence
  Description of Artificial Sequence: Synthetic oligonucleotide
cauuaacacucuggggacu

SEQ ID NO: 1991848 - RNA, 19 nt, Artificial Sequence
  Description of Artificial Sequence: Synthetic oligonucleotide
ggucgugugucugcuggca

SEQ ID NO: 1991849 - RNA, 19 nt, Artificial Sequence
  Description of Artificial Sequence: Synthetic oligonucleotide
cagugugaccgagcgcuca

SEQ ID NO: 1991850 - RNA, 19 nt, Artificial Sequence
  Description of Artificial Sequence: Synthetic oligonucleotide
ccggugcccacagacuagg

SEQ ID NO: 1991851 - RNA, 19 nt, Artificial Sequence
  Description of Artificial Sequence: Synthetic oligonucleotide
ggacugcacuucccuucag

SEQ ID NO: 1991852 - RNA, 19 nt, Artificial Sequence
  Description of Artificial Sequence: Synthetic oligonucleotide
auccccguugcagccugga

SEQ ID NO: 1991853 - RNA, 19 nt, Artificial Sequence
  Description of Artificial Sequence: Synthetic oligonucleotide
gccaggugacagugugacc

SEQ ID NO: 1991854 - RNA, 19 nt, Artificial Sequence
  Description of Artificial Sequence: Synthetic oligonucleotide
gcaaaggguuuccgagguc

SEQ ID NO: 1991855 - RNA, 19 nt, Artificial Sequence
  Description of Artificial Sequence: Synthetic oligonucleotide
gcgucaagcauggcucaug

SEQ ID NO: 1991856 - RNA, 19 nt, Artificial Sequence
  Description of Artificial Sequence: Synthetic oligonucleotide
gaccgagcgcucacuucuc

SEQ ID NO: 1991857 - RNA, 19 nt, Artificial Sequence
  Description of Artificial Sequence: Synthetic oligonucleotide
gugcgacaggugccaggug

SEQ ID NO: 1991858 - RNA, 19 nt, Artificial Sequence
  Description of Artificial Sequence: Synthetic oligonucleotide
gcuucaagcuuuaacuguu

SEQ ID NO: 1991859 - RNA, 19 nt, Artificial Sequence
  Description of Artificial Sequence: Synthetic oligonucleotide
gcauaccgccucagaaggc

SEQ ID NO: 1991860 - RNA, 19 nt, Artificial Sequence
  Description of Artificial Sequence: Synthetic oligonucleotide
guaccagggcugggugagc

SEQ ID NO: 1991861 - RNA, 19 nt, Artificial Sequence
  Description of Artificial Sequence: Synthetic oligonucleotide
ccgagcgcucacuucucug

SEQ ID NO: 1991862 - RNA, 19 nt, Artificial Sequence
  Description of Artificial Sequence: Synthetic oligonucleotide
ggugcccaccucaggacuc

SEQ ID NO: 1991863 - RNA, 19 nt, Artificial Sequence
  Description of Artificial Sequence: Synthetic oligonucleotide
cgaguaccagggcugggug

SEQ ID NO: 1991864 - RNA, 19 nt, Artificial Sequence
  Description of Artificial Sequence: Synthetic oligonucleotide
ggcagaugcggagccucug

SEQ ID NO: 1991865 - RNA, 19 nt, Artificial Sequence
  Description of Artificial Sequence: Synthetic oligonucleotide
cuccuggcauggaugcugu

SEQ ID NO: 1991866 - RNA, 19 nt, Artificial Sequence
  Description of Artificial Sequence: Synthetic oligonucleotide
cgucaagcauggcucauga

SEQ ID NO: 1991867 - RNA, 19 nt, Artificial Sequence
  Description of Artificial Sequence: Synthetic oligonucleotide
aggcccgcauuaacacucu

SEQ ID NO: 1991868 - RNA, 19 nt, Artificial Sequence
  Description of Artificial Sequence: Synthetic oligonucleotide
ggugacaggcccgcauuaa

SEQ ID NO: 1991869 - RNA, 19 nt, Artificial Sequence
  Description of Artificial Sequence: Synthetic oligonucleotide
ggcccgcauuaacacucug

SEQ ID NO: 1991870 - RNA, 19 nt, Artificial Sequence
  Description of Artificial Sequence: Synthetic oligonucleotide
aggaccuggguggcaucaa

SEQ ID NO: 1991871 - RNA, 19 nt, Artificial Sequence
  Description of Artificial Sequence: Synthetic oligonucleotide
cuacgaggacaaaguuccu

SEQ ID NO: 1991872 - RNA, 19 nt, Artificial Sequence
  Description of Artificial Sequence: Synthetic oligonucleotide
cugcacuucccuucagcuu

SEQ ID NO: 1991873 - RNA, 19 nt, Artificial Sequence
  Description of Artificial Sequence: Synthetic oligonucleotide
gcagaugcggagccucugu

SEQ ID NO: 1991874 - RNA, 19 nt, Artificial Sequence
  Description of Artificial Sequence: Synthetic oligonucleotide
agcauccagccugcuucaa

SEQ ID NO: 1991875 - RNA, 19 nt, Artificial Sequence
  Description of Artificial Sequence: Synthetic oligonucleotide
acucugcacccuggacacu

SEQ ID NO: 1991876 - RNA, 19 nt, Artificial Sequence
  Description of Artificial Sequence: Synthetic oligonucleotide
gcgcucacuucucugugcu

SEQ ID NO: 1991877 - RNA, 19 nt, Artificial Sequence
  Description of Artificial Sequence: Synthetic oligonucleotide
cuuguggauuugggaccca

SEQ ID NO: 1991878 - RNA, 19 nt, Artificial Sequence
  Description of Artificial Sequence: Synthetic oligonucleotide
aggugccaggugacagugu

SEQ ID NO: 1991879 - RNA, 19 nt, Artificial Sequence
  Description of Artificial Sequence: Synthetic oligonucleotide
gcggagccucugugaagag

SEQ ID NO: 1991880 - RNA, 19 nt, Artificial Sequence
  Description of Artificial Sequence: Synthetic oligonucleotide
aggaagcuacgaggacaaa

SEQ ID NO: 1991881 - RNA, 19 nt, Artificial Sequence
  Description of Artificial Sequence: Synthetic oligonucleotide
ggacugaauucagguuguc

SEQ ID NO: 1991882 - RNA, 19 nt, Artificial Sequence
  Description of Artificial Sequence: Synthetic oligonucleotide
caguagcgucaagcauggc

SEQ ID NO: 1991883 - RNA, 19 nt, Artificial Sequence
  Description of Artificial Sequence: Synthetic oligonucleotide
cguugcagccuggaaccag

SEQ ID NO: 1991884 - RNA, 19 nt, Artificial Sequence
  Description of Artificial Sequence: Synthetic oligonucleotide
gcugugcgacaggugccag

SEQ ID NO: 1991885 - RNA, 19 nt, Artificial Sequence
  Description of Artificial Sequence: Synthetic oligonucleotide
cucugcacccuggacacuu

SEQ ID NO: 1991886 - RNA, 19 nt, Artificial Sequence
  Description of Artificial Sequence: Synthetic oligonucleotide
gggacccauuaagaggcaa

SEQ ID NO: 1991887 - RNA, 19 nt, Artificial Sequence
  Description of Artificial Sequence: Synthetic oligonucleotide
gagccaccugugugguccu

SEQ ID NO: 1991888 - RNA, 19 nt, Artificial Sequence
  Description of Artificial Sequence: Synthetic oligonucleotide
gcauaggaccuuacaccaa

SEQ ID NO: 1991889 - RNA, 19 nt, Artificial Sequence
  Description of Artificial Sequence: Synthetic oligonucleotide
cuguaggaccuggguggca

SEQ ID NO: 1991890 - RNA, 19 nt, Artificial Sequence
  Description of Artificial Sequence: Synthetic oligonucleotide
cacauccggugcccacaga

SEQ ID NO: 1991891 - RNA, 19 nt, Artificial Sequence
  Description of Artificial Sequence: Synthetic oligonucleotide
cgaggucgacagcugggug

SEQ ID NO: 1991892 - RNA, 19 nt, Artificial Sequence
  Description of Artificial Sequence: Synthetic oligonucleotide
gcacccagaugccuucccu

SEQ ID NO: 1991893 - RNA, 19 nt, Artificial Sequence
  Description of Artificial Sequence: Synthetic oligonucleotide
gcagcacagugggugugca

SEQ ID NO: 1991894 - RNA, 19 nt, Artificial Sequence
  Description of Artificial Sequence: Synthetic oligonucleotide
ggccaagagccaccugugu

SEQ ID NO: 1991895 - RNA, 19 nt, Artificial Sequence
  Description of Artificial Sequence: Synthetic oligonucleotide
ggcagagcuggcaaagcuu

SEQ ID NO: 1991896 - RNA, 19 nt, Artificial Sequence
  Description of Artificial Sequence: Synthetic oligonucleotide
ccccugugaggaacgggca

SEQ ID NO: 1991897 - RNA, 19 nt, Artificial Sequence
  Description of Artificial Sequence: Synthetic oligonucleotide
agccugcuucaagcuuuaa

SEQ ID NO: 1991898 - RNA, 19 nt, Artificial Sequence
  Description of Artificial Sequence: Synthetic oligonucleotide
gcuggacugcacuucccuu

SEQ ID NO: 1991899 - RNA, 19 nt, Artificial Sequence
  Description of Artificial Sequence: Synthetic oligonucleotide
gugugaccgagcgcucacu

SEQ ID NO: 1991900 - RNA, 19 nt, Artificial Sequence
  Description of Artificial Sequence: Synthetic oligonucleotide
gugcccaccucaggacucu

SEQ ID NO: 1991901 - RNA, 19 nt, Artificial Sequence
  Description of Artificial Sequence: Synthetic oligonucleotide
cgagcgcucacuucucugu

SEQ ID NO: 1991902 - RNA, 19 nt, Artificial Sequence
  Description of Artificial Sequence: Synthetic oligonucleotide
cgcucacuucucugugcuc

SEQ ID NO: 1991903 - RNA, 19 nt, Artificial Sequence
  Description of Artificial Sequence: Synthetic oligonucleotide
ccgaguaccagggcugggu

SEQ ID NO: 1991904 - RNA, 19 nt, Artificial Sequence
  Description of Artificial Sequence: Synthetic oligonucleotide
ccgaggucgacagcugggu

SEQ ID NO: 1991905 - RNA, 19 nt, Artificial Sequence
  Description of Artificial Sequence: Synthetic oligonucleotide
ggucgacagcuggguggga

SEQ ID NO: 1991906 - RNA, 19 nt, Artificial Sequence
  Description of Artificial Sequence: Synthetic oligonucleotide
ccguugcagccuggaacca

SEQ ID NO: 1991907 - RNA, 19 nt, Artificial Sequence
  Description of Artificial Sequence: Synthetic oligonucleotide
ccgccucagaaggcaaggu

SEQ ID NO: 1991908 - RNA, 19 nt, Artificial Sequence
  Description of Artificial Sequence: Synthetic oligonucleotide
cggugcccacagacuaggu

SEQ ID NO: 1991909 - RNA, 19 nt, Artificial Sequence
  Description of Artificial Sequence: Synthetic oligonucleotide
gcccuccguuuggguaucu

SEQ ID NO: 1991910 - RNA, 19 nt, Artificial Sequence
  Description of Artificial Sequence: Synthetic oligonucleotide
aaagcaaguagacaguugc

SEQ ID NO: 1991911 - RNA, 19 nt, Artificial Sequence
  Description of Artificial Sequence: Synthetic oligonucleotide
aauaaucuugauuagcuca

SEQ ID NO: 1991912 - RNA, 19 nt, Artificial Sequence
  Description of Artificial Sequence: Synthetic oligonucleotide
aacuucuaaaguuugaaca

SEQ ID NO: 1991913 - RNA, 19 nt, Artificial Sequence
  Description of Artificial Sequence: Synthetic oligonucleotide
uuuaaaucccuacugagga

SEQ ID NO: 1991914 - RNA, 19 nt, Artificial Sequence
  Description of Artificial Sequence: Synthetic oligonucleotide
uguucuauaaaugaaggcc

SEQ ID NO: 1991915 - RNA, 19 nt, Artificial Sequence
  Description of Artificial Sequence: Synthetic oligonucleotide
uuuaaagcaguauuacagg

SEQ ID NO: 1991916 - RNA, 19 nt, Artificial Sequence
  Description of Artificial Sequence: Synthetic oligonucleotide
acuucuaaaguuugaacac

SEQ ID NO: 1991917 - RNA, 19 nt, Artificial Sequence
  Description of Artificial Sequence: Synthetic oligonucleotide
uuuauuggcaacuuaagau

SEQ ID NO: 1991918 - RNA, 19 nt, Artificial Sequence
  Description of Artificial Sequence: Synthetic oligonucleotide
ugucaaaauaacuuggucu

SEQ ID NO: 1991919 - RNA, 19 nt, Artificial Sequence
  Description of Artificial Sequence: Synthetic oligonucleotide
ucuagucuuacacagccag

SEQ ID NO: 1991920 - RNA, 19 nt, Artificial Sequence
  Description of Artificial Sequence: Synthetic oligonucleotide
aaaugucaaaauaacuugg

SEQ ID NO: 1991921 - RNA, 19 nt, Artificial Sequence
  Description of Artificial Sequence: Synthetic oligonucleotide
uuccuaacacccuaggugg

SEQ ID NO: 1991922 - RNA, 19 nt, Artificial Sequence
  Description of Artificial Sequence: Synthetic oligonucleotide
aauccuuauugaucgcacc

SEQ ID NO: 1991923 - RNA, 19 nt, Artificial Sequence
  Description of Artificial Sequence: Synthetic oligonucleotide
uaguuagauagaaugaugu

SEQ ID NO: 1991924 - RNA, 19 nt, Artificial Sequence
  Description of Artificial Sequence: Synthetic oligonucleotide
aggguaguuagauagaaug

SEQ ID NO: 1991925 - RNA, 19 nt, Artificial Sequence
  Description of Artificial Sequence: Synthetic oligonucleotide
auuuuaaaucccuacugag

SEQ ID NO: 1991926 - RNA, 19 nt, Artificial Sequence
  Description of Artificial Sequence: Synthetic oligonucleotide
uuuuauuggcaacuuaaga

SEQ ID NO: 1991927 - RNA, 19 nt, Artificial Sequence
  Description of Artificial Sequence: Synthetic oligonucleotide
uuuagaugaguuuccaagc

SEQ ID NO: 1991928 - RNA, 19 nt, Artificial Sequence
  Description of Artificial Sequence: Synthetic oligonucleotide
aaguuugaacacaagagag

SEQ ID NO: 1991929 - RNA, 19 nt, Artificial Sequence
  Description of Artificial Sequence: Synthetic oligonucleotide
uauuggcaacuuaagaugc

SEQ ID NO: 1991930 - RNA, 19 nt, Artificial Sequence
  Description of Artificial Sequence: Synthetic oligonucleotide
ucggguacaaggaacuugg

SEQ ID NO: 1991931 - RNA, 19 nt, Artificial Sequence
  Description of Artificial Sequence: Synthetic oligonucleotide
aaucuugauuagcucacuc

SEQ ID NO: 1991932 - RNA, 19 nt, Artificial Sequence
  Description of Artificial Sequence: Synthetic oligonucleotide
guucuauaaaugaaggccg

SEQ ID NO: 1991933 - RNA, 19 nt, Artificial Sequence
  Description of Artificial Sequence: Synthetic oligonucleotide
agucgaaggcucuugcucc

SEQ ID NO: 1991934 - RNA, 19 nt, Artificial Sequence
  Description of Artificial Sequence: Synthetic oligonucleotide
uauaaaugaaggccgcccc

SEQ ID NO: 1991935 - RNA, 19 nt, Artificial Sequence
  Description of Artificial Sequence: Synthetic oligonucleotide
uugauuggcguuaagcugu

SEQ ID NO: 1991936 - RNA, 19 nt, Artificial Sequence
  Description of Artificial Sequence: Synthetic oligonucleotide
uuaggcauuguucuagucu

SEQ ID NO: 1991937 - RNA, 19 nt, Artificial Sequence
  Description of Artificial Sequence: Synthetic oligonucleotide
uaucgcucuauuaucacug

SEQ ID NO: 1991938 - RNA, 19 nt, Artificial Sequence
  Description of Artificial Sequence: Synthetic oligonucleotide
acucucauacacuucagag

SEQ ID NO: 1991939 - RNA, 19 nt, Artificial Sequence
  Description of Artificial Sequence: Synthetic oligonucleotide
ucuaauaaucuugauuagc

SEQ ID NO: 1991940 - RNA, 19 nt, Artificial Sequence
  Description of Artificial Sequence: Synthetic oligonucleotide
ugauaagggcuuaacaaac

SEQ ID NO: 1991941 - RNA, 19 nt, Artificial Sequence
  Description of Artificial Sequence: Synthetic oligonucleotide
ugcuguuccauuuuaaauc

SEQ ID NO: 1991942 - RNA, 19 nt, Artificial Sequence
  Description of Artificial Sequence: Synthetic oligonucleotide
agauucucagaucaccuuc

SEQ ID NO: 1991943 - RNA, 19 nt, Artificial Sequence
  Description of Artificial Sequence: Synthetic oligonucleotide
ucuuacacagccaguacug

SEQ ID NO: 1991944 - RNA, 19 nt, Artificial Sequence
  Description of Artificial Sequence: Synthetic oligonucleotide
uagacaguugcaugcaggg

SEQ ID NO: 1991945 - RNA, 19 nt, Artificial Sequence
  Description of Artificial Sequence: Synthetic oligonucleotide
guuccuaacacccuaggug

SEQ ID NO: 1991946 - RNA, 19 nt, Artificial Sequence
  Description of Artificial Sequence: Synthetic oligonucleotide
guuugaacacaagagagcc

SEQ ID NO: 1991947 - RNA, 19 nt, Artificial Sequence
  Description of Artificial Sequence: Synthetic oligonucleotide
uauucugaucugugaaugg

SEQ ID NO: 1991948 - RNA, 19 nt, Artificial Sequence
  Description of Artificial Sequence: Synthetic oligonucleotide
auccuuauugaucgcaccg

SEQ ID NO: 1991949 - RNA, 19 nt, Artificial Sequence
  Description of Artificial Sequence: Synthetic oligonucleotide
uuauugaucgcaccguagu

SEQ ID NO: 1991950 - RNA, 19 nt, Artificial Sequence
  Description of Artificial Sequence: Synthetic oligonucleotide
guucuagucuuacacagcc

SEQ ID NO: 1991951 - RNA, 19 nt, Artificial Sequence
  Description of Artificial Sequence: Synthetic oligonucleotide
aagaaagcuugauuggcgu

SEQ ID NO: 1991952 - RNA, 19 nt, Artificial Sequence
  Description of Artificial Sequence: Synthetic oligonucleotide
uugauaagggcuuaacaaa

SEQ ID NO: 1991953 - RNA, 19 nt, Artificial Sequence
  Description of Artificial Sequence: Synthetic oligonucleotide
aucacguggcuauauuggc

SEQ ID NO: 1991954 - RNA, 19 nt, Artificial Sequence
  Description of Artificial Sequence: Synthetic oligonucleotide
cacaagacaggguaguuag

SEQ ID NO: 1991955 - RNA, 19 nt, Artificial Sequence
  Description of Artificial Sequence: Synthetic oligonucleotide
aguuugaacacaagagagc

SEQ ID NO: 1991956 - RNA, 19 nt, Artificial Sequence
  Description of Artificial Sequence: Synthetic oligonucleotide
ucuugauuagcucacucau

SEQ ID NO: 1991957 - RNA, 19 nt, Artificial Sequence
  Description of Artificial Sequence: Synthetic oligonucleotide
gacaguugcaugcagggac

SEQ ID NO: 1991958 - RNA, 19 nt, Artificial Sequence
  Description of Artificial Sequence: Synthetic oligonucleotide
gagagccuaguuuagauga

SEQ ID NO: 1991959 - RNA, 19 nt, Artificial Sequence
  Description of Artificial Sequence: Synthetic oligonucleotide
ucaccuucucuacugagug

SEQ ID NO: 1991960 - RNA, 19 nt, Artificial Sequence
  Description of Artificial Sequence: Synthetic oligonucleotide
gaagaaagcuugauuggcg

SEQ ID NO: 1991961 - RNA, 19 nt, Artificial Sequence
  Description of Artificial Sequence: Synthetic oligonucleotide
agugcaucgaaguguacag

SEQ ID NO: 1991962 - RNA, 19 nt, Artificial Sequence
  Description of Artificial Sequence: Synthetic oligonucleotide
caucacguggcuauauugg

SEQ ID NO: 1991963 - RNA, 19 nt, Artificial Sequence
  Description of Artificial Sequence: Synthetic oligonucleotide
agcuugauuggcguuaagc

SEQ ID NO: 1991964 - RNA, 19 nt, Artificial Sequence
  Description of Artificial Sequence: Synthetic oligonucleotide
uguuccgaaugucuccugg

SEQ ID NO: 1991965 - RNA, 19 nt, Artificial Sequence
  Description of Artificial Sequence: Synthetic oligonucleotide
uucucuacugaguggaagc

SEQ ID NO: 1991966 - RNA, 19 nt, Artificial Sequence
  Description of Artificial Sequence: Synthetic oligonucleotide
uuggcguuaagcuguaagc

SEQ ID NO: 1991967 - RNA, 19 nt, Artificial Sequence
  Description of Artificial Sequence: Synthetic oligonucleotide
ugcccauucaccaggagga

SEQ ID NO: 1991968 - RNA, 19 nt, Artificial Sequence
  Description of Artificial Sequence: Synthetic oligonucleotide
auaaucuugauuagcucac

SEQ ID NO: 1991969 - RNA, 19 nt, Artificial Sequence
  Description of Artificial Sequence: Synthetic oligonucleotide
ucuaaaguuugaacacaag

SEQ ID NO: 1991970 - RNA, 19 nt, Artificial Sequence
  Description of Artificial Sequence: Synthetic oligonucleotide
cuaguuuagaugaguuucc

SEQ ID NO: 1991971 - RNA, 19 nt, Artificial Sequence
  Description of Artificial Sequence: Synthetic oligonucleotide
auuggcguuaagcuguaag

SEQ ID NO: 1991972 - RNA, 19 nt, Artificial Sequence
  Description of Artificial Sequence: Synthetic oligonucleotide
cucauguucacaugaucgg

SEQ ID NO: 1991973 - RNA, 19 nt, Artificial Sequence
  Description of Artificial Sequence: Synthetic oligonucleotide
uuguaucgcucuauuauca

SEQ ID NO: 1991974 - RNA, 19 nt, Artificial Sequence
  Description of Artificial Sequence: Synthetic oligonucleotide
ugagauucucagaucaccu

SEQ ID NO: 1991975 - RNA, 19 nt, Artificial Sequence
  Description of Artificial Sequence: Synthetic oligonucleotide
uucuaauaaucuugauuag

SEQ ID NO: 1991976 - RNA, 19 nt, Artificial Sequence
  Description of Artificial Sequence: Synthetic oligonucleotide
uugcaugaagcucaguuuc

SEQ ID NO: 1991977 - RNA, 19 nt, Artificial Sequence
  Description of Artificial Sequence: Synthetic oligonucleotide
aagggcuuaacaaacauua

SEQ ID NO: 1991978 - RNA, 19 nt, Artificial Sequence
  Description of Artificial Sequence: Synthetic oligonucleotide
uuuguucgaagcugcggcg

SEQ ID NO: 1991979 - RNA, 19 nt, Artificial Sequence
  Description of Artificial Sequence: Synthetic oligonucleotide
auugacguacacaaccuac

SEQ ID NO: 1991980 - RNA, 19 nt, Artificial Sequence
  Description of Artificial Sequence: Synthetic oligonucleotide
aaugucaaaauaacuuggu

SEQ ID NO: 1991981 - RNA, 19 nt, Artificial Sequence
  Description of Artificial Sequence: Synthetic oligonucleotide
uucuaaaguuugaacacaa

SEQ ID NO: 1991982 - RNA, 19 nt, Artificial Sequence
  Description of Artificial Sequence: Synthetic oligonucleotide
acgcucaccaugcugugcc

SEQ ID NO: 1991983 - RNA, 19 nt, Artificial Sequence
  Description of Artificial Sequence: Synthetic oligonucleotide
ucucagaucaccuucucua

SEQ ID NO: 1991984 - RNA, 19 nt, Artificial Sequence
  Description of Artificial Sequence: Synthetic oligonucleotide
auuguucuagucuuacaca

SEQ ID NO: 1991985 - RNA, 19 nt, Artificial Sequence
  Description of Artificial Sequence: Synthetic oligonucleotide
ucugaucugugaaugguaa

SEQ ID NO: 1991986 - RNA, 19 nt, Artificial Sequence
  Description of Artificial Sequence: Synthetic oligonucleotide
uggcguuaagcuguaagcg

SEQ ID NO: 1991987 - RNA, 19 nt, Artificial Sequence
  Description of Artificial Sequence: Synthetic oligonucleotide
cuuucucacucucauacac

SEQ ID NO: 1991988 - RNA, 19 nt, Artificial Sequence
  Description of Artificial Sequence: Synthetic oligonucleotide
aagagagccuaguuuagau

SEQ ID NO: 1991989 - RNA, 19 nt, Artificial Sequence
  Description of Artificial Sequence: Synthetic oligonucleotide
cugacaaacaguuccuaac

SEQ ID NO: 1991990 - RNA, 19 nt, Artificial Sequence
  Description of Artificial Sequence: Synthetic oligonucleotide
auuaucacugggauuuugg

SEQ ID NO: 1991991 - RNA, 19 nt, Artificial Sequence
  Description of Artificial Sequence: Synthetic oligonucleotide
ugcaucgaaguguacaggu

SEQ ID NO: 1991992 - RNA, 19 nt, Artificial Sequence
  Description of Artificial Sequence: Synthetic oligonucleotide
uauauucugaucugugaau

SEQ ID NO: 1991993 - RNA, 19 nt, Artificial Sequence
  Description of Artificial Sequence: Synthetic oligonucleotide
uuuuccuugauaagggcuu

SEQ ID NO: 1991994 - RNA, 19 nt, Artificial Sequence
  Description of Artificial Sequence: Synthetic oligonucleotide
aaggccgccccucugagca

SEQ ID NO: 1991995 - RNA, 19 nt, Artificial Sequence
  Description of Artificial Sequence: Synthetic oligonucleotide
uuaaaucccuacugaggag

SEQ ID NO: 1991996 - RNA, 19 nt, Artificial Sequence
  Description of Artificial Sequence: Synthetic oligonucleotide
cuauaaaugaaggccgccc

SEQ ID NO: 1991997 - RNA, 19 nt, Artificial Sequence
  Description of Artificial Sequence: Synthetic oligonucleotide
auauucugaucugugaaug

SEQ ID NO: 1991998 - RNA, 19 nt, Artificial Sequence
  Description of Artificial Sequence: Synthetic oligonucleotide
uuggcuucccuccaugaca

SEQ ID NO: 1991999 - RNA, 19 nt, Artificial Sequence
  Description of Artificial Sequence: Synthetic oligonucleotide
ugaucggguacaaggaacu

SEQ ID NO: 1992000 - RNA, 19 nt, Artificial Sequence
  Description of Artificial Sequence: Synthetic oligonucleotide
uaauaaucuugauuagcuc

SEQ ID NO: 1992001 - RNA, 19 nt, Artificial Sequence
  Description of Artificial Sequence: Synthetic oligonucleotide
ggcuuaacaaacauuaggc

SEQ ID NO: 1992002 - RNA, 19 nt, Artificial Sequence
  Description of Artificial Sequence: Synthetic oligonucleotide
gaagcugcggcgcugcuug

SEQ ID NO: 1992003 - RNA, 19 nt, Artificial Sequence
  Description of Artificial Sequence: Synthetic oligonucleotide
gguguucuauaaaugaagg

SEQ ID NO: 1992004 - RNA, 19 nt, Artificial Sequence
  Description of Artificial Sequence: Synthetic oligonucleotide
agucuuacacagccaguac

SEQ ID NO: 1992005 - RNA, 19 nt, Artificial Sequence
  Description of Artificial Sequence: Synthetic oligonucleotide
uguucuagucuuacacagc

SEQ ID NO: 1992006 - RNA, 19 nt, Artificial Sequence
  Description of Artificial Sequence: Synthetic oligonucleotide
agcugaaugcgcuugcaug

SEQ ID NO: 1992007 - RNA, 19 nt, Artificial Sequence
  Description of Artificial Sequence: Synthetic oligonucleotide
uacacagccaguacuguuc

SEQ ID NO: 1992008 - RNA, 19 nt, Artificial Sequence
  Description of Artificial Sequence: Synthetic oligonucleotide
aucuugauuagcucacuca

SEQ ID NO: 1992009 - RNA, 19 nt, Artificial Sequence
  Description of Artificial Sequence: Synthetic oligonucleotide
uucucggacggcauggcgc

SEQ ID NO: 1992010 - RNA, 19 nt, Artificial Sequence
  Description of Artificial Sequence: Synthetic oligonucleotide
cuuauugaucgcaccguag

SEQ ID NO: 1992011 - RNA, 19 nt, Artificial Sequence
  Description of Artificial Sequence: Synthetic oligonucleotide
aacacaagagagccuaguu

SEQ ID NO: 1992012 - RNA, 19 nt, Artificial Sequence
  Description of Artificial Sequence: Synthetic oligonucleotide
uguaagcgccuucuaauaa

SEQ ID NO: 1992013 - RNA, 19 nt, Artificial Sequence
  Description of Artificial Sequence: Synthetic oligonucleotide
guguucuauaaaugaaggc

SEQ ID NO: 1992014 - RNA, 19 nt, Artificial Sequence
  Description of Artificial Sequence: Synthetic oligonucleotide
uguacagguguucuauaaa

SEQ ID NO: 1992015 - RNA, 19 nt, Artificial Sequence
  Description of Artificial Sequence: Synthetic oligonucleotide
ucuuuguucgaagcugcgg

SEQ ID NO: 1992016 - RNA, 19 nt, Artificial Sequence
  Description of Artificial Sequence: Synthetic oligonucleotide
cauuuuaaaucccuacuga

SEQ ID NO: 1992017 - RNA, 19 nt, Artificial Sequence
  Description of Artificial Sequence: Synthetic oligonucleotide
uuaucacugggauuuuggu

SEQ ID NO: 1992018 - RNA, 19 nt, Artificial Sequence
  Description of Artificial Sequence: Synthetic oligonucleotide
aacaguuccuaacacccua

SEQ ID NO: 1992019 - RNA, 19 nt, Artificial Sequence
  Description of Artificial Sequence: Synthetic oligonucleotide
acauuaggcauuguucuag

SEQ ID NO: 1992020 - RNA, 19 nt, Artificial Sequence
  Description of Artificial Sequence: Synthetic oligonucleotide
aaugguaagcugaccagca

SEQ ID NO: 1992021 - RNA, 19 nt, Artificial Sequence
  Description of Artificial Sequence: Synthetic oligonucleotide
uugaacacaagagagccua

SEQ ID NO: 1992022 - RNA, 19 nt, Artificial Sequence
  Description of Artificial Sequence: Synthetic oligonucleotide
uacucuuuguucgaagcug

SEQ ID NO: 1992023 - RNA, 19 nt, Artificial Sequence
  Description of Artificial Sequence: Synthetic oligonucleotide
accuacacaagacagggua

SEQ ID NO: 1992024 - RNA, 19 nt, Artificial Sequence
  Description of Artificial Sequence: Synthetic oligonucleotide
auuaggcauuguucuaguc

SEQ ID NO: 1992025 - RNA, 19 nt, Artificial Sequence
  Description of Artificial Sequence: Synthetic oligonucleotide
uggcuucccuccaugacag

SEQ ID NO: 1992026 - RNA, 19 nt, Artificial Sequence
  Description of Artificial Sequence: Synthetic oligonucleotide
aacuuaagaugcaaaguau

SEQ ID NO: 1992027 - RNA, 19 nt, Artificial Sequence
  Description of Artificial Sequence: Synthetic oligonucleotide
ugacguacacaaccuacac

SEQ ID NO: 1992028 - RNA, 19 nt, Artificial Sequence
  Description of Artificial Sequence: Synthetic oligonucleotide
gaaugcgcuugcaugaagc

SEQ ID NO: 1992029 - RNA, 19 nt, Artificial Sequence
  Description of Artificial Sequence: Synthetic oligonucleotide
auaagggcuuaacaaacau

SEQ ID NO: 1992030 - RNA, 19 nt, Artificial Sequence
  Description of Artificial Sequence: Synthetic oligonucleotide
uuaagaugcaaaguauuuu

SEQ ID NO: 1992031 - RNA, 19 nt, Artificial Sequence
  Description of Artificial Sequence: Synthetic oligonucleotide
auacacuucagagaugggu

SEQ ID NO: 1992032 - RNA, 19 nt, Artificial Sequence
  Description of Artificial Sequence: Synthetic oligonucleotide
ucucggacggcauggcgcg

SEQ ID NO: 1992033 - RNA, 19 nt, Artificial Sequence
  Description of Artificial Sequence: Synthetic oligonucleotide
ucuauaaaugaaggccgcc

SEQ ID NO: 1992034 - RNA, 19 nt, Artificial Sequence
  Description of Artificial Sequence: Synthetic oligonucleotide
uacuguuccgaaugucucc

SEQ ID NO: 1992035 - RNA, 19 nt, Artificial Sequence
  Description of Artificial Sequence: Synthetic oligonucleotide
ucgcucuauuaucacuggg

SEQ ID NO: 1992036 - RNA, 19 nt, Artificial Sequence
  Description of Artificial Sequence: Synthetic oligonucleotide
guaguuagauagaaugaug

SEQ ID NO: 1992037 - RNA, 19 nt, Artificial Sequence
  Description of Artificial Sequence: Synthetic oligonucleotide
agagagccuaguuuagaug

SEQ ID NO: 1992038 - RNA, 19 nt, Artificial Sequence
  Description of Artificial Sequence: Synthetic oligonucleotide
augaucggguacaaggaac

SEQ ID NO: 1992039 - RNA, 19 nt, Artificial Sequence
  Description of Artificial Sequence: Synthetic oligonucleotide
uaagcgccuucuaauaauc

SEQ ID NO: 1992040 - RNA, 19 nt, Artificial Sequence
  Description of Artificial Sequence: Synthetic oligonucleotide
ugguaagcugaccagcauc

SEQ ID NO: 1992041 - RNA, 19 nt, Artificial Sequence
  Description of Artificial Sequence: Synthetic oligonucleotide
guagacaguugcaugcagg

SEQ ID NO: 1992042 - RNA, 19 nt, Artificial Sequence
  Description of Artificial Sequence: Synthetic oligonucleotide
uagugcaucgaaguguaca

SEQ ID NO: 1992043 - RNA, 19 nt, Artificial Sequence
  Description of Artificial Sequence: Synthetic oligonucleotide
uaagcuguaagcgccuucu

SEQ ID NO: 1992044 - RNA, 19 nt, Artificial Sequence
  Description of Artificial Sequence: Synthetic oligonucleotide
cuugauuagcucacucaug

SEQ ID NO: 1992045 - RNA, 19 nt, Artificial Sequence
  Description of Artificial Sequence: Synthetic oligonucleotide
auaaaugaaggccgccccu

SEQ ID NO: 1992046 - RNA, 19 nt, Artificial Sequence
  Description of Artificial Sequence: Synthetic oligonucleotide
ucuucuacucuuuguucga

SEQ ID NO: 1992047 - RNA, 19 nt, Artificial Sequence
  Description of Artificial Sequence: Synthetic oligonucleotide
uguaucgcucuauuaucac

SEQ ID NO: 1992048 - RNA, 19 nt, Artificial Sequence
  Description of Artificial Sequence: Synthetic oligonucleotide
aacacccuaggugggcgcc

SEQ ID NO: 1992049 - RNA, 19 nt, Artificial Sequence
  Description of Artificial Sequence: Synthetic oligonucleotide
cugagauucucagaucacc

SEQ ID NO: 1992050 - RNA, 19 nt, Artificial Sequence
  Description of Artificial Sequence: Synthetic oligonucleotide
aacauuaggcauuguucua

SEQ ID NO: 1992051 - RNA, 19 nt, Artificial Sequence
  Description of Artificial Sequence: Synthetic oligonucleotide
aguacuguuccgaaugucu

SEQ ID NO: 1992052 - RNA, 19 nt, Artificial Sequence
  Description of Artificial Sequence: Synthetic oligonucleotide
aguuuccaagcugaaugcg

SEQ ID NO: 1992053 - RNA, 19 nt, Artificial Sequence
  Description of Artificial Sequence: Synthetic oligonucleotide
ugaaugcgcuugcaugaag

SEQ ID NO: 1992054 - RNA, 19 nt, Artificial Sequence
  Description of Artificial Sequence: Synthetic oligonucleotide
uuggucuguuuuauuggca

SEQ ID NO: 1992055 - RNA, 19 nt, Artificial Sequence
  Description of Artificial Sequence: Synthetic oligonucleotide
ucugagauucucagaucac

SEQ ID NO: 1992056 - RNA, 19 nt, Artificial Sequence
  Description of Artificial Sequence: Synthetic oligonucleotide
aucgcucuauuaucacugg

SEQ ID NO: 1992057 - RNA, 19 nt, Artificial Sequence
  Description of Artificial Sequence: Synthetic oligonucleotide
aguuccuaacacccuaggu

SEQ ID NO: 1992058 - RNA, 19 nt, Artificial Sequence
  Description of Artificial Sequence: Synthetic oligonucleotide
guuccgaaugucuccuggg

SEQ ID NO: 1992059 - RNA, 19 nt, Artificial Sequence
  Description of Artificial Sequence: Synthetic oligonucleotide
ugaacacaagagagccuag

SEQ ID NO: 1992060 - RNA, 19 nt, Artificial Sequence
  Description of Artificial Sequence: Synthetic oligonucleotide
aguuagauagaaugaugua

SEQ ID NO: 1992061 - RNA, 19 nt, Artificial Sequence
  Description of Artificial Sequence: Synthetic oligonucleotide
aggaauccuuauugaucgc

SEQ ID NO: 1992062 - RNA, 19 nt, Artificial Sequence
  Description of Artificial Sequence: Synthetic oligonucleotide
gagucgaaggcucuugcuc

SEQ ID NO: 1992063 - RNA, 19 nt, Artificial Sequence
  Description of Artificial Sequence: Synthetic oligonucleotide
uguucacaugaucggguac

SEQ ID NO: 1992064 - RNA, 19 nt, Artificial Sequence
  Description of Artificial Sequence: Synthetic oligonucleotide
uugaucgcaccguaguuau

SEQ ID NO: 1992065 - RNA, 19 nt, Artificial Sequence
  Description of Artificial Sequence: Synthetic oligonucleotide
uccuaacacccuagguggg

SEQ ID NO: 1992066 - RNA, 19 nt, Artificial Sequence
  Description of Artificial Sequence: Synthetic oligonucleotide
uuccgaaugucuccuggga

SEQ ID NO: 1992067 - RNA, 19 nt, Artificial Sequence
  Description of Artificial Sequence: Synthetic oligonucleotide
ucugcugguaacaucccuu

SEQ ID NO: 1992068 - RNA, 19 nt, Artificial Sequence
  Description of Artificial Sequence: Synthetic oligonucleotide
agauagaaugauguaaaua

SEQ ID NO: 1992069 - RNA, 19 nt, Artificial Sequence
  Description of Artificial Sequence: Synthetic oligonucleotide
cacaagagagccuaguuua

SEQ ID NO: 1992070 - RNA, 19 nt, Artificial Sequence
  Description of Artificial Sequence: Synthetic oligonucleotide
aaccagggacauauugacg

SEQ ID NO: 1992071 - RNA, 19 nt, Artificial Sequence
  Description of Artificial Sequence: Synthetic oligonucleotide
agcucacucauguucacau

SEQ ID NO: 1992072 - RNA, 19 nt, Artificial Sequence
  Description of Artificial Sequence: Synthetic oligonucleotide
gcauacaccauguacagaa

SEQ ID NO: 1992073 - RNA, 19 nt, Artificial Sequence
  Description of Artificial Sequence: Synthetic oligonucleotide
agccggacaucuucuacuc

SEQ ID NO: 1992074 - RNA, 19 nt, Artificial Sequence
  Description of Artificial Sequence: Synthetic oligonucleotide
acacaagagagccuaguuu

SEQ ID NO: 1992075 - RNA, 19 nt, Artificial Sequence
  Description of Artificial Sequence: Synthetic oligonucleotide
uaagggcuuaacaaacauu

SEQ ID NO: 1992076 - RNA, 19 nt, Artificial Sequence
  Description of Artificial Sequence: Synthetic oligonucleotide
ugggauuuugguggggugc

SEQ ID NO: 1992077 - RNA, 19 nt, Artificial Sequence
  Description of Artificial Sequence: Synthetic oligonucleotide
ugcaugaagcucaguuucu

SEQ ID NO: 1992078 - RNA, 19 nt, Artificial Sequence
  Description of Artificial Sequence: Synthetic oligonucleotide
uauugacguacacaaccua

SEQ ID NO: 1992079 - RNA, 19 nt, Artificial Sequence
  Description of Artificial Sequence: Synthetic oligonucleotide
ucacugggauuuugguggg

SEQ ID NO: 1992080 - RNA, 19 nt, Artificial Sequence
  Description of Artificial Sequence: Synthetic oligonucleotide
uauugaucgcaccguaguu

SEQ ID NO: 1992081 - RNA, 19 nt, Artificial Sequence
  Description of Artificial Sequence: Synthetic oligonucleotide
gauaagggcuuaacaaaca

SEQ ID NO: 1992082 - RNA, 19 nt, Artificial Sequence
  Description of Artificial Sequence: Synthetic oligonucleotide
auauuggcuucccuccaug

SEQ ID NO: 1992083 - RNA, 19 nt, Artificial Sequence
  Description of Artificial Sequence: Synthetic oligonucleotide
ugcuucucacccuuguauc

SEQ ID NO: 1992084 - RNA, 19 nt, Artificial Sequence
  Description of Artificial Sequence: Synthetic oligonucleotide
ggaggcauacaccauguac

SEQ ID NO: 1992085 - RNA, 19 nt, Artificial Sequence
  Description of Artificial Sequence: Synthetic oligonucleotide
auauugacguacacaaccu

SEQ ID NO: 1992086 - RNA, 19 nt, Artificial Sequence
  Description of Artificial Sequence: Synthetic oligonucleotide
auucugaucugugaauggu

SEQ ID NO: 1992087 - RNA, 19 nt, Artificial Sequence
  Description of Artificial Sequence: Synthetic oligonucleotide
aguuuagaugaguuuccaa

SEQ ID NO: 1992088 - RNA, 19 nt, Artificial Sequence
  Description of Artificial Sequence: Synthetic oligonucleotide
ccaggaaaagaauguaccc

SEQ ID NO: 1992089 - RNA, 19 nt, Artificial Sequence
  Description of Artificial Sequence: Synthetic oligonucleotide
aaguagacaguugcaugca

SEQ ID NO: 1992090 - RNA, 19 nt, Artificial Sequence
  Description of Artificial Sequence: Synthetic oligonucleotide
uucuagucuuacacagcca

SEQ ID NO: 1992091 - RNA, 19 nt, Artificial Sequence
  Description of Artificial Sequence: Synthetic oligonucleotide
ucccggaugagccggacau

SEQ ID NO: 1992092 - RNA, 19 nt, Artificial Sequence
  Description of Artificial Sequence: Synthetic oligonucleotide
ccuaguuuagaugaguuuc

SEQ ID NO: 1992093 - RNA, 19 nt, Artificial Sequence
  Description of Artificial Sequence: Synthetic oligonucleotide
acauauugacguacacaac

SEQ ID NO: 1992094 - RNA, 19 nt, Artificial Sequence
  Description of Artificial Sequence: Synthetic oligonucleotide
aagcccuuuuggagaaggc

SEQ ID NO: 1992095 - RNA, 19 nt, Artificial Sequence
  Description of Artificial Sequence: Synthetic oligonucleotide
acacuucagagaugggugu

SEQ ID NO: 1992096 - RNA, 19 nt, Artificial Sequence
  Description of Artificial Sequence: Synthetic oligonucleotide
ugggaggcauacaccaugu

SEQ ID NO: 1992097 - RNA, 19 nt, Artificial Sequence
  Description of Artificial Sequence: Synthetic oligonucleotide
uccaagcugaaugcgcuug

SEQ ID NO: 1992098 - RNA, 19 nt, Artificial Sequence
  Description of Artificial Sequence: Synthetic oligonucleotide
cuaacacccuaggugggcg

SEQ ID NO: 1992099 - RNA, 19 nt, Artificial Sequence
  Description of Artificial Sequence: Synthetic oligonucleotide
cucuuuguucgaagcugcg

SEQ ID NO: 1992100 - RNA, 19 nt, Artificial Sequence
  Description of Artificial Sequence: Synthetic oligonucleotide
gaucgcaccguaguuauaa

SEQ ID NO: 1992101 - RNA, 19 nt, Artificial Sequence
  Description of Artificial Sequence: Synthetic oligonucleotide
gccaguacuguuccgaaug

SEQ ID NO: 1992102 - RNA, 19 nt, Artificial Sequence
  Description of Artificial Sequence: Synthetic oligonucleotide
acuuaagaugcaaaguauu

SEQ ID NO: 1992103 - RNA, 19 nt, Artificial Sequence
  Description of Artificial Sequence: Synthetic oligonucleotide
auagaaugauguaaauaaa

SEQ ID NO: 1992104 - RNA, 19 nt, Artificial Sequence
  Description of Artificial Sequence: Synthetic oligonucleotide
gcuuaacaaacauuaggca

SEQ ID NO: 1992105 - RNA, 19 nt, Artificial Sequence
  Description of Artificial Sequence: Synthetic oligonucleotide
ggcguuaagcuguaagcgc

SEQ ID NO: 1992106 - RNA, 19 nt, Artificial Sequence
  Description of Artificial Sequence: Synthetic oligonucleotide
uggcaacuuaagaugcaaa

SEQ ID NO: 1992107 - RNA, 19 nt, Artificial Sequence
  Description of Artificial Sequence: Synthetic oligonucleotide
gauggguguggacacgcuc

SEQ ID NO: 1992108 - RNA, 19 nt, Artificial Sequence
  Description of Artificial Sequence: Synthetic oligonucleotide
uugcaugcagggacgggga

SEQ ID NO: 1992109 - RNA, 19 nt, Artificial Sequence
  Description of Artificial Sequence: Synthetic oligonucleotide
uccuuauugaucgcaccgu

SEQ ID NO: 1992110 - RNA, 19 nt, Artificial Sequence
  Description of Artificial Sequence: Synthetic oligonucleotide
uguucgaagcugcggcgcu

SEQ ID NO: 1992111 - RNA, 19 nt, Artificial Sequence
  Description of Artificial Sequence: Synthetic oligonucleotide
uaaaugaaggccgccccuc

SEQ ID NO: 1992112 - RNA, 19 nt, Artificial Sequence
  Description of Artificial Sequence: Synthetic oligonucleotide
ucgcaccguaguuauaaaa

SEQ ID NO: 1992113 - RNA, 19 nt, Artificial Sequence
  Description of Artificial Sequence: Synthetic oligonucleotide
aucggguacaaggaacuug

SEQ ID NO: 1992114 - RNA, 19 nt, Artificial Sequence
  Description of Artificial Sequence: Synthetic oligonucleotide
agcuguaagcgccuucuaa

SEQ ID NO: 1992115 - RNA, 19 nt, Artificial Sequence
  Description of Artificial Sequence: Synthetic oligonucleotide
aggagcuugggcaucacgu

SEQ ID NO: 1992116 - RNA, 19 nt, Artificial Sequence
  Description of Artificial Sequence: Synthetic oligonucleotide
uuguucgaagcugcggcgc

SEQ ID NO: 1992117 - RNA, 19 nt, Artificial Sequence
  Description of Artificial Sequence: Synthetic oligonucleotide
acaugaucggguacaagga

SEQ ID NO: 1992118 - RNA, 19 nt, Artificial Sequence
  Description of Artificial Sequence: Synthetic oligonucleotide
cuucuaaaguuugaacaca

SEQ ID NO: 1992119 - RNA, 19 nt, Artificial Sequence
  Description of Artificial Sequence: Synthetic oligonucleotide
cuucucacccuuguaucgc

SEQ ID NO: 1992120 - RNA, 19 nt, Artificial Sequence
  Description of Artificial Sequence: Synthetic oligonucleotide
aaagcuugauuggcguuaa

SEQ ID NO: 1992121 - RNA, 19 nt, Artificial Sequence
  Description of Artificial Sequence: Synthetic oligonucleotide
agaucaccuucucuacuga

SEQ ID NO: 1992122 - RNA, 19 nt, Artificial Sequence
  Description of Artificial Sequence: Synthetic oligonucleotide
gaaagcuugauuggcguua

SEQ ID NO: 1992123 - RNA, 19 nt, Artificial Sequence
  Description of Artificial Sequence: Synthetic oligonucleotide
auugaucgcaccguaguua

SEQ ID NO: 1992124 - RNA, 19 nt, Artificial Sequence
  Description of Artificial Sequence: Synthetic oligonucleotide
ugcaugcagggacggggag

SEQ ID NO: 1992125 - RNA, 19 nt, Artificial Sequence
  Description of Artificial Sequence: Synthetic oligonucleotide
cuuaagaugcaaaguauuu

SEQ ID NO: 1992126 - RNA, 19 nt, Artificial Sequence
  Description of Artificial Sequence: Synthetic oligonucleotide
accauguacagaaauccau

SEQ ID NO: 1992127 - RNA, 19 nt, Artificial Sequence
  Description of Artificial Sequence: Synthetic oligonucleotide
gcaucacguggcuauauug

SEQ ID NO: 1992128 - RNA, 19 nt, Artificial Sequence
  Description of Artificial Sequence: Synthetic oligonucleotide
cuucucggacggcauggcg

SEQ ID NO: 1992129 - RNA, 19 nt, Artificial Sequence
  Description of Artificial Sequence: Synthetic oligonucleotide
aagcaaguagacaguugca

SEQ ID NO: 1992130 - RNA, 19 nt, Artificial Sequence
  Description of Artificial Sequence: Synthetic oligonucleotide
agcgccuucuaauaaucuu

SEQ ID NO: 1992131 - RNA, 19 nt, Artificial Sequence
  Description of Artificial Sequence: Synthetic oligonucleotide
guacagguguucuauaaau

SEQ ID NO: 1992132 - RNA, 19 nt, Artificial Sequence
  Description of Artificial Sequence: Synthetic oligonucleotide
aguuucuugcugacaaaca

SEQ ID NO: 1992133 - RNA, 19 nt, Artificial Sequence
  Description of Artificial Sequence: Synthetic oligonucleotide
uucucacccuuguaucgcu

SEQ ID NO: 1992134 - RNA, 19 nt, Artificial Sequence
  Description of Artificial Sequence: Synthetic oligonucleotide
gcugaaugcgcuugcauga

SEQ ID NO: 1992135 - RNA, 19 nt, Artificial Sequence
  Description of Artificial Sequence: Synthetic oligonucleotide
caccuucucuacugagugg

SEQ ID NO: 1992136 - RNA, 19 nt, Artificial Sequence
  Description of Artificial Sequence: Synthetic oligonucleotide
acaggguaguuagauagaa

SEQ ID NO: 1992137 - RNA, 19 nt, Artificial Sequence
  Description of Artificial Sequence: Synthetic oligonucleotide
cacucauguucacaugauc

SEQ ID NO: 1992138 - RNA, 19 nt, Artificial Sequence
  Description of Artificial Sequence: Synthetic oligonucleotide
uucagagauggguguggac

SEQ ID NO: 1992139 - RNA, 19 nt, Artificial Sequence
  Description of Artificial Sequence: Synthetic oligonucleotide
uccuugauaagggcuuaac

SEQ ID NO: 1992140 - RNA, 19 nt, Artificial Sequence
  Description of Artificial Sequence: Synthetic oligonucleotide
augcgcuugcaugaagcuc

SEQ ID NO: 1992141 - RNA, 19 nt, Artificial Sequence
  Description of Artificial Sequence: Synthetic oligonucleotide
ggcgccuauauucugaucu

SEQ ID NO: 1992142 - RNA, 19 nt, Artificial Sequence
  Description of Artificial Sequence: Synthetic oligonucleotide
acugggauuuugguggggu

SEQ ID NO: 1992143 - RNA, 19 nt, Artificial Sequence
  Description of Artificial Sequence: Synthetic oligonucleotide
ccauguacagaaauccauc

SEQ ID NO: 1992144 - RNA, 19 nt, Artificial Sequence
  Description of Artificial Sequence: Synthetic oligonucleotide
uaacacccuaggugggcgc

SEQ ID NO: 1992145 - RNA, 19 nt, Artificial Sequence
  Description of Artificial Sequence: Synthetic oligonucleotide
acaguuccuaacacccuag

SEQ ID NO: 1992146 - RNA, 19 nt, Artificial Sequence
  Description of Artificial Sequence: Synthetic oligonucleotide
uacaaggaacuugguuuug

SEQ ID NO: 1992147 - RNA, 19 nt, Artificial Sequence
  Description of Artificial Sequence: Synthetic oligonucleotide
agcccuuuuggagaaggca

SEQ ID NO: 1992148 - RNA, 19 nt, Artificial Sequence
  Description of Artificial Sequence: Synthetic oligonucleotide
gcuugauuggcguuaagcu

SEQ ID NO: 1992149 - RNA, 19 nt, Artificial Sequence
  Description of Artificial Sequence: Synthetic oligonucleotide
gucuuacacagccaguacu

SEQ ID NO: 1992150 - RNA, 19 nt, Artificial Sequence
  Description of Artificial Sequence: Synthetic oligonucleotide
ugcggcgcugcuugaaggu

SEQ ID NO: 1992151 - RNA, 19 nt, Artificial Sequence
  Description of Artificial Sequence: Synthetic oligonucleotide
auggguguggacacgcuca

SEQ ID NO: 1992152 - RNA, 19 nt, Artificial Sequence
  Description of Artificial Sequence: Synthetic oligonucleotide
agggcuuaacaaacauuag

SEQ ID NO: 1992153 - RNA, 19 nt, Artificial Sequence
  Description of Artificial Sequence: Synthetic oligonucleotide
caucgaaguguacaggugu

SEQ ID NO: 1992154 - RNA, 19 nt, Artificial Sequence
  Description of Artificial Sequence: Synthetic oligonucleotide
uuagugcaucgaaguguac

SEQ ID NO: 1992155 - RNA, 19 nt, Artificial Sequence
  Description of Artificial Sequence: Synthetic oligonucleotide
cagggacauauugacguac

SEQ ID NO: 1992156 - RNA, 19 nt, Artificial Sequence
  Description of Artificial Sequence: Synthetic oligonucleotide
aagcgccuucuaauaaucu

SEQ ID NO: 1992157 - RNA, 19 nt, Artificial Sequence
  Description of Artificial Sequence: Synthetic oligonucleotide
uuggagaaggcagcagauc

SEQ ID NO: 1992158 - RNA, 19 nt, Artificial Sequence
  Description of Artificial Sequence: Synthetic oligonucleotide
caccauguacagaaaucca

SEQ ID NO: 1992159 - RNA, 19 nt, Artificial Sequence
  Description of Artificial Sequence: Synthetic oligonucleotide
gugcaucgaaguguacagg

SEQ ID NO: 1992160 - RNA, 19 nt, Artificial Sequence
  Description of Artificial Sequence: Synthetic oligonucleotide
gucgaaggcucuugcuccc

SEQ ID NO: 1992161 - RNA, 19 nt, Artificial Sequence
  Description of Artificial Sequence: Synthetic oligonucleotide
guacuguuccgaaugucuc

SEQ ID NO: 1992162 - RNA, 19 nt, Artificial Sequence
  Description of Artificial Sequence: Synthetic oligonucleotide
gcccuuuuggagaaggcag

SEQ ID NO: 1992163 - RNA, 19 nt, Artificial Sequence
  Description of Artificial Sequence: Synthetic oligonucleotide
ugauuagcucacucauguu

SEQ ID NO: 1992164 - RNA, 19 nt, Artificial Sequence
  Description of Artificial Sequence: Synthetic oligonucleotide
gcguuaagcuguaagcgcc

SEQ ID NO: 1992165 - RNA, 19 nt, Artificial Sequence
  Description of Artificial Sequence: Synthetic oligonucleotide
aguugcaugcagggacggg

SEQ ID NO: 1992166 - RNA, 19 nt, Artificial Sequence
  Description of Artificial Sequence: Synthetic oligonucleotide
caugaucggguacaaggaa

SEQ ID NO: 1992167 - RNA, 19 nt, Artificial Sequence
  Description of Artificial Sequence: Synthetic oligonucleotide
ucgaaguguacagguguuc

SEQ ID NO: 1992168 - RNA, 19 nt, Artificial Sequence
  Description of Artificial Sequence: Synthetic oligonucleotide
ggacauauugacguacaca

SEQ ID NO: 1992169 - RNA, 19 nt, Artificial Sequence
  Description of Artificial Sequence: Synthetic oligonucleotide
agagccuaguuuagaugag

SEQ ID NO: 1992170 - RNA, 19 nt, Artificial Sequence
  Description of Artificial Sequence: Synthetic oligonucleotide
uggcuauauuggcuucccu

SEQ ID NO: 1992171 - RNA, 19 nt, Artificial Sequence
  Description of Artificial Sequence: Synthetic oligonucleotide
cagcagaucccaggaaaag

SEQ ID NO: 1992172 - RNA, 19 nt, Artificial Sequence
  Description of Artificial Sequence: Synthetic oligonucleotide
guaucgcucuauuaucacu

SEQ ID NO: 1992173 - RNA, 19 nt, Artificial Sequence
  Description of Artificial Sequence: Synthetic oligonucleotide
ucggacggcauggcgcggg

SEQ ID NO: 1992174 - RNA, 19 nt, Artificial Sequence
  Description of Artificial Sequence: Synthetic oligonucleotide
ucgaaggcucuugcucccg

SEQ ID NO: 1992175 - RNA, 19 nt, Artificial Sequence
  Description of Artificial Sequence: Synthetic oligonucleotide
gacaggguaguuagauaga

SEQ ID NO: 1992176 - RNA, 19 nt, Artificial Sequence
  Description of Artificial Sequence: Synthetic oligonucleotide
ggaauccuuauugaucgca

SEQ ID NO: 1992177 - RNA, 19 nt, Artificial Sequence
  Description of Artificial Sequence: Synthetic oligonucleotide
gagccggacaucuucuacu

SEQ ID NO: 1992178 - RNA, 19 nt, Artificial Sequence
  Description of Artificial Sequence: Synthetic oligonucleotide
acacaagacaggguaguua

SEQ ID NO: 1992179 - RNA, 19 nt, Artificial Sequence
  Description of Artificial Sequence: Synthetic oligonucleotide
gcgccuucuaauaaucuug

SEQ ID NO: 1992180 - RNA, 19 nt, Artificial Sequence
  Description of Artificial Sequence: Synthetic oligonucleotide
guggcuauauuggcuuccc

SEQ ID NO: 1992181 - RNA, 19 nt, Artificial Sequence
  Description of Artificial Sequence: Synthetic oligonucleotide
ucucacccuuguaucgcuc

SEQ ID NO: 1992182 - RNA, 19 nt, Artificial Sequence
  Description of Artificial Sequence: Synthetic oligonucleotide
uuuccuugauaagggcuua

SEQ ID NO: 1992183 - RNA, 19 nt, Artificial Sequence
  Description of Artificial Sequence: Synthetic oligonucleotide
ggguaguuagauagaauga

SEQ ID NO: 1992184 - RNA, 19 nt, Artificial Sequence
  Description of Artificial Sequence: Synthetic oligonucleotide
ugauuggcguuaagcugua

SEQ ID NO: 1992185 - RNA, 19 nt, Artificial Sequence
  Description of Artificial Sequence: Synthetic oligonucleotide
aaccuacacaagacagggu

SEQ ID NO: 1992186 - RNA, 19 nt, Artificial Sequence
  Description of Artificial Sequence: Synthetic oligonucleotide
guaagcgccuucuaauaau

SEQ ID NO: 1992187 - RNA, 19 nt, Artificial Sequence
  Description of Artificial Sequence: Synthetic oligonucleotide
cuguaagcgccuucuaaua

SEQ ID NO: 1992188 - RNA, 19 nt, Artificial Sequence
  Description of Artificial Sequence: Synthetic oligonucleotide
ugggcgccuauauucugau

SEQ ID NO: 1992189 - RNA, 19 nt, Artificial Sequence
  Description of Artificial Sequence: Synthetic oligonucleotide
gguaguuagauagaaugau

SEQ ID NO: 1992190 - RNA, 19 nt, Artificial Sequence
  Description of Artificial Sequence: Synthetic oligonucleotide
guacaaggaacuugguuuu

SEQ ID NO: 1992191 - RNA, 19 nt, Artificial Sequence
  Description of Artificial Sequence: Synthetic oligonucleotide
gaugaguuuccaagcugaa

SEQ ID NO: 1992192 - RNA, 19 nt, Artificial Sequence
  Description of Artificial Sequence: Synthetic oligonucleotide
caccaugcugugcccauuc

SEQ ID NO: 1992193 - RNA, 19 nt, Artificial Sequence
  Description of Artificial Sequence: Synthetic oligonucleotide
ccuugauaagggcuuaaca

SEQ ID NO: 1992194 - RNA, 19 nt, Artificial Sequence
  Description of Artificial Sequence: Synthetic oligonucleotide
cuugcucccgcgacggcca

SEQ ID NO: 1992195 - RNA, 19 nt, Artificial Sequence
  Description of Artificial Sequence: Synthetic oligonucleotide
aaucccuacugaggagaaa

SEQ ID NO: 1992196 - RNA, 19 nt, Artificial Sequence
  Description of Artificial Sequence: Synthetic oligonucleotide
agacaguugcaugcaggga

SEQ ID NO: 1992197 - RNA, 19 nt, Artificial Sequence
  Description of Artificial Sequence: Synthetic oligonucleotide
caguauuacaggaauccuu

SEQ ID NO: 1992198 - RNA, 19 nt, Artificial Sequence
  Description of Artificial Sequence: Synthetic oligonucleotide
caguugcaugcagggacgg

SEQ ID NO: 1992199 - RNA, 19 nt, Artificial Sequence
  Description of Artificial Sequence: Synthetic oligonucleotide
cuacucuuuguucgaagcu

SEQ ID NO: 1992200 - RNA, 19 nt, Artificial Sequence
  Description of Artificial Sequence: Synthetic oligonucleotide
gccuauauucugaucugug

SEQ ID NO: 1992201 - RNA, 19 nt, Artificial Sequence
  Description of Artificial Sequence: Synthetic oligonucleotide
ggcauuguucuagucuuac

SEQ ID NO: 1992202 - RNA, 19 nt, Artificial Sequence
  Description of Artificial Sequence: Synthetic oligonucleotide
caagagagccuaguuuaga

SEQ ID NO: 1992203 - RNA, 19 nt, Artificial Sequence
  Description of Artificial Sequence: Synthetic oligonucleotide
agccaguacuguuccgaau

SEQ ID NO: 1992204 - RNA, 19 nt, Artificial Sequence
  Description of Artificial Sequence: Synthetic oligonucleotide
gaacacaagagagccuagu

SEQ ID NO: 1992205 - RNA, 19 nt, Artificial Sequence
  Description of Artificial Sequence: Synthetic oligonucleotide
acccuuguaucgcucuauu

SEQ ID NO: 1992206 - RNA, 19 nt, Artificial Sequence
  Description of Artificial Sequence: Synthetic oligonucleotide
guaagcugaccagcaucug

SEQ ID NO: 1992207 - RNA, 19 nt, Artificial Sequence
  Description of Artificial Sequence: Synthetic oligonucleotide
aucgcaccguaguuauaaa

SEQ ID NO: 1992208 - RNA, 19 nt, Artificial Sequence
  Description of Artificial Sequence: Synthetic oligonucleotide
uuccuugauaagggcuuaa

SEQ ID NO: 1992209 - RNA, 19 nt, Artificial Sequence
  Description of Artificial Sequence: Synthetic oligonucleotide
gcucuugcucccgcgacgg

SEQ ID NO: 1992210 - RNA, 19 nt, Artificial Sequence
  Description of Artificial Sequence: Synthetic oligonucleotide
caagacaggguaguuagau

SEQ ID NO: 1992211 - RNA, 19 nt, Artificial Sequence
  Description of Artificial Sequence: Synthetic oligonucleotide
caguacuguuccgaauguc

SEQ ID NO: 1992212 - RNA, 19 nt, Artificial Sequence
  Description of Artificial Sequence: Synthetic oligonucleotide
uguccaggacaggcaguug

SEQ ID NO: 1992213 - RNA, 19 nt, Artificial Sequence
  Description of Artificial Sequence: Synthetic oligonucleotide
guaccccugaugcugcugu

SEQ ID NO: 1992214 - RNA, 19 nt, Artificial Sequence
  Description of Artificial Sequence: Synthetic oligonucleotide
aucgaaguguacagguguu

SEQ ID NO: 1992215 - RNA, 19 nt, Artificial Sequence
  Description of Artificial Sequence: Synthetic oligonucleotide
cauuaggcauuguucuagu

SEQ ID NO: 1992216 - RNA, 19 nt, Artificial Sequence
  Description of Artificial Sequence: Synthetic oligonucleotide
ggggaggggugccuguaag

SEQ ID NO: 1992217 - RNA, 19 nt, Artificial Sequence
  Description of Artificial Sequence: Synthetic oligonucleotide
gcgccuauauucugaucug

SEQ ID NO: 1992218 - RNA, 19 nt, Artificial Sequence
  Description of Artificial Sequence: Synthetic oligonucleotide
gcuguaagcgccuucuaau

SEQ ID NO: 1992219 - RNA, 19 nt, Artificial Sequence
  Description of Artificial Sequence: Synthetic oligonucleotide
ggcaguucugagauucuca

SEQ ID NO: 1992220 - RNA, 19 nt, Artificial Sequence
  Description of Artificial Sequence: Synthetic oligonucleotide
aggugggcgccuauauucu

SEQ ID NO: 1992221 - RNA, 19 nt, Artificial Sequence
  Description of Artificial Sequence: Synthetic oligonucleotide
acaagacaggguaguuaga

SEQ ID NO: 1992222 - RNA, 19 nt, Artificial Sequence
  Description of Artificial Sequence: Synthetic oligonucleotide
gcaucgaaguguacaggug

SEQ ID NO: 1992223 - RNA, 19 nt, Artificial Sequence
  Description of Artificial Sequence: Synthetic oligonucleotide
ccuuguaucgcucuauuau

SEQ ID NO: 1992224 - RNA, 19 nt, Artificial Sequence
  Description of Artificial Sequence: Synthetic oligonucleotide
ugaucgcaccguaguuaua

SEQ ID NO: 1992225 - RNA, 19 nt, Artificial Sequence
  Description of Artificial Sequence: Synthetic oligonucleotide
cuagucuuacacagccagu

SEQ ID NO: 1992226 - RNA, 19 nt, Artificial Sequence
  Description of Artificial Sequence: Synthetic oligonucleotide
ggugggcgccuauauucug

SEQ ID NO: 1992227 - RNA, 19 nt, Artificial Sequence
  Description of Artificial Sequence: Synthetic oligonucleotide
gagccuaguuuagaugagu

SEQ ID NO: 1992228 - RNA, 19 nt, Artificial Sequence
  Description of Artificial Sequence: Synthetic oligonucleotide
cgcucuauuaucacuggga

SEQ ID NO: 1992229 - RNA, 19 nt, Artificial Sequence
  Description of Artificial Sequence: Synthetic oligonucleotide
ccuucuaauaaucuugauu

SEQ ID NO: 1992230 - RNA, 19 nt, Artificial Sequence
  Description of Artificial Sequence: Synthetic oligonucleotide
gcugcggcgcugcuugaag

SEQ ID NO: 1992231 - RNA, 19 nt, Artificial Sequence
  Description of Artificial Sequence: Synthetic oligonucleotide
cagcaggcaguucugagau

SEQ ID NO: 1992232 - RNA, 19 nt, Artificial Sequence
  Description of Artificial Sequence: Synthetic oligonucleotide
cacguggcuauauuggcuu

SEQ ID NO: 1992233 - RNA, 19 nt, Artificial Sequence
  Description of Artificial Sequence: Synthetic oligonucleotide
ccuaacacccuaggugggc

SEQ ID NO: 1992234 - RNA, 19 nt, Artificial Sequence
  Description of Artificial Sequence: Synthetic oligonucleotide
gugggcgccuauauucuga

SEQ ID NO: 1992235 - RNA, 19 nt, Artificial Sequence
  Description of Artificial Sequence: Synthetic oligonucleotide
guucgaagcugcggcgcug

SEQ ID NO: 1992236 - RNA, 19 nt, Artificial Sequence
  Description of Artificial Sequence: Synthetic oligonucleotide
cuucuacucuuuguucgaa

SEQ ID NO: 1992237 - RNA, 19 nt, Artificial Sequence
  Description of Artificial Sequence: Synthetic oligonucleotide
cccgcgacggccacuuccc

SEQ ID NO: 1992238 - RNA, 19 nt, Artificial Sequence
  Description of Artificial Sequence: Synthetic oligonucleotide
cagccaguacuguuccgaa

SEQ ID NO: 1992239 - RNA, 19 nt, Artificial Sequence
  Description of Artificial Sequence: Synthetic oligonucleotide
agauggguguggacacgcu

SEQ ID NO: 1992240 - RNA, 19 nt, Artificial Sequence
  Description of Artificial Sequence: Synthetic oligonucleotide
cuuacacagccaguacugu

SEQ ID NO: 1992241 - RNA, 19 nt, Artificial Sequence
  Description of Artificial Sequence: Synthetic oligonucleotide
cugaaugcgcuugcaugaa

SEQ ID NO: 1992242 - RNA, 19 nt, Artificial Sequence
  Description of Artificial Sequence: Synthetic oligonucleotide
ggguacaaggaacuugguu

SEQ ID NO: 1992243 - RNA, 19 nt, Artificial Sequence
  Description of Artificial Sequence: Synthetic oligonucleotide
uccggagucgaaggcucuu

SEQ ID NO: 1992244 - RNA, 19 nt, Artificial Sequence
  Description of Artificial Sequence: Synthetic oligonucleotide
gcagcagaucccaggaaaa

SEQ ID NO: 1992245 - RNA, 19 nt, Artificial Sequence
  Description of Artificial Sequence: Synthetic oligonucleotide
ggagucgaaggcucuugcu

SEQ ID NO: 1992246 - RNA, 19 nt, Artificial Sequence
  Description of Artificial Sequence: Synthetic oligonucleotide
uaccccugaugcugcuguu

SEQ ID NO: 1992247 - RNA, 19 nt, Artificial Sequence
  Description of Artificial Sequence: Synthetic oligonucleotide
cguggcuauauuggcuucc

SEQ ID NO: 1992248 - RNA, 19 nt, Artificial Sequence
  Description of Artificial Sequence: Synthetic oligonucleotide
ugggcaucacguggcuaua

SEQ ID NO: 1992249 - RNA, 19 nt, Artificial Sequence
  Description of Artificial Sequence: Synthetic oligonucleotide
aggucuucucggacggcau

SEQ ID NO: 1992250 - RNA, 19 nt, Artificial Sequence
  Description of Artificial Sequence: Synthetic oligonucleotide
ccuuauugaucgcaccgua

SEQ ID NO: 1992251 - RNA, 19 nt, Artificial Sequence
  Description of Artificial Sequence: Synthetic oligonucleotide
ggauuuugguggggugcug

SEQ ID NO: 1992252 - RNA, 19 nt, Artificial Sequence
  Description of Artificial Sequence: Synthetic oligonucleotide
cugcugguaacaucccuuu

SEQ ID NO: 1992253 - RNA, 19 nt, Artificial Sequence
  Description of Artificial Sequence: Synthetic oligonucleotide
ccuuuuggagaaggcagca

SEQ ID NO: 1992254 - RNA, 19 nt, Artificial Sequence
  Description of Artificial Sequence: Synthetic oligonucleotide
acacccuaggugggcgccu

SEQ ID NO: 1992255 - RNA, 19 nt, Artificial Sequence
  Description of Artificial Sequence: Synthetic oligonucleotide
cucccggaugagccggaca

SEQ ID NO: 1992256 - RNA, 19 nt, Artificial Sequence
  Description of Artificial Sequence: Synthetic oligonucleotide
cggagucgaaggcucuugc

SEQ ID NO: 1992257 - RNA, 19 nt, Artificial Sequence
  Description of Artificial Sequence: Synthetic oligonucleotide
gauuggcguuaagcuguaa

SEQ ID NO: 1992258 - RNA, 19 nt, Artificial Sequence
  Description of Artificial Sequence: Synthetic oligonucleotide
aggcauuguucuagucuua

SEQ ID NO: 1992259 - RNA, 19 nt, Artificial Sequence
  Description of Artificial Sequence: Synthetic oligonucleotide
cucggacggcauggcgcgg

SEQ ID NO: 1992260 - RNA, 19 nt, Artificial Sequence
  Description of Artificial Sequence: Synthetic oligonucleotide
gccuaguuuagaugaguuu

SEQ ID NO: 1992261 - RNA, 19 nt, Artificial Sequence
  Description of Artificial Sequence: Synthetic oligonucleotide
gaucggguacaaggaacuu

SEQ ID NO: 1992262 - RNA, 19 nt, Artificial Sequence
  Description of Artificial Sequence: Synthetic oligonucleotide
cuaggugggcgccuauauu

SEQ ID NO: 1992263 - RNA, 19 nt, Artificial Sequence
  Description of Artificial Sequence: Synthetic oligonucleotide
guuaagcuguaagcgccuu

SEQ ID NO: 1992264 - RNA, 19 nt, Artificial Sequence
  Description of Artificial Sequence: Synthetic oligonucleotide
ggacaggcaguugcuucuc

SEQ ID NO: 1992265 - RNA, 19 nt, Artificial Sequence
  Description of Artificial Sequence: Synthetic oligonucleotide
acccuaggugggcgccuau

SEQ ID NO: 1992266 - RNA, 19 nt, Artificial Sequence
  Description of Artificial Sequence: Synthetic oligonucleotide
gcucaccaugcugugccca

SEQ ID NO: 1992267 - RNA, 19 nt, Artificial Sequence
  Description of Artificial Sequence: Synthetic oligonucleotide
ggcuucccuccaugacagc

SEQ ID NO: 1992268 - RNA, 19 nt, Artificial Sequence
  Description of Artificial Sequence: Synthetic oligonucleotide
cccuuguaucgcucuauua

SEQ ID NO: 1992269 - RNA, 19 nt, Artificial Sequence
  Description of Artificial Sequence: Synthetic oligonucleotide
gggcgccuauauucugauc

SEQ ID NO: 1992270 - RNA, 19 nt, Artificial Sequence
  Description of Artificial Sequence: Synthetic oligonucleotide
ccggagucgaaggcucuug

SEQ ID NO: 1992271 - RNA, 19 nt, Artificial Sequence
  Description of Artificial Sequence: Synthetic oligonucleotide
ggcaucacguggcuauauu

SEQ ID NO: 1992272 - RNA, 19 nt, Artificial Sequence
  Description of Artificial Sequence: Synthetic oligonucleotide
ccagggacauauugacgua

SEQ ID NO: 1992273 - RNA, 19 nt, Artificial Sequence
  Description of Artificial Sequence: Synthetic oligonucleotide
gggaggcauacaccaugua

SEQ ID NO: 1992274 - RNA, 19 nt, Artificial Sequence
  Description of Artificial Sequence: Synthetic oligonucleotide
gccuucuaauaaucuugau

SEQ ID NO: 1992275 - RNA, 19 nt, Artificial Sequence
  Description of Artificial Sequence: Synthetic oligonucleotide
cuauuaucacugggauuuu

SEQ ID NO: 1992276 - RNA, 19 nt, Artificial Sequence
  Description of Artificial Sequence: Synthetic oligonucleotide
ccuucucuacugaguggaa

SEQ ID NO: 1992277 - RNA, 19 nt, Artificial Sequence
  Description of Artificial Sequence: Synthetic oligonucleotide
cgaaguguacagguguucu

SEQ ID NO: 1992278 - RNA, 19 nt, Artificial Sequence
  Description of Artificial Sequence: Synthetic oligonucleotide
cacccuuguaucgcucuau

SEQ ID NO: 1992279 - RNA, 19 nt, Artificial Sequence
  Description of Artificial Sequence: Synthetic oligonucleotide
ccuaggugggcgccuauau

SEQ ID NO: 1992280 - RNA, 19 nt, Artificial Sequence
  Description of Artificial Sequence: Synthetic oligonucleotide
gcaugaagcucaguuucuu

SEQ ID NO: 1992281 - RNA, 19 nt, Artificial Sequence
  Description of Artificial Sequence: Synthetic oligonucleotide
gcggcgcugcuugaagguc

SEQ ID NO: 1992282 - RNA, 19 nt, Artificial Sequence
  Description of Artificial Sequence: Synthetic oligonucleotide
gccgccccucugagcagcg

SEQ ID NO: 1992283 - RNA, 19 nt, Artificial Sequence
  Description of Artificial Sequence: Synthetic oligonucleotide
guccggagucgaaggcucu

SEQ ID NO: 1992284 - RNA, 19 nt, Artificial Sequence
  Description of Artificial Sequence: Synthetic oligonucleotide
cacccuaggugggcgccua

SEQ ID NO: 1992285 - RNA, 19 nt, Artificial Sequence
  Description of Artificial Sequence: Synthetic oligonucleotide
cucccgcgacggccacuuc

SEQ ID NO: 1992286 - RNA, 19 nt, Artificial Sequence
  Description of Artificial Sequence: Synthetic oligonucleotide
cccggaugagccggacauc

SEQ ID NO: 1992287 - RNA, 19 nt, Artificial Sequence
  Description of Artificial Sequence: Synthetic oligonucleotide
gggcaucacguggcuauau

SEQ ID NO: 1992288 - RNA, 19 nt, Artificial Sequence
  Description of Artificial Sequence: Synthetic oligonucleotide
cgccuauauucugaucugu

SEQ ID NO: 1992289 - RNA, 19 nt, Artificial Sequence
  Description of Artificial Sequence: Synthetic oligonucleotide
cccuaggugggcgccuaua

SEQ ID NO: 1992290 - RNA, 19 nt, Artificial Sequence
  Description of Artificial Sequence: Synthetic oligonucleotide
cgcgacggccacuucccuu

SEQ ID NO: 1992291 - RNA, 19 nt, Artificial Sequence
  Description of Artificial Sequence: Synthetic oligonucleotide
ccccucugagcagcguuuu

SEQ ID NO: 1992292 - RNA, 19 nt, Artificial Sequence
  Description of Artificial Sequence: Synthetic oligonucleotide
cggaugagccggacaucuu

SEQ ID NO: 1992293 - RNA, 19 nt, Artificial Sequence
  Description of Artificial Sequence: Synthetic oligonucleotide
ccgcgacggccacuucccu

SEQ ID NO: 1992294 - RNA, 19 nt, Artificial Sequence
  Description of Artificial Sequence: Synthetic oligonucleotide
cgcuugcaugaagcucagu

SEQ ID NO: 1992295 - RNA, 19 nt, Artificial Sequence
  Description of Artificial Sequence: Synthetic oligonucleotide
ccgccccucugagcagcgu

SEQ ID NO: 1992296 - RNA, 19 nt, Artificial Sequence
  Description of Artificial Sequence: Synthetic oligonucleotide
aauccaaggagacuuuagg

SEQ ID NO: 1992297 - RNA, 19 nt, Artificial Sequence
  Description of Artificial Sequence: Synthetic oligonucleotide
uaaccugacgcccacaucc

SEQ ID NO: 1992298 - RNA, 19 nt, Artificial Sequence
  Description of Artificial Sequence: Synthetic oligonucleotide
cuuauagucaucugugagg

SEQ ID NO: 1992299 - RNA, 19 nt, Artificial Sequence
  Description of Artificial Sequence: Synthetic oligonucleotide
aaccacggguccuugaggc

SEQ ID NO: 1992300 - RNA, 19 nt, Artificial Sequence
  Description of Artificial Sequence: Synthetic oligonucleotide
aaaggcaucaggcccuggc

SEQ ID NO: 1992301 - RNA, 19 nt, Artificial Sequence
  Description of Artificial Sequence: Synthetic oligonucleotide
aaugguucagaauccagca

SEQ ID NO: 1992302 - RNA, 19 nt, Artificial Sequence
  Description of Artificial Sequence: Synthetic oligonucleotide
gaugaccucauccagccgg

SEQ ID NO: 1992303 - RNA, 19 nt, Artificial Sequence
  Description of Artificial Sequence: Synthetic oligonucleotide
ugaugagccgcucaaugcg

SEQ ID NO: 1992304 - RNA, 19 nt, Artificial Sequence
  Description of Artificial Sequence: Synthetic oligonucleotide
uaaugguucagaauccagc

SEQ ID NO: 1992305 - RNA, 19 nt, Artificial Sequence
  Description of Artificial Sequence: Synthetic oligonucleotide
ucaguuuccgcuucagacg

SEQ ID NO: 1992306 - RNA, 19 nt, Artificial Sequence
  Description of Artificial Sequence: Synthetic oligonucleotide
uguagaggugaccacaucu

SEQ ID NO: 1992307 - RNA, 19 nt, Artificial Sequence
  Description of Artificial Sequence: Synthetic oligonucleotide
augccaguccacuaggacc

SEQ ID NO: 1992308 - RNA, 19 nt, Artificial Sequence
  Description of Artificial Sequence: Synthetic oligonucleotide
uccuucaacucacacagcc

SEQ ID NO: 1992309 - RNA, 19 nt, Artificial Sequence
  Description of Artificial Sequence: Synthetic oligonucleotide
agagugcagggucaaagcc

SEQ ID NO: 1992310 - RNA, 19 nt, Artificial Sequence
  Description of Artificial Sequence: Synthetic oligonucleotide
uccgagaucucuugcaugg

SEQ ID NO: 1992311 - RNA, 19 nt, Artificial Sequence
  Description of Artificial Sequence: Synthetic oligonucleotide
gauacguggagucaggguc

SEQ ID NO: 1992312 - RNA, 19 nt, Artificial Sequence
  Description of Artificial Sequence: Synthetic oligonucleotide
aucgucgucagugucagcc

SEQ ID NO: 1992313 - RNA, 19 nt, Artificial Sequence
  Description of Artificial Sequence: Synthetic oligonucleotide
ugcucuaugacccggccag

SEQ ID NO: 1992314 - RNA, 19 nt, Artificial Sequence
  Description of Artificial Sequence: Synthetic oligonucleotide
auccaaggagacuuuaggg

SEQ ID NO: 1992315 - RNA, 19 nt, Artificial Sequence
  Description of Artificial Sequence: Synthetic oligonucleotide
agugugggaagagacacgc

SEQ ID NO: 1992316 - RNA, 19 nt, Artificial Sequence
  Description of Artificial Sequence: Synthetic oligonucleotide
aaggcgacgagccaacgug

SEQ ID NO: 1992317 - RNA, 19 nt, Artificial Sequence
  Description of Artificial Sequence: Synthetic oligonucleotide
aaugggaaguguugccuag

SEQ ID NO: 1992318 - RNA, 19 nt, Artificial Sequence
  Description of Artificial Sequence: Synthetic oligonucleotide
uucuaaugguucagaaucc

SEQ ID NO: 1992319 - RNA, 19 nt, Artificial Sequence
  Description of Artificial Sequence: Synthetic oligonucleotide
ggaaguguugccuaggagc

SEQ ID NO: 1992320 - RNA, 19 nt, Artificial Sequence
  Description of Artificial Sequence: Synthetic oligonucleotide
uggcuuauagucaucugug

SEQ ID NO: 1992321 - RNA, 19 nt, Artificial Sequence
  Description of Artificial Sequence: Synthetic oligonucleotide
gagacuuuaggggagcccg

SEQ ID NO: 1992322 - RNA, 19 nt, Artificial Sequence
  Description of Artificial Sequence: Synthetic oligonucleotide
uuugcuucucuacauugcu

SEQ ID NO: 1992323 - RNA, 19 nt, Artificial Sequence
  Description of Artificial Sequence: Synthetic oligonucleotide
auugcuguuuucuaauggu

SEQ ID NO: 1992324 - RNA, 19 nt, Artificial Sequence
  Description of Artificial Sequence: Synthetic oligonucleotide
cugacuguuuccuagaaga

SEQ ID NO: 1992325 - RNA, 19 nt, Artificial Sequence
  Description of Artificial Sequence: Synthetic oligonucleotide
ugccaguccacuaggaccc

SEQ ID NO: 1992326 - RNA, 19 nt, Artificial Sequence
  Description of Artificial Sequence: Synthetic oligonucleotide
gaagaaugggaaguguugc

SEQ ID NO: 1992327 - RNA, 19 nt, Artificial Sequence
  Description of Artificial Sequence: Synthetic oligonucleotide
ugagguggcagccaaaguu

SEQ ID NO: 1992328 - RNA, 19 nt, Artificial Sequence
  Description of Artificial Sequence: Synthetic oligonucleotide
aaggccgagauugugccgg

SEQ ID NO: 1992329 - RNA, 19 nt, Artificial Sequence
  Description of Artificial Sequence: Synthetic oligonucleotide
gaaucuugccaaguguggg

SEQ ID NO: 1992330 - RNA, 19 nt, Artificial Sequence
  Description of Artificial Sequence: Synthetic oligonucleotide
aagcgcuggaucugccucc

SEQ ID NO: 1992331 - RNA, 19 nt, Artificial Sequence
  Description of Artificial Sequence: Synthetic oligonucleotide
gaaguguugccuaggagcc

SEQ ID NO: 1992332 - RNA, 19 nt, Artificial Sequence
  Description of Artificial Sequence: Synthetic oligonucleotide
aaucuugccaaguguggga

SEQ ID NO: 1992333 - RNA, 19 nt, Artificial Sequence
  Description of Artificial Sequence: Synthetic oligonucleotide
uugaugagccgcucaaugc

SEQ ID NO: 1992334 - RNA, 19 nt, Artificial Sequence
  Description of Artificial Sequence: Synthetic oligonucleotide
gacuguuuccuagaagagg

SEQ ID NO: 1992335 - RNA, 19 nt, Artificial Sequence
  Description of Artificial Sequence: Synthetic oligonucleotide
agcacgucaccauagucag

SEQ ID NO: 1992336 - RNA, 19 nt, Artificial Sequence
  Description of Artificial Sequence: Synthetic oligonucleotide
gguaguagggcacuccugg

SEQ ID NO: 1992337 - RNA, 19 nt, Artificial Sequence
  Description of Artificial Sequence: Synthetic oligonucleotide
gucaccauagucaggaaag

SEQ ID NO: 1992338 - RNA, 19 nt, Artificial Sequence
  Description of Artificial Sequence: Synthetic oligonucleotide
gaggugaccacaucugccc

SEQ ID NO: 1992339 - RNA, 19 nt, Artificial Sequence
  Description of Artificial Sequence: Synthetic oligonucleotide
cagaaucuugccaagugug

SEQ ID NO: 1992340 - RNA, 19 nt, Artificial Sequence
  Description of Artificial Sequence: Synthetic oligonucleotide
auugcauauuuggagauga

SEQ ID NO: 1992341 - RNA, 19 nt, Artificial Sequence
  Description of Artificial Sequence: Synthetic oligonucleotide
gaugaggucgaggugucgg

SEQ ID NO: 1992342 - RNA, 19 nt, Artificial Sequence
  Description of Artificial Sequence: Synthetic oligonucleotide
ugagagugcagggucaaag

SEQ ID NO: 1992343 - RNA, 19 nt, Artificial Sequence
  Description of Artificial Sequence: Synthetic oligonucleotide
ugggaugccaguccacuag

SEQ ID NO: 1992344 - RNA, 19 nt, Artificial Sequence
  Description of Artificial Sequence: Synthetic oligonucleotide
acuccugggaugccagucc

SEQ ID NO: 1992345 - RNA, 19 nt, Artificial Sequence
  Description of Artificial Sequence: Synthetic oligonucleotide
acuguuuccuagaagagga

SEQ ID NO: 1992346 - RNA, 19 nt, Artificial Sequence
  Description of Artificial Sequence: Synthetic oligonucleotide
caguuuccgcuucagacgg

SEQ ID NO: 1992347 - RNA, 19 nt, Artificial Sequence
  Description of Artificial Sequence: Synthetic oligonucleotide
uugccuaggagccuggcuc

SEQ ID NO: 1992348 - RNA, 19 nt, Artificial Sequence
  Description of Artificial Sequence: Synthetic oligonucleotide
cuaaugguucagaauccag

SEQ ID NO: 1992349 - RNA, 19 nt, Artificial Sequence
  Description of Artificial Sequence: Synthetic oligonucleotide
uucccgaaggcgacgagcc

SEQ ID NO: 1992350 - RNA, 19 nt, Artificial Sequence
  Description of Artificial Sequence: Synthetic oligonucleotide
acgguaggggauucuuugc

SEQ ID NO: 1992351 - RNA, 19 nt, Artificial Sequence
  Description of Artificial Sequence: Synthetic oligonucleotide
uccgguuuucccgaaggcg

SEQ ID NO: 1992352 - RNA, 19 nt, Artificial Sequence
  Description of Artificial Sequence: Synthetic oligonucleotide
uacauugcuguuuucuaau

SEQ ID NO: 1992353 - RNA, 19 nt, Artificial Sequence
  Description of Artificial Sequence: Synthetic oligonucleotide
gaucugagagugcaggguc

SEQ ID NO: 1992354 - RNA, 19 nt, Artificial Sequence
  Description of Artificial Sequence: Synthetic oligonucleotide
cuccgagagauccaacucc

SEQ ID NO: 1992355 - RNA, 19 nt, Artificial Sequence
  Description of Artificial Sequence: Synthetic oligonucleotide
aagagacacgcccauugaa

SEQ ID NO: 1992356 - RNA, 19 nt, Artificial Sequence
  Description of Artificial Sequence: Synthetic oligonucleotide
uggggagggaaucuucuga

SEQ ID NO: 1992357 - RNA, 19 nt, Artificial Sequence
  Description of Artificial Sequence: Synthetic oligonucleotide
cuucagacgggccuccugc

SEQ ID NO: 1992358 - RNA, 19 nt, Artificial Sequence
  Description of Artificial Sequence: Synthetic oligonucleotide
agaaucuugccaagugugg

SEQ ID NO: 1992359 - RNA, 19 nt, Artificial Sequence
  Description of Artificial Sequence: Synthetic oligonucleotide
ucauugcauauuuggagau

SEQ ID NO: 1992360 - RNA, 19 nt, Artificial Sequence
  Description of Artificial Sequence: Synthetic oligonucleotide
uccgagagauccaacuccu

SEQ ID NO: 1992361 - RNA, 19 nt, Artificial Sequence
  Description of Artificial Sequence: Synthetic oligonucleotide
ucuaugacccggccaguca

SEQ ID NO: 1992362 - RNA, 19 nt, Artificial Sequence
  Description of Artificial Sequence: Synthetic oligonucleotide
gcuuauagucaucugugag

SEQ ID NO: 1992363 - RNA, 19 nt, Artificial Sequence
  Description of Artificial Sequence: Synthetic oligonucleotide
gaauccaaggagacuuuag

SEQ ID NO: 1992364 - RNA, 19 nt, Artificial Sequence
  Description of Artificial Sequence: Synthetic oligonucleotide
ggaucugccuccucgaacc

SEQ ID NO: 1992365 - RNA, 19 nt, Artificial Sequence
  Description of Artificial Sequence: Synthetic oligonucleotide
caaaguuguagaugagguc

SEQ ID NO: 1992366 - RNA, 19 nt, Artificial Sequence
  Description of Artificial Sequence: Synthetic oligonucleotide
aaggcaucaggcccuggcu

SEQ ID NO: 1992367 - RNA, 19 nt, Artificial Sequence
  Description of Artificial Sequence: Synthetic oligonucleotide
acgggccuccugcagauac

SEQ ID NO: 1992368 - RNA, 19 nt, Artificial Sequence
  Description of Artificial Sequence: Synthetic oligonucleotide
gaugccaguccacuaggac

SEQ ID NO: 1992369 - RNA, 19 nt, Artificial Sequence
  Description of Artificial Sequence: Synthetic oligonucleotide
ucaaugcgccuguugaccu

SEQ ID NO: 1992370 - RNA, 19 nt, Artificial Sequence
  Description of Artificial Sequence: Synthetic oligonucleotide
ugucuugcaucauugcaua

SEQ ID NO: 1992371 - RNA, 19 nt, Artificial Sequence
  Description of Artificial Sequence: Synthetic oligonucleotide
cucacucuugucuugcauc

SEQ ID NO: 1992372 - RNA, 19 nt, Artificial Sequence
  Description of Artificial Sequence: Synthetic oligonucleotide
uuccuagaagaggaaaugu

SEQ ID NO: 1992373 - RNA, 19 nt, Artificial Sequence
  Description of Artificial Sequence: Synthetic oligonucleotide
ggaagagacacgcccauug

SEQ ID NO: 1992374 - RNA, 19 nt, Artificial Sequence
  Description of Artificial Sequence: Synthetic oligonucleotide
ucaucgucgucagugucag

SEQ ID NO: 1992375 - RNA, 19 nt, Artificial Sequence
  Description of Artificial Sequence: Synthetic oligonucleotide
ggagggaaucuucugacug

SEQ ID NO: 1992376 - RNA, 19 nt, Artificial Sequence
  Description of Artificial Sequence: Synthetic oligonucleotide
aggaaauguccuucuccuc

SEQ ID NO: 1992377 - RNA, 19 nt, Artificial Sequence
  Description of Artificial Sequence: Synthetic oligonucleotide
ugccuaggagccuggcucg

SEQ ID NO: 1992378 - RNA, 19 nt, Artificial Sequence
  Description of Artificial Sequence: Synthetic oligonucleotide
cacgguaggggauucuuug

SEQ ID NO: 1992379 - RNA, 19 nt, Artificial Sequence
  Description of Artificial Sequence: Synthetic oligonucleotide
cuugucuugcaucauugca

SEQ ID NO: 1992380 - RNA, 19 nt, Artificial Sequence
  Description of Artificial Sequence: Synthetic oligonucleotide
cuaugacccggccagucag

SEQ ID NO: 1992381 - RNA, 19 nt, Artificial Sequence
  Description of Artificial Sequence: Synthetic oligonucleotide
ugggaaguguugccuagga

SEQ ID NO: 1992382 - RNA, 19 nt, Artificial Sequence
  Description of Artificial Sequence: Synthetic oligonucleotide
agcuccgagagauccaacu

SEQ ID NO: 1992383 - RNA, 19 nt, Artificial Sequence
  Description of Artificial Sequence: Synthetic oligonucleotide
guuguagaugaggucgagg

SEQ ID NO: 1992384 - RNA, 19 nt, Artificial Sequence
  Description of Artificial Sequence: Synthetic oligonucleotide
ccaacgugggaucugagag

SEQ ID NO: 1992385 - RNA, 19 nt, Artificial Sequence
  Description of Artificial Sequence: Synthetic oligonucleotide
cugcugucggggaaggccg

SEQ ID NO: 1992386 - RNA, 19 nt, Artificial Sequence
  Description of Artificial Sequence: Synthetic oligonucleotide
aaccugacgcccacauccc

SEQ ID NO: 1992387 - RNA, 19 nt, Artificial Sequence
  Description of Artificial Sequence: Synthetic oligonucleotide
gauugugccggguggccgc

SEQ ID NO: 1992388 - RNA, 19 nt, Artificial Sequence
  Description of Artificial Sequence: Synthetic oligonucleotide
guggcagccaaaguuguag

SEQ ID NO: 1992389 - RNA, 19 nt, Artificial Sequence
  Description of Artificial Sequence: Synthetic oligonucleotide
uagucaucugugagguggc

SEQ ID NO: 1992390 - RNA, 19 nt, Artificial Sequence
  Description of Artificial Sequence: Synthetic oligonucleotide
ucagcacgucaccauaguc

SEQ ID NO: 1992391 - RNA, 19 nt, Artificial Sequence
  Description of Artificial Sequence: Synthetic oligonucleotide
uuucccgaaggcgacgagc

SEQ ID NO: 1992392 - RNA, 19 nt, Artificial Sequence
  Description of Artificial Sequence: Synthetic oligonucleotide
guaguagggcacuccuggg

SEQ ID NO: 1992393 - RNA, 19 nt, Artificial Sequence
  Description of Artificial Sequence: Synthetic oligonucleotide
aguagggcacuccugggau

SEQ ID NO: 1992394 - RNA, 19 nt, Artificial Sequence
  Description of Artificial Sequence: Synthetic oligonucleotide
uuccgagaucucuugcaug

SEQ ID NO: 1992395 - RNA, 19 nt, Artificial Sequence
  Description of Artificial Sequence: Synthetic oligonucleotide
aagugugggaagagacacg

SEQ ID NO: 1992396 - RNA, 19 nt, Artificial Sequence
  Description of Artificial Sequence: Synthetic oligonucleotide
agauacguggagucagggu

SEQ ID NO: 1992397 - RNA, 19 nt, Artificial Sequence
  Description of Artificial Sequence: Synthetic oligonucleotide
auacguggagucagggucg

SEQ ID NO: 1992398 - RNA, 19 nt, Artificial Sequence
  Description of Artificial Sequence: Synthetic oligonucleotide
uuccgcuucagacgggccu

SEQ ID NO: 1992399 - RNA, 19 nt, Artificial Sequence
  Description of Artificial Sequence: Synthetic oligonucleotide
cagcacgucaccauaguca

SEQ ID NO: 1992400 - RNA, 19 nt, Artificial Sequence
  Description of Artificial Sequence: Synthetic oligonucleotide
acaucugccccguuuucca

SEQ ID NO: 1992401 - RNA, 19 nt, Artificial Sequence
  Description of Artificial Sequence: Synthetic oligonucleotide
ugaggucgaggugucggcg

SEQ ID NO: 1992402 - RNA, 19 nt, Artificial Sequence
  Description of Artificial Sequence: Synthetic oligonucleotide
gaaggccgagauugugccg

SEQ ID NO: 1992403 - RNA, 19 nt, Artificial Sequence
  Description of Artificial Sequence: Synthetic oligonucleotide
uugcaucauugcauauuug

SEQ ID NO: 1992404 - RNA, 19 nt, Artificial Sequence
  Description of Artificial Sequence: Synthetic oligonucleotide
ggauucuuugcucuaugac

SEQ ID NO: 1992405 - RNA, 19 nt, Artificial Sequence
  Description of Artificial Sequence: Synthetic oligonucleotide
ucagacgggccuccugcag

SEQ ID NO: 1992406 - RNA, 19 nt, Artificial Sequence
  Description of Artificial Sequence: Synthetic oligonucleotide
gaagagacacgcccauuga

SEQ ID NO: 1992407 - RNA, 19 nt, Artificial Sequence
  Description of Artificial Sequence: Synthetic oligonucleotide
aaugcgccuguugaccucu

SEQ ID NO: 1992408 - RNA, 19 nt, Artificial Sequence
  Description of Artificial Sequence: Synthetic oligonucleotide
ucguccagcuccgagagau

SEQ ID NO: 1992409 - RNA, 19 nt, Artificial Sequence
  Description of Artificial Sequence: Synthetic oligonucleotide
uucccauuucccugcugag

SEQ ID NO: 1992410 - RNA, 19 nt, Artificial Sequence
  Description of Artificial Sequence: Synthetic oligonucleotide
uugcucuaugacccggcca

SEQ ID NO: 1992411 - RNA, 19 nt, Artificial Sequence
  Description of Artificial Sequence: Synthetic oligonucleotide
ucuugcaucauugcauauu

SEQ ID NO: 1992412 - RNA, 19 nt, Artificial Sequence
  Description of Artificial Sequence: Synthetic oligonucleotide
gaaggauguagaggugacc

SEQ ID NO: 1992413 - RNA, 19 nt, Artificial Sequence
  Description of Artificial Sequence: Synthetic oligonucleotide
gagcccgaagaaugggaag

SEQ ID NO: 1992414 - RNA, 19 nt, Artificial Sequence
  Description of Artificial Sequence: Synthetic oligonucleotide
gaugagccgcucaaugcgc

SEQ ID NO: 1992415 - RNA, 19 nt, Artificial Sequence
  Description of Artificial Sequence: Synthetic oligonucleotide
ucuugccaagugugggaag

SEQ ID NO: 1992416 - RNA, 19 nt, Artificial Sequence
  Description of Artificial Sequence: Synthetic oligonucleotide
gaaauguccuucuccucaa

SEQ ID NO: 1992417 - RNA, 19 nt, Artificial Sequence
  Description of Artificial Sequence: Synthetic oligonucleotide
ugagccuuuugcuucucua

SEQ ID NO: 1992418 - RNA, 19 nt, Artificial Sequence
  Description of Artificial Sequence: Synthetic oligonucleotide
aaguuguagaugaggucga

SEQ ID NO: 1992419 - RNA, 19 nt, Artificial Sequence
  Description of Artificial Sequence: Synthetic oligonucleotide
acauacagcgccagcagcu

SEQ ID NO: 1992420 - RNA, 19 nt, Artificial Sequence
  Description of Artificial Sequence: Synthetic oligonucleotide
ccaagcuccgguuuucccg

SEQ ID NO: 1992421 - RNA, 19 nt, Artificial Sequence
  Description of Artificial Sequence: Synthetic oligonucleotide
cacgucaccauagucagga

SEQ ID NO: 1992422 - RNA, 19 nt, Artificial Sequence
  Description of Artificial Sequence: Synthetic oligonucleotide
aucugccccguuuuccaag

SEQ ID NO: 1992423 - RNA, 19 nt, Artificial Sequence
  Description of Artificial Sequence: Synthetic oligonucleotide
uggaucaguuuccgcuuca

SEQ ID NO: 1992424 - RNA, 19 nt, Artificial Sequence
  Description of Artificial Sequence: Synthetic oligonucleotide
agauugugccggguggccg

SEQ ID NO: 1992425 - RNA, 19 nt, Artificial Sequence
  Description of Artificial Sequence: Synthetic oligonucleotide
cauccagccggcucauggc

SEQ ID NO: 1992426 - RNA, 19 nt, Artificial Sequence
  Description of Artificial Sequence: Synthetic oligonucleotide
gaggucgaggugucggcgc

SEQ ID NO: 1992427 - RNA, 19 nt, Artificial Sequence
  Description of Artificial Sequence: Synthetic oligonucleotide
ggagcaguccuucaacuca

SEQ ID NO: 1992428 - RNA, 19 nt, Artificial Sequence
  Description of Artificial Sequence: Synthetic oligonucleotide
uuuucccgaaggcgacgag

SEQ ID NO: 1992429 - RNA, 19 nt, Artificial Sequence
  Description of Artificial Sequence: Synthetic oligonucleotide
gaaugggaaguguugccua

SEQ ID NO: 1992430 - RNA, 19 nt, Artificial Sequence
  Description of Artificial Sequence: Synthetic oligonucleotide
uuccuccuccuccuccucc

SEQ ID NO: 1992431 - RNA, 19 nt, Artificial Sequence
  Description of Artificial Sequence: Synthetic oligonucleotide
accucuggguagcgcgugc

SEQ ID NO: 1992432 - RNA, 19 nt, Artificial Sequence
  Description of Artificial Sequence: Synthetic oligonucleotide
uggcagccaaaguuguaga

SEQ ID NO: 1992433 - RNA, 19 nt, Artificial Sequence
  Description of Artificial Sequence: Synthetic oligonucleotide
agcccgaagaaugggaagu

SEQ ID NO: 1992434 - RNA, 19 nt, Artificial Sequence
  Description of Artificial Sequence: Synthetic oligonucleotide
uccugcagccgccguaucu

SEQ ID NO: 1992435 - RNA, 19 nt, Artificial Sequence
  Description of Artificial Sequence: Synthetic oligonucleotide
cagauacguggagucaggg

SEQ ID NO: 1992436 - RNA, 19 nt, Artificial Sequence
  Description of Artificial Sequence: Synthetic oligonucleotide
ccauugaaggauguagagg

SEQ ID NO: 1992437 - RNA, 19 nt, Artificial Sequence
  Description of Artificial Sequence: Synthetic oligonucleotide
ucgucgucagugucagccc

SEQ ID NO: 1992438 - RNA, 19 nt, Artificial Sequence
  Description of Artificial Sequence: Synthetic oligonucleotide
cacccgaauccaaggagac

SEQ ID NO: 1992439 - RNA, 19 nt, Artificial Sequence
  Description of Artificial Sequence: Synthetic oligonucleotide
acucuugucuugcaucauu

SEQ ID NO: 1992440 - RNA, 19 nt, Artificial Sequence
  Description of Artificial Sequence: Synthetic oligonucleotide
ccguuuuccaagacagugg

SEQ ID NO: 1992441 - RNA, 19 nt, Artificial Sequence
  Description of Artificial Sequence: Synthetic oligonucleotide
uuuccgcuucagacgggcc

SEQ ID NO: 1992442 - RNA, 19 nt, Artificial Sequence
  Description of Artificial Sequence: Synthetic oligonucleotide
gggaccagaaucuugccaa

SEQ ID NO: 1992443 - RNA, 19 nt, Artificial Sequence
  Description of Artificial Sequence: Synthetic oligonucleotide
aagacaguggggagggaau

SEQ ID NO: 1992444 - RNA, 19 nt, Artificial Sequence
  Description of Artificial Sequence: Synthetic oligonucleotide
ugcgccuguugaccucugg

SEQ ID NO: 1992445 - RNA, 19 nt, Artificial Sequence
  Description of Artificial Sequence: Synthetic oligonucleotide
uggguagcgcgugccacgg

SEQ ID NO: 1992446 - RNA, 19 nt, Artificial Sequence
  Description of Artificial Sequence: Synthetic oligonucleotide
gagguggaucaguuuccgc

SEQ ID NO: 1992447 - RNA, 19 nt, Artificial Sequence
  Description of Artificial Sequence: Synthetic oligonucleotide
gugucagcccuggagguag

SEQ ID NO: 1992448 - RNA, 19 nt, Artificial Sequence
  Description of Artificial Sequence: Synthetic oligonucleotide
uccuccuccuccuccuccc

SEQ ID NO: 1992449 - RNA, 19 nt, Artificial Sequence
  Description of Artificial Sequence: Synthetic oligonucleotide
guuuccgcuucagacgggc

SEQ ID NO: 1992450 - RNA, 19 nt, Artificial Sequence
  Description of Artificial Sequence: Synthetic oligonucleotide
uccugcagauacguggagu

SEQ ID NO: 1992451 - RNA, 19 nt, Artificial Sequence
  Description of Artificial Sequence: Synthetic oligonucleotide
auugaaggauguagaggug

SEQ ID NO: 1992452 - RNA, 19 nt, Artificial Sequence
  Description of Artificial Sequence: Synthetic oligonucleotide
uucagacgggccuccugca

SEQ ID NO: 1992453 - RNA, 19 nt, Artificial Sequence
  Description of Artificial Sequence: Synthetic oligonucleotide
ugaccucuggguagcgcgu

SEQ ID NO: 1992454 - RNA, 19 nt, Artificial Sequence
  Description of Artificial Sequence: Synthetic oligonucleotide
gcuccgguuuucccgaagg

SEQ ID NO: 1992455 - RNA, 19 nt, Artificial Sequence
  Description of Artificial Sequence: Synthetic oligonucleotide
uuaggggagcccgaagaau

SEQ ID NO: 1992456 - RNA, 19 nt, Artificial Sequence
  Description of Artificial Sequence: Synthetic oligonucleotide
agggucguccagcuccgag

SEQ ID NO: 1992457 - RNA, 19 nt, Artificial Sequence
  Description of Artificial Sequence: Synthetic oligonucleotide
ucuccucaaggcaccuccu

SEQ ID NO: 1992458 - RNA, 19 nt, Artificial Sequence
  Description of Artificial Sequence: Synthetic oligonucleotide
gagauugugccggguggcc

SEQ ID NO: 1992459 - RNA, 19 nt, Artificial Sequence
  Description of Artificial Sequence: Synthetic oligonucleotide
guaggggauucuuugcucu

SEQ ID NO: 1992460 - RNA, 19 nt, Artificial Sequence
  Description of Artificial Sequence: Synthetic oligonucleotide
gggaugccaguccacuagg

SEQ ID NO: 1992461 - RNA, 19 nt, Artificial Sequence
  Description of Artificial Sequence: Synthetic oligonucleotide
ugccacauacagcgccagc

SEQ ID NO: 1992462 - RNA, 19 nt, Artificial Sequence
  Description of Artificial Sequence: Synthetic oligonucleotide
uccaagcgcuggaucugcc

SEQ ID NO: 1992463 - RNA, 19 nt, Artificial Sequence
  Description of Artificial Sequence: Synthetic oligonucleotide
cuccgguuuucccgaaggc

SEQ ID NO: 1992464 - RNA, 19 nt, Artificial Sequence
  Description of Artificial Sequence: Synthetic oligonucleotide
ucccuccuccuccuccucc

SEQ ID NO: 1992465 - RNA, 19 nt, Artificial Sequence
  Description of Artificial Sequence: Synthetic oligonucleotide
agcccuggagguaguaggg

SEQ ID NO: 1992466 - RNA, 19 nt, Artificial Sequence
  Description of Artificial Sequence: Synthetic oligonucleotide
ccugcagauacguggaguc

SEQ ID NO: 1992467 - RNA, 19 nt, Artificial Sequence
  Description of Artificial Sequence: Synthetic oligonucleotide
uguugaccucuggguagcg

SEQ ID NO: 1992468 - RNA, 19 nt, Artificial Sequence
  Description of Artificial Sequence: Synthetic oligonucleotide
uggcucgucucuucugccu

SEQ ID NO: 1992469 - RNA, 19 nt, Artificial Sequence
  Description of Artificial Sequence: Synthetic oligonucleotide
gacgagccaacgugggauc

SEQ ID NO: 1992470 - RNA, 19 nt, Artificial Sequence
  Description of Artificial Sequence: Synthetic oligonucleotide
cggcucauggccaagcucc

SEQ ID NO: 1992471 - RNA, 19 nt, Artificial Sequence
  Description of Artificial Sequence: Synthetic oligonucleotide
gagguaguagggcacuccu

SEQ ID NO: 1992472 - RNA, 19 nt, Artificial Sequence
  Description of Artificial Sequence: Synthetic oligonucleotide
ugccaagugugggaagaga

SEQ ID NO: 1992473 - RNA, 19 nt, Artificial Sequence
  Description of Artificial Sequence: Synthetic oligonucleotide
ugucggcgcuccuguaacc

SEQ ID NO: 1992474 - RNA, 19 nt, Artificial Sequence
  Description of Artificial Sequence: Synthetic oligonucleotide
gccccguuuuccaagacag

SEQ ID NO: 1992475 - RNA, 19 nt, Artificial Sequence
  Description of Artificial Sequence: Synthetic oligonucleotide
cuggcucgucucuucugcc

SEQ ID NO: 1992476 - RNA, 19 nt, Artificial Sequence
  Description of Artificial Sequence: Synthetic oligonucleotide
aggggagcccgaagaaugg

SEQ ID NO: 1992477 - RNA, 19 nt, Artificial Sequence
  Description of Artificial Sequence: Synthetic oligonucleotide
ggggagggaaucuucugac

SEQ ID NO: 1992478 - RNA, 19 nt, Artificial Sequence
  Description of Artificial Sequence: Synthetic oligonucleotide
uccuccuccuccuccuccu

SEQ ID NO: 1992479 - RNA, 19 nt, Artificial Sequence
  Description of Artificial Sequence: Synthetic oligonucleotide
uccuccuccuccuccucac

SEQ ID NO: 1992480 - RNA, 19 nt, Artificial Sequence
  Description of Artificial Sequence: Synthetic oligonucleotide
ccguaucucugccacauac

SEQ ID NO: 1992481 - RNA, 19 nt, Artificial Sequence
  Description of Artificial Sequence: Synthetic oligonucleotide
ggauguagaggugaccaca

SEQ ID NO: 1992482 - RNA, 19 nt, Artificial Sequence
  Description of Artificial Sequence: Synthetic oligonucleotide
aucuugccaagugugggaa

SEQ ID NO: 1992483 - RNA, 19 nt, Artificial Sequence
  Description of Artificial Sequence: Synthetic oligonucleotide
guagggcacuccugggaug

SEQ ID NO: 1992484 - RNA, 19 nt, Artificial Sequence
  Description of Artificial Sequence: Synthetic oligonucleotide
uguugaugagccgcucaau

SEQ ID NO: 1992485 - RNA, 19 nt, Artificial Sequence
  Description of Artificial Sequence: Synthetic oligonucleotide
aaguguugccuaggagccu

SEQ ID NO: 1992486 - RNA, 19 nt, Artificial Sequence
  Description of Artificial Sequence: Synthetic oligonucleotide
cauacagcgccagcagcug

SEQ ID NO: 1992487 - RNA, 19 nt, Artificial Sequence
  Description of Artificial Sequence: Synthetic oligonucleotide
gugucggcgcuccuguaac

SEQ ID NO: 1992488 - RNA, 19 nt, Artificial Sequence
  Description of Artificial Sequence: Synthetic oligonucleotide
cccguuuuccaagacagug

SEQ ID NO: 1992489 - RNA, 19 nt, Artificial Sequence
  Description of Artificial Sequence: Synthetic oligonucleotide
ucggcgcuccuguaaccug

SEQ ID NO: 1992490 - RNA, 19 nt, Artificial Sequence
  Description of Artificial Sequence: Synthetic oligonucleotide
agccggcucauggccaagc

SEQ ID NO: 1992491 - RNA, 19 nt, Artificial Sequence
  Description of Artificial Sequence: Synthetic oligonucleotide
agaugaggucgaggugucg

SEQ ID NO: 1992492 - RNA, 19 nt, Artificial Sequence
  Description of Artificial Sequence: Synthetic oligonucleotide
cgcuccuguaaccugacgc

SEQ ID NO: 1992493 - RNA, 19 nt, Artificial Sequence
  Description of Artificial Sequence: Synthetic oligonucleotide
aggcgacgagccaacgugg

SEQ ID NO: 1992494 - RNA, 19 nt, Artificial Sequence
  Description of Artificial Sequence: Synthetic oligonucleotide
gccaagugugggaagagac

SEQ ID NO: 1992495 - RNA, 19 nt, Artificial Sequence
  Description of Artificial Sequence: Synthetic oligonucleotide
cacaucccggaaggcaucc

SEQ ID NO: 1992496 - RNA, 19 nt, Artificial Sequence
  Description of Artificial Sequence: Synthetic oligonucleotide
uaggggauucuuugcucua

SEQ ID NO: 1992497 - RNA, 19 nt, Artificial Sequence
  Description of Artificial Sequence: Synthetic oligonucleotide
ggaccagaaucuugccaag

SEQ ID NO: 1992498 - RNA, 19 nt, Artificial Sequence
  Description of Artificial Sequence: Synthetic oligonucleotide
ccgagauugugccgggugg

SEQ ID NO: 1992499 - RNA, 19 nt, Artificial Sequence
  Description of Artificial Sequence: Synthetic oligonucleotide
gcgccuguugaccucuggg

SEQ ID NO: 1992500 - RNA, 19 nt, Artificial Sequence
  Description of Artificial Sequence: Synthetic oligonucleotide
gcaucauugcauauuugga

SEQ ID NO: 1992501 - RNA, 19 nt, Artificial Sequence
  Description of Artificial Sequence: Synthetic oligonucleotide
cuccuccuccuccuccucc

SEQ ID NO: 1992502 - RNA, 19 nt, Artificial Sequence
  Description of Artificial Sequence: Synthetic oligonucleotide
auggccaagcuccgguuuu

SEQ ID NO: 1992503 - RNA, 19 nt, Artificial Sequence
  Description of Artificial Sequence: Synthetic oligonucleotide
agcuccgguuuucccgaag

SEQ ID NO: 1992504 - RNA, 19 nt, Artificial Sequence
  Description of Artificial Sequence: Synthetic oligonucleotide
guaaccugacgcccacauc

SEQ ID NO: 1992505 - RNA, 19 nt, Artificial Sequence
  Description of Artificial Sequence: Synthetic oligonucleotide
caguggggagggaaucuuc

SEQ ID NO: 1992506 - RNA, 19 nt, Artificial Sequence
  Description of Artificial Sequence: Synthetic oligonucleotide
cacuaggacccucacccga

SEQ ID NO: 1992507 - RNA, 19 nt, Artificial Sequence
  Description of Artificial Sequence: Synthetic oligonucleotide
guagcgcgugccacgguag

SEQ ID NO: 1992508 - RNA, 19 nt, Artificial Sequence
  Description of Artificial Sequence: Synthetic oligonucleotide
gauguagaggugaccacau

SEQ ID NO: 1992509 - RNA, 19 nt, Artificial Sequence
  Description of Artificial Sequence: Synthetic oligonucleotide
uguugccuaggagccuggc

SEQ ID NO: 1992510 - RNA, 19 nt, Artificial Sequence
  Description of Artificial Sequence: Synthetic oligonucleotide
agacgggccuccugcagau

SEQ ID NO: 1992511 - RNA, 19 nt, Artificial Sequence
  Description of Artificial Sequence: Synthetic oligonucleotide
gaaggcgacgagccaacgu

SEQ ID NO: 1992512 - RNA, 19 nt, Artificial Sequence
  Description of Artificial Sequence: Synthetic oligonucleotide
agcgcgugccacgguaggg

SEQ ID NO: 1992513 - RNA, 19 nt, Artificial Sequence
  Description of Artificial Sequence: Synthetic oligonucleotide
ggagucagggucguccagc

SEQ ID NO: 1992514 - RNA, 19 nt, Artificial Sequence
  Description of Artificial Sequence: Synthetic oligonucleotide
guugaccucuggguagcgc

SEQ ID NO: 1992515 - RNA, 19 nt, Artificial Sequence
  Description of Artificial Sequence: Synthetic oligonucleotide
cgagaucucuugcaugggg

SEQ ID NO: 1992516 - RNA, 19 nt, Artificial Sequence
  Description of Artificial Sequence: Synthetic oligonucleotide
cucuaugacccggccaguc

SEQ ID NO: 1992517 - RNA, 19 nt, Artificial Sequence
  Description of Artificial Sequence: Synthetic oligonucleotide
ggggauucuuugcucuaug

SEQ ID NO: 1992518 - RNA, 19 nt, Artificial Sequence
  Description of Artificial Sequence: Synthetic oligonucleotide
caagacaguggggagggaa

SEQ ID NO: 1992519 - RNA, 19 nt, Artificial Sequence
  Description of Artificial Sequence: Synthetic oligonucleotide
uccucgaaccacggguccu

SEQ ID NO: 1992520 - RNA, 19 nt, Artificial Sequence
  Description of Artificial Sequence: Synthetic oligonucleotide
caguccacuaggacccuca

SEQ ID NO: 1992521 - RNA, 19 nt, Artificial Sequence
  Description of Artificial Sequence: Synthetic oligonucleotide
uccgcuucagacgggccuc

SEQ ID NO: 1992522 - RNA, 19 nt, Artificial Sequence
  Description of Artificial Sequence: Synthetic oligonucleotide
gaucugccuccucgaacca

SEQ ID NO: 1992523 - RNA, 19 nt, Artificial Sequence
  Description of Artificial Sequence: Synthetic oligonucleotide
gagccaacgugggaucuga

SEQ ID NO: 1992524 - RNA, 19 nt, Artificial Sequence
  Description of Artificial Sequence: Synthetic oligonucleotide
gcagauacguggagucagg

SEQ ID NO: 1992525 - RNA, 19 nt, Artificial Sequence
  Description of Artificial Sequence: Synthetic oligonucleotide
gguuuucccgaaggcgacg

SEQ ID NO: 1992526 - RNA, 19 nt, Artificial Sequence
  Description of Artificial Sequence: Synthetic oligonucleotide
cuccugcagauacguggag

SEQ ID NO: 1992527 - RNA, 19 nt, Artificial Sequence
  Description of Artificial Sequence: Synthetic oligonucleotide
caaugcgccuguugaccuc

SEQ ID NO: 1992528 - RNA, 19 nt, Artificial Sequence
  Description of Artificial Sequence: Synthetic oligonucleotide
ggagguaguagggcacucc

SEQ ID NO: 1992529 - RNA, 19 nt, Artificial Sequence
  Description of Artificial Sequence: Synthetic oligonucleotide
ccuggagguaguagggcac

SEQ ID NO: 1992530 - RNA, 19 nt, Artificial Sequence
  Description of Artificial Sequence: Synthetic oligonucleotide
gcaguccuucaacucacac

SEQ ID NO: 1992531 - RNA, 19 nt, Artificial Sequence
  Description of Artificial Sequence: Synthetic oligonucleotide
gccgagauugugccgggug

SEQ ID NO: 1992532 - RNA, 19 nt, Artificial Sequence
  Description of Artificial Sequence: Synthetic oligonucleotide
gcuccgagagauccaacuc

SEQ ID NO: 1992533 - RNA, 19 nt, Artificial Sequence
  Description of Artificial Sequence: Synthetic oligonucleotide
agguaguagggcacuccug

SEQ ID NO: 1992534 - RNA, 19 nt, Artificial Sequence
  Description of Artificial Sequence: Synthetic oligonucleotide
ggagcugcugucggggaag

SEQ ID NO: 1992535 - RNA, 19 nt, Artificial Sequence
  Description of Artificial Sequence: Synthetic oligonucleotide
ggggaccagaaucuugcca

SEQ ID NO: 1992536 - RNA, 19 nt, Artificial Sequence
  Description of Artificial Sequence: Synthetic oligonucleotide
acuaggacccucacccgaa

SEQ ID NO: 1992537 - RNA, 19 nt, Artificial Sequence
  Description of Artificial Sequence: Synthetic oligonucleotide
cucgcccuccucacucuug

SEQ ID NO: 1992538 - RNA, 19 nt, Artificial Sequence
  Description of Artificial Sequence: Synthetic oligonucleotide
aggcaccuccuuccuccuc

SEQ ID NO: 1992539 - RNA, 19 nt, Artificial Sequence
  Description of Artificial Sequence: Synthetic oligonucleotide
ccgguuuucccgaaggcga

SEQ ID NO: 1992540 - RNA, 19 nt, Artificial Sequence
  Description of Artificial Sequence: Synthetic oligonucleotide
uaggagccuggcucgucuc

SEQ ID NO: 1992541 - RNA, 19 nt, Artificial Sequence
  Description of Artificial Sequence: Synthetic oligonucleotide
aguuuccgcuucagacggg

SEQ ID NO: 1992542 - RNA, 19 nt, Artificial Sequence
  Description of Artificial Sequence: Synthetic oligonucleotide
cugacgcccacaucccgga

SEQ ID NO: 1992543 - RNA, 19 nt, Artificial Sequence
  Description of Artificial Sequence: Synthetic oligonucleotide
uacguggagucagggucgu

SEQ ID NO: 1992544 - RNA, 19 nt, Artificial Sequence
  Description of Artificial Sequence: Synthetic oligonucleotide
aggggauucuuugcucuau

SEQ ID NO: 1992545 - RNA, 19 nt, Artificial Sequence
  Description of Artificial Sequence: Synthetic oligonucleotide
gccgccguaucucugccac

SEQ ID NO: 1992546 - RNA, 19 nt, Artificial Sequence
  Description of Artificial Sequence: Synthetic oligonucleotide
ugucagcccuggagguagu

SEQ ID NO: 1992547 - RNA, 19 nt, Artificial Sequence
  Description of Artificial Sequence: Synthetic oligonucleotide
cacagccgcccaaagaggu

SEQ ID NO: 1992548 - RNA, 19 nt, Artificial Sequence
  Description of Artificial Sequence: Synthetic oligonucleotide
acgugggaucugagagugc

SEQ ID NO: 1992549 - RNA, 19 nt, Artificial Sequence
  Description of Artificial Sequence: Synthetic oligonucleotide
aggcauccugagccaugag

SEQ ID NO: 1992550 - RNA, 19 nt, Artificial Sequence
  Description of Artificial Sequence: Synthetic oligonucleotide
gccaacgugggaucugaga

SEQ ID NO: 1992551 - RNA, 19 nt, Artificial Sequence
  Description of Artificial Sequence: Synthetic oligonucleotide
acacgcccauugaaggaug

SEQ ID NO: 1992552 - RNA, 19 nt, Artificial Sequence
  Description of Artificial Sequence: Synthetic oligonucleotide
ggcgacgagccaacguggg

SEQ ID NO: 1992553 - RNA, 19 nt, Artificial Sequence
  Description of Artificial Sequence: Synthetic oligonucleotide
acaguggggagggaaucuu

SEQ ID NO: 1992554 - RNA, 19 nt, Artificial Sequence
  Description of Artificial Sequence: Synthetic oligonucleotide
gggucguccagcuccgaga

SEQ ID NO: 1992555 - RNA, 19 nt, Artificial Sequence
  Description of Artificial Sequence: Synthetic oligonucleotide
acccgaauccaaggagacu

SEQ ID NO: 1992556 - RNA, 19 nt, Artificial Sequence
  Description of Artificial Sequence: Synthetic oligonucleotide
acgagccaacgugggaucu

SEQ ID NO: 1992557 - RNA, 19 nt, Artificial Sequence
  Description of Artificial Sequence: Synthetic oligonucleotide
ucucgcccuccucacucuu

SEQ ID NO: 1992558 - RNA, 19 nt, Artificial Sequence
  Description of Artificial Sequence: Synthetic oligonucleotide
caacgugggaucugagagu

SEQ ID NO: 1992559 - RNA, 19 nt, Artificial Sequence
  Description of Artificial Sequence: Synthetic oligonucleotide
aagcuccgguuuucccgaa

SEQ ID NO: 1992560 - RNA, 19 nt, Artificial Sequence
  Description of Artificial Sequence: Synthetic oligonucleotide
agacuuuaggggagcccga

SEQ ID NO: 1992561 - RNA, 19 nt, Artificial Sequence
  Description of Artificial Sequence: Synthetic oligonucleotide
gugugggaagagacacgcc

SEQ ID NO: 1992562 - RNA, 19 nt, Artificial Sequence
  Description of Artificial Sequence: Synthetic oligonucleotide
acagccgcccaaagaggug

SEQ ID NO: 1992563 - RNA, 19 nt, Artificial Sequence
  Description of Artificial Sequence: Synthetic oligonucleotide
cgcccauugaaggauguag

SEQ ID NO: 1992564 - RNA, 19 nt, Artificial Sequence
  Description of Artificial Sequence: Synthetic oligonucleotide
cuuccgagaucucuugcau

SEQ ID NO: 1992565 - RNA, 19 nt, Artificial Sequence
  Description of Artificial Sequence: Synthetic oligonucleotide
ccacuaggacccucacccg

SEQ ID NO: 1992566 - RNA, 19 nt, Artificial Sequence
  Description of Artificial Sequence: Synthetic oligonucleotide
agugucagcccuggaggua

SEQ ID NO: 1992567 - RNA, 19 nt, Artificial Sequence
  Description of Artificial Sequence: Synthetic oligonucleotide
gcccauugaaggauguaga

SEQ ID NO: 1992568 - RNA, 19 nt, Artificial Sequence
  Description of Artificial Sequence: Synthetic oligonucleotide
ugacgcccacaucccggaa

SEQ ID NO: 1992569 - RNA, 19 nt, Artificial Sequence
  Description of Artificial Sequence: Synthetic oligonucleotide
ggcacuccugggaugccag

SEQ ID NO: 1992570 - RNA, 19 nt, Artificial Sequence
  Description of Artificial Sequence: Synthetic oligonucleotide
aggcccuggcuuguugaug

SEQ ID NO: 1992571 - RNA, 19 nt, Artificial Sequence
  Description of Artificial Sequence: Synthetic oligonucleotide
gguagcgcgugccacggua

SEQ ID NO: 1992572 - RNA, 19 nt, Artificial Sequence
  Description of Artificial Sequence: Synthetic oligonucleotide
gaccagaaucuugccaagu

SEQ ID NO: 1992573 - RNA, 19 nt, Artificial Sequence
  Description of Artificial Sequence: Synthetic oligonucleotide
cuaggagccuggcucgucu

SEQ ID NO: 1992574 - RNA, 19 nt, Artificial Sequence
  Description of Artificial Sequence: Synthetic oligonucleotide
ggugucggcgcuccuguaa

SEQ ID NO: 1992575 - RNA, 19 nt, Artificial Sequence
  Description of Artificial Sequence: Synthetic oligonucleotide
gaccacaucugccccguuu

SEQ ID NO: 1992576 - RNA, 19 nt, Artificial Sequence
  Description of Artificial Sequence: Synthetic oligonucleotide
gggaggagcaguccuucaa

SEQ ID NO: 1992577 - RNA, 19 nt, Artificial Sequence
  Description of Artificial Sequence: Synthetic oligonucleotide
ccuguaaccugacgcccac

SEQ ID NO: 1992578 - RNA, 19 nt, Artificial Sequence
  Description of Artificial Sequence: Synthetic oligonucleotide
gcgcgugccacgguagggg

SEQ ID NO: 1992579 - RNA, 19 nt, Artificial Sequence
  Description of Artificial Sequence: Synthetic oligonucleotide
cuuccuccuccuccuccuc

SEQ ID NO: 1992580 - RNA, 19 nt, Artificial Sequence
  Description of Artificial Sequence: Synthetic oligonucleotide
agccgccguaucucugcca

SEQ ID NO: 1992581 - RNA, 19 nt, Artificial Sequence
  Description of Artificial Sequence: Synthetic oligonucleotide
cgcccaaagagguggauca

SEQ ID NO: 1992582 - RNA, 19 nt, Artificial Sequence
  Description of Artificial Sequence: Synthetic oligonucleotide
acgucaccauagucaggaa

SEQ ID NO: 1992583 - RNA, 19 nt, Artificial Sequence
  Description of Artificial Sequence: Synthetic oligonucleotide
caaagagguggaucaguuu

SEQ ID NO: 1992584 - RNA, 19 nt, Artificial Sequence
  Description of Artificial Sequence: Synthetic oligonucleotide
cagcuccgagagauccaac

SEQ ID NO: 1992585 - RNA, 19 nt, Artificial Sequence
  Description of Artificial Sequence: Synthetic oligonucleotide
ggagcccgaagaaugggaa

SEQ ID NO: 1992586 - RNA, 19 nt, Artificial Sequence
  Description of Artificial Sequence: Synthetic oligonucleotide
ccucucgcccuccucacuc

SEQ ID NO: 1992587 - RNA, 19 nt, Artificial Sequence
  Description of Artificial Sequence: Synthetic oligonucleotide
cuccuccuccuccucccuc

SEQ ID NO: 1992588 - RNA, 19 nt, Artificial Sequence
  Description of Artificial Sequence: Synthetic oligonucleotide
cucgaaccacggguccuug

SEQ ID NO: 1992589 - RNA, 19 nt, Artificial Sequence
  Description of Artificial Sequence: Synthetic oligonucleotide
cgcucaaugcgccuguuga

SEQ ID NO: 1992590 - RNA, 19 nt, Artificial Sequence
  Description of Artificial Sequence: Synthetic oligonucleotide
cuccuccuccuccuccuca

SEQ ID NO: 1992591 - RNA, 19 nt, Artificial Sequence
  Description of Artificial Sequence: Synthetic oligonucleotide
cuggaucugccuccucgaa

SEQ ID NO: 1992592 - RNA, 19 nt, Artificial Sequence
  Description of Artificial Sequence: Synthetic oligonucleotide
gcccgaagaaugggaagug

SEQ ID NO: 1992593 - RNA, 19 nt, Artificial Sequence
  Description of Artificial Sequence: Synthetic oligonucleotide
ccagaaucuugccaagugu

SEQ ID NO: 1992594 - RNA, 19 nt, Artificial Sequence
  Description of Artificial Sequence: Synthetic oligonucleotide
gguggaucaguuuccgcuu

SEQ ID NO: 1992595 - RNA, 19 nt, Artificial Sequence
  Description of Artificial Sequence: Synthetic oligonucleotide
agccaacgugggaucugag

SEQ ID NO: 1992596 - RNA, 19 nt, Artificial Sequence
  Description of Artificial Sequence: Synthetic oligonucleotide
ggccgcccucuccacagcc

SEQ ID NO: 1992597 - RNA, 19 nt, Artificial Sequence
  Description of Artificial Sequence: Synthetic oligonucleotide
cguaucucugccacauaca

SEQ ID NO: 1992598 - RNA, 19 nt, Artificial Sequence
  Description of Artificial Sequence: Synthetic oligonucleotide
ccgaaggcgacgagccaac

SEQ ID NO: 1992599 - RNA, 19 nt, Artificial Sequence
  Description of Artificial Sequence: Synthetic oligonucleotide
acccggccagucagggagg

SEQ ID NO: 1992600 - RNA, 19 nt, Artificial Sequence
  Description of Artificial Sequence: Synthetic oligonucleotide
gggagcccgaagaauggga

SEQ ID NO: 1992601 - RNA, 19 nt, Artificial Sequence
  Description of Artificial Sequence: Synthetic oligonucleotide
gacccucacccgaauccaa

SEQ ID NO: 1992602 - RNA, 19 nt, Artificial Sequence
  Description of Artificial Sequence: Synthetic oligonucleotide
gugagguggcagccaaagu

SEQ ID NO: 1992603 - RNA, 19 nt, Artificial Sequence
  Description of Artificial Sequence: Synthetic oligonucleotide
acaucccggaaggcauccu

SEQ ID NO: 1992604 - RNA, 19 nt, Artificial Sequence
  Description of Artificial Sequence: Synthetic oligonucleotide
ugccacgguaggggauucu

SEQ ID NO: 1992605 - RNA, 19 nt, Artificial Sequence
  Description of Artificial Sequence: Synthetic oligonucleotide
gucuugcaucauugcauau

SEQ ID NO: 1992606 - RNA, 19 nt, Artificial Sequence
  Description of Artificial Sequence: Synthetic oligonucleotide
cgugggaucugagagugca

SEQ ID NO: 1992607 - RNA, 19 nt, Artificial Sequence
  Description of Artificial Sequence: Synthetic oligonucleotide
ggcagccaaaguuguagau

SEQ ID NO: 1992608 - RNA, 19 nt, Artificial Sequence
  Description of Artificial Sequence: Synthetic oligonucleotide
gcgcuccuguaaccugacg

SEQ ID NO: 1992609 - RNA, 19 nt, Artificial Sequence
  Description of Artificial Sequence: Synthetic oligonucleotide
gggagggaaucuucugacu

SEQ ID NO: 1992610 - RNA, 19 nt, Artificial Sequence
  Description of Artificial Sequence: Synthetic oligonucleotide
ccgagaucucuugcauggg

SEQ ID NO: 1992611 - RNA, 19 nt, Artificial Sequence
  Description of Artificial Sequence: Synthetic oligonucleotide
gucggcgcuccuguaaccu

SEQ ID NO: 1992612 - RNA, 19 nt, Artificial Sequence
  Description of Artificial Sequence: Synthetic oligonucleotide
gcacgucaccauagucagg

SEQ ID NO: 1992613 - RNA, 19 nt, Artificial Sequence
  Description of Artificial Sequence: Synthetic oligonucleotide
ccaaagagguggaucaguu

SEQ ID NO: 1992614 - RNA, 19 nt, Artificial Sequence
  Description of Artificial Sequence: Synthetic oligonucleotide
cgguuuucccgaaggcgac

SEQ ID NO: 1992615 - RNA, 19 nt, Artificial Sequence
  Description of Artificial Sequence: Synthetic oligonucleotide
cacgcccauugaaggaugu

SEQ ID NO: 1992616 - RNA, 19 nt, Artificial Sequence
  Description of Artificial Sequence: Synthetic oligonucleotide
cauggccaagcuccgguuu

SEQ ID NO: 1992617 - RNA, 19 nt, Artificial Sequence
  Description of Artificial Sequence: Synthetic oligonucleotide
ccucuggguagcgcgugcc

SEQ ID NO: 1992618 - RNA, 19 nt, Artificial Sequence
  Description of Artificial Sequence: Synthetic oligonucleotide
gcgacgagccaacguggga

SEQ ID NO: 1992619 - RNA, 19 nt, Artificial Sequence
  Description of Artificial Sequence: Synthetic oligonucleotide
cucccuccuccuccuccuc

SEQ ID NO: 1992620 - RNA, 19 nt, Artificial Sequence
  Description of Artificial Sequence: Synthetic oligonucleotide
acgcccauugaaggaugua

SEQ ID NO: 1992621 - RNA, 19 nt, Artificial Sequence
  Description of Artificial Sequence: Synthetic oligonucleotide
cccgaauccaaggagacuu

SEQ ID NO: 1992622 - RNA, 19 nt, Artificial Sequence
  Description of Artificial Sequence: Synthetic oligonucleotide
aggugucggcgcuccugua

SEQ ID NO: 1992623 - RNA, 19 nt, Artificial Sequence
  Description of Artificial Sequence: Synthetic oligonucleotide
cugucggggaaggccgaga

SEQ ID NO: 1992624 - RNA, 19 nt, Artificial Sequence
  Description of Artificial Sequence: Synthetic oligonucleotide
ccgcucaaugcgccuguug

SEQ ID NO: 1992625 - RNA, 19 nt, Artificial Sequence
  Description of Artificial Sequence: Synthetic oligonucleotide
ccgaagaaugggaaguguu

SEQ ID NO: 1992626 - RNA, 19 nt, Artificial Sequence
  Description of Artificial Sequence: Synthetic oligonucleotide
ccgcccaaagagguggauc

SEQ ID NO: 1992627 - RNA, 19 nt, Artificial Sequence
  Description of Artificial Sequence: Synthetic oligonucleotide
agccgcccaaagaggugga

SEQ ID NO: 1992628 - RNA, 19 nt, Artificial Sequence
  Description of Artificial Sequence: Synthetic oligonucleotide
cugagagugcagggucaaa

SEQ ID NO: 1992629 - RNA, 19 nt, Artificial Sequence
  Description of Artificial Sequence: Synthetic oligonucleotide
cucucgcccuccucacucu

SEQ ID NO: 1992630 - RNA, 19 nt, Artificial Sequence
  Description of Artificial Sequence: Synthetic oligonucleotide
gugccacgguaggggauuc

SEQ ID NO: 1992631 - RNA, 19 nt, Artificial Sequence
  Description of Artificial Sequence: Synthetic oligonucleotide
cuaggacccucacccgaau

SEQ ID NO: 1992632 - RNA, 19 nt, Artificial Sequence
  Description of Artificial Sequence: Synthetic oligonucleotide
cagccggcucauggccaag

SEQ ID NO: 1992633 - RNA, 19 nt, Artificial Sequence
  Description of Artificial Sequence: Synthetic oligonucleotide
cccgaaggcgacgagccaa

SEQ ID NO: 1992634 - RNA, 19 nt, Artificial Sequence
  Description of Artificial Sequence: Synthetic oligonucleotide
cgaaggcgacgagccaacg

SEQ ID NO: 1992635 - RNA, 19 nt, Artificial Sequence
  Description of Artificial Sequence: Synthetic oligonucleotide
gcucgucucuucugccucu

SEQ ID NO: 1992636 - RNA, 19 nt, Artificial Sequence
  Description of Artificial Sequence: Synthetic oligonucleotide
ggucaaagccuggcuuaua

SEQ ID NO: 1992637 - RNA, 19 nt, Artificial Sequence
  Description of Artificial Sequence: Synthetic oligonucleotide
ccuaggagccuggcucguc

SEQ ID NO: 1992638 - RNA, 19 nt, Artificial Sequence
  Description of Artificial Sequence: Synthetic oligonucleotide
ccaagcgcuggaucugccu

SEQ ID NO: 1992639 - RNA, 19 nt, Artificial Sequence
  Description of Artificial Sequence: Synthetic oligonucleotide
ggucgaggugucggcgcuc

SEQ ID NO: 1992640 - RNA, 19 nt, Artificial Sequence
  Description of Artificial Sequence: Synthetic oligonucleotide
ccagccggcucauggccaa

SEQ ID NO: 1992641 - RNA, 19 nt, Artificial Sequence
  Description of Artificial Sequence: Synthetic oligonucleotide
cggcgcuccuguaaccuga

SEQ ID NO: 1992642 - RNA, 19 nt, Artificial Sequence
  Description of Artificial Sequence: Synthetic oligonucleotide
cgguaggggauucuuugcu

SEQ ID NO: 1992643 - RNA, 19 nt, Artificial Sequence
  Description of Artificial Sequence: Synthetic oligonucleotide
ccuccuccuccuccuccuc

SEQ ID NO: 1992644 - RNA, 19 nt, Artificial Sequence
  Description of Artificial Sequence: Synthetic oligonucleotide
ccacggguccuugaggccu

SEQ ID NO: 1992645 - RNA, 19 nt, Artificial Sequence
  Description of Artificial Sequence: Synthetic oligonucleotide
cguccagcuccgagagauc

SEQ ID NO: 1992646 - RNA, 19 nt, Artificial Sequence
  Description of Artificial Sequence: Synthetic oligonucleotide
gccguaucucugccacaua

SEQ ID NO: 1992647 - RNA, 19 nt, Artificial Sequence
  Description of Artificial Sequence: Synthetic oligonucleotide
cccgaagaaugggaagugu

SEQ ID NO: 1992648 - RNA, 19 nt, Artificial Sequence
  Description of Artificial Sequence: Synthetic oligonucleotide
cacggguccuugaggccuu

SEQ ID NO: 1992649 - RNA, 19 nt, Artificial Sequence
  Description of Artificial Sequence: Synthetic oligonucleotide
cgcgugccacgguagggga

SEQ ID NO: 1992650 - RNA, 19 nt, Artificial Sequence
  Description of Artificial Sequence: Synthetic oligonucleotide
cgacgagccaacgugggau

SEQ ID NO: 1992651 - RNA, 19 nt, Artificial Sequence
  Description of Artificial Sequence: Synthetic oligonucleotide
cgucgucagugucagcccu

SEQ ID NO: 1992652 - RNA, 19 nt, Artificial Sequence
  Description of Artificial Sequence: Synthetic oligonucleotide
cagggucguccagcuccga

SEQ ID NO: 1992653 - RNA, 19 nt, Artificial Sequence
  Description of Artificial Sequence: Synthetic oligonucleotide
cccuccuccuccuccuccu

SEQ ID NO: 1992654 - RNA, 19 nt, Artificial Sequence
  Description of Artificial Sequence: Synthetic oligonucleotide
ccacgguaggggauucuuu

SEQ ID NO: 1992655 - RNA, 19 nt, Artificial Sequence
  Description of Artificial Sequence: Synthetic oligonucleotide
ccggccagucagggaggag

SEQ ID NO: 1992656 - RNA, 19 nt, Artificial Sequence
  Description of Artificial Sequence: Synthetic oligonucleotide
ccgccguaucucugccaca

SEQ ID NO: 1992657 - RNA, 19 nt, Artificial Sequence
  Description of Artificial Sequence: Synthetic oligonucleotide
ccgaauccaaggagacuuu

SEQ ID NO: 1992658 - RNA, 19 nt, Artificial Sequence
  Description of Artificial Sequence: Synthetic oligonucleotide
gccucucgcccuccucacu

SEQ ID NO: 1992659 - RNA, 19 nt, Artificial Sequence
  Description of Artificial Sequence: Synthetic oligonucleotide
gcucuaugacccggccagu

SEQ ID NO: 1992660 - RNA, 19 nt, Artificial Sequence
  Description of Artificial Sequence: Synthetic oligonucleotide
ccgcccucuccacagcccu

SEQ ID NO: 1992661 - RNA, 19 nt, Artificial Sequence
  Description of Artificial Sequence: Synthetic oligonucleotide
gccggguggccgcccucuc

SEQ ID NO: 1992662 - RNA, 19 nt, Artificial Sequence
  Description of Artificial Sequence: Synthetic oligonucleotide
gcgcuggaucugccuccuc

SEQ ID NO: 1992663 - RNA, 19 nt, Artificial Sequence
  Description of Artificial Sequence: Synthetic oligonucleotide
ccaagacaguggggaggga

SEQ ID NO: 1992664 - RNA, 19 nt, Artificial Sequence
  Description of Artificial Sequence: Synthetic oligonucleotide
cccggccagucagggagga

SEQ ID NO: 1992665 - RNA, 19 nt, Artificial Sequence
  Description of Artificial Sequence: Synthetic oligonucleotide
ggguagcgcgugccacggu

SEQ ID NO: 1992666 - RNA, 19 nt, Artificial Sequence
  Description of Artificial Sequence: Synthetic oligonucleotide
cgccguaucucugccacau

SEQ ID NO: 1992667 - RNA, 19 nt, Artificial Sequence
  Description of Artificial Sequence: Synthetic oligonucleotide
ggccgagauugugccgggu

SEQ ID NO: 1992668 - RNA, 19 nt, Artificial Sequence
  Description of Artificial Sequence: Synthetic oligonucleotide
ccgagagauccaacuccuu

SEQ ID NO: 1992669 - RNA, 19 nt, Artificial Sequence
  Description of Artificial Sequence: Synthetic oligonucleotide
gccuaggagccuggcucgu

SEQ ID NO: 1992670 - RNA, 19 nt, Artificial Sequence
  Description of Artificial Sequence: Synthetic oligonucleotide
ccuccuccuccuccucccu

SEQ ID NO: 1992671 - RNA, 19 nt, Artificial Sequence
  Description of Artificial Sequence: Synthetic oligonucleotide
ccucgaaccacggguccuu

SEQ ID NO: 1992672 - RNA, 19 nt, Artificial Sequence
  Description of Artificial Sequence: Synthetic oligonucleotide
cgugccacgguaggggauu

SEQ ID NO: 1992673 - RNA, 19 nt, Artificial Sequence
  Description of Artificial Sequence: Synthetic oligonucleotide
gcgugccacgguaggggau

SEQ ID NO: 1992674 - RNA, 19 nt, Artificial Sequence
  Description of Artificial Sequence: Synthetic oligonucleotide
gccgcccaaagagguggau

SEQ ID NO: 1992675 - RNA, 19 nt, Artificial Sequence
  Description of Artificial Sequence: Synthetic oligonucleotide
cgcuucagacgggccuccu

SEQ ID NO: 1992676 - RNA, 19 nt, Artificial Sequence
  Description of Artificial Sequence: Synthetic oligonucleotide
auuaacaauguucaggucc

SEQ ID NO: 1992677 - RNA, 19 nt, Artificial Sequence
  Description of Artificial Sequence: Synthetic oligonucleotide
aaugaaaauacauuaaaga

SEQ ID NO: 1992678 - RNA, 19 nt, Artificial Sequence
  Description of Artificial Sequence: Synthetic oligonucleotide
ucuaauuacagcaacaugu

SEQ ID NO: 1992679 - RNA, 19 nt, Artificial Sequence
  Description of Artificial Sequence: Synthetic oligonucleotide
uucgcaaagaacaagauug

SEQ ID NO: 1992680 - RNA, 19 nt, Artificial Sequence
  Description of Artificial Sequence: Synthetic oligonucleotide
aaugcuuuaaagcugucuc

SEQ ID NO: 1992681 - RNA, 19 nt, Artificial Sequence
  Description of Artificial Sequence: Synthetic oligonucleotide
uaugguuggaacaauaucc

SEQ ID NO: 1992682 - RNA, 19 nt, Artificial Sequence
  Description of Artificial Sequence: Synthetic oligonucleotide
aaacuaaacuuuuagaaga

SEQ ID NO: 1992683 - RNA, 19 nt, Artificial Sequence
  Description of Artificial Sequence: Synthetic oligonucleotide
uucaguaugccuuacauag

SEQ ID NO: 1992684 - RNA, 19 nt, Artificial Sequence
  Description of Artificial Sequence: Synthetic oligonucleotide
uuugagauuauucaguaug

SEQ ID NO: 1992685 - RNA, 19 nt, Artificial Sequence
  Description of Artificial Sequence: Synthetic oligonucleotide
aauaaauuugagauuauuc

SEQ ID NO: 1992686 - RNA, 19 nt, Artificial Sequence
  Description of Artificial Sequence: Synthetic oligonucleotide
ucuauggugaauccuaugg

SEQ ID NO: 1992687 - RNA, 19 nt, Artificial Sequence
  Description of Artificial Sequence: Synthetic oligonucleotide
agaacauuguaaaauaucc

SEQ ID NO: 1992688 - RNA, 19 nt, Artificial Sequence
  Description of Artificial Sequence: Synthetic oligonucleotide
aaagauaucauaaaucaug

SEQ ID NO: 1992689 - RNA, 19 nt, Artificial Sequence
  Description of Artificial Sequence: Synthetic oligonucleotide
aagaacaagauuggaaucc

SEQ ID NO: 1992690 - RNA, 19 nt, Artificial Sequence
  Description of Artificial Sequence: Synthetic oligonucleotide
aucuuuauaauaguguucc

SEQ ID NO: 1992691 - RNA, 19 nt, Artificial Sequence
  Description of Artificial Sequence: Synthetic oligonucleotide
aacugagacacuuucacag

SEQ ID NO: 1992692 - RNA, 19 nt, Artificial Sequence
  Description of Artificial Sequence: Synthetic oligonucleotide
auaacuuauuuacacauuc

SEQ ID NO: 1992693 - RNA, 19 nt, Artificial Sequence
  Description of Artificial Sequence: Synthetic oligonucleotide
ugauaggauauugagaugg

SEQ ID NO: 1992694 - RNA, 19 nt, Artificial Sequence
  Description of Artificial Sequence: Synthetic oligonucleotide
uauaauaguguucccagag

SEQ ID NO: 1992695 - RNA, 19 nt, Artificial Sequence
  Description of Artificial Sequence: Synthetic oligonucleotide
uuuauaauaguguucccag

SEQ ID NO: 1992696 - RNA, 19 nt, Artificial Sequence
  Description of Artificial Sequence: Synthetic oligonucleotide
uaaauuugagauuauucag

SEQ ID NO: 1992697 - RNA, 19 nt, Artificial Sequence
  Description of Artificial Sequence: Synthetic oligonucleotide
uugaauuucucuaugguga

SEQ ID NO: 1992698 - RNA, 19 nt, Artificial Sequence
  Description of Artificial Sequence: Synthetic oligonucleotide
auaaacuaaacuuuuagaa

SEQ ID NO: 1992699 - RNA, 19 nt, Artificial Sequence
  Description of Artificial Sequence: Synthetic oligonucleotide
guaaaagacagacuggagg

SEQ ID NO: 1992700 - RNA, 19 nt, Artificial Sequence
  Description of Artificial Sequence: Synthetic oligonucleotide
acauauaccaauuacuugu

SEQ ID NO: 1992701 - RNA, 19 nt, Artificial Sequence
  Description of Artificial Sequence: Synthetic oligonucleotide
aaagaacaagauuggaauc

SEQ ID NO: 1992702 - RNA, 19 nt, Artificial Sequence
  Description of Artificial Sequence: Synthetic oligonucleotide
gacacugagcauuugacgg

SEQ ID NO: 1992703 - RNA, 19 nt, Artificial Sequence
  Description of Artificial Sequence: Synthetic oligonucleotide
ugaaaauacauuaaagaua

SEQ ID NO: 1992704 - RNA, 19 nt, Artificial Sequence
  Description of Artificial Sequence: Synthetic oligonucleotide
uaaaccagaaaguuugucc

SEQ ID NO: 1992705 - RNA, 19 nt, Artificial Sequence
  Description of Artificial Sequence: Synthetic oligonucleotide
acuauuauccaguccaagg

SEQ ID NO: 1992706 - RNA, 19 nt, Artificial Sequence
  Description of Artificial Sequence: Synthetic oligonucleotide
uggaacaauauccugacac

SEQ ID NO: 1992707 - RNA, 19 nt, Artificial Sequence
  Description of Artificial Sequence: Synthetic oligonucleotide
uuuuaggccaaguaaacca

SEQ ID NO: 1992708 - RNA, 19 nt, Artificial Sequence
  Description of Artificial Sequence: Synthetic oligonucleotide
uagauuaacaauguucagg

SEQ ID NO: 1992709 - RNA, 19 nt, Artificial Sequence
  Description of Artificial Sequence: Synthetic oligonucleotide
cuugugaucccuuauaaug

SEQ ID NO: 1992710 - RNA, 19 nt, Artificial Sequence
  Description of Artificial Sequence: Synthetic oligonucleotide
aaggguaucaaguucuucu

SEQ ID NO: 1992711 - RNA, 19 nt, Artificial Sequence
  Description of Artificial Sequence: Synthetic oligonucleotide
uauaaacuaaacuuuuaga

SEQ ID NO: 1992712 - RNA, 19 nt, Artificial Sequence
  Description of Artificial Sequence: Synthetic oligonucleotide
agauuaacaauguucaggu

SEQ ID NO: 1992713 - RNA, 19 nt, Artificial Sequence
  Description of Artificial Sequence: Synthetic oligonucleotide
aacauuguaaaauauccuu

SEQ ID NO: 1992714 - RNA, 19 nt, Artificial Sequence
  Description of Artificial Sequence: Synthetic oligonucleotide
uauaaugcuuuaaagcugu

SEQ ID NO: 1992715 - RNA, 19 nt, Artificial Sequence
  Description of Artificial Sequence: Synthetic oligonucleotide
aaaccagaaaguuugucca

SEQ ID NO: 1992716 - RNA, 19 nt, Artificial Sequence
  Description of Artificial Sequence: Synthetic oligonucleotide
ucauacuauaaacuaaacu

SEQ ID NO: 1992717 - RNA, 19 nt, Artificial Sequence
  Description of Artificial Sequence: Synthetic oligonucleotide
ucaaacacuguaaaagaca

SEQ ID NO: 1992718 - RNA, 19 nt, Artificial Sequence
  Description of Artificial Sequence: Synthetic oligonucleotide
agcacagcaacugagacac

SEQ ID NO: 1992719 - RNA, 19 nt, Artificial Sequence
  Description of Artificial Sequence: Synthetic oligonucleotide
cuauaaacuaaacuuuuag

SEQ ID NO: 1992720 - RNA, 19 nt, Artificial Sequence
  Description of Artificial Sequence: Synthetic oligonucleotide
aucaugauaggauauugag

SEQ ID NO: 1992721 - RNA, 19 nt, Artificial Sequence
  Description of Artificial Sequence: Synthetic oligonucleotide
ucauaaaucaugauaggau

SEQ ID NO: 1992722 - RNA, 19 nt, Artificial Sequence
  Description of Artificial Sequence: Synthetic oligonucleotide
guuuucauaugguuaauag

SEQ ID NO: 1992723 - RNA, 19 nt, Artificial Sequence
  Description of Artificial Sequence: Synthetic oligonucleotide
cacgguuugucuuugaugc

SEQ ID NO: 1992724 - RNA, 19 nt, Artificial Sequence
  Description of Artificial Sequence: Synthetic oligonucleotide
uacacauauaccaauuacu

SEQ ID NO: 1992725 - RNA, 19 nt, Artificial Sequence
  Description of Artificial Sequence: Synthetic oligonucleotide
ucuaagauccauuuuguuc

SEQ ID NO: 1992726 - RNA, 19 nt, Artificial Sequence
  Description of Artificial Sequence: Synthetic oligonucleotide
aauaauggcuuguccaucu

SEQ ID NO: 1992727 - RNA, 19 nt, Artificial Sequence
  Description of Artificial Sequence: Synthetic oligonucleotide
uuuacaagaagcagguaac

SEQ ID NO: 1992728 - RNA, 19 nt, Artificial Sequence
  Description of Artificial Sequence: Synthetic oligonucleotide
auguucagguccuaaauuc

SEQ ID NO: 1992729 - RNA, 19 nt, Artificial Sequence
  Description of Artificial Sequence: Synthetic oligonucleotide
uaugguuaauagauuaaca

SEQ ID NO: 1992730 - RNA, 19 nt, Artificial Sequence
  Description of Artificial Sequence: Synthetic oligonucleotide
auaguguucccagagauuc

SEQ ID NO: 1992731 - RNA, 19 nt, Artificial Sequence
  Description of Artificial Sequence: Synthetic oligonucleotide
auaccaauuacuugugauc

SEQ ID NO: 1992732 - RNA, 19 nt, Artificial Sequence
  Description of Artificial Sequence: Synthetic oligonucleotide
aaucccauaauguaauuua

SEQ ID NO: 1992733 - RNA, 19 nt, Artificial Sequence
  Description of Artificial Sequence: Synthetic oligonucleotide
auuuuguucgcaaagaaca

SEQ ID NO: 1992734 - RNA, 19 nt, Artificial Sequence
  Description of Artificial Sequence: Synthetic oligonucleotide
uugugaucccuuauaaugc

SEQ ID NO: 1992735 - RNA, 19 nt, Artificial Sequence
  Description of Artificial Sequence: Synthetic oligonucleotide
uuacacauauaccaauuac

SEQ ID NO: 1992736 - RNA, 19 nt, Artificial Sequence
  Description of Artificial Sequence: Synthetic oligonucleotide
uugagauuauucaguaugc

SEQ ID NO: 1992737 - RNA, 19 nt, Artificial Sequence
  Description of Artificial Sequence: Synthetic oligonucleotide
aagcaacugaucuuugaag

SEQ ID NO: 1992738 - RNA, 19 nt, Artificial Sequence
  Description of Artificial Sequence: Synthetic oligonucleotide
aaauugcugaaguuuccag

SEQ ID NO: 1992739 - RNA, 19 nt, Artificial Sequence
  Description of Artificial Sequence: Synthetic oligonucleotide
accauucuuaauuuaucac

SEQ ID NO: 1992740 - RNA, 19 nt, Artificial Sequence
  Description of Artificial Sequence: Synthetic oligonucleotide
cuauuauccaguccaaggc

SEQ ID NO: 1992741 - RNA, 19 nt, Artificial Sequence
  Description of Artificial Sequence: Synthetic oligonucleotide
agguccuaaauucuuaaag

SEQ ID NO: 1992742 - RNA, 19 nt, Artificial Sequence
  Description of Artificial Sequence: Synthetic oligonucleotide
uaucauaaaucaugauagg

SEQ ID NO: 1992743 - RNA, 19 nt, Artificial Sequence
  Description of Artificial Sequence: Synthetic oligonucleotide
auaugguuaauagauuaac

SEQ ID NO: 1992744 - RNA, 19 nt, Artificial Sequence
  Description of Artificial Sequence: Synthetic oligonucleotide
uuuaggccaaguaaaccag

SEQ ID NO: 1992745 - RNA, 19 nt, Artificial Sequence
  Description of Artificial Sequence: Synthetic oligonucleotide
aaauuugagauuauucagu

SEQ ID NO: 1992746 - RNA, 19 nt, Artificial Sequence
  Description of Artificial Sequence: Synthetic oligonucleotide
uguaguuuugccacuauua

SEQ ID NO: 1992747 - RNA, 19 nt, Artificial Sequence
  Description of Artificial Sequence: Synthetic oligonucleotide
uuugccacuauuauccagu

SEQ ID NO: 1992748 - RNA, 19 nt, Artificial Sequence
  Description of Artificial Sequence: Synthetic oligonucleotide
uccuaaauucuuaaagacu

SEQ ID NO: 1992749 - RNA, 19 nt, Artificial Sequence
  Description of Artificial Sequence: Synthetic oligonucleotide
guaacuaaggcguuccgag

SEQ ID NO: 1992750 - RNA, 19 nt, Artificial Sequence
  Description of Artificial Sequence: Synthetic oligonucleotide
uagaaggguaucaaguucu

SEQ ID NO: 1992751 - RNA, 19 nt, Artificial Sequence
  Description of Artificial Sequence: Synthetic oligonucleotide
augguuaauagauuaacaa

SEQ ID NO: 1992752 - RNA, 19 nt, Artificial Sequence
  Description of Artificial Sequence: Synthetic oligonucleotide
aauacauuaaagauaucau

SEQ ID NO: 1992753 - RNA, 19 nt, Artificial Sequence
  Description of Artificial Sequence: Synthetic oligonucleotide
cauacuauaaacuaaacuu

SEQ ID NO: 1992754 - RNA, 19 nt, Artificial Sequence
  Description of Artificial Sequence: Synthetic oligonucleotide
aacuaaacuuuuagaagac

SEQ ID NO: 1992755 - RNA, 19 nt, Artificial Sequence
  Description of Artificial Sequence: Synthetic oligonucleotide
ucaugauaggauauugaga

SEQ ID NO: 1992756 - RNA, 19 nt, Artificial Sequence
  Description of Artificial Sequence: Synthetic oligonucleotide
gguuaauagauuaacaaug

SEQ ID NO: 1992757 - RNA, 19 nt, Artificial Sequence
  Description of Artificial Sequence: Synthetic oligonucleotide
acuuuuagaagacaauuaa

SEQ ID NO: 1992758 - RNA, 19 nt, Artificial Sequence
  Description of Artificial Sequence: Synthetic oligonucleotide
aaagcaacugaucuuugaa

SEQ ID NO: 1992759 - RNA, 19 nt, Artificial Sequence
  Description of Artificial Sequence: Synthetic oligonucleotide
caagauuggaauccggcgg

SEQ ID NO: 1992760 - RNA, 19 nt, Artificial Sequence
  Description of Artificial Sequence: Synthetic oligonucleotide
uuguucgcaaagaacaaga

SEQ ID NO: 1992761 - RNA, 19 nt, Artificial Sequence
  Description of Artificial Sequence: Synthetic oligonucleotide
uaccaauuacuugugaucc

SEQ ID NO: 1992762 - RNA, 19 nt, Artificial Sequence
  Description of Artificial Sequence: Synthetic oligonucleotide
uuaauugaaaauugcugaa

SEQ ID NO: 1992763 - RNA, 19 nt, Artificial Sequence
  Description of Artificial Sequence: Synthetic oligonucleotide
aagauaucauaaaucauga

SEQ ID NO: 1992764 - RNA, 19 nt, Artificial Sequence
  Description of Artificial Sequence: Synthetic oligonucleotide
cuccuuaacacaauuugag

SEQ ID NO: 1992765 - RNA, 19 nt, Artificial Sequence
  Description of Artificial Sequence: Synthetic oligonucleotide
gaccuuuacaagaagcagg

SEQ ID NO: 1992766 - RNA, 19 nt, Artificial Sequence
  Description of Artificial Sequence: Synthetic oligonucleotide
uaaugauuguaguuuugcc

SEQ ID NO: 1992767 - RNA, 19 nt, Artificial Sequence
  Description of Artificial Sequence: Synthetic oligonucleotide
uguaaaagacagacuggag

SEQ ID NO: 1992768 - RNA, 19 nt, Artificial Sequence
  Description of Artificial Sequence: Synthetic oligonucleotide
aacuaaggcguuccgaggu

SEQ ID NO: 1992769 - RNA, 19 nt, Artificial Sequence
  Description of Artificial Sequence: Synthetic oligonucleotide
gugcuuaauaucugggugg

SEQ ID NO: 1992770 - RNA, 19 nt, Artificial Sequence
  Description of Artificial Sequence: Synthetic oligonucleotide
ugguuaauagauuaacaau

SEQ ID NO: 1992771 - RNA, 19 nt, Artificial Sequence
  Description of Artificial Sequence: Synthetic oligonucleotide
uuuguuaaugauuguaguu

SEQ ID NO: 1992772 - RNA, 19 nt, Artificial Sequence
  Description of Artificial Sequence: Synthetic oligonucleotide
ucuccuuaacacaauuuga

SEQ ID NO: 1992773 - RNA, 19 nt, Artificial Sequence
  Description of Artificial Sequence: Synthetic oligonucleotide
ugcugaaguuuccagagac

SEQ ID NO: 1992774 - RNA, 19 nt, Artificial Sequence
  Description of Artificial Sequence: Synthetic oligonucleotide
ugagacacuuucacagacg

SEQ ID NO: 1992775 - RNA, 19 nt, Artificial Sequence
  Description of Artificial Sequence: Synthetic oligonucleotide
uugauaguggcacaaugaa

SEQ ID NO: 1992776 - RNA, 19 nt, Artificial Sequence
  Description of Artificial Sequence: Synthetic oligonucleotide
uucuaauuacagcaacaug

SEQ ID NO: 1992777 - RNA, 19 nt, Artificial Sequence
  Description of Artificial Sequence: Synthetic oligonucleotide
agagacuaucuuuucaugu

SEQ ID NO: 1992778 - RNA, 19 nt, Artificial Sequence
  Description of Artificial Sequence: Synthetic oligonucleotide
acauguagaccuuuacaag

SEQ ID NO: 1992779 - RNA, 19 nt, Artificial Sequence
  Description of Artificial Sequence: Synthetic oligonucleotide
uuagaaggguaucaaguuc

SEQ ID NO: 1992780 - RNA, 19 nt, Artificial Sequence
  Description of Artificial Sequence: Synthetic oligonucleotide
ucgcaaagaacaagauugg

SEQ ID NO: 1992781 - RNA, 19 nt, Artificial Sequence
  Description of Artificial Sequence: Synthetic oligonucleotide
aguuuguuaaugauuguag

SEQ ID NO: 1992782 - RNA, 19 nt, Artificial Sequence
  Description of Artificial Sequence: Synthetic oligonucleotide
gucuccuuaacacaauuug

SEQ ID NO: 1992783 - RNA, 19 nt, Artificial Sequence
  Description of Artificial Sequence: Synthetic oligonucleotide
uggugaauccuaugguugg

SEQ ID NO: 1992784 - RNA, 19 nt, Artificial Sequence
  Description of Artificial Sequence: Synthetic oligonucleotide
aaauaauggcuuguccauc

SEQ ID NO: 1992785 - RNA, 19 nt, Artificial Sequence
  Description of Artificial Sequence: Synthetic oligonucleotide
uuuagaaggguaucaaguu

SEQ ID NO: 1992786 - RNA, 19 nt, Artificial Sequence
  Description of Artificial Sequence: Synthetic oligonucleotide
uccagcaaucccauaaugu

SEQ ID NO: 1992787 - RNA, 19 nt, Artificial Sequence
  Description of Artificial Sequence: Synthetic oligonucleotide
ucuuuggccacaaccauuc

SEQ ID NO: 1992788 - RNA, 19 nt, Artificial Sequence
  Description of Artificial Sequence: Synthetic oligonucleotide
aagauuggaauccggcggu

SEQ ID NO: 1992789 - RNA, 19 nt, Artificial Sequence
  Description of Artificial Sequence: Synthetic oligonucleotide
acaagaagcagguaacuaa

SEQ ID NO: 1992790 - RNA, 19 nt, Artificial Sequence
  Description of Artificial Sequence: Synthetic oligonucleotide
caauuugagcuucaaaguc

SEQ ID NO: 1992791 - RNA, 19 nt, Artificial Sequence
  Description of Artificial Sequence: Synthetic oligonucleotide
guaugccuuacauagacuc

SEQ ID NO: 1992792 - RNA, 19 nt, Artificial Sequence
  Description of Artificial Sequence: Synthetic oligonucleotide
uaacuuauuuacacauucu

SEQ ID NO: 1992793 - RNA, 19 nt, Artificial Sequence
  Description of Artificial Sequence: Synthetic oligonucleotide
cauuuuguucgcaaagaac

SEQ ID NO: 1992794 - RNA, 19 nt, Artificial Sequence
  Description of Artificial Sequence: Synthetic oligonucleotide
cuuuacaagaagcagguaa

SEQ ID NO: 1992795 - RNA, 19 nt, Artificial Sequence
  Description of Artificial Sequence: Synthetic oligonucleotide
caugauaggauauugagau

SEQ ID NO: 1992796 - RNA, 19 nt, Artificial Sequence
  Description of Artificial Sequence: Synthetic oligonucleotide
aggcauaacacaugaaccu

SEQ ID NO: 1992797 - RNA, 19 nt, Artificial Sequence
  Description of Artificial Sequence: Synthetic oligonucleotide
uccaguccaaggcauaaca

SEQ ID NO: 1992798 - RNA, 19 nt, Artificial Sequence
  Description of Artificial Sequence: Synthetic oligonucleotide
uaugccuuacauagacucc

SEQ ID NO: 1992799 - RNA, 19 nt, Artificial Sequence
  Description of Artificial Sequence: Synthetic oligonucleotide
auagauuaacaauguucag

SEQ ID NO: 1992800 - RNA, 19 nt, Artificial Sequence
  Description of Artificial Sequence: Synthetic oligonucleotide
uuguccagcaaucccauaa

SEQ ID NO: 1992801 - RNA, 19 nt, Artificial Sequence
  Description of Artificial Sequence: Synthetic oligonucleotide
ucucuaagauccauuuugu

SEQ ID NO: 1992802 - RNA, 19 nt, Artificial Sequence
  Description of Artificial Sequence: Synthetic oligonucleotide
aucauaaaucaugauagga

SEQ ID NO: 1992803 - RNA, 19 nt, Artificial Sequence
  Description of Artificial Sequence: Synthetic oligonucleotide
accaauuacuugugauccc

SEQ ID NO: 1992804 - RNA, 19 nt, Artificial Sequence
  Description of Artificial Sequence: Synthetic oligonucleotide
aaccagaaaguuuguccag

SEQ ID NO: 1992805 - RNA, 19 nt, Artificial Sequence
  Description of Artificial Sequence: Synthetic oligonucleotide
uccuugguugcauaaauau

SEQ ID NO: 1992806 - RNA, 19 nt, Artificial Sequence
  Description of Artificial Sequence: Synthetic oligonucleotide
uuguuaaugauuguaguuu

SEQ ID NO: 1992807 - RNA, 19 nt, Artificial Sequence
  Description of Artificial Sequence: Synthetic oligonucleotide
uaggauauugagauggcuu

SEQ ID NO: 1992808 - RNA, 19 nt, Artificial Sequence
  Description of Artificial Sequence: Synthetic oligonucleotide
uacauagacuccuuuaauu

SEQ ID NO: 1992809 - RNA, 19 nt, Artificial Sequence
  Description of Artificial Sequence: Synthetic oligonucleotide
aguccauaagagcaagcag

SEQ ID NO: 1992810 - RNA, 19 nt, Artificial Sequence
  Description of Artificial Sequence: Synthetic oligonucleotide
uuuguucgcaaagaacaag

SEQ ID NO: 1992811 - RNA, 19 nt, Artificial Sequence
  Description of Artificial Sequence: Synthetic oligonucleotide
uguucagguccuaaauucu

SEQ ID NO: 1992812 - RNA, 19 nt, Artificial Sequence
  Description of Artificial Sequence: Synthetic oligonucleotide
uucucuauggugaauccua

SEQ ID NO: 1992813 - RNA, 19 nt, Artificial Sequence
  Description of Artificial Sequence: Synthetic oligonucleotide
cauguagaccuuuacaaga

SEQ ID NO: 1992814 - RNA, 19 nt, Artificial Sequence
  Description of Artificial Sequence: Synthetic oligonucleotide
ucacuacuaucaaugacaa

SEQ ID NO: 1992815 - RNA, 19 nt, Artificial Sequence
  Description of Artificial Sequence: Synthetic oligonucleotide
uuaauagauuaacaauguu

SEQ ID NO: 1992816 - RNA, 19 nt, Artificial Sequence
  Description of Artificial Sequence: Synthetic oligonucleotide
uugaugcucuccaagcaca

SEQ ID NO: 1992817 - RNA, 19 nt, Artificial Sequence
  Description of Artificial Sequence: Synthetic oligonucleotide
uuuauugauaguggcacaa

SEQ ID NO: 1992818 - RNA, 19 nt, Artificial Sequence
  Description of Artificial Sequence: Synthetic oligonucleotide
uuauaauaguguucccaga

SEQ ID NO: 1992819 - RNA, 19 nt, Artificial Sequence
  Description of Artificial Sequence: Synthetic oligonucleotide
uuugguuuauuauuucauu

SEQ ID NO: 1992820 - RNA, 19 nt, Artificial Sequence
  Description of Artificial Sequence: Synthetic oligonucleotide
uguuaguuuucauaugguu

SEQ ID NO: 1992821 - RNA, 19 nt, Artificial Sequence
  Description of Artificial Sequence: Synthetic oligonucleotide
guuggaacaauauccugac

SEQ ID NO: 1992822 - RNA, 19 nt, Artificial Sequence
  Description of Artificial Sequence: Synthetic oligonucleotide
aucacucgcgcaaaugugc

SEQ ID NO: 1992823 - RNA, 19 nt, Artificial Sequence
  Description of Artificial Sequence: Synthetic oligonucleotide
aauccuaugguuggaacaa

SEQ ID NO: 1992824 - RNA, 19 nt, Artificial Sequence
  Description of Artificial Sequence: Synthetic oligonucleotide
agaacaagauuggaauccg

SEQ ID NO: 1992825 - RNA, 19 nt, Artificial Sequence
  Description of Artificial Sequence: Synthetic oligonucleotide
cacauauaccaauuacuug

SEQ ID NO: 1992826 - RNA, 19 nt, Artificial Sequence
  Description of Artificial Sequence: Synthetic oligonucleotide
uuuuguucgcaaagaacaa

SEQ ID NO: 1992827 - RNA, 19 nt, Artificial Sequence
  Description of Artificial Sequence: Synthetic oligonucleotide
aaucaugauaggauauuga

SEQ ID NO: 1992828 - RNA, 19 nt, Artificial Sequence
  Description of Artificial Sequence: Synthetic oligonucleotide
acauuguaaaauauccuug

SEQ ID NO: 1992829 - RNA, 19 nt, Artificial Sequence
  Description of Artificial Sequence: Synthetic oligonucleotide
uacuugugaucccuuauaa

SEQ ID NO: 1992830 - RNA, 19 nt, Artificial Sequence
  Description of Artificial Sequence: Synthetic oligonucleotide
cuugaagccaguccacacc

SEQ ID NO: 1992831 - RNA, 19 nt, Artificial Sequence
  Description of Artificial Sequence: Synthetic oligonucleotide
caguaugccuuacauagac

SEQ ID NO: 1992832 - RNA, 19 nt, Artificial Sequence
  Description of Artificial Sequence: Synthetic oligonucleotide
cauaaaucaugauaggaua

SEQ ID NO: 1992833 - RNA, 19 nt, Artificial Sequence
  Description of Artificial Sequence: Synthetic oligonucleotide
aauuacuugugaucccuua

SEQ ID NO: 1992834 - RNA, 19 nt, Artificial Sequence
  Description of Artificial Sequence: Synthetic oligonucleotide
acuguaaaagacagacugg

SEQ ID NO: 1992835 - RNA, 19 nt, Artificial Sequence
  Description of Artificial Sequence: Synthetic oligonucleotide
uuacauagacuccuuuaau

SEQ ID NO: 1992836 - RNA, 19 nt, Artificial Sequence
  Description of Artificial Sequence: Synthetic oligonucleotide
ugugaucccuuauaaugcu

SEQ ID NO: 1992837 - RNA, 19 nt, Artificial Sequence
  Description of Artificial Sequence: Synthetic oligonucleotide
uggcacaaugaaaauuaca

SEQ ID NO: 1992838 - RNA, 19 nt, Artificial Sequence
  Description of Artificial Sequence: Synthetic oligonucleotide
agcauuugacgguuuaagu

SEQ ID NO: 1992839 - RNA, 19 nt, Artificial Sequence
  Description of Artificial Sequence: Synthetic oligonucleotide
auuuaucacuacuaucaau

SEQ ID NO: 1992840 - RNA, 19 nt, Artificial Sequence
  Description of Artificial Sequence: Synthetic oligonucleotide
cuuaaagacuucuuccaga

SEQ ID NO: 1992841 - RNA, 19 nt, Artificial Sequence
  Description of Artificial Sequence: Synthetic oligonucleotide
ucuuuauaauaguguuccc

SEQ ID NO: 1992842 - RNA, 19 nt, Artificial Sequence
  Description of Artificial Sequence: Synthetic oligonucleotide
uuacuugugaucccuuaua

SEQ ID NO: 1992843 - RNA, 19 nt, Artificial Sequence
  Description of Artificial Sequence: Synthetic oligonucleotide
uuaacacaauuugagcuuc

SEQ ID NO: 1992844 - RNA, 19 nt, Artificial Sequence
  Description of Artificial Sequence: Synthetic oligonucleotide
gagcauuugacgguuuaag

SEQ ID NO: 1992845 - RNA, 19 nt, Artificial Sequence
  Description of Artificial Sequence: Synthetic oligonucleotide
ucccauaauguaauuuaaa

SEQ ID NO: 1992846 - RNA, 19 nt, Artificial Sequence
  Description of Artificial Sequence: Synthetic oligonucleotide
uuccagaguccauaagagc

SEQ ID NO: 1992847 - RNA, 19 nt, Artificial Sequence
  Description of Artificial Sequence: Synthetic oligonucleotide
cugacacugagcauuugac

SEQ ID NO: 1992848 - RNA, 19 nt, Artificial Sequence
  Description of Artificial Sequence: Synthetic oligonucleotide
cauucuuaauuuaucacua

SEQ ID NO: 1992849 - RNA, 19 nt, Artificial Sequence
  Description of Artificial Sequence: Synthetic oligonucleotide
uguccaucuuuauaauagu

SEQ ID NO: 1992850 - RNA, 19 nt, Artificial Sequence
  Description of Artificial Sequence: Synthetic oligonucleotide
ugaauccuaugguuggaac

SEQ ID NO: 1992851 - RNA, 19 nt, Artificial Sequence
  Description of Artificial Sequence: Synthetic oligonucleotide
aggauauugagauggcuua

SEQ ID NO: 1992852 - RNA, 19 nt, Artificial Sequence
  Description of Artificial Sequence: Synthetic oligonucleotide
auacuauaaacuaaacuuu

SEQ ID NO: 1992853 - RNA, 19 nt, Artificial Sequence
  Description of Artificial Sequence: Synthetic oligonucleotide
aagucauacuauaaacuaa

SEQ ID NO: 1992854 - RNA, 19 nt, Artificial Sequence
  Description of Artificial Sequence: Synthetic oligonucleotide
cuuuuagaagacaauuaaa

SEQ ID NO: 1992855 - RNA, 19 nt, Artificial Sequence
  Description of Artificial Sequence: Synthetic oligonucleotide
uaguuuugccacuauuauc

SEQ ID NO: 1992856 - RNA, 19 nt, Artificial Sequence
  Description of Artificial Sequence: Synthetic oligonucleotide
ugaucccuuauaaugcuuu

SEQ ID NO: 1992857 - RNA, 19 nt, Artificial Sequence
  Description of Artificial Sequence: Synthetic oligonucleotide
aguggcacaaugaaaauua

SEQ ID NO: 1992858 - RNA, 19 nt, Artificial Sequence
  Description of Artificial Sequence: Synthetic oligonucleotide
uuaggccaaguaaaccaga

SEQ ID NO: 1992859 - RNA, 19 nt, Artificial Sequence
  Description of Artificial Sequence: Synthetic oligonucleotide
cuuacauagacuccuuuaa

SEQ ID NO: 1992860 - RNA, 19 nt, Artificial Sequence
  Description of Artificial Sequence: Synthetic oligonucleotide
uucauaugguuaauagauu

SEQ ID NO: 1992861 - RNA, 19 nt, Artificial Sequence
  Description of Artificial Sequence: Synthetic oligonucleotide
auuacuugugaucccuuau

SEQ ID NO: 1992862 - RNA, 19 nt, Artificial Sequence
  Description of Artificial Sequence: Synthetic oligonucleotide
gguccuaaauucuuaaaga

SEQ ID NO: 1992863 - RNA, 19 nt, Artificial Sequence
  Description of Artificial Sequence: Synthetic oligonucleotide
ucacucgcgcaaaugugcc

SEQ ID NO: 1992864 - RNA, 19 nt, Artificial Sequence
  Description of Artificial Sequence: Synthetic oligonucleotide
agucauacuauaaacuaaa

SEQ ID NO: 1992865 - RNA, 19 nt, Artificial Sequence
  Description of Artificial Sequence: Synthetic oligonucleotide
gaggacuugaauuucucua

SEQ ID NO: 1992866 - RNA, 19 nt, Artificial Sequence
  Description of Artificial Sequence: Synthetic oligonucleotide
guccauaagagcaagcaga

SEQ ID NO: 1992867 - RNA, 19 nt, Artificial Sequence
  Description of Artificial Sequence: Synthetic oligonucleotide
agacuggaggacuugaauu

SEQ ID NO: 1992868 - RNA, 19 nt, Artificial Sequence
  Description of Artificial Sequence: Synthetic oligonucleotide
aaugugccacgguuugucu

SEQ ID NO: 1992869 - RNA, 19 nt, Artificial Sequence
  Description of Artificial Sequence: Synthetic oligonucleotide
ucacagacguuacugcauc

SEQ ID NO: 1992870 - RNA, 19 nt, Artificial Sequence
  Description of Artificial Sequence: Synthetic oligonucleotide
ugcccugacaugucaaaca

SEQ ID NO: 1992871 - RNA, 19 nt, Artificial Sequence
  Description of Artificial Sequence: Synthetic oligonucleotide
auuauucaguaugccuuac

SEQ ID NO: 1992872 - RNA, 19 nt, Artificial Sequence
  Description of Artificial Sequence: Synthetic oligonucleotide
cuugguugcauaaauauuu

SEQ ID NO: 1992873 - RNA, 19 nt, Artificial Sequence
  Description of Artificial Sequence: Synthetic oligonucleotide
ucagguccuaaauucuuaa

SEQ ID NO: 1992874 - RNA, 19 nt, Artificial Sequence
  Description of Artificial Sequence: Synthetic oligonucleotide
gauggcaucacucgcgcaa

SEQ ID NO: 1992875 - RNA, 19 nt, Artificial Sequence
  Description of Artificial Sequence: Synthetic oligonucleotide
cauagacuccuuuaauuga

SEQ ID NO: 1992876 - RNA, 19 nt, Artificial Sequence
  Description of Artificial Sequence: Synthetic oligonucleotide
acaugaaccuccuuucuuu

SEQ ID NO: 1992877 - RNA, 19 nt, Artificial Sequence
  Description of Artificial Sequence: Synthetic oligonucleotide
cugagacacuuucacagac

SEQ ID NO: 1992878 - RNA, 19 nt, Artificial Sequence
  Description of Artificial Sequence: Synthetic oligonucleotide
uguucgcaaagaacaagau

SEQ ID NO: 1992879 - RNA, 19 nt, Artificial Sequence
  Description of Artificial Sequence: Synthetic oligonucleotide
ucaguaugccuuacauaga

SEQ ID NO: 1992880 - RNA, 19 nt, Artificial Sequence
  Description of Artificial Sequence: Synthetic oligonucleotide
auauaccaauuacuuguga

SEQ ID NO: 1992881 - RNA, 19 nt, Artificial Sequence
  Description of Artificial Sequence: Synthetic oligonucleotide
ugacgguuuaaguuuguua

SEQ ID NO: 1992882 - RNA, 19 nt, Artificial Sequence
  Description of Artificial Sequence: Synthetic oligonucleotide
auaaaucaugauaggauau

SEQ ID NO: 1992883 - RNA, 19 nt, Artificial Sequence
  Description of Artificial Sequence: Synthetic oligonucleotide
gaacaagauuggaauccgg

SEQ ID NO: 1992884 - RNA, 19 nt, Artificial Sequence
  Description of Artificial Sequence: Synthetic oligonucleotide
uccgagguaauguuaguuu

SEQ ID NO: 1992885 - RNA, 19 nt, Artificial Sequence
  Description of Artificial Sequence: Synthetic oligonucleotide
gauaggauauugagauggc

SEQ ID NO: 1992886 - RNA, 19 nt, Artificial Sequence
  Description of Artificial Sequence: Synthetic oligonucleotide
gaguccauaagagcaagca

SEQ ID NO: 1992887 - RNA, 19 nt, Artificial Sequence
  Description of Artificial Sequence: Synthetic oligonucleotide
acucgcgcaaaugugccac

SEQ ID NO: 1992888 - RNA, 19 nt, Artificial Sequence
  Description of Artificial Sequence: Synthetic oligonucleotide
aauccggcggugcuuaaua

SEQ ID NO: 1992889 - RNA, 19 nt, Artificial Sequence
  Description of Artificial Sequence: Synthetic oligonucleotide
acacauauaccaauuacuu

SEQ ID NO: 1992890 - RNA, 19 nt, Artificial Sequence
  Description of Artificial Sequence: Synthetic oligonucleotide
uaaaucaugauaggauauu

SEQ ID NO: 1992891 - RNA, 19 nt, Artificial Sequence
  Description of Artificial Sequence: Synthetic oligonucleotide
uuacaagaagcagguaacu

SEQ ID NO: 1992892 - RNA, 19 nt, Artificial Sequence
  Description of Artificial Sequence: Synthetic oligonucleotide
ugaaguuuccagagacuau

SEQ ID NO: 1992893 - RNA, 19 nt, Artificial Sequence
  Description of Artificial Sequence: Synthetic oligonucleotide
guuaauagauuaacaaugu

SEQ ID NO: 1992894 - RNA, 19 nt, Artificial Sequence
  Description of Artificial Sequence: Synthetic oligonucleotide
ccuuugauggcaucacucg

SEQ ID NO: 1992895 - RNA, 19 nt, Artificial Sequence
  Description of Artificial Sequence: Synthetic oligonucleotide
auggugaauccuaugguug

SEQ ID NO: 1992896 - RNA, 19 nt, Artificial Sequence
  Description of Artificial Sequence: Synthetic oligonucleotide
uucagguccuaaauucuua

SEQ ID NO: 1992897 - RNA, 19 nt, Artificial Sequence
  Description of Artificial Sequence: Synthetic oligonucleotide
cuguaaaagacagacugga

SEQ ID NO: 1992898 - RNA, 19 nt, Artificial Sequence
  Description of Artificial Sequence: Synthetic oligonucleotide
uugguugcauaaauauuuu

SEQ ID NO: 1992899 - RNA, 19 nt, Artificial Sequence
  Description of Artificial Sequence: Synthetic oligonucleotide
uaaagacuucuuccagagu

SEQ ID NO: 1992900 - RNA, 19 nt, Artificial Sequence
  Description of Artificial Sequence: Synthetic oligonucleotide
gauuaacaauguucagguc

SEQ ID NO: 1992901 - RNA, 19 nt, Artificial Sequence
  Description of Artificial Sequence: Synthetic oligonucleotide
gcaacugagacacuuucac

SEQ ID NO: 1992902 - RNA, 19 nt, Artificial Sequence
  Description of Artificial Sequence: Synthetic oligonucleotide
acuaaacuuuuagaagaca

SEQ ID NO: 1992903 - RNA, 19 nt, Artificial Sequence
  Description of Artificial Sequence: Synthetic oligonucleotide
guuaaugauuguaguuuug

SEQ ID NO: 1992904 - RNA, 19 nt, Artificial Sequence
  Description of Artificial Sequence: Synthetic oligonucleotide
agauaucauaaaucaugau

SEQ ID NO: 1992905 - RNA, 19 nt, Artificial Sequence
  Description of Artificial Sequence: Synthetic oligonucleotide
guuuguuaaugauuguagu

SEQ ID NO: 1992906 - RNA, 19 nt, Artificial Sequence
  Description of Artificial Sequence: Synthetic oligonucleotide
acagacguuacugcaucuc

SEQ ID NO: 1992907 - RNA, 19 nt, Artificial Sequence
  Description of Artificial Sequence: Synthetic oligonucleotide
uguaguccuucuccuuuga

SEQ ID NO: 1992908 - RNA, 19 nt, Artificial Sequence
  Description of Artificial Sequence: Synthetic oligonucleotide
uuucucuauggugaauccu

SEQ ID NO: 1992909 - RNA, 19 nt, Artificial Sequence
  Description of Artificial Sequence: Synthetic oligonucleotide
auaagagcaagcagaacau

SEQ ID NO: 1992910 - RNA, 19 nt, Artificial Sequence
  Description of Artificial Sequence: Synthetic oligonucleotide
agacuccuuuaauugaaaa

SEQ ID NO: 1992911 - RNA, 19 nt, Artificial Sequence
  Description of Artificial Sequence: Synthetic oligonucleotide
gagacacuuucacagacgu

SEQ ID NO: 1992912 - RNA, 19 nt, Artificial Sequence
  Description of Artificial Sequence: Synthetic oligonucleotide
caucacucgcgcaaaugug

SEQ ID NO: 1992913 - RNA, 19 nt, Artificial Sequence
  Description of Artificial Sequence: Synthetic oligonucleotide
auucaguaugccuuacaua

SEQ ID NO: 1992914 - RNA, 19 nt, Artificial Sequence
  Description of Artificial Sequence: Synthetic oligonucleotide
uccuaugguuggaacaaua

SEQ ID NO: 1992915 - RNA, 19 nt, Artificial Sequence
  Description of Artificial Sequence: Synthetic oligonucleotide
ggcuuguccaucuuuauaa

SEQ ID NO: 1992916 - RNA, 19 nt, Artificial Sequence
  Description of Artificial Sequence: Synthetic oligonucleotide
ugcuuaauaucuggguggu

SEQ ID NO: 1992917 - RNA, 19 nt, Artificial Sequence
  Description of Artificial Sequence: Synthetic oligonucleotide
ucucuauggugaauccuau

SEQ ID NO: 1992918 - RNA, 19 nt, Artificial Sequence
  Description of Artificial Sequence: Synthetic oligonucleotide
acuugugaucccuuauaau

SEQ ID NO: 1992919 - RNA, 19 nt, Artificial Sequence
  Description of Artificial Sequence: Synthetic oligonucleotide
gacguuacugcaucucuaa

SEQ ID NO: 1992920 - RNA, 19 nt, Artificial Sequence
  Description of Artificial Sequence: Synthetic oligonucleotide
agaguccauaagagcaagc

SEQ ID NO: 1992921 - RNA, 19 nt, Artificial Sequence
  Description of Artificial Sequence: Synthetic oligonucleotide
uguccagcaaucccauaau

SEQ ID NO: 1992922 - RNA, 19 nt, Artificial Sequence
  Description of Artificial Sequence: Synthetic oligonucleotide
acacugagcauuugacggu

SEQ ID NO: 1992923 - RNA, 19 nt, Artificial Sequence
  Description of Artificial Sequence: Synthetic oligonucleotide
auaggauauugagauggcu

SEQ ID NO: 1992924 - RNA, 19 nt, Artificial Sequence
  Description of Artificial Sequence: Synthetic oligonucleotide
agguaacuaaggcguuccg

SEQ ID NO: 1992925 - RNA, 19 nt, Artificial Sequence
  Description of Artificial Sequence: Synthetic oligonucleotide
cccuuauaaugcuuuaaag

SEQ ID NO: 1992926 - RNA, 19 nt, Artificial Sequence
  Description of Artificial Sequence: Synthetic oligonucleotide
ugccacuauuauccagucc

SEQ ID NO: 1992927 - RNA, 19 nt, Artificial Sequence
  Description of Artificial Sequence: Synthetic oligonucleotide
uaguguucccagagauucc

SEQ ID NO: 1992928 - RNA, 19 nt, Artificial Sequence
  Description of Artificial Sequence: Synthetic oligonucleotide
augccuuacauagacuccu

SEQ ID NO: 1992929 - RNA, 19 nt, Artificial Sequence
  Description of Artificial Sequence: Synthetic oligonucleotide
uuggaacaauauccugaca

SEQ ID NO: 1992930 - RNA, 19 nt, Artificial Sequence
  Description of Artificial Sequence: Synthetic oligonucleotide
uucuuuggccacaaccauu

SEQ ID NO: 1992931 - RNA, 19 nt, Artificial Sequence
  Description of Artificial Sequence: Synthetic oligonucleotide
cagguaacuaaggcguucc

SEQ ID NO: 1992932 - RNA, 19 nt, Artificial Sequence
  Description of Artificial Sequence: Synthetic oligonucleotide
uaauggcuuguccaucuuu

SEQ ID NO: 1992933 - RNA, 19 nt, Artificial Sequence
  Description of Artificial Sequence: Synthetic oligonucleotide
aaguuuccagagacuaucu

SEQ ID NO: 1992934 - RNA, 19 nt, Artificial Sequence
  Description of Artificial Sequence: Synthetic oligonucleotide
augguuggaacaauauccu

SEQ ID NO: 1992935 - RNA, 19 nt, Artificial Sequence
  Description of Artificial Sequence: Synthetic oligonucleotide
acguuacugcaucucuaag

SEQ ID NO: 1992936 - RNA, 19 nt, Artificial Sequence
  Description of Artificial Sequence: Synthetic oligonucleotide
ugguugcauaaauauuuua

SEQ ID NO: 1992937 - RNA, 19 nt, Artificial Sequence
  Description of Artificial Sequence: Synthetic oligonucleotide
ggcggugcuuaauaucugg

SEQ ID NO: 1992938 - RNA, 19 nt, Artificial Sequence
  Description of Artificial Sequence: Synthetic oligonucleotide
ucccagagauuccuguauc

SEQ ID NO: 1992939 - RNA, 19 nt, Artificial Sequence
  Description of Artificial Sequence: Synthetic oligonucleotide
gacuccuuuaauugaaaau

SEQ ID NO: 1992940 - RNA, 19 nt, Artificial Sequence
  Description of Artificial Sequence: Synthetic oligonucleotide
gguuggaacaauauccuga

SEQ ID NO: 1992941 - RNA, 19 nt, Artificial Sequence
  Description of Artificial Sequence: Synthetic oligonucleotide
aauaguguucccagagauu

SEQ ID NO: 1992942 - RNA, 19 nt, Artificial Sequence
  Description of Artificial Sequence: Synthetic oligonucleotide
uggaggacuugaauuucuc

SEQ ID NO: 1992943 - RNA, 19 nt, Artificial Sequence
  Description of Artificial Sequence: Synthetic oligonucleotide
ugugccacgguuugucuuu

SEQ ID NO: 1992944 - RNA, 19 nt, Artificial Sequence
  Description of Artificial Sequence: Synthetic oligonucleotide
gaacauuguaaaauauccu

SEQ ID NO: 1992945 - RNA, 19 nt, Artificial Sequence
  Description of Artificial Sequence: Synthetic oligonucleotide
caaagcaacugaucuuuga

SEQ ID NO: 1992946 - RNA, 19 nt, Artificial Sequence
  Description of Artificial Sequence: Synthetic oligonucleotide
aaggcguuccgagguaaug

SEQ ID NO: 1992947 - RNA, 19 nt, Artificial Sequence
  Description of Artificial Sequence: Synthetic oligonucleotide
cauuugacgguuuaaguuu

SEQ ID NO: 1992948 - RNA, 19 nt, Artificial Sequence
  Description of Artificial Sequence: Synthetic oligonucleotide
aacugaucuuugaagccaa

SEQ ID NO: 1992949 - RNA, 19 nt, Artificial Sequence
  Description of Artificial Sequence: Synthetic oligonucleotide
cucuauggugaauccuaug

SEQ ID NO: 1992950 - RNA, 19 nt, Artificial Sequence
  Description of Artificial Sequence: Synthetic oligonucleotide
cuuaacacaauuugagcuu

SEQ ID NO: 1992951 - RNA, 19 nt, Artificial Sequence
  Description of Artificial Sequence: Synthetic oligonucleotide
uauccaguccaaggcauaa

SEQ ID NO: 1992952 - RNA, 19 nt, Artificial Sequence
  Description of Artificial Sequence: Synthetic oligonucleotide
acgguuuaaguuuguuaau

SEQ ID NO: 1992953 - RNA, 19 nt, Artificial Sequence
  Description of Artificial Sequence: Synthetic oligonucleotide
gucauacuauaaacuaaac

SEQ ID NO: 1992954 - RNA, 19 nt, Artificial Sequence
  Description of Artificial Sequence: Synthetic oligonucleotide
aggguaucaaguucuucuu

SEQ ID NO: 1992955 - RNA, 19 nt, Artificial Sequence
  Description of Artificial Sequence: Synthetic oligonucleotide
cacuauuauccaguccaag

SEQ ID NO: 1992956 - RNA, 19 nt, Artificial Sequence
  Description of Artificial Sequence: Synthetic oligonucleotide
guaguuuugccacuauuau

SEQ ID NO: 1992957 - RNA, 19 nt, Artificial Sequence
  Description of Artificial Sequence: Synthetic oligonucleotide
ugagcauuugacgguuuaa

SEQ ID NO: 1992958 - RNA, 19 nt, Artificial Sequence
  Description of Artificial Sequence: Synthetic oligonucleotide
uaguggcacaaugaaaauu

SEQ ID NO: 1992959 - RNA, 19 nt, Artificial Sequence
  Description of Artificial Sequence: Synthetic oligonucleotide
aguccacaccuuccuguag

SEQ ID NO: 1992960 - RNA, 19 nt, Artificial Sequence
  Description of Artificial Sequence: Synthetic oligonucleotide
ccauaauguaauuuaaaua

SEQ ID NO: 1992961 - RNA, 19 nt, Artificial Sequence
  Description of Artificial Sequence: Synthetic oligonucleotide
ccuuaacacaauuugagcu

SEQ ID NO: 1992962 - RNA, 19 nt, Artificial Sequence
  Description of Artificial Sequence: Synthetic oligonucleotide
gcauaacacaugaaccucc

SEQ ID NO: 1992963 - RNA, 19 nt, Artificial Sequence
  Description of Artificial Sequence: Synthetic oligonucleotide
ucgcgcaaaugugccacgg

SEQ ID NO: 1992964 - RNA, 19 nt, Artificial Sequence
  Description of Artificial Sequence: Synthetic oligonucleotide
aguuuccagagacuaucuu

SEQ ID NO: 1992965 - RNA, 19 nt, Artificial Sequence
  Description of Artificial Sequence: Synthetic oligonucleotide
gacuggaggacuugaauuu

SEQ ID NO: 1992966 - RNA, 19 nt, Artificial Sequence
  Description of Artificial Sequence: Synthetic oligonucleotide
uugccacuauuauccaguc

SEQ ID NO: 1992967 - RNA, 19 nt, Artificial Sequence
  Description of Artificial Sequence: Synthetic oligonucleotide
agcaagcagaacauuguaa

SEQ ID NO: 1992968 - RNA, 19 nt, Artificial Sequence
  Description of Artificial Sequence: Synthetic oligonucleotide
uuccgagguaauguuaguu

SEQ ID NO: 1992969 - RNA, 19 nt, Artificial Sequence
  Description of Artificial Sequence: Synthetic oligonucleotide
guaucuuccuugcccugac

SEQ ID NO: 1992970 - RNA, 19 nt, Artificial Sequence
  Description of Artificial Sequence: Synthetic oligonucleotide
uccggcggugcuuaauauc

SEQ ID NO: 1992971 - RNA, 19 nt, Artificial Sequence
  Description of Artificial Sequence: Synthetic oligonucleotide
aguaaaccagaaaguuugu

SEQ ID NO: 1992972 - RNA, 19 nt, Artificial Sequence
  Description of Artificial Sequence: Synthetic oligonucleotide
uugcccugacaugucaaac

SEQ ID NO: 1992973 - RNA, 19 nt, Artificial Sequence
  Description of Artificial Sequence: Synthetic oligonucleotide
gcaacauguagaccuuuac

SEQ ID NO: 1992974 - RNA, 19 nt, Artificial Sequence
  Description of Artificial Sequence: Synthetic oligonucleotide
agguaauguuaguuuucau

SEQ ID NO: 1992975 - RNA, 19 nt, Artificial Sequence
  Description of Artificial Sequence: Synthetic oligonucleotide
auauccuugguugcauaaa

SEQ ID NO: 1992976 - RNA, 19 nt, Artificial Sequence
  Description of Artificial Sequence: Synthetic oligonucleotide
aucccauaauguaauuuaa

SEQ ID NO: 1992977 - RNA, 19 nt, Artificial Sequence
  Description of Artificial Sequence: Synthetic oligonucleotide
cguuccgagguaauguuag

SEQ ID NO: 1992978 - RNA, 19 nt, Artificial Sequence
  Description of Artificial Sequence: Synthetic oligonucleotide
aggccaaguaaaccagaaa

SEQ ID NO: 1992979 - RNA, 19 nt, Artificial Sequence
  Description of Artificial Sequence: Synthetic oligonucleotide
aggcguuccgagguaaugu

SEQ ID NO: 1992980 - RNA, 19 nt, Artificial Sequence
  Description of Artificial Sequence: Synthetic oligonucleotide
agcaacugagacacuuuca

SEQ ID NO: 1992981 - RNA, 19 nt, Artificial Sequence
  Description of Artificial Sequence: Synthetic oligonucleotide
uaagagcaagcagaacauu

SEQ ID NO: 1992982 - RNA, 19 nt, Artificial Sequence
  Description of Artificial Sequence: Synthetic oligonucleotide
uaaggcguuccgagguaau

SEQ ID NO: 1992983 - RNA, 19 nt, Artificial Sequence
  Description of Artificial Sequence: Synthetic oligonucleotide
cucgcgcaaaugugccacg

SEQ ID NO: 1992984 - RNA, 19 nt, Artificial Sequence
  Description of Artificial Sequence: Synthetic oligonucleotide
ugauggcaucacucgcgca

SEQ ID NO: 1992985 - RNA, 19 nt, Artificial Sequence
  Description of Artificial Sequence: Synthetic oligonucleotide
aguaugccuuacauagacu

SEQ ID NO: 1992986 - RNA, 19 nt, Artificial Sequence
  Description of Artificial Sequence: Synthetic oligonucleotide
ggaacaauauccugacacu

SEQ ID NO: 1992987 - RNA, 19 nt, Artificial Sequence
  Description of Artificial Sequence: Synthetic oligonucleotide
cuauggugaauccuauggu

SEQ ID NO: 1992988 - RNA, 19 nt, Artificial Sequence
  Description of Artificial Sequence: Synthetic oligonucleotide
acgguuugucuuugaugcu

SEQ ID NO: 1992989 - RNA, 19 nt, Artificial Sequence
  Description of Artificial Sequence: Synthetic oligonucleotide
auaacacaugaaccuccuu

SEQ ID NO: 1992990 - RNA, 19 nt, Artificial Sequence
  Description of Artificial Sequence: Synthetic oligonucleotide
gcccugacaugucaaacac

SEQ ID NO: 1992991 - RNA, 19 nt, Artificial Sequence
  Description of Artificial Sequence: Synthetic oligonucleotide
acuaaggcguuccgaggua

SEQ ID NO: 1992992 - RNA, 19 nt, Artificial Sequence
  Description of Artificial Sequence: Synthetic oligonucleotide
auaauggcuuguccaucuu

SEQ ID NO: 1992993 - RNA, 19 nt, Artificial Sequence
  Description of Artificial Sequence: Synthetic oligonucleotide
ggcauaacacaugaaccuc

SEQ ID NO: 1992994 - RNA, 19 nt, Artificial Sequence
  Description of Artificial Sequence: Synthetic oligonucleotide
cuuccuugcccugacaugu

SEQ ID NO: 1992995 - RNA, 19 nt, Artificial Sequence
  Description of Artificial Sequence: Synthetic oligonucleotide
guucgcaaagaacaagauu

SEQ ID NO: 1992996 - RNA, 19 nt, Artificial Sequence
  Description of Artificial Sequence: Synthetic oligonucleotide
gguaacuaaggcguuccga

SEQ ID NO: 1992997 - RNA, 19 nt, Artificial Sequence
  Description of Artificial Sequence: Synthetic oligonucleotide
uggccacaaccauucuuaa

SEQ ID NO: 1992998 - RNA, 19 nt, Artificial Sequence
  Description of Artificial Sequence: Synthetic oligonucleotide
uggaauccggcggugcuua

SEQ ID NO: 1992999 - RNA, 19 nt, Artificial Sequence
  Description of Artificial Sequence: Synthetic oligonucleotide
gcauuugacgguuuaaguu

SEQ ID NO: 1993000 - RNA, 19 nt, Artificial Sequence
  Description of Artificial Sequence: Synthetic oligonucleotide
guggcacaaugaaaauuac

SEQ ID NO: 1993001 - RNA, 19 nt, Artificial Sequence
  Description of Artificial Sequence: Synthetic oligonucleotide
cacaaccauucuuaauuua

SEQ ID NO: 1993002 - RNA, 19 nt, Artificial Sequence
  Description of Artificial Sequence: Synthetic oligonucleotide
ccacgguuugucuuugaug

SEQ ID NO: 1993003 - RNA, 19 nt, Artificial Sequence
  Description of Artificial Sequence: Synthetic oligonucleotide
ugccuuacauagacuccuu

SEQ ID NO: 1993004 - RNA, 19 nt, Artificial Sequence
  Description of Artificial Sequence: Synthetic oligonucleotide
ggugguuuagaaggguauc

SEQ ID NO: 1993005 - RNA, 19 nt, Artificial Sequence
  Description of Artificial Sequence: Synthetic oligonucleotide
cccauaauguaauuuaaau

SEQ ID NO: 1993006 - RNA, 19 nt, Artificial Sequence
  Description of Artificial Sequence: Synthetic oligonucleotide
ggaucugaucuugaagcca

SEQ ID NO: 1993007 - RNA, 19 nt, Artificial Sequence
  Description of Artificial Sequence: Synthetic oligonucleotide
gcggugcuuaauaucuggg

SEQ ID NO: 1993008 - RNA, 19 nt, Artificial Sequence
  Description of Artificial Sequence: Synthetic oligonucleotide
cguuacugcaucucuaaga

SEQ ID NO: 1993009 - RNA, 19 nt, Artificial Sequence
  Description of Artificial Sequence: Synthetic oligonucleotide
cagguccuaaauucuuaaa

SEQ ID NO: 1993010 - RNA, 19 nt, Artificial Sequence
  Description of Artificial Sequence: Synthetic oligonucleotide
auccggcggugcuuaauau

SEQ ID NO: 1993011 - RNA, 19 nt, Artificial Sequence
  Description of Artificial Sequence: Synthetic oligonucleotide
gcucuccaagcacagcaac

SEQ ID NO: 1993012 - RNA, 19 nt, Artificial Sequence
  Description of Artificial Sequence: Synthetic oligonucleotide
cagacguuacugcaucucu

SEQ ID NO: 1993013 - RNA, 19 nt, Artificial Sequence
  Description of Artificial Sequence: Synthetic oligonucleotide
ccuuacauagacuccuuua

SEQ ID NO: 1993014 - RNA, 19 nt, Artificial Sequence
  Description of Artificial Sequence: Synthetic oligonucleotide
agacguuacugcaucucua

SEQ ID NO: 1993015 - RNA, 19 nt, Artificial Sequence
  Description of Artificial Sequence: Synthetic oligonucleotide
uggcaucacucgcgcaaau

SEQ ID NO: 1993016 - RNA, 19 nt, Artificial Sequence
  Description of Artificial Sequence: Synthetic oligonucleotide
ccauuuuguucgcaaagaa

SEQ ID NO: 1993017 - RNA, 19 nt, Artificial Sequence
  Description of Artificial Sequence: Synthetic oligonucleotide
cgagguaauguuaguuuuc

SEQ ID NO: 1993018 - RNA, 19 nt, Artificial Sequence
  Description of Artificial Sequence: Synthetic oligonucleotide
cugagcauuugacgguuua

SEQ ID NO: 1993019 - RNA, 19 nt, Artificial Sequence
  Description of Artificial Sequence: Synthetic oligonucleotide
ggcaucacucgcgcaaaug

SEQ ID NO: 1993020 - RNA, 19 nt, Artificial Sequence
  Description of Artificial Sequence: Synthetic oligonucleotide
ugccacgguuugucuuuga

SEQ ID NO: 1993021 - RNA, 19 nt, Artificial Sequence
  Description of Artificial Sequence: Synthetic oligonucleotide
auggcaucacucgcgcaaa

SEQ ID NO: 1993022 - RNA, 19 nt, Artificial Sequence
  Description of Artificial Sequence: Synthetic oligonucleotide
gcuuggaucugaucuugaa

SEQ ID NO: 1993023 - RNA, 19 nt, Artificial Sequence
  Description of Artificial Sequence: Synthetic oligonucleotide
cuaaggcguuccgagguaa

SEQ ID NO: 1993024 - RNA, 19 nt, Artificial Sequence
  Description of Artificial Sequence: Synthetic oligonucleotide
agcuuggaucugaucuuga

SEQ ID NO: 1993025 - RNA, 19 nt, Artificial Sequence
  Description of Artificial Sequence: Synthetic oligonucleotide
auccuaugguuggaacaau

SEQ ID NO: 1993026 - RNA, 19 nt, Artificial Sequence
  Description of Artificial Sequence: Synthetic oligonucleotide
caaucccauaauguaauuu

SEQ ID NO: 1993027 - RNA, 19 nt, Artificial Sequence
  Description of Artificial Sequence: Synthetic oligonucleotide
cucuaagauccauuuuguu

SEQ ID NO: 1993028 - RNA, 19 nt, Artificial Sequence
  Description of Artificial Sequence: Synthetic oligonucleotide
cagacuggaggacuugaau

SEQ ID NO: 1993029 - RNA, 19 nt, Artificial Sequence
  Description of Artificial Sequence: Synthetic oligonucleotide
cacuacuaucaaugacaaa

SEQ ID NO: 1993030 - RNA, 19 nt, Artificial Sequence
  Description of Artificial Sequence: Synthetic oligonucleotide
agauggcuuauaacuuauu

SEQ ID NO: 1993031 - RNA, 19 nt, Artificial Sequence
  Description of Artificial Sequence: Synthetic oligonucleotide
cacucgcgcaaaugugcca

SEQ ID NO: 1993032 - RNA, 19 nt, Artificial Sequence
  Description of Artificial Sequence: Synthetic oligonucleotide
caugaaccuccuuucuuuu

SEQ ID NO: 1993033 - RNA, 19 nt, Artificial Sequence
  Description of Artificial Sequence: Synthetic oligonucleotide
guuccgagguaauguuagu

SEQ ID NO: 1993034 - RNA, 19 nt, Artificial Sequence
  Description of Artificial Sequence: Synthetic oligonucleotide
cacaugaaccuccuuucuu

SEQ ID NO: 1993035 - RNA, 19 nt, Artificial Sequence
  Description of Artificial Sequence: Synthetic oligonucleotide
acugaucuuugaagccaau

SEQ ID NO: 1993036 - RNA, 19 nt, Artificial Sequence
  Description of Artificial Sequence: Synthetic oligonucleotide
ccggcggugcuuaauaucu

SEQ ID NO: 1993037 - RNA, 19 nt, Artificial Sequence
  Description of Artificial Sequence: Synthetic oligonucleotide
caucucuaagauccauuuu

SEQ ID NO: 1993038 - RNA, 19 nt, Artificial Sequence
  Description of Artificial Sequence: Synthetic oligonucleotide
agacacuuucacagacguu

SEQ ID NO: 1993039 - RNA, 19 nt, Artificial Sequence
  Description of Artificial Sequence: Synthetic oligonucleotide
caauuacuugugaucccuu

SEQ ID NO: 1993040 - RNA, 19 nt, Artificial Sequence
  Description of Artificial Sequence: Synthetic oligonucleotide
gugccacgguuugucuuug

SEQ ID NO: 1993041 - RNA, 19 nt, Artificial Sequence
  Description of Artificial Sequence: Synthetic oligonucleotide
cacagacguuacugcaucu

SEQ ID NO: 1993042 - RNA, 19 nt, Artificial Sequence
  Description of Artificial Sequence: Synthetic oligonucleotide
ccaauuacuugugaucccu

SEQ ID NO: 1993043 - RNA, 19 nt, Artificial Sequence
  Description of Artificial Sequence: Synthetic oligonucleotide
acugagcauuugacgguuu

SEQ ID NO: 1993044 - RNA, 19 nt, Artificial Sequence
  Description of Artificial Sequence: Synthetic oligonucleotide
ccacuauuauccaguccaa

SEQ ID NO: 1993045 - RNA, 19 nt, Artificial Sequence
  Description of Artificial Sequence: Synthetic oligonucleotide
gaauccggcggugcuuaau

SEQ ID NO: 1993046 - RNA, 19 nt, Artificial Sequence
  Description of Artificial Sequence: Synthetic oligonucleotide
caaaugugccacgguuugu

SEQ ID NO: 1993047 - RNA, 19 nt, Artificial Sequence
  Description of Artificial Sequence: Synthetic oligonucleotide
gcgcaaaugugccacgguu

SEQ ID NO: 1993048 - RNA, 19 nt, Artificial Sequence
  Description of Artificial Sequence: Synthetic oligonucleotide
ccuugguugcauaaauauu

SEQ ID NO: 1993049 - RNA, 19 nt, Artificial Sequence
  Description of Artificial Sequence: Synthetic oligonucleotide
ccgagguaauguuaguuuu

SEQ ID NO: 1993050 - RNA, 19 nt, Artificial Sequence
  Description of Artificial Sequence: Synthetic oligonucleotide
ggcguuccgagguaauguu

SEQ ID NO: 1993051 - RNA, 19 nt, Artificial Sequence
  Description of Artificial Sequence: Synthetic oligonucleotide
gggugguuuagaaggguau

SEQ ID NO: 1993052 - RNA, 19 nt, Artificial Sequence
  Description of Artificial Sequence: Synthetic oligonucleotide
cgcaaagaacaagauugga

SEQ ID NO: 1993053 - RNA, 19 nt, Artificial Sequence
  Description of Artificial Sequence: Synthetic oligonucleotide
ggccacaaccauucuuaau

SEQ ID NO: 1993054 - RNA, 19 nt, Artificial Sequence
  Description of Artificial Sequence: Synthetic oligonucleotide
ccacaaccauucuuaauuu

SEQ ID NO: 1993055 - RNA, 19 nt, Artificial Sequence
  Description of Artificial Sequence: Synthetic oligonucleotide
gcaaucccauaauguaauu

SEQ ID NO: 1993056 - RNA, 19 nt, Artificial Sequence
  Description of Artificial Sequence: Synthetic oligonucleotide
gccacgguuugucuuugau

SEQ ID NO: 1993057 - RNA, 19 nt, Artificial Sequence
  Description of Artificial Sequence: Synthetic oligonucleotide
cggugcuuaauaucugggu

SEQ ID NO: 1993058 - RNA, 19 nt, Artificial Sequence
  Description of Artificial Sequence: Synthetic oligonucleotide
gcguuccgagguaauguua

SEQ ID NO: 1993059 - RNA, 19 nt, Artificial Sequence
  Description of Artificial Sequence: Synthetic oligonucleotide
ggaauccggcggugcuuaa

SEQ ID NO: 1993060 - RNA, 19 nt, Artificial Sequence
  Description of Artificial Sequence: Synthetic oligonucleotide
cggcggugcuuaauaucug

SEQ ID NO: 1993061 - RNA, 19 nt, Artificial Sequence
  Description of Artificial Sequence: Synthetic oligonucleotide
gcugucuccuuaacacaau

SEQ ID NO: 1993062 - RNA, 19 nt, Artificial Sequence
  Description of Artificial Sequence: Synthetic oligonucleotide
cgcgcaaaugugccacggu

SEQ ID NO: 1993063 - RNA, 19 nt, Artificial Sequence
  Description of Artificial Sequence: Synthetic oligonucleotide
aauacaagaaguuauaaug

SEQ ID NO: 1993064 - RNA, 19 nt, Artificial Sequence
  Description of Artificial Sequence: Synthetic oligonucleotide
uuugcuuuaaaacagcugg

SEQ ID NO: 1993065 - RNA, 19 nt, Artificial Sequence
  Description of Artificial Sequence: Synthetic oligonucleotide
aauauaggagagcuggggc

SEQ ID NO: 1993066 - RNA, 19 nt, Artificial Sequence
  Description of Artificial Sequence: Synthetic oligonucleotide
auguacgacauccugagcc

SEQ ID NO: 1993067 - RNA, 19 nt, Artificial Sequence
  Description of Artificial Sequence: Synthetic oligonucleotide
aaaauguggcuagaaauac

SEQ ID NO: 1993068 - RNA, 19 nt, Artificial Sequence
  Description of Artificial Sequence: Synthetic oligonucleotide
aaaggugcaaggcugcgcg

SEQ ID NO: 1993069 - RNA, 19 nt, Artificial Sequence
  Description of Artificial Sequence: Synthetic oligonucleotide
agggauacauacuuggcgc

SEQ ID NO: 1993070 - RNA, 19 nt, Artificial Sequence
  Description of Artificial Sequence: Synthetic oligonucleotide
guuauaaugcucaagcagg

SEQ ID NO: 1993071 - RNA, 19 nt, Artificial Sequence
  Description of Artificial Sequence: Synthetic oligonucleotide
aaacgaaugacgaccacgc

SEQ ID NO: 1993072 - RNA, 19 nt, Artificial Sequence
  Description of Artificial Sequence: Synthetic oligonucleotide
auacaagaaguuauaaugc

SEQ ID NO: 1993073 - RNA, 19 nt, Artificial Sequence
  Description of Artificial Sequence: Synthetic oligonucleotide
uguggcuagaaauacaaga

SEQ ID NO: 1993074 - RNA, 19 nt, Artificial Sequence
  Description of Artificial Sequence: Synthetic oligonucleotide
cuucauagcauaugcaucc

SEQ ID NO: 1993075 - RNA, 19 nt, Artificial Sequence
  Description of Artificial Sequence: Synthetic oligonucleotide
auauaggagagcuggggcc

SEQ ID NO: 1993076 - RNA, 19 nt, Artificial Sequence
  Description of Artificial Sequence: Synthetic oligonucleotide
aagaucucccacuaucuuc

SEQ ID NO: 1993077 - RNA, 19 nt, Artificial Sequence
  Description of Artificial Sequence: Synthetic oligonucleotide
aaauacaagaaguuauaau

SEQ ID NO: 1993078 - RNA, 19 nt, Artificial Sequence
  Description of Artificial Sequence: Synthetic oligonucleotide
auaaugcucaagcaggcuc

SEQ ID NO: 1993079 - RNA, 19 nt, Artificial Sequence
  Description of Artificial Sequence: Synthetic oligonucleotide
acaccguuugcuuuaaaac

SEQ ID NO: 1993080 - RNA, 19 nt, Artificial Sequence
  Description of Artificial Sequence: Synthetic oligonucleotide
agugauguguccgugaggg

SEQ ID NO: 1993081 - RNA, 19 nt, Artificial Sequence
  Description of Artificial Sequence: Synthetic oligonucleotide
uuggaauaaaggugcaagg

SEQ ID NO: 1993082 - RNA, 19 nt, Artificial Sequence
  Description of Artificial Sequence: Synthetic oligonucleotide
uuuaaaacagcugggauau

SEQ ID NO: 1993083 - RNA, 19 nt, Artificial Sequence
  Description of Artificial Sequence: Synthetic oligonucleotide
aucaucuccggccagguuc

SEQ ID NO: 1993084 - RNA, 19 nt, Artificial Sequence
  Description of Artificial Sequence: Synthetic oligonucleotide
acaagcgacaccaacaccg

SEQ ID NO: 1993085 - RNA, 19 nt, Artificial Sequence
  Description of Artificial Sequence: Synthetic oligonucleotide
gaugccacggagcacaagc

SEQ ID NO: 1993086 - RNA, 19 nt, Artificial Sequence
  Description of Artificial Sequence: Synthetic oligonucleotide
uuauaaugcucaagcaggc

SEQ ID NO: 1993087 - RNA, 19 nt, Artificial Sequence
  Description of Artificial Sequence: Synthetic oligonucleotide
aaguucucgaucauggcuc

SEQ ID NO: 1993088 - RNA, 19 nt, Artificial Sequence
  Description of Artificial Sequence: Synthetic oligonucleotide
uaaaacagcugggauaucc

SEQ ID NO: 1993089 - RNA, 19 nt, Artificial Sequence
  Description of Artificial Sequence: Synthetic oligonucleotide
acgaaugacgaccacgcgg

SEQ ID NO: 1993090 - RNA, 19 nt, Artificial Sequence
  Description of Artificial Sequence: Synthetic oligonucleotide
gaaacgaaugacgaccacg

SEQ ID NO: 1993091 - RNA, 19 nt, Artificial Sequence
  Description of Artificial Sequence: Synthetic oligonucleotide
uguacgacauccugagccg

SEQ ID NO: 1993092 - RNA, 19 nt, Artificial Sequence
  Description of Artificial Sequence: Synthetic oligonucleotide
uggcuagaaauacaagaag

SEQ ID NO: 1993093 - RNA, 19 nt, Artificial Sequence
  Description of Artificial Sequence: Synthetic oligonucleotide
gaugcuguacagaaccucg

SEQ ID NO: 1993094 - RNA, 19 nt, Artificial Sequence
  Description of Artificial Sequence: Synthetic oligonucleotide
ucgaucauggcucgugagg

SEQ ID NO: 1993095 - RNA, 19 nt, Artificial Sequence
  Description of Artificial Sequence: Synthetic oligonucleotide
ucguccaucuucaugcaag

SEQ ID NO: 1993096 - RNA, 19 nt, Artificial Sequence
  Description of Artificial Sequence: Synthetic oligonucleotide
ucacuaaccuggaaguuca

SEQ ID NO: 1993097 - RNA, 19 nt, Artificial Sequence
  Description of Artificial Sequence: Synthetic oligonucleotide
acauaacccacaaucuucc

SEQ ID NO: 1993098 - RNA, 19 nt, Artificial Sequence
  Description of Artificial Sequence: Synthetic oligonucleotide
auaugcauccucuccaucu

SEQ ID NO: 1993099 - RNA, 19 nt, Artificial Sequence
  Description of Artificial Sequence: Synthetic oligonucleotide
aacaccguuugcuuuaaaa

SEQ ID NO: 1993100 - RNA, 19 nt, Artificial Sequence
  Description of Artificial Sequence: Synthetic oligonucleotide
uggaauaaaggugcaaggc

SEQ ID NO: 1993101 - RNA, 19 nt, Artificial Sequence
  Description of Artificial Sequence: Synthetic oligonucleotide
uguucauuuuggcagcaga

SEQ ID NO: 1993102 - RNA, 19 nt, Artificial Sequence
  Description of Artificial Sequence: Synthetic oligonucleotide
uucuccggcaggcagagca

SEQ ID NO: 1993103 - RNA, 19 nt, Artificial Sequence
  Description of Artificial Sequence: Synthetic oligonucleotide
gaagugauguguccgugag

SEQ ID NO: 1993104 - RNA, 19 nt, Artificial Sequence
  Description of Artificial Sequence: Synthetic oligonucleotide
uaagagguggaauccaagu

SEQ ID NO: 1993105 - RNA, 19 nt, Artificial Sequence
  Description of Artificial Sequence: Synthetic oligonucleotide
cagggauacauacuuggcg

SEQ ID NO: 1993106 - RNA, 19 nt, Artificial Sequence
  Description of Artificial Sequence: Synthetic oligonucleotide
agaggucucgcuucauagc

SEQ ID NO: 1993107 - RNA, 19 nt, Artificial Sequence
  Description of Artificial Sequence: Synthetic oligonucleotide
gagaggucucgcuucauag

SEQ ID NO: 1993108 - RNA, 19 nt, Artificial Sequence
  Description of Artificial Sequence: Synthetic oligonucleotide
cucauacaagaugagaaag

SEQ ID NO: 1993109 - RNA, 19 nt, Artificial Sequence
  Description of Artificial Sequence: Synthetic oligonucleotide
ugcggaagcauguacgaca

SEQ ID NO: 1993110 - RNA, 19 nt, Artificial Sequence
  Description of Artificial Sequence: Synthetic oligonucleotide
aagcauguacgacauccug

SEQ ID NO: 1993111 - RNA, 19 nt, Artificial Sequence
  Description of Artificial Sequence: Synthetic oligonucleotide
uaaugcucaagcaggcucu

SEQ ID NO: 1993112 - RNA, 19 nt, Artificial Sequence
  Description of Artificial Sequence: Synthetic oligonucleotide
auagcauaugcauccucuc

SEQ ID NO: 1993113 - RNA, 19 nt, Artificial Sequence
  Description of Artificial Sequence: Synthetic oligonucleotide
ugcucaagcaggcucuaag

SEQ ID NO: 1993114 - RNA, 19 nt, Artificial Sequence
  Description of Artificial Sequence: Synthetic oligonucleotide
agcaccagcgcccaccgcg

SEQ ID NO: 1993115 - RNA, 19 nt, Artificial Sequence
  Description of Artificial Sequence: Synthetic oligonucleotide
acaagaaguuauaaugcuc

SEQ ID NO: 1993116 - RNA, 19 nt, Artificial Sequence
  Description of Artificial Sequence: Synthetic oligonucleotide
agacaggccuaucaggcuc

SEQ ID NO: 1993117 - RNA, 19 nt, Artificial Sequence
  Description of Artificial Sequence: Synthetic oligonucleotide
aacgaaugacgaccacgcg

SEQ ID NO: 1993118 - RNA, 19 nt, Artificial Sequence
  Description of Artificial Sequence: Synthetic oligonucleotide
caauauaggagagcugggg

SEQ ID NO: 1993119 - RNA, 19 nt, Artificial Sequence
  Description of Artificial Sequence: Synthetic oligonucleotide
agcauaugcauccucucca

SEQ ID NO: 1993120 - RNA, 19 nt, Artificial Sequence
  Description of Artificial Sequence: Synthetic oligonucleotide
gacucauacaagaugagaa

SEQ ID NO: 1993121 - RNA, 19 nt, Artificial Sequence
  Description of Artificial Sequence: Synthetic oligonucleotide
agagaacaagagaggaugc

SEQ ID NO: 1993122 - RNA, 19 nt, Artificial Sequence
  Description of Artificial Sequence: Synthetic oligonucleotide
auacuuggcgcugaaguuc

SEQ ID NO: 1993123 - RNA, 19 nt, Artificial Sequence
  Description of Artificial Sequence: Synthetic oligonucleotide
ugggauauccaaacaggac

SEQ ID NO: 1993124 - RNA, 19 nt, Artificial Sequence
  Description of Artificial Sequence: Synthetic oligonucleotide
aagugauguguccgugagg

SEQ ID NO: 1993125 - RNA, 19 nt, Artificial Sequence
  Description of Artificial Sequence: Synthetic oligonucleotide
ugcccgaaacgaaugacga

SEQ ID NO: 1993126 - RNA, 19 nt, Artificial Sequence
  Description of Artificial Sequence: Synthetic oligonucleotide
caaacaggacucauacaag

SEQ ID NO: 1993127 - RNA, 19 nt, Artificial Sequence
  Description of Artificial Sequence: Synthetic oligonucleotide
uucauuuuggcagcagaca

SEQ ID NO: 1993128 - RNA, 19 nt, Artificial Sequence
  Description of Artificial Sequence: Synthetic oligonucleotide
gacaggccucuucagaacc

SEQ ID NO: 1993129 - RNA, 19 nt, Artificial Sequence
  Description of Artificial Sequence: Synthetic oligonucleotide
acaagagaggaugccacgg

SEQ ID NO: 1993130 - RNA, 19 nt, Artificial Sequence
  Description of Artificial Sequence: Synthetic oligonucleotide
ggcgaugcuguacagaacc

SEQ ID NO: 1993131 - RNA, 19 nt, Artificial Sequence
  Description of Artificial Sequence: Synthetic oligonucleotide
accucacuaaccuggaagu

SEQ ID NO: 1993132 - RNA, 19 nt, Artificial Sequence
  Description of Artificial Sequence: Synthetic oligonucleotide
cucgugagagcccacgcgg

SEQ ID NO: 1993133 - RNA, 19 nt, Artificial Sequence
  Description of Artificial Sequence: Synthetic oligonucleotide
agaugcggaagcauguacg

SEQ ID NO: 1993134 - RNA, 19 nt, Artificial Sequence
  Description of Artificial Sequence: Synthetic oligonucleotide
acucauacaagaugagaaa

SEQ ID NO: 1993135 - RNA, 19 nt, Artificial Sequence
  Description of Artificial Sequence: Synthetic oligonucleotide
aaagaucucccacuaucuu

SEQ ID NO: 1993136 - RNA, 19 nt, Artificial Sequence
  Description of Artificial Sequence: Synthetic oligonucleotide
caccucacuaaccuggaag

SEQ ID NO: 1993137 - RNA, 19 nt, Artificial Sequence
  Description of Artificial Sequence: Synthetic oligonucleotide
aagaaguuauaaugcucaa

SEQ ID NO: 1993138 - RNA, 19 nt, Artificial Sequence
  Description of Artificial Sequence: Synthetic oligonucleotide
cuaccugccagccauugug

SEQ ID NO: 1993139 - RNA, 19 nt, Artificial Sequence
  Description of Artificial Sequence: Synthetic oligonucleotide
ucuucaugcaagugggguc

SEQ ID NO: 1993140 - RNA, 19 nt, Artificial Sequence
  Description of Artificial Sequence: Synthetic oligonucleotide
aaccacauaucugccuuuc

SEQ ID NO: 1993141 - RNA, 19 nt, Artificial Sequence
  Description of Artificial Sequence: Synthetic oligonucleotide
cuucaugcaaguggggucc

SEQ ID NO: 1993142 - RNA, 19 nt, Artificial Sequence
  Description of Artificial Sequence: Synthetic oligonucleotide
aguucucgaucauggcucg

SEQ ID NO: 1993143 - RNA, 19 nt, Artificial Sequence
  Description of Artificial Sequence: Synthetic oligonucleotide
aaggcugcgcgguugcucu

SEQ ID NO: 1993144 - RNA, 19 nt, Artificial Sequence
  Description of Artificial Sequence: Synthetic oligonucleotide
cauuucuucucggcgaugc

SEQ ID NO: 1993145 - RNA, 19 nt, Artificial Sequence
  Description of Artificial Sequence: Synthetic oligonucleotide
ugaagugauguguccguga

SEQ ID NO: 1993146 - RNA, 19 nt, Artificial Sequence
  Description of Artificial Sequence: Synthetic oligonucleotide
aaccucguccaucuucaug

SEQ ID NO: 1993147 - RNA, 19 nt, Artificial Sequence
  Description of Artificial Sequence: Synthetic oligonucleotide
gaggucucgcuucauagca

SEQ ID NO: 1993148 - RNA, 19 nt, Artificial Sequence
  Description of Artificial Sequence: Synthetic oligonucleotide
ccagccauugugcagaugc

SEQ ID NO: 1993149 - RNA, 19 nt, Artificial Sequence
  Description of Artificial Sequence: Synthetic oligonucleotide
guugcccugauucuccuug

SEQ ID NO: 1993150 - RNA, 19 nt, Artificial Sequence
  Description of Artificial Sequence: Synthetic oligonucleotide
ucggcgaugcuguacagaa

SEQ ID NO: 1993151 - RNA, 19 nt, Artificial Sequence
  Description of Artificial Sequence: Synthetic oligonucleotide
uggucuaccugccagccau

SEQ ID NO: 1993152 - RNA, 19 nt, Artificial Sequence
  Description of Artificial Sequence: Synthetic oligonucleotide
gacauccugagccggcccg

SEQ ID NO: 1993153 - RNA, 19 nt, Artificial Sequence
  Description of Artificial Sequence: Synthetic oligonucleotide
aguggggucccagucgugc

SEQ ID NO: 1993154 - RNA, 19 nt, Artificial Sequence
  Description of Artificial Sequence: Synthetic oligonucleotide
agugaagugauguguccgu

SEQ ID NO: 1993155 - RNA, 19 nt, Artificial Sequence
  Description of Artificial Sequence: Synthetic oligonucleotide
gugggagcguuucacagcc

SEQ ID NO: 1993156 - RNA, 19 nt, Artificial Sequence
  Description of Artificial Sequence: Synthetic oligonucleotide
uucuccugcugacaggccu

SEQ ID NO: 1993157 - RNA, 19 nt, Artificial Sequence
  Description of Artificial Sequence: Synthetic oligonucleotide
auacaagaugagaaagauc

SEQ ID NO: 1993158 - RNA, 19 nt, Artificial Sequence
  Description of Artificial Sequence: Synthetic oligonucleotide
agaacaagagaggaugcca

SEQ ID NO: 1993159 - RNA, 19 nt, Artificial Sequence
  Description of Artificial Sequence: Synthetic oligonucleotide
caccguuugcuuuaaaaca

SEQ ID NO: 1993160 - RNA, 19 nt, Artificial Sequence
  Description of Artificial Sequence: Synthetic oligonucleotide
gaugcggaagcauguacga

SEQ ID NO: 1993161 - RNA, 19 nt, Artificial Sequence
  Description of Artificial Sequence: Synthetic oligonucleotide
gaacaagagaggaugccac

SEQ ID NO: 1993162 - RNA, 19 nt, Artificial Sequence
  Description of Artificial Sequence: Synthetic oligonucleotide
acuaaccuggaaguucagg

SEQ ID NO: 1993163 - RNA, 19 nt, Artificial Sequence
  Description of Artificial Sequence: Synthetic oligonucleotide
uccuccgagaggauggccu

SEQ ID NO: 1993164 - RNA, 19 nt, Artificial Sequence
  Description of Artificial Sequence: Synthetic oligonucleotide
acuaucaucuccggccagg

SEQ ID NO: 1993165 - RNA, 19 nt, Artificial Sequence
  Description of Artificial Sequence: Synthetic oligonucleotide
gagaacaagagaggaugcc

SEQ ID NO: 1993166 - RNA, 19 nt, Artificial Sequence
  Description of Artificial Sequence: Synthetic oligonucleotide
gcauguacgacauccugag

SEQ ID NO: 1993167 - RNA, 19 nt, Artificial Sequence
  Description of Artificial Sequence: Synthetic oligonucleotide
uucugggccaggccgagac

SEQ ID NO: 1993168 - RNA, 19 nt, Artificial Sequence
  Description of Artificial Sequence: Synthetic oligonucleotide
ugcgcgguugcucuuucug

SEQ ID NO: 1993169 - RNA, 19 nt, Artificial Sequence
  Description of Artificial Sequence: Synthetic oligonucleotide
cagugaagugauguguccg

SEQ ID NO: 1993170 - RNA, 19 nt, Artificial Sequence
  Description of Artificial Sequence: Synthetic oligonucleotide
ccugauucuccuuggaacc

SEQ ID NO: 1993171 - RNA, 19 nt, Artificial Sequence
  Description of Artificial Sequence: Synthetic oligonucleotide
ucucgaucauggcucguga

SEQ ID NO: 1993172 - RNA, 19 nt, Artificial Sequence
  Description of Artificial Sequence: Synthetic oligonucleotide
ucucccacuaucuuccauu

SEQ ID NO: 1993173 - RNA, 19 nt, Artificial Sequence
  Description of Artificial Sequence: Synthetic oligonucleotide
aaggugcaaggcugcgcgg

SEQ ID NO: 1993174 - RNA, 19 nt, Artificial Sequence
  Description of Artificial Sequence: Synthetic oligonucleotide
auaaaggugcaaggcugcg

SEQ ID NO: 1993175 - RNA, 19 nt, Artificial Sequence
  Description of Artificial Sequence: Synthetic oligonucleotide
augacgaccacgcgguccu

SEQ ID NO: 1993176 - RNA, 19 nt, Artificial Sequence
  Description of Artificial Sequence: Synthetic oligonucleotide
uauaaugcucaagcaggcu

SEQ ID NO: 1993177 - RNA, 19 nt, Artificial Sequence
  Description of Artificial Sequence: Synthetic oligonucleotide
caucuggccgagcacggcg

SEQ ID NO: 1993178 - RNA, 19 nt, Artificial Sequence
  Description of Artificial Sequence: Synthetic oligonucleotide
cauugugcagaugcggaag

SEQ ID NO: 1993179 - RNA, 19 nt, Artificial Sequence
  Description of Artificial Sequence: Synthetic oligonucleotide
auuuuggccaggacauaac

SEQ ID NO: 1993180 - RNA, 19 nt, Artificial Sequence
  Description of Artificial Sequence: Synthetic oligonucleotide
aucuucaugcaaguggggu

SEQ ID NO: 1993181 - RNA, 19 nt, Artificial Sequence
  Description of Artificial Sequence: Synthetic oligonucleotide
cucacuaaccuggaaguuc

SEQ ID NO: 1993182 - RNA, 19 nt, Artificial Sequence
  Description of Artificial Sequence: Synthetic oligonucleotide
cugggauauccaaacagga

SEQ ID NO: 1993183 - RNA, 19 nt, Artificial Sequence
  Description of Artificial Sequence: Synthetic oligonucleotide
uaccugccagccauugugc

SEQ ID NO: 1993184 - RNA, 19 nt, Artificial Sequence
  Description of Artificial Sequence: Synthetic oligonucleotide
ucgcuucauagcauaugca

SEQ ID NO: 1993185 - RNA, 19 nt, Artificial Sequence
  Description of Artificial Sequence: Synthetic oligonucleotide
agccauugugcagaugcgg

SEQ ID NO: 1993186 - RNA, 19 nt, Artificial Sequence
  Description of Artificial Sequence: Synthetic oligonucleotide
gugcccgaaacgaaugacg

SEQ ID NO: 1993187 - RNA, 19 nt, Artificial Sequence
  Description of Artificial Sequence: Synthetic oligonucleotide
uaaaggugcaaggcugcgc

SEQ ID NO: 1993188 - RNA, 19 nt, Artificial Sequence
  Description of Artificial Sequence: Synthetic oligonucleotide
uguacagaaccucguccau

SEQ ID NO: 1993189 - RNA, 19 nt, Artificial Sequence
  Description of Artificial Sequence: Synthetic oligonucleotide
gcuguacagaaccucgucc

SEQ ID NO: 1993190 - RNA, 19 nt, Artificial Sequence
  Description of Artificial Sequence: Synthetic oligonucleotide
uacgacauccugagccggc

SEQ ID NO: 1993191 - RNA, 19 nt, Artificial Sequence
  Description of Artificial Sequence: Synthetic oligonucleotide
acggcggauguucauuuug

SEQ ID NO: 1993192 - RNA, 19 nt, Artificial Sequence
  Description of Artificial Sequence: Synthetic oligonucleotide
uucucgaucauggcucgug

SEQ ID NO: 1993193 - RNA, 19 nt, Artificial Sequence
  Description of Artificial Sequence: Synthetic oligonucleotide
cauaacccacaaucuuccc

SEQ ID NO: 1993194 - RNA, 19 nt, Artificial Sequence
  Description of Artificial Sequence: Synthetic oligonucleotide
ggcucuaagagguggaauc

SEQ ID NO: 1993195 - RNA, 19 nt, Artificial Sequence
  Description of Artificial Sequence: Synthetic oligonucleotide
gggauauccaaacaggacu

SEQ ID NO: 1993196 - RNA, 19 nt, Artificial Sequence
  Description of Artificial Sequence: Synthetic oligonucleotide
guggcuagaaauacaagaa

SEQ ID NO: 1993197 - RNA, 19 nt, Artificial Sequence
  Description of Artificial Sequence: Synthetic oligonucleotide
uugcccugauucuccuugg

SEQ ID NO: 1993198 - RNA, 19 nt, Artificial Sequence
  Description of Artificial Sequence: Synthetic oligonucleotide
cuuggcgcugaaguucucg

SEQ ID NO: 1993199 - RNA, 19 nt, Artificial Sequence
  Description of Artificial Sequence: Synthetic oligonucleotide
cauagcauaugcauccucu

SEQ ID NO: 1993200 - RNA, 19 nt, Artificial Sequence
  Description of Artificial Sequence: Synthetic oligonucleotide
gauacauacuuggcgcuga

SEQ ID NO: 1993201 - RNA, 19 nt, Artificial Sequence
  Description of Artificial Sequence: Synthetic oligonucleotide
ugccacggagcacaagcga

SEQ ID NO: 1993202 - RNA, 19 nt, Artificial Sequence
  Description of Artificial Sequence: Synthetic oligonucleotide
uuggcgcugaaguucucga

SEQ ID NO: 1993203 - RNA, 19 nt, Artificial Sequence
  Description of Artificial Sequence: Synthetic oligonucleotide
gaccacgcgguccuccucc

SEQ ID NO: 1993204 - RNA, 19 nt, Artificial Sequence
  Description of Artificial Sequence: Synthetic oligonucleotide
ggucaucuggccgagcacg

SEQ ID NO: 1993205 - RNA, 19 nt, Artificial Sequence
  Description of Artificial Sequence: Synthetic oligonucleotide
aucugugagaggucucgcu

SEQ ID NO: 1993206 - RNA, 19 nt, Artificial Sequence
  Description of Artificial Sequence: Synthetic oligonucleotide
gaaagaucucccacuaucu

SEQ ID NO: 1993207 - RNA, 19 nt, Artificial Sequence
  Description of Artificial Sequence: Synthetic oligonucleotide
agcauguacgacauccuga

SEQ ID NO: 1993208 - RNA, 19 nt, Artificial Sequence
  Description of Artificial Sequence: Synthetic oligonucleotide
gacaccaacaccguuugcu

SEQ ID NO: 1993209 - RNA, 19 nt, Artificial Sequence
  Description of Artificial Sequence: Synthetic oligonucleotide
ucccagucgugcccgaaac

SEQ ID NO: 1993210 - RNA, 19 nt, Artificial Sequence
  Description of Artificial Sequence: Synthetic oligonucleotide
aacagcugggauauccaaa

SEQ ID NO: 1993211 - RNA, 19 nt, Artificial Sequence
  Description of Artificial Sequence: Synthetic oligonucleotide
cccgaaacgaaugacgacc

SEQ ID NO: 1993212 - RNA, 19 nt, Artificial Sequence
  Description of Artificial Sequence: Synthetic oligonucleotide
ugauucuccuuggaaccca

SEQ ID NO: 1993213 - RNA, 19 nt, Artificial Sequence
  Description of Artificial Sequence: Synthetic oligonucleotide
acgacauccugagccggcc

SEQ ID NO: 1993214 - RNA, 19 nt, Artificial Sequence
  Description of Artificial Sequence: Synthetic oligonucleotide
cucgaucauggcucgugag

SEQ ID NO: 1993215 - RNA, 19 nt, Artificial Sequence
  Description of Artificial Sequence: Synthetic oligonucleotide
caucaggucaucuggccga

SEQ ID NO: 1993216 - RNA, 19 nt, Artificial Sequence
  Description of Artificial Sequence: Synthetic oligonucleotide
ucgugcccgaaacgaauga

SEQ ID NO: 1993217 - RNA, 19 nt, Artificial Sequence
  Description of Artificial Sequence: Synthetic oligonucleotide
ugacaggccucuucagaac

SEQ ID NO: 1993218 - RNA, 19 nt, Artificial Sequence
  Description of Artificial Sequence: Synthetic oligonucleotide
cugugagaggucucgcuuc

SEQ ID NO: 1993219 - RNA, 19 nt, Artificial Sequence
  Description of Artificial Sequence: Synthetic oligonucleotide
gcaaguggggucccagucg

SEQ ID NO: 1993220 - RNA, 19 nt, Artificial Sequence
  Description of Artificial Sequence: Synthetic oligonucleotide
ucuccggcaggcagagcag

SEQ ID NO: 1993221 - RNA, 19 nt, Artificial Sequence
  Description of Artificial Sequence: Synthetic oligonucleotide
cagaugcggaagcauguac

SEQ ID NO: 1993222 - RNA, 19 nt, Artificial Sequence
  Description of Artificial Sequence: Synthetic oligonucleotide
uacauacuuggcgcugaag

SEQ ID NO: 1993223 - RNA, 19 nt, Artificial Sequence
  Description of Artificial Sequence: Synthetic oligonucleotide
cugauucuccuuggaaccc

SEQ ID NO: 1993224 - RNA, 19 nt, Artificial Sequence
  Description of Artificial Sequence: Synthetic oligonucleotide
aaccaggaguguugcccug

SEQ ID NO: 1993225 - RNA, 19 nt, Artificial Sequence
  Description of Artificial Sequence: Synthetic oligonucleotide
uucauagcauaugcauccu

SEQ ID NO: 1993226 - RNA, 19 nt, Artificial Sequence
  Description of Artificial Sequence: Synthetic oligonucleotide
guacuugggcuccaccuca

SEQ ID NO: 1993227 - RNA, 19 nt, Artificial Sequence
  Description of Artificial Sequence: Synthetic oligonucleotide
cacaagcgacaccaacacc

SEQ ID NO: 1993228 - RNA, 19 nt, Artificial Sequence
  Description of Artificial Sequence: Synthetic oligonucleotide
augcggaagcauguacgac

SEQ ID NO: 1993229 - RNA, 19 nt, Artificial Sequence
  Description of Artificial Sequence: Synthetic oligonucleotide
uggggucccagucgugccc

SEQ ID NO: 1993230 - RNA, 19 nt, Artificial Sequence
  Description of Artificial Sequence: Synthetic oligonucleotide
gggagcguuucacagccag

SEQ ID NO: 1993231 - RNA, 19 nt, Artificial Sequence
  Description of Artificial Sequence: Synthetic oligonucleotide
agaggauggccuggucuac

SEQ ID NO: 1993232 - RNA, 19 nt, Artificial Sequence
  Description of Artificial Sequence: Synthetic oligonucleotide
cauguacgacauccugagc

SEQ ID NO: 1993233 - RNA, 19 nt, Artificial Sequence
  Description of Artificial Sequence: Synthetic oligonucleotide
ggcucgugaggccuggucc

SEQ ID NO: 1993234 - RNA, 19 nt, Artificial Sequence
  Description of Artificial Sequence: Synthetic oligonucleotide
ugccgucugagcucaucug

SEQ ID NO: 1993235 - RNA, 19 nt, Artificial Sequence
  Description of Artificial Sequence: Synthetic oligonucleotide
agcguuucacagccaguga

SEQ ID NO: 1993236 - RNA, 19 nt, Artificial Sequence
  Description of Artificial Sequence: Synthetic oligonucleotide
gacaggccuaucaggcucc

SEQ ID NO: 1993237 - RNA, 19 nt, Artificial Sequence
  Description of Artificial Sequence: Synthetic oligonucleotide
gagcccacgcggcccaccg

SEQ ID NO: 1993238 - RNA, 19 nt, Artificial Sequence
  Description of Artificial Sequence: Synthetic oligonucleotide
ugccucgugagagcccacg

SEQ ID NO: 1993239 - RNA, 19 nt, Artificial Sequence
  Description of Artificial Sequence: Synthetic oligonucleotide
gcacaagcgacaccaacac

SEQ ID NO: 1993240 - RNA, 19 nt, Artificial Sequence
  Description of Artificial Sequence: Synthetic oligonucleotide
caugcagggauacauacuu

SEQ ID NO: 1993241 - RNA, 19 nt, Artificial Sequence
  Description of Artificial Sequence: Synthetic oligonucleotide
guacgacauccugagccgg

SEQ ID NO: 1993242 - RNA, 19 nt, Artificial Sequence
  Description of Artificial Sequence: Synthetic oligonucleotide
ggugggagcguuucacagc

SEQ ID NO: 1993243 - RNA, 19 nt, Artificial Sequence
  Description of Artificial Sequence: Synthetic oligonucleotide
ggcuagaaauacaagaagu

SEQ ID NO: 1993244 - RNA, 19 nt, Artificial Sequence
  Description of Artificial Sequence: Synthetic oligonucleotide
gaguguugcccugauucuc

SEQ ID NO: 1993245 - RNA, 19 nt, Artificial Sequence
  Description of Artificial Sequence: Synthetic oligonucleotide
uucaggguguuggaauaaa

SEQ ID NO: 1993246 - RNA, 19 nt, Artificial Sequence
  Description of Artificial Sequence: Synthetic oligonucleotide
agaggaugccacggagcac

SEQ ID NO: 1993247 - RNA, 19 nt, Artificial Sequence
  Description of Artificial Sequence: Synthetic oligonucleotide
gaaccaggaguguugcccu

SEQ ID NO: 1993248 - RNA, 19 nt, Artificial Sequence
  Description of Artificial Sequence: Synthetic oligonucleotide
augccacggagcacaagcg

SEQ ID NO: 1993249 - RNA, 19 nt, Artificial Sequence
  Description of Artificial Sequence: Synthetic oligonucleotide
ccuaucaggcuccagagaa

SEQ ID NO: 1993250 - RNA, 19 nt, Artificial Sequence
  Description of Artificial Sequence: Synthetic oligonucleotide
aggacucauacaagaugag

SEQ ID NO: 1993251 - RNA, 19 nt, Artificial Sequence
  Description of Artificial Sequence: Synthetic oligonucleotide
cacgcgguccuccuccgag

SEQ ID NO: 1993252 - RNA, 19 nt, Artificial Sequence
  Description of Artificial Sequence: Synthetic oligonucleotide
ggaacccagaaccacauau

SEQ ID NO: 1993253 - RNA, 19 nt, Artificial Sequence
  Description of Artificial Sequence: Synthetic oligonucleotide
gccgucugagcucaucugc

SEQ ID NO: 1993254 - RNA, 19 nt, Artificial Sequence
  Description of Artificial Sequence: Synthetic oligonucleotide
aggagaggccgugauagaa

SEQ ID NO: 1993255 - RNA, 19 nt, Artificial Sequence
  Description of Artificial Sequence: Synthetic oligonucleotide
ccagugaagugaugugucc

SEQ ID NO: 1993256 - RNA, 19 nt, Artificial Sequence
  Description of Artificial Sequence: Synthetic oligonucleotide
gugaagugauguguccgug

SEQ ID NO: 1993257 - RNA, 19 nt, Artificial Sequence
  Description of Artificial Sequence: Synthetic oligonucleotide
caagagaggaugccacgga

SEQ ID NO: 1993258 - RNA, 19 nt, Artificial Sequence
  Description of Artificial Sequence: Synthetic oligonucleotide
ucucggcgaugcuguacag

SEQ ID NO: 1993259 - RNA, 19 nt, Artificial Sequence
  Description of Artificial Sequence: Synthetic oligonucleotide
gaggauggccuggucuacc

SEQ ID NO: 1993260 - RNA, 19 nt, Artificial Sequence
  Description of Artificial Sequence: Synthetic oligonucleotide
acaugcagggauacauacu

SEQ ID NO: 1993261 - RNA, 19 nt, Artificial Sequence
  Description of Artificial Sequence: Synthetic oligonucleotide
ugagcucaucugccaucug

SEQ ID NO: 1993262 - RNA, 19 nt, Artificial Sequence
  Description of Artificial Sequence: Synthetic oligonucleotide
auacauacuuggcgcugaa

SEQ ID NO: 1993263 - RNA, 19 nt, Artificial Sequence
  Description of Artificial Sequence: Synthetic oligonucleotide
agcgacaccaacaccguuu

SEQ ID NO: 1993264 - RNA, 19 nt, Artificial Sequence
  Description of Artificial Sequence: Synthetic oligonucleotide
ggcggauguucauuuuggc

SEQ ID NO: 1993265 - RNA, 19 nt, Artificial Sequence
  Description of Artificial Sequence: Synthetic oligonucleotide
ccguuugcuuuaaaacagc

SEQ ID NO: 1993266 - RNA, 19 nt, Artificial Sequence
  Description of Artificial Sequence: Synthetic oligonucleotide
ucccacuaucuuccauuuc

SEQ ID NO: 1993267 - RNA, 19 nt, Artificial Sequence
  Description of Artificial Sequence: Synthetic oligonucleotide
gucgugcccgaaacgaaug

SEQ ID NO: 1993268 - RNA, 19 nt, Artificial Sequence
  Description of Artificial Sequence: Synthetic oligonucleotide
aucuggccgagcacggcgg

SEQ ID NO: 1993269 - RNA, 19 nt, Artificial Sequence
  Description of Artificial Sequence: Synthetic oligonucleotide
gcucaagcaggcucuaaga

SEQ ID NO: 1993270 - RNA, 19 nt, Artificial Sequence
  Description of Artificial Sequence: Synthetic oligonucleotide
aagcgacaccaacaccguu

SEQ ID NO: 1993271 - RNA, 19 nt, Artificial Sequence
  Description of Artificial Sequence: Synthetic oligonucleotide
ucuggccgagcacggcgga

SEQ ID NO: 1993272 - RNA, 19 nt, Artificial Sequence
  Description of Artificial Sequence: Synthetic oligonucleotide
ggauacauacuuggcgcug

SEQ ID NO: 1993273 - RNA, 19 nt, Artificial Sequence
  Description of Artificial Sequence: Synthetic oligonucleotide
aucaggucaucuggccgag

SEQ ID NO: 1993274 - RNA, 19 nt, Artificial Sequence
  Description of Artificial Sequence: Synthetic oligonucleotide
aaugcucaagcaggcucua

SEQ ID NO: 1993275 - RNA, 19 nt, Artificial Sequence
  Description of Artificial Sequence: Synthetic oligonucleotide
ggacucauacaagaugaga

SEQ ID NO: 1993276 - RNA, 19 nt, Artificial Sequence
  Description of Artificial Sequence: Synthetic oligonucleotide
cacuaaccuggaaguucag

SEQ ID NO: 1993277 - RNA, 19 nt, Artificial Sequence
  Description of Artificial Sequence: Synthetic oligonucleotide
gcgacaccaacaccguuug

SEQ ID NO: 1993278 - RNA, 19 nt, Artificial Sequence
  Description of Artificial Sequence: Synthetic oligonucleotide
accacgcgguccuccuccg

SEQ ID NO: 1993279 - RNA, 19 nt, Artificial Sequence
  Description of Artificial Sequence: Synthetic oligonucleotide
cucuaagagguggaaucca

SEQ ID NO: 1993280 - RNA, 19 nt, Artificial Sequence
  Description of Artificial Sequence: Synthetic oligonucleotide
uggcucgugaggccugguc

SEQ ID NO: 1993281 - RNA, 19 nt, Artificial Sequence
  Description of Artificial Sequence: Synthetic oligonucleotide
ggccuggucuaccugccag

SEQ ID NO: 1993282 - RNA, 19 nt, Artificial Sequence
  Description of Artificial Sequence: Synthetic oligonucleotide
cguuucacagccagugaag

SEQ ID NO: 1993283 - RNA, 19 nt, Artificial Sequence
  Description of Artificial Sequence: Synthetic oligonucleotide
uggccgagcacggcggaug

SEQ ID NO: 1993284 - RNA, 19 nt, Artificial Sequence
  Description of Artificial Sequence: Synthetic oligonucleotide
uaucaucuccggccagguu

SEQ ID NO: 1993285 - RNA, 19 nt, Artificial Sequence
  Description of Artificial Sequence: Synthetic oligonucleotide
gacgaccacgcgguccucc

SEQ ID NO: 1993286 - RNA, 19 nt, Artificial Sequence
  Description of Artificial Sequence: Synthetic oligonucleotide
cuucucggcgaugcuguac

SEQ ID NO: 1993287 - RNA, 19 nt, Artificial Sequence
  Description of Artificial Sequence: Synthetic oligonucleotide
cacuaucaucuccggccag

SEQ ID NO: 1993288 - RNA, 19 nt, Artificial Sequence
  Description of Artificial Sequence: Synthetic oligonucleotide
cugccagccauugugcaga

SEQ ID NO: 1993289 - RNA, 19 nt, Artificial Sequence
  Description of Artificial Sequence: Synthetic oligonucleotide
guggggucccagucgugcc

SEQ ID NO: 1993290 - RNA, 19 nt, Artificial Sequence
  Description of Artificial Sequence: Synthetic oligonucleotide
aucucccacuaucuuccau

SEQ ID NO: 1993291 - RNA, 19 nt, Artificial Sequence
  Description of Artificial Sequence: Synthetic oligonucleotide
ugggccaggccgagacgcc

SEQ ID NO: 1993292 - RNA, 19 nt, Artificial Sequence
  Description of Artificial Sequence: Synthetic oligonucleotide
uccgagaggauggccuggu

SEQ ID NO: 1993293 - RNA, 19 nt, Artificial Sequence
  Description of Artificial Sequence: Synthetic oligonucleotide
gugagagcccacgcggccc

SEQ ID NO: 1993294 - RNA, 19 nt, Artificial Sequence
  Description of Artificial Sequence: Synthetic oligonucleotide
agucgugcccgaaacgaau

SEQ ID NO: 1993295 - RNA, 19 nt, Artificial Sequence
  Description of Artificial Sequence: Synthetic oligonucleotide
uggcgcugaaguucucgau

SEQ ID NO: 1993296 - RNA, 19 nt, Artificial Sequence
  Description of Artificial Sequence: Synthetic oligonucleotide
augcagggauacauacuug

SEQ ID NO: 1993297 - RNA, 19 nt, Artificial Sequence
  Description of Artificial Sequence: Synthetic oligonucleotide
gaagcauguacgacauccu

SEQ ID NO: 1993298 - RNA, 19 nt, Artificial Sequence
  Description of Artificial Sequence: Synthetic oligonucleotide
uggaacccagaaccacaua

SEQ ID NO: 1993299 - RNA, 19 nt, Artificial Sequence
  Description of Artificial Sequence: Synthetic oligonucleotide
ccgucugagcucaucugcc

SEQ ID NO: 1993300 - RNA, 19 nt, Artificial Sequence
  Description of Artificial Sequence: Synthetic oligonucleotide
cgaucauggcucgugaggc

SEQ ID NO: 1993301 - RNA, 19 nt, Artificial Sequence
  Description of Artificial Sequence: Synthetic oligonucleotide
gcagggauacauacuuggc

SEQ ID NO: 1993302 - RNA, 19 nt, Artificial Sequence
  Description of Artificial Sequence: Synthetic oligonucleotide
acgugccgcgagcugccuc

SEQ ID NO: 1993303 - RNA, 19 nt, Artificial Sequence
  Description of Artificial Sequence: Synthetic oligonucleotide
ccucgugagagcccacgcg

SEQ ID NO: 1993304 - RNA, 19 nt, Artificial Sequence
  Description of Artificial Sequence: Synthetic oligonucleotide
acgaccacgcgguccuccu

SEQ ID NO: 1993305 - RNA, 19 nt, Artificial Sequence
  Description of Artificial Sequence: Synthetic oligonucleotide
gaucucccacuaucuucca

SEQ ID NO: 1993306 - RNA, 19 nt, Artificial Sequence
  Description of Artificial Sequence: Synthetic oligonucleotide
aucuucccguccucauccu

SEQ ID NO: 1993307 - RNA, 19 nt, Artificial Sequence
  Description of Artificial Sequence: Synthetic oligonucleotide
cgugagggacaucaucagg

SEQ ID NO: 1993308 - RNA, 19 nt, Artificial Sequence
  Description of Artificial Sequence: Synthetic oligonucleotide
cauacuuggcgcugaaguu

SEQ ID NO: 1993309 - RNA, 19 nt, Artificial Sequence
  Description of Artificial Sequence: Synthetic oligonucleotide
gcguuucacagccagugaa

SEQ ID NO: 1993310 - RNA, 19 nt, Artificial Sequence
  Description of Artificial Sequence: Synthetic oligonucleotide
gaaugacgaccacgcgguc

SEQ ID NO: 1993311 - RNA, 19 nt, Artificial Sequence
  Description of Artificial Sequence: Synthetic oligonucleotide
cuccgagaggauggccugg

SEQ ID NO: 1993312 - RNA, 19 nt, Artificial Sequence
  Description of Artificial Sequence: Synthetic oligonucleotide
augcuguacagaaccucgu

SEQ ID NO: 1993313 - RNA, 19 nt, Artificial Sequence
  Description of Artificial Sequence: Synthetic oligonucleotide
cccacuaucuuccauuucu

SEQ ID NO: 1993314 - RNA, 19 nt, Artificial Sequence
  Description of Artificial Sequence: Synthetic oligonucleotide
aggcucuaagagguggaau

SEQ ID NO: 1993315 - RNA, 19 nt, Artificial Sequence
  Description of Artificial Sequence: Synthetic oligonucleotide
caaggcugcgcgguugcuc

SEQ ID NO: 1993316 - RNA, 19 nt, Artificial Sequence
  Description of Artificial Sequence: Synthetic oligonucleotide
cggcggauguucauuuugg

SEQ ID NO: 1993317 - RNA, 19 nt, Artificial Sequence
  Description of Artificial Sequence: Synthetic oligonucleotide
cuccgcgcagcaccagcgc

SEQ ID NO: 1993318 - RNA, 19 nt, Artificial Sequence
  Description of Artificial Sequence: Synthetic oligonucleotide
uguugcccugauucuccuu

SEQ ID NO: 1993319 - RNA, 19 nt, Artificial Sequence
  Description of Artificial Sequence: Synthetic oligonucleotide
gcuagaaauacaagaaguu

SEQ ID NO: 1993320 - RNA, 19 nt, Artificial Sequence
  Description of Artificial Sequence: Synthetic oligonucleotide
caaguggggucccagucgu

SEQ ID NO: 1993321 - RNA, 19 nt, Artificial Sequence
  Description of Artificial Sequence: Synthetic oligonucleotide
caccgccugcuccuccgcg

SEQ ID NO: 1993322 - RNA, 19 nt, Artificial Sequence
  Description of Artificial Sequence: Synthetic oligonucleotide
ggacauaacccacaaucuu

SEQ ID NO: 1993323 - RNA, 19 nt, Artificial Sequence
  Description of Artificial Sequence: Synthetic oligonucleotide
gugaggccugguccaucag

SEQ ID NO: 1993324 - RNA, 19 nt, Artificial Sequence
  Description of Artificial Sequence: Synthetic oligonucleotide
ggucucgcuucauagcaua

SEQ ID NO: 1993325 - RNA, 19 nt, Artificial Sequence
  Description of Artificial Sequence: Synthetic oligonucleotide
guucaggguguuggaauaa

SEQ ID NO: 1993326 - RNA, 19 nt, Artificial Sequence
  Description of Artificial Sequence: Synthetic oligonucleotide
ccgugagggacaucaucag

SEQ ID NO: 1993327 - RNA, 19 nt, Artificial Sequence
  Description of Artificial Sequence: Synthetic oligonucleotide
ucacugccacuaucaucuc

SEQ ID NO: 1993328 - RNA, 19 nt, Artificial Sequence
  Description of Artificial Sequence: Synthetic oligonucleotide
cgugccgcgagcugccucg

SEQ ID NO: 1993329 - RNA, 19 nt, Artificial Sequence
  Description of Artificial Sequence: Synthetic oligonucleotide
ccgaaacgaaugacgacca

SEQ ID NO: 1993330 - RNA, 19 nt, Artificial Sequence
  Description of Artificial Sequence: Synthetic oligonucleotide
gccacggagcacaagcgac

SEQ ID NO: 1993331 - RNA, 19 nt, Artificial Sequence
  Description of Artificial Sequence: Synthetic oligonucleotide
gccuggucuaccugccagc

SEQ ID NO: 1993332 - RNA, 19 nt, Artificial Sequence
  Description of Artificial Sequence: Synthetic oligonucleotide
gcucgugaggccuggucca

SEQ ID NO: 1993333 - RNA, 19 nt, Artificial Sequence
  Description of Artificial Sequence: Synthetic oligonucleotide
gcuccaccucacuaaccug

SEQ ID NO: 1993334 - RNA, 19 nt, Artificial Sequence
  Description of Artificial Sequence: Synthetic oligonucleotide
aaguggggucccagucgug

SEQ ID NO: 1993335 - RNA, 19 nt, Artificial Sequence
  Description of Artificial Sequence: Synthetic oligonucleotide
ggccagguucuccugcuga

SEQ ID NO: 1993336 - RNA, 19 nt, Artificial Sequence
  Description of Artificial Sequence: Synthetic oligonucleotide
caagcgacaccaacaccgu

SEQ ID NO: 1993337 - RNA, 19 nt, Artificial Sequence
  Description of Artificial Sequence: Synthetic oligonucleotide
gggauacauacuuggcgcu

SEQ ID NO: 1993338 - RNA, 19 nt, Artificial Sequence
  Description of Artificial Sequence: Synthetic oligonucleotide
cacgcggcccaccgccugc

SEQ ID NO: 1993339 - RNA, 19 nt, Artificial Sequence
  Description of Artificial Sequence: Synthetic oligonucleotide
ggaguguugcccugauucu

SEQ ID NO: 1993340 - RNA, 19 nt, Artificial Sequence
  Description of Artificial Sequence: Synthetic oligonucleotide
cccagucgugcccgaaacg

SEQ ID NO: 1993341 - RNA, 19 nt, Artificial Sequence
  Description of Artificial Sequence: Synthetic oligonucleotide
cuccuccgagaggauggcc

SEQ ID NO: 1993342 - RNA, 19 nt, Artificial Sequence
  Description of Artificial Sequence: Synthetic oligonucleotide
cagucgugcccgaaacgaa

SEQ ID NO: 1993343 - RNA, 19 nt, Artificial Sequence
  Description of Artificial Sequence: Synthetic oligonucleotide
gccacgugccgcgagcugc

SEQ ID NO: 1993344 - RNA, 19 nt, Artificial Sequence
  Description of Artificial Sequence: Synthetic oligonucleotide
gcccgaaacgaaugacgac

SEQ ID NO: 1993345 - RNA, 19 nt, Artificial Sequence
  Description of Artificial Sequence: Synthetic oligonucleotide
gccgagacgccggugggag

SEQ ID NO: 1993346 - RNA, 19 nt, Artificial Sequence
  Description of Artificial Sequence: Synthetic oligonucleotide
cgagacgccggugggagcg

SEQ ID NO: 1993347 - RNA, 19 nt, Artificial Sequence
  Description of Artificial Sequence: Synthetic oligonucleotide
ggggucccagucgugcccg

SEQ ID NO: 1993348 - RNA, 19 nt, Artificial Sequence
  Description of Artificial Sequence: Synthetic oligonucleotide
gccucgugagagcccacgc

SEQ ID NO: 1993349 - RNA, 19 nt, Artificial Sequence
  Description of Artificial Sequence: Synthetic oligonucleotide
cggugggagcguuucacag

SEQ ID NO: 1993350 - RNA, 19 nt, Artificial Sequence
  Description of Artificial Sequence: Synthetic oligonucleotide
cucguccaucuucaugcaa

SEQ ID NO: 1993351 - RNA, 19 nt, Artificial Sequence
  Description of Artificial Sequence: Synthetic oligonucleotide
cugccgucugagcucaucu

SEQ ID NO: 1993352 - RNA, 19 nt, Artificial Sequence
  Description of Artificial Sequence: Synthetic oligonucleotide
ccagucgugcccgaaacga

SEQ ID NO: 1993353 - RNA, 19 nt, Artificial Sequence
  Description of Artificial Sequence: Synthetic oligonucleotide
cggagcacaagcgacacca

SEQ ID NO: 1993354 - RNA, 19 nt, Artificial Sequence
  Description of Artificial Sequence: Synthetic oligonucleotide
cgcgguugcucuuucugac

SEQ ID NO: 1993355 - RNA, 19 nt, Artificial Sequence
  Description of Artificial Sequence: Synthetic oligonucleotide
ccuccgagaggauggccug

SEQ ID NO: 1993356 - RNA, 19 nt, Artificial Sequence
  Description of Artificial Sequence: Synthetic oligonucleotide
gucccagucgugcccgaaa

SEQ ID NO: 1993357 - RNA, 19 nt, Artificial Sequence
  Description of Artificial Sequence: Synthetic oligonucleotide
auguguccgugagggacau

SEQ ID NO: 1993358 - RNA, 19 nt, Artificial Sequence
  Description of Artificial Sequence: Synthetic oligonucleotide
aggucucgcuucauagcau

SEQ ID NO: 1993359 - RNA, 19 nt, Artificial Sequence
  Description of Artificial Sequence: Synthetic oligonucleotide
ugccgcgagcugccucgug

SEQ ID NO: 1993360 - RNA, 19 nt, Artificial Sequence
  Description of Artificial Sequence: Synthetic oligonucleotide
cucggcgaugcuguacaga

SEQ ID NO: 1993361 - RNA, 19 nt, Artificial Sequence
  Description of Artificial Sequence: Synthetic oligonucleotide
cuggucuaccugccagcca

SEQ ID NO: 1993362 - RNA, 19 nt, Artificial Sequence
  Description of Artificial Sequence: Synthetic oligonucleotide
cgaaugacgaccacgcggu

SEQ ID NO: 1993363 - RNA, 19 nt, Artificial Sequence
  Description of Artificial Sequence: Synthetic oligonucleotide
gccgcgagcugccucguga

SEQ ID NO: 1993364 - RNA, 19 nt, Artificial Sequence
  Description of Artificial Sequence: Synthetic oligonucleotide
cuucagaaccaggaguguu

SEQ ID NO: 1993365 - RNA, 19 nt, Artificial Sequence
  Description of Artificial Sequence: Synthetic oligonucleotide
gcgcgguugcucuuucuga

SEQ ID NO: 1993366 - RNA, 19 nt, Artificial Sequence
  Description of Artificial Sequence: Synthetic oligonucleotide
ccgagcacggcggauguuc

SEQ ID NO: 1993367 - RNA, 19 nt, Artificial Sequence
  Description of Artificial Sequence: Synthetic oligonucleotide
ccgcgcagcaccagcgccc

SEQ ID NO: 1993368 - RNA, 19 nt, Artificial Sequence
  Description of Artificial Sequence: Synthetic oligonucleotide
gggccaggccgagacgccg

SEQ ID NO: 1993369 - RNA, 19 nt, Artificial Sequence
  Description of Artificial Sequence: Synthetic oligonucleotide
cucccacuaucuuccauuu

SEQ ID NO: 1993370 - RNA, 19 nt, Artificial Sequence
  Description of Artificial Sequence: Synthetic oligonucleotide
cuaucaucuccggccaggu

SEQ ID NO: 1993371 - RNA, 19 nt, Artificial Sequence
  Description of Artificial Sequence: Synthetic oligonucleotide
ccauugugcagaugcggaa

SEQ ID NO: 1993372 - RNA, 19 nt, Artificial Sequence
  Description of Artificial Sequence: Synthetic oligonucleotide
cuuugcugucacugccacu

SEQ ID NO: 1993373 - RNA, 19 nt, Artificial Sequence
  Description of Artificial Sequence: Synthetic oligonucleotide
ccuccauuuuggccaggac

SEQ ID NO: 1993374 - RNA, 19 nt, Artificial Sequence
  Description of Artificial Sequence: Synthetic oligonucleotide
ccacgugccgcgagcugcc

SEQ ID NO: 1993375 - RNA, 19 nt, Artificial Sequence
  Description of Artificial Sequence: Synthetic oligonucleotide
augcucaagcaggcucuaa

SEQ ID NO: 1993376 - RNA, 19 nt, Artificial Sequence
  Description of Artificial Sequence: Synthetic oligonucleotide
ccgcgagcugccucgugag

SEQ ID NO: 1993377 - RNA, 19 nt, Artificial Sequence
  Description of Artificial Sequence: Synthetic oligonucleotide
cgcuucauagcauaugcau

SEQ ID NO: 1993378 - RNA, 19 nt, Artificial Sequence
  Description of Artificial Sequence: Synthetic oligonucleotide
ggccaggacauaacccaca

SEQ ID NO: 1993379 - RNA, 19 nt, Artificial Sequence
  Description of Artificial Sequence: Synthetic oligonucleotide
caggccuaucaggcuccag

SEQ ID NO: 1993380 - RNA, 19 nt, Artificial Sequence
  Description of Artificial Sequence: Synthetic oligonucleotide
ggcccgcgcggccacgugc

SEQ ID NO: 1993381 - RNA, 19 nt, Artificial Sequence
  Description of Artificial Sequence: Synthetic oligonucleotide
ccugagccggcccgcgcgg

SEQ ID NO: 1993382 - RNA, 19 nt, Artificial Sequence
  Description of Artificial Sequence: Synthetic oligonucleotide
cgaaacgaaugacgaccac

SEQ ID NO: 1993383 - RNA, 19 nt, Artificial Sequence
  Description of Artificial Sequence: Synthetic oligonucleotide
ggaugccacggagcacaag

SEQ ID NO: 1993384 - RNA, 19 nt, Artificial Sequence
  Description of Artificial Sequence: Synthetic oligonucleotide
cugagccggcccgcgcggc

SEQ ID NO: 1993385 - RNA, 19 nt, Artificial Sequence
  Description of Artificial Sequence: Synthetic oligonucleotide
cgugcccgaaacgaaugac

SEQ ID NO: 1993386 - RNA, 19 nt, Artificial Sequence
  Description of Artificial Sequence: Synthetic oligonucleotide
gagcacggcggauguucau

SEQ ID NO: 1993387 - RNA, 19 nt, Artificial Sequence
  Description of Artificial Sequence: Synthetic oligonucleotide
gcagaugcggaagcaugua

SEQ ID NO: 1993388 - RNA, 19 nt, Artificial Sequence
  Description of Artificial Sequence: Synthetic oligonucleotide
ggccacgugccgcgagcug

SEQ ID NO: 1993389 - RNA, 19 nt, Artificial Sequence
  Description of Artificial Sequence: Synthetic oligonucleotide
cgacauccugagccggccc

SEQ ID NO: 1993390 - RNA, 19 nt, Artificial Sequence
  Description of Artificial Sequence: Synthetic oligonucleotide
cgcgcggccacgugccgcg

SEQ ID NO: 1993391 - RNA, 19 nt, Artificial Sequence
  Description of Artificial Sequence: Synthetic oligonucleotide
guucuccggcaggcagagc

SEQ ID NO: 1993392 - RNA, 19 nt, Artificial Sequence
  Description of Artificial Sequence: Synthetic oligonucleotide
gagccggcccgcgcggcca

SEQ ID NO: 1993393 - RNA, 19 nt, Artificial Sequence
  Description of Artificial Sequence: Synthetic oligonucleotide
aggaugccacggagcacaa

SEQ ID NO: 1993394 - RNA, 19 nt, Artificial Sequence
  Description of Artificial Sequence: Synthetic oligonucleotide
auggcucgugaggccuggu

SEQ ID NO: 1993395 - RNA, 19 nt, Artificial Sequence
  Description of Artificial Sequence: Synthetic oligonucleotide
gucucgcuucauagcauau

SEQ ID NO: 1993396 - RNA, 19 nt, Artificial Sequence
  Description of Artificial Sequence: Synthetic oligonucleotide
ccauuucuucucggcgaug

SEQ ID NO: 1993397 - RNA, 19 nt, Artificial Sequence
  Description of Artificial Sequence: Synthetic oligonucleotide
gcugcgcgguugcucuuuc

SEQ ID NO: 1993398 - RNA, 19 nt, Artificial Sequence
  Description of Artificial Sequence: Synthetic oligonucleotide
ccucguccaucuucaugca

SEQ ID NO: 1993399 - RNA, 19 nt, Artificial Sequence
  Description of Artificial Sequence: Synthetic oligonucleotide
gcggaagcauguacgacau

SEQ ID NO: 1993400 - RNA, 19 nt, Artificial Sequence
  Description of Artificial Sequence: Synthetic oligonucleotide
ugacgaccacgcgguccuc

SEQ ID NO: 1993401 - RNA, 19 nt, Artificial Sequence
  Description of Artificial Sequence: Synthetic oligonucleotide
gcugccgucugagcucauc

SEQ ID NO: 1993402 - RNA, 19 nt, Artificial Sequence
  Description of Artificial Sequence: Synthetic oligonucleotide
ccgagacgccggugggagc

SEQ ID NO: 1993403 - RNA, 19 nt, Artificial Sequence
  Description of Artificial Sequence: Synthetic oligonucleotide
aggcugcgcgguugcucuu

SEQ ID NO: 1993404 - RNA, 19 nt, Artificial Sequence
  Description of Artificial Sequence: Synthetic oligonucleotide
gcacggcggauguucauuu

SEQ ID NO: 1993405 - RNA, 19 nt, Artificial Sequence
  Description of Artificial Sequence: Synthetic oligonucleotide
gcccgcgcggccacgugcc

SEQ ID NO: 1993406 - RNA, 19 nt, Artificial Sequence
  Description of Artificial Sequence: Synthetic oligonucleotide
ggagcguuucacagccagu

SEQ ID NO: 1993407 - RNA, 19 nt, Artificial Sequence
  Description of Artificial Sequence: Synthetic oligonucleotide
cgacaccaacaccguuugc

SEQ ID NO: 1993408 - RNA, 19 nt, Artificial Sequence
  Description of Artificial Sequence: Synthetic oligonucleotide
cggcgaugcuguacagaac

SEQ ID NO: 1993409 - RNA, 19 nt, Artificial Sequence
  Description of Artificial Sequence: Synthetic oligonucleotide
ggcagcagacaggccuauc

SEQ ID NO: 1993410 - RNA, 19 nt, Artificial Sequence
  Description of Artificial Sequence: Synthetic oligonucleotide
guucucgaucauggcucgu

SEQ ID NO: 1993411 - RNA, 19 nt, Artificial Sequence
  Description of Artificial Sequence: Synthetic oligonucleotide
agacgccggugggagcguu

SEQ ID NO: 1993412 - RNA, 19 nt, Artificial Sequence
  Description of Artificial Sequence: Synthetic oligonucleotide
cgagcacggcggauguuca

SEQ ID NO: 1993413 - RNA, 19 nt, Artificial Sequence
  Description of Artificial Sequence: Synthetic oligonucleotide
ccgagaggauggccugguc

SEQ ID NO: 1993414 - RNA, 19 nt, Artificial Sequence
  Description of Artificial Sequence: Synthetic oligonucleotide
ccacuaucuuccauuucuu

SEQ ID NO: 1993415 - RNA, 19 nt, Artificial Sequence
  Description of Artificial Sequence: Synthetic oligonucleotide
ggccgagcacggcggaugu

SEQ ID NO: 1993416 - RNA, 19 nt, Artificial Sequence
  Description of Artificial Sequence: Synthetic oligonucleotide
cacggcggauguucauuuu

SEQ ID NO: 1993417 - RNA, 19 nt, Artificial Sequence
  Description of Artificial Sequence: Synthetic oligonucleotide
ggugcaaggcugcgcgguu

SEQ ID NO: 1993418 - RNA, 19 nt, Artificial Sequence
  Description of Artificial Sequence: Synthetic oligonucleotide
ggccgagacgccgguggga

SEQ ID NO: 1993419 - RNA, 19 nt, Artificial Sequence
  Description of Artificial Sequence: Synthetic oligonucleotide
gccagccauugugcagaug

SEQ ID NO: 1993420 - RNA, 19 nt, Artificial Sequence
  Description of Artificial Sequence: Synthetic oligonucleotide
gagacgccggugggagcgu

SEQ ID NO: 1993421 - RNA, 19 nt, Artificial Sequence
  Description of Artificial Sequence: Synthetic oligonucleotide
ggucccagucgugcccgaa

SEQ ID NO: 1993422 - RNA, 19 nt, Artificial Sequence
  Description of Artificial Sequence: Synthetic oligonucleotide
ccgccugcuccuccgcgca

SEQ ID NO: 1993423 - RNA, 19 nt, Artificial Sequence
  Description of Artificial Sequence: Synthetic oligonucleotide
cggaagcauguacgacauc

SEQ ID NO: 1993424 - RNA, 19 nt, Artificial Sequence
  Description of Artificial Sequence: Synthetic oligonucleotide
gggucccagucgugcccga

SEQ ID NO: 1993425 - RNA, 19 nt, Artificial Sequence
  Description of Artificial Sequence: Synthetic oligonucleotide
cccgcgcggccacgugccg

SEQ ID NO: 1993426 - RNA, 19 nt, Artificial Sequence
  Description of Artificial Sequence: Synthetic oligonucleotide
ccgcgcggccacgugccgc

SEQ ID NO: 1993427 - RNA, 19 nt, Artificial Sequence
  Description of Artificial Sequence: Synthetic oligonucleotide
gacgccggugggagcguuu

SEQ ID NO: 1993428 - RNA, 19 nt, Artificial Sequence
  Description of Artificial Sequence: Synthetic oligonucleotide
ccaggccgagacgccggug

SEQ ID NO: 1993429 - RNA, 19 nt, Artificial Sequence
  Description of Artificial Sequence: Synthetic oligonucleotide
ccaggacauaacccacaau

SEQ ID NO: 1993430 - RNA, 19 nt, Artificial Sequence
  Description of Artificial Sequence: Synthetic oligonucleotide
cgaccacgcgguccuccuc

SEQ ID NO: 1993431 - RNA, 19 nt, Artificial Sequence
  Description of Artificial Sequence: Synthetic oligonucleotide
gccaggccgagacgccggu

SEQ ID NO: 1993432 - RNA, 19 nt, Artificial Sequence
  Description of Artificial Sequence: Synthetic oligonucleotide
cuggccgagcacggcggau

SEQ ID NO: 1993433 - RNA, 19 nt, Artificial Sequence
  Description of Artificial Sequence: Synthetic oligonucleotide
cgcgagcugccucgugaga

SEQ ID NO: 1993434 - RNA, 19 nt, Artificial Sequence
  Description of Artificial Sequence: Synthetic oligonucleotide
agcugccgucugagcucau

SEQ ID NO: 1993435 - RNA, 19 nt, Artificial Sequence
  Description of Artificial Sequence: Synthetic oligonucleotide
ccacgcgguccuccuccga

SEQ ID NO: 1993436 - RNA, 19 nt, Artificial Sequence
  Description of Artificial Sequence: Synthetic oligonucleotide
ggcugcgcgguugcucuuu

SEQ ID NO: 1993437 - RNA, 19 nt, Artificial Sequence
  Description of Artificial Sequence: Synthetic oligonucleotide
gugccgcgagcugccucgu

SEQ ID NO: 1993438 - RNA, 19 nt, Artificial Sequence
  Description of Artificial Sequence: Synthetic oligonucleotide
cacgugccgcgagcugccu

SEQ ID NO: 1993439 - RNA, 19 nt, Artificial Sequence
  Description of Artificial Sequence: Synthetic oligonucleotide
gccgagcacggcggauguu

SEQ ID NO: 1993440 - RNA, 19 nt, Artificial Sequence
  Description of Artificial Sequence: Synthetic oligonucleotide
ucuuugaguagucagagcc

SEQ ID NO: 1993441 - RNA, 19 nt, Artificial Sequence
  Description of Artificial Sequence: Synthetic oligonucleotide
aauaagucuuauuuauggg

SEQ ID NO: 1993442 - RNA, 19 nt, Artificial Sequence
  Description of Artificial Sequence: Synthetic oligonucleotide
uuguacaguauccugaggg

SEQ ID NO: 1993443 - RNA, 19 nt, Artificial Sequence
  Description of Artificial Sequence: Synthetic oligonucleotide
aaagaaguggaugaugucg

SEQ ID NO: 1993444 - RNA, 19 nt, Artificial Sequence
  Description of Artificial Sequence: Synthetic oligonucleotide
auaagucuuauuuaugggg

SEQ ID NO: 1993445 - RNA, 19 nt, Artificial Sequence
  Description of Artificial Sequence: Synthetic oligonucleotide
aagacaucgaagcuuauca

SEQ ID NO: 1993446 - RNA, 19 nt, Artificial Sequence
  Description of Artificial Sequence: Synthetic oligonucleotide
uuuauggggagccaccugg

SEQ ID NO: 1993447 - RNA, 19 nt, Artificial Sequence
  Description of Artificial Sequence: Synthetic oligonucleotide
agagccauguaacuaagac

SEQ ID NO: 1993448 - RNA, 19 nt, Artificial Sequence
  Description of Artificial Sequence: Synthetic oligonucleotide
guaacuaagacagaaguug

SEQ ID NO: 1993449 - RNA, 19 nt, Artificial Sequence
  Description of Artificial Sequence: Synthetic oligonucleotide
uuccggaacucaaugaagg

SEQ ID NO: 1993450 - RNA, 19 nt, Artificial Sequence
  Description of Artificial Sequence: Synthetic oligonucleotide
aacucaaugaagguuccac

SEQ ID NO: 1993451 - RNA, 19 nt, Artificial Sequence
  Description of Artificial Sequence: Synthetic oligonucleotide
agaaccuuagccccuugcc

SEQ ID NO: 1993452 - RNA, 19 nt, Artificial Sequence
  Description of Artificial Sequence: Synthetic oligonucleotide
aaccuauucuguuacagaa

SEQ ID NO: 1993453 - RNA, 19 nt, Artificial Sequence
  Description of Artificial Sequence: Synthetic oligonucleotide
aagcuguccucaucgagac

SEQ ID NO: 1993454 - RNA, 19 nt, Artificial Sequence
  Description of Artificial Sequence: Synthetic oligonucleotide
acuacgccaaucugcaccc

SEQ ID NO: 1993455 - RNA, 19 nt, Artificial Sequence
  Description of Artificial Sequence: Synthetic oligonucleotide
aguagucagagccacccac

SEQ ID NO: 1993456 - RNA, 19 nt, Artificial Sequence
  Description of Artificial Sequence: Synthetic oligonucleotide
caaucugcacccuacuucg

SEQ ID NO: 1993457 - RNA, 19 nt, Artificial Sequence
  Description of Artificial Sequence: Synthetic oligonucleotide
aaccuuagccccuugccag

SEQ ID NO: 1993458 - RNA, 19 nt, Artificial Sequence
  Description of Artificial Sequence: Synthetic oligonucleotide
agacugucgaggcaguagc

SEQ ID NO: 1993459 - RNA, 19 nt, Artificial Sequence
  Description of Artificial Sequence: Synthetic oligonucleotide
aagcuuaucaugccuccuc

SEQ ID NO: 1993460 - RNA, 19 nt, Artificial Sequence
  Description of Artificial Sequence: Synthetic oligonucleotide
aaugcuuagcugugaucac

SEQ ID NO: 1993461 - RNA, 19 nt, Artificial Sequence
  Description of Artificial Sequence: Synthetic oligonucleotide
aggaauaagucuuauuuau

SEQ ID NO: 1993462 - RNA, 19 nt, Artificial Sequence
  Description of Artificial Sequence: Synthetic oligonucleotide
uccgggaagacaucgaagc

SEQ ID NO: 1993463 - RNA, 19 nt, Artificial Sequence
  Description of Artificial Sequence: Synthetic oligonucleotide
ugcuuagcugugaucaccg

SEQ ID NO: 1993464 - RNA, 19 nt, Artificial Sequence
  Description of Artificial Sequence: Synthetic oligonucleotide
uaacuaagacagaaguuga

SEQ ID NO: 1993465 - RNA, 19 nt, Artificial Sequence
  Description of Artificial Sequence: Synthetic oligonucleotide
aagucuuauuuauggggag

SEQ ID NO: 1993466 - RNA, 19 nt, Artificial Sequence
  Description of Artificial Sequence: Synthetic oligonucleotide
cucaaugaagguuccacgc

SEQ ID NO: 1993467 - RNA, 19 nt, Artificial Sequence
  Description of Artificial Sequence: Synthetic oligonucleotide
ucaccgucaugccucaugg

SEQ ID NO: 1993468 - RNA, 19 nt, Artificial Sequence
  Description of Artificial Sequence: Synthetic oligonucleotide
gaagguuccacgcuucuug

SEQ ID NO: 1993469 - RNA, 19 nt, Artificial Sequence
  Description of Artificial Sequence: Synthetic oligonucleotide
gucagagccacccacuacg

SEQ ID NO: 1993470 - RNA, 19 nt, Artificial Sequence
  Description of Artificial Sequence: Synthetic oligonucleotide
aagacagaaguugaucaag

SEQ ID NO: 1993471 - RNA, 19 nt, Artificial Sequence
  Description of Artificial Sequence: Synthetic oligonucleotide
caugguucucucuucaggc

SEQ ID NO: 1993472 - RNA, 19 nt, Artificial Sequence
  Description of Artificial Sequence: Synthetic oligonucleotide
aaaccuauucuguuacaga

SEQ ID NO: 1993473 - RNA, 19 nt, Artificial Sequence
  Description of Artificial Sequence: Synthetic oligonucleotide
ucugcuuggagaguagccg

SEQ ID NO: 1993474 - RNA, 19 nt, Artificial Sequence
  Description of Artificial Sequence: Synthetic oligonucleotide
acucaaugaagguuccacg

SEQ ID NO: 1993475 - RNA, 19 nt, Artificial Sequence
  Description of Artificial Sequence: Synthetic oligonucleotide
aguagcgcuuaucccagcc

SEQ ID NO: 1993476 - RNA, 19 nt, Artificial Sequence
  Description of Artificial Sequence: Synthetic oligonucleotide
gaaaccuauucuguuacag

SEQ ID NO: 1993477 - RNA, 19 nt, Artificial Sequence
  Description of Artificial Sequence: Synthetic oligonucleotide
cuuaucaugccuccucgcg

SEQ ID NO: 1993478 - RNA, 19 nt, Artificial Sequence
  Description of Artificial Sequence: Synthetic oligonucleotide
gaucuuugaguagucagag

SEQ ID NO: 1993479 - RNA, 19 nt, Artificial Sequence
  Description of Artificial Sequence: Synthetic oligonucleotide
ucucaaugacuucaucccc

SEQ ID NO: 1993480 - RNA, 19 nt, Artificial Sequence
  Description of Artificial Sequence: Synthetic oligonucleotide
ucucuucaggccuagccag

SEQ ID NO: 1993481 - RNA, 19 nt, Artificial Sequence
  Description of Artificial Sequence: Synthetic oligonucleotide
cucgcgagaaccuuagccc

SEQ ID NO: 1993482 - RNA, 19 nt, Artificial Sequence
  Description of Artificial Sequence: Synthetic oligonucleotide
ucguuguacaguauccuga

SEQ ID NO: 1993483 - RNA, 19 nt, Artificial Sequence
  Description of Artificial Sequence: Synthetic oligonucleotide
agucuuauuuauggggagc

SEQ ID NO: 1993484 - RNA, 19 nt, Artificial Sequence
  Description of Artificial Sequence: Synthetic oligonucleotide
uccucaucgagacugucga

SEQ ID NO: 1993485 - RNA, 19 nt, Artificial Sequence
  Description of Artificial Sequence: Synthetic oligonucleotide
uccgcauagaucucaaagu

SEQ ID NO: 1993486 - RNA, 19 nt, Artificial Sequence
  Description of Artificial Sequence: Synthetic oligonucleotide
cacacuauggccgacaguc

SEQ ID NO: 1993487 - RNA, 19 nt, Artificial Sequence
  Description of Artificial Sequence: Synthetic oligonucleotide
ugaguagucagagccaccc

SEQ ID NO: 1993488 - RNA, 19 nt, Artificial Sequence
  Description of Artificial Sequence: Synthetic oligonucleotide
uuuucuggcgagcuggcgu

SEQ ID NO: 1993489 - RNA, 19 nt, Artificial Sequence
  Description of Artificial Sequence: Synthetic oligonucleotide
uucuggauugucugcuugg

SEQ ID NO: 1993490 - RNA, 19 nt, Artificial Sequence
  Description of Artificial Sequence: Synthetic oligonucleotide
augguucucucuucaggcc

SEQ ID NO: 1993491 - RNA, 19 nt, Artificial Sequence
  Description of Artificial Sequence: Synthetic oligonucleotide
ucaaugaagguuccacgcu

SEQ ID NO: 1993492 - RNA, 19 nt, Artificial Sequence
  Description of Artificial Sequence: Synthetic oligonucleotide
guccgcauagaucucaaag

SEQ ID NO: 1993493 - RNA, 19 nt, Artificial Sequence
  Description of Artificial Sequence: Synthetic oligonucleotide
aggaaugggaaccuuggca

SEQ ID NO: 1993494 - RNA, 19 nt, Artificial Sequence
  Description of Artificial Sequence: Synthetic oligonucleotide
aaguucucggcaucguugu

SEQ ID NO: 1993495 - RNA, 19 nt, Artificial Sequence
  Description of Artificial Sequence: Synthetic oligonucleotide
uaucaugccuccucgcgag

SEQ ID NO: 1993496 - RNA, 19 nt, Artificial Sequence
  Description of Artificial Sequence: Synthetic oligonucleotide
agcuuaucaugccuccucg

SEQ ID NO: 1993497 - RNA, 19 nt, Artificial Sequence
  Description of Artificial Sequence: Synthetic oligonucleotide
accaggacuggucucauug

SEQ ID NO: 1993498 - RNA, 19 nt, Artificial Sequence
  Description of Artificial Sequence: Synthetic oligonucleotide
uuaucaugccuccucgcga

SEQ ID NO: 1993499 - RNA, 19 nt, Artificial Sequence
  Description of Artificial Sequence: Synthetic oligonucleotide
aauuuucuggcgagcuggc

SEQ ID NO: 1993500 - RNA, 19 nt, Artificial Sequence
  Description of Artificial Sequence: Synthetic oligonucleotide
cacuacgccaaucugcacc

SEQ ID NO: 1993501 - RNA, 19 nt, Artificial Sequence
  Description of Artificial Sequence: Synthetic oligonucleotide
ucaaagucauucccaccag

SEQ ID NO: 1993502 - RNA, 19 nt, Artificial Sequence
  Description of Artificial Sequence: Synthetic oligonucleotide
ucugagcagagccauguaa

SEQ ID NO: 1993503 - RNA, 19 nt, Artificial Sequence
  Description of Artificial Sequence: Synthetic oligonucleotide
ucaauuuucuggcgagcug

SEQ ID NO: 1993504 - RNA, 19 nt, Artificial Sequence
  Description of Artificial Sequence: Synthetic oligonucleotide
ugcucagcgaucuuugagu

SEQ ID NO: 1993505 - RNA, 19 nt, Artificial Sequence
  Description of Artificial Sequence: Synthetic oligonucleotide
augaugucgaagcuguccu

SEQ ID NO: 1993506 - RNA, 19 nt, Artificial Sequence
  Description of Artificial Sequence: Synthetic oligonucleotide
uuugaguagucagagccac

SEQ ID NO: 1993507 - RNA, 19 nt, Artificial Sequence
  Description of Artificial Sequence: Synthetic oligonucleotide
ucucggcaaacacauaauc

SEQ ID NO: 1993508 - RNA, 19 nt, Artificial Sequence
  Description of Artificial Sequence: Synthetic oligonucleotide
uaagacagaaguugaucaa

SEQ ID NO: 1993509 - RNA, 19 nt, Artificial Sequence
  Description of Artificial Sequence: Synthetic oligonucleotide
cugagcagagccauguaac

SEQ ID NO: 1993510 - RNA, 19 nt, Artificial Sequence
  Description of Artificial Sequence: Synthetic oligonucleotide
caaugcuuagcugugauca

SEQ ID NO: 1993511 - RNA, 19 nt, Artificial Sequence
  Description of Artificial Sequence: Synthetic oligonucleotide
cuuauuuauggggagccac

SEQ ID NO: 1993512 - RNA, 19 nt, Artificial Sequence
  Description of Artificial Sequence: Synthetic oligonucleotide
gugaaaccuauucuguuac

SEQ ID NO: 1993513 - RNA, 19 nt, Artificial Sequence
  Description of Artificial Sequence: Synthetic oligonucleotide
ggacaguugccacagaccc

SEQ ID NO: 1993514 - RNA, 19 nt, Artificial Sequence
  Description of Artificial Sequence: Synthetic oligonucleotide
agagccacccacuacgcca

SEQ ID NO: 1993515 - RNA, 19 nt, Artificial Sequence
  Description of Artificial Sequence: Synthetic oligonucleotide
aacucgauccucuccucca

SEQ ID NO: 1993516 - RNA, 19 nt, Artificial Sequence
  Description of Artificial Sequence: Synthetic oligonucleotide
aucguuguacaguauccug

SEQ ID NO: 1993517 - RNA, 19 nt, Artificial Sequence
  Description of Artificial Sequence: Synthetic oligonucleotide
gaugcuacaugcuggucca

SEQ ID NO: 1993518 - RNA, 19 nt, Artificial Sequence
  Description of Artificial Sequence: Synthetic oligonucleotide
augcuuagcugugaucacc

SEQ ID NO: 1993519 - RNA, 19 nt, Artificial Sequence
  Description of Artificial Sequence: Synthetic oligonucleotide
ucugcacccuacuucgaag

SEQ ID NO: 1993520 - RNA, 19 nt, Artificial Sequence
  Description of Artificial Sequence: Synthetic oligonucleotide
ggaaugggaaccuuggcac

SEQ ID NO: 1993521 - RNA, 19 nt, Artificial Sequence
  Description of Artificial Sequence: Synthetic oligonucleotide
acugucgaggcaguagcgc

SEQ ID NO: 1993522 - RNA, 19 nt, Artificial Sequence
  Description of Artificial Sequence: Synthetic oligonucleotide
ucgaagcuuaucaugccuc

SEQ ID NO: 1993523 - RNA, 19 nt, Artificial Sequence
  Description of Artificial Sequence: Synthetic oligonucleotide
aggaugcgcucuuuccugc

SEQ ID NO: 1993524 - RNA, 19 nt, Artificial Sequence
  Description of Artificial Sequence: Synthetic oligonucleotide
cacuauggccgacaguccg

SEQ ID NO: 1993525 - RNA, 19 nt, Artificial Sequence
  Description of Artificial Sequence: Synthetic oligonucleotide
aggcaguagcgcuuauccc

SEQ ID NO: 1993526 - RNA, 19 nt, Artificial Sequence
  Description of Artificial Sequence: Synthetic oligonucleotide
ugguucucucuucaggccu

SEQ ID NO: 1993527 - RNA, 19 nt, Artificial Sequence
  Description of Artificial Sequence: Synthetic oligonucleotide
aaccuuggcacuccauggu

SEQ ID NO: 1993528 - RNA, 19 nt, Artificial Sequence
  Description of Artificial Sequence: Synthetic oligonucleotide
gucuuauuuauggggagcc

SEQ ID NO: 1993529 - RNA, 19 nt, Artificial Sequence
  Description of Artificial Sequence: Synthetic oligonucleotide
uuccgggaagacaucgaag

SEQ ID NO: 1993530 - RNA, 19 nt, Artificial Sequence
  Description of Artificial Sequence: Synthetic oligonucleotide
aucgaagcuuaucaugccu

SEQ ID NO: 1993531 - RNA, 19 nt, Artificial Sequence
  Description of Artificial Sequence: Synthetic oligonucleotide
acuggucucauugccaaag

SEQ ID NO: 1993532 - RNA, 19 nt, Artificial Sequence
  Description of Artificial Sequence: Synthetic oligonucleotide
ugguccagaggaaugggaa

SEQ ID NO: 1993533 - RNA, 19 nt, Artificial Sequence
  Description of Artificial Sequence: Synthetic oligonucleotide
ccuauucuguuacagaaac

SEQ ID NO: 1993534 - RNA, 19 nt, Artificial Sequence
  Description of Artificial Sequence: Synthetic oligonucleotide
acacauaaucaaauuucuc

SEQ ID NO: 1993535 - RNA, 19 nt, Artificial Sequence
  Description of Artificial Sequence: Synthetic oligonucleotide
cucggcaaacacauaauca

SEQ ID NO: 1993536 - RNA, 19 nt, Artificial Sequence
  Description of Artificial Sequence: Synthetic oligonucleotide
gaggaugcgcucuuuccug

SEQ ID NO: 1993537 - RNA, 19 nt, Artificial Sequence
  Description of Artificial Sequence: Synthetic oligonucleotide
gaaguugaucaaguccugc

SEQ ID NO: 1993538 - RNA, 19 nt, Artificial Sequence
  Description of Artificial Sequence: Synthetic oligonucleotide
uauuuauggggagccaccu

SEQ ID NO: 1993539 - RNA, 19 nt, Artificial Sequence
  Description of Artificial Sequence: Synthetic oligonucleotide
ggagaccacacuauggccg

SEQ ID NO: 1993540 - RNA, 19 nt, Artificial Sequence
  Description of Artificial Sequence: Synthetic oligonucleotide
gaaccuuagccccuugcca

SEQ ID NO: 1993541 - RNA, 19 nt, Artificial Sequence
  Description of Artificial Sequence: Synthetic oligonucleotide
ugacuucauccccaucacc

SEQ ID NO: 1993542 - RNA, 19 nt, Artificial Sequence
  Description of Artificial Sequence: Synthetic oligonucleotide
aucacccagcugcucagcg

SEQ ID NO: 1993543 - RNA, 19 nt, Artificial Sequence
  Description of Artificial Sequence: Synthetic oligonucleotide
gcuuguacugcacuguccc

SEQ ID NO: 1993544 - RNA, 19 nt, Artificial Sequence
  Description of Artificial Sequence: Synthetic oligonucleotide
agggucaauuuucuggcga

SEQ ID NO: 1993545 - RNA, 19 nt, Artificial Sequence
  Description of Artificial Sequence: Synthetic oligonucleotide
cuuagcugugaucaccguc

SEQ ID NO: 1993546 - RNA, 19 nt, Artificial Sequence
  Description of Artificial Sequence: Synthetic oligonucleotide
gaugcgcucuuuccugcgg

SEQ ID NO: 1993547 - RNA, 19 nt, Artificial Sequence
  Description of Artificial Sequence: Synthetic oligonucleotide
cucucugcgcgccaagugc

SEQ ID NO: 1993548 - RNA, 19 nt, Artificial Sequence
  Description of Artificial Sequence: Synthetic oligonucleotide
uagccguccaugcuuguac

SEQ ID NO: 1993549 - RNA, 19 nt, Artificial Sequence
  Description of Artificial Sequence: Synthetic oligonucleotide
uccaugcuuguacugcacu

SEQ ID NO: 1993550 - RNA, 19 nt, Artificial Sequence
  Description of Artificial Sequence: Synthetic oligonucleotide
cuacaugcugguccagagg

SEQ ID NO: 1993551 - RNA, 19 nt, Artificial Sequence
  Description of Artificial Sequence: Synthetic oligonucleotide
ugaaaccuauucuguuaca

SEQ ID NO: 1993552 - RNA, 19 nt, Artificial Sequence
  Description of Artificial Sequence: Synthetic oligonucleotide
cugcacccuacuucgaagc

SEQ ID NO: 1993553 - RNA, 19 nt, Artificial Sequence
  Description of Artificial Sequence: Synthetic oligonucleotide
cugcaacucucucugcgcg

SEQ ID NO: 1993554 - RNA, 19 nt, Artificial Sequence
  Description of Artificial Sequence: Synthetic oligonucleotide
caucgaagcuuaucaugcc

SEQ ID NO: 1993555 - RNA, 19 nt, Artificial Sequence
  Description of Artificial Sequence: Synthetic oligonucleotide
gagaaccuuagccccuugc

SEQ ID NO: 1993556 - RNA, 19 nt, Artificial Sequence
  Description of Artificial Sequence: Synthetic oligonucleotide
ucucucugcgcgccaagug

SEQ ID NO: 1993557 - RNA, 19 nt, Artificial Sequence
  Description of Artificial Sequence: Synthetic oligonucleotide
ggaaccuuggcacuccaug

SEQ ID NO: 1993558 - RNA, 19 nt, Artificial Sequence
  Description of Artificial Sequence: Synthetic oligonucleotide
ucggcaucguuguacagua

SEQ ID NO: 1993559 - RNA, 19 nt, Artificial Sequence
  Description of Artificial Sequence: Synthetic oligonucleotide
aucaccgucaugccucaug

SEQ ID NO: 1993560 - RNA, 19 nt, Artificial Sequence
  Description of Artificial Sequence: Synthetic oligonucleotide
gaggaaugggaaccuuggc

SEQ ID NO: 1993561 - RNA, 19 nt, Artificial Sequence
  Description of Artificial Sequence: Synthetic oligonucleotide
ugaggggagaccacacuau

SEQ ID NO: 1993562 - RNA, 19 nt, Artificial Sequence
  Description of Artificial Sequence: Synthetic oligonucleotide
uccaugguucucucuucag

SEQ ID NO: 1993563 - RNA, 19 nt, Artificial Sequence
  Description of Artificial Sequence: Synthetic oligonucleotide
caggacuggucucauugcc

SEQ ID NO: 1993564 - RNA, 19 nt, Artificial Sequence
  Description of Artificial Sequence: Synthetic oligonucleotide
gaagacaucgaagcuuauc

SEQ ID NO: 1993565 - RNA, 19 nt, Artificial Sequence
  Description of Artificial Sequence: Synthetic oligonucleotide
cagcaugccauuccggaac

SEQ ID NO: 1993566 - RNA, 19 nt, Artificial Sequence
  Description of Artificial Sequence: Synthetic oligonucleotide
uccggaacucaaugaaggu

SEQ ID NO: 1993567 - RNA, 19 nt, Artificial Sequence
  Description of Artificial Sequence: Synthetic oligonucleotide
gggcaaucugagcagagcc

SEQ ID NO: 1993568 - RNA, 19 nt, Artificial Sequence
  Description of Artificial Sequence: Synthetic oligonucleotide
gaggggagaccacacuaug

SEQ ID NO: 1993569 - RNA, 19 nt, Artificial Sequence
  Description of Artificial Sequence: Synthetic oligonucleotide
accacacuauggccgacag

SEQ ID NO: 1993570 - RNA, 19 nt, Artificial Sequence
  Description of Artificial Sequence: Synthetic oligonucleotide
ggggagaccacacuauggc

SEQ ID NO: 1993571 - RNA, 19 nt, Artificial Sequence
  Description of Artificial Sequence: Synthetic oligonucleotide
ggcaguagcgcuuauccca

SEQ ID NO: 1993572 - RNA, 19 nt, Artificial Sequence
  Description of Artificial Sequence: Synthetic oligonucleotide
cacccuacuucgaagcuuc

SEQ ID NO: 1993573 - RNA, 19 nt, Artificial Sequence
  Description of Artificial Sequence: Synthetic oligonucleotide
cuuugaguagucagagcca

SEQ ID NO: 1993574 - RNA, 19 nt, Artificial Sequence
  Description of Artificial Sequence: Synthetic oligonucleotide
aacuaagacagaaguugau

SEQ ID NO: 1993575 - RNA, 19 nt, Artificial Sequence
  Description of Artificial Sequence: Synthetic oligonucleotide
augcgcucuuuccugcggg

SEQ ID NO: 1993576 - RNA, 19 nt, Artificial Sequence
  Description of Artificial Sequence: Synthetic oligonucleotide
cugcucagcgaucuuugag

SEQ ID NO: 1993577 - RNA, 19 nt, Artificial Sequence
  Description of Artificial Sequence: Synthetic oligonucleotide
ucuggauugucugcuugga

SEQ ID NO: 1993578 - RNA, 19 nt, Artificial Sequence
  Description of Artificial Sequence: Synthetic oligonucleotide
gugaucaccgucaugccuc

SEQ ID NO: 1993579 - RNA, 19 nt, Artificial Sequence
  Description of Artificial Sequence: Synthetic oligonucleotide
cauuccggaacucaaugaa

SEQ ID NO: 1993580 - RNA, 19 nt, Artificial Sequence
  Description of Artificial Sequence: Synthetic oligonucleotide
ggcugcaacucucucugcg

SEQ ID NO: 1993581 - RNA, 19 nt, Artificial Sequence
  Description of Artificial Sequence: Synthetic oligonucleotide
ugcacccuacuucgaagcu

SEQ ID NO: 1993582 - RNA, 19 nt, Artificial Sequence
  Description of Artificial Sequence: Synthetic oligonucleotide
guauccugaggggagacca

SEQ ID NO: 1993583 - RNA, 19 nt, Artificial Sequence
  Description of Artificial Sequence: Synthetic oligonucleotide
ugcaacucucucugcgcgc

SEQ ID NO: 1993584 - RNA, 19 nt, Artificial Sequence
  Description of Artificial Sequence: Synthetic oligonucleotide
agguuccacgcuucuuggg

SEQ ID NO: 1993585 - RNA, 19 nt, Artificial Sequence
  Description of Artificial Sequence: Synthetic oligonucleotide
uauggggagccaccuggcu

SEQ ID NO: 1993586 - RNA, 19 nt, Artificial Sequence
  Description of Artificial Sequence: Synthetic oligonucleotide
gacugucgaggcaguagcg

SEQ ID NO: 1993587 - RNA, 19 nt, Artificial Sequence
  Description of Artificial Sequence: Synthetic oligonucleotide
gcaggaauaagucuuauuu

SEQ ID NO: 1993588 - RNA, 19 nt, Artificial Sequence
  Description of Artificial Sequence: Synthetic oligonucleotide
caggaauaagucuuauuua

SEQ ID NO: 1993589 - RNA, 19 nt, Artificial Sequence
  Description of Artificial Sequence: Synthetic oligonucleotide
uuagccccuugccagcaaa

SEQ ID NO: 1993590 - RNA, 19 nt, Artificial Sequence
  Description of Artificial Sequence: Synthetic oligonucleotide
uuguacugcacugucccau

SEQ ID NO: 1993591 - RNA, 19 nt, Artificial Sequence
  Description of Artificial Sequence: Synthetic oligonucleotide
cagggucaauuuucuggcg

SEQ ID NO: 1993592 - RNA, 19 nt, Artificial Sequence
  Description of Artificial Sequence: Synthetic oligonucleotide
ggagaguagccguccaugc

SEQ ID NO: 1993593 - RNA, 19 nt, Artificial Sequence
  Description of Artificial Sequence: Synthetic oligonucleotide
ugucugcuuggagaguagc

SEQ ID NO: 1993594 - RNA, 19 nt, Artificial Sequence
  Description of Artificial Sequence: Synthetic oligonucleotide
cuggauugucugcuuggag

SEQ ID NO: 1993595 - RNA, 19 nt, Artificial Sequence
  Description of Artificial Sequence: Synthetic oligonucleotide
uagcgcuuaucccagccuu

SEQ ID NO: 1993596 - RNA, 19 nt, Artificial Sequence
  Description of Artificial Sequence: Synthetic oligonucleotide
agaaaccagcagcaucaga

SEQ ID NO: 1993597 - RNA, 19 nt, Artificial Sequence
  Description of Artificial Sequence: Synthetic oligonucleotide
uucagagaacucgauccuc

SEQ ID NO: 1993598 - RNA, 19 nt, Artificial Sequence
  Description of Artificial Sequence: Synthetic oligonucleotide
ugggcaaucugagcagagc

SEQ ID NO: 1993599 - RNA, 19 nt, Artificial Sequence
  Description of Artificial Sequence: Synthetic oligonucleotide
acuauggccgacaguccgg

SEQ ID NO: 1993600 - RNA, 19 nt, Artificial Sequence
  Description of Artificial Sequence: Synthetic oligonucleotide
auuuucuggcgagcuggcg

SEQ ID NO: 1993601 - RNA, 19 nt, Artificial Sequence
  Description of Artificial Sequence: Synthetic oligonucleotide
ccguccacgucaaacaggc

SEQ ID NO: 1993602 - RNA, 19 nt, Artificial Sequence
  Description of Artificial Sequence: Synthetic oligonucleotide
uuaucccagccuuccggga

SEQ ID NO: 1993603 - RNA, 19 nt, Artificial Sequence
  Description of Artificial Sequence: Synthetic oligonucleotide
ccucgcgagaaccuuagcc

SEQ ID NO: 1993604 - RNA, 19 nt, Artificial Sequence
  Description of Artificial Sequence: Synthetic oligonucleotide
cagacccugguccugugug

SEQ ID NO: 1993605 - RNA, 19 nt, Artificial Sequence
  Description of Artificial Sequence: Synthetic oligonucleotide
cgaagcuucugcaggaagg

SEQ ID NO: 1993606 - RNA, 19 nt, Artificial Sequence
  Description of Artificial Sequence: Synthetic oligonucleotide
augaagguuccacgcuucu

SEQ ID NO: 1993607 - RNA, 19 nt, Artificial Sequence
  Description of Artificial Sequence: Synthetic oligonucleotide
ggcaucguuguacaguauc

SEQ ID NO: 1993608 - RNA, 19 nt, Artificial Sequence
  Description of Artificial Sequence: Synthetic oligonucleotide
cuauggccgacaguccggg

SEQ ID NO: 1993609 - RNA, 19 nt, Artificial Sequence
  Description of Artificial Sequence: Synthetic oligonucleotide
uauccugaggggagaccac

SEQ ID NO: 1993610 - RNA, 19 nt, Artificial Sequence
  Description of Artificial Sequence: Synthetic oligonucleotide
ugaucaccgucaugccuca

SEQ ID NO: 1993611 - RNA, 19 nt, Artificial Sequence
  Description of Artificial Sequence: Synthetic oligonucleotide
agcaugccauuccggaacu

SEQ ID NO: 1993612 - RNA, 19 nt, Artificial Sequence
  Description of Artificial Sequence: Synthetic oligonucleotide
cuccucgcgagaaccuuag

SEQ ID NO: 1993613 - RNA, 19 nt, Artificial Sequence
  Description of Artificial Sequence: Synthetic oligonucleotide
ugucccauucucggcaaac

SEQ ID NO: 1993614 - RNA, 19 nt, Artificial Sequence
  Description of Artificial Sequence: Synthetic oligonucleotide
aucugcacccuacuucgaa

SEQ ID NO: 1993615 - RNA, 19 nt, Artificial Sequence
  Description of Artificial Sequence: Synthetic oligonucleotide
ggugaaaccuauucuguua

SEQ ID NO: 1993616 - RNA, 19 nt, Artificial Sequence
  Description of Artificial Sequence: Synthetic oligonucleotide
gccauuccggaacucaaug

SEQ ID NO: 1993617 - RNA, 19 nt, Artificial Sequence
  Description of Artificial Sequence: Synthetic oligonucleotide
cugguccugugugaguggg

SEQ ID NO: 1993618 - RNA, 19 nt, Artificial Sequence
  Description of Artificial Sequence: Synthetic oligonucleotide
acgccaaucugcacccuac

SEQ ID NO: 1993619 - RNA, 19 nt, Artificial Sequence
  Description of Artificial Sequence: Synthetic oligonucleotide
uguacugcacugucccauu

SEQ ID NO: 1993620 - RNA, 19 nt, Artificial Sequence
  Description of Artificial Sequence: Synthetic oligonucleotide
gucccguccacgucaaaca

SEQ ID NO: 1993621 - RNA, 19 nt, Artificial Sequence
  Description of Artificial Sequence: Synthetic oligonucleotide
ucgaagcuguccucaucga

SEQ ID NO: 1993622 - RNA, 19 nt, Artificial Sequence
  Description of Artificial Sequence: Synthetic oligonucleotide
gcgccaagugcugugaccg

SEQ ID NO: 1993623 - RNA, 19 nt, Artificial Sequence
  Description of Artificial Sequence: Synthetic oligonucleotide
gcaucguuguacaguaucc

SEQ ID NO: 1993624 - RNA, 19 nt, Artificial Sequence
  Description of Artificial Sequence: Synthetic oligonucleotide
uacgccaaucugcacccua

SEQ ID NO: 1993625 - RNA, 19 nt, Artificial Sequence
  Description of Artificial Sequence: Synthetic oligonucleotide
gacccugguccugugugag

SEQ ID NO: 1993626 - RNA, 19 nt, Artificial Sequence
  Description of Artificial Sequence: Synthetic oligonucleotide
gggagaccacacuauggcc

SEQ ID NO: 1993627 - RNA, 19 nt, Artificial Sequence
  Description of Artificial Sequence: Synthetic oligonucleotide
caaucugagcagagccaug

SEQ ID NO: 1993628 - RNA, 19 nt, Artificial Sequence
  Description of Artificial Sequence: Synthetic oligonucleotide
cacugucccauucucggca

SEQ ID NO: 1993629 - RNA, 19 nt, Artificial Sequence
  Description of Artificial Sequence: Synthetic oligonucleotide
ccgcauagaucucaaaguc

SEQ ID NO: 1993630 - RNA, 19 nt, Artificial Sequence
  Description of Artificial Sequence: Synthetic oligonucleotide
ugucgaggcaguagcgcuu

SEQ ID NO: 1993631 - RNA, 19 nt, Artificial Sequence
  Description of Artificial Sequence: Synthetic oligonucleotide
cugcgggugcccuccacag

SEQ ID NO: 1993632 - RNA, 19 nt, Artificial Sequence
  Description of Artificial Sequence: Synthetic oligonucleotide
gagagauguucagcaugcc

SEQ ID NO: 1993633 - RNA, 19 nt, Artificial Sequence
  Description of Artificial Sequence: Synthetic oligonucleotide
cagagaacucgauccucuc

SEQ ID NO: 1993634 - RNA, 19 nt, Artificial Sequence
  Description of Artificial Sequence: Synthetic oligonucleotide
uagccccuugccagcaaac

SEQ ID NO: 1993635 - RNA, 19 nt, Artificial Sequence
  Description of Artificial Sequence: Synthetic oligonucleotide
cguuguacaguauccugag

SEQ ID NO: 1993636 - RNA, 19 nt, Artificial Sequence
  Description of Artificial Sequence: Synthetic oligonucleotide
gagugggccucguggugcc

SEQ ID NO: 1993637 - RNA, 19 nt, Artificial Sequence
  Description of Artificial Sequence: Synthetic oligonucleotide
guucagagaacucgauccu

SEQ ID NO: 1993638 - RNA, 19 nt, Artificial Sequence
  Description of Artificial Sequence: Synthetic oligonucleotide
gaguagucagagccaccca

SEQ ID NO: 1993639 - RNA, 19 nt, Artificial Sequence
  Description of Artificial Sequence: Synthetic oligonucleotide
ugagggucccguccacguc

SEQ ID NO: 1993640 - RNA, 19 nt, Artificial Sequence
  Description of Artificial Sequence: Synthetic oligonucleotide
ucaugccuccucgcgagaa

SEQ ID NO: 1993641 - RNA, 19 nt, Artificial Sequence
  Description of Artificial Sequence: Synthetic oligonucleotide
agcgcuuaucccagccuuc

SEQ ID NO: 1993642 - RNA, 19 nt, Artificial Sequence
  Description of Artificial Sequence: Synthetic oligonucleotide
ggaugcgcucuuuccugcg

SEQ ID NO: 1993643 - RNA, 19 nt, Artificial Sequence
  Description of Artificial Sequence: Synthetic oligonucleotide
gucaauuuucuggcgagcu

SEQ ID NO: 1993644 - RNA, 19 nt, Artificial Sequence
  Description of Artificial Sequence: Synthetic oligonucleotide
cugaggggagaccacacua

SEQ ID NO: 1993645 - RNA, 19 nt, Artificial Sequence
  Description of Artificial Sequence: Synthetic oligonucleotide
ugccaaagaaguggaugau

SEQ ID NO: 1993646 - RNA, 19 nt, Artificial Sequence
  Description of Artificial Sequence: Synthetic oligonucleotide
ugccccacaugaugcuaca

SEQ ID NO: 1993647 - RNA, 19 nt, Artificial Sequence
  Description of Artificial Sequence: Synthetic oligonucleotide
cagagccacccacuacgcc

SEQ ID NO: 1993648 - RNA, 19 nt, Artificial Sequence
  Description of Artificial Sequence: Synthetic oligonucleotide
aggacuggucucauugcca

SEQ ID NO: 1993649 - RNA, 19 nt, Artificial Sequence
  Description of Artificial Sequence: Synthetic oligonucleotide
accuauucuguuacagaaa

SEQ ID NO: 1993650 - RNA, 19 nt, Artificial Sequence
  Description of Artificial Sequence: Synthetic oligonucleotide
gggacaguugccacagacc

SEQ ID NO: 1993651 - RNA, 19 nt, Artificial Sequence
  Description of Artificial Sequence: Synthetic oligonucleotide
gcuuaucaugccuccucgc

SEQ ID NO: 1993652 - RNA, 19 nt, Artificial Sequence
  Description of Artificial Sequence: Synthetic oligonucleotide
cuuguacugcacuguccca

SEQ ID NO: 1993653 - RNA, 19 nt, Artificial Sequence
  Description of Artificial Sequence: Synthetic oligonucleotide
caugccuccucgcgagaac

SEQ ID NO: 1993654 - RNA, 19 nt, Artificial Sequence
  Description of Artificial Sequence: Synthetic oligonucleotide
gagaguagccguccaugcu

SEQ ID NO: 1993655 - RNA, 19 nt, Artificial Sequence
  Description of Artificial Sequence: Synthetic oligonucleotide
uccucgcgagaaccuuagc

SEQ ID NO: 1993656 - RNA, 19 nt, Artificial Sequence
  Description of Artificial Sequence: Synthetic oligonucleotide
guacugcacugucccauuc

SEQ ID NO: 1993657 - RNA, 19 nt, Artificial Sequence
  Description of Artificial Sequence: Synthetic oligonucleotide
aaucugcacccuacuucga

SEQ ID NO: 1993658 - RNA, 19 nt, Artificial Sequence
  Description of Artificial Sequence: Synthetic oligonucleotide
gcaguagcgcuuaucccag

SEQ ID NO: 1993659 - RNA, 19 nt, Artificial Sequence
  Description of Artificial Sequence: Synthetic oligonucleotide
ggacuggucucauugccaa

SEQ ID NO: 1993660 - RNA, 19 nt, Artificial Sequence
  Description of Artificial Sequence: Synthetic oligonucleotide
ucugcgcgccaagugcugu

SEQ ID NO: 1993661 - RNA, 19 nt, Artificial Sequence
  Description of Artificial Sequence: Synthetic oligonucleotide
ggucaauuuucuggcgagc

SEQ ID NO: 1993662 - RNA, 19 nt, Artificial Sequence
  Description of Artificial Sequence: Synthetic oligonucleotide
gcugcggccgaugggagag

SEQ ID NO: 1993663 - RNA, 19 nt, Artificial Sequence
  Description of Artificial Sequence: Synthetic oligonucleotide
aguagccguccaugcuugu

SEQ ID NO: 1993664 - RNA, 19 nt, Artificial Sequence
  Description of Artificial Sequence: Synthetic oligonucleotide
gaccacacuauggccgaca

SEQ ID NO: 1993665 - RNA, 19 nt, Artificial Sequence
  Description of Artificial Sequence: Synthetic oligonucleotide
cccacuacgccaaucugca

SEQ ID NO: 1993666 - RNA, 19 nt, Artificial Sequence
  Description of Artificial Sequence: Synthetic oligonucleotide
agaccacacuauggccgac

SEQ ID NO: 1993667 - RNA, 19 nt, Artificial Sequence
  Description of Artificial Sequence: Synthetic oligonucleotide
cccguccacgucaaacagg

SEQ ID NO: 1993668 - RNA, 19 nt, Artificial Sequence
  Description of Artificial Sequence: Synthetic oligonucleotide
caguauccugaggggagac

SEQ ID NO: 1993669 - RNA, 19 nt, Artificial Sequence
  Description of Artificial Sequence: Synthetic oligonucleotide
cagcgaucuuugaguaguc

SEQ ID NO: 1993670 - RNA, 19 nt, Artificial Sequence
  Description of Artificial Sequence: Synthetic oligonucleotide
gccgaugggagagauguuc

SEQ ID NO: 1993671 - RNA, 19 nt, Artificial Sequence
  Description of Artificial Sequence: Synthetic oligonucleotide
ggcaaacacauaaucaaau

SEQ ID NO: 1993672 - RNA, 19 nt, Artificial Sequence
  Description of Artificial Sequence: Synthetic oligonucleotide
agccccuugccagcaaacu

SEQ ID NO: 1993673 - RNA, 19 nt, Artificial Sequence
  Description of Artificial Sequence: Synthetic oligonucleotide
caguagcgcuuaucccagc

SEQ ID NO: 1993674 - RNA, 19 nt, Artificial Sequence
  Description of Artificial Sequence: Synthetic oligonucleotide
ucguggugccccacaugau

SEQ ID NO: 1993675 - RNA, 19 nt, Artificial Sequence
  Description of Artificial Sequence: Synthetic oligonucleotide
cagcgacagccauggcugc

SEQ ID NO: 1993676 - RNA, 19 nt, Artificial Sequence
  Description of Artificial Sequence: Synthetic oligonucleotide
caaugaagguuccacgcuu

SEQ ID NO: 1993677 - RNA, 19 nt, Artificial Sequence
  Description of Artificial Sequence: Synthetic oligonucleotide
aggggccaucaguggagug

SEQ ID NO: 1993678 - RNA, 19 nt, Artificial Sequence
  Description of Artificial Sequence: Synthetic oligonucleotide
aucaugccuccucgcgaga

SEQ ID NO: 1993679 - RNA, 19 nt, Artificial Sequence
  Description of Artificial Sequence: Synthetic oligonucleotide
ccaaugcuuagcugugauc

SEQ ID NO: 1993680 - RNA, 19 nt, Artificial Sequence
  Description of Artificial Sequence: Synthetic oligonucleotide
caucagaagccaggggcca

SEQ ID NO: 1993681 - RNA, 19 nt, Artificial Sequence
  Description of Artificial Sequence: Synthetic oligonucleotide
agcugcggccgaugggaga

SEQ ID NO: 1993682 - RNA, 19 nt, Artificial Sequence
  Description of Artificial Sequence: Synthetic oligonucleotide
caugcuuguacugcacugu

SEQ ID NO: 1993683 - RNA, 19 nt, Artificial Sequence
  Description of Artificial Sequence: Synthetic oligonucleotide
cugcuuggagaguagccgu

SEQ ID NO: 1993684 - RNA, 19 nt, Artificial Sequence
  Description of Artificial Sequence: Synthetic oligonucleotide
caucgagacugucgaggca

SEQ ID NO: 1993685 - RNA, 19 nt, Artificial Sequence
  Description of Artificial Sequence: Synthetic oligonucleotide
agugggccucguggugccc

SEQ ID NO: 1993686 - RNA, 19 nt, Artificial Sequence
  Description of Artificial Sequence: Synthetic oligonucleotide
gcagcugcggccgauggga

SEQ ID NO: 1993687 - RNA, 19 nt, Artificial Sequence
  Description of Artificial Sequence: Synthetic oligonucleotide
guagucagagccacccacu

SEQ ID NO: 1993688 - RNA, 19 nt, Artificial Sequence
  Description of Artificial Sequence: Synthetic oligonucleotide
cugcgcgccaagugcugug

SEQ ID NO: 1993689 - RNA, 19 nt, Artificial Sequence
  Description of Artificial Sequence: Synthetic oligonucleotide
ccucaugggcugucucugg

SEQ ID NO: 1993690 - RNA, 19 nt, Artificial Sequence
  Description of Artificial Sequence: Synthetic oligonucleotide
caucguuguacaguauccu

SEQ ID NO: 1993691 - RNA, 19 nt, Artificial Sequence
  Description of Artificial Sequence: Synthetic oligonucleotide
aguucucggcaucguugua

SEQ ID NO: 1993692 - RNA, 19 nt, Artificial Sequence
  Description of Artificial Sequence: Synthetic oligonucleotide
cagcugcggccgaugggag

SEQ ID NO: 1993693 - RNA, 19 nt, Artificial Sequence
  Description of Artificial Sequence: Synthetic oligonucleotide
cgagcuggcgugagggucc

SEQ ID NO: 1993694 - RNA, 19 nt, Artificial Sequence
  Description of Artificial Sequence: Synthetic oligonucleotide
ucaugccucaugggcuguc

SEQ ID NO: 1993695 - RNA, 19 nt, Artificial Sequence
  Description of Artificial Sequence: Synthetic oligonucleotide
cucggcaucguuguacagu

SEQ ID NO: 1993696 - RNA, 19 nt, Artificial Sequence
  Description of Artificial Sequence: Synthetic oligonucleotide
agcgacagccauggcugca

SEQ ID NO: 1993697 - RNA, 19 nt, Artificial Sequence
  Description of Artificial Sequence: Synthetic oligonucleotide
uucuggcgagcuggcguga

SEQ ID NO: 1993698 - RNA, 19 nt, Artificial Sequence
  Description of Artificial Sequence: Synthetic oligonucleotide
cuggcgugagggucccguc

SEQ ID NO: 1993699 - RNA, 19 nt, Artificial Sequence
  Description of Artificial Sequence: Synthetic oligonucleotide
ggcgugagggucccgucca

SEQ ID NO: 1993700 - RNA, 19 nt, Artificial Sequence
  Description of Artificial Sequence: Synthetic oligonucleotide
ugcggccgaugggagagau

SEQ ID NO: 1993701 - RNA, 19 nt, Artificial Sequence
  Description of Artificial Sequence: Synthetic oligonucleotide
gccguccaugcuuguacug

SEQ ID NO: 1993702 - RNA, 19 nt, Artificial Sequence
  Description of Artificial Sequence: Synthetic oligonucleotide
gcgcuuaucccagccuucc

SEQ ID NO: 1993703 - RNA, 19 nt, Artificial Sequence
  Description of Artificial Sequence: Synthetic oligonucleotide
gauugucugcuuggagagu

SEQ ID NO: 1993704 - RNA, 19 nt, Artificial Sequence
  Description of Artificial Sequence: Synthetic oligonucleotide
gccucaugggcugucucug

SEQ ID NO: 1993705 - RNA, 19 nt, Artificial Sequence
  Description of Artificial Sequence: Synthetic oligonucleotide
ccgaugggagagauguuca

SEQ ID NO: 1993706 - RNA, 19 nt, Artificial Sequence
  Description of Artificial Sequence: Synthetic oligonucleotide
uuggcacuccaugguucuc

SEQ ID NO: 1993707 - RNA, 19 nt, Artificial Sequence
  Description of Artificial Sequence: Synthetic oligonucleotide
caugcugguccagaggaau

SEQ ID NO: 1993708 - RNA, 19 nt, Artificial Sequence
  Description of Artificial Sequence: Synthetic oligonucleotide
ccucaucgagacugucgag

SEQ ID NO: 1993709 - RNA, 19 nt, Artificial Sequence
  Description of Artificial Sequence: Synthetic oligonucleotide
gagcuggcgugaggguccc

SEQ ID NO: 1993710 - RNA, 19 nt, Artificial Sequence
  Description of Artificial Sequence: Synthetic oligonucleotide
ccuagccagagcucuuuga

SEQ ID NO: 1993711 - RNA, 19 nt, Artificial Sequence
  Description of Artificial Sequence: Synthetic oligonucleotide
gccuagccagagcucuuug

SEQ ID NO: 1993712 - RNA, 19 nt, Artificial Sequence
  Description of Artificial Sequence: Synthetic oligonucleotide
ucgaggcaguagcgcuuau

SEQ ID NO: 1993713 - RNA, 19 nt, Artificial Sequence
  Description of Artificial Sequence: Synthetic oligonucleotide
caggccuagccagagcucu

SEQ ID NO: 1993714 - RNA, 19 nt, Artificial Sequence
  Description of Artificial Sequence: Synthetic oligonucleotide
cauucucggcaaacacaua

SEQ ID NO: 1993715 - RNA, 19 nt, Artificial Sequence
  Description of Artificial Sequence: Synthetic oligonucleotide
cauugccaaagaaguggau

SEQ ID NO: 1993716 - RNA, 19 nt, Artificial Sequence
  Description of Artificial Sequence: Synthetic oligonucleotide
uccacgcuucuugggcaau

SEQ ID NO: 1993717 - RNA, 19 nt, Artificial Sequence
  Description of Artificial Sequence: Synthetic oligonucleotide
cugcagccggggucgcgug

SEQ ID NO: 1993718 - RNA, 19 nt, Artificial Sequence
  Description of Artificial Sequence: Synthetic oligonucleotide
guagccguccaugcuugua

SEQ ID NO: 1993719 - RNA, 19 nt, Artificial Sequence
  Description of Artificial Sequence: Synthetic oligonucleotide
gucgaggcaguagcgcuua

SEQ ID NO: 1993720 - RNA, 19 nt, Artificial Sequence
  Description of Artificial Sequence: Synthetic oligonucleotide
cgcgccaagugcugugacc

SEQ ID NO: 1993721 - RNA, 19 nt, Artificial Sequence
  Description of Artificial Sequence: Synthetic oligonucleotide
cccuacuucgaagcuucug

SEQ ID NO: 1993722 - RNA, 19 nt, Artificial Sequence
  Description of Artificial Sequence: Synthetic oligonucleotide
ccugugugagugggccucg

SEQ ID NO: 1993723 - RNA, 19 nt, Artificial Sequence
  Description of Artificial Sequence: Synthetic oligonucleotide
cuuagccccuugccagcaa

SEQ ID NO: 1993724 - RNA, 19 nt, Artificial Sequence
  Description of Artificial Sequence: Synthetic oligonucleotide
gcgagcuggcgugaggguc

SEQ ID NO: 1993725 - RNA, 19 nt, Artificial Sequence
  Description of Artificial Sequence: Synthetic oligonucleotide
gguccgcauagaucucaaa

SEQ ID NO: 1993726 - RNA, 19 nt, Artificial Sequence
  Description of Artificial Sequence: Synthetic oligonucleotide
ccacccacuacgccaaucu

SEQ ID NO: 1993727 - RNA, 19 nt, Artificial Sequence
  Description of Artificial Sequence: Synthetic oligonucleotide
cacgcuucuugggcaaucu

SEQ ID NO: 1993728 - RNA, 19 nt, Artificial Sequence
  Description of Artificial Sequence: Synthetic oligonucleotide
ccucguggugccccacaug

SEQ ID NO: 1993729 - RNA, 19 nt, Artificial Sequence
  Description of Artificial Sequence: Synthetic oligonucleotide
cccaccaggacuggucuca

SEQ ID NO: 1993730 - RNA, 19 nt, Artificial Sequence
  Description of Artificial Sequence: Synthetic oligonucleotide
ccacaugaugcuacaugcu

SEQ ID NO: 1993731 - RNA, 19 nt, Artificial Sequence
  Description of Artificial Sequence: Synthetic oligonucleotide
acccuacuucgaagcuucu

SEQ ID NO: 1993732 - RNA, 19 nt, Artificial Sequence
  Description of Artificial Sequence: Synthetic oligonucleotide
ggcugacaccucaggguca

SEQ ID NO: 1993733 - RNA, 19 nt, Artificial Sequence
  Description of Artificial Sequence: Synthetic oligonucleotide
cugucccauucucggcaaa

SEQ ID NO: 1993734 - RNA, 19 nt, Artificial Sequence
  Description of Artificial Sequence: Synthetic oligonucleotide
ccugcgggugcccuccaca

SEQ ID NO: 1993735 - RNA, 19 nt, Artificial Sequence
  Description of Artificial Sequence: Synthetic oligonucleotide
caugccucaugggcugucu

SEQ ID NO: 1993736 - RNA, 19 nt, Artificial Sequence
  Description of Artificial Sequence: Synthetic oligonucleotide
ccggggucgcgugcgacag

SEQ ID NO: 1993737 - RNA, 19 nt, Artificial Sequence
  Description of Artificial Sequence: Synthetic oligonucleotide
cucucucugcgcgccaagu

SEQ ID NO: 1993738 - RNA, 19 nt, Artificial Sequence
  Description of Artificial Sequence: Synthetic oligonucleotide
ggugccccacaugaugcua

SEQ ID NO: 1993739 - RNA, 19 nt, Artificial Sequence
  Description of Artificial Sequence: Synthetic oligonucleotide
agcuggcgugagggucccg

SEQ ID NO: 1993740 - RNA, 19 nt, Artificial Sequence
  Description of Artificial Sequence: Synthetic oligonucleotide
gccaagugcugugaccgcu

SEQ ID NO: 1993741 - RNA, 19 nt, Artificial Sequence
  Description of Artificial Sequence: Synthetic oligonucleotide
ggccucguggugccccaca

SEQ ID NO: 1993742 - RNA, 19 nt, Artificial Sequence
  Description of Artificial Sequence: Synthetic oligonucleotide
gcgcgccaagugcugugac

SEQ ID NO: 1993743 - RNA, 19 nt, Artificial Sequence
  Description of Artificial Sequence: Synthetic oligonucleotide
cgccaagugcugugaccgc

SEQ ID NO: 1993744 - RNA, 19 nt, Artificial Sequence
  Description of Artificial Sequence: Synthetic oligonucleotide
aggccuagccagagcucuu

SEQ ID NO: 1993745 - RNA, 19 nt, Artificial Sequence
  Description of Artificial Sequence: Synthetic oligonucleotide
ccuccucgcgagaaccuua

SEQ ID NO: 1993746 - RNA, 19 nt, Artificial Sequence
  Description of Artificial Sequence: Synthetic oligonucleotide
ggguccgcauagaucucaa

SEQ ID NO: 1993747 - RNA, 19 nt, Artificial Sequence
  Description of Artificial Sequence: Synthetic oligonucleotide
cccaaugcuuagcugugau

SEQ ID NO: 1993748 - RNA, 19 nt, Artificial Sequence
  Description of Artificial Sequence: Synthetic oligonucleotide
ccuuagccccuugccagca

SEQ ID NO: 1993749 - RNA, 19 nt, Artificial Sequence
  Description of Artificial Sequence: Synthetic oligonucleotide
cgaggcaguagcgcuuauc

SEQ ID NO: 1993750 - RNA, 19 nt, Artificial Sequence
  Description of Artificial Sequence: Synthetic oligonucleotide
cgagaaccuuagccccuug

SEQ ID NO: 1993751 - RNA, 19 nt, Artificial Sequence
  Description of Artificial Sequence: Synthetic oligonucleotide
gcacccuacuucgaagcuu

SEQ ID NO: 1993752 - RNA, 19 nt, Artificial Sequence
  Description of Artificial Sequence: Synthetic oligonucleotide
cagccggggucgcgugcga

SEQ ID NO: 1993753 - RNA, 19 nt, Artificial Sequence
  Description of Artificial Sequence: Synthetic oligonucleotide
gccucguggugccccacau

SEQ ID NO: 1993754 - RNA, 19 nt, Artificial Sequence
  Description of Artificial Sequence: Synthetic oligonucleotide
cugugugagugggccucgu

SEQ ID NO: 1993755 - RNA, 19 nt, Artificial Sequence
  Description of Artificial Sequence: Synthetic oligonucleotide
cuacgccaaucugcacccu

SEQ ID NO: 1993756 - RNA, 19 nt, Artificial Sequence
  Description of Artificial Sequence: Synthetic oligonucleotide
cugcggccgaugggagaga

SEQ ID NO: 1993757 - RNA, 19 nt, Artificial Sequence
  Description of Artificial Sequence: Synthetic oligonucleotide
caccaggacuggucucauu

SEQ ID NO: 1993758 - RNA, 19 nt, Artificial Sequence
  Description of Artificial Sequence: Synthetic oligonucleotide
ggccuagccagagcucuuu

SEQ ID NO: 1993759 - RNA, 19 nt, Artificial Sequence
  Description of Artificial Sequence: Synthetic oligonucleotide
gggaaccuuggcacuccau

SEQ ID NO: 1993760 - RNA, 19 nt, Artificial Sequence
  Description of Artificial Sequence: Synthetic oligonucleotide
ccacacuauggccgacagu

SEQ ID NO: 1993761 - RNA, 19 nt, Artificial Sequence
  Description of Artificial Sequence: Synthetic oligonucleotide
cgcgagaaccuuagccccu

SEQ ID NO: 1993762 - RNA, 19 nt, Artificial Sequence
  Description of Artificial Sequence: Synthetic oligonucleotide
gcgagaaccuuagccccuu

SEQ ID NO: 1993763 - RNA, 19 nt, Artificial Sequence
  Description of Artificial Sequence: Synthetic oligonucleotide
gccuccucgcgagaaccuu

SEQ ID NO: 1993764 - RNA, 19 nt, Artificial Sequence
  Description of Artificial Sequence: Synthetic oligonucleotide
cgccaaucugcacccuacu

SEQ ID NO: 1993765 - RNA, 19 nt, Artificial Sequence
  Description of Artificial Sequence: Synthetic oligonucleotide
gccccacaugaugcuacau

SEQ ID NO: 1993766 - RNA, 19 nt, Artificial Sequence
  Description of Artificial Sequence: Synthetic oligonucleotide
cgggugcccuccacagcga

SEQ ID NO: 1993767 - RNA, 19 nt, Artificial Sequence
  Description of Artificial Sequence: Synthetic oligonucleotide
ccaccaggacuggucucau

SEQ ID NO: 1993768 - RNA, 19 nt, Artificial Sequence
  Description of Artificial Sequence: Synthetic oligonucleotide
cggcaucguuguacaguau

SEQ ID NO: 1993769 - RNA, 19 nt, Artificial Sequence
  Description of Artificial Sequence: Synthetic oligonucleotide
guuguaauuacuuuucagg

SEQ ID NO: 1993770 - RNA, 19 nt, Artificial Sequence
  Description of Artificial Sequence: Synthetic oligonucleotide
uuguaauuacuuuucaggg

SEQ ID NO: 1993771 - RNA, 19 nt, Artificial Sequence
  Description of Artificial Sequence: Synthetic oligonucleotide
uucaacauuauucucaggu

SEQ ID NO: 1993772 - RNA, 19 nt, Artificial Sequence
  Description of Artificial Sequence: Synthetic oligonucleotide
ucuacgaugaaucuucuug

SEQ ID NO: 1993773 - RNA, 19 nt, Artificial Sequence
  Description of Artificial Sequence: Synthetic oligonucleotide
agaaacgucccacaugucc

SEQ ID NO: 1993774 - RNA, 19 nt, Artificial Sequence
  Description of Artificial Sequence: Synthetic oligonucleotide
uuauagaugaugcaggguc

SEQ ID NO: 1993775 - RNA, 19 nt, Artificial Sequence
  Description of Artificial Sequence: Synthetic oligonucleotide
uuaucuuccacgaccaaag

SEQ ID NO: 1993776 - RNA, 19 nt, Artificial Sequence
  Description of Artificial Sequence: Synthetic oligonucleotide
uggaauucgagccacagcu

SEQ ID NO: 1993777 - RNA, 19 nt, Artificial Sequence
  Description of Artificial Sequence: Synthetic oligonucleotide
gauucggugaccuuuagac

SEQ ID NO: 1993778 - RNA, 19 nt, Artificial Sequence
  Description of Artificial Sequence: Synthetic oligonucleotide
aguaauaccagggauguuc

SEQ ID NO: 1993779 - RNA, 19 nt, Artificial Sequence
  Description of Artificial Sequence: Synthetic oligonucleotide
gaguacaccgauaugaggg

SEQ ID NO: 1993780 - RNA, 19 nt, Artificial Sequence
  Description of Artificial Sequence: Synthetic oligonucleotide
ucuuccacgaccaaaggga

SEQ ID NO: 1993781 - RNA, 19 nt, Artificial Sequence
  Description of Artificial Sequence: Synthetic oligonucleotide
cucauuuugccuuugcccg

SEQ ID NO: 1993782 - RNA, 19 nt, Artificial Sequence
  Description of Artificial Sequence: Synthetic oligonucleotide
ugaccuuuagacaucacca

SEQ ID NO: 1993783 - RNA, 19 nt, Artificial Sequence
  Description of Artificial Sequence: Synthetic oligonucleotide
uccucauuauagaugaugc

SEQ ID NO: 1993784 - RNA, 19 nt, Artificial Sequence
  Description of Artificial Sequence: Synthetic oligonucleotide
aguuugcucacauugagca

SEQ ID NO: 1993785 - RNA, 19 nt, Artificial Sequence
  Description of Artificial Sequence: Synthetic oligonucleotide
uucacuaacggcauacggc

SEQ ID NO: 1993786 - RNA, 19 nt, Artificial Sequence
  Description of Artificial Sequence: Synthetic oligonucleotide
acaaaguucacaauauccg

SEQ ID NO: 1993787 - RNA, 19 nt, Artificial Sequence
  Description of Artificial Sequence: Synthetic oligonucleotide
uuuaggauccugcuuaggu

SEQ ID NO: 1993788 - RNA, 19 nt, Artificial Sequence
  Description of Artificial Sequence: Synthetic oligonucleotide
uuggugugaacaaaguuca

SEQ ID NO: 1993789 - RNA, 19 nt, Artificial Sequence
  Description of Artificial Sequence: Synthetic oligonucleotide
gaugauaccauuauccuca

SEQ ID NO: 1993790 - RNA, 19 nt, Artificial Sequence
  Description of Artificial Sequence: Synthetic oligonucleotide
accauuauccucauuauag

SEQ ID NO: 1993791 - RNA, 19 nt, Artificial Sequence
  Description of Artificial Sequence: Synthetic oligonucleotide
uguaauuacuuuucaggga

SEQ ID NO: 1993792 - RNA, 19 nt, Artificial Sequence
  Description of Artificial Sequence: Synthetic oligonucleotide
gaccaaagggaguucaggg

SEQ ID NO: 1993793 - RNA, 19 nt, Artificial Sequence
  Description of Artificial Sequence: Synthetic oligonucleotide
uacggguugagcuucaaca

SEQ ID NO: 1993794 - RNA, 19 nt, Artificial Sequence
  Description of Artificial Sequence: Synthetic oligonucleotide
cuaacuuucggaaggcacc

SEQ ID NO: 1993795 - RNA, 19 nt, Artificial Sequence
  Description of Artificial Sequence: Synthetic oligonucleotide
ucccauacaacucaucuaa

SEQ ID NO: 1993796 - RNA, 19 nt, Artificial Sequence
  Description of Artificial Sequence: Synthetic oligonucleotide
uacuuuucagggaagcagc

SEQ ID NO: 1993797 - RNA, 19 nt, Artificial Sequence
  Description of Artificial Sequence: Synthetic oligonucleotide
ucuaacuuucggaaggcac

SEQ ID NO: 1993798 - RNA, 19 nt, Artificial Sequence
  Description of Artificial Sequence: Synthetic oligonucleotide
uggagcuuugaauacagcu

SEQ ID NO: 1993799 - RNA, 19 nt, Artificial Sequence
  Description of Artificial Sequence: Synthetic oligonucleotide
auucacuaacggcauacgg

SEQ ID NO: 1993800 - RNA, 19 nt, Artificial Sequence
  Description of Artificial Sequence: Synthetic oligonucleotide
aaacaugcggccuccccgg

SEQ ID NO: 1993801 - RNA, 19 nt, Artificial Sequence
  Description of Artificial Sequence: Synthetic oligonucleotide
uauccggucgaauuggagc

SEQ ID NO: 1993802 - RNA, 19 nt, Artificial Sequence
  Description of Artificial Sequence: Synthetic oligonucleotide
auagucuuugcauacgggu

SEQ ID NO: 1993803 - RNA, 19 nt, Artificial Sequence
  Description of Artificial Sequence: Synthetic oligonucleotide
acgggcacaagccaugucg

SEQ ID NO: 1993804 - RNA, 19 nt, Artificial Sequence
  Description of Artificial Sequence: Synthetic oligonucleotide
uuuugaugucauuccaugc

SEQ ID NO: 1993805 - RNA, 19 nt, Artificial Sequence
  Description of Artificial Sequence: Synthetic oligonucleotide
acaauauccggucgaauug

SEQ ID NO: 1993806 - RNA, 19 nt, Artificial Sequence
  Description of Artificial Sequence: Synthetic oligonucleotide
aauacagcuggcaaaguga

SEQ ID NO: 1993807 - RNA, 19 nt, Artificial Sequence
  Description of Artificial Sequence: Synthetic oligonucleotide
ugauuuugcugcuagcgcu

SEQ ID NO: 1993808 - RNA, 19 nt, Artificial Sequence
  Description of Artificial Sequence: Synthetic oligonucleotide
aacgguggguuccuccacc

SEQ ID NO: 1993809 - RNA, 19 nt, Artificial Sequence
  Description of Artificial Sequence: Synthetic oligonucleotide
ucacuaacggcauacggcu

SEQ ID NO: 1993810 - RNA, 19 nt, Artificial Sequence
  Description of Artificial Sequence: Synthetic oligonucleotide
aggagcaaguuucaaaaug

SEQ ID NO: 1993811 - RNA, 19 nt, Artificial Sequence
  Description of Artificial Sequence: Synthetic oligonucleotide
uggcauaucgcuuuugggu

SEQ ID NO: 1993812 - RNA, 19 nt, Artificial Sequence
  Description of Artificial Sequence: Synthetic oligonucleotide
cuacgaugaaucuucuugc

SEQ ID NO: 1993813 - RNA, 19 nt, Artificial Sequence
  Description of Artificial Sequence: Synthetic oligonucleotide
uccgaguacaccgauauga

SEQ ID NO: 1993814 - RNA, 19 nt, Artificial Sequence
  Description of Artificial Sequence: Synthetic oligonucleotide
guaauuacuuuucagggaa

SEQ ID NO: 1993815 - RNA, 19 nt, Artificial Sequence
  Description of Artificial Sequence: Synthetic oligonucleotide
cuuuagacaucaccaaagc

SEQ ID NO: 1993816 - RNA, 19 nt, Artificial Sequence
  Description of Artificial Sequence: Synthetic oligonucleotide
acuuccucgauucggugac

SEQ ID NO: 1993817 - RNA, 19 nt, Artificial Sequence
  Description of Artificial Sequence: Synthetic oligonucleotide
uacgaugaaucuucuugcg

SEQ ID NO: 1993818 - RNA, 19 nt, Artificial Sequence
  Description of Artificial Sequence: Synthetic oligonucleotide
ucucugauuuugcugcuag

SEQ ID NO: 1993819 - RNA, 19 nt, Artificial Sequence
  Description of Artificial Sequence: Synthetic oligonucleotide
uacaacucaucuaacuuuc

SEQ ID NO: 1993820 - RNA, 19 nt, Artificial Sequence
  Description of Artificial Sequence: Synthetic oligonucleotide
aauaccagggauguuccug

SEQ ID NO: 1993821 - RNA, 19 nt, Artificial Sequence
  Description of Artificial Sequence: Synthetic oligonucleotide
agucccauacaacucaucu

SEQ ID NO: 1993822 - RNA, 19 nt, Artificial Sequence
  Description of Artificial Sequence: Synthetic oligonucleotide
ucuaguuucuucacccgca

SEQ ID NO: 1993823 - RNA, 19 nt, Artificial Sequence
  Description of Artificial Sequence: Synthetic oligonucleotide
acauauuuccaaaggcacc

SEQ ID NO: 1993824 - RNA, 19 nt, Artificial Sequence
  Description of Artificial Sequence: Synthetic oligonucleotide
uuugcucacauugagcaga

SEQ ID NO: 1993825 - RNA, 19 nt, Artificial Sequence
  Description of Artificial Sequence: Synthetic oligonucleotide
aguacaccgauaugagggg

SEQ ID NO: 1993826 - RNA, 19 nt, Artificial Sequence
  Description of Artificial Sequence: Synthetic oligonucleotide
aaacgucccacauguccac

SEQ ID NO: 1993827 - RNA, 19 nt, Artificial Sequence
  Description of Artificial Sequence: Synthetic oligonucleotide
ucaucuugugcaugggaag

SEQ ID NO: 1993828 - RNA, 19 nt, Artificial Sequence
  Description of Artificial Sequence: Synthetic oligonucleotide
uucuaguuucuucacccgc

SEQ ID NO: 1993829 - RNA, 19 nt, Artificial Sequence
  Description of Artificial Sequence: Synthetic oligonucleotide
ucgaauuggagcuuugaau

SEQ ID NO: 1993830 - RNA, 19 nt, Artificial Sequence
  Description of Artificial Sequence: Synthetic oligonucleotide
aauucacuaacggcauacg

SEQ ID NO: 1993831 - RNA, 19 nt, Artificial Sequence
  Description of Artificial Sequence: Synthetic oligonucleotide
cagaguaauaccagggaug

SEQ ID NO: 1993832 - RNA, 19 nt, Artificial Sequence
  Description of Artificial Sequence: Synthetic oligonucleotide
uacgccaagucccauacaa

SEQ ID NO: 1993833 - RNA, 19 nt, Artificial Sequence
  Description of Artificial Sequence: Synthetic oligonucleotide
aguucacaauauccggucg

SEQ ID NO: 1993834 - RNA, 19 nt, Artificial Sequence
  Description of Artificial Sequence: Synthetic oligonucleotide
gugaccuuuagacaucacc

SEQ ID NO: 1993835 - RNA, 19 nt, Artificial Sequence
  Description of Artificial Sequence: Synthetic oligonucleotide
agaacagauggcauaucgc

SEQ ID NO: 1993836 - RNA, 19 nt, Artificial Sequence
  Description of Artificial Sequence: Synthetic oligonucleotide
ucugcggugccaacgacgc

SEQ ID NO: 1993837 - RNA, 19 nt, Artificial Sequence
  Description of Artificial Sequence: Synthetic oligonucleotide
guuggugcaaacaugcggc

SEQ ID NO: 1993838 - RNA, 19 nt, Artificial Sequence
  Description of Artificial Sequence: Synthetic oligonucleotide
uguguucaucaucuugugc

SEQ ID NO: 1993839 - RNA, 19 nt, Artificial Sequence
  Description of Artificial Sequence: Synthetic oligonucleotide
uaauuacuuuucagggaag

SEQ ID NO: 1993840 - RNA, 19 nt, Artificial Sequence
  Description of Artificial Sequence: Synthetic oligonucleotide
uuuuggguuguguuuacuc

SEQ ID NO: 1993841 - RNA, 19 nt, Artificial Sequence
  Description of Artificial Sequence: Synthetic oligonucleotide
agcugaacagccuccuugg

SEQ ID NO: 1993842 - RNA, 19 nt, Artificial Sequence
  Description of Artificial Sequence: Synthetic oligonucleotide
uguguuuacucugcggugc

SEQ ID NO: 1993843 - RNA, 19 nt, Artificial Sequence
  Description of Artificial Sequence: Synthetic oligonucleotide
agggauguuccugaaggcc

SEQ ID NO: 1993844 - RNA, 19 nt, Artificial Sequence
  Description of Artificial Sequence: Synthetic oligonucleotide
cagccuuacgccaaguccc

SEQ ID NO: 1993845 - RNA, 19 nt, Artificial Sequence
  Description of Artificial Sequence: Synthetic oligonucleotide
ugaugauaccauuauccuc

SEQ ID NO: 1993846 - RNA, 19 nt, Artificial Sequence
  Description of Artificial Sequence: Synthetic oligonucleotide
gaaucuucuugcguggugc

SEQ ID NO: 1993847 - RNA, 19 nt, Artificial Sequence
  Description of Artificial Sequence: Synthetic oligonucleotide
uccaccuuaucuuccacga

SEQ ID NO: 1993848 - RNA, 19 nt, Artificial Sequence
  Description of Artificial Sequence: Synthetic oligonucleotide
caaacaugcggccuccccg

SEQ ID NO: 1993849 - RNA, 19 nt, Artificial Sequence
  Description of Artificial Sequence: Synthetic oligonucleotide
auagaugaugcaggguccc

SEQ ID NO: 1993850 - RNA, 19 nt, Artificial Sequence
  Description of Artificial Sequence: Synthetic oligonucleotide
agaaugguauuccuccuca

SEQ ID NO: 1993851 - RNA, 19 nt, Artificial Sequence
  Description of Artificial Sequence: Synthetic oligonucleotide
acucaucuaacuuucggaa

SEQ ID NO: 1993852 - RNA, 19 nt, Artificial Sequence
  Description of Artificial Sequence: Synthetic oligonucleotide
gaauuggagcuuugaauac

SEQ ID NO: 1993853 - RNA, 19 nt, Artificial Sequence
  Description of Artificial Sequence: Synthetic oligonucleotide
ugaggggacgggcacaagc

SEQ ID NO: 1993854 - RNA, 19 nt, Artificial Sequence
  Description of Artificial Sequence: Synthetic oligonucleotide
aauuggagcuuugaauaca

SEQ ID NO: 1993855 - RNA, 19 nt, Artificial Sequence
  Description of Artificial Sequence: Synthetic oligonucleotide
aacgacgccagguuuuggu

SEQ ID NO: 1993856 - RNA, 19 nt, Artificial Sequence
  Description of Artificial Sequence: Synthetic oligonucleotide
aacggcauacggcugucug

SEQ ID NO: 1993857 - RNA, 19 nt, Artificial Sequence
  Description of Artificial Sequence: Synthetic oligonucleotide
ucuugcguggugcucggag

SEQ ID NO: 1993858 - RNA, 19 nt, Artificial Sequence
  Description of Artificial Sequence: Synthetic oligonucleotide
gacucuacgaugaaucuuc

SEQ ID NO: 1993859 - RNA, 19 nt, Artificial Sequence
  Description of Artificial Sequence: Synthetic oligonucleotide
agaguaauaccagggaugu

SEQ ID NO: 1993860 - RNA, 19 nt, Artificial Sequence
  Description of Artificial Sequence: Synthetic oligonucleotide
gguuggugcaaacaugcgg

SEQ ID NO: 1993861 - RNA, 19 nt, Artificial Sequence
  Description of Artificial Sequence: Synthetic oligonucleotide
ugaugcaggguccccugcg

SEQ ID NO: 1993862 - RNA, 19 nt, Artificial Sequence
  Description of Artificial Sequence: Synthetic oligonucleotide
cuuaggucuguguucauca

SEQ ID NO: 1993863 - RNA, 19 nt, Artificial Sequence
  Description of Artificial Sequence: Synthetic oligonucleotide
cugccaauucacuaacggc

SEQ ID NO: 1993864 - RNA, 19 nt, Artificial Sequence
  Description of Artificial Sequence: Synthetic oligonucleotide
ucgguccagaugcagaaac

SEQ ID NO: 1993865 - RNA, 19 nt, Artificial Sequence
  Description of Artificial Sequence: Synthetic oligonucleotide
gguuguaauuacuuuucag

SEQ ID NO: 1993866 - RNA, 19 nt, Artificial Sequence
  Description of Artificial Sequence: Synthetic oligonucleotide
gauaugaggggacgggcac

SEQ ID NO: 1993867 - RNA, 19 nt, Artificial Sequence
  Description of Artificial Sequence: Synthetic oligonucleotide
gcuucuaguuucuucaccc

SEQ ID NO: 1993868 - RNA, 19 nt, Artificial Sequence
  Description of Artificial Sequence: Synthetic oligonucleotide
ucugaugaccugccaauuc

SEQ ID NO: 1993869 - RNA, 19 nt, Artificial Sequence
  Description of Artificial Sequence: Synthetic oligonucleotide
ucaacauuauucucagguu

SEQ ID NO: 1993870 - RNA, 19 nt, Artificial Sequence
  Description of Artificial Sequence: Synthetic oligonucleotide
auacagcuggcaaagugac

SEQ ID NO: 1993871 - RNA, 19 nt, Artificial Sequence
  Description of Artificial Sequence: Synthetic oligonucleotide
cuuacgccaagucccauac

SEQ ID NO: 1993872 - RNA, 19 nt, Artificial Sequence
  Description of Artificial Sequence: Synthetic oligonucleotide
cuuucggaaggcacccucg

SEQ ID NO: 1993873 - RNA, 19 nt, Artificial Sequence
  Description of Artificial Sequence: Synthetic oligonucleotide
acuaacggcauacggcugu

SEQ ID NO: 1993874 - RNA, 19 nt, Artificial Sequence
  Description of Artificial Sequence: Synthetic oligonucleotide
caauauccggucgaauugg

SEQ ID NO: 1993875 - RNA, 19 nt, Artificial Sequence
  Description of Artificial Sequence: Synthetic oligonucleotide
auucgagccacagcucugc

SEQ ID NO: 1993876 - RNA, 19 nt, Artificial Sequence
  Description of Artificial Sequence: Synthetic oligonucleotide
caucuugugcaugggaagg

SEQ ID NO: 1993877 - RNA, 19 nt, Artificial Sequence
  Description of Artificial Sequence: Synthetic oligonucleotide
uuguguuuacucugcggug

SEQ ID NO: 1993878 - RNA, 19 nt, Artificial Sequence
  Description of Artificial Sequence: Synthetic oligonucleotide
aaucuucuugcguggugcu

SEQ ID NO: 1993879 - RNA, 19 nt, Artificial Sequence
  Description of Artificial Sequence: Synthetic oligonucleotide
uuacucugcggugccaacg

SEQ ID NO: 1993880 - RNA, 19 nt, Artificial Sequence
  Description of Artificial Sequence: Synthetic oligonucleotide
auccggucgaauuggagcu

SEQ ID NO: 1993881 - RNA, 19 nt, Artificial Sequence
  Description of Artificial Sequence: Synthetic oligonucleotide
caauucacuaacggcauac

SEQ ID NO: 1993882 - RNA, 19 nt, Artificial Sequence
  Description of Artificial Sequence: Synthetic oligonucleotide
ccuuuagacaucaccaaag

SEQ ID NO: 1993883 - RNA, 19 nt, Artificial Sequence
  Description of Artificial Sequence: Synthetic oligonucleotide
aacauuauucucagguuuu

SEQ ID NO: 1993884 - RNA, 19 nt, Artificial Sequence
  Description of Artificial Sequence: Synthetic oligonucleotide
auacggguugagcuucaac

SEQ ID NO: 1993885 - RNA, 19 nt, Artificial Sequence
  Description of Artificial Sequence: Synthetic oligonucleotide
cccuuuuccgaguacaccg

SEQ ID NO: 1993886 - RNA, 19 nt, Artificial Sequence
  Description of Artificial Sequence: Synthetic oligonucleotide
ucaaaauguucaguuugcu

SEQ ID NO: 1993887 - RNA, 19 nt, Artificial Sequence
  Description of Artificial Sequence: Synthetic oligonucleotide
ugaugaccugccaauucac

SEQ ID NO: 1993888 - RNA, 19 nt, Artificial Sequence
  Description of Artificial Sequence: Synthetic oligonucleotide
cuugcguggugcucggagg

SEQ ID NO: 1993889 - RNA, 19 nt, Artificial Sequence
  Description of Artificial Sequence: Synthetic oligonucleotide
accaaagggaguucaggga

SEQ ID NO: 1993890 - RNA, 19 nt, Artificial Sequence
  Description of Artificial Sequence: Synthetic oligonucleotide
ucggaaggcacccucgguc

SEQ ID NO: 1993891 - RNA, 19 nt, Artificial Sequence
  Description of Artificial Sequence: Synthetic oligonucleotide
aguuggugugaacaaaguu

SEQ ID NO: 1993892 - RNA, 19 nt, Artificial Sequence
  Description of Artificial Sequence: Synthetic oligonucleotide
cauucucugagaggcauag

SEQ ID NO: 1993893 - RNA, 19 nt, Artificial Sequence
  Description of Artificial Sequence: Synthetic oligonucleotide
gaaacgucccacaugucca

SEQ ID NO: 1993894 - RNA, 19 nt, Artificial Sequence
  Description of Artificial Sequence: Synthetic oligonucleotide
guaauaccagggauguucc

SEQ ID NO: 1993895 - RNA, 19 nt, Artificial Sequence
  Description of Artificial Sequence: Synthetic oligonucleotide
uacaccgauaugaggggac

SEQ ID NO: 1993896 - RNA, 19 nt, Artificial Sequence
  Description of Artificial Sequence: Synthetic oligonucleotide
caguuugcucacauugagc

SEQ ID NO: 1993897 - RNA, 19 nt, Artificial Sequence
  Description of Artificial Sequence: Synthetic oligonucleotide
gaugaugcaggguccccug

SEQ ID NO: 1993898 - RNA, 19 nt, Artificial Sequence
  Description of Artificial Sequence: Synthetic oligonucleotide
cuuccacgaccaaagggag

SEQ ID NO: 1993899 - RNA, 19 nt, Artificial Sequence
  Description of Artificial Sequence: Synthetic oligonucleotide
uugcucacauugagcagag

SEQ ID NO: 1993900 - RNA, 19 nt, Artificial Sequence
  Description of Artificial Sequence: Synthetic oligonucleotide
aacaugcggccuccccggc

SEQ ID NO: 1993901 - RNA, 19 nt, Artificial Sequence
  Description of Artificial Sequence: Synthetic oligonucleotide
uacccuuccaccuuaucuu

SEQ ID NO: 1993902 - RNA, 19 nt, Artificial Sequence
  Description of Artificial Sequence: Synthetic oligonucleotide
gugauuucuggccuggcga

SEQ ID NO: 1993903 - RNA, 19 nt, Artificial Sequence
  Description of Artificial Sequence: Synthetic oligonucleotide
uaccauuauccucauuaua

SEQ ID NO: 1993904 - RNA, 19 nt, Artificial Sequence
  Description of Artificial Sequence: Synthetic oligonucleotide
uacucugcggugccaacga

SEQ ID NO: 1993905 - RNA, 19 nt, Artificial Sequence
  Description of Artificial Sequence: Synthetic oligonucleotide
uguucaucaucuugugcau

SEQ ID NO: 1993906 - RNA, 19 nt, Artificial Sequence
  Description of Artificial Sequence: Synthetic oligonucleotide
auucggugaccuuuagaca

SEQ ID NO: 1993907 - RNA, 19 nt, Artificial Sequence
  Description of Artificial Sequence: Synthetic oligonucleotide
gauuuugcugcuagcgcug

SEQ ID NO: 1993908 - RNA, 19 nt, Artificial Sequence
  Description of Artificial Sequence: Synthetic oligonucleotide
acgaugaaucuucuugcgu

SEQ ID NO: 1993909 - RNA, 19 nt, Artificial Sequence
  Description of Artificial Sequence: Synthetic oligonucleotide
ugggaagguuguaauuacu

SEQ ID NO: 1993910 - RNA, 19 nt, Artificial Sequence
  Description of Artificial Sequence: Synthetic oligonucleotide
ugcaugggaagguuguaau

SEQ ID NO: 1993911 - RNA, 19 nt, Artificial Sequence
  Description of Artificial Sequence: Synthetic oligonucleotide
aacgucccacauguccacc

SEQ ID NO: 1993912 - RNA, 19 nt, Artificial Sequence
  Description of Artificial Sequence: Synthetic oligonucleotide
agguuguaauuacuuuuca

SEQ ID NO: 1993913 - RNA, 19 nt, Artificial Sequence
  Description of Artificial Sequence: Synthetic oligonucleotide
gguuguguuuacucugcgg

SEQ ID NO: 1993914 - RNA, 19 nt, Artificial Sequence
  Description of Artificial Sequence: Synthetic oligonucleotide
agcagccuuacgccaaguc

SEQ ID NO: 1993915 - RNA, 19 nt, Artificial Sequence
  Description of Artificial Sequence: Synthetic oligonucleotide
accuuuagacaucaccaaa

SEQ ID NO: 1993916 - RNA, 19 nt, Artificial Sequence
  Description of Artificial Sequence: Synthetic oligonucleotide
gcacccucgguccagaugc

SEQ ID NO: 1993917 - RNA, 19 nt, Artificial Sequence
  Description of Artificial Sequence: Synthetic oligonucleotide
cucauagucuuugcauacg

SEQ ID NO: 1993918 - RNA, 19 nt, Artificial Sequence
  Description of Artificial Sequence: Synthetic oligonucleotide
guuugcucacauugagcag

SEQ ID NO: 1993919 - RNA, 19 nt, Artificial Sequence
  Description of Artificial Sequence: Synthetic oligonucleotide
ugcggugccaacgacgcca

SEQ ID NO: 1993920 - RNA, 19 nt, Artificial Sequence
  Description of Artificial Sequence: Synthetic oligonucleotide
auuauagaugaugcagggu

SEQ ID NO: 1993921 - RNA, 19 nt, Artificial Sequence
  Description of Artificial Sequence: Synthetic oligonucleotide
ggacucuuggaauucgagc

SEQ ID NO: 1993922 - RNA, 19 nt, Artificial Sequence
  Description of Artificial Sequence: Synthetic oligonucleotide
uccugcuuaggucuguguu

SEQ ID NO: 1993923 - RNA, 19 nt, Artificial Sequence
  Description of Artificial Sequence: Synthetic oligonucleotide
acucuuggaauucgagcca

SEQ ID NO: 1993924 - RNA, 19 nt, Artificial Sequence
  Description of Artificial Sequence: Synthetic oligonucleotide
uaggucuguguucaucauc

SEQ ID NO: 1993925 - RNA, 19 nt, Artificial Sequence
  Description of Artificial Sequence: Synthetic oligonucleotide
gaauucgagccacagcucu

SEQ ID NO: 1993926 - RNA, 19 nt, Artificial Sequence
  Description of Artificial Sequence: Synthetic oligonucleotide
cucugagaggcauagaccu

SEQ ID NO: 1993927 - RNA, 19 nt, Artificial Sequence
  Description of Artificial Sequence: Synthetic oligonucleotide
ugcgcuggauccgucuucg

SEQ ID NO: 1993928 - RNA, 19 nt, Artificial Sequence
  Description of Artificial Sequence: Synthetic oligonucleotide
agggacuuccucgauucgg

SEQ ID NO: 1993929 - RNA, 19 nt, Artificial Sequence
  Description of Artificial Sequence: Synthetic oligonucleotide
uuggugcaaacaugcggcc

SEQ ID NO: 1993930 - RNA, 19 nt, Artificial Sequence
  Description of Artificial Sequence: Synthetic oligonucleotide
accgauaugaggggacggg

SEQ ID NO: 1993931 - RNA, 19 nt, Artificial Sequence
  Description of Artificial Sequence: Synthetic oligonucleotide
cagcugaacagccuccuug

SEQ ID NO: 1993932 - RNA, 19 nt, Artificial Sequence
  Description of Artificial Sequence: Synthetic oligonucleotide
gacuuccucgauucgguga

SEQ ID NO: 1993933 - RNA, 19 nt, Artificial Sequence
  Description of Artificial Sequence: Synthetic oligonucleotide
gcaguuugugauuucuggc

SEQ ID NO: 1993934 - RNA, 19 nt, Artificial Sequence
  Description of Artificial Sequence: Synthetic oligonucleotide
augaccugccaauucacua

SEQ ID NO: 1993935 - RNA, 19 nt, Artificial Sequence
  Description of Artificial Sequence: Synthetic oligonucleotide
gaagcagccuuacgccaag

SEQ ID NO: 1993936 - RNA, 19 nt, Artificial Sequence
  Description of Artificial Sequence: Synthetic oligonucleotide
uccacgaccaaagggaguu

SEQ ID NO: 1993937 - RNA, 19 nt, Artificial Sequence
  Description of Artificial Sequence: Synthetic oligonucleotide
cugaugaccugccaauuca

SEQ ID NO: 1993938 - RNA, 19 nt, Artificial Sequence
  Description of Artificial Sequence: Synthetic oligonucleotide
uggcgaagaaugguauucc

SEQ ID NO: 1993939 - RNA, 19 nt, Artificial Sequence
  Description of Artificial Sequence: Synthetic oligonucleotide
cugaacagccuccuugguc

SEQ ID NO: 1993940 - RNA, 19 nt, Artificial Sequence
  Description of Artificial Sequence: Synthetic oligonucleotide
uccaccucggacucuugga

SEQ ID NO: 1993941 - RNA, 19 nt, Artificial Sequence
  Description of Artificial Sequence: Synthetic oligonucleotide
caucaccaaagcuggcaag

SEQ ID NO: 1993942 - RNA, 19 nt, Artificial Sequence
  Description of Artificial Sequence: Synthetic oligonucleotide
ucuuguacccuuccaccuu

SEQ ID NO: 1993943 - RNA, 19 nt, Artificial Sequence
  Description of Artificial Sequence: Synthetic oligonucleotide
cuggcgaagaaugguauuc

SEQ ID NO: 1993944 - RNA, 19 nt, Artificial Sequence
  Description of Artificial Sequence: Synthetic oligonucleotide
gaccuuuagacaucaccaa

SEQ ID NO: 1993945 - RNA, 19 nt, Artificial Sequence
  Description of Artificial Sequence: Synthetic oligonucleotide
aucaucuugugcaugggaa

SEQ ID NO: 1993946 - RNA, 19 nt, Artificial Sequence
  Description of Artificial Sequence: Synthetic oligonucleotide
ucggagggcucuuuggauc

SEQ ID NO: 1993947 - RNA, 19 nt, Artificial Sequence
  Description of Artificial Sequence: Synthetic oligonucleotide
uuuuccgaguacaccgaua

SEQ ID NO: 1993948 - RNA, 19 nt, Artificial Sequence
  Description of Artificial Sequence: Synthetic oligonucleotide
ucaagacucuacgaugaau

SEQ ID NO: 1993949 - RNA, 19 nt, Artificial Sequence
  Description of Artificial Sequence: Synthetic oligonucleotide
gaggggacgggcacaagcc

SEQ ID NO: 1993950 - RNA, 19 nt, Artificial Sequence
  Description of Artificial Sequence: Synthetic oligonucleotide
uucaagacucuacgaugaa

SEQ ID NO: 1993951 - RNA, 19 nt, Artificial Sequence
  Description of Artificial Sequence: Synthetic oligonucleotide
uucacaauauccggucgaa

SEQ ID NO: 1993952 - RNA, 19 nt, Artificial Sequence
  Description of Artificial Sequence: Synthetic oligonucleotide
aauucgagccacagcucug

SEQ ID NO: 1993953 - RNA, 19 nt, Artificial Sequence
  Description of Artificial Sequence: Synthetic oligonucleotide
gcagccuuacgccaagucc

SEQ ID NO: 1993954 - RNA, 19 nt, Artificial Sequence
  Description of Artificial Sequence: Synthetic oligonucleotide
aauauccggucgaauugga

SEQ ID NO: 1993955 - RNA, 19 nt, Artificial Sequence
  Description of Artificial Sequence: Synthetic oligonucleotide
ccacauguccaccaggagc

SEQ ID NO: 1993956 - RNA, 19 nt, Artificial Sequence
  Description of Artificial Sequence: Synthetic oligonucleotide
acaccgauaugaggggacg

SEQ ID NO: 1993957 - RNA, 19 nt, Artificial Sequence
  Description of Artificial Sequence: Synthetic oligonucleotide
uuugcccgcucucauucuc

SEQ ID NO: 1993958 - RNA, 19 nt, Artificial Sequence
  Description of Artificial Sequence: Synthetic oligonucleotide
cucugauuuugcugcuagc

SEQ ID NO: 1993959 - RNA, 19 nt, Artificial Sequence
  Description of Artificial Sequence: Synthetic oligonucleotide
cagggauguuccugaaggc

SEQ ID NO: 1993960 - RNA, 19 nt, Artificial Sequence
  Description of Artificial Sequence: Synthetic oligonucleotide
aaggcacccuggccagaac

SEQ ID NO: 1993961 - RNA, 19 nt, Artificial Sequence
  Description of Artificial Sequence: Synthetic oligonucleotide
guacccuuccaccuuaucu

SEQ ID NO: 1993962 - RNA, 19 nt, Artificial Sequence
  Description of Artificial Sequence: Synthetic oligonucleotide
ugccaguaccccaggacuc

SEQ ID NO: 1993963 - RNA, 19 nt, Artificial Sequence
  Description of Artificial Sequence: Synthetic oligonucleotide
agccaugucggggaaagga

SEQ ID NO: 1993964 - RNA, 19 nt, Artificial Sequence
  Description of Artificial Sequence: Synthetic oligonucleotide
uuuacucugcggugccaac

SEQ ID NO: 1993965 - RNA, 19 nt, Artificial Sequence
  Description of Artificial Sequence: Synthetic oligonucleotide
auguucaguuugcucacau

SEQ ID NO: 1993966 - RNA, 19 nt, Artificial Sequence
  Description of Artificial Sequence: Synthetic oligonucleotide
gcagaaacgucccacaugu

SEQ ID NO: 1993967 - RNA, 19 nt, Artificial Sequence
  Description of Artificial Sequence: Synthetic oligonucleotide
aagucccauacaacucauc

SEQ ID NO: 1993968 - RNA, 19 nt, Artificial Sequence
  Description of Artificial Sequence: Synthetic oligonucleotide
gagcuucaacauuauucuc

SEQ ID NO: 1993969 - RNA, 19 nt, Artificial Sequence
  Description of Artificial Sequence: Synthetic oligonucleotide
ucgauucggugaccuuuag

SEQ ID NO: 1993970 - RNA, 19 nt, Artificial Sequence
  Description of Artificial Sequence: Synthetic oligonucleotide
cgaugaaucuucuugcgug

SEQ ID NO: 1993971 - RNA, 19 nt, Artificial Sequence
  Description of Artificial Sequence: Synthetic oligonucleotide
caugggaagguuguaauua

SEQ ID NO: 1993972 - RNA, 19 nt, Artificial Sequence
  Description of Artificial Sequence: Synthetic oligonucleotide
uugcauacggguugagcuu

SEQ ID NO: 1993973 - RNA, 19 nt, Artificial Sequence
  Description of Artificial Sequence: Synthetic oligonucleotide
uaauaccagggauguuccu

SEQ ID NO: 1993974 - RNA, 19 nt, Artificial Sequence
  Description of Artificial Sequence: Synthetic oligonucleotide
aaagggaguucagggacuu

SEQ ID NO: 1993975 - RNA, 19 nt, Artificial Sequence
  Description of Artificial Sequence: Synthetic oligonucleotide
guguuuacucugcggugcc

SEQ ID NO: 1993976 - RNA, 19 nt, Artificial Sequence
  Description of Artificial Sequence: Synthetic oligonucleotide
guuuugguuggugcaaaca

SEQ ID NO: 1993977 - RNA, 19 nt, Artificial Sequence
  Description of Artificial Sequence: Synthetic oligonucleotide
gauuucuggccuggcgaag

SEQ ID NO: 1993978 - RNA, 19 nt, Artificial Sequence
  Description of Artificial Sequence: Synthetic oligonucleotide
uuccgaguacaccgauaug

SEQ ID NO: 1993979 - RNA, 19 nt, Artificial Sequence
  Description of Artificial Sequence: Synthetic oligonucleotide
ucgcuuuuggguuguguuu

SEQ ID NO: 1993980 - RNA, 19 nt, Artificial Sequence
  Description of Artificial Sequence: Synthetic oligonucleotide
uuccacgaccaaagggagu

SEQ ID NO: 1993981 - RNA, 19 nt, Artificial Sequence
  Description of Artificial Sequence: Synthetic oligonucleotide
ggcacaagccaugucgggg

SEQ ID NO: 1993982 - RNA, 19 nt, Artificial Sequence
  Description of Artificial Sequence: Synthetic oligonucleotide
aaaggcacccuggccagaa

SEQ ID NO: 1993983 - RNA, 19 nt, Artificial Sequence
  Description of Artificial Sequence: Synthetic oligonucleotide
cuucuugcguggugcucgg

SEQ ID NO: 1993984 - RNA, 19 nt, Artificial Sequence
  Description of Artificial Sequence: Synthetic oligonucleotide
acggcauacggcugucugu

SEQ ID NO: 1993985 - RNA, 19 nt, Artificial Sequence
  Description of Artificial Sequence: Synthetic oligonucleotide
auauccggucgaauuggag

SEQ ID NO: 1993986 - RNA, 19 nt, Artificial Sequence
  Description of Artificial Sequence: Synthetic oligonucleotide
ucugagaggcauagaccuu

SEQ ID NO: 1993987 - RNA, 19 nt, Artificial Sequence
  Description of Artificial Sequence: Synthetic oligonucleotide
agaugaugcaggguccccu

SEQ ID NO: 1993988 - RNA, 19 nt, Artificial Sequence
  Description of Artificial Sequence: Synthetic oligonucleotide
accucggacucuuggaauu

SEQ ID NO: 1993989 - RNA, 19 nt, Artificial Sequence
  Description of Artificial Sequence: Synthetic oligonucleotide
uguacccuuccaccuuauc

SEQ ID NO: 1993990 - RNA, 19 nt, Artificial Sequence
  Description of Artificial Sequence: Synthetic oligonucleotide
uuacgccaagucccauaca

SEQ ID NO: 1993991 - RNA, 19 nt, Artificial Sequence
  Description of Artificial Sequence: Synthetic oligonucleotide
uaucgcuuuuggguugugu

SEQ ID NO: 1993992 - RNA, 19 nt, Artificial Sequence
  Description of Artificial Sequence: Synthetic oligonucleotide
cacaauauccggucgaauu

SEQ ID NO: 1993993 - RNA, 19 nt, Artificial Sequence
  Description of Artificial Sequence: Synthetic oligonucleotide
uuccucgauucggugaccu

SEQ ID NO: 1993994 - RNA, 19 nt, Artificial Sequence
  Description of Artificial Sequence: Synthetic oligonucleotide
caacauuauucucagguuu

SEQ ID NO: 1993995 - RNA, 19 nt, Artificial Sequence
  Description of Artificial Sequence: Synthetic oligonucleotide
acgucccacauguccacca

SEQ ID NO: 1993996 - RNA, 19 nt, Artificial Sequence
  Description of Artificial Sequence: Synthetic oligonucleotide
ccaggagcaaguuucaaaa

SEQ ID NO: 1993997 - RNA, 19 nt, Artificial Sequence
  Description of Artificial Sequence: Synthetic oligonucleotide
ugaaggccuugaugauacc

SEQ ID NO: 1993998 - RNA, 19 nt, Artificial Sequence
  Description of Artificial Sequence: Synthetic oligonucleotide
auuuugccuuugcccgcuc

SEQ ID NO: 1993999 - RNA, 19 nt, Artificial Sequence
  Description of Artificial Sequence: Synthetic oligonucleotide
cgaauuggagcuuugaaua

SEQ ID NO: 1994000 - RNA, 19 nt, Artificial Sequence
  Description of Artificial Sequence: Synthetic oligonucleotide
aucuugugcaugggaaggu

SEQ ID NO: 1994001 - RNA, 19 nt, Artificial Sequence
  Description of Artificial Sequence: Synthetic oligonucleotide
uccucaaguuggugugaac

SEQ ID NO: 1994002 - RNA, 19 nt, Artificial Sequence
  Description of Artificial Sequence: Synthetic oligonucleotide
gaacgguggguuccuccac

SEQ ID NO: 1994003 - RNA, 19 nt, Artificial Sequence
  Description of Artificial Sequence: Synthetic oligonucleotide
ucuugugcaugggaagguu

SEQ ID NO: 1994004 - RNA, 19 nt, Artificial Sequence
  Description of Artificial Sequence: Synthetic oligonucleotide
ugagaggcauagaccuuuu

SEQ ID NO: 1994005 - RNA, 19 nt, Artificial Sequence
  Description of Artificial Sequence: Synthetic oligonucleotide
ccgaguacaccgauaugag

SEQ ID NO: 1994006 - RNA, 19 nt, Artificial Sequence
  Description of Artificial Sequence: Synthetic oligonucleotide
gguuccuccaccucggacu

SEQ ID NO: 1994007 - RNA, 19 nt, Artificial Sequence
  Description of Artificial Sequence: Synthetic oligonucleotide
cacuaacggcauacggcug

SEQ ID NO: 1994008 - RNA, 19 nt, Artificial Sequence
  Description of Artificial Sequence: Synthetic oligonucleotide
agacucuacgaugaaucuu

SEQ ID NO: 1994009 - RNA, 19 nt, Artificial Sequence
  Description of Artificial Sequence: Synthetic oligonucleotide
ugcccgcucucauucucug

SEQ ID NO: 1994010 - RNA, 19 nt, Artificial Sequence
  Description of Artificial Sequence: Synthetic oligonucleotide
gcauaucgcuuuuggguug

SEQ ID NO: 1994011 - RNA, 19 nt, Artificial Sequence
  Description of Artificial Sequence: Synthetic oligonucleotide
augaaucuucuugcguggu

SEQ ID NO: 1994012 - RNA, 19 nt, Artificial Sequence
  Description of Artificial Sequence: Synthetic oligonucleotide
caccgauaugaggggacgg

SEQ ID NO: 1994013 - RNA, 19 nt, Artificial Sequence
  Description of Artificial Sequence: Synthetic oligonucleotide
ucacaauauccggucgaau

SEQ ID NO: 1994014 - RNA, 19 nt, Artificial Sequence
  Description of Artificial Sequence: Synthetic oligonucleotide
auaugaggggacgggcaca

SEQ ID NO: 1994015 - RNA, 19 nt, Artificial Sequence
  Description of Artificial Sequence: Synthetic oligonucleotide
augucauuccaugcuuuaa

SEQ ID NO: 1994016 - RNA, 19 nt, Artificial Sequence
  Description of Artificial Sequence: Synthetic oligonucleotide
ccaagucccauacaacuca

SEQ ID NO: 1994017 - RNA, 19 nt, Artificial Sequence
  Description of Artificial Sequence: Synthetic oligonucleotide
gguuuugguuggugcaaac

SEQ ID NO: 1994018 - RNA, 19 nt, Artificial Sequence
  Description of Artificial Sequence: Synthetic oligonucleotide
guuuacucugcggugccaa

SEQ ID NO: 1994019 - RNA, 19 nt, Artificial Sequence
  Description of Artificial Sequence: Synthetic oligonucleotide
cgaguacaccgauaugagg

SEQ ID NO: 1994020 - RNA, 19 nt, Artificial Sequence
  Description of Artificial Sequence: Synthetic oligonucleotide
ugccuuugcccgcucucau

SEQ ID NO: 1994021 - RNA, 19 nt, Artificial Sequence
  Description of Artificial Sequence: Synthetic oligonucleotide
acgacgccagguuuugguu

SEQ ID NO: 1994022 - RNA, 19 nt, Artificial Sequence
  Description of Artificial Sequence: Synthetic oligonucleotide
acgaccaaagggaguucag

SEQ ID NO: 1994023 - RNA, 19 nt, Artificial Sequence
  Description of Artificial Sequence: Synthetic oligonucleotide
ccuuugcccgcucucauuc

SEQ ID NO: 1994024 - RNA, 19 nt, Artificial Sequence
  Description of Artificial Sequence: Synthetic oligonucleotide
cuuguacccuuccaccuua

SEQ ID NO: 1994025 - RNA, 19 nt, Artificial Sequence
  Description of Artificial Sequence: Synthetic oligonucleotide
gcacaagccaugucgggga

SEQ ID NO: 1994026 - RNA, 19 nt, Artificial Sequence
  Description of Artificial Sequence: Synthetic oligonucleotide
cacauugagcagaguaaua

SEQ ID NO: 1994027 - RNA, 19 nt, Artificial Sequence
  Description of Artificial Sequence: Synthetic oligonucleotide
gaugaccugccaauucacu

SEQ ID NO: 1994028 - RNA, 19 nt, Artificial Sequence
  Description of Artificial Sequence: Synthetic oligonucleotide
ccucaaguuggugugaaca

SEQ ID NO: 1994029 - RNA, 19 nt, Artificial Sequence
  Description of Artificial Sequence: Synthetic oligonucleotide
uuguacccuuccaccuuau

SEQ ID NO: 1994030 - RNA, 19 nt, Artificial Sequence
  Description of Artificial Sequence: Synthetic oligonucleotide
gggcacaagccaugucggg

SEQ ID NO: 1994031 - RNA, 19 nt, Artificial Sequence
  Description of Artificial Sequence: Synthetic oligonucleotide
cugccaguaccccaggacu

SEQ ID NO: 1994032 - RNA, 19 nt, Artificial Sequence
  Description of Artificial Sequence: Synthetic oligonucleotide
acccgcaguuugugauuuc

SEQ ID NO: 1994033 - RNA, 19 nt, Artificial Sequence
  Description of Artificial Sequence: Synthetic oligonucleotide
cacgaccaaagggaguuca

SEQ ID NO: 1994034 - RNA, 19 nt, Artificial Sequence
  Description of Artificial Sequence: Synthetic oligonucleotide
agguuuugguuggugcaaa

SEQ ID NO: 1994035 - RNA, 19 nt, Artificial Sequence
  Description of Artificial Sequence: Synthetic oligonucleotide
acucagcacuggucugaug

SEQ ID NO: 1994036 - RNA, 19 nt, Artificial Sequence
  Description of Artificial Sequence: Synthetic oligonucleotide
cucgauucggugaccuuua

SEQ ID NO: 1994037 - RNA, 19 nt, Artificial Sequence
  Description of Artificial Sequence: Synthetic oligonucleotide
guacaccgauaugagggga

SEQ ID NO: 1994038 - RNA, 19 nt, Artificial Sequence
  Description of Artificial Sequence: Synthetic oligonucleotide
ggguugagcuucaacauua

SEQ ID NO: 1994039 - RNA, 19 nt, Artificial Sequence
  Description of Artificial Sequence: Synthetic oligonucleotide
gcagaguaauaccagggau

SEQ ID NO: 1994040 - RNA, 19 nt, Artificial Sequence
  Description of Artificial Sequence: Synthetic oligonucleotide
uggauccgucuucgguuuc

SEQ ID NO: 1994041 - RNA, 19 nt, Artificial Sequence
  Description of Artificial Sequence: Synthetic oligonucleotide
gaaugguauuccuccucau

SEQ ID NO: 1994042 - RNA, 19 nt, Artificial Sequence
  Description of Artificial Sequence: Synthetic oligonucleotide
ggacuuccucgauucggug

SEQ ID NO: 1994043 - RNA, 19 nt, Artificial Sequence
  Description of Artificial Sequence: Synthetic oligonucleotide
ggcauaucgcuuuuggguu

SEQ ID NO: 1994044 - RNA, 19 nt, Artificial Sequence
  Description of Artificial Sequence: Synthetic oligonucleotide
agggcagaacagauggcau

SEQ ID NO: 1994045 - RNA, 19 nt, Artificial Sequence
  Description of Artificial Sequence: Synthetic oligonucleotide
acucuacgaugaaucuucu

SEQ ID NO: 1994046 - RNA, 19 nt, Artificial Sequence
  Description of Artificial Sequence: Synthetic oligonucleotide
cagaaacgucccacauguc

SEQ ID NO: 1994047 - RNA, 19 nt, Artificial Sequence
  Description of Artificial Sequence: Synthetic oligonucleotide
gugcaugggaagguuguaa

SEQ ID NO: 1994048 - RNA, 19 nt, Artificial Sequence
  Description of Artificial Sequence: Synthetic oligonucleotide
cuaacggcauacggcuguc

SEQ ID NO: 1994049 - RNA, 19 nt, Artificial Sequence
  Description of Artificial Sequence: Synthetic oligonucleotide
uaacggcauacggcugucu

SEQ ID NO: 1994050 - RNA, 19 nt, Artificial Sequence
  Description of Artificial Sequence: Synthetic oligonucleotide
ccauacaacucaucuaacu

SEQ ID NO: 1994051 - RNA, 19 nt, Artificial Sequence
  Description of Artificial Sequence: Synthetic oligonucleotide
cccauacaacucaucuaac

SEQ ID NO: 1994052 - RNA, 19 nt, Artificial Sequence
  Description of Artificial Sequence: Synthetic oligonucleotide
aggauccugcuuaggucug

SEQ ID NO: 1994053 - RNA, 19 nt, Artificial Sequence
  Description of Artificial Sequence: Synthetic oligonucleotide
cuuccucgauucggugacc

SEQ ID NO: 1994054 - RNA, 19 nt, Artificial Sequence
  Description of Artificial Sequence: Synthetic oligonucleotide
caacgacgccagguuuugg

SEQ ID NO: 1994055 - RNA, 19 nt, Artificial Sequence
  Description of Artificial Sequence: Synthetic oligonucleotide
ccaggacucagcacugguc

SEQ ID NO: 1994056 - RNA, 19 nt, Artificial Sequence
  Description of Artificial Sequence: Synthetic oligonucleotide
cugcgcuggauccgucuuc

SEQ ID NO: 1994057 - RNA, 19 nt, Artificial Sequence
  Description of Artificial Sequence: Synthetic oligonucleotide
gcucggagggcucuuugga

SEQ ID NO: 1994058 - RNA, 19 nt, Artificial Sequence
  Description of Artificial Sequence: Synthetic oligonucleotide
ccgauaugaggggacgggc

SEQ ID NO: 1994059 - RNA, 19 nt, Artificial Sequence
  Description of Artificial Sequence: Synthetic oligonucleotide
auacggcugucuguuguuu

SEQ ID NO: 1994060 - RNA, 19 nt, Artificial Sequence
  Description of Artificial Sequence: Synthetic oligonucleotide
agccuuacgccaaguccca

SEQ ID NO: 1994061 - RNA, 19 nt, Artificial Sequence
  Description of Artificial Sequence: Synthetic oligonucleotide
ggcacccucgguccagaug

SEQ ID NO: 1994062 - RNA, 19 nt, Artificial Sequence
  Description of Artificial Sequence: Synthetic oligonucleotide
ggaauucgagccacagcuc

SEQ ID NO: 1994063 - RNA, 19 nt, Artificial Sequence
  Description of Artificial Sequence: Synthetic oligonucleotide
ccaugucggggaaaggaga

SEQ ID NO: 1994064 - RNA, 19 nt, Artificial Sequence
  Description of Artificial Sequence: Synthetic oligonucleotide
uuuggaucucugggcuuuu

SEQ ID NO: 1994065 - RNA, 19 nt, Artificial Sequence
  Description of Artificial Sequence: Synthetic oligonucleotide
uccucgauucggugaccuu

SEQ ID NO: 1994066 - RNA, 19 nt, Artificial Sequence
  Description of Artificial Sequence: Synthetic oligonucleotide
ggucgaauuggagcuuuga

SEQ ID NO: 1994067 - RNA, 19 nt, Artificial Sequence
  Description of Artificial Sequence: Synthetic oligonucleotide
ugcuuaggucuguguucau

SEQ ID NO: 1994068 - RNA, 19 nt, Artificial Sequence
  Description of Artificial Sequence: Synthetic oligonucleotide
uccccugcgcuggauccgu

SEQ ID NO: 1994069 - RNA, 19 nt, Artificial Sequence
  Description of Artificial Sequence: Synthetic oligonucleotide
guugagcuucaacauuauu

SEQ ID NO: 1994070 - RNA, 19 nt, Artificial Sequence
  Description of Artificial Sequence: Synthetic oligonucleotide
cucauucucugagaggcau

SEQ ID NO: 1994071 - RNA, 19 nt, Artificial Sequence
  Description of Artificial Sequence: Synthetic oligonucleotide
ggcgaagaaugguauuccu

SEQ ID NO: 1994072 - RNA, 19 nt, Artificial Sequence
  Description of Artificial Sequence: Synthetic oligonucleotide
ggcauacggcugucuguug

SEQ ID NO: 1994073 - RNA, 19 nt, Artificial Sequence
  Description of Artificial Sequence: Synthetic oligonucleotide
gcauacggcugucuguugu

SEQ ID NO: 1994074 - RNA, 19 nt, Artificial Sequence
  Description of Artificial Sequence: Synthetic oligonucleotide
acaagccaugucggggaaa

SEQ ID NO: 1994075 - RNA, 19 nt, Artificial Sequence
  Description of Artificial Sequence: Synthetic oligonucleotide
ccuuuuccgaguacaccga

SEQ ID NO: 1994076 - RNA, 19 nt, Artificial Sequence
  Description of Artificial Sequence: Synthetic oligonucleotide
cgacgccagguuuugguug

SEQ ID NO: 1994077 - RNA, 19 nt, Artificial Sequence
  Description of Artificial Sequence: Synthetic oligonucleotide
auaucgcuuuuggguugug

SEQ ID NO: 1994078 - RNA, 19 nt, Artificial Sequence
  Description of Artificial Sequence: Synthetic oligonucleotide
ggugccaacgacgccaggu

SEQ ID NO: 1994079 - RNA, 19 nt, Artificial Sequence
  Description of Artificial Sequence: Synthetic oligonucleotide
ccccuuuuccgaguacacc

SEQ ID NO: 1994080 - RNA, 19 nt, Artificial Sequence
  Description of Artificial Sequence: Synthetic oligonucleotide
cuuuuccgaguacaccgau

SEQ ID NO: 1994081 - RNA, 19 nt, Artificial Sequence
  Description of Artificial Sequence: Synthetic oligonucleotide
caggagcaaguuucaaaau

SEQ ID NO: 1994082 - RNA, 19 nt, Artificial Sequence
  Description of Artificial Sequence: Synthetic oligonucleotide
gcacuggucugaugaccug

SEQ ID NO: 1994083 - RNA, 19 nt, Artificial Sequence
  Description of Artificial Sequence: Synthetic oligonucleotide
caagucccauacaacucau

SEQ ID NO: 1994084 - RNA, 19 nt, Artificial Sequence
  Description of Artificial Sequence: Synthetic oligonucleotide
ccaccuuaucuuccacgac

SEQ ID NO: 1994085 - RNA, 19 nt, Artificial Sequence
  Description of Artificial Sequence: Synthetic oligonucleotide
uucuugcguggugcucgga

SEQ ID NO: 1994086 - RNA, 19 nt, Artificial Sequence
  Description of Artificial Sequence: Synthetic oligonucleotide
cauaucgcuuuuggguugu

SEQ ID NO: 1994087 - RNA, 19 nt, Artificial Sequence
  Description of Artificial Sequence: Synthetic oligonucleotide
cgauaugaggggacgggca

SEQ ID NO: 1994088 - RNA, 19 nt, Artificial Sequence
  Description of Artificial Sequence: Synthetic oligonucleotide
uccggucgaauuggagcuu

SEQ ID NO: 1994089 - RNA, 19 nt, Artificial Sequence
  Description of Artificial Sequence: Synthetic oligonucleotide
cauuuugccuuugcccgcu

SEQ ID NO: 1994090 - RNA, 19 nt, Artificial Sequence
  Description of Artificial Sequence: Synthetic oligonucleotide
ggaaggcacccucggucca

SEQ ID NO: 1994091 - RNA, 19 nt, Artificial Sequence
  Description of Artificial Sequence: Synthetic oligonucleotide
ccaacgacgccagguuuug

SEQ ID NO: 1994092 - RNA, 19 nt, Artificial Sequence
  Description of Artificial Sequence: Synthetic oligonucleotide
cucggagggcucuuuggau

SEQ ID NO: 1994093 - RNA, 19 nt, Artificial Sequence
  Description of Artificial Sequence: Synthetic oligonucleotide
cuuugcccgcucucauucu

SEQ ID NO: 1994094 - RNA, 19 nt, Artificial Sequence
  Description of Artificial Sequence: Synthetic oligonucleotide
caccucggacucuuggaau

SEQ ID NO: 1994095 - RNA, 19 nt, Artificial Sequence
  Description of Artificial Sequence: Synthetic oligonucleotide
cccggcacauauuuccaaa

SEQ ID NO: 1994096 - RNA, 19 nt, Artificial Sequence
  Description of Artificial Sequence: Synthetic oligonucleotide
gggacuuccucgauucggu

SEQ ID NO: 1994097 - RNA, 19 nt, Artificial Sequence
  Description of Artificial Sequence: Synthetic oligonucleotide
cucuacgaugaaucuucuu

SEQ ID NO: 1994098 - RNA, 19 nt, Artificial Sequence
  Description of Artificial Sequence: Synthetic oligonucleotide
gacucagcacuggucugau

SEQ ID NO: 1994099 - RNA, 19 nt, Artificial Sequence
  Description of Artificial Sequence: Synthetic oligonucleotide
ccaccucggacucuuggaa

SEQ ID NO: 1994100 - RNA, 19 nt, Artificial Sequence
  Description of Artificial Sequence: Synthetic oligonucleotide
ggugaccuuuagacaucac

SEQ ID NO: 1994101 - RNA, 19 nt, Artificial Sequence
  Description of Artificial Sequence: Synthetic oligonucleotide
aggcacccucgguccagau

SEQ ID NO: 1994102 - RNA, 19 nt, Artificial Sequence
  Description of Artificial Sequence: Synthetic oligonucleotide
cgucccacauguccaccag

SEQ ID NO: 1994103 - RNA, 19 nt, Artificial Sequence
  Description of Artificial Sequence: Synthetic oligonucleotide
ggccuggcgaagaauggua

SEQ ID NO: 1994104 - RNA, 19 nt, Artificial Sequence
  Description of Artificial Sequence: Synthetic oligonucleotide
cucgguccagaugcagaaa

SEQ ID NO: 1994105 - RNA, 19 nt, Artificial Sequence
  Description of Artificial Sequence: Synthetic oligonucleotide
gcgcuggauccgucuucgg

SEQ ID NO: 1994106 - RNA, 19 nt, Artificial Sequence
  Description of Artificial Sequence: Synthetic oligonucleotide
gucugaugaccugccaauu

SEQ ID NO: 1994107 - RNA, 19 nt, Artificial Sequence
  Description of Artificial Sequence: Synthetic oligonucleotide
cauacggguugagcuucaa

SEQ ID NO: 1994108 - RNA, 19 nt, Artificial Sequence
  Description of Artificial Sequence: Synthetic oligonucleotide
gcggugccaacgacgccag

SEQ ID NO: 1994109 - RNA, 19 nt, Artificial Sequence
  Description of Artificial Sequence: Synthetic oligonucleotide
ccugaaggccuugaugaua

SEQ ID NO: 1994110 - RNA, 19 nt, Artificial Sequence
  Description of Artificial Sequence: Synthetic oligonucleotide
cacccucgguccagaugca

SEQ ID NO: 1994111 - RNA, 19 nt, Artificial Sequence
  Description of Artificial Sequence: Synthetic oligonucleotide
caccaggagcaaguuucaa

SEQ ID NO: 1994112 - RNA, 19 nt, Artificial Sequence
  Description of Artificial Sequence: Synthetic oligonucleotide
ccuccccggcacauauuuc

SEQ ID NO: 1994113 - RNA, 19 nt, Artificial Sequence
  Description of Artificial Sequence: Synthetic oligonucleotide
cgauucggugaccuuuaga

SEQ ID NO: 1994114 - RNA, 19 nt, Artificial Sequence
  Description of Artificial Sequence: Synthetic oligonucleotide
gaguaauaccagggauguu

SEQ ID NO: 1994115 - RNA, 19 nt, Artificial Sequence
  Description of Artificial Sequence: Synthetic oligonucleotide
acgccagguuuugguuggu

SEQ ID NO: 1994116 - RNA, 19 nt, Artificial Sequence
  Description of Artificial Sequence: Synthetic oligonucleotide
ccaauucacuaacggcaua

SEQ ID NO: 1994117 - RNA, 19 nt, Artificial Sequence
  Description of Artificial Sequence: Synthetic oligonucleotide
gccuccccggcacauauuu

SEQ ID NO: 1994118 - RNA, 19 nt, Artificial Sequence
  Description of Artificial Sequence: Synthetic oligonucleotide
ggauccgucuucgguuucu

SEQ ID NO: 1994119 - RNA, 19 nt, Artificial Sequence
  Description of Artificial Sequence: Synthetic oligonucleotide
gcccgcucucauucucuga

SEQ ID NO: 1994120 - RNA, 19 nt, Artificial Sequence
  Description of Artificial Sequence: Synthetic oligonucleotide
gcauacggguugagcuuca

SEQ ID NO: 1994121 - RNA, 19 nt, Artificial Sequence
  Description of Artificial Sequence: Synthetic oligonucleotide
guggugcucggagggcucu

SEQ ID NO: 1994122 - RNA, 19 nt, Artificial Sequence
  Description of Artificial Sequence: Synthetic oligonucleotide
cggucgaauuggagcuuug

SEQ ID NO: 1994123 - RNA, 19 nt, Artificial Sequence
  Description of Artificial Sequence: Synthetic oligonucleotide
ggauguuccugaaggccuu

SEQ ID NO: 1994124 - RNA, 19 nt, Artificial Sequence
  Description of Artificial Sequence: Synthetic oligonucleotide
gccaacgacgccagguuuu

SEQ ID NO: 1994125 - RNA, 19 nt, Artificial Sequence
  Description of Artificial Sequence: Synthetic oligonucleotide
cccgcaguuugugauuucu

SEQ ID NO: 1994126 - RNA, 19 nt, Artificial Sequence
  Description of Artificial Sequence: Synthetic oligonucleotide
gccuggcgaagaaugguau

SEQ ID NO: 1994127 - RNA, 19 nt, Artificial Sequence
  Description of Artificial Sequence: Synthetic oligonucleotide
ccucgauucggugaccuuu

SEQ ID NO: 1994128 - RNA, 19 nt, Artificial Sequence
  Description of Artificial Sequence: Synthetic oligonucleotide
ggauccugcuuaggucugu

SEQ ID NO: 1994129 - RNA, 19 nt, Artificial Sequence
  Description of Artificial Sequence: Synthetic oligonucleotide
cggugaccuuuagacauca

SEQ ID NO: 1994130 - RNA, 19 nt, Artificial Sequence
  Description of Artificial Sequence: Synthetic oligonucleotide
ccuggcgaagaaugguauu

SEQ ID NO: 1994131 - RNA, 19 nt, Artificial Sequence
  Description of Artificial Sequence: Synthetic oligonucleotide
ccgucuucgguuucucauu

SEQ ID NO: 1994132 - RNA, 19 nt, Artificial Sequence
  Description of Artificial Sequence: Synthetic oligonucleotide
gcguggugcucggagggcu

SEQ ID NO: 1994133 - RNA, 19 nt, Artificial Sequence
  Description of Artificial Sequence: Synthetic oligonucleotide
cgucuucgguuucucauuu

SEQ ID NO: 1994134 - RNA, 19 nt, Artificial Sequence
  Description of Artificial Sequence: Synthetic oligonucleotide
cggguugagcuucaacauu

SEQ ID NO: 1994135 - RNA, 19 nt, Artificial Sequence
  Description of Artificial Sequence: Synthetic oligonucleotide
cggugccaacgacgccagg

SEQ ID NO: 1994136 - RNA, 19 nt, Artificial Sequence
  Description of Artificial Sequence: Synthetic oligonucleotide
ccugcgcuggauccgucuu

SEQ ID NO: 1994137 - RNA, 19 nt, Artificial Sequence
  Description of Artificial Sequence: Synthetic oligonucleotide
ccccugcgcuggauccguc

SEQ ID NO: 1994138 - RNA, 19 nt, Artificial Sequence
  Description of Artificial Sequence: Synthetic oligonucleotide
cggcauacggcugucuguu

SEQ ID NO: 1994139 - RNA, 19 nt, Artificial Sequence
  Description of Artificial Sequence: Synthetic oligonucleotide
ccggucgaauuggagcuuu

SEQ ID NO: 1994140 - RNA, 19 nt, Artificial Sequence
  Description of Artificial Sequence: Synthetic oligonucleotide
gccuuacgccaagucccau

SEQ ID NO: 1994141 - RNA, 19 nt, Artificial Sequence
  Description of Artificial Sequence: Synthetic oligonucleotide
uguaauaauaauaucauag

SEQ ID NO: 1994142 - RNA, 19 nt, Artificial Sequence
  Description of Artificial Sequence: Synthetic oligonucleotide
uuauguaauaauaauauca

SEQ ID NO: 1994143 - RNA, 19 nt, Artificial Sequence
  Description of Artificial Sequence: Synthetic oligonucleotide
aaagaaagccuguagggcc

SEQ ID NO: 1994144 - RNA, 19 nt, Artificial Sequence
  Description of Artificial Sequence: Synthetic oligonucleotide
ucuaugaugacauugcccg

SEQ ID NO: 1994145 - RNA, 19 nt, Artificial Sequence
  Description of Artificial Sequence: Synthetic oligonucleotide
aaauucuucaagugcaccc

SEQ ID NO: 1994146 - RNA, 19 nt, Artificial Sequence
  Description of Artificial Sequence: Synthetic oligonucleotide
acauagaaaagccucaccc

SEQ ID NO: 1994147 - RNA, 19 nt, Artificial Sequence
  Description of Artificial Sequence: Synthetic oligonucleotide
uguaggaauaguuuaaugc

SEQ ID NO: 1994148 - RNA, 19 nt, Artificial Sequence
  Description of Artificial Sequence: Synthetic oligonucleotide
aauaauaauaucauagucu

SEQ ID NO: 1994149 - RNA, 19 nt, Artificial Sequence
  Description of Artificial Sequence: Synthetic oligonucleotide
aguuuaaugcuuuaauuac

SEQ ID NO: 1994150 - RNA, 19 nt, Artificial Sequence
  Description of Artificial Sequence: Synthetic oligonucleotide
aaaagccucacccuggacg

SEQ ID NO: 1994151 - RNA, 19 nt, Artificial Sequence
  Description of Artificial Sequence: Synthetic oligonucleotide
aauaucauagucuauuuua

SEQ ID NO: 1994152 - RNA, 19 nt, Artificial Sequence
  Description of Artificial Sequence: Synthetic oligonucleotide
aaaaucaaacgaguggagc

SEQ ID NO: 1994153 - RNA, 19 nt, Artificial Sequence
  Description of Artificial Sequence: Synthetic oligonucleotide
uaugaaauagaagugguag

SEQ ID NO: 1994154 - RNA, 19 nt, Artificial Sequence
  Description of Artificial Sequence: Synthetic oligonucleotide
aaguaaagcuuccuccugc

SEQ ID NO: 1994155 - RNA, 19 nt, Artificial Sequence
  Description of Artificial Sequence: Synthetic oligonucleotide
uguugaaggaaucagcuga

SEQ ID NO: 1994156 - RNA, 19 nt, Artificial Sequence
  Description of Artificial Sequence: Synthetic oligonucleotide
aaaguucaguucucgagac

SEQ ID NO: 1994157 - RNA, 19 nt, Artificial Sequence
  Description of Artificial Sequence: Synthetic oligonucleotide
aaagguaugagaauguaug

SEQ ID NO: 1994158 - RNA, 19 nt, Artificial Sequence
  Description of Artificial Sequence: Synthetic oligonucleotide
aaaucaaacgaguggagca

SEQ ID NO: 1994159 - RNA, 19 nt, Artificial Sequence
  Description of Artificial Sequence: Synthetic oligonucleotide
ucuauuuuacaaguuaaag

SEQ ID NO: 1994160 - RNA, 19 nt, Artificial Sequence
  Description of Artificial Sequence: Synthetic oligonucleotide
auuauguaauaauaauauc

SEQ ID NO: 1994161 - RNA, 19 nt, Artificial Sequence
  Description of Artificial Sequence: Synthetic oligonucleotide
gacauugcccguuaggacg

SEQ ID NO: 1994162 - RNA, 19 nt, Artificial Sequence
  Description of Artificial Sequence: Synthetic oligonucleotide
aauaauaucauagucuauu

SEQ ID NO: 1994163 - RNA, 19 nt, Artificial Sequence
  Description of Artificial Sequence: Synthetic oligonucleotide
aagaaccacucuucuaggc

SEQ ID NO: 1994164 - RNA, 19 nt, Artificial Sequence
  Description of Artificial Sequence: Synthetic oligonucleotide
aaguucuucucucagacau

SEQ ID NO: 1994165 - RNA, 19 nt, Artificial Sequence
  Description of Artificial Sequence: Synthetic oligonucleotide
uguuucagcaucccgaaga

SEQ ID NO: 1994166 - RNA, 19 nt, Artificial Sequence
  Description of Artificial Sequence: Synthetic oligonucleotide
aacuuugucucuaugauga

SEQ ID NO: 1994167 - RNA, 19 nt, Artificial Sequence
  Description of Artificial Sequence: Synthetic oligonucleotide
gaucacaaagccaaacucg

SEQ ID NO: 1994168 - RNA, 19 nt, Artificial Sequence
  Description of Artificial Sequence: Synthetic oligonucleotide
ucagacauagaaaagccuc

SEQ ID NO: 1994169 - RNA, 19 nt, Artificial Sequence
  Description of Artificial Sequence: Synthetic oligonucleotide
ucauagucuauuuuacaag

SEQ ID NO: 1994170 - RNA, 19 nt, Artificial Sequence
  Description of Artificial Sequence: Synthetic oligonucleotide
uucagcaucccgaagauuc

SEQ ID NO: 1994171 - RNA, 19 nt, Artificial Sequence
  Description of Artificial Sequence: Synthetic oligonucleotide
uuuaaaguacuguaggaau

SEQ ID NO: 1994172 - RNA, 19 nt, Artificial Sequence
  Description of Artificial Sequence: Synthetic oligonucleotide
uuuaaugcuuuaauuacau

SEQ ID NO: 1994173 - RNA, 19 nt, Artificial Sequence
  Description of Artificial Sequence: Synthetic oligonucleotide
ucuucucucagacauagaa

SEQ ID NO: 1994174 - RNA, 19 nt, Artificial Sequence
  Description of Artificial Sequence: Synthetic oligonucleotide
ugcuuuaauuacauuaugu

SEQ ID NO: 1994175 - RNA, 19 nt, Artificial Sequence
  Description of Artificial Sequence: Synthetic oligonucleotide
aauguaugaaauagaagug

SEQ ID NO: 1994176 - RNA, 19 nt, Artificial Sequence
  Description of Artificial Sequence: Synthetic oligonucleotide
uucucucagacauagaaaa

SEQ ID NO: 1994177 - RNA, 19 nt, Artificial Sequence
  Description of Artificial Sequence: Synthetic oligonucleotide
augaaauagaagugguagg

SEQ ID NO: 1994178 - RNA, 19 nt, Artificial Sequence
  Description of Artificial Sequence: Synthetic oligonucleotide
ucgucaaagaacuuugucu

SEQ ID NO: 1994179 - RNA, 19 nt, Artificial Sequence
  Description of Artificial Sequence: Synthetic oligonucleotide
acaaguuaaagguaugaga

SEQ ID NO: 1994180 - RNA, 19 nt, Artificial Sequence
  Description of Artificial Sequence: Synthetic oligonucleotide
auguaugaaauagaagugg

SEQ ID NO: 1994181 - RNA, 19 nt, Artificial Sequence
  Description of Artificial Sequence: Synthetic oligonucleotide
uauuuguggaguuagggau

SEQ ID NO: 1994182 - RNA, 19 nt, Artificial Sequence
  Description of Artificial Sequence: Synthetic oligonucleotide
aguuaaagguaugagaaug

SEQ ID NO: 1994183 - RNA, 19 nt, Artificial Sequence
  Description of Artificial Sequence: Synthetic oligonucleotide
aagaaggucgucgucaaag

SEQ ID NO: 1994184 - RNA, 19 nt, Artificial Sequence
  Description of Artificial Sequence: Synthetic oligonucleotide
ugaaauagaagugguagga

SEQ ID NO: 1994185 - RNA, 19 nt, Artificial Sequence
  Description of Artificial Sequence: Synthetic oligonucleotide
ucuaucaaggacugccagg

SEQ ID NO: 1994186 - RNA, 19 nt, Artificial Sequence
  Description of Artificial Sequence: Synthetic oligonucleotide
caaguuaaagguaugagaa

SEQ ID NO: 1994187 - RNA, 19 nt, Artificial Sequence
  Description of Artificial Sequence: Synthetic oligonucleotide
uuccuggugucacaggugg

SEQ ID NO: 1994188 - RNA, 19 nt, Artificial Sequence
  Description of Artificial Sequence: Synthetic oligonucleotide
auggagucgaggcuugucc

SEQ ID NO: 1994189 - RNA, 19 nt, Artificial Sequence
  Description of Artificial Sequence: Synthetic oligonucleotide
acagauaggucuucuguuc

SEQ ID NO: 1994190 - RNA, 19 nt, Artificial Sequence
  Description of Artificial Sequence: Synthetic oligonucleotide
acuggcuaccuauacagag

SEQ ID NO: 1994191 - RNA, 19 nt, Artificial Sequence
  Description of Artificial Sequence: Synthetic oligonucleotide
gaugacauugcccguuagg

SEQ ID NO: 1994192 - RNA, 19 nt, Artificial Sequence
  Description of Artificial Sequence: Synthetic oligonucleotide
uuuacaaguuaaagguaug

SEQ ID NO: 1994193 - RNA, 19 nt, Artificial Sequence
  Description of Artificial Sequence: Synthetic oligonucleotide
aucauagucuauuuuacaa

SEQ ID NO: 1994194 - RNA, 19 nt, Artificial Sequence
  Description of Artificial Sequence: Synthetic oligonucleotide
uuugcucugcagaagaaaa

SEQ ID NO: 1994195 - RNA, 19 nt, Artificial Sequence
  Description of Artificial Sequence: Synthetic oligonucleotide
aagguaugagaauguauga

SEQ ID NO: 1994196 - RNA, 19 nt, Artificial Sequence
  Description of Artificial Sequence: Synthetic oligonucleotide
caacuggcuaccuauacag

SEQ ID NO: 1994197 - RNA, 19 nt, Artificial Sequence
  Description of Artificial Sequence: Synthetic oligonucleotide
acugccuugcacuugagga

SEQ ID NO: 1994198 - RNA, 19 nt, Artificial Sequence
  Description of Artificial Sequence: Synthetic oligonucleotide
auaucauagucuauuuuac

SEQ ID NO: 1994199 - RNA, 19 nt, Artificial Sequence
  Description of Artificial Sequence: Synthetic oligonucleotide
aaaacuagaugggucaggu

SEQ ID NO: 1994200 - RNA, 19 nt, Artificial Sequence
  Description of Artificial Sequence: Synthetic oligonucleotide
aguuuagucuugucagugg

SEQ ID NO: 1994201 - RNA, 19 nt, Artificial Sequence
  Description of Artificial Sequence: Synthetic oligonucleotide
uacaaguuaaagguaugag

SEQ ID NO: 1994202 - RNA, 19 nt, Artificial Sequence
  Description of Artificial Sequence: Synthetic oligonucleotide
agauucauccaauuuaguu

SEQ ID NO: 1994203 - RNA, 19 nt, Artificial Sequence
  Description of Artificial Sequence: Synthetic oligonucleotide
uacccaggaacugaggacg

SEQ ID NO: 1994204 - RNA, 19 nt, Artificial Sequence
  Description of Artificial Sequence: Synthetic oligonucleotide
aacucgaagaaccacucuu

SEQ ID NO: 1994205 - RNA, 19 nt, Artificial Sequence
  Description of Artificial Sequence: Synthetic oligonucleotide
gaaggaaucagcugaagua

SEQ ID NO: 1994206 - RNA, 19 nt, Artificial Sequence
  Description of Artificial Sequence: Synthetic oligonucleotide
uaucauagucuauuuuaca

SEQ ID NO: 1994207 - RNA, 19 nt, Artificial Sequence
  Description of Artificial Sequence: Synthetic oligonucleotide
uucuaucaaggacugccag

SEQ ID NO: 1994208 - RNA, 19 nt, Artificial Sequence
  Description of Artificial Sequence: Synthetic oligonucleotide
gaagaaccacucuucuagg

SEQ ID NO: 1994209 - RNA, 19 nt, Artificial Sequence
  Description of Artificial Sequence: Synthetic oligonucleotide
aauagaagugguaggaaaa

SEQ ID NO: 1994210 - RNA, 19 nt, Artificial Sequence
  Description of Artificial Sequence: Synthetic oligonucleotide
uaaagguaugagaauguau

SEQ ID NO: 1994211 - RNA, 19 nt, Artificial Sequence
  Description of Artificial Sequence: Synthetic oligonucleotide
aagccuguagggcccaagg

SEQ ID NO: 1994212 - RNA, 19 nt, Artificial Sequence
  Description of Artificial Sequence: Synthetic oligonucleotide
ugucucuaugaugacauug

SEQ ID NO: 1994213 - RNA, 19 nt, Artificial Sequence
  Description of Artificial Sequence: Synthetic oligonucleotide
uuacaaguuaaagguauga

SEQ ID NO: 1994214 - RNA, 19 nt, Artificial Sequence
  Description of Artificial Sequence: Synthetic oligonucleotide
uuuguucccaugcuugcac

SEQ ID NO: 1994215 - RNA, 19 nt, Artificial Sequence
  Description of Artificial Sequence: Synthetic oligonucleotide
aaguuaaagguaugagaau

SEQ ID NO: 1994216 - RNA, 19 nt, Artificial Sequence
  Description of Artificial Sequence: Synthetic oligonucleotide
aaucagcugaaguaucaaa

SEQ ID NO: 1994217 - RNA, 19 nt, Artificial Sequence
  Description of Artificial Sequence: Synthetic oligonucleotide
ugcccuuugaaguaaacuu

SEQ ID NO: 1994218 - RNA, 19 nt, Artificial Sequence
  Description of Artificial Sequence: Synthetic oligonucleotide
aaggaaucagcugaaguau

SEQ ID NO: 1994219 - RNA, 19 nt, Artificial Sequence
  Description of Artificial Sequence: Synthetic oligonucleotide
uaucuucccuguuucagca

SEQ ID NO: 1994220 - RNA, 19 nt, Artificial Sequence
  Description of Artificial Sequence: Synthetic oligonucleotide
uuagucuugucaguggaga

SEQ ID NO: 1994221 - RNA, 19 nt, Artificial Sequence
  Description of Artificial Sequence: Synthetic oligonucleotide
auaauaucauagucuauuu

SEQ ID NO: 1994222 - RNA, 19 nt, Artificial Sequence
  Description of Artificial Sequence: Synthetic oligonucleotide
gacauagaaaagccucacc

SEQ ID NO: 1994223 - RNA, 19 nt, Artificial Sequence
  Description of Artificial Sequence: Synthetic oligonucleotide
aagccaacuggcuaccuau

SEQ ID NO: 1994224 - RNA, 19 nt, Artificial Sequence
  Description of Artificial Sequence: Synthetic oligonucleotide
ccaaagaaagccuguaggg

SEQ ID NO: 1994225 - RNA, 19 nt, Artificial Sequence
  Description of Artificial Sequence: Synthetic oligonucleotide
agaauguaugaaauagaag

SEQ ID NO: 1994226 - RNA, 19 nt, Artificial Sequence
  Description of Artificial Sequence: Synthetic oligonucleotide
agaaccacucuucuaggca

SEQ ID NO: 1994227 - RNA, 19 nt, Artificial Sequence
  Description of Artificial Sequence: Synthetic oligonucleotide
ucaggauaucccuggcccg

SEQ ID NO: 1994228 - RNA, 19 nt, Artificial Sequence
  Description of Artificial Sequence: Synthetic oligonucleotide
gaacugaggacggagcugc

SEQ ID NO: 1994229 - RNA, 19 nt, Artificial Sequence
  Description of Artificial Sequence: Synthetic oligonucleotide
gguauuuguggaguuaggg

SEQ ID NO: 1994230 - RNA, 19 nt, Artificial Sequence
  Description of Artificial Sequence: Synthetic oligonucleotide
aagccucucaggauauccc

SEQ ID NO: 1994231 - RNA, 19 nt, Artificial Sequence
  Description of Artificial Sequence: Synthetic oligonucleotide
guauuuguggaguuaggga

SEQ ID NO: 1994232 - RNA, 19 nt, Artificial Sequence
  Description of Artificial Sequence: Synthetic oligonucleotide
gacgcagugugguuccugg

SEQ ID NO: 1994233 - RNA, 19 nt, Artificial Sequence
  Description of Artificial Sequence: Synthetic oligonucleotide
aguaucuucccuguuucag

SEQ ID NO: 1994234 - RNA, 19 nt, Artificial Sequence
  Description of Artificial Sequence: Synthetic oligonucleotide
gcuaccuauacagagcugg

SEQ ID NO: 1994235 - RNA, 19 nt, Artificial Sequence
  Description of Artificial Sequence: Synthetic oligonucleotide
uaggaauaguuuaaugcuu

SEQ ID NO: 1994236 - RNA, 19 nt, Artificial Sequence
  Description of Artificial Sequence: Synthetic oligonucleotide
agaaaaguucaguucucga

SEQ ID NO: 1994237 - RNA, 19 nt, Artificial Sequence
  Description of Artificial Sequence: Synthetic oligonucleotide
uggacgugcugacaagaag

SEQ ID NO: 1994238 - RNA, 19 nt, Artificial Sequence
  Description of Artificial Sequence: Synthetic oligonucleotide
aacgaguggagcaaaagua

SEQ ID NO: 1994239 - RNA, 19 nt, Artificial Sequence
  Description of Artificial Sequence: Synthetic oligonucleotide
agacauagaaaagccucac

SEQ ID NO: 1994240 - RNA, 19 nt, Artificial Sequence
  Description of Artificial Sequence: Synthetic oligonucleotide
cuugaggauuuucuugggc

SEQ ID NO: 1994241 - RNA, 19 nt, Artificial Sequence
  Description of Artificial Sequence: Synthetic oligonucleotide
gauaucccuggcccgcucg

SEQ ID NO: 1994242 - RNA, 19 nt, Artificial Sequence
  Description of Artificial Sequence: Synthetic oligonucleotide
cuugccagaguaucuuccc

SEQ ID NO: 1994243 - RNA, 19 nt, Artificial Sequence
  Description of Artificial Sequence: Synthetic oligonucleotide
gaguuuagucuugucagug

SEQ ID NO: 1994244 - RNA, 19 nt, Artificial Sequence
  Description of Artificial Sequence: Synthetic oligonucleotide
aaacuagaugggucaggug

SEQ ID NO: 1994245 - RNA, 19 nt, Artificial Sequence
  Description of Artificial Sequence: Synthetic oligonucleotide
gaagccucucaggauaucc

SEQ ID NO: 1994246 - RNA, 19 nt, Artificial Sequence
  Description of Artificial Sequence: Synthetic oligonucleotide
uaauaauaucauagucuau

SEQ ID NO: 1994247 - RNA, 19 nt, Artificial Sequence
  Description of Artificial Sequence: Synthetic oligonucleotide
accuauacagagcugguuu

SEQ ID NO: 1994248 - RNA, 19 nt, Artificial Sequence
  Description of Artificial Sequence: Synthetic oligonucleotide
augacauugcccguuagga

SEQ ID NO: 1994249 - RNA, 19 nt, Artificial Sequence
  Description of Artificial Sequence: Synthetic oligonucleotide
aagugcacccaaguucuuc

SEQ ID NO: 1994250 - RNA, 19 nt, Artificial Sequence
  Description of Artificial Sequence: Synthetic oligonucleotide
ugcagaagaaaaguucagu

SEQ ID NO: 1994251 - RNA, 19 nt, Artificial Sequence
  Description of Artificial Sequence: Synthetic oligonucleotide
ucgggugcugcuucuauca

SEQ ID NO: 1994252 - RNA, 19 nt, Artificial Sequence
  Description of Artificial Sequence: Synthetic oligonucleotide
gucucuaugaugacauugc

SEQ ID NO: 1994253 - RNA, 19 nt, Artificial Sequence
  Description of Artificial Sequence: Synthetic oligonucleotide
ggacgugcugacaagaagg

SEQ ID NO: 1994254 - RNA, 19 nt, Artificial Sequence
  Description of Artificial Sequence: Synthetic oligonucleotide
aaucaaacgaguggagcaa

SEQ ID NO: 1994255 - RNA, 19 nt, Artificial Sequence
  Description of Artificial Sequence: Synthetic oligonucleotide
cuguaggaauaguuuaaug

SEQ ID NO: 1994256 - RNA, 19 nt, Artificial Sequence
  Description of Artificial Sequence: Synthetic oligonucleotide
uugcccguuaggacgcugg

SEQ ID NO: 1994257 - RNA, 19 nt, Artificial Sequence
  Description of Artificial Sequence: Synthetic oligonucleotide
caaacucgaagaaccacuc

SEQ ID NO: 1994258 - RNA, 19 nt, Artificial Sequence
  Description of Artificial Sequence: Synthetic oligonucleotide
agugcacccaaguucuucu

SEQ ID NO: 1994259 - RNA, 19 nt, Artificial Sequence
  Description of Artificial Sequence: Synthetic oligonucleotide
gacaagaaggucgucguca

SEQ ID NO: 1994260 - RNA, 19 nt, Artificial Sequence
  Description of Artificial Sequence: Synthetic oligonucleotide
caggugacgacgcagugug

SEQ ID NO: 1994261 - RNA, 19 nt, Artificial Sequence
  Description of Artificial Sequence: Synthetic oligonucleotide
ccugguguggguuuguucc

SEQ ID NO: 1994262 - RNA, 19 nt, Artificial Sequence
  Description of Artificial Sequence: Synthetic oligonucleotide
guuuagucuugucagugga

SEQ ID NO: 1994263 - RNA, 19 nt, Artificial Sequence
  Description of Artificial Sequence: Synthetic oligonucleotide
uuccauuugcucugcagaa

SEQ ID NO: 1994264 - RNA, 19 nt, Artificial Sequence
  Description of Artificial Sequence: Synthetic oligonucleotide
uguggaguuagggaucaca

SEQ ID NO: 1994265 - RNA, 19 nt, Artificial Sequence
  Description of Artificial Sequence: Synthetic oligonucleotide
uuuccuggugucacaggug

SEQ ID NO: 1994266 - RNA, 19 nt, Artificial Sequence
  Description of Artificial Sequence: Synthetic oligonucleotide
cacacgggcuucaugcucc

SEQ ID NO: 1994267 - RNA, 19 nt, Artificial Sequence
  Description of Artificial Sequence: Synthetic oligonucleotide
aggauuuucuugggcacac

SEQ ID NO: 1994268 - RNA, 19 nt, Artificial Sequence
  Description of Artificial Sequence: Synthetic oligonucleotide
aguacuguaggaauaguuu

SEQ ID NO: 1994269 - RNA, 19 nt, Artificial Sequence
  Description of Artificial Sequence: Synthetic oligonucleotide
ugacauugcccguuaggac

SEQ ID NO: 1994270 - RNA, 19 nt, Artificial Sequence
  Description of Artificial Sequence: Synthetic oligonucleotide
uuaaagguaugagaaugua

SEQ ID NO: 1994271 - RNA, 19 nt, Artificial Sequence
  Description of Artificial Sequence: Synthetic oligonucleotide
caaauucuucaagugcacc

SEQ ID NO: 1994272 - RNA, 19 nt, Artificial Sequence
  Description of Artificial Sequence: Synthetic oligonucleotide
aucccgaagauucauccaa

SEQ ID NO: 1994273 - RNA, 19 nt, Artificial Sequence
  Description of Artificial Sequence: Synthetic oligonucleotide
cuggcgggcaucaucuggg

SEQ ID NO: 1994274 - RNA, 19 nt, Artificial Sequence
  Description of Artificial Sequence: Synthetic oligonucleotide
uggagucgaggcuuguccc

SEQ ID NO: 1994275 - RNA, 19 nt, Artificial Sequence
  Description of Artificial Sequence: Synthetic oligonucleotide
acauugcccguuaggacgc

SEQ ID NO: 1994276 - RNA, 19 nt, Artificial Sequence
  Description of Artificial Sequence: Synthetic oligonucleotide
guggagauggagguuuugg

SEQ ID NO: 1994277 - RNA, 19 nt, Artificial Sequence
  Description of Artificial Sequence: Synthetic oligonucleotide
cuugucaguggagauggag

SEQ ID NO: 1994278 - RNA, 19 nt, Artificial Sequence
  Description of Artificial Sequence: Synthetic oligonucleotide
acuagaugggucagguggg

SEQ ID NO: 1994279 - RNA, 19 nt, Artificial Sequence
  Description of Artificial Sequence: Synthetic oligonucleotide
caugaugcggcgccugccg

SEQ ID NO: 1994280 - RNA, 19 nt, Artificial Sequence
  Description of Artificial Sequence: Synthetic oligonucleotide
aucacaaagccaaacucga

SEQ ID NO: 1994281 - RNA, 19 nt, Artificial Sequence
  Description of Artificial Sequence: Synthetic oligonucleotide
cgaagaaccacucuucuag

SEQ ID NO: 1994282 - RNA, 19 nt, Artificial Sequence
  Description of Artificial Sequence: Synthetic oligonucleotide
aaguucaguucucgagaca

SEQ ID NO: 1994283 - RNA, 19 nt, Artificial Sequence
  Description of Artificial Sequence: Synthetic oligonucleotide
aaagccaacuggcuaccua

SEQ ID NO: 1994284 - RNA, 19 nt, Artificial Sequence
  Description of Artificial Sequence: Synthetic oligonucleotide
cuauacagagcugguuucc

SEQ ID NO: 1994285 - RNA, 19 nt, Artificial Sequence
  Description of Artificial Sequence: Synthetic oligonucleotide
ugcacccaaguucuucucu

SEQ ID NO: 1994286 - RNA, 19 nt, Artificial Sequence
  Description of Artificial Sequence: Synthetic oligonucleotide
ggaucacaaagccaaacuc

SEQ ID NO: 1994287 - RNA, 19 nt, Artificial Sequence
  Description of Artificial Sequence: Synthetic oligonucleotide
cuuggcugacaugaugcgg

SEQ ID NO: 1994288 - RNA, 19 nt, Artificial Sequence
  Description of Artificial Sequence: Synthetic oligonucleotide
auacagagcugguuuccug

SEQ ID NO: 1994289 - RNA, 19 nt, Artificial Sequence
  Description of Artificial Sequence: Synthetic oligonucleotide
ucaaggacugccagguauu

SEQ ID NO: 1994290 - RNA, 19 nt, Artificial Sequence
  Description of Artificial Sequence: Synthetic oligonucleotide
uugcccuuugaaguaaacu

SEQ ID NO: 1994291 - RNA, 19 nt, Artificial Sequence
  Description of Artificial Sequence: Synthetic oligonucleotide
gacgacgcagugugguucc

SEQ ID NO: 1994292 - RNA, 19 nt, Artificial Sequence
  Description of Artificial Sequence: Synthetic oligonucleotide
caaacgaguggagcaaaag

SEQ ID NO: 1994293 - RNA, 19 nt, Artificial Sequence
  Description of Artificial Sequence: Synthetic oligonucleotide
gcaaaaguaaagcuuccuc

SEQ ID NO: 1994294 - RNA, 19 nt, Artificial Sequence
  Description of Artificial Sequence: Synthetic oligonucleotide
augaugcggcgccugccgc

SEQ ID NO: 1994295 - RNA, 19 nt, Artificial Sequence
  Description of Artificial Sequence: Synthetic oligonucleotide
agauaggucuucuguuccu

SEQ ID NO: 1994296 - RNA, 19 nt, Artificial Sequence
  Description of Artificial Sequence: Synthetic oligonucleotide
uaugaugacauugcccguu

SEQ ID NO: 1994297 - RNA, 19 nt, Artificial Sequence
  Description of Artificial Sequence: Synthetic oligonucleotide
gaaauagaagugguaggaa

SEQ ID NO: 1994298 - RNA, 19 nt, Artificial Sequence
  Description of Artificial Sequence: Synthetic oligonucleotide
ucgcugacgguacccagga

SEQ ID NO: 1994299 - RNA, 19 nt, Artificial Sequence
  Description of Artificial Sequence: Synthetic oligonucleotide
gcaucccgaagauucaucc

SEQ ID NO: 1994300 - RNA, 19 nt, Artificial Sequence
  Description of Artificial Sequence: Synthetic oligonucleotide
uguagggcccaaggaagag

SEQ ID NO: 1994301 - RNA, 19 nt, Artificial Sequence
  Description of Artificial Sequence: Synthetic oligonucleotide
uggagguuuugggagaaaa

SEQ ID NO: 1994302 - RNA, 19 nt, Artificial Sequence
  Description of Artificial Sequence: Synthetic oligonucleotide
ugguuuccuggugucacag

SEQ ID NO: 1994303 - RNA, 19 nt, Artificial Sequence
  Description of Artificial Sequence: Synthetic oligonucleotide
gggcacacgggcuucaugc

SEQ ID NO: 1994304 - RNA, 19 nt, Artificial Sequence
  Description of Artificial Sequence: Synthetic oligonucleotide
uugccagaguaucuucccu

SEQ ID NO: 1994305 - RNA, 19 nt, Artificial Sequence
  Description of Artificial Sequence: Synthetic oligonucleotide
aggacggagcugcugccgg

SEQ ID NO: 1994306 - RNA, 19 nt, Artificial Sequence
  Description of Artificial Sequence: Synthetic oligonucleotide
agcggccagacccgaaccg

SEQ ID NO: 1994307 - RNA, 19 nt, Artificial Sequence
  Description of Artificial Sequence: Synthetic oligonucleotide
agguaugagaauguaugaa

SEQ ID NO: 1994308 - RNA, 19 nt, Artificial Sequence
  Description of Artificial Sequence: Synthetic oligonucleotide
aagauucauccaauuuagu

SEQ ID NO: 1994309 - RNA, 19 nt, Artificial Sequence
  Description of Artificial Sequence: Synthetic oligonucleotide
auuuuacaaguuaaaggua

SEQ ID NO: 1994310 - RNA, 19 nt, Artificial Sequence
  Description of Artificial Sequence: Synthetic oligonucleotide
acaagaaggucgucgucaa

SEQ ID NO: 1994311 - RNA, 19 nt, Artificial Sequence
  Description of Artificial Sequence: Synthetic oligonucleotide
acaugaugcggcgccugcc

SEQ ID NO: 1994312 - RNA, 19 nt, Artificial Sequence
  Description of Artificial Sequence: Synthetic oligonucleotide
gacaugaugcggcgccugc

SEQ ID NO: 1994313 - RNA, 19 nt, Artificial Sequence
  Description of Artificial Sequence: Synthetic oligonucleotide
gcugacaugaugcggcgcc

SEQ ID NO: 1994314 - RNA, 19 nt, Artificial Sequence
  Description of Artificial Sequence: Synthetic oligonucleotide
gcugacgguacccaggaac

SEQ ID NO: 1994315 - RNA, 19 nt, Artificial Sequence
  Description of Artificial Sequence: Synthetic oligonucleotide
agccucacccuggacgugc

SEQ ID NO: 1994316 - RNA, 19 nt, Artificial Sequence
  Description of Artificial Sequence: Synthetic oligonucleotide
cugcuucuaucaaggacug

SEQ ID NO: 1994317 - RNA, 19 nt, Artificial Sequence
  Description of Artificial Sequence: Synthetic oligonucleotide
cgucaaagaacuuugucuc

SEQ ID NO: 1994318 - RNA, 19 nt, Artificial Sequence
  Description of Artificial Sequence: Synthetic oligonucleotide
agccucucaggauaucccu

SEQ ID NO: 1994319 - RNA, 19 nt, Artificial Sequence
  Description of Artificial Sequence: Synthetic oligonucleotide
cccguuaggacgcuggcgg

SEQ ID NO: 1994320 - RNA, 19 nt, Artificial Sequence
  Description of Artificial Sequence: Synthetic oligonucleotide
cuucuaucaaggacugcca

SEQ ID NO: 1994321 - RNA, 19 nt, Artificial Sequence
  Description of Artificial Sequence: Synthetic oligonucleotide
uccuggugucacagguggg

SEQ ID NO: 1994322 - RNA, 19 nt, Artificial Sequence
  Description of Artificial Sequence: Synthetic oligonucleotide
cauagaaaagccucacccu

SEQ ID NO: 1994323 - RNA, 19 nt, Artificial Sequence
  Description of Artificial Sequence: Synthetic oligonucleotide
gaaggucgucgucaaagaa

SEQ ID NO: 1994324 - RNA, 19 nt, Artificial Sequence
  Description of Artificial Sequence: Synthetic oligonucleotide
ugacaagaaggucgucguc

SEQ ID NO: 1994325 - RNA, 19 nt, Artificial Sequence
  Description of Artificial Sequence: Synthetic oligonucleotide
cuucucucagacauagaaa

SEQ ID NO: 1994326 - RNA, 19 nt, Artificial Sequence
  Description of Artificial Sequence: Synthetic oligonucleotide
aggaauaguuuaaugcuuu

SEQ ID NO: 1994327 - RNA, 19 nt, Artificial Sequence
  Description of Artificial Sequence: Synthetic oligonucleotide
gguuuguucccaugcuugc

SEQ ID NO: 1994328 - RNA, 19 nt, Artificial Sequence
  Description of Artificial Sequence: Synthetic oligonucleotide
ucgaagaaccacucuucua

SEQ ID NO: 1994329 - RNA, 19 nt, Artificial Sequence
  Description of Artificial Sequence: Synthetic oligonucleotide
caggcgagcagcgguagcg

SEQ ID NO: 1994330 - RNA, 19 nt, Artificial Sequence
  Description of Artificial Sequence: Synthetic oligonucleotide
ccuguagggcccaaggaag

SEQ ID NO: 1994331 - RNA, 19 nt, Artificial Sequence
  Description of Artificial Sequence: Synthetic oligonucleotide
uucuaggcauugcccuuug

SEQ ID NO: 1994332 - RNA, 19 nt, Artificial Sequence
  Description of Artificial Sequence: Synthetic oligonucleotide
aaggacugccagguauuug

SEQ ID NO: 1994333 - RNA, 19 nt, Artificial Sequence
  Description of Artificial Sequence: Synthetic oligonucleotide
ugaggacggagcugcugcc

SEQ ID NO: 1994334 - RNA, 19 nt, Artificial Sequence
  Description of Artificial Sequence: Synthetic oligonucleotide
uagcggccagacccgaacc

SEQ ID NO: 1994335 - RNA, 19 nt, Artificial Sequence
  Description of Artificial Sequence: Synthetic oligonucleotide
acgaguggagcaaaaguaa

SEQ ID NO: 1994336 - RNA, 19 nt, Artificial Sequence
  Description of Artificial Sequence: Synthetic oligonucleotide
guuaaagguaugagaaugu

SEQ ID NO: 1994337 - RNA, 19 nt, Artificial Sequence
  Description of Artificial Sequence: Synthetic oligonucleotide
guagcggccagacccgaac

SEQ ID NO: 1994338 - RNA, 19 nt, Artificial Sequence
  Description of Artificial Sequence: Synthetic oligonucleotide
guaugagaauguaugaaau

SEQ ID NO: 1994339 - RNA, 19 nt, Artificial Sequence
  Description of Artificial Sequence: Synthetic oligonucleotide
aaaagccaacuggcuaccu

SEQ ID NO: 1994340 - RNA, 19 nt, Artificial Sequence
  Description of Artificial Sequence: Synthetic oligonucleotide
gaaaagccucacccuggac

SEQ ID NO: 1994341 - RNA, 19 nt, Artificial Sequence
  Description of Artificial Sequence: Synthetic oligonucleotide
ccucucaggauaucccugg

SEQ ID NO: 1994342 - RNA, 19 nt, Artificial Sequence
  Description of Artificial Sequence: Synthetic oligonucleotide
gaggacggagcugcugccg

SEQ ID NO: 1994343 - RNA, 19 nt, Artificial Sequence
  Description of Artificial Sequence: Synthetic oligonucleotide
gaguaucuucccuguuuca

SEQ ID NO: 1994344 - RNA, 19 nt, Artificial Sequence
  Description of Artificial Sequence: Synthetic oligonucleotide
ugacgacgcagugugguuc

SEQ ID NO: 1994345 - RNA, 19 nt, Artificial Sequence
  Description of Artificial Sequence: Synthetic oligonucleotide
uguccccugcacucggcug

SEQ ID NO: 1994346 - RNA, 19 nt, Artificial Sequence
  Description of Artificial Sequence: Synthetic oligonucleotide
ucuaggcauugcccuuuga

SEQ ID NO: 1994347 - RNA, 19 nt, Artificial Sequence
  Description of Artificial Sequence: Synthetic oligonucleotide
agcaucccgaagauucauc

SEQ ID NO: 1994348 - RNA, 19 nt, Artificial Sequence
  Description of Artificial Sequence: Synthetic oligonucleotide
caggauaucccuggcccgc

SEQ ID NO: 1994349 - RNA, 19 nt, Artificial Sequence
  Description of Artificial Sequence: Synthetic oligonucleotide
uccuugccagaguaucuuc

SEQ ID NO: 1994350 - RNA, 19 nt, Artificial Sequence
  Description of Artificial Sequence: Synthetic oligonucleotide
gacgguacccaggaacuga

SEQ ID NO: 1994351 - RNA, 19 nt, Artificial Sequence
  Description of Artificial Sequence: Synthetic oligonucleotide
agccuguagggcccaagga

SEQ ID NO: 1994352 - RNA, 19 nt, Artificial Sequence
  Description of Artificial Sequence: Synthetic oligonucleotide
aacuggcuaccuauacaga

SEQ ID NO: 1994353 - RNA, 19 nt, Artificial Sequence
  Description of Artificial Sequence: Synthetic oligonucleotide
gaaucagcugaaguaucaa

SEQ ID NO: 1994354 - RNA, 19 nt, Artificial Sequence
  Description of Artificial Sequence: Synthetic oligonucleotide
ugcccguuaggacgcuggc

SEQ ID NO: 1994355 - RNA, 19 nt, Artificial Sequence
  Description of Artificial Sequence: Synthetic oligonucleotide
gaaccggccucucccuccc

SEQ ID NO: 1994356 - RNA, 19 nt, Artificial Sequence
  Description of Artificial Sequence: Synthetic oligonucleotide
ugacaugaugcggcgccug

SEQ ID NO: 1994357 - RNA, 19 nt, Artificial Sequence
  Description of Artificial Sequence: Synthetic oligonucleotide
augaugacauugcccguua

SEQ ID NO: 1994358 - RNA, 19 nt, Artificial Sequence
  Description of Artificial Sequence: Synthetic oligonucleotide
acgugcugacaagaagguc

SEQ ID NO: 1994359 - RNA, 19 nt, Artificial Sequence
  Description of Artificial Sequence: Synthetic oligonucleotide
ucacccuggacgugcugac

SEQ ID NO: 1994360 - RNA, 19 nt, Artificial Sequence
  Description of Artificial Sequence: Synthetic oligonucleotide
gggcccaaggaagaggcgg

SEQ ID NO: 1994361 - RNA, 19 nt, Artificial Sequence
  Description of Artificial Sequence: Synthetic oligonucleotide
gggugcugcuucuaucaag

SEQ ID NO: 1994362 - RNA, 19 nt, Artificial Sequence
  Description of Artificial Sequence: Synthetic oligonucleotide
uuccuugccagaguaucuu

SEQ ID NO: 1994363 - RNA, 19 nt, Artificial Sequence
  Description of Artificial Sequence: Synthetic oligonucleotide
ugacgguacccaggaacug

SEQ ID NO: 1994364 - RNA, 19 nt, Artificial Sequence
  Description of Artificial Sequence: Synthetic oligonucleotide
guugaaggaaucagcugaa

SEQ ID NO: 1994365 - RNA, 19 nt, Artificial Sequence
  Description of Artificial Sequence: Synthetic oligonucleotide
ugccuugcacuugaggauu

SEQ ID NO: 1994366 - RNA, 19 nt, Artificial Sequence
  Description of Artificial Sequence: Synthetic oligonucleotide
uaucaaggacugccaggua

SEQ ID NO: 1994367 - RNA, 19 nt, Artificial Sequence
  Description of Artificial Sequence: Synthetic oligonucleotide
uugggaguuuagucuuguc

SEQ ID NO: 1994368 - RNA, 19 nt, Artificial Sequence
  Description of Artificial Sequence: Synthetic oligonucleotide
ugcggcccucccacgcugg

SEQ ID NO: 1994369 - RNA, 19 nt, Artificial Sequence
  Description of Artificial Sequence: Synthetic oligonucleotide
cuuguccccugcacucggc

SEQ ID NO: 1994370 - RNA, 19 nt, Artificial Sequence
  Description of Artificial Sequence: Synthetic oligonucleotide
ugucacagguggguucugu

SEQ ID NO: 1994371 - RNA, 19 nt, Artificial Sequence
  Description of Artificial Sequence: Synthetic oligonucleotide
gauggagucgaggcuuguc

SEQ ID NO: 1994372 - RNA, 19 nt, Artificial Sequence
  Description of Artificial Sequence: Synthetic oligonucleotide
cugacaagaaggucgucgu

SEQ ID NO: 1994373 - RNA, 19 nt, Artificial Sequence
  Description of Artificial Sequence: Synthetic oligonucleotide
ggagucgaggcuugucccc

SEQ ID NO: 1994374 - RNA, 19 nt, Artificial Sequence
  Description of Artificial Sequence: Synthetic oligonucleotide
auaucccuggcccgcucgu

SEQ ID NO: 1994375 - RNA, 19 nt, Artificial Sequence
  Description of Artificial Sequence: Synthetic oligonucleotide
acgguacccaggaacugag

SEQ ID NO: 1994376 - RNA, 19 nt, Artificial Sequence
  Description of Artificial Sequence: Synthetic oligonucleotide
caucccgaagauucaucca

SEQ ID NO: 1994377 - RNA, 19 nt, Artificial Sequence
  Description of Artificial Sequence: Synthetic oligonucleotide
cuguagggcccaaggaaga

SEQ ID NO: 1994378 - RNA, 19 nt, Artificial Sequence
  Description of Artificial Sequence: Synthetic oligonucleotide
cugacgguacccaggaacu

SEQ ID NO: 1994379 - RNA, 19 nt, Artificial Sequence
  Description of Artificial Sequence: Synthetic oligonucleotide
uaccuauacagagcugguu

SEQ ID NO: 1994380 - RNA, 19 nt, Artificial Sequence
  Description of Artificial Sequence: Synthetic oligonucleotide
cucgggugcugcuucuauc

SEQ ID NO: 1994381 - RNA, 19 nt, Artificial Sequence
  Description of Artificial Sequence: Synthetic oligonucleotide
cgaagauucauccaauuua

SEQ ID NO: 1994382 - RNA, 19 nt, Artificial Sequence
  Description of Artificial Sequence: Synthetic oligonucleotide
ugcuugcaccaggauggag

SEQ ID NO: 1994383 - RNA, 19 nt, Artificial Sequence
  Description of Artificial Sequence: Synthetic oligonucleotide
caccccaggcacagauagg

SEQ ID NO: 1994384 - RNA, 19 nt, Artificial Sequence
  Description of Artificial Sequence: Synthetic oligonucleotide
ugcuucuaucaaggacugc

SEQ ID NO: 1994385 - RNA, 19 nt, Artificial Sequence
  Description of Artificial Sequence: Synthetic oligonucleotide
guuucagcaucccgaagau

SEQ ID NO: 1994386 - RNA, 19 nt, Artificial Sequence
  Description of Artificial Sequence: Synthetic oligonucleotide
guguggguuuguucccaug

SEQ ID NO: 1994387 - RNA, 19 nt, Artificial Sequence
  Description of Artificial Sequence: Synthetic oligonucleotide
aguucucgagacacugccu

SEQ ID NO: 1994388 - RNA, 19 nt, Artificial Sequence
  Description of Artificial Sequence: Synthetic oligonucleotide
guucucgagacacugccuu

SEQ ID NO: 1994389 - RNA, 19 nt, Artificial Sequence
  Description of Artificial Sequence: Synthetic oligonucleotide
guuaggacgcuggcgggca

SEQ ID NO: 1994390 - RNA, 19 nt, Artificial Sequence
  Description of Artificial Sequence: Synthetic oligonucleotide
acucgggugcugcuucuau

SEQ ID NO: 1994391 - RNA, 19 nt, Artificial Sequence
  Description of Artificial Sequence: Synthetic oligonucleotide
ggaauaguuuaaugcuuua

SEQ ID NO: 1994392 - RNA, 19 nt, Artificial Sequence
  Description of Artificial Sequence: Synthetic oligonucleotide
gccaacuggcuaccuauac

SEQ ID NO: 1994393 - RNA, 19 nt, Artificial Sequence
  Description of Artificial Sequence: Synthetic oligonucleotide
gaugggucagguggguaaa

SEQ ID NO: 1994394 - RNA, 19 nt, Artificial Sequence
  Description of Artificial Sequence: Synthetic oligonucleotide
gucgaggcuuguccccugc

SEQ ID NO: 1994395 - RNA, 19 nt, Artificial Sequence
  Description of Artificial Sequence: Synthetic oligonucleotide
agucgaggcuuguccccug

SEQ ID NO: 1994396 - RNA, 19 nt, Artificial Sequence
  Description of Artificial Sequence: Synthetic oligonucleotide
gccuguagggcccaaggaa

SEQ ID NO: 1994397 - RNA, 19 nt, Artificial Sequence
  Description of Artificial Sequence: Synthetic oligonucleotide
ggauuuucuugggcacacg

SEQ ID NO: 1994398 - RNA, 19 nt, Artificial Sequence
  Description of Artificial Sequence: Synthetic oligonucleotide
cacagauaggucuucuguu

SEQ ID NO: 1994399 - RNA, 19 nt, Artificial Sequence
  Description of Artificial Sequence: Synthetic oligonucleotide
agacacugccuugcacuug

SEQ ID NO: 1994400 - RNA, 19 nt, Artificial Sequence
  Description of Artificial Sequence: Synthetic oligonucleotide
uggcgggcaucaucuggga

SEQ ID NO: 1994401 - RNA, 19 nt, Artificial Sequence
  Description of Artificial Sequence: Synthetic oligonucleotide
cuggacgugcugacaagaa

SEQ ID NO: 1994402 - RNA, 19 nt, Artificial Sequence
  Description of Artificial Sequence: Synthetic oligonucleotide
gcacccaaguucuucucuc

SEQ ID NO: 1994403 - RNA, 19 nt, Artificial Sequence
  Description of Artificial Sequence: Synthetic oligonucleotide
ucuugggcacacgggcuuc

SEQ ID NO: 1994404 - RNA, 19 nt, Artificial Sequence
  Description of Artificial Sequence: Synthetic oligonucleotide
ggcggggcaggugacgacg

SEQ ID NO: 1994405 - RNA, 19 nt, Artificial Sequence
  Description of Artificial Sequence: Synthetic oligonucleotide
ccccguuccaaauucuuca

SEQ ID NO: 1994406 - RNA, 19 nt, Artificial Sequence
  Description of Artificial Sequence: Synthetic oligonucleotide
ccaaacucgaagaaccacu

SEQ ID NO: 1994407 - RNA, 19 nt, Artificial Sequence
  Description of Artificial Sequence: Synthetic oligonucleotide
cucaggcgagcagcgguag

SEQ ID NO: 1994408 - RNA, 19 nt, Artificial Sequence
  Description of Artificial Sequence: Synthetic oligonucleotide
acgcuggcucggcggggcc

SEQ ID NO: 1994409 - RNA, 19 nt, Artificial Sequence
  Description of Artificial Sequence: Synthetic oligonucleotide
aggauggagucgaggcuug

SEQ ID NO: 1994410 - RNA, 19 nt, Artificial Sequence
  Description of Artificial Sequence: Synthetic oligonucleotide
cucguccuuggcugacaug

SEQ ID NO: 1994411 - RNA, 19 nt, Artificial Sequence
  Description of Artificial Sequence: Synthetic oligonucleotide
aaccacucuucuaggcauu

SEQ ID NO: 1994412 - RNA, 19 nt, Artificial Sequence
  Description of Artificial Sequence: Synthetic oligonucleotide
gagacacugccuugcacuu

SEQ ID NO: 1994413 - RNA, 19 nt, Artificial Sequence
  Description of Artificial Sequence: Synthetic oligonucleotide
uuaggacgcuggcgggcau

SEQ ID NO: 1994414 - RNA, 19 nt, Artificial Sequence
  Description of Artificial Sequence: Synthetic oligonucleotide
acgcagugugguuccuggu

SEQ ID NO: 1994415 - RNA, 19 nt, Artificial Sequence
  Description of Artificial Sequence: Synthetic oligonucleotide
gccaaacucgaagaaccac

SEQ ID NO: 1994416 - RNA, 19 nt, Artificial Sequence
  Description of Artificial Sequence: Synthetic oligonucleotide
cauugcccuuugaaguaaa

SEQ ID NO: 1994417 - RNA, 19 nt, Artificial Sequence
  Description of Artificial Sequence: Synthetic oligonucleotide
cugguuuccuggugucaca

SEQ ID NO: 1994418 - RNA, 19 nt, Artificial Sequence
  Description of Artificial Sequence: Synthetic oligonucleotide
cuaccuauacagagcuggu

SEQ ID NO: 1994419 - RNA, 19 nt, Artificial Sequence
  Description of Artificial Sequence: Synthetic oligonucleotide
ggaguuuagucuugucagu

SEQ ID NO: 1994420 - RNA, 19 nt, Artificial Sequence
  Description of Artificial Sequence: Synthetic oligonucleotide
cagaguaucuucccuguuu

SEQ ID NO: 1994421 - RNA, 19 nt, Artificial Sequence
  Description of Artificial Sequence: Synthetic oligonucleotide
ugaagccucucaggauauc

SEQ ID NO: 1994422 - RNA, 19 nt, Artificial Sequence
  Description of Artificial Sequence: Synthetic oligonucleotide
ggacggagcugcugccggg

SEQ ID NO: 1994423 - RNA, 19 nt, Artificial Sequence
  Description of Artificial Sequence: Synthetic oligonucleotide
gucgucgucaaagaacuuu

SEQ ID NO: 1994424 - RNA, 19 nt, Artificial Sequence
  Description of Artificial Sequence: Synthetic oligonucleotide
auugcccguuaggacgcug

SEQ ID NO: 1994425 - RNA, 19 nt, Artificial Sequence
  Description of Artificial Sequence: Synthetic oligonucleotide
ccaacuggcuaccuauaca

SEQ ID NO: 1994426 - RNA, 19 nt, Artificial Sequence
  Description of Artificial Sequence: Synthetic oligonucleotide
aagccucacccuggacgug

SEQ ID NO: 1994427 - RNA, 19 nt, Artificial Sequence
  Description of Artificial Sequence: Synthetic oligonucleotide
cucgagacacugccuugca

SEQ ID NO: 1994428 - RNA, 19 nt, Artificial Sequence
  Description of Artificial Sequence: Synthetic oligonucleotide
cucggcggggccucgcuga

SEQ ID NO: 1994429 - RNA, 19 nt, Artificial Sequence
  Description of Artificial Sequence: Synthetic oligonucleotide
gcccgcucguccuuggcug

SEQ ID NO: 1994430 - RNA, 19 nt, Artificial Sequence
  Description of Artificial Sequence: Synthetic oligonucleotide
cuaugaugacauugcccgu

SEQ ID NO: 1994431 - RNA, 19 nt, Artificial Sequence
  Description of Artificial Sequence: Synthetic oligonucleotide
gcuugcaccaggauggagu

SEQ ID NO: 1994432 - RNA, 19 nt, Artificial Sequence
  Description of Artificial Sequence: Synthetic oligonucleotide
gguugggaguuuagucuug

SEQ ID NO: 1994433 - RNA, 19 nt, Artificial Sequence
  Description of Artificial Sequence: Synthetic oligonucleotide
aggauaucccuggcccgcu

SEQ ID NO: 1994434 - RNA, 19 nt, Artificial Sequence
  Description of Artificial Sequence: Synthetic oligonucleotide
cacgcuggcucggcggggc

SEQ ID NO: 1994435 - RNA, 19 nt, Artificial Sequence
  Description of Artificial Sequence: Synthetic oligonucleotide
guuccuugccagaguaucu

SEQ ID NO: 1994436 - RNA, 19 nt, Artificial Sequence
  Description of Artificial Sequence: Synthetic oligonucleotide
cugcugccgggccggacac

SEQ ID NO: 1994437 - RNA, 19 nt, Artificial Sequence
  Description of Artificial Sequence: Synthetic oligonucleotide
gggacucgggugcugcuuc

SEQ ID NO: 1994438 - RNA, 19 nt, Artificial Sequence
  Description of Artificial Sequence: Synthetic oligonucleotide
ccuguuucagcaucccgaa

SEQ ID NO: 1994439 - RNA, 19 nt, Artificial Sequence
  Description of Artificial Sequence: Synthetic oligonucleotide
guugggaguuuagucuugu

SEQ ID NO: 1994440 - RNA, 19 nt, Artificial Sequence
  Description of Artificial Sequence: Synthetic oligonucleotide
cugccuugcacuugaggau

SEQ ID NO: 1994441 - RNA, 19 nt, Artificial Sequence
  Description of Artificial Sequence: Synthetic oligonucleotide
ucggcggggccucgcugac

SEQ ID NO: 1994442 - RNA, 19 nt, Artificial Sequence
  Description of Artificial Sequence: Synthetic oligonucleotide
gcggccagacccgaaccgg

SEQ ID NO: 1994443 - RNA, 19 nt, Artificial Sequence
  Description of Artificial Sequence: Synthetic oligonucleotide
aggugacgacgcagugugg

SEQ ID NO: 1994444 - RNA, 19 nt, Artificial Sequence
  Description of Artificial Sequence: Synthetic oligonucleotide
gcugcugccgggccggaca

SEQ ID NO: 1994445 - RNA, 19 nt, Artificial Sequence
  Description of Artificial Sequence: Synthetic oligonucleotide
uaucccuggcccgcucguc

SEQ ID NO: 1994446 - RNA, 19 nt, Artificial Sequence
  Description of Artificial Sequence: Synthetic oligonucleotide
ugggacucgggugcugcuu

SEQ ID NO: 1994447 - RNA, 19 nt, Artificial Sequence
  Description of Artificial Sequence: Synthetic oligonucleotide
ccguuaggacgcuggcggg

SEQ ID NO: 1994448 - RNA, 19 nt, Artificial Sequence
  Description of Artificial Sequence: Synthetic oligonucleotide
gcccguuaggacgcuggcg

SEQ ID NO: 1994449 - RNA, 19 nt, Artificial Sequence
  Description of Artificial Sequence: Synthetic oligonucleotide
ggugacgacgcaguguggu

SEQ ID NO: 1994450 - RNA, 19 nt, Artificial Sequence
  Description of Artificial Sequence: Synthetic oligonucleotide
gccucucaggauaucccug

SEQ ID NO: 1994451 - RNA, 19 nt, Artificial Sequence
  Description of Artificial Sequence: Synthetic oligonucleotide
agacccgaaccggccucuc

SEQ ID NO: 1994452 - RNA, 19 nt, Artificial Sequence
  Description of Artificial Sequence: Synthetic oligonucleotide
cugcggcccucccacgcug

SEQ ID NO: 1994453 - RNA, 19 nt, Artificial Sequence
  Description of Artificial Sequence: Synthetic oligonucleotide
gagucgaggcuuguccccu

SEQ ID NO: 1994454 - RNA, 19 nt, Artificial Sequence
  Description of Artificial Sequence: Synthetic oligonucleotide
uuguggaguuagggaucac

SEQ ID NO: 1994455 - RNA, 19 nt, Artificial Sequence
  Description of Artificial Sequence: Synthetic oligonucleotide
gugcugacaagaaggucgu

SEQ ID NO: 1994456 - RNA, 19 nt, Artificial Sequence
  Description of Artificial Sequence: Synthetic oligonucleotide
augcuugcaccaggaugga

SEQ ID NO: 1994457 - RNA, 19 nt, Artificial Sequence
  Description of Artificial Sequence: Synthetic oligonucleotide
agguggguucuguguugaa

SEQ ID NO: 1994458 - RNA, 19 nt, Artificial Sequence
  Description of Artificial Sequence: Synthetic oligonucleotide
cagcgguagcggccagacc

SEQ ID NO: 1994459 - RNA, 19 nt, Artificial Sequence
  Description of Artificial Sequence: Synthetic oligonucleotide
ugcugacaagaaggucguc

SEQ ID NO: 1994460 - RNA, 19 nt, Artificial Sequence
  Description of Artificial Sequence: Synthetic oligonucleotide
uuccugguguggguuuguu

SEQ ID NO: 1994461 - RNA, 19 nt, Artificial Sequence
  Description of Artificial Sequence: Synthetic oligonucleotide
gcagcgguagcggccagac

SEQ ID NO: 1994462 - RNA, 19 nt, Artificial Sequence
  Description of Artificial Sequence: Synthetic oligonucleotide
gcgguagcggccagacccg

SEQ ID NO: 1994463 - RNA, 19 nt, Artificial Sequence
  Description of Artificial Sequence: Synthetic oligonucleotide
cccacgcuggcucggcggg

SEQ ID NO: 1994464 - RNA, 19 nt, Artificial Sequence
  Description of Artificial Sequence: Synthetic oligonucleotide
ggugucacagguggguucu

SEQ ID NO: 1994465 - RNA, 19 nt, Artificial Sequence
  Description of Artificial Sequence: Synthetic oligonucleotide
gccagaguaucuucccugu

SEQ ID NO: 1994466 - RNA, 19 nt, Artificial Sequence
  Description of Artificial Sequence: Synthetic oligonucleotide
cgaaccggccucucccucc

SEQ ID NO: 1994467 - RNA, 19 nt, Artificial Sequence
  Description of Artificial Sequence: Synthetic oligonucleotide
cgagacacugccuugcacu

SEQ ID NO: 1994468 - RNA, 19 nt, Artificial Sequence
  Description of Artificial Sequence: Synthetic oligonucleotide
ggguugggaguuuagucuu

SEQ ID NO: 1994469 - RNA, 19 nt, Artificial Sequence
  Description of Artificial Sequence: Synthetic oligonucleotide
aucugggacucgggugcug

SEQ ID NO: 1994470 - RNA, 19 nt, Artificial Sequence
  Description of Artificial Sequence: Synthetic oligonucleotide
gggcuucaugcuccacccc

SEQ ID NO: 1994471 - RNA, 19 nt, Artificial Sequence
  Description of Artificial Sequence: Synthetic oligonucleotide
cgaguggagcaaaaguaaa

SEQ ID NO: 1994472 - RNA, 19 nt, Artificial Sequence
  Description of Artificial Sequence: Synthetic oligonucleotide
cuugggcacacgggcuuca

SEQ ID NO: 1994473 - RNA, 19 nt, Artificial Sequence
  Description of Artificial Sequence: Synthetic oligonucleotide
cccuggacgugcugacaag

SEQ ID NO: 1994474 - RNA, 19 nt, Artificial Sequence
  Description of Artificial Sequence: Synthetic oligonucleotide
gccugcggcccucccacgc

SEQ ID NO: 1994475 - RNA, 19 nt, Artificial Sequence
  Description of Artificial Sequence: Synthetic oligonucleotide
auggagguuuugggagaaa

SEQ ID NO: 1994476 - RNA, 19 nt, Artificial Sequence
  Description of Artificial Sequence: Synthetic oligonucleotide
ggcuaccuauacagagcug

SEQ ID NO: 1994477 - RNA, 19 nt, Artificial Sequence
  Description of Artificial Sequence: Synthetic oligonucleotide
agccaacuggcuaccuaua

SEQ ID NO: 1994478 - RNA, 19 nt, Artificial Sequence
  Description of Artificial Sequence: Synthetic oligonucleotide
ggauaucccuggcccgcuc

SEQ ID NO: 1994479 - RNA, 19 nt, Artificial Sequence
  Description of Artificial Sequence: Synthetic oligonucleotide
gcauugcccuuugaaguaa

SEQ ID NO: 1994480 - RNA, 19 nt, Artificial Sequence
  Description of Artificial Sequence: Synthetic oligonucleotide
cguuaggacgcuggcgggc

SEQ ID NO: 1994481 - RNA, 19 nt, Artificial Sequence
  Description of Artificial Sequence: Synthetic oligonucleotide
cgggccggacaccucaggc

SEQ ID NO: 1994482 - RNA, 19 nt, Artificial Sequence
  Description of Artificial Sequence: Synthetic oligonucleotide
ccuggacgugcugacaaga

SEQ ID NO: 1994483 - RNA, 19 nt, Artificial Sequence
  Description of Artificial Sequence: Synthetic oligonucleotide
ccagacccgaaccggccuc

SEQ ID NO: 1994484 - RNA, 19 nt, Artificial Sequence
  Description of Artificial Sequence: Synthetic oligonucleotide
gugucacagguggguucug

SEQ ID NO: 1994485 - RNA, 19 nt, Artificial Sequence
  Description of Artificial Sequence: Synthetic oligonucleotide
gcccuuugaaguaaacuuu

SEQ ID NO: 1994486 - RNA, 19 nt, Artificial Sequence
  Description of Artificial Sequence: Synthetic oligonucleotide
gcccucccacgcuggcucg

SEQ ID NO: 1994487 - RNA, 19 nt, Artificial Sequence
  Description of Artificial Sequence: Synthetic oligonucleotide
gugacgacgcagugugguu

SEQ ID NO: 1994488 - RNA, 19 nt, Artificial Sequence
  Description of Artificial Sequence: Synthetic oligonucleotide
cgguacccaggaacugagg

SEQ ID NO: 1994489 - RNA, 19 nt, Artificial Sequence
  Description of Artificial Sequence: Synthetic oligonucleotide
ggggccucgcugacgguac

SEQ ID NO: 1994490 - RNA, 19 nt, Artificial Sequence
  Description of Artificial Sequence: Synthetic oligonucleotide
ccgccugcggcccucccac

SEQ ID NO: 1994491 - RNA, 19 nt, Artificial Sequence
  Description of Artificial Sequence: Synthetic oligonucleotide
gacucgggugcugcuucua

SEQ ID NO: 1994492 - RNA, 19 nt, Artificial Sequence
  Description of Artificial Sequence: Synthetic oligonucleotide
ccgaagauucauccaauuu

SEQ ID NO: 1994493 - RNA, 19 nt, Artificial Sequence
  Description of Artificial Sequence: Synthetic oligonucleotide
acgacgcagugugguuccu

SEQ ID NO: 1994494 - RNA, 19 nt, Artificial Sequence
  Description of Artificial Sequence: Synthetic oligonucleotide
gcucugcagaagaaaaguu

SEQ ID NO: 1994495 - RNA, 19 nt, Artificial Sequence
  Description of Artificial Sequence: Synthetic oligonucleotide
gugguuccugguguggguu

SEQ ID NO: 1994496 - RNA, 19 nt, Artificial Sequence
  Description of Artificial Sequence: Synthetic oligonucleotide
uggcucggcggggccucgc

SEQ ID NO: 1994497 - RNA, 19 nt, Artificial Sequence
  Description of Artificial Sequence: Synthetic oligonucleotide
gcaggugacgacgcagugu

SEQ ID NO: 1994498 - RNA, 19 nt, Artificial Sequence
  Description of Artificial Sequence: Synthetic oligonucleotide
cuggcucggcggggccucg

SEQ ID NO: 1994499 - RNA, 19 nt, Artificial Sequence
  Description of Artificial Sequence: Synthetic oligonucleotide
gcucggcggggccucgcug

SEQ ID NO: 1994500 - RNA, 19 nt, Artificial Sequence
  Description of Artificial Sequence: Synthetic oligonucleotide
cacccuggacgugcugaca

SEQ ID NO: 1994501 - RNA, 19 nt, Artificial Sequence
  Description of Artificial Sequence: Synthetic oligonucleotide
gggccucgcugacgguacc

SEQ ID NO: 1994502 - RNA, 19 nt, Artificial Sequence
  Description of Artificial Sequence: Synthetic oligonucleotide
augcggcgccugccgccug

SEQ ID NO: 1994503 - RNA, 19 nt, Artificial Sequence
  Description of Artificial Sequence: Synthetic oligonucleotide
cugacaugaugcggcgccu

SEQ ID NO: 1994504 - RNA, 19 nt, Artificial Sequence
  Description of Artificial Sequence: Synthetic oligonucleotide
gguguggguuuguucccau

SEQ ID NO: 1994505 - RNA, 19 nt, Artificial Sequence
  Description of Artificial Sequence: Synthetic oligonucleotide
gccggacaccucaggcgag

SEQ ID NO: 1994506 - RNA, 19 nt, Artificial Sequence
  Description of Artificial Sequence: Synthetic oligonucleotide
guuccugguguggguuugu

SEQ ID NO: 1994507 - RNA, 19 nt, Artificial Sequence
  Description of Artificial Sequence: Synthetic oligonucleotide
gccucgcugacgguaccca

SEQ ID NO: 1994508 - RNA, 19 nt, Artificial Sequence
  Description of Artificial Sequence: Synthetic oligonucleotide
cugccgggccggacaccuc

SEQ ID NO: 1994509 - RNA, 19 nt, Artificial Sequence
  Description of Artificial Sequence: Synthetic oligonucleotide
gggcaucaucugggacucg

SEQ ID NO: 1994510 - RNA, 19 nt, Artificial Sequence
  Description of Artificial Sequence: Synthetic oligonucleotide
gccagacccgaaccggccu

SEQ ID NO: 1994511 - RNA, 19 nt, Artificial Sequence
  Description of Artificial Sequence: Synthetic oligonucleotide
ccucaggcgagcagcggua

SEQ ID NO: 1994512 - RNA, 19 nt, Artificial Sequence
  Description of Artificial Sequence: Synthetic oligonucleotide
cagcaucccgaagauucau

SEQ ID NO: 1994513 - RNA, 19 nt, Artificial Sequence
  Description of Artificial Sequence: Synthetic oligonucleotide
ccgaaccggccucucccuc

SEQ ID NO: 1994514 - RNA, 19 nt, Artificial Sequence
  Description of Artificial Sequence: Synthetic oligonucleotide
ccucccacgcuggcucggc

SEQ ID NO: 1994515 - RNA, 19 nt, Artificial Sequence
  Description of Artificial Sequence: Synthetic oligonucleotide
cccgaagauucauccaauu

SEQ ID NO: 1994516 - RNA, 19 nt, Artificial Sequence
  Description of Artificial Sequence: Synthetic oligonucleotide
gguagcggccagacccgaa

SEQ ID NO: 1994517 - RNA, 19 nt, Artificial Sequence
  Description of Artificial Sequence: Synthetic oligonucleotide
caucugggacucgggugcu

SEQ ID NO: 1994518 - RNA, 19 nt, Artificial Sequence
  Description of Artificial Sequence: Synthetic oligonucleotide
gcuggcucggcggggccuc

SEQ ID NO: 1994519 - RNA, 19 nt, Artificial Sequence
  Description of Artificial Sequence: Synthetic oligonucleotide
ccacgcuggcucggcgggg

SEQ ID NO: 1994520 - RNA, 19 nt, Artificial Sequence
  Description of Artificial Sequence: Synthetic oligonucleotide
cccgcucguccuuggcuga

SEQ ID NO: 1994521 - RNA, 19 nt, Artificial Sequence
  Description of Artificial Sequence: Synthetic oligonucleotide
cgucgucaaagaacuuugu

SEQ ID NO: 1994522 - RNA, 19 nt, Artificial Sequence
  Description of Artificial Sequence: Synthetic oligonucleotide
ggcugggguugggaguuua

SEQ ID NO: 1994523 - RNA, 19 nt, Artificial Sequence
  Description of Artificial Sequence: Synthetic oligonucleotide
ggauggagucgaggcuugu

SEQ ID NO: 1994524 - RNA, 19 nt, Artificial Sequence
  Description of Artificial Sequence: Synthetic oligonucleotide
cauugcccguuaggacgcu

SEQ ID NO: 1994525 - RNA, 19 nt, Artificial Sequence
  Description of Artificial Sequence: Synthetic oligonucleotide
ccgcucguccuuggcugac

SEQ ID NO: 1994526 - RNA, 19 nt, Artificial Sequence
  Description of Artificial Sequence: Synthetic oligonucleotide
cccgaaccggccucucccu

SEQ ID NO: 1994527 - RNA, 19 nt, Artificial Sequence
  Description of Artificial Sequence: Synthetic oligonucleotide
cgggugcugcuucuaucaa

SEQ ID NO: 1994528 - RNA, 19 nt, Artificial Sequence
  Description of Artificial Sequence: Synthetic oligonucleotide
ccccugcacucggcugggg

SEQ ID NO: 1994529 - RNA, 19 nt, Artificial Sequence
  Description of Artificial Sequence: Synthetic oligonucleotide
gccuugcacuugaggauuu

SEQ ID NO: 1994530 - RNA, 19 nt, Artificial Sequence
  Description of Artificial Sequence: Synthetic oligonucleotide
ggucgucgucaaagaacuu

SEQ ID NO: 1994531 - RNA, 19 nt, Artificial Sequence
  Description of Artificial Sequence: Synthetic oligonucleotide
cggggccucgcugacggua

SEQ ID NO: 1994532 - RNA, 19 nt, Artificial Sequence
  Description of Artificial Sequence: Synthetic oligonucleotide
cguccuuggcugacaugau

SEQ ID NO: 1994533 - RNA, 19 nt, Artificial Sequence
  Description of Artificial Sequence: Synthetic oligonucleotide
cgcugacgguacccaggaa

SEQ ID NO: 1994534 - RNA, 19 nt, Artificial Sequence
  Description of Artificial Sequence: Synthetic oligonucleotide
cccuggcccgcucguccuu

SEQ ID NO: 1994535 - RNA, 19 nt, Artificial Sequence
  Description of Artificial Sequence: Synthetic oligonucleotide
cggcccucccacgcuggcu

SEQ ID NO: 1994536 - RNA, 19 nt, Artificial Sequence
  Description of Artificial Sequence: Synthetic oligonucleotide
aaagcuuccaaauuccacc

SEQ ID NO: 1994537 - RNA, 19 nt, Artificial Sequence
  Description of Artificial Sequence: Synthetic oligonucleotide
aggaagaucacacagacag

SEQ ID NO: 1994538 - RNA, 19 nt, Artificial Sequence
  Description of Artificial Sequence: Synthetic oligonucleotide
acauccauucuucagaagc

SEQ ID NO: 1994539 - RNA, 19 nt, Artificial Sequence
  Description of Artificial Sequence: Synthetic oligonucleotide
uucuucagcauuaaugggg

SEQ ID NO: 1994540 - RNA, 19 nt, Artificial Sequence
  Description of Artificial Sequence: Synthetic oligonucleotide
aaagugaucauaaacucuc

SEQ ID NO: 1994541 - RNA, 19 nt, Artificial Sequence
  Description of Artificial Sequence: Synthetic oligonucleotide
auaaacagcagucuucuuc

SEQ ID NO: 1994542 - RNA, 19 nt, Artificial Sequence
  Description of Artificial Sequence: Synthetic oligonucleotide
ugguaaagcacauuucugg

SEQ ID NO: 1994543 - RNA, 19 nt, Artificial Sequence
  Description of Artificial Sequence: Synthetic oligonucleotide
auagcaacuagcauggacc

SEQ ID NO: 1994544 - RNA, 19 nt, Artificial Sequence
  Description of Artificial Sequence: Synthetic oligonucleotide
ugguaggucaggaagauca

SEQ ID NO: 1994545 - RNA, 19 nt, Artificial Sequence
  Description of Artificial Sequence: Synthetic oligonucleotide
ugugguaaagcacauuucu

SEQ ID NO: 1994546 - RNA, 19 nt, Artificial Sequence
  Description of Artificial Sequence: Synthetic oligonucleotide
uuuggcaagacguuccagg

SEQ ID NO: 1994547 - RNA, 19 nt, Artificial Sequence
  Description of Artificial Sequence: Synthetic oligonucleotide
gacacuagcaugcuggugc

SEQ ID NO: 1994548 - RNA, 19 nt, Artificial Sequence
  Description of Artificial Sequence: Synthetic oligonucleotide
aacacauccauucuucaga

SEQ ID NO: 1994549 - RNA, 19 nt, Artificial Sequence
  Description of Artificial Sequence: Synthetic oligonucleotide
auuaauggggaaaucaggg

SEQ ID NO: 1994550 - RNA, 19 nt, Artificial Sequence
  Description of Artificial Sequence: Synthetic oligonucleotide
aauuccaccugaugguagg

SEQ ID NO: 1994551 - RNA, 19 nt, Artificial Sequence
  Description of Artificial Sequence: Synthetic oligonucleotide
aaguaguggauucagcaca

SEQ ID NO: 1994552 - RNA, 19 nt, Artificial Sequence
  Description of Artificial Sequence: Synthetic oligonucleotide
cuuuccacaguuuguagcg

SEQ ID NO: 1994553 - RNA, 19 nt, Artificial Sequence
  Description of Artificial Sequence: Synthetic oligonucleotide
aucgggaacacauccauuc

SEQ ID NO: 1994554 - RNA, 19 nt, Artificial Sequence
  Description of Artificial Sequence: Synthetic oligonucleotide
aaugagcauaaacagcagu

SEQ ID NO: 1994555 - RNA, 19 nt, Artificial Sequence
  Description of Artificial Sequence: Synthetic oligonucleotide
gugaucauaaacucucccg

SEQ ID NO: 1994556 - RNA, 19 nt, Artificial Sequence
  Description of Artificial Sequence: Synthetic oligonucleotide
guuuguagcgcucaggcug

SEQ ID NO: 1994557 - RNA, 19 nt, Artificial Sequence
  Description of Artificial Sequence: Synthetic oligonucleotide
ugggaaagugaucauaaac

SEQ ID NO: 1994558 - RNA, 19 nt, Artificial Sequence
  Description of Artificial Sequence: Synthetic oligonucleotide
cauuaauggggaaaucagg

SEQ ID NO: 1994559 - RNA, 19 nt, Artificial Sequence
  Description of Artificial Sequence: Synthetic oligonucleotide
uuucucacaguucugacua

SEQ ID NO: 1994560 - RNA, 19 nt, Artificial Sequence
  Description of Artificial Sequence: Synthetic oligonucleotide
agguaugggguguucaccc

SEQ ID NO: 1994561 - RNA, 19 nt, Artificial Sequence
  Description of Artificial Sequence: Synthetic oligonucleotide
uaugggaaagugaucauaa

SEQ ID NO: 1994562 - RNA, 19 nt, Artificial Sequence
  Description of Artificial Sequence: Synthetic oligonucleotide
cacagcacacgaaacaugg

SEQ ID NO: 1994563 - RNA, 19 nt, Artificial Sequence
  Description of Artificial Sequence: Synthetic oligonucleotide
agcaugauaaccauauggg

SEQ ID NO: 1994564 - RNA, 19 nt, Artificial Sequence
  Description of Artificial Sequence: Synthetic oligonucleotide
acauuucugggaucaaugg

SEQ ID NO: 1994565 - RNA, 19 nt, Artificial Sequence
  Description of Artificial Sequence: Synthetic oligonucleotide
aguauggucgauaacagug

SEQ ID NO: 1994566 - RNA, 19 nt, Artificial Sequence
  Description of Artificial Sequence: Synthetic oligonucleotide
guugaugcuguacaagucc

SEQ ID NO: 1994567 - RNA, 19 nt, Artificial Sequence
  Description of Artificial Sequence: Synthetic oligonucleotide
uaaagcacauuucugggau

SEQ ID NO: 1994568 - RNA, 19 nt, Artificial Sequence
  Description of Artificial Sequence: Synthetic oligonucleotide
aaaagccuuuggcaagacg

SEQ ID NO: 1994569 - RNA, 19 nt, Artificial Sequence
  Description of Artificial Sequence: Synthetic oligonucleotide
uuuguagcgcucaggcugg

SEQ ID NO: 1994570 - RNA, 19 nt, Artificial Sequence
  Description of Artificial Sequence: Synthetic oligonucleotide
uacaaguccaugucuuccg

SEQ ID NO: 1994571 - RNA, 19 nt, Artificial Sequence
  Description of Artificial Sequence: Synthetic oligonucleotide
aucguuugcucucugcagg

SEQ ID NO: 1994572 - RNA, 19 nt, Artificial Sequence
  Description of Artificial Sequence: Synthetic oligonucleotide
cacgcaaugagcauaaaca

SEQ ID NO: 1994573 - RNA, 19 nt, Artificial Sequence
  Description of Artificial Sequence: Synthetic oligonucleotide
acgcaaugagcauaaacag

SEQ ID NO: 1994574 - RNA, 19 nt, Artificial Sequence
  Description of Artificial Sequence: Synthetic oligonucleotide
aauccaucgacggguaagg

SEQ ID NO: 1994575 - RNA, 19 nt, Artificial Sequence
  Description of Artificial Sequence: Synthetic oligonucleotide
uaugccaggcaaacgaugu

SEQ ID NO: 1994576 - RNA, 19 nt, Artificial Sequence
  Description of Artificial Sequence: Synthetic oligonucleotide
uaguugaugcuguacaagu

SEQ ID NO: 1994577 - RNA, 19 nt, Artificial Sequence
  Description of Artificial Sequence: Synthetic oligonucleotide
cugaugguaggucaggaag

SEQ ID NO: 1994578 - RNA, 19 nt, Artificial Sequence
  Description of Artificial Sequence: Synthetic oligonucleotide
cagaguaccaagacuuugg

SEQ ID NO: 1994579 - RNA, 19 nt, Artificial Sequence
  Description of Artificial Sequence: Synthetic oligonucleotide
augauaaccauaugggaaa

SEQ ID NO: 1994580 - RNA, 19 nt, Artificial Sequence
  Description of Artificial Sequence: Synthetic oligonucleotide
ucugacuaaagcuuccaaa

SEQ ID NO: 1994581 - RNA, 19 nt, Artificial Sequence
  Description of Artificial Sequence: Synthetic oligonucleotide
augagcauaaacagcaguc

SEQ ID NO: 1994582 - RNA, 19 nt, Artificial Sequence
  Description of Artificial Sequence: Synthetic oligonucleotide
guacucaauccaucgacgg

SEQ ID NO: 1994583 - RNA, 19 nt, Artificial Sequence
  Description of Artificial Sequence: Synthetic oligonucleotide
ucgauaacagugcuguccu

SEQ ID NO: 1994584 - RNA, 19 nt, Artificial Sequence
  Description of Artificial Sequence: Synthetic oligonucleotide
ucaucguuugcucucugca

SEQ ID NO: 1994585 - RNA, 19 nt, Artificial Sequence
  Description of Artificial Sequence: Synthetic oligonucleotide
uugcaggacacuagcaugc

SEQ ID NO: 1994586 - RNA, 19 nt, Artificial Sequence
  Description of Artificial Sequence: Synthetic oligonucleotide
ugaugguaggucaggaaga

SEQ ID NO: 1994587 - RNA, 19 nt, Artificial Sequence
  Description of Artificial Sequence: Synthetic oligonucleotide
uaaccauaugggaaaguga

SEQ ID NO: 1994588 - RNA, 19 nt, Artificial Sequence
  Description of Artificial Sequence: Synthetic oligonucleotide
aaagcacauuucugggauc

SEQ ID NO: 1994589 - RNA, 19 nt, Artificial Sequence
  Description of Artificial Sequence: Synthetic oligonucleotide
agcacacgaaacauggacc

SEQ ID NO: 1994590 - RNA, 19 nt, Artificial Sequence
  Description of Artificial Sequence: Synthetic oligonucleotide
gaacacauccauucuucag

SEQ ID NO: 1994591 - RNA, 19 nt, Artificial Sequence
  Description of Artificial Sequence: Synthetic oligonucleotide
gacacugcacuucuugcag

SEQ ID NO: 1994592 - RNA, 19 nt, Artificial Sequence
  Description of Artificial Sequence: Synthetic oligonucleotide
caugauaaccauaugggaa

SEQ ID NO: 1994593 - RNA, 19 nt, Artificial Sequence
  Description of Artificial Sequence: Synthetic oligonucleotide
cauccauucuucagaagcc

SEQ ID NO: 1994594 - RNA, 19 nt, Artificial Sequence
  Description of Artificial Sequence: Synthetic oligonucleotide
uuccacaugccgaaguaca

SEQ ID NO: 1994595 - RNA, 19 nt, Artificial Sequence
  Description of Artificial Sequence: Synthetic oligonucleotide
uuaauggggaaaucagggu

SEQ ID NO: 1994596 - RNA, 19 nt, Artificial Sequence
  Description of Artificial Sequence: Synthetic oligonucleotide
caguuuguagcgcucaggc

SEQ ID NO: 1994597 - RNA, 19 nt, Artificial Sequence
  Description of Artificial Sequence: Synthetic oligonucleotide
ugccguacucaauccaucg

SEQ ID NO: 1994598 - RNA, 19 nt, Artificial Sequence
  Description of Artificial Sequence: Synthetic oligonucleotide
cauuucugggaucaauggc

SEQ ID NO: 1994599 - RNA, 19 nt, Artificial Sequence
  Description of Artificial Sequence: Synthetic oligonucleotide
cuagcauggacccggacac

SEQ ID NO: 1994600 - RNA, 19 nt, Artificial Sequence
  Description of Artificial Sequence: Synthetic oligonucleotide
ucagaagccuuugugggag

SEQ ID NO: 1994601 - RNA, 19 nt, Artificial Sequence
  Description of Artificial Sequence: Synthetic oligonucleotide
auuucugggaucaauggcu

SEQ ID NO: 1994602 - RNA, 19 nt, Artificial Sequence
  Description of Artificial Sequence: Synthetic oligonucleotide
aggccucacagcuuugagc

SEQ ID NO: 1994603 - RNA, 19 nt, Artificial Sequence
  Description of Artificial Sequence: Synthetic oligonucleotide
agcauuaauggggaaauca

SEQ ID NO: 1994604 - RNA, 19 nt, Artificial Sequence
  Description of Artificial Sequence: Synthetic oligonucleotide
cacauuucugggaucaaug

SEQ ID NO: 1994605 - RNA, 19 nt, Artificial Sequence
  Description of Artificial Sequence: Synthetic oligonucleotide
ucaggcuggaaccuccuca

SEQ ID NO: 1994606 - RNA, 19 nt, Artificial Sequence
  Description of Artificial Sequence: Synthetic oligonucleotide
uggucgauaacagugcugu

SEQ ID NO: 1994607 - RNA, 19 nt, Artificial Sequence
  Description of Artificial Sequence: Synthetic oligonucleotide
aacauggacccaucuguca

SEQ ID NO: 1994608 - RNA, 19 nt, Artificial Sequence
  Description of Artificial Sequence: Synthetic oligonucleotide
cuugcaggacacuagcaug

SEQ ID NO: 1994609 - RNA, 19 nt, Artificial Sequence
  Description of Artificial Sequence: Synthetic oligonucleotide
gaagccagcaugauaacca

SEQ ID NO: 1994610 - RNA, 19 nt, Artificial Sequence
  Description of Artificial Sequence: Synthetic oligonucleotide
ucaccauaucugcuugccg

SEQ ID NO: 1994611 - RNA, 19 nt, Artificial Sequence
  Description of Artificial Sequence: Synthetic oligonucleotide
aaacauggacccaucuguc

SEQ ID NO: 1994612 - RNA, 19 nt, Artificial Sequence
  Description of Artificial Sequence: Synthetic oligonucleotide
cauagcaacuagcauggac

SEQ ID NO: 1994613 - RNA, 19 nt, Artificial Sequence
  Description of Artificial Sequence: Synthetic oligonucleotide
uguccuucagaaacucagc

SEQ ID NO: 1994614 - RNA, 19 nt, Artificial Sequence
  Description of Artificial Sequence: Synthetic oligonucleotide
caaguaguggauucagcac

SEQ ID NO: 1994615 - RNA, 19 nt, Artificial Sequence
  Description of Artificial Sequence: Synthetic oligonucleotide
agggcauuggcugagcauc

SEQ ID NO: 1994616 - RNA, 19 nt, Artificial Sequence
  Description of Artificial Sequence: Synthetic oligonucleotide
agcauaaacagcagucuuc

SEQ ID NO: 1994617 - RNA, 19 nt, Artificial Sequence
  Description of Artificial Sequence: Synthetic oligonucleotide
uuugcucucugcagggccc

SEQ ID NO: 1994618 - RNA, 19 nt, Artificial Sequence
  Description of Artificial Sequence: Synthetic oligonucleotide
gagcaucgggaacacaucc

SEQ ID NO: 1994619 - RNA, 19 nt, Artificial Sequence
  Description of Artificial Sequence: Synthetic oligonucleotide
acacuagcaugcuggugcc

SEQ ID NO: 1994620 - RNA, 19 nt, Artificial Sequence
  Description of Artificial Sequence: Synthetic oligonucleotide
cagaguauggucgauaaca

SEQ ID NO: 1994621 - RNA, 19 nt, Artificial Sequence
  Description of Artificial Sequence: Synthetic oligonucleotide
gucgauaacagugcugucc

SEQ ID NO: 1994622 - RNA, 19 nt, Artificial Sequence
  Description of Artificial Sequence: Synthetic oligonucleotide
uccaccugaugguagguca

SEQ ID NO: 1994623 - RNA, 19 nt, Artificial Sequence
  Description of Artificial Sequence: Synthetic oligonucleotide
gggaucaauggcuuggucc

SEQ ID NO: 1994624 - RNA, 19 nt, Artificial Sequence
  Description of Artificial Sequence: Synthetic oligonucleotide
augucuuccguaugccagg

SEQ ID NO: 1994625 - RNA, 19 nt, Artificial Sequence
  Description of Artificial Sequence: Synthetic oligonucleotide
uccacaugccgaaguacag

SEQ ID NO: 1994626 - RNA, 19 nt, Artificial Sequence
  Description of Artificial Sequence: Synthetic oligonucleotide
ggaaagugaucauaaacuc

SEQ ID NO: 1994627 - RNA, 19 nt, Artificial Sequence
  Description of Artificial Sequence: Synthetic oligonucleotide
uggcaagacguuccaggcg

SEQ ID NO: 1994628 - RNA, 19 nt, Artificial Sequence
  Description of Artificial Sequence: Synthetic oligonucleotide
ucguuugcucucugcaggg

SEQ ID NO: 1994629 - RNA, 19 nt, Artificial Sequence
  Description of Artificial Sequence: Synthetic oligonucleotide
ucagcauuaauggggaaau

SEQ ID NO: 1994630 - RNA, 19 nt, Artificial Sequence
  Description of Artificial Sequence: Synthetic oligonucleotide
gauaacagugcuguccuuc

SEQ ID NO: 1994631 - RNA, 19 nt, Artificial Sequence
  Description of Artificial Sequence: Synthetic oligonucleotide
aguggauucagcacaguug

SEQ ID NO: 1994632 - RNA, 19 nt, Artificial Sequence
  Description of Artificial Sequence: Synthetic oligonucleotide
gaucccacucuccuucucc

SEQ ID NO: 1994633 - RNA, 19 nt, Artificial Sequence
  Description of Artificial Sequence: Synthetic oligonucleotide
agggucaucuuguagcgga

SEQ ID NO: 1994634 - RNA, 19 nt, Artificial Sequence
  Description of Artificial Sequence: Synthetic oligonucleotide
gguggaacagaguaccaag

SEQ ID NO: 1994635 - RNA, 19 nt, Artificial Sequence
  Description of Artificial Sequence: Synthetic oligonucleotide
ugaagccagcaugauaacc

SEQ ID NO: 1994636 - RNA, 19 nt, Artificial Sequence
  Description of Artificial Sequence: Synthetic oligonucleotide
cagcacacgaaacauggac

SEQ ID NO: 1994637 - RNA, 19 nt, Artificial Sequence
  Description of Artificial Sequence: Synthetic oligonucleotide
ugauaaccauaugggaaag

SEQ ID NO: 1994638 - RNA, 19 nt, Artificial Sequence
  Description of Artificial Sequence: Synthetic oligonucleotide
aaggccucacagcuuugag

SEQ ID NO: 1994639 - RNA, 19 nt, Artificial Sequence
  Description of Artificial Sequence: Synthetic oligonucleotide
cccauagcaacuagcaugg

SEQ ID NO: 1994640 - RNA, 19 nt, Artificial Sequence
  Description of Artificial Sequence: Synthetic oligonucleotide
ugccgaaguacagguaugg

SEQ ID NO: 1994641 - RNA, 19 nt, Artificial Sequence
  Description of Artificial Sequence: Synthetic oligonucleotide
acucaauccaucgacgggu

SEQ ID NO: 1994642 - RNA, 19 nt, Artificial Sequence
  Description of Artificial Sequence: Synthetic oligonucleotide
cucuccgaagugcagguag

SEQ ID NO: 1994643 - RNA, 19 nt, Artificial Sequence
  Description of Artificial Sequence: Synthetic oligonucleotide
uucaccauaucugcuugcc

SEQ ID NO: 1994644 - RNA, 19 nt, Artificial Sequence
  Description of Artificial Sequence: Synthetic oligonucleotide
gcaaugagcauaaacagca

SEQ ID NO: 1994645 - RNA, 19 nt, Artificial Sequence
  Description of Artificial Sequence: Synthetic oligonucleotide
gaugcuguacaaguccaug

SEQ ID NO: 1994646 - RNA, 19 nt, Artificial Sequence
  Description of Artificial Sequence: Synthetic oligonucleotide
ugacuaaagcuuccaaauu

SEQ ID NO: 1994647 - RNA, 19 nt, Artificial Sequence
  Description of Artificial Sequence: Synthetic oligonucleotide
agaguauggucgauaacag

SEQ ID NO: 1994648 - RNA, 19 nt, Artificial Sequence
  Description of Artificial Sequence: Synthetic oligonucleotide
agccaguugugguaaagca

SEQ ID NO: 1994649 - RNA, 19 nt, Artificial Sequence
  Description of Artificial Sequence: Synthetic oligonucleotide
aacuagcauggacccggac

SEQ ID NO: 1994650 - RNA, 19 nt, Artificial Sequence
  Description of Artificial Sequence: Synthetic oligonucleotide
guaguugaugcuguacaag

SEQ ID NO: 1994651 - RNA, 19 nt, Artificial Sequence
  Description of Artificial Sequence: Synthetic oligonucleotide
agcagucuucuuccagggc

SEQ ID NO: 1994652 - RNA, 19 nt, Artificial Sequence
  Description of Artificial Sequence: Synthetic oligonucleotide
ggaaaucagggucaucuug

SEQ ID NO: 1994653 - RNA, 19 nt, Artificial Sequence
  Description of Artificial Sequence: Synthetic oligonucleotide
uguacaaguccaugucuuc

SEQ ID NO: 1994654 - RNA, 19 nt, Artificial Sequence
  Description of Artificial Sequence: Synthetic oligonucleotide
uugugguaaagcacauuuc

SEQ ID NO: 1994655 - RNA, 19 nt, Artificial Sequence
  Description of Artificial Sequence: Synthetic oligonucleotide
aguugaugcuguacaaguc

SEQ ID NO: 1994656 - RNA, 19 nt, Artificial Sequence
  Description of Artificial Sequence: Synthetic oligonucleotide
caucguuugcucucugcag

SEQ ID NO: 1994657 - RNA, 19 nt, Artificial Sequence
  Description of Artificial Sequence: Synthetic oligonucleotide
gucaaagggaaugccauac

SEQ ID NO: 1994658 - RNA, 19 nt, Artificial Sequence
  Description of Artificial Sequence: Synthetic oligonucleotide
caccccucaauggugaucc

SEQ ID NO: 1994659 - RNA, 19 nt, Artificial Sequence
  Description of Artificial Sequence: Synthetic oligonucleotide
auggugaucccacucuccu

SEQ ID NO: 1994660 - RNA, 19 nt, Artificial Sequence
  Description of Artificial Sequence: Synthetic oligonucleotide
uaguggauucagcacaguu

SEQ ID NO: 1994661 - RNA, 19 nt, Artificial Sequence
  Description of Artificial Sequence: Synthetic oligonucleotide
guauggucgauaacagugc

SEQ ID NO: 1994662 - RNA, 19 nt, Artificial Sequence
  Description of Artificial Sequence: Synthetic oligonucleotide
uccucacaaacacauccau

SEQ ID NO: 1994663 - RNA, 19 nt, Artificial Sequence
  Description of Artificial Sequence: Synthetic oligonucleotide
uagcgcucaggcuggaacc

SEQ ID NO: 1994664 - RNA, 19 nt, Artificial Sequence
  Description of Artificial Sequence: Synthetic oligonucleotide
gcaacuagcauggacccgg

SEQ ID NO: 1994665 - RNA, 19 nt, Artificial Sequence
  Description of Artificial Sequence: Synthetic oligonucleotide
ucagccggccaauauucca

SEQ ID NO: 1994666 - RNA, 19 nt, Artificial Sequence
  Description of Artificial Sequence: Synthetic oligonucleotide
guacaaguccaugucuucc

SEQ ID NO: 1994667 - RNA, 19 nt, Artificial Sequence
  Description of Artificial Sequence: Synthetic oligonucleotide
uucugacuaaagcuuccaa

SEQ ID NO: 1994668 - RNA, 19 nt, Artificial Sequence
  Description of Artificial Sequence: Synthetic oligonucleotide
aaacgaugucuuccacaug

SEQ ID NO: 1994669 - RNA, 19 nt, Artificial Sequence
  Description of Artificial Sequence: Synthetic oligonucleotide
cucagguggaacagaguac

SEQ ID NO: 1994670 - RNA, 19 nt, Artificial Sequence
  Description of Artificial Sequence: Synthetic oligonucleotide
uuccacaguuuguagcgcu

SEQ ID NO: 1994671 - RNA, 19 nt, Artificial Sequence
  Description of Artificial Sequence: Synthetic oligonucleotide
agacuuuggcucuccgaag

SEQ ID NO: 1994672 - RNA, 19 nt, Artificial Sequence
  Description of Artificial Sequence: Synthetic oligonucleotide
gaagccgugguugaagcca

SEQ ID NO: 1994673 - RNA, 19 nt, Artificial Sequence
  Description of Artificial Sequence: Synthetic oligonucleotide
gaacagaguaccaagacuu

SEQ ID NO: 1994674 - RNA, 19 nt, Artificial Sequence
  Description of Artificial Sequence: Synthetic oligonucleotide
ggauucagcacaguugaag

SEQ ID NO: 1994675 - RNA, 19 nt, Artificial Sequence
  Description of Artificial Sequence: Synthetic oligonucleotide
guugugguaaagcacauuu

SEQ ID NO: 1994676 - RNA, 19 nt, Artificial Sequence
  Description of Artificial Sequence: Synthetic oligonucleotide
aguaguggauucagcacag

SEQ ID NO: 1994677 - RNA, 19 nt, Artificial Sequence
  Description of Artificial Sequence: Synthetic oligonucleotide
aaggcaaguaguggauuca

SEQ ID NO: 1994678 - RNA, 19 nt, Artificial Sequence
  Description of Artificial Sequence: Synthetic oligonucleotide
aagccagcaugauaaccau

SEQ ID NO: 1994679 - RNA, 19 nt, Artificial Sequence
  Description of Artificial Sequence: Synthetic oligonucleotide
cagguaagggguagacagg

SEQ ID NO: 1994680 - RNA, 19 nt, Artificial Sequence
  Description of Artificial Sequence: Synthetic oligonucleotide
aucauaaacucucccgcuu

SEQ ID NO: 1994681 - RNA, 19 nt, Artificial Sequence
  Description of Artificial Sequence: Synthetic oligonucleotide
acagaguaccaagacuuug

SEQ ID NO: 1994682 - RNA, 19 nt, Artificial Sequence
  Description of Artificial Sequence: Synthetic oligonucleotide
gaaagugaucauaaacucu

SEQ ID NO: 1994683 - RNA, 19 nt, Artificial Sequence
  Description of Artificial Sequence: Synthetic oligonucleotide
ugaagccgugguugaagcc

SEQ ID NO: 1994684 - RNA, 19 nt, Artificial Sequence
  Description of Artificial Sequence: Synthetic oligonucleotide
aguuuguagcgcucaggcu

SEQ ID NO: 1994685 - RNA, 19 nt, Artificial Sequence
  Description of Artificial Sequence: Synthetic oligonucleotide
ugagcaucgggaacacauc

SEQ ID NO: 1994686 - RNA, 19 nt, Artificial Sequence
  Description of Artificial Sequence: Synthetic oligonucleotide
ucgggaacacauccauucu

SEQ ID NO: 1994687 - RNA, 19 nt, Artificial Sequence
  Description of Artificial Sequence: Synthetic oligonucleotide
uucagccggccaauauucc

SEQ ID NO: 1994688 - RNA, 19 nt, Artificial Sequence
  Description of Artificial Sequence: Synthetic oligonucleotide
guagcgcucaggcuggaac

SEQ ID NO: 1994689 - RNA, 19 nt, Artificial Sequence
  Description of Artificial Sequence: Synthetic oligonucleotide
aucugucaucguuugcucu

SEQ ID NO: 1994690 - RNA, 19 nt, Artificial Sequence
  Description of Artificial Sequence: Synthetic oligonucleotide
ugcuugccguacucaaucc

SEQ ID NO: 1994691 - RNA, 19 nt, Artificial Sequence
  Description of Artificial Sequence: Synthetic oligonucleotide
cuucaccauaucugcuugc

SEQ ID NO: 1994692 - RNA, 19 nt, Artificial Sequence
  Description of Artificial Sequence: Synthetic oligonucleotide
gacagcacagugaggggcc

SEQ ID NO: 1994693 - RNA, 19 nt, Artificial Sequence
  Description of Artificial Sequence: Synthetic oligonucleotide
guagacagguugaugucug

SEQ ID NO: 1994694 - RNA, 19 nt, Artificial Sequence
  Description of Artificial Sequence: Synthetic oligonucleotide
aggcaaacgaugucuucca

SEQ ID NO: 1994695 - RNA, 19 nt, Artificial Sequence
  Description of Artificial Sequence: Synthetic oligonucleotide
agguaagggguagacaggu

SEQ ID NO: 1994696 - RNA, 19 nt, Artificial Sequence
  Description of Artificial Sequence: Synthetic oligonucleotide
cugacuaaagcuuccaaau

SEQ ID NO: 1994697 - RNA, 19 nt, Artificial Sequence
  Description of Artificial Sequence: Synthetic oligonucleotide
gugguaaagcacauuucug

SEQ ID NO: 1994698 - RNA, 19 nt, Artificial Sequence
  Description of Artificial Sequence: Synthetic oligonucleotide
uguagcggagaaaggccuc

SEQ ID NO: 1994699 - RNA, 19 nt, Artificial Sequence
  Description of Artificial Sequence: Synthetic oligonucleotide
uagcaugcuggugccaucc

SEQ ID NO: 1994700 - RNA, 19 nt, Artificial Sequence
  Description of Artificial Sequence: Synthetic oligonucleotide
ggaggcaccccauagcaac

SEQ ID NO: 1994701 - RNA, 19 nt, Artificial Sequence
  Description of Artificial Sequence: Synthetic oligonucleotide
uacagguaugggguguuca

SEQ ID NO: 1994702 - RNA, 19 nt, Artificial Sequence
  Description of Artificial Sequence: Synthetic oligonucleotide
gucaccuugucaaagggaa

SEQ ID NO: 1994703 - RNA, 19 nt, Artificial Sequence
  Description of Artificial Sequence: Synthetic oligonucleotide
uccaugucuuccguaugcc

SEQ ID NO: 1994704 - RNA, 19 nt, Artificial Sequence
  Description of Artificial Sequence: Synthetic oligonucleotide
uccguaugccaggcaaacg

SEQ ID NO: 1994705 - RNA, 19 nt, Artificial Sequence
  Description of Artificial Sequence: Synthetic oligonucleotide
uccgaagugcagguaguug

SEQ ID NO: 1994706 - RNA, 19 nt, Artificial Sequence
  Description of Artificial Sequence: Synthetic oligonucleotide
caccccauagcaacuagca

SEQ ID NO: 1994707 - RNA, 19 nt, Artificial Sequence
  Description of Artificial Sequence: Synthetic oligonucleotide
auggagaucuucaccauau

SEQ ID NO: 1994708 - RNA, 19 nt, Artificial Sequence
  Description of Artificial Sequence: Synthetic oligonucleotide
uccauucuucagaagccuu

SEQ ID NO: 1994709 - RNA, 19 nt, Artificial Sequence
  Description of Artificial Sequence: Synthetic oligonucleotide
uuuccacaguuuguagcgc

SEQ ID NO: 1994710 - RNA, 19 nt, Artificial Sequence
  Description of Artificial Sequence: Synthetic oligonucleotide
acggguaaggcaaguagug

SEQ ID NO: 1994711 - RNA, 19 nt, Artificial Sequence
  Description of Artificial Sequence: Synthetic oligonucleotide
ugucaaagggaaugccaua

SEQ ID NO: 1994712 - RNA, 19 nt, Artificial Sequence
  Description of Artificial Sequence: Synthetic oligonucleotide
gggaaagugaucauaaacu

SEQ ID NO: 1994713 - RNA, 19 nt, Artificial Sequence
  Description of Artificial Sequence: Synthetic oligonucleotide
auggucuucagccggccaa

SEQ ID NO: 1994714 - RNA, 19 nt, Artificial Sequence
  Description of Artificial Sequence: Synthetic oligonucleotide
aguccaugucuuccguaug

SEQ ID NO: 1994715 - RNA, 19 nt, Artificial Sequence
  Description of Artificial Sequence: Synthetic oligonucleotide
acgaugucuuccacaugcc

SEQ ID NO: 1994716 - RNA, 19 nt, Artificial Sequence
  Description of Artificial Sequence: Synthetic oligonucleotide
caucugucaucguuugcuc

SEQ ID NO: 1994717 - RNA, 19 nt, Artificial Sequence
  Description of Artificial Sequence: Synthetic oligonucleotide
ugccauacuucuucagcau

SEQ ID NO: 1994718 - RNA, 19 nt, Artificial Sequence
  Description of Artificial Sequence: Synthetic oligonucleotide
gcaugauaaccauauggga

SEQ ID NO: 1994719 - RNA, 19 nt, Artificial Sequence
  Description of Artificial Sequence: Synthetic oligonucleotide
accauaugggaaagugauc

SEQ ID NO: 1994720 - RNA, 19 nt, Artificial Sequence
  Description of Artificial Sequence: Synthetic oligonucleotide
caaacgaugucuuccacau

SEQ ID NO: 1994721 - RNA, 19 nt, Artificial Sequence
  Description of Artificial Sequence: Synthetic oligonucleotide
uuccguaugccaggcaaac

SEQ ID NO: 1994722 - RNA, 19 nt, Artificial Sequence
  Description of Artificial Sequence: Synthetic oligonucleotide
uucugggaucaauggcuug

SEQ ID NO: 1994723 - RNA, 19 nt, Artificial Sequence
  Description of Artificial Sequence: Synthetic oligonucleotide
ugaugcuguacaaguccau

SEQ ID NO: 1994724 - RNA, 19 nt, Artificial Sequence
  Description of Artificial Sequence: Synthetic oligonucleotide
cuuugugggaggcacccca

SEQ ID NO: 1994725 - RNA, 19 nt, Artificial Sequence
  Description of Artificial Sequence: Synthetic oligonucleotide
uaugggguguucaccccuc

SEQ ID NO: 1994726 - RNA, 19 nt, Artificial Sequence
  Description of Artificial Sequence: Synthetic oligonucleotide
uccacaguuuguagcgcuc

SEQ ID NO: 1994727 - RNA, 19 nt, Artificial Sequence
  Description of Artificial Sequence: Synthetic oligonucleotide
ucucccgcuuccuggguca

SEQ ID NO: 1994728 - RNA, 19 nt, Artificial Sequence
  Description of Artificial Sequence: Synthetic oligonucleotide
cagccggccaauauuccac

SEQ ID NO: 1994729 - RNA, 19 nt, Artificial Sequence
  Description of Artificial Sequence: Synthetic oligonucleotide
gacuuuggcucuccgaagu

SEQ ID NO: 1994730 - RNA, 19 nt, Artificial Sequence
  Description of Artificial Sequence: Synthetic oligonucleotide
uugccguacucaauccauc

SEQ ID NO: 1994731 - RNA, 19 nt, Artificial Sequence
  Description of Artificial Sequence: Synthetic oligonucleotide
gggucaccuugucaaaggg

SEQ ID NO: 1994732 - RNA, 19 nt, Artificial Sequence
  Description of Artificial Sequence: Synthetic oligonucleotide
ucucacaguucugacuaaa

SEQ ID NO: 1994733 - RNA, 19 nt, Artificial Sequence
  Description of Artificial Sequence: Synthetic oligonucleotide
aagccgugguugaagccag

SEQ ID NO: 1994734 - RNA, 19 nt, Artificial Sequence
  Description of Artificial Sequence: Synthetic oligonucleotide
augcucagguggaacagag

SEQ ID NO: 1994735 - RNA, 19 nt, Artificial Sequence
  Description of Artificial Sequence: Synthetic oligonucleotide
auccauucuucagaagccu

SEQ ID NO: 1994736 - RNA, 19 nt, Artificial Sequence
  Description of Artificial Sequence: Synthetic oligonucleotide
guaugccaggcaaacgaug

SEQ ID NO: 1994737 - RNA, 19 nt, Artificial Sequence
  Description of Artificial Sequence: Synthetic oligonucleotide
ucaucuuguagcggagaaa

SEQ ID NO: 1994738 - RNA, 19 nt, Artificial Sequence
  Description of Artificial Sequence: Synthetic oligonucleotide
cagcuuugagcacuuccug

SEQ ID NO: 1994739 - RNA, 19 nt, Artificial Sequence
  Description of Artificial Sequence: Synthetic oligonucleotide
auccaucgacggguaaggc

SEQ ID NO: 1994740 - RNA, 19 nt, Artificial Sequence
  Description of Artificial Sequence: Synthetic oligonucleotide
uccagguaagggguagaca

SEQ ID NO: 1994741 - RNA, 19 nt, Artificial Sequence
  Description of Artificial Sequence: Synthetic oligonucleotide
ugucuuccguaugccaggc

SEQ ID NO: 1994742 - RNA, 19 nt, Artificial Sequence
  Description of Artificial Sequence: Synthetic oligonucleotide
uccuccagguaagggguag

SEQ ID NO: 1994743 - RNA, 19 nt, Artificial Sequence
  Description of Artificial Sequence: Synthetic oligonucleotide
uuugugggaggcaccccau

SEQ ID NO: 1994744 - RNA, 19 nt, Artificial Sequence
  Description of Artificial Sequence: Synthetic oligonucleotide
acacgaaacauggacccau

SEQ ID NO: 1994745 - RNA, 19 nt, Artificial Sequence
  Description of Artificial Sequence: Synthetic oligonucleotide
cguacucaauccaucgacg

SEQ ID NO: 1994746 - RNA, 19 nt, Artificial Sequence
  Description of Artificial Sequence: Synthetic oligonucleotide
augggaaagugaucauaaa

SEQ ID NO: 1994747 - RNA, 19 nt, Artificial Sequence
  Description of Artificial Sequence: Synthetic oligonucleotide
gaucucauugaacuccuuu

SEQ ID NO: 1994748 - RNA, 19 nt, Artificial Sequence
  Description of Artificial Sequence: Synthetic oligonucleotide
cagguaugggguguucacc

SEQ ID NO: 1994749 - RNA, 19 nt, Artificial Sequence
  Description of Artificial Sequence: Synthetic oligonucleotide
gugguugaagccagcauga

SEQ ID NO: 1994750 - RNA, 19 nt, Artificial Sequence
  Description of Artificial Sequence: Synthetic oligonucleotide
aggacacuagcaugcuggu

SEQ ID NO: 1994751 - RNA, 19 nt, Artificial Sequence
  Description of Artificial Sequence: Synthetic oligonucleotide
uggcuccgaagcuuucuca

SEQ ID NO: 1994752 - RNA, 19 nt, Artificial Sequence
  Description of Artificial Sequence: Synthetic oligonucleotide
cagccaguugugguaaagc

SEQ ID NO: 1994753 - RNA, 19 nt, Artificial Sequence
  Description of Artificial Sequence: Synthetic oligonucleotide
cagugaggggccuguuggg

SEQ ID NO: 1994754 - RNA, 19 nt, Artificial Sequence
  Description of Artificial Sequence: Synthetic oligonucleotide
ucaauccaucgacggguaa

SEQ ID NO: 1994755 - RNA, 19 nt, Artificial Sequence
  Description of Artificial Sequence: Synthetic oligonucleotide
agcaacuagcauggacccg

SEQ ID NO: 1994756 - RNA, 19 nt, Artificial Sequence
  Description of Artificial Sequence: Synthetic oligonucleotide
cuggugugggcagaguaug

SEQ ID NO: 1994757 - RNA, 19 nt, Artificial Sequence
  Description of Artificial Sequence: Synthetic oligonucleotide
caagacuuuggcucuccga

SEQ ID NO: 1994758 - RNA, 19 nt, Artificial Sequence
  Description of Artificial Sequence: Synthetic oligonucleotide
acuagcaugcuggugccau

SEQ ID NO: 1994759 - RNA, 19 nt, Artificial Sequence
  Description of Artificial Sequence: Synthetic oligonucleotide
cacauccauucuucagaag

SEQ ID NO: 1994760 - RNA, 19 nt, Artificial Sequence
  Description of Artificial Sequence: Synthetic oligonucleotide
cauggacccaucugucauc

SEQ ID NO: 1994761 - RNA, 19 nt, Artificial Sequence
  Description of Artificial Sequence: Synthetic oligonucleotide
cugagcaucgggaacacau

SEQ ID NO: 1994762 - RNA, 19 nt, Artificial Sequence
  Description of Artificial Sequence: Synthetic oligonucleotide
auacuucuucagcauuaau

SEQ ID NO: 1994763 - RNA, 19 nt, Artificial Sequence
  Description of Artificial Sequence: Synthetic oligonucleotide
uagacagguugaugucugu

SEQ ID NO: 1994764 - RNA, 19 nt, Artificial Sequence
  Description of Artificial Sequence: Synthetic oligonucleotide
ggagaucuucaccauaucu

SEQ ID NO: 1994765 - RNA, 19 nt, Artificial Sequence
  Description of Artificial Sequence: Synthetic oligonucleotide
uccgaagcuuucucacagu

SEQ ID NO: 1994766 - RNA, 19 nt, Artificial Sequence
  Description of Artificial Sequence: Synthetic oligonucleotide
gacguuccaggcguuuccc

SEQ ID NO: 1994767 - RNA, 19 nt, Artificial Sequence
  Description of Artificial Sequence: Synthetic oligonucleotide
aacagaguaccaagacuuu

SEQ ID NO: 1994768 - RNA, 19 nt, Artificial Sequence
  Description of Artificial Sequence: Synthetic oligonucleotide
cgugguugaagccagcaug

SEQ ID NO: 1994769 - RNA, 19 nt, Artificial Sequence
  Description of Artificial Sequence: Synthetic oligonucleotide
accauaucugcuugccgua

SEQ ID NO: 1994770 - RNA, 19 nt, Artificial Sequence
  Description of Artificial Sequence: Synthetic oligonucleotide
auaaacucucccgcuuccu

SEQ ID NO: 1994771 - RNA, 19 nt, Artificial Sequence
  Description of Artificial Sequence: Synthetic oligonucleotide
caugccgaaguacagguau

SEQ ID NO: 1994772 - RNA, 19 nt, Artificial Sequence
  Description of Artificial Sequence: Synthetic oligonucleotide
ggaacagaguaccaagacu

SEQ ID NO: 1994773 - RNA, 19 nt, Artificial Sequence
  Description of Artificial Sequence: Synthetic oligonucleotide
gaguauggucgauaacagu

SEQ ID NO: 1994774 - RNA, 19 nt, Artificial Sequence
  Description of Artificial Sequence: Synthetic oligonucleotide
ccguacucaauccaucgac

SEQ ID NO: 1994775 - RNA, 19 nt, Artificial Sequence
  Description of Artificial Sequence: Synthetic oligonucleotide
guggaacagaguaccaaga

SEQ ID NO: 1994776 - RNA, 19 nt, Artificial Sequence
  Description of Artificial Sequence: Synthetic oligonucleotide
agcggagaaaggccucaca

SEQ ID NO: 1994777 - RNA, 19 nt, Artificial Sequence
  Description of Artificial Sequence: Synthetic oligonucleotide
ggaacacauccauucuuca

SEQ ID NO: 1994778 - RNA, 19 nt, Artificial Sequence
  Description of Artificial Sequence: Synthetic oligonucleotide
cacaugccgaaguacaggu

SEQ ID NO: 1994779 - RNA, 19 nt, Artificial Sequence
  Description of Artificial Sequence: Synthetic oligonucleotide
cacgaaacauggacccauc

SEQ ID NO: 1994780 - RNA, 19 nt, Artificial Sequence
  Description of Artificial Sequence: Synthetic oligonucleotide
cuuugagcacuuccuggga

SEQ ID NO: 1994781 - RNA, 19 nt, Artificial Sequence
  Description of Artificial Sequence: Synthetic oligonucleotide
gacggguaaggcaaguagu

SEQ ID NO: 1994782 - RNA, 19 nt, Artificial Sequence
  Description of Artificial Sequence: Synthetic oligonucleotide
ggcagaguauggucgauaa

SEQ ID NO: 1994783 - RNA, 19 nt, Artificial Sequence
  Description of Artificial Sequence: Synthetic oligonucleotide
gagcauaaacagcagucuu

SEQ ID NO: 1994784 - RNA, 19 nt, Artificial Sequence
  Description of Artificial Sequence: Synthetic oligonucleotide
guaguccacuguccuucag

SEQ ID NO: 1994785 - RNA, 19 nt, Artificial Sequence
  Description of Artificial Sequence: Synthetic oligonucleotide
acccggacacugcacuucu

SEQ ID NO: 1994786 - RNA, 19 nt, Artificial Sequence
  Description of Artificial Sequence: Synthetic oligonucleotide
ggcuccgaagcuuucucac

SEQ ID NO: 1994787 - RNA, 19 nt, Artificial Sequence
  Description of Artificial Sequence: Synthetic oligonucleotide
ccacgcaaugagcauaaac

SEQ ID NO: 1994788 - RNA, 19 nt, Artificial Sequence
  Description of Artificial Sequence: Synthetic oligonucleotide
gguaugggguguucacccc

SEQ ID NO: 1994789 - RNA, 19 nt, Artificial Sequence
  Description of Artificial Sequence: Synthetic oligonucleotide
guguucaccccucaauggu

SEQ ID NO: 1994790 - RNA, 19 nt, Artificial Sequence
  Description of Artificial Sequence: Synthetic oligonucleotide
gggaacacauccauucuuc

SEQ ID NO: 1994791 - RNA, 19 nt, Artificial Sequence
  Description of Artificial Sequence: Synthetic oligonucleotide
auggucgauaacagugcug

SEQ ID NO: 1994792 - RNA, 19 nt, Artificial Sequence
  Description of Artificial Sequence: Synthetic oligonucleotide
ugaucccacucuccuucuc

SEQ ID NO: 1994793 - RNA, 19 nt, Artificial Sequence
  Description of Artificial Sequence: Synthetic oligonucleotide
agccggccaauauuccacu

SEQ ID NO: 1994794 - RNA, 19 nt, Artificial Sequence
  Description of Artificial Sequence: Synthetic oligonucleotide
caccugaugguaggucagg

SEQ ID NO: 1994795 - RNA, 19 nt, Artificial Sequence
  Description of Artificial Sequence: Synthetic oligonucleotide
agggguagacagguugaug

SEQ ID NO: 1994796 - RNA, 19 nt, Artificial Sequence
  Description of Artificial Sequence: Synthetic oligonucleotide
gggcccuccacgcaaugag

SEQ ID NO: 1994797 - RNA, 19 nt, Artificial Sequence
  Description of Artificial Sequence: Synthetic oligonucleotide
caucgacggguaaggcaag

SEQ ID NO: 1994798 - RNA, 19 nt, Artificial Sequence
  Description of Artificial Sequence: Synthetic oligonucleotide
cccucaauggugaucccac

SEQ ID NO: 1994799 - RNA, 19 nt, Artificial Sequence
  Description of Artificial Sequence: Synthetic oligonucleotide
cuggcuccgaagcuuucuc

SEQ ID NO: 1994800 - RNA, 19 nt, Artificial Sequence
  Description of Artificial Sequence: Synthetic oligonucleotide
accccucaauggugauccc

SEQ ID NO: 1994801 - RNA, 19 nt, Artificial Sequence
  Description of Artificial Sequence: Synthetic oligonucleotide
cauggacccggacacugca

SEQ ID NO: 1994802 - RNA, 19 nt, Artificial Sequence
  Description of Artificial Sequence: Synthetic oligonucleotide
ggcaagacguuccaggcgu

SEQ ID NO: 1994803 - RNA, 19 nt, Artificial Sequence
  Description of Artificial Sequence: Synthetic oligonucleotide
cuccagguaagggguagac

SEQ ID NO: 1994804 - RNA, 19 nt, Artificial Sequence
  Description of Artificial Sequence: Synthetic oligonucleotide
ccaucgacggguaaggcaa

SEQ ID NO: 1994805 - RNA, 19 nt, Artificial Sequence
  Description of Artificial Sequence: Synthetic oligonucleotide
gugggcagaguauggucga

SEQ ID NO: 1994806 - RNA, 19 nt, Artificial Sequence
  Description of Artificial Sequence: Synthetic oligonucleotide
accugaugguaggucagga

SEQ ID NO: 1994807 - RNA, 19 nt, Artificial Sequence
  Description of Artificial Sequence: Synthetic oligonucleotide
gcuugguccucugagucug

SEQ ID NO: 1994808 - RNA, 19 nt, Artificial Sequence
  Description of Artificial Sequence: Synthetic oligonucleotide
cuagcaugcuggugccauc

SEQ ID NO: 1994809 - RNA, 19 nt, Artificial Sequence
  Description of Artificial Sequence: Synthetic oligonucleotide
gaagccuuugugggaggca

SEQ ID NO: 1994810 - RNA, 19 nt, Artificial Sequence
  Description of Artificial Sequence: Synthetic oligonucleotide
cuccacgcaaugagcauaa

SEQ ID NO: 1994811 - RNA, 19 nt, Artificial Sequence
  Description of Artificial Sequence: Synthetic oligonucleotide
cuugccguacucaauccau

SEQ ID NO: 1994812 - RNA, 19 nt, Artificial Sequence
  Description of Artificial Sequence: Synthetic oligonucleotide
cauccuccuccagguaagg

SEQ ID NO: 1994813 - RNA, 19 nt, Artificial Sequence
  Description of Artificial Sequence: Synthetic oligonucleotide
gggcacuccucauucccag

SEQ ID NO: 1994814 - RNA, 19 nt, Artificial Sequence
  Description of Artificial Sequence: Synthetic oligonucleotide
acguuccaggcguuuccca

SEQ ID NO: 1994815 - RNA, 19 nt, Artificial Sequence
  Description of Artificial Sequence: Synthetic oligonucleotide
auggacccggacacugcac

SEQ ID NO: 1994816 - RNA, 19 nt, Artificial Sequence
  Description of Artificial Sequence: Synthetic oligonucleotide
caggaagaucacacagaca

SEQ ID NO: 1994817 - RNA, 19 nt, Artificial Sequence
  Description of Artificial Sequence: Synthetic oligonucleotide
uugugggaggcaccccaua

SEQ ID NO: 1994818 - RNA, 19 nt, Artificial Sequence
  Description of Artificial Sequence: Synthetic oligonucleotide
cauacuucuucagcauuaa

SEQ ID NO: 1994819 - RNA, 19 nt, Artificial Sequence
  Description of Artificial Sequence: Synthetic oligonucleotide
ccguaugccaggcaaacga

SEQ ID NO: 1994820 - RNA, 19 nt, Artificial Sequence
  Description of Artificial Sequence: Synthetic oligonucleotide
auuccaccugaugguaggu

SEQ ID NO: 1994821 - RNA, 19 nt, Artificial Sequence
  Description of Artificial Sequence: Synthetic oligonucleotide
cagggucaucuuguagcgg

SEQ ID NO: 1994822 - RNA, 19 nt, Artificial Sequence
  Description of Artificial Sequence: Synthetic oligonucleotide
ggguaguccacuguccuuc

SEQ ID NO: 1994823 - RNA, 19 nt, Artificial Sequence
  Description of Artificial Sequence: Synthetic oligonucleotide
guagcggagaaaggccuca

SEQ ID NO: 1994824 - RNA, 19 nt, Artificial Sequence
  Description of Artificial Sequence: Synthetic oligonucleotide
accuccucacaaacacauc

SEQ ID NO: 1994825 - RNA, 19 nt, Artificial Sequence
  Description of Artificial Sequence: Synthetic oligonucleotide
ccacaugccgaaguacagg

SEQ ID NO: 1994826 - RNA, 19 nt, Artificial Sequence
  Description of Artificial Sequence: Synthetic oligonucleotide
cgaugucuuccacaugccg

SEQ ID NO: 1994827 - RNA, 19 nt, Artificial Sequence
  Description of Artificial Sequence: Synthetic oligonucleotide
ggcuggaaccuccucacaa

SEQ ID NO: 1994828 - RNA, 19 nt, Artificial Sequence
  Description of Artificial Sequence: Synthetic oligonucleotide
ucaccccucaauggugauc

SEQ ID NO: 1994829 - RNA, 19 nt, Artificial Sequence
  Description of Artificial Sequence: Synthetic oligonucleotide
uucaccccucaauggugau

SEQ ID NO: 1994830 - RNA, 19 nt, Artificial Sequence
  Description of Artificial Sequence: Synthetic oligonucleotide
aguugugguaaagcacauu

SEQ ID NO: 1994831 - RNA, 19 nt, Artificial Sequence
  Description of Artificial Sequence: Synthetic oligonucleotide
gaucaauggcuugguccuc

SEQ ID NO: 1994832 - RNA, 19 nt, Artificial Sequence
  Description of Artificial Sequence: Synthetic oligonucleotide
guaugggguguucaccccu

SEQ ID NO: 1994833 - RNA, 19 nt, Artificial Sequence
  Description of Artificial Sequence: Synthetic oligonucleotide
cacauccauggagaucuuc

SEQ ID NO: 1994834 - RNA, 19 nt, Artificial Sequence
  Description of Artificial Sequence: Synthetic oligonucleotide
ggcaccccauagcaacuag

SEQ ID NO: 1994835 - RNA, 19 nt, Artificial Sequence
  Description of Artificial Sequence: Synthetic oligonucleotide
ccaaauuccaccugauggu

SEQ ID NO: 1994836 - RNA, 19 nt, Artificial Sequence
  Description of Artificial Sequence: Synthetic oligonucleotide
ucgacggguaaggcaagua

SEQ ID NO: 1994837 - RNA, 19 nt, Artificial Sequence
  Description of Artificial Sequence: Synthetic oligonucleotide
gccgaaguacagguauggg

SEQ ID NO: 1994838 - RNA, 19 nt, Artificial Sequence
  Description of Artificial Sequence: Synthetic oligonucleotide
agcgcucaggcuggaaccu

SEQ ID NO: 1994839 - RNA, 19 nt, Artificial Sequence
  Description of Artificial Sequence: Synthetic oligonucleotide
cgacggguaaggcaaguag

SEQ ID NO: 1994840 - RNA, 19 nt, Artificial Sequence
  Description of Artificial Sequence: Synthetic oligonucleotide
gucuuccacaugccgaagu

SEQ ID NO: 1994841 - RNA, 19 nt, Artificial Sequence
  Description of Artificial Sequence: Synthetic oligonucleotide
ggcguuucccaugcucagg

SEQ ID NO: 1994842 - RNA, 19 nt, Artificial Sequence
  Description of Artificial Sequence: Synthetic oligonucleotide
acagcacacgaaacaugga

SEQ ID NO: 1994843 - RNA, 19 nt, Artificial Sequence
  Description of Artificial Sequence: Synthetic oligonucleotide
ccaagacuuuggcucuccg

SEQ ID NO: 1994844 - RNA, 19 nt, Artificial Sequence
  Description of Artificial Sequence: Synthetic oligonucleotide
cucaauccaucgacgggua

SEQ ID NO: 1994845 - RNA, 19 nt, Artificial Sequence
  Description of Artificial Sequence: Synthetic oligonucleotide
gcagaguauggucgauaac

SEQ ID NO: 1994846 - RNA, 19 nt, Artificial Sequence
  Description of Artificial Sequence: Synthetic oligonucleotide
caaguccaugucuuccgua

SEQ ID NO: 1994847 - RNA, 19 nt, Artificial Sequence
  Description of Artificial Sequence: Synthetic oligonucleotide
cacuucuugcaggacacua

SEQ ID NO: 1994848 - RNA, 19 nt, Artificial Sequence
  Description of Artificial Sequence: Synthetic oligonucleotide
ggucaccuugucaaaggga

SEQ ID NO: 1994849 - RNA, 19 nt, Artificial Sequence
  Description of Artificial Sequence: Synthetic oligonucleotide
cggacacugcacuucuugc

SEQ ID NO: 1994850 - RNA, 19 nt, Artificial Sequence
  Description of Artificial Sequence: Synthetic oligonucleotide
cauaucugcuugccguacu

SEQ ID NO: 1994851 - RNA, 19 nt, Artificial Sequence
  Description of Artificial Sequence: Synthetic oligonucleotide
cauaugggaaagugaucau

SEQ ID NO: 1994852 - RNA, 19 nt, Artificial Sequence
  Description of Artificial Sequence: Synthetic oligonucleotide
ggcauuggcugagcaucgg

SEQ ID NO: 1994853 - RNA, 19 nt, Artificial Sequence
  Description of Artificial Sequence: Synthetic oligonucleotide
ggccaugaucucauugaac

SEQ ID NO: 1994854 - RNA, 19 nt, Artificial Sequence
  Description of Artificial Sequence: Synthetic oligonucleotide
cagcacaguugaagccgug

SEQ ID NO: 1994855 - RNA, 19 nt, Artificial Sequence
  Description of Artificial Sequence: Synthetic oligonucleotide
gguaguccacuguccuuca

SEQ ID NO: 1994856 - RNA, 19 nt, Artificial Sequence
  Description of Artificial Sequence: Synthetic oligonucleotide
ggcacuccucauucccagc

SEQ ID NO: 1994857 - RNA, 19 nt, Artificial Sequence
  Description of Artificial Sequence: Synthetic oligonucleotide
uucccaugcucagguggaa

SEQ ID NO: 1994858 - RNA, 19 nt, Artificial Sequence
  Description of Artificial Sequence: Synthetic oligonucleotide
uagcauggacccggacacu

SEQ ID NO: 1994859 - RNA, 19 nt, Artificial Sequence
  Description of Artificial Sequence: Synthetic oligonucleotide
cacacgaaacauggaccca

SEQ ID NO: 1994860 - RNA, 19 nt, Artificial Sequence
  Description of Artificial Sequence: Synthetic oligonucleotide
caacuagcauggacccgga

SEQ ID NO: 1994861 - RNA, 19 nt, Artificial Sequence
  Description of Artificial Sequence: Synthetic oligonucleotide
agggcccuccacgcaauga

SEQ ID NO: 1994862 - RNA, 19 nt, Artificial Sequence
  Description of Artificial Sequence: Synthetic oligonucleotide
gccguacucaauccaucga

SEQ ID NO: 1994863 - RNA, 19 nt, Artificial Sequence
  Description of Artificial Sequence: Synthetic oligonucleotide
gggccaugaucucauugaa

SEQ ID NO: 1994864 - RNA, 19 nt, Artificial Sequence
  Description of Artificial Sequence: Synthetic oligonucleotide
gggucaucuuguagcggag

SEQ ID NO: 1994865 - RNA, 19 nt, Artificial Sequence
  Description of Artificial Sequence: Synthetic oligonucleotide
guccacuguccuucagaaa

SEQ ID NO: 1994866 - RNA, 19 nt, Artificial Sequence
  Description of Artificial Sequence: Synthetic oligonucleotide
ccaggcaaacgaugucuuc

SEQ ID NO: 1994867 - RNA, 19 nt, Artificial Sequence
  Description of Artificial Sequence: Synthetic oligonucleotide
agcacauuucugggaucaa

SEQ ID NO: 1994868 - RNA, 19 nt, Artificial Sequence
  Description of Artificial Sequence: Synthetic oligonucleotide
guacagguaugggguguuc

SEQ ID NO: 1994869 - RNA, 19 nt, Artificial Sequence
  Description of Artificial Sequence: Synthetic oligonucleotide
gucuuccguaugccaggca

SEQ ID NO: 1994870 - RNA, 19 nt, Artificial Sequence
  Description of Artificial Sequence: Synthetic oligonucleotide
ggucaucuuguagcggaga

SEQ ID NO: 1994871 - RNA, 19 nt, Artificial Sequence
  Description of Artificial Sequence: Synthetic oligonucleotide
ggauggucuucagccggcc

SEQ ID NO: 1994872 - RNA, 19 nt, Artificial Sequence
  Description of Artificial Sequence: Synthetic oligonucleotide
ggucgauaacagugcuguc

SEQ ID NO: 1994873 - RNA, 19 nt, Artificial Sequence
  Description of Artificial Sequence: Synthetic oligonucleotide
gcaucgggaacacauccau

SEQ ID NO: 1994874 - RNA, 19 nt, Artificial Sequence
  Description of Artificial Sequence: Synthetic oligonucleotide
gcacaguugaagccguggu

SEQ ID NO: 1994875 - RNA, 19 nt, Artificial Sequence
  Description of Artificial Sequence: Synthetic oligonucleotide
guaaggcaaguaguggauu

SEQ ID NO: 1994876 - RNA, 19 nt, Artificial Sequence
  Description of Artificial Sequence: Synthetic oligonucleotide
gcguuucccaugcucaggu

SEQ ID NO: 1994877 - RNA, 19 nt, Artificial Sequence
  Description of Artificial Sequence: Synthetic oligonucleotide
ccauaucugcuugccguac

SEQ ID NO: 1994878 - RNA, 19 nt, Artificial Sequence
  Description of Artificial Sequence: Synthetic oligonucleotide
gcacuccucauucccagcu

SEQ ID NO: 1994879 - RNA, 19 nt, Artificial Sequence
  Description of Artificial Sequence: Synthetic oligonucleotide
ggacccaucugucaucguu

SEQ ID NO: 1994880 - RNA, 19 nt, Artificial Sequence
  Description of Artificial Sequence: Synthetic oligonucleotide
cacaguugaagccgugguu

SEQ ID NO: 1994881 - RNA, 19 nt, Artificial Sequence
  Description of Artificial Sequence: Synthetic oligonucleotide
acaugccgaaguacaggua

SEQ ID NO: 1994882 - RNA, 19 nt, Artificial Sequence
  Description of Artificial Sequence: Synthetic oligonucleotide
ccuguugggccaugaucuc

SEQ ID NO: 1994883 - RNA, 19 nt, Artificial Sequence
  Description of Artificial Sequence: Synthetic oligonucleotide
cgcucaggcuggaaccucc

SEQ ID NO: 1994884 - RNA, 19 nt, Artificial Sequence
  Description of Artificial Sequence: Synthetic oligonucleotide
ucccgcuuccugggucacc

SEQ ID NO: 1994885 - RNA, 19 nt, Artificial Sequence
  Description of Artificial Sequence: Synthetic oligonucleotide
uuguagcgcucaggcugga

SEQ ID NO: 1994886 - RNA, 19 nt, Artificial Sequence
  Description of Artificial Sequence: Synthetic oligonucleotide
uccacgcaaugagcauaaa

SEQ ID NO: 1994887 - RNA, 19 nt, Artificial Sequence
  Description of Artificial Sequence: Synthetic oligonucleotide
gugaucccacucuccuucu

SEQ ID NO: 1994888 - RNA, 19 nt, Artificial Sequence
  Description of Artificial Sequence: Synthetic oligonucleotide
gcauggacccggacacugc

SEQ ID NO: 1994889 - RNA, 19 nt, Artificial Sequence
  Description of Artificial Sequence: Synthetic oligonucleotide
ggcuugguccucugagucu

SEQ ID NO: 1994890 - RNA, 19 nt, Artificial Sequence
  Description of Artificial Sequence: Synthetic oligonucleotide
cagcacagugaggggccug

SEQ ID NO: 1994891 - RNA, 19 nt, Artificial Sequence
  Description of Artificial Sequence: Synthetic oligonucleotide
ggccaauauuccacucauc

SEQ ID NO: 1994892 - RNA, 19 nt, Artificial Sequence
  Description of Artificial Sequence: Synthetic oligonucleotide
cugucaucguuugcucucu

SEQ ID NO: 1994893 - RNA, 19 nt, Artificial Sequence
  Description of Artificial Sequence: Synthetic oligonucleotide
gccgugguugaagccagca

SEQ ID NO: 1994894 - RNA, 19 nt, Artificial Sequence
  Description of Artificial Sequence: Synthetic oligonucleotide
gccggccaauauuccacuc

SEQ ID NO: 1994895 - RNA, 19 nt, Artificial Sequence
  Description of Artificial Sequence: Synthetic oligonucleotide
agccucuggugugggcaga

SEQ ID NO: 1994896 - RNA, 19 nt, Artificial Sequence
  Description of Artificial Sequence: Synthetic oligonucleotide
caucgggaacacauccauu

SEQ ID NO: 1994897 - RNA, 19 nt, Artificial Sequence
  Description of Artificial Sequence: Synthetic oligonucleotide
gccauacuucuucagcauu

SEQ ID NO: 1994898 - RNA, 19 nt, Artificial Sequence
  Description of Artificial Sequence: Synthetic oligonucleotide
ccacaguuuguagcgcuca

SEQ ID NO: 1994899 - RNA, 19 nt, Artificial Sequence
  Description of Artificial Sequence: Synthetic oligonucleotide
ccuuugugggaggcacccc

SEQ ID NO: 1994900 - RNA, 19 nt, Artificial Sequence
  Description of Artificial Sequence: Synthetic oligonucleotide
guaguggauucagcacagu

SEQ ID NO: 1994901 - RNA, 19 nt, Artificial Sequence
  Description of Artificial Sequence: Synthetic oligonucleotide
gggaaaucagggucaucuu

SEQ ID NO: 1994902 - RNA, 19 nt, Artificial Sequence
  Description of Artificial Sequence: Synthetic oligonucleotide
cguuugcucucugcagggc

SEQ ID NO: 1994903 - RNA, 19 nt, Artificial Sequence
  Description of Artificial Sequence: Synthetic oligonucleotide
gcacauuucugggaucaau

SEQ ID NO: 1994904 - RNA, 19 nt, Artificial Sequence
  Description of Artificial Sequence: Synthetic oligonucleotide
gggcagaguauggucgaua

SEQ ID NO: 1994905 - RNA, 19 nt, Artificial Sequence
  Description of Artificial Sequence: Synthetic oligonucleotide
ccccucaauggugauccca

SEQ ID NO: 1994906 - RNA, 19 nt, Artificial Sequence
  Description of Artificial Sequence: Synthetic oligonucleotide
ccuccacgcaaugagcaua

SEQ ID NO: 1994907 - RNA, 19 nt, Artificial Sequence
  Description of Artificial Sequence: Synthetic oligonucleotide
ccgaagcuuucucacaguu

SEQ ID NO: 1994908 - RNA, 19 nt, Artificial Sequence
  Description of Artificial Sequence: Synthetic oligonucleotide
acacauccauggagaucuu

SEQ ID NO: 1994909 - RNA, 19 nt, Artificial Sequence
  Description of Artificial Sequence: Synthetic oligonucleotide
caagacguuccaggcguuu

SEQ ID NO: 1994910 - RNA, 19 nt, Artificial Sequence
  Description of Artificial Sequence: Synthetic oligonucleotide
cuccgaagugcagguaguu

SEQ ID NO: 1994911 - RNA, 19 nt, Artificial Sequence
  Description of Artificial Sequence: Synthetic oligonucleotide
gggguaguccacuguccuu

SEQ ID NO: 1994912 - RNA, 19 nt, Artificial Sequence
  Description of Artificial Sequence: Synthetic oligonucleotide
ccauggagaucuucaccau

SEQ ID NO: 1994913 - RNA, 19 nt, Artificial Sequence
  Description of Artificial Sequence: Synthetic oligonucleotide
cguaugccaggcaaacgau

SEQ ID NO: 1994914 - RNA, 19 nt, Artificial Sequence
  Description of Artificial Sequence: Synthetic oligonucleotide
gguaagggguagacagguu

SEQ ID NO: 1994915 - RNA, 19 nt, Artificial Sequence
  Description of Artificial Sequence: Synthetic oligonucleotide
gcgcucaggcuggaaccuc

SEQ ID NO: 1994916 - RNA, 19 nt, Artificial Sequence
  Description of Artificial Sequence: Synthetic oligonucleotide
gccaggcaaacgaugucuu

SEQ ID NO: 1994917 - RNA, 19 nt, Artificial Sequence
  Description of Artificial Sequence: Synthetic oligonucleotide
cguuccaggcguuucccau

SEQ ID NO: 1994918 - RNA, 19 nt, Artificial Sequence
  Description of Artificial Sequence: Synthetic oligonucleotide
cggccaauauuccacucau

SEQ ID NO: 1994919 - RNA, 19 nt, Artificial Sequence
  Description of Artificial Sequence: Synthetic oligonucleotide
gcucuccgaagugcaggua

SEQ ID NO: 1994920 - RNA, 19 nt, Artificial Sequence
  Description of Artificial Sequence: Synthetic oligonucleotide
ccgugguugaagccagcau

SEQ ID NO: 1994921 - RNA, 19 nt, Artificial Sequence
  Description of Artificial Sequence: Synthetic oligonucleotide
cccuccacgcaaugagcau

SEQ ID NO: 1994922 - RNA, 19 nt, Artificial Sequence
  Description of Artificial Sequence: Synthetic oligonucleotide
gcaagacguuccaggcguu

SEQ ID NO: 1994923 - RNA, 19 nt, Artificial Sequence
  Description of Artificial Sequence: Synthetic oligonucleotide
cgauaacagugcuguccuu

SEQ ID NO: 1994924 - RNA, 19 nt, Artificial Sequence
  Description of Artificial Sequence: Synthetic oligonucleotide
aaaccauagaggcagauga

SEQ ID NO: 1994925 - RNA, 19 nt, Artificial Sequence
  Description of Artificial Sequence: Synthetic oligonucleotide
ucuagagacaucuacagcu

SEQ ID NO: 1994926 - RNA, 19 nt, Artificial Sequence
  Description of Artificial Sequence: Synthetic oligonucleotide
aguaagaagaaccuggugu

SEQ ID NO: 1994927 - RNA, 19 nt, Artificial Sequence
  Description of Artificial Sequence: Synthetic oligonucleotide
acuggguugguacagcucc

SEQ ID NO: 1994928 - RNA, 19 nt, Artificial Sequence
  Description of Artificial Sequence: Synthetic oligonucleotide
uuaagcgaaggccaaaucu

SEQ ID NO: 1994929 - RNA, 19 nt, Artificial Sequence
  Description of Artificial Sequence: Synthetic oligonucleotide
cauacugucgccaggagcc

SEQ ID NO: 1994930 - RNA, 19 nt, Artificial Sequence
  Description of Artificial Sequence: Synthetic oligonucleotide
aagggcauuagaugguugg

SEQ ID NO: 1994931 - RNA, 19 nt, Artificial Sequence
  Description of Artificial Sequence: Synthetic oligonucleotide
ucauauacauacuggguag

SEQ ID NO: 1994932 - RNA, 19 nt, Artificial Sequence
  Description of Artificial Sequence: Synthetic oligonucleotide
uuuuggagcguucccagcg

SEQ ID NO: 1994933 - RNA, 19 nt, Artificial Sequence
  Description of Artificial Sequence: Synthetic oligonucleotide
ugauauagccgcuuaagcu

SEQ ID NO: 1994934 - RNA, 19 nt, Artificial Sequence
  Description of Artificial Sequence: Synthetic oligonucleotide
gauauagccgcuuaagcuc

SEQ ID NO: 1994935 - RNA, 19 nt, Artificial Sequence
  Description of Artificial Sequence: Synthetic oligonucleotide
ucggauuccaagcccaugg

SEQ ID NO: 1994936 - RNA, 19 nt, Artificial Sequence
  Description of Artificial Sequence: Synthetic oligonucleotide
ugacacacugaccaugggg

SEQ ID NO: 1994937 - RNA, 19 nt, Artificial Sequence
  Description of Artificial Sequence: Synthetic oligonucleotide
uuugguaaaggccuccucu

SEQ ID NO: 1994938 - RNA, 19 nt, Artificial Sequence
  Description of Artificial Sequence: Synthetic oligonucleotide
acugcuaggaaccuuccuc

SEQ ID NO: 1994939 - RNA, 19 nt, Artificial Sequence
  Description of Artificial Sequence: Synthetic oligonucleotide
ugaaggcuaaugaaguacc

SEQ ID NO: 1994940 - RNA, 19 nt, Artificial Sequence
  Description of Artificial Sequence: Synthetic oligonucleotide
ucuuggauguuacugguac

SEQ ID NO: 1994941 - RNA, 19 nt, Artificial Sequence
  Description of Artificial Sequence: Synthetic oligonucleotide
ucuuuauucgccucccucc

SEQ ID NO: 1994942 - RNA, 19 nt, Artificial Sequence
  Description of Artificial Sequence: Synthetic oligonucleotide
aaaucucuuuauucgccuc

SEQ ID NO: 1994943 - RNA, 19 nt, Artificial Sequence
  Description of Artificial Sequence: Synthetic oligonucleotide
uuuguuacgggguucuggc

SEQ ID NO: 1994944 - RNA, 19 nt, Artificial Sequence
  Description of Artificial Sequence: Synthetic oligonucleotide
ugguguacggcuuuuggag

SEQ ID NO: 1994945 - RNA, 19 nt, Artificial Sequence
  Description of Artificial Sequence: Synthetic oligonucleotide
auagaggcagaugacacac

SEQ ID NO: 1994946 - RNA, 19 nt, Artificial Sequence
  Description of Artificial Sequence: Synthetic oligonucleotide
ugugagaucuuguggaucu

SEQ ID NO: 1994947 - RNA, 19 nt, Artificial Sequence
  Description of Artificial Sequence: Synthetic oligonucleotide
ucuguggcaccucaugggg

SEQ ID NO: 1994948 - RNA, 19 nt, Artificial Sequence
  Description of Artificial Sequence: Synthetic oligonucleotide
aguaguaggaggcugcuga

SEQ ID NO: 1994949 - RNA, 19 nt, Artificial Sequence
  Description of Artificial Sequence: Synthetic oligonucleotide
guuacugguaccuuuugug

SEQ ID NO: 1994950 - RNA, 19 nt, Artificial Sequence
  Description of Artificial Sequence: Synthetic oligonucleotide
gauguagcgagcgaggcag

SEQ ID NO: 1994951 - RNA, 19 nt, Artificial Sequence
  Description of Artificial Sequence: Synthetic oligonucleotide
acggauggagaucuguggc

SEQ ID NO: 1994952 - RNA, 19 nt, Artificial Sequence
  Description of Artificial Sequence: Synthetic oligonucleotide
uagcauagauuucugaguc

SEQ ID NO: 1994953 - RNA, 19 nt, Artificial Sequence
  Description of Artificial Sequence: Synthetic oligonucleotide
agaagaaccugguguacgg

SEQ ID NO: 1994954 - RNA, 19 nt, Artificial Sequence
  Description of Artificial Sequence: Synthetic oligonucleotide
ucugauauagccgcuuaag

SEQ ID NO: 1994955 - RNA, 19 nt, Artificial Sequence
  Description of Artificial Sequence: Synthetic oligonucleotide
aggccaaaucucuuuauuc

SEQ ID NO: 1994956 - RNA, 19 nt, Artificial Sequence
  Description of Artificial Sequence: Synthetic oligonucleotide
auauacauacuggguagcc

SEQ ID NO: 1994957 - RNA, 19 nt, Artificial Sequence
  Description of Artificial Sequence: Synthetic oligonucleotide
uaagcgaaggccaaaucuc

SEQ ID NO: 1994958 - RNA, 19 nt, Artificial Sequence
  Description of Artificial Sequence: Synthetic oligonucleotide
aaggcuaaugaaguaccgg

SEQ ID NO: 1994959 - RNA, 19 nt, Artificial Sequence
  Description of Artificial Sequence: Synthetic oligonucleotide
ggaaguagugguaacaggg

SEQ ID NO: 1994960 - RNA, 19 nt, Artificial Sequence
  Description of Artificial Sequence: Synthetic oligonucleotide
ucucauauacauacugggu

SEQ ID NO: 1994961 - RNA, 19 nt, Artificial Sequence
  Description of Artificial Sequence: Synthetic oligonucleotide
uuccagaguaguaggaggc

SEQ ID NO: 1994962 - RNA, 19 nt, Artificial Sequence
  Description of Artificial Sequence: Synthetic oligonucleotide
uagggaaguagacuguucu

SEQ ID NO: 1994963 - RNA, 19 nt, Artificial Sequence
  Description of Artificial Sequence: Synthetic oligonucleotide
auagauuucugagucucac

SEQ ID NO: 1994964 - RNA, 19 nt, Artificial Sequence
  Description of Artificial Sequence: Synthetic oligonucleotide
uugucuguuaagcgaaggc

SEQ ID NO: 1994965 - RNA, 19 nt, Artificial Sequence
  Description of Artificial Sequence: Synthetic oligonucleotide
guugguacagcuccauggg

SEQ ID NO: 1994966 - RNA, 19 nt, Artificial Sequence
  Description of Artificial Sequence: Synthetic oligonucleotide
uacggauggagaucugugg

SEQ ID NO: 1994967 - RNA, 19 nt, Artificial Sequence
  Description of Artificial Sequence: Synthetic oligonucleotide
cuggaaucuucucauauac

SEQ ID NO: 1994968 - RNA, 19 nt, Artificial Sequence
  Description of Artificial Sequence: Synthetic oligonucleotide
gaugacacacugaccaugg

SEQ ID NO: 1994969 - RNA, 19 nt, Artificial Sequence
  Description of Artificial Sequence: Synthetic oligonucleotide
uaccagaccuguaugcucc

SEQ ID NO: 1994970 - RNA, 19 nt, Artificial Sequence
  Description of Artificial Sequence: Synthetic oligonucleotide
cuaaugaaguaccgguucc

SEQ ID NO: 1994971 - RNA, 19 nt, Artificial Sequence
  Description of Artificial Sequence: Synthetic oligonucleotide
ugaaguaccgguuccguuc

SEQ ID NO: 1994972 - RNA, 19 nt, Artificial Sequence
  Description of Artificial Sequence: Synthetic oligonucleotide
agacaucuacagcugacuc

SEQ ID NO: 1994973 - RNA, 19 nt, Artificial Sequence
  Description of Artificial Sequence: Synthetic oligonucleotide
ucauacugucgccaggagc

SEQ ID NO: 1994974 - RNA, 19 nt, Artificial Sequence
  Description of Artificial Sequence: Synthetic oligonucleotide
uggaaguagugguaacagg

SEQ ID NO: 1994975 - RNA, 19 nt, Artificial Sequence
  Description of Artificial Sequence: Synthetic oligonucleotide
gguugguacagcuccaugg

SEQ ID NO: 1994976 - RNA, 19 nt, Artificial Sequence
  Description of Artificial Sequence: Synthetic oligonucleotide
acaucuacagcugacucag

SEQ ID NO: 1994977 - RNA, 19 nt, Artificial Sequence
  Description of Artificial Sequence: Synthetic oligonucleotide
aagaaccugguguacggcu

SEQ ID NO: 1994978 - RNA, 19 nt, Artificial Sequence
  Description of Artificial Sequence: Synthetic oligonucleotide
uucugagucucacccagcc

SEQ ID NO: 1994979 - RNA, 19 nt, Artificial Sequence
  Description of Artificial Sequence: Synthetic oligonucleotide
aguacugcuaggaaccuuc

SEQ ID NO: 1994980 - RNA, 19 nt, Artificial Sequence
  Description of Artificial Sequence: Synthetic oligonucleotide
agucccgaguccuucgagc

SEQ ID NO: 1994981 - RNA, 19 nt, Artificial Sequence
  Description of Artificial Sequence: Synthetic oligonucleotide
ggccaaaucucuuuauucg

SEQ ID NO: 1994982 - RNA, 19 nt, Artificial Sequence
  Description of Artificial Sequence: Synthetic oligonucleotide
gaggcuucccagaaggugg

SEQ ID NO: 1994983 - RNA, 19 nt, Artificial Sequence
  Description of Artificial Sequence: Synthetic oligonucleotide
guaggugggaguaagaaga

SEQ ID NO: 1994984 - RNA, 19 nt, Artificial Sequence
  Description of Artificial Sequence: Synthetic oligonucleotide
ugccucaaggucaaugaug

SEQ ID NO: 1994985 - RNA, 19 nt, Artificial Sequence
  Description of Artificial Sequence: Synthetic oligonucleotide
uuacggauggagaucugug

SEQ ID NO: 1994986 - RNA, 19 nt, Artificial Sequence
  Description of Artificial Sequence: Synthetic oligonucleotide
uggaggaucuagcauagau

SEQ ID NO: 1994987 - RNA, 19 nt, Artificial Sequence
  Description of Artificial Sequence: Synthetic oligonucleotide
ugaguaccagaccuguaug

SEQ ID NO: 1994988 - RNA, 19 nt, Artificial Sequence
  Description of Artificial Sequence: Synthetic oligonucleotide
cauggcugugccuaguccc

SEQ ID NO: 1994989 - RNA, 19 nt, Artificial Sequence
  Description of Artificial Sequence: Synthetic oligonucleotide
cugcuaggaaccuuccucg

SEQ ID NO: 1994990 - RNA, 19 nt, Artificial Sequence
  Description of Artificial Sequence: Synthetic oligonucleotide
aggcuaaugaaguaccggu

SEQ ID NO: 1994991 - RNA, 19 nt, Artificial Sequence
  Description of Artificial Sequence: Synthetic oligonucleotide
ugagcccuuuguuacgggg

SEQ ID NO: 1994992 - RNA, 19 nt, Artificial Sequence
  Description of Artificial Sequence: Synthetic oligonucleotide
gaguaccagaccuguaugc

SEQ ID NO: 1994993 - RNA, 19 nt, Artificial Sequence
  Description of Artificial Sequence: Synthetic oligonucleotide
uguuacugguaccuuuugu

SEQ ID NO: 1994994 - RNA, 19 nt, Artificial Sequence
  Description of Artificial Sequence: Synthetic oligonucleotide
auacauacuggguagccau

SEQ ID NO: 1994995 - RNA, 19 nt, Artificial Sequence
  Description of Artificial Sequence: Synthetic oligonucleotide
gcagaugacacacugacca

SEQ ID NO: 1994996 - RNA, 19 nt, Artificial Sequence
  Description of Artificial Sequence: Synthetic oligonucleotide
accgguuccguucugccuc

SEQ ID NO: 1994997 - RNA, 19 nt, Artificial Sequence
  Description of Artificial Sequence: Synthetic oligonucleotide
cagcuagggaaguagacug

SEQ ID NO: 1994998 - RNA, 19 nt, Artificial Sequence
  Description of Artificial Sequence: Synthetic oligonucleotide
uuuugucuguuaagcgaag

SEQ ID NO: 1994999 - RNA, 19 nt, Artificial Sequence
  Description of Artificial Sequence: Synthetic oligonucleotide
agaccuguaugcuccuugg

SEQ ID NO: 1995000 - RNA, 19 nt, Artificial Sequence
  Description of Artificial Sequence: Synthetic oligonucleotide
ugacugggcagcuagggaa

SEQ ID NO: 1995001 - RNA, 19 nt, Artificial Sequence
  Description of Artificial Sequence: Synthetic oligonucleotide
uagccauggguagaguugg

SEQ ID NO: 1995002 - RNA, 19 nt, Artificial Sequence
  Description of Artificial Sequence: Synthetic oligonucleotide
uaacaggguguuuugguaa

SEQ ID NO: 1995003 - RNA, 19 nt, Artificial Sequence
  Description of Artificial Sequence: Synthetic oligonucleotide
gaaggcuaaugaaguaccg

SEQ ID NO: 1995004 - RNA, 19 nt, Artificial Sequence
  Description of Artificial Sequence: Synthetic oligonucleotide
cuuuauucgccucccuccc

SEQ ID NO: 1995005 - RNA, 19 nt, Artificial Sequence
  Description of Artificial Sequence: Synthetic oligonucleotide
guguacggcuuuuggagcg

SEQ ID NO: 1995006 - RNA, 19 nt, Artificial Sequence
  Description of Artificial Sequence: Synthetic oligonucleotide
cuagagacaucuacagcug

SEQ ID NO: 1995007 - RNA, 19 nt, Artificial Sequence
  Description of Artificial Sequence: Synthetic oligonucleotide
cauagagcauggcugugcc

SEQ ID NO: 1995008 - RNA, 19 nt, Artificial Sequence
  Description of Artificial Sequence: Synthetic oligonucleotide
uccuguuggcgcaagcucu

SEQ ID NO: 1995009 - RNA, 19 nt, Artificial Sequence
  Description of Artificial Sequence: Synthetic oligonucleotide
ucuuccuggaaaccauaga

SEQ ID NO: 1995010 - RNA, 19 nt, Artificial Sequence
  Description of Artificial Sequence: Synthetic oligonucleotide
cuuuguuacgggguucugg

SEQ ID NO: 1995011 - RNA, 19 nt, Artificial Sequence
  Description of Artificial Sequence: Synthetic oligonucleotide
aaccauagaggcagaugac

SEQ ID NO: 1995012 - RNA, 19 nt, Artificial Sequence
  Description of Artificial Sequence: Synthetic oligonucleotide
uucccagcgagcacagucc

SEQ ID NO: 1995013 - RNA, 19 nt, Artificial Sequence
  Description of Artificial Sequence: Synthetic oligonucleotide
gacaucuacagcugacuca

SEQ ID NO: 1995014 - RNA, 19 nt, Artificial Sequence
  Description of Artificial Sequence: Synthetic oligonucleotide
aaugaaguaccgguuccgu

SEQ ID NO: 1995015 - RNA, 19 nt, Artificial Sequence
  Description of Artificial Sequence: Synthetic oligonucleotide
gaggaucuagcauagauuu

SEQ ID NO: 1995016 - RNA, 19 nt, Artificial Sequence
  Description of Artificial Sequence: Synthetic oligonucleotide
ucguggaggaucuagcaua

SEQ ID NO: 1995017 - RNA, 19 nt, Artificial Sequence
  Description of Artificial Sequence: Synthetic oligonucleotide
auucgccucccucccaccc

SEQ ID NO: 1995018 - RNA, 19 nt, Artificial Sequence
  Description of Artificial Sequence: Synthetic oligonucleotide
agaucguggaggaucuagc

SEQ ID NO: 1995019 - RNA, 19 nt, Artificial Sequence
  Description of Artificial Sequence: Synthetic oligonucleotide
acauacuggguagccaugg

SEQ ID NO: 1995020 - RNA, 19 nt, Artificial Sequence
  Description of Artificial Sequence: Synthetic oligonucleotide
uagagacaucuacagcuga

SEQ ID NO: 1995021 - RNA, 19 nt, Artificial Sequence
  Description of Artificial Sequence: Synthetic oligonucleotide
gucgccaggagccacgacc

SEQ ID NO: 1995022 - RNA, 19 nt, Artificial Sequence
  Description of Artificial Sequence: Synthetic oligonucleotide
uuauucgccucccucccac

SEQ ID NO: 1995023 - RNA, 19 nt, Artificial Sequence
  Description of Artificial Sequence: Synthetic oligonucleotide
uguuacgggguucuggcuu

SEQ ID NO: 1995024 - RNA, 19 nt, Artificial Sequence
  Description of Artificial Sequence: Synthetic oligonucleotide
aacaggguguuuugguaaa

SEQ ID NO: 1995025 - RNA, 19 nt, Artificial Sequence
  Description of Artificial Sequence: Synthetic oligonucleotide
augguugggauccucuaga

SEQ ID NO: 1995026 - RNA, 19 nt, Artificial Sequence
  Description of Artificial Sequence: Synthetic oligonucleotide
acggcuuuuggagcguucc

SEQ ID NO: 1995027 - RNA, 19 nt, Artificial Sequence
  Description of Artificial Sequence: Synthetic oligonucleotide
aguaccgguuccguucugc

SEQ ID NO: 1995028 - RNA, 19 nt, Artificial Sequence
  Description of Artificial Sequence: Synthetic oligonucleotide
uacagcugacucagguucc

SEQ ID NO: 1995029 - RNA, 19 nt, Artificial Sequence
  Description of Artificial Sequence: Synthetic oligonucleotide
agagacaucuacagcugac

SEQ ID NO: 1995030 - RNA, 19 nt, Artificial Sequence
  Description of Artificial Sequence: Synthetic oligonucleotide
guugacugggcagcuaggg

SEQ ID NO: 1995031 - RNA, 19 nt, Artificial Sequence
  Description of Artificial Sequence: Synthetic oligonucleotide
cucuagagacaucuacagc

SEQ ID NO: 1995032 - RNA, 19 nt, Artificial Sequence
  Description of Artificial Sequence: Synthetic oligonucleotide
uccucggauuccaagccca

SEQ ID NO: 1995033 - RNA, 19 nt, Artificial Sequence
  Description of Artificial Sequence: Synthetic oligonucleotide
caccaguacugcuaggaac

SEQ ID NO: 1995034 - RNA, 19 nt, Artificial Sequence
  Description of Artificial Sequence: Synthetic oligonucleotide
auacuggguagccaugggu

SEQ ID NO: 1995035 - RNA, 19 nt, Artificial Sequence
  Description of Artificial Sequence: Synthetic oligonucleotide
caguucuuggauguuacug

SEQ ID NO: 1995036 - RNA, 19 nt, Artificial Sequence
  Description of Artificial Sequence: Synthetic oligonucleotide
ugguugggauccucuagag

SEQ ID NO: 1995037 - RNA, 19 nt, Artificial Sequence
  Description of Artificial Sequence: Synthetic oligonucleotide
gaucguggaggaucuagca

SEQ ID NO: 1995038 - RNA, 19 nt, Artificial Sequence
  Description of Artificial Sequence: Synthetic oligonucleotide
uguuuugguaaaggccucc

SEQ ID NO: 1995039 - RNA, 19 nt, Artificial Sequence
  Description of Artificial Sequence: Synthetic oligonucleotide
uuuuccugcugucucugau

SEQ ID NO: 1995040 - RNA, 19 nt, Artificial Sequence
  Description of Artificial Sequence: Synthetic oligonucleotide
cuguaugcuccuuggcccg

SEQ ID NO: 1995041 - RNA, 19 nt, Artificial Sequence
  Description of Artificial Sequence: Synthetic oligonucleotide
cauauacauacuggguagc

SEQ ID NO: 1995042 - RNA, 19 nt, Artificial Sequence
  Description of Artificial Sequence: Synthetic oligonucleotide
gguaggugggaguaagaag

SEQ ID NO: 1995043 - RNA, 19 nt, Artificial Sequence
  Description of Artificial Sequence: Synthetic oligonucleotide
uggcacaguacuccccucc

SEQ ID NO: 1995044 - RNA, 19 nt, Artificial Sequence
  Description of Artificial Sequence: Synthetic oligonucleotide
guuggcgcaagcucucugc

SEQ ID NO: 1995045 - RNA, 19 nt, Artificial Sequence
  Description of Artificial Sequence: Synthetic oligonucleotide
caguugacugggcagcuag

SEQ ID NO: 1995046 - RNA, 19 nt, Artificial Sequence
  Description of Artificial Sequence: Synthetic oligonucleotide
gaucauacugucgccagga

SEQ ID NO: 1995047 - RNA, 19 nt, Artificial Sequence
  Description of Artificial Sequence: Synthetic oligonucleotide
agugguaacaggguguuuu

SEQ ID NO: 1995048 - RNA, 19 nt, Artificial Sequence
  Description of Artificial Sequence: Synthetic oligonucleotide
uuuggagcguucccagcga

SEQ ID NO: 1995049 - RNA, 19 nt, Artificial Sequence
  Description of Artificial Sequence: Synthetic oligonucleotide
uacauacuggguagccaug

SEQ ID NO: 1995050 - RNA, 19 nt, Artificial Sequence
  Description of Artificial Sequence: Synthetic oligonucleotide
uuuugguaaaggccuccuc

SEQ ID NO: 1995051 - RNA, 19 nt, Artificial Sequence
  Description of Artificial Sequence: Synthetic oligonucleotide
gauuucugagucucaccca

SEQ ID NO: 1995052 - RNA, 19 nt, Artificial Sequence
  Description of Artificial Sequence: Synthetic oligonucleotide
uuguggaucugcucaucug

SEQ ID NO: 1995053 - RNA, 19 nt, Artificial Sequence
  Description of Artificial Sequence: Synthetic oligonucleotide
uugggauccucuagagaca

SEQ ID NO: 1995054 - RNA, 19 nt, Artificial Sequence
  Description of Artificial Sequence: Synthetic oligonucleotide
uuuauucgccucccuccca

SEQ ID NO: 1995055 - RNA, 19 nt, Artificial Sequence
  Description of Artificial Sequence: Synthetic oligonucleotide
uguuaagcgaaggccaaau

SEQ ID NO: 1995056 - RNA, 19 nt, Artificial Sequence
  Description of Artificial Sequence: Synthetic oligonucleotide
uuccuguuggcgcaagcuc

SEQ ID NO: 1995057 - RNA, 19 nt, Artificial Sequence
  Description of Artificial Sequence: Synthetic oligonucleotide
uccguucugccucaagguc

SEQ ID NO: 1995058 - RNA, 19 nt, Artificial Sequence
  Description of Artificial Sequence: Synthetic oligonucleotide
agcauggcugugccuaguc

SEQ ID NO: 1995059 - RNA, 19 nt, Artificial Sequence
  Description of Artificial Sequence: Synthetic oligonucleotide
guagccauggguagaguug

SEQ ID NO: 1995060 - RNA, 19 nt, Artificial Sequence
  Description of Artificial Sequence: Synthetic oligonucleotide
ucgccaggagccacgacca

SEQ ID NO: 1995061 - RNA, 19 nt, Artificial Sequence
  Description of Artificial Sequence: Synthetic oligonucleotide
ccuccgaucauacugucgc

SEQ ID NO: 1995062 - RNA, 19 nt, Artificial Sequence
  Description of Artificial Sequence: Synthetic oligonucleotide
uuggagcguucccagcgag

SEQ ID NO: 1995063 - RNA, 19 nt, Artificial Sequence
  Description of Artificial Sequence: Synthetic oligonucleotide
agcauagauuucugagucu

SEQ ID NO: 1995064 - RNA, 19 nt, Artificial Sequence
  Description of Artificial Sequence: Synthetic oligonucleotide
cucuuuauucgccucccuc

SEQ ID NO: 1995065 - RNA, 19 nt, Artificial Sequence
  Description of Artificial Sequence: Synthetic oligonucleotide
gcuaaugaaguaccgguuc

SEQ ID NO: 1995066 - RNA, 19 nt, Artificial Sequence
  Description of Artificial Sequence: Synthetic oligonucleotide
aagcgaaggccaaaucucu

SEQ ID NO: 1995067 - RNA, 19 nt, Artificial Sequence
  Description of Artificial Sequence: Synthetic oligonucleotide
cauacuggguagccauggg

SEQ ID NO: 1995068 - RNA, 19 nt, Artificial Sequence
  Description of Artificial Sequence: Synthetic oligonucleotide
uguggcaccucauggggau

SEQ ID NO: 1995069 - RNA, 19 nt, Artificial Sequence
  Description of Artificial Sequence: Synthetic oligonucleotide
gauuccaagcccaugggcu

SEQ ID NO: 1995070 - RNA, 19 nt, Artificial Sequence
  Description of Artificial Sequence: Synthetic oligonucleotide
gucuguuaagcgaaggcca

SEQ ID NO: 1995071 - RNA, 19 nt, Artificial Sequence
  Description of Artificial Sequence: Synthetic oligonucleotide
uggauguagcgagcgaggc

SEQ ID NO: 1995072 - RNA, 19 nt, Artificial Sequence
  Description of Artificial Sequence: Synthetic oligonucleotide
ucucugauauagccgcuua

SEQ ID NO: 1995073 - RNA, 19 nt, Artificial Sequence
  Description of Artificial Sequence: Synthetic oligonucleotide
uccauggguugguuggggc

SEQ ID NO: 1995074 - RNA, 19 nt, Artificial Sequence
  Description of Artificial Sequence: Synthetic oligonucleotide
ccucuagagacaucuacag

SEQ ID NO: 1995075 - RNA, 19 nt, Artificial Sequence
  Description of Artificial Sequence: Synthetic oligonucleotide
ugcugauuugggccagccc

SEQ ID NO: 1995076 - RNA, 19 nt, Artificial Sequence
  Description of Artificial Sequence: Synthetic oligonucleotide
acgaccagaucguggagga

SEQ ID NO: 1995077 - RNA, 19 nt, Artificial Sequence
  Description of Artificial Sequence: Synthetic oligonucleotide
ugagucucacccagccucu

SEQ ID NO: 1995078 - RNA, 19 nt, Artificial Sequence
  Description of Artificial Sequence: Synthetic oligonucleotide
uccgaucauacugucgcca

SEQ ID NO: 1995079 - RNA, 19 nt, Artificial Sequence
  Description of Artificial Sequence: Synthetic oligonucleotide
gaccagaucguggaggauc

SEQ ID NO: 1995080 - RNA, 19 nt, Artificial Sequence
  Description of Artificial Sequence: Synthetic oligonucleotide
ucugagucucacccagccu

SEQ ID NO: 1995081 - RNA, 19 nt, Artificial Sequence
  Description of Artificial Sequence: Synthetic oligonucleotide
gccucaaggucaaugaugc

SEQ ID NO: 1995082 - RNA, 19 nt, Artificial Sequence
  Description of Artificial Sequence: Synthetic oligonucleotide
cacgaccagaucguggagg

SEQ ID NO: 1995083 - RNA, 19 nt, Artificial Sequence
  Description of Artificial Sequence: Synthetic oligonucleotide
gauuugggccagccccugg

SEQ ID NO: 1995084 - RNA, 19 nt, Artificial Sequence
  Description of Artificial Sequence: Synthetic oligonucleotide
aaagggcauuagaugguug

SEQ ID NO: 1995085 - RNA, 19 nt, Artificial Sequence
  Description of Artificial Sequence: Synthetic oligonucleotide
cuagcauagauuucugagu

SEQ ID NO: 1995086 - RNA, 19 nt, Artificial Sequence
  Description of Artificial Sequence: Synthetic oligonucleotide
caggguguuuugguaaagg

SEQ ID NO: 1995087 - RNA, 19 nt, Artificial Sequence
  Description of Artificial Sequence: Synthetic oligonucleotide
gaucuagcauagauuucug

SEQ ID NO: 1995088 - RNA, 19 nt, Artificial Sequence
  Description of Artificial Sequence: Synthetic oligonucleotide
gugccugugagaucuugug

SEQ ID NO: 1995089 - RNA, 19 nt, Artificial Sequence
  Description of Artificial Sequence: Synthetic oligonucleotide
aucauacugucgccaggag

SEQ ID NO: 1995090 - RNA, 19 nt, Artificial Sequence
  Description of Artificial Sequence: Synthetic oligonucleotide
auauagccgcuuaagcucu

SEQ ID NO: 1995091 - RNA, 19 nt, Artificial Sequence
  Description of Artificial Sequence: Synthetic oligonucleotide
augacacacugaccauggg

SEQ ID NO: 1995092 - RNA, 19 nt, Artificial Sequence
  Description of Artificial Sequence: Synthetic oligonucleotide
cagaucguggaggaucuag

SEQ ID NO: 1995093 - RNA, 19 nt, Artificial Sequence
  Description of Artificial Sequence: Synthetic oligonucleotide
accuuuuguggcacaguac

SEQ ID NO: 1995094 - RNA, 19 nt, Artificial Sequence
  Description of Artificial Sequence: Synthetic oligonucleotide
ugccuagucccuccuuggc

SEQ ID NO: 1995095 - RNA, 19 nt, Artificial Sequence
  Description of Artificial Sequence: Synthetic oligonucleotide
aucguggaggaucuagcau

SEQ ID NO: 1995096 - RNA, 19 nt, Artificial Sequence
  Description of Artificial Sequence: Synthetic oligonucleotide
uacugcuaggaaccuuccu

SEQ ID NO: 1995097 - RNA, 19 nt, Artificial Sequence
  Description of Artificial Sequence: Synthetic oligonucleotide
uaguaggaggcugcugaag

SEQ ID NO: 1995098 - RNA, 19 nt, Artificial Sequence
  Description of Artificial Sequence: Synthetic oligonucleotide
ucccagcgagcacaguccc

SEQ ID NO: 1995099 - RNA, 19 nt, Artificial Sequence
  Description of Artificial Sequence: Synthetic oligonucleotide
gcuaccaggccccuuuucc

SEQ ID NO: 1995100 - RNA, 19 nt, Artificial Sequence
  Description of Artificial Sequence: Synthetic oligonucleotide
guuggggcagcucuugcuc

SEQ ID NO: 1995101 - RNA, 19 nt, Artificial Sequence
  Description of Artificial Sequence: Synthetic oligonucleotide
guuaagcgaaggccaaauc

SEQ ID NO: 1995102 - RNA, 19 nt, Artificial Sequence
  Description of Artificial Sequence: Synthetic oligonucleotide
guaacaggguguuuuggua

SEQ ID NO: 1995103 - RNA, 19 nt, Artificial Sequence
  Description of Artificial Sequence: Synthetic oligonucleotide
ccugugagcccuuuguuac

SEQ ID NO: 1995104 - RNA, 19 nt, Artificial Sequence
  Description of Artificial Sequence: Synthetic oligonucleotide
gugccuagucccuccuugg

SEQ ID NO: 1995105 - RNA, 19 nt, Artificial Sequence
  Description of Artificial Sequence: Synthetic oligonucleotide
gaggaagaccugugagccc

SEQ ID NO: 1995106 - RNA, 19 nt, Artificial Sequence
  Description of Artificial Sequence: Synthetic oligonucleotide
ccuuccucggauuccaagc

SEQ ID NO: 1995107 - RNA, 19 nt, Artificial Sequence
  Description of Artificial Sequence: Synthetic oligonucleotide
gggguucuggcuuuaaguc

SEQ ID NO: 1995108 - RNA, 19 nt, Artificial Sequence
  Description of Artificial Sequence: Synthetic oligonucleotide
ucucuuuauucgccucccu

SEQ ID NO: 1995109 - RNA, 19 nt, Artificial Sequence
  Description of Artificial Sequence: Synthetic oligonucleotide
ugaguucauagagcauggc

SEQ ID NO: 1995110 - RNA, 19 nt, Artificial Sequence
  Description of Artificial Sequence: Synthetic oligonucleotide
augggcucccugugaguac

SEQ ID NO: 1995111 - RNA, 19 nt, Artificial Sequence
  Description of Artificial Sequence: Synthetic oligonucleotide
uuggugccuccgaucauac

SEQ ID NO: 1995112 - RNA, 19 nt, Artificial Sequence
  Description of Artificial Sequence: Synthetic oligonucleotide
ugggccagccccuggaauc

SEQ ID NO: 1995113 - RNA, 19 nt, Artificial Sequence
  Description of Artificial Sequence: Synthetic oligonucleotide
uucuuggauguuacuggua

SEQ ID NO: 1995114 - RNA, 19 nt, Artificial Sequence
  Description of Artificial Sequence: Synthetic oligonucleotide
ggauuccaagcccaugggc

SEQ ID NO: 1995115 - RNA, 19 nt, Artificial Sequence
  Description of Artificial Sequence: Synthetic oligonucleotide
agaaagggcauuagauggu

SEQ ID NO: 1995116 - RNA, 19 nt, Artificial Sequence
  Description of Artificial Sequence: Synthetic oligonucleotide
gaccuguaugcuccuuggc

SEQ ID NO: 1995117 - RNA, 19 nt, Artificial Sequence
  Description of Artificial Sequence: Synthetic oligonucleotide
guaccagaccuguaugcuc

SEQ ID NO: 1995118 - RNA, 19 nt, Artificial Sequence
  Description of Artificial Sequence: Synthetic oligonucleotide
ggaaguagacuguucugca

SEQ ID NO: 1995119 - RNA, 19 nt, Artificial Sequence
  Description of Artificial Sequence: Synthetic oligonucleotide
gguuccagaguaguaggag

SEQ ID NO: 1995120 - RNA, 19 nt, Artificial Sequence
  Description of Artificial Sequence: Synthetic oligonucleotide
uggaucugcucaucugaaa

SEQ ID NO: 1995121 - RNA, 19 nt, Artificial Sequence
  Description of Artificial Sequence: Synthetic oligonucleotide
uggagcguucccagcgagc

SEQ ID NO: 1995122 - RNA, 19 nt, Artificial Sequence
  Description of Artificial Sequence: Synthetic oligonucleotide
uguaugcuccuuggcccgg

SEQ ID NO: 1995123 - RNA, 19 nt, Artificial Sequence
  Description of Artificial Sequence: Synthetic oligonucleotide
guagcgagcgaggcagugg

SEQ ID NO: 1995124 - RNA, 19 nt, Artificial Sequence
  Description of Artificial Sequence: Synthetic oligonucleotide
cauagauuucugagucuca

SEQ ID NO: 1995125 - RNA, 19 nt, Artificial Sequence
  Description of Artificial Sequence: Synthetic oligonucleotide
ccaugugcuggauguagcg

SEQ ID NO: 1995126 - RNA, 19 nt, Artificial Sequence
  Description of Artificial Sequence: Synthetic oligonucleotide
guaccgguuccguucugcc

SEQ ID NO: 1995127 - RNA, 19 nt, Artificial Sequence
  Description of Artificial Sequence: Synthetic oligonucleotide
uguagcgagcgaggcagug

SEQ ID NO: 1995128 - RNA, 19 nt, Artificial Sequence
  Description of Artificial Sequence: Synthetic oligonucleotide
acgggguucuggcuuuaag

SEQ ID NO: 1995129 - RNA, 19 nt, Artificial Sequence
  Description of Artificial Sequence: Synthetic oligonucleotide
agcguucccagcgagcaca

SEQ ID NO: 1995130 - RNA, 19 nt, Artificial Sequence
  Description of Artificial Sequence: Synthetic oligonucleotide
gcuggauguagcgagcgag

SEQ ID NO: 1995131 - RNA, 19 nt, Artificial Sequence
  Description of Artificial Sequence: Synthetic oligonucleotide
cugguguacggcuuuugga

SEQ ID NO: 1995132 - RNA, 19 nt, Artificial Sequence
  Description of Artificial Sequence: Synthetic oligonucleotide
uccagaguaguaggaggcu

SEQ ID NO: 1995133 - RNA, 19 nt, Artificial Sequence
  Description of Artificial Sequence: Synthetic oligonucleotide
uggaaaccauagaggcaga

SEQ ID NO: 1995134 - RNA, 19 nt, Artificial Sequence
  Description of Artificial Sequence: Synthetic oligonucleotide
ugcuggauguagcgagcga

SEQ ID NO: 1995135 - RNA, 19 nt, Artificial Sequence
  Description of Artificial Sequence: Synthetic oligonucleotide
uuguuacgggguucuggcu

SEQ ID NO: 1995136 - RNA, 19 nt, Artificial Sequence
  Description of Artificial Sequence: Synthetic oligonucleotide
ugugaguaccagaccugua

SEQ ID NO: 1995137 - RNA, 19 nt, Artificial Sequence
  Description of Artificial Sequence: Synthetic oligonucleotide
ggaucuagcauagauuucu

SEQ ID NO: 1995138 - RNA, 19 nt, Artificial Sequence
  Description of Artificial Sequence: Synthetic oligonucleotide
cuccgaucauacugucgcc

SEQ ID NO: 1995139 - RNA, 19 nt, Artificial Sequence
  Description of Artificial Sequence: Synthetic oligonucleotide
uauucgccucccucccacc

SEQ ID NO: 1995140 - RNA, 19 nt, Artificial Sequence
  Description of Artificial Sequence: Synthetic oligonucleotide
uugguuggggcagcucuug

SEQ ID NO: 1995141 - RNA, 19 nt, Artificial Sequence
  Description of Artificial Sequence: Synthetic oligonucleotide
gugaguaccagaccuguau

SEQ ID NO: 1995142 - RNA, 19 nt, Artificial Sequence
  Description of Artificial Sequence: Synthetic oligonucleotide
gaaguaccgguuccguucu

SEQ ID NO: 1995143 - RNA, 19 nt, Artificial Sequence
  Description of Artificial Sequence: Synthetic oligonucleotide
uaccgguuccguucugccu

SEQ ID NO: 1995144 - RNA, 19 nt, Artificial Sequence
  Description of Artificial Sequence: Synthetic oligonucleotide
ggagguaggugggaguaag

SEQ ID NO: 1995145 - RNA, 19 nt, Artificial Sequence
  Description of Artificial Sequence: Synthetic oligonucleotide
ccauggguagaguuggcac

SEQ ID NO: 1995146 - RNA, 19 nt, Artificial Sequence
  Description of Artificial Sequence: Synthetic oligonucleotide
accagaucguggaggaucu

SEQ ID NO: 1995147 - RNA, 19 nt, Artificial Sequence
  Description of Artificial Sequence: Synthetic oligonucleotide
ccugguguacggcuuuugg

SEQ ID NO: 1995148 - RNA, 19 nt, Artificial Sequence
  Description of Artificial Sequence: Synthetic oligonucleotide
auagccgcuuaagcucuuc

SEQ ID NO: 1995149 - RNA, 19 nt, Artificial Sequence
  Description of Artificial Sequence: Synthetic oligonucleotide
acaggguguuuugguaaag

SEQ ID NO: 1995150 - RNA, 19 nt, Artificial Sequence
  Description of Artificial Sequence: Synthetic oligonucleotide
ggcugcugaaggcuaauga

SEQ ID NO: 1995151 - RNA, 19 nt, Artificial Sequence
  Description of Artificial Sequence: Synthetic oligonucleotide
caucuacagcugacucagg

SEQ ID NO: 1995152 - RNA, 19 nt, Artificial Sequence
  Description of Artificial Sequence: Synthetic oligonucleotide
acagucccgaguccuucga

SEQ ID NO: 1995153 - RNA, 19 nt, Artificial Sequence
  Description of Artificial Sequence: Synthetic oligonucleotide
ugauuugggccagccccug

SEQ ID NO: 1995154 - RNA, 19 nt, Artificial Sequence
  Description of Artificial Sequence: Synthetic oligonucleotide
aaguaccgguuccguucug

SEQ ID NO: 1995155 - RNA, 19 nt, Artificial Sequence
  Description of Artificial Sequence: Synthetic oligonucleotide
cugugagaucuuguggauc

SEQ ID NO: 1995156 - RNA, 19 nt, Artificial Sequence
  Description of Artificial Sequence: Synthetic oligonucleotide
acaguacuccccuccuuuu

SEQ ID NO: 1995157 - RNA, 19 nt, Artificial Sequence
  Description of Artificial Sequence: Synthetic oligonucleotide
cugcagaaagggcauuaga

SEQ ID NO: 1995158 - RNA, 19 nt, Artificial Sequence
  Description of Artificial Sequence: Synthetic oligonucleotide
uugggccagccccuggaau

SEQ ID NO: 1995159 - RNA, 19 nt, Artificial Sequence
  Description of Artificial Sequence: Synthetic oligonucleotide
ccagccucugcugauuugg

SEQ ID NO: 1995160 - RNA, 19 nt, Artificial Sequence
  Description of Artificial Sequence: Synthetic oligonucleotide
agccacgaccagaucgugg

SEQ ID NO: 1995161 - RNA, 19 nt, Artificial Sequence
  Description of Artificial Sequence: Synthetic oligonucleotide
agugccugugagaucuugu

SEQ ID NO: 1995162 - RNA, 19 nt, Artificial Sequence
  Description of Artificial Sequence: Synthetic oligonucleotide
agcccaugggcucccugug

SEQ ID NO: 1995163 - RNA, 19 nt, Artificial Sequence
  Description of Artificial Sequence: Synthetic oligonucleotide
gcauuagaugguugggauc

SEQ ID NO: 1995164 - RNA, 19 nt, Artificial Sequence
  Description of Artificial Sequence: Synthetic oligonucleotide
gauguuacugguaccuuuu

SEQ ID NO: 1995165 - RNA, 19 nt, Artificial Sequence
  Description of Artificial Sequence: Synthetic oligonucleotide
uguacggcuuuuggagcgu

SEQ ID NO: 1995166 - RNA, 19 nt, Artificial Sequence
  Description of Artificial Sequence: Synthetic oligonucleotide
uacggcuuuuggagcguuc

SEQ ID NO: 1995167 - RNA, 19 nt, Artificial Sequence
  Description of Artificial Sequence: Synthetic oligonucleotide
agcccuuuguuacgggguu

SEQ ID NO: 1995168 - RNA, 19 nt, Artificial Sequence
  Description of Artificial Sequence: Synthetic oligonucleotide
cacuggguugguacagcuc

SEQ ID NO: 1995169 - RNA, 19 nt, Artificial Sequence
  Description of Artificial Sequence: Synthetic oligonucleotide
uggcaguucuuggauguua

SEQ ID NO: 1995170 - RNA, 19 nt, Artificial Sequence
  Description of Artificial Sequence: Synthetic oligonucleotide
uaggaaccuuccucggauu

SEQ ID NO: 1995171 - RNA, 19 nt, Artificial Sequence
  Description of Artificial Sequence: Synthetic oligonucleotide
guaguaggaggcugcugaa

SEQ ID NO: 1995172 - RNA, 19 nt, Artificial Sequence
  Description of Artificial Sequence: Synthetic oligonucleotide
guacugcuaggaaccuucc

SEQ ID NO: 1995173 - RNA, 19 nt, Artificial Sequence
  Description of Artificial Sequence: Synthetic oligonucleotide
ugguaccuuuuguggcaca

SEQ ID NO: 1995174 - RNA, 19 nt, Artificial Sequence
  Description of Artificial Sequence: Synthetic oligonucleotide
cuaggaaccuuccucggau

SEQ ID NO: 1995175 - RNA, 19 nt, Artificial Sequence
  Description of Artificial Sequence: Synthetic oligonucleotide
ccgaucauacugucgccag

SEQ ID NO: 1995176 - RNA, 19 nt, Artificial Sequence
  Description of Artificial Sequence: Synthetic oligonucleotide
gguugguuggggcagcucu

SEQ ID NO: 1995177 - RNA, 19 nt, Artificial Sequence
  Description of Artificial Sequence: Synthetic oligonucleotide
guuacggauggagaucugu

SEQ ID NO: 1995178 - RNA, 19 nt, Artificial Sequence
  Description of Artificial Sequence: Synthetic oligonucleotide
cagcuccauggguugguug

SEQ ID NO: 1995179 - RNA, 19 nt, Artificial Sequence
  Description of Artificial Sequence: Synthetic oligonucleotide
agguuccagaguaguagga

SEQ ID NO: 1995180 - RNA, 19 nt, Artificial Sequence
  Description of Artificial Sequence: Synthetic oligonucleotide
cugguaccuuuuguggcac

SEQ ID NO: 1995181 - RNA, 19 nt, Artificial Sequence
  Description of Artificial Sequence: Synthetic oligonucleotide
gugggaguaagaagaaccu

SEQ ID NO: 1995182 - RNA, 19 nt, Artificial Sequence
  Description of Artificial Sequence: Synthetic oligonucleotide
caugugcuggauguagcga

SEQ ID NO: 1995183 - RNA, 19 nt, Artificial Sequence
  Description of Artificial Sequence: Synthetic oligonucleotide
agcuagggaaguagacugu

SEQ ID NO: 1995184 - RNA, 19 nt, Artificial Sequence
  Description of Artificial Sequence: Synthetic oligonucleotide
cucugauauagccgcuuaa

SEQ ID NO: 1995185 - RNA, 19 nt, Artificial Sequence
  Description of Artificial Sequence: Synthetic oligonucleotide
ccugugaguaccagaccug

SEQ ID NO: 1995186 - RNA, 19 nt, Artificial Sequence
  Description of Artificial Sequence: Synthetic oligonucleotide
uggauguuacugguaccuu

SEQ ID NO: 1995187 - RNA, 19 nt, Artificial Sequence
  Description of Artificial Sequence: Synthetic oligonucleotide
gcauggcugugccuagucc

SEQ ID NO: 1995188 - RNA, 19 nt, Artificial Sequence
  Description of Artificial Sequence: Synthetic oligonucleotide
gguugggauccucuagaga

SEQ ID NO: 1995189 - RNA, 19 nt, Artificial Sequence
  Description of Artificial Sequence: Synthetic oligonucleotide
ggagcguucccagcgagca

SEQ ID NO: 1995190 - RNA, 19 nt, Artificial Sequence
  Description of Artificial Sequence: Synthetic oligonucleotide
cucagguuccagaguagua

SEQ ID NO: 1995191 - RNA, 19 nt, Artificial Sequence
  Description of Artificial Sequence: Synthetic oligonucleotide
ggauguagcgagcgaggca

SEQ ID NO: 1995192 - RNA, 19 nt, Artificial Sequence
  Description of Artificial Sequence: Synthetic oligonucleotide
ggcauuagaugguugggau

SEQ ID NO: 1995193 - RNA, 19 nt, Artificial Sequence
  Description of Artificial Sequence: Synthetic oligonucleotide
ugccuccgaucauacuguc

SEQ ID NO: 1995194 - RNA, 19 nt, Artificial Sequence
  Description of Artificial Sequence: Synthetic oligonucleotide
cucggauuccaagcccaug

SEQ ID NO: 1995195 - RNA, 19 nt, Artificial Sequence
  Description of Artificial Sequence: Synthetic oligonucleotide
uacugucgccaggagccac

SEQ ID NO: 1995196 - RNA, 19 nt, Artificial Sequence
  Description of Artificial Sequence: Synthetic oligonucleotide
uauagccgcuuaagcucuu

SEQ ID NO: 1995197 - RNA, 19 nt, Artificial Sequence
  Description of Artificial Sequence: Synthetic oligonucleotide
gaaagggcauuagaugguu

SEQ ID NO: 1995198 - RNA, 19 nt, Artificial Sequence
  Description of Artificial Sequence: Synthetic oligonucleotide
ggcuuuuggagcguuccca

SEQ ID NO: 1995199 - RNA, 19 nt, Artificial Sequence
  Description of Artificial Sequence: Synthetic oligonucleotide
ggcagcuagggaaguagac

SEQ ID NO: 1995200 - RNA, 19 nt, Artificial Sequence
  Description of Artificial Sequence: Synthetic oligonucleotide
uggugccuccgaucauacu

SEQ ID NO: 1995201 - RNA, 19 nt, Artificial Sequence
  Description of Artificial Sequence: Synthetic oligonucleotide
aggcugcugaaggcuaaug

SEQ ID NO: 1995202 - RNA, 19 nt, Artificial Sequence
  Description of Artificial Sequence: Synthetic oligonucleotide
gagcguucccagcgagcac

SEQ ID NO: 1995203 - RNA, 19 nt, Artificial Sequence
  Description of Artificial Sequence: Synthetic oligonucleotide
cccaugggcucccugugag

SEQ ID NO: 1995204 - RNA, 19 nt, Artificial Sequence
  Description of Artificial Sequence: Synthetic oligonucleotide
guuuugguaaaggccuccu

SEQ ID NO: 1995205 - RNA, 19 nt, Artificial Sequence
  Description of Artificial Sequence: Synthetic oligonucleotide
cugauuugggccagccccu

SEQ ID NO: 1995206 - RNA, 19 nt, Artificial Sequence
  Description of Artificial Sequence: Synthetic oligonucleotide
caggccccuuuuccugagg

SEQ ID NO: 1995207 - RNA, 19 nt, Artificial Sequence
  Description of Artificial Sequence: Synthetic oligonucleotide
ccguucugccucaagguca

SEQ ID NO: 1995208 - RNA, 19 nt, Artificial Sequence
  Description of Artificial Sequence: Synthetic oligonucleotide
ggcgcaagcucucugcacu

SEQ ID NO: 1995209 - RNA, 19 nt, Artificial Sequence
  Description of Artificial Sequence: Synthetic oligonucleotide
auacugucgccaggagcca

SEQ ID NO: 1995210 - RNA, 19 nt, Artificial Sequence
  Description of Artificial Sequence: Synthetic oligonucleotide
cuggguugguacagcucca

SEQ ID NO: 1995211 - RNA, 19 nt, Artificial Sequence
  Description of Artificial Sequence: Synthetic oligonucleotide
cagugccugugagaucuug

SEQ ID NO: 1995212 - RNA, 19 nt, Artificial Sequence
  Description of Artificial Sequence: Synthetic oligonucleotide
gagcccuuuguuacggggu

SEQ ID NO: 1995213 - RNA, 19 nt, Artificial Sequence
  Description of Artificial Sequence: Synthetic oligonucleotide
accugguguacggcuuuug

SEQ ID NO: 1995214 - RNA, 19 nt, Artificial Sequence
  Description of Artificial Sequence: Synthetic oligonucleotide
ugucgccaggagccacgac

SEQ ID NO: 1995215 - RNA, 19 nt, Artificial Sequence
  Description of Artificial Sequence: Synthetic oligonucleotide
gagccacgaccagaucgug

SEQ ID NO: 1995216 - RNA, 19 nt, Artificial Sequence
  Description of Artificial Sequence: Synthetic oligonucleotide
ggaguaagaagaaccuggu

SEQ ID NO: 1995217 - RNA, 19 nt, Artificial Sequence
  Description of Artificial Sequence: Synthetic oligonucleotide
cuuccuguuggcgcaagcu

SEQ ID NO: 1995218 - RNA, 19 nt, Artificial Sequence
  Description of Artificial Sequence: Synthetic oligonucleotide
cgaucauacugucgccagg

SEQ ID NO: 1995219 - RNA, 19 nt, Artificial Sequence
  Description of Artificial Sequence: Synthetic oligonucleotide
cagcgagcacagucccgag

SEQ ID NO: 1995220 - RNA, 19 nt, Artificial Sequence
  Description of Artificial Sequence: Synthetic oligonucleotide
aaccugguguacggcuuuu

SEQ ID NO: 1995221 - RNA, 19 nt, Artificial Sequence
  Description of Artificial Sequence: Synthetic oligonucleotide
gccuccgaucauacugucg

SEQ ID NO: 1995222 - RNA, 19 nt, Artificial Sequence
  Description of Artificial Sequence: Synthetic oligonucleotide
gcuccauggguugguuggg

SEQ ID NO: 1995223 - RNA, 19 nt, Artificial Sequence
  Description of Artificial Sequence: Synthetic oligonucleotide
guagugguaacaggguguu

SEQ ID NO: 1995224 - RNA, 19 nt, Artificial Sequence
  Description of Artificial Sequence: Synthetic oligonucleotide
guuacgggguucuggcuuu

SEQ ID NO: 1995225 - RNA, 19 nt, Artificial Sequence
  Description of Artificial Sequence: Synthetic oligonucleotide
caagcucucugcacugggu

SEQ ID NO: 1995226 - RNA, 19 nt, Artificial Sequence
  Description of Artificial Sequence: Synthetic oligonucleotide
ggguuacggauggagaucu

SEQ ID NO: 1995227 - RNA, 19 nt, Artificial Sequence
  Description of Artificial Sequence: Synthetic oligonucleotide
agcgaaggccaaaucucuu

SEQ ID NO: 1995228 - RNA, 19 nt, Artificial Sequence
  Description of Artificial Sequence: Synthetic oligonucleotide
gggguuacggauggagauc

SEQ ID NO: 1995229 - RNA, 19 nt, Artificial Sequence
  Description of Artificial Sequence: Synthetic oligonucleotide
gaaccugguguacggcuuu

SEQ ID NO: 1995230 - RNA, 19 nt, Artificial Sequence
  Description of Artificial Sequence: Synthetic oligonucleotide
gcagcuagggaaguagacu

SEQ ID NO: 1995231 - RNA, 19 nt, Artificial Sequence
  Description of Artificial Sequence: Synthetic oligonucleotide
gcucccugugaguaccaga

SEQ ID NO: 1995232 - RNA, 19 nt, Artificial Sequence
  Description of Artificial Sequence: Synthetic oligonucleotide
acaguugacugggcagcua

SEQ ID NO: 1995233 - RNA, 19 nt, Artificial Sequence
  Description of Artificial Sequence: Synthetic oligonucleotide
ggaggaucuagcauagauu

SEQ ID NO: 1995234 - RNA, 19 nt, Artificial Sequence
  Description of Artificial Sequence: Synthetic oligonucleotide
cuguuaagcgaaggccaaa

SEQ ID NO: 1995235 - RNA, 19 nt, Artificial Sequence
  Description of Artificial Sequence: Synthetic oligonucleotide
gugccuccgaucauacugu

SEQ ID NO: 1995236 - RNA, 19 nt, Artificial Sequence
  Description of Artificial Sequence: Synthetic oligonucleotide
ggucaaugaugccaccuuu

SEQ ID NO: 1995237 - RNA, 19 nt, Artificial Sequence
  Description of Artificial Sequence: Synthetic oligonucleotide
uacgggguucuggcuuuaa

SEQ ID NO: 1995238 - RNA, 19 nt, Artificial Sequence
  Description of Artificial Sequence: Synthetic oligonucleotide
acagcuccauggguugguu

SEQ ID NO: 1995239 - RNA, 19 nt, Artificial Sequence
  Description of Artificial Sequence: Synthetic oligonucleotide
ggagccacgaccagaucgu

SEQ ID NO: 1995240 - RNA, 19 nt, Artificial Sequence
  Description of Artificial Sequence: Synthetic oligonucleotide
guaccuuuuguggcacagu

SEQ ID NO: 1995241 - RNA, 19 nt, Artificial Sequence
  Description of Artificial Sequence: Synthetic oligonucleotide
guaugcuccuuggcccgga

SEQ ID NO: 1995242 - RNA, 19 nt, Artificial Sequence
  Description of Artificial Sequence: Synthetic oligonucleotide
uuacgggguucuggcuuua

SEQ ID NO: 1995243 - RNA, 19 nt, Artificial Sequence
  Description of Artificial Sequence: Synthetic oligonucleotide
caggagccacgaccagauc

SEQ ID NO: 1995244 - RNA, 19 nt, Artificial Sequence
  Description of Artificial Sequence: Synthetic oligonucleotide
uucgagcuguggggcccug

SEQ ID NO: 1995245 - RNA, 19 nt, Artificial Sequence
  Description of Artificial Sequence: Synthetic oligonucleotide
gguuacggauggagaucug

SEQ ID NO: 1995246 - RNA, 19 nt, Artificial Sequence
  Description of Artificial Sequence: Synthetic oligonucleotide
cggauggagaucuguggca

SEQ ID NO: 1995247 - RNA, 19 nt, Artificial Sequence
  Description of Artificial Sequence: Synthetic oligonucleotide
cugccucaaggucaaugau

SEQ ID NO: 1995248 - RNA, 19 nt, Artificial Sequence
  Description of Artificial Sequence: Synthetic oligonucleotide
ccacgaccagaucguggag

SEQ ID NO: 1995249 - RNA, 19 nt, Artificial Sequence
  Description of Artificial Sequence: Synthetic oligonucleotide
gggcagcuagggaaguaga

SEQ ID NO: 1995250 - RNA, 19 nt, Artificial Sequence
  Description of Artificial Sequence: Synthetic oligonucleotide
ggcccagugccugugagau

SEQ ID NO: 1995251 - RNA, 19 nt, Artificial Sequence
  Description of Artificial Sequence: Synthetic oligonucleotide
gcgaaggccaaaucucuuu

SEQ ID NO: 1995252 - RNA, 19 nt, Artificial Sequence
  Description of Artificial Sequence: Synthetic oligonucleotide
ggcuaaugaaguaccgguu

SEQ ID NO: 1995253 - RNA, 19 nt, Artificial Sequence
  Description of Artificial Sequence: Synthetic oligonucleotide
cacaguugacugggcagcu

SEQ ID NO: 1995254 - RNA, 19 nt, Artificial Sequence
  Description of Artificial Sequence: Synthetic oligonucleotide
cggcuuuuggagcguuccc

SEQ ID NO: 1995255 - RNA, 19 nt, Artificial Sequence
  Description of Artificial Sequence: Synthetic oligonucleotide
guugguuggggcagcucuu

SEQ ID NO: 1995256 - RNA, 19 nt, Artificial Sequence
  Description of Artificial Sequence: Synthetic oligonucleotide
cgaaggccaaaucucuuua

SEQ ID NO: 1995257 - RNA, 19 nt, Artificial Sequence
  Description of Artificial Sequence: Synthetic oligonucleotide
ggaggcugcugaaggcuaa

SEQ ID NO: 1995258 - RNA, 19 nt, Artificial Sequence
  Description of Artificial Sequence: Synthetic oligonucleotide
gagcauggcugugccuagu

SEQ ID NO: 1995259 - RNA, 19 nt, Artificial Sequence
  Description of Artificial Sequence: Synthetic oligonucleotide
ccuuuguuacgggguucug

SEQ ID NO: 1995260 - RNA, 19 nt, Artificial Sequence
  Description of Artificial Sequence: Synthetic oligonucleotide
gaagaccugugagcccuuu

SEQ ID NO: 1995261 - RNA, 19 nt, Artificial Sequence
  Description of Artificial Sequence: Synthetic oligonucleotide
cuugcuccaugugcuggau

SEQ ID NO: 1995262 - RNA, 19 nt, Artificial Sequence
  Description of Artificial Sequence: Synthetic oligonucleotide
ccagcuaccaggccccuuu

SEQ ID NO: 1995263 - RNA, 19 nt, Artificial Sequence
  Description of Artificial Sequence: Synthetic oligonucleotide
ggguugguuggggcagcuc

SEQ ID NO: 1995264 - RNA, 19 nt, Artificial Sequence
  Description of Artificial Sequence: Synthetic oligonucleotide
cuguuggcgcaagcucucu

SEQ ID NO: 1995265 - RNA, 19 nt, Artificial Sequence
  Description of Artificial Sequence: Synthetic oligonucleotide
cccuuuguuacgggguucu

SEQ ID NO: 1995266 - RNA, 19 nt, Artificial Sequence
  Description of Artificial Sequence: Synthetic oligonucleotide
cagucuccuugagaggcuu

SEQ ID NO: 1995267 - RNA, 19 nt, Artificial Sequence
  Description of Artificial Sequence: Synthetic oligonucleotide
cuucgagcuguggggcccu

SEQ ID NO: 1995268 - RNA, 19 nt, Artificial Sequence
  Description of Artificial Sequence: Synthetic oligonucleotide
guacggcuuuuggagcguu

SEQ ID NO: 1995269 - RNA, 19 nt, Artificial Sequence
  Description of Artificial Sequence: Synthetic oligonucleotide
cugugccuagucccuccuu

SEQ ID NO: 1995270 - RNA, 19 nt, Artificial Sequence
  Description of Artificial Sequence: Synthetic oligonucleotide
cccggagguaggugggagu

SEQ ID NO: 1995271 - RNA, 19 nt, Artificial Sequence
  Description of Artificial Sequence: Synthetic oligonucleotide
cagcuaccaggccccuuuu

SEQ ID NO: 1995272 - RNA, 19 nt, Artificial Sequence
  Description of Artificial Sequence: Synthetic oligonucleotide
cacccagccucugcugauu

SEQ ID NO: 1995273 - RNA, 19 nt, Artificial Sequence
  Description of Artificial Sequence: Synthetic oligonucleotide
ccucggauuccaagcccau

SEQ ID NO: 1995274 - RNA, 19 nt, Artificial Sequence
  Description of Artificial Sequence: Synthetic oligonucleotide
ggaagaccugugagcccuu

SEQ ID NO: 1995275 - RNA, 19 nt, Artificial Sequence
  Description of Artificial Sequence: Synthetic oligonucleotide
ccagaucguggaggaucua

SEQ ID NO: 1995276 - RNA, 19 nt, Artificial Sequence
  Description of Artificial Sequence: Synthetic oligonucleotide
ccaagcccaugggcucccu

SEQ ID NO: 1995277 - RNA, 19 nt, Artificial Sequence
  Description of Artificial Sequence: Synthetic oligonucleotide
cgaccagaucguggaggau

SEQ ID NO: 1995278 - RNA, 19 nt, Artificial Sequence
  Description of Artificial Sequence: Synthetic oligonucleotide
ugaguagucauccugaggc

SEQ ID NO: 1995279 - RNA, 19 nt, Artificial Sequence
  Description of Artificial Sequence: Synthetic oligonucleotide
uauuuauuuuauuacagga

SEQ ID NO: 1995280 - RNA, 19 nt, Artificial Sequence
  Description of Artificial Sequence: Synthetic oligonucleotide
auaaggagaaaucuuguuc

SEQ ID NO: 1995281 - RNA, 19 nt, Artificial Sequence
  Description of Artificial Sequence: Synthetic oligonucleotide
auaggaagugucuucaaac

SEQ ID NO: 1995282 - RNA, 19 nt, Artificial Sequence
  Description of Artificial Sequence: Synthetic oligonucleotide
acuacuucagcuaggaucc

SEQ ID NO: 1995283 - RNA, 19 nt, Artificial Sequence
  Description of Artificial Sequence: Synthetic oligonucleotide
uggauguucaccaaguugu

SEQ ID NO: 1995284 - RNA, 19 nt, Artificial Sequence
  Description of Artificial Sequence: Synthetic oligonucleotide
uuuuauuacaggaacucgu

SEQ ID NO: 1995285 - RNA, 19 nt, Artificial Sequence
  Description of Artificial Sequence: Synthetic oligonucleotide
uuuguuagagggaagagua

SEQ ID NO: 1995286 - RNA, 19 nt, Artificial Sequence
  Description of Artificial Sequence: Synthetic oligonucleotide
agugucuucaaacaggacu

SEQ ID NO: 1995287 - RNA, 19 nt, Artificial Sequence
  Description of Artificial Sequence: Synthetic oligonucleotide
uaaggagaaaucuuguucu

SEQ ID NO: 1995288 - RNA, 19 nt, Artificial Sequence
  Description of Artificial Sequence: Synthetic oligonucleotide
ucuuauccaaugcuuuucg

SEQ ID NO: 1995289 - RNA, 19 nt, Artificial Sequence
  Description of Artificial Sequence: Synthetic oligonucleotide
ugcaauucgggaaucagca

SEQ ID NO: 1995290 - RNA, 19 nt, Artificial Sequence
  Description of Artificial Sequence: Synthetic oligonucleotide
agaccugcgaucuuggccg

SEQ ID NO: 1995291 - RNA, 19 nt, Artificial Sequence
  Description of Artificial Sequence: Synthetic oligonucleotide
uccagguuuggccacauag

SEQ ID NO: 1995292 - RNA, 19 nt, Artificial Sequence
  Description of Artificial Sequence: Synthetic oligonucleotide
ucagcuaucuuauccaaug

SEQ ID NO: 1995293 - RNA, 19 nt, Artificial Sequence
  Description of Artificial Sequence: Synthetic oligonucleotide
uuauuuuauuacaggaacu

SEQ ID NO: 1995294 - RNA, 19 nt, Artificial Sequence
  Description of Artificial Sequence: Synthetic oligonucleotide
gacuacuucagcuaggauc

SEQ ID NO: 1995295 - RNA, 19 nt, Artificial Sequence
  Description of Artificial Sequence: Synthetic oligonucleotide
ucagcuaggauccacugcu

SEQ ID NO: 1995296 - RNA, 19 nt, Artificial Sequence
  Description of Artificial Sequence: Synthetic oligonucleotide
aacuuuguccgguaauaag

SEQ ID NO: 1995297 - RNA, 19 nt, Artificial Sequence
  Description of Artificial Sequence: Synthetic oligonucleotide
ucaucuaccucauacuugu

SEQ ID NO: 1995298 - RNA, 19 nt, Artificial Sequence
  Description of Artificial Sequence: Synthetic oligonucleotide
uccgcaucagccuuggcgg

SEQ ID NO: 1995299 - RNA, 19 nt, Artificial Sequence
  Description of Artificial Sequence: Synthetic oligonucleotide
auuguagagaccugcgauc

SEQ ID NO: 1995300 - RNA, 19 nt, Artificial Sequence
  Description of Artificial Sequence: Synthetic oligonucleotide
uuauccaaugcuuuucgga

SEQ ID NO: 1995301 - RNA, 19 nt, Artificial Sequence
  Description of Artificial Sequence: Synthetic oligonucleotide
acuuuguccgguaauaagg

SEQ ID NO: 1995302 - RNA, 19 nt, Artificial Sequence
  Description of Artificial Sequence: Synthetic oligonucleotide
uauuuuauuacaggaacuc

SEQ ID NO: 1995303 - RNA, 19 nt, Artificial Sequence
  Description of Artificial Sequence: Synthetic oligonucleotide
auuuuauuacaggaacucg

SEQ ID NO: 1995304 - RNA, 19 nt, Artificial Sequence
  Description of Artificial Sequence: Synthetic oligonucleotide
aaguugugcucacuccucg

SEQ ID NO: 1995305 - RNA, 19 nt, Artificial Sequence
  Description of Artificial Sequence: Synthetic oligonucleotide
cuuacaagccaccacguac

SEQ ID NO: 1995306 - RNA, 19 nt, Artificial Sequence
  Description of Artificial Sequence: Synthetic oligonucleotide
agucauuguagagaccugc

SEQ ID NO: 1995307 - RNA, 19 nt, Artificial Sequence
  Description of Artificial Sequence: Synthetic oligonucleotide
ucgggaaucagcagacacg

SEQ ID NO: 1995308 - RNA, 19 nt, Artificial Sequence
  Description of Artificial Sequence: Synthetic oligonucleotide
cuccuuacaagccaccacg

SEQ ID NO: 1995309 - RNA, 19 nt, Artificial Sequence
  Description of Artificial Sequence: Synthetic oligonucleotide
agcagugucaucagcacgc

SEQ ID NO: 1995310 - RNA, 19 nt, Artificial Sequence
  Description of Artificial Sequence: Synthetic oligonucleotide
uuguccgguaauaaggaga

SEQ ID NO: 1995311 - RNA, 19 nt, Artificial Sequence
  Description of Artificial Sequence: Synthetic oligonucleotide
ugaaacaaggccucagggu

SEQ ID NO: 1995312 - RNA, 19 nt, Artificial Sequence
  Description of Artificial Sequence: Synthetic oligonucleotide
aggacaucgagucuggggu

SEQ ID NO: 1995313 - RNA, 19 nt, Artificial Sequence
  Description of Artificial Sequence: Synthetic oligonucleotide
uuuauuacaggaacucguu

SEQ ID NO: 1995314 - RNA, 19 nt, Artificial Sequence
  Description of Artificial Sequence: Synthetic oligonucleotide
ucgcacuuguguucgaagg

SEQ ID NO: 1995315 - RNA, 19 nt, Artificial Sequence
  Description of Artificial Sequence: Synthetic oligonucleotide
uguccgguaauaaggagaa

SEQ ID NO: 1995316 - RNA, 19 nt, Artificial Sequence
  Description of Artificial Sequence: Synthetic oligonucleotide
uuuuguuagagggaagagu

SEQ ID NO: 1995317 - RNA, 19 nt, Artificial Sequence
  Description of Artificial Sequence: Synthetic oligonucleotide
uugcuugaucagcugaugc

SEQ ID NO: 1995318 - RNA, 19 nt, Artificial Sequence
  Description of Artificial Sequence: Synthetic oligonucleotide
cugugaaggacaucgaguc

SEQ ID NO: 1995319 - RNA, 19 nt, Artificial Sequence
  Description of Artificial Sequence: Synthetic oligonucleotide
aguaucgcacuuguguucg

SEQ ID NO: 1995320 - RNA, 19 nt, Artificial Sequence
  Description of Artificial Sequence: Synthetic oligonucleotide
ucguuuguugccuucuccc

SEQ ID NO: 1995321 - RNA, 19 nt, Artificial Sequence
  Description of Artificial Sequence: Synthetic oligonucleotide
gguuuggccacauaguccc

SEQ ID NO: 1995322 - RNA, 19 nt, Artificial Sequence
  Description of Artificial Sequence: Synthetic oligonucleotide
ugaaggacaucgagucugg

SEQ ID NO: 1995323 - RNA, 19 nt, Artificial Sequence
  Description of Artificial Sequence: Synthetic oligonucleotide
uccaaugcuuuucggagga

SEQ ID NO: 1995324 - RNA, 19 nt, Artificial Sequence
  Description of Artificial Sequence: Synthetic oligonucleotide
auauagggccagcaccagc

SEQ ID NO: 1995325 - RNA, 19 nt, Artificial Sequence
  Description of Artificial Sequence: Synthetic oligonucleotide
uuucggaggauguugcacu

SEQ ID NO: 1995326 - RNA, 19 nt, Artificial Sequence
  Description of Artificial Sequence: Synthetic oligonucleotide
uucgggaaucagcagacac

SEQ ID NO: 1995327 - RNA, 19 nt, Artificial Sequence
  Description of Artificial Sequence: Synthetic oligonucleotide
aggccacgcaacuuugucc

SEQ ID NO: 1995328 - RNA, 19 nt, Artificial Sequence
  Description of Artificial Sequence: Synthetic oligonucleotide
agugucaucagcacgccuc

SEQ ID NO: 1995329 - RNA, 19 nt, Artificial Sequence
  Description of Artificial Sequence: Synthetic oligonucleotide
uccucacaggguaguaucg

SEQ ID NO: 1995330 - RNA, 19 nt, Artificial Sequence
  Description of Artificial Sequence: Synthetic oligonucleotide
uagccgucugcauaggaag

SEQ ID NO: 1995331 - RNA, 19 nt, Artificial Sequence
  Description of Artificial Sequence: Synthetic oligonucleotide
uccgguaauaaggagaaau

SEQ ID NO: 1995332 - RNA, 19 nt, Artificial Sequence
  Description of Artificial Sequence: Synthetic oligonucleotide
ucugcauucgcucgugggu

SEQ ID NO: 1995333 - RNA, 19 nt, Artificial Sequence
  Description of Artificial Sequence: Synthetic oligonucleotide
ucauuguagagaccugcga

SEQ ID NO: 1995334 - RNA, 19 nt, Artificial Sequence
  Description of Artificial Sequence: Synthetic oligonucleotide
cuccgcaucagccuuggcg

SEQ ID NO: 1995335 - RNA, 19 nt, Artificial Sequence
  Description of Artificial Sequence: Synthetic oligonucleotide
gagaccugcgaucuuggcc

SEQ ID NO: 1995336 - RNA, 19 nt, Artificial Sequence
  Description of Artificial Sequence: Synthetic oligonucleotide
cuuauccaaugcuuuucgg

SEQ ID NO: 1995337 - RNA, 19 nt, Artificial Sequence
  Description of Artificial Sequence: Synthetic oligonucleotide
uuuguccgguaauaaggag

SEQ ID NO: 1995338 - RNA, 19 nt, Artificial Sequence
  Description of Artificial Sequence: Synthetic oligonucleotide
auccaaugcuuuucggagg

SEQ ID NO: 1995339 - RNA, 19 nt, Artificial Sequence
  Description of Artificial Sequence: Synthetic oligonucleotide
uguguagaggccacgcaac

SEQ ID NO: 1995340 - RNA, 19 nt, Artificial Sequence
  Description of Artificial Sequence: Synthetic oligonucleotide
agcuaucuuauccaaugcu

SEQ ID NO: 1995341 - RNA, 19 nt, Artificial Sequence
  Description of Artificial Sequence: Synthetic oligonucleotide
ucaccaggcuucccgaucc

SEQ ID NO: 1995342 - RNA, 19 nt, Artificial Sequence
  Description of Artificial Sequence: Synthetic oligonucleotide
ugucaucuaccucauacuu

SEQ ID NO: 1995343 - RNA, 19 nt, Artificial Sequence
  Description of Artificial Sequence: Synthetic oligonucleotide
gauggcgggaacaggagag

SEQ ID NO: 1995344 - RNA, 19 nt, Artificial Sequence
  Description of Artificial Sequence: Synthetic oligonucleotide
aguagucauccugaggccg

SEQ ID NO: 1995345 - RNA, 19 nt, Artificial Sequence
  Description of Artificial Sequence: Synthetic oligonucleotide
uucagcuaggauccacugc

SEQ ID NO: 1995346 - RNA, 19 nt, Artificial Sequence
  Description of Artificial Sequence: Synthetic oligonucleotide
aggagagucgcuggaacgc

SEQ ID NO: 1995347 - RNA, 19 nt, Artificial Sequence
  Description of Artificial Sequence: Synthetic oligonucleotide
guaacugacuacuucagcu

SEQ ID NO: 1995348 - RNA, 19 nt, Artificial Sequence
  Description of Artificial Sequence: Synthetic oligonucleotide
uaggauccacugcucaucc

SEQ ID NO: 1995349 - RNA, 19 nt, Artificial Sequence
  Description of Artificial Sequence: Synthetic oligonucleotide
ucgcucguggguuuucugg

SEQ ID NO: 1995350 - RNA, 19 nt, Artificial Sequence
  Description of Artificial Sequence: Synthetic oligonucleotide
ggagaaaucuuguucucag

SEQ ID NO: 1995351 - RNA, 19 nt, Artificial Sequence
  Description of Artificial Sequence: Synthetic oligonucleotide
gggucugugaaggacaucg

SEQ ID NO: 1995352 - RNA, 19 nt, Artificial Sequence
  Description of Artificial Sequence: Synthetic oligonucleotide
acuccucgagcguucuucc

SEQ ID NO: 1995353 - RNA, 19 nt, Artificial Sequence
  Description of Artificial Sequence: Synthetic oligonucleotide
aucuuauccaaugcuuuuc

SEQ ID NO: 1995354 - RNA, 19 nt, Artificial Sequence
  Description of Artificial Sequence: Synthetic oligonucleotide
gaucuuggccgcuauccgc

SEQ ID NO: 1995355 - RNA, 19 nt, Artificial Sequence
  Description of Artificial Sequence: Synthetic oligonucleotide
cacauugagaggaggggag

SEQ ID NO: 1995356 - RNA, 19 nt, Artificial Sequence
  Description of Artificial Sequence: Synthetic oligonucleotide
cucagucugcauucgcucg

SEQ ID NO: 1995357 - RNA, 19 nt, Artificial Sequence
  Description of Artificial Sequence: Synthetic oligonucleotide
uagagaccugcgaucuugg

SEQ ID NO: 1995358 - RNA, 19 nt, Artificial Sequence
  Description of Artificial Sequence: Synthetic oligonucleotide
ugcgcauggucuuccgugg

SEQ ID NO: 1995359 - RNA, 19 nt, Artificial Sequence
  Description of Artificial Sequence: Synthetic oligonucleotide
gugaaggacaucgagucug

SEQ ID NO: 1995360 - RNA, 19 nt, Artificial Sequence
  Description of Artificial Sequence: Synthetic oligonucleotide
ggcuucccgauccagaggg

SEQ ID NO: 1995361 - RNA, 19 nt, Artificial Sequence
  Description of Artificial Sequence: Synthetic oligonucleotide
gacacgagggccaugggac

SEQ ID NO: 1995362 - RNA, 19 nt, Artificial Sequence
  Description of Artificial Sequence: Synthetic oligonucleotide
agacucaagccagccagcc

SEQ ID NO: 1995363 - RNA, 19 nt, Artificial Sequence
  Description of Artificial Sequence: Synthetic oligonucleotide
agagacuugaucucagcua

SEQ ID NO: 1995364 - RNA, 19 nt, Artificial Sequence
  Description of Artificial Sequence: Synthetic oligonucleotide
aucagcacgccucugcgca

SEQ ID NO: 1995365 - RNA, 19 nt, Artificial Sequence
  Description of Artificial Sequence: Synthetic oligonucleotide
ggaacgcuuccucacaggg

SEQ ID NO: 1995366 - RNA, 19 nt, Artificial Sequence
  Description of Artificial Sequence: Synthetic oligonucleotide
cuguaacugacuacuucag

SEQ ID NO: 1995367 - RNA, 19 nt, Artificial Sequence
  Description of Artificial Sequence: Synthetic oligonucleotide
gucugugaaggacaucgag

SEQ ID NO: 1995368 - RNA, 19 nt, Artificial Sequence
  Description of Artificial Sequence: Synthetic oligonucleotide
acugaguagucauccugag

SEQ ID NO: 1995369 - RNA, 19 nt, Artificial Sequence
  Description of Artificial Sequence: Synthetic oligonucleotide
agaagcucugcaauucggg

SEQ ID NO: 1995370 - RNA, 19 nt, Artificial Sequence
  Description of Artificial Sequence: Synthetic oligonucleotide
gcagacucaagccagccag

SEQ ID NO: 1995371 - RNA, 19 nt, Artificial Sequence
  Description of Artificial Sequence: Synthetic oligonucleotide
ggucuggggauauagggcc

SEQ ID NO: 1995372 - RNA, 19 nt, Artificial Sequence
  Description of Artificial Sequence: Synthetic oligonucleotide
gggauauagggccagcacc

SEQ ID NO: 1995373 - RNA, 19 nt, Artificial Sequence
  Description of Artificial Sequence: Synthetic oligonucleotide
uuguagagaccugcgaucu

SEQ ID NO: 1995374 - RNA, 19 nt, Artificial Sequence
  Description of Artificial Sequence: Synthetic oligonucleotide
uaacugacuacuucagcua

SEQ ID NO: 1995375 - RNA, 19 nt, Artificial Sequence
  Description of Artificial Sequence: Synthetic oligonucleotide
uuguugguagcauggcugu

SEQ ID NO: 1995376 - RNA, 19 nt, Artificial Sequence
  Description of Artificial Sequence: Synthetic oligonucleotide
gaaaucuuguucucagucu

SEQ ID NO: 1995377 - RNA, 19 nt, Artificial Sequence
  Description of Artificial Sequence: Synthetic oligonucleotide
ugugaaggacaucgagucu

SEQ ID NO: 1995378 - RNA, 19 nt, Artificial Sequence
  Description of Artificial Sequence: Synthetic oligonucleotide
ggccacgcaacuuuguccg

SEQ ID NO: 1995379 - RNA, 19 nt, Artificial Sequence
  Description of Artificial Sequence: Synthetic oligonucleotide
caggagagucgcuggaacg

SEQ ID NO: 1995380 - RNA, 19 nt, Artificial Sequence
  Description of Artificial Sequence: Synthetic oligonucleotide
uaucuuauccaaugcuuuu

SEQ ID NO: 1995381 - RNA, 19 nt, Artificial Sequence
  Description of Artificial Sequence: Synthetic oligonucleotide
uuuucggaggauguugcac

SEQ ID NO: 1995382 - RNA, 19 nt, Artificial Sequence
  Description of Artificial Sequence: Synthetic oligonucleotide
caauucgggaaucagcaga

SEQ ID NO: 1995383 - RNA, 19 nt, Artificial Sequence
  Description of Artificial Sequence: Synthetic oligonucleotide
acauaguccccugaggcug

SEQ ID NO: 1995384 - RNA, 19 nt, Artificial Sequence
  Description of Artificial Sequence: Synthetic oligonucleotide
gaagcucugcaauucggga

SEQ ID NO: 1995385 - RNA, 19 nt, Artificial Sequence
  Description of Artificial Sequence: Synthetic oligonucleotide
agagaccugcgaucuuggc

SEQ ID NO: 1995386 - RNA, 19 nt, Artificial Sequence
  Description of Artificial Sequence: Synthetic oligonucleotide
gauguucaccaaguugugc

SEQ ID NO: 1995387 - RNA, 19 nt, Artificial Sequence
  Description of Artificial Sequence: Synthetic oligonucleotide
cuuuguccgguaauaagga

SEQ ID NO: 1995388 - RNA, 19 nt, Artificial Sequence
  Description of Artificial Sequence: Synthetic oligonucleotide
cuugggcuccuuacaagcc

SEQ ID NO: 1995389 - RNA, 19 nt, Artificial Sequence
  Description of Artificial Sequence: Synthetic oligonucleotide
ggaguagccgucugcauag

SEQ ID NO: 1995390 - RNA, 19 nt, Artificial Sequence
  Description of Artificial Sequence: Synthetic oligonucleotide
ugugagaagcucugcaauu

SEQ ID NO: 1995391 - RNA, 19 nt, Artificial Sequence
  Description of Artificial Sequence: Synthetic oligonucleotide
gucauuguagagaccugcg

SEQ ID NO: 1995392 - RNA, 19 nt, Artificial Sequence
  Description of Artificial Sequence: Synthetic oligonucleotide
cugaguagucauccugagg

SEQ ID NO: 1995393 - RNA, 19 nt, Artificial Sequence
  Description of Artificial Sequence: Synthetic oligonucleotide
guugugcucacuccucgag

SEQ ID NO: 1995394 - RNA, 19 nt, Artificial Sequence
  Description of Artificial Sequence: Synthetic oligonucleotide
gcacgguagaagcaggugg

SEQ ID NO: 1995395 - RNA, 19 nt, Artificial Sequence
  Description of Artificial Sequence: Synthetic oligonucleotide
cagguuuggccacauaguc

SEQ ID NO: 1995396 - RNA, 19 nt, Artificial Sequence
  Description of Artificial Sequence: Synthetic oligonucleotide
uucugaaacaaggccucag

SEQ ID NO: 1995397 - RNA, 19 nt, Artificial Sequence
  Description of Artificial Sequence: Synthetic oligonucleotide
uagagggaagaguauuuau

SEQ ID NO: 1995398 - RNA, 19 nt, Artificial Sequence
  Description of Artificial Sequence: Synthetic oligonucleotide
caggacugaguagucaucc

SEQ ID NO: 1995399 - RNA, 19 nt, Artificial Sequence
  Description of Artificial Sequence: Synthetic oligonucleotide
gucugcauucgcucguggg

SEQ ID NO: 1995400 - RNA, 19 nt, Artificial Sequence
  Description of Artificial Sequence: Synthetic oligonucleotide
aagcacgucgcgcuggcaa

SEQ ID NO: 1995401 - RNA, 19 nt, Artificial Sequence
  Description of Artificial Sequence: Synthetic oligonucleotide
agaggaggggaguagccgu

SEQ ID NO: 1995402 - RNA, 19 nt, Artificial Sequence
  Description of Artificial Sequence: Synthetic oligonucleotide
uguucucagucugcauucg

SEQ ID NO: 1995403 - RNA, 19 nt, Artificial Sequence
  Description of Artificial Sequence: Synthetic oligonucleotide
ggaacaggagagucgcugg

SEQ ID NO: 1995404 - RNA, 19 nt, Artificial Sequence
  Description of Artificial Sequence: Synthetic oligonucleotide
ucagucugcauucgcucgu

SEQ ID NO: 1995405 - RNA, 19 nt, Artificial Sequence
  Description of Artificial Sequence: Synthetic oligonucleotide
agcugaugcagcucuguga

SEQ ID NO: 1995406 - RNA, 19 nt, Artificial Sequence
  Description of Artificial Sequence: Synthetic oligonucleotide
caccacguaccucugggcc

SEQ ID NO: 1995407 - RNA, 19 nt, Artificial Sequence
  Description of Artificial Sequence: Synthetic oligonucleotide
guagagaccugcgaucuug

SEQ ID NO: 1995408 - RNA, 19 nt, Artificial Sequence
  Description of Artificial Sequence: Synthetic oligonucleotide
aucgcacuuguguucgaag

SEQ ID NO: 1995409 - RNA, 19 nt, Artificial Sequence
  Description of Artificial Sequence: Synthetic oligonucleotide
cucguuuguugccuucucc

SEQ ID NO: 1995410 - RNA, 19 nt, Artificial Sequence
  Description of Artificial Sequence: Synthetic oligonucleotide
uaguaucgcacuuguguuc

SEQ ID NO: 1995411 - RNA, 19 nt, Artificial Sequence
  Description of Artificial Sequence: Synthetic oligonucleotide
uccuuacaagccaccacgu

SEQ ID NO: 1995412 - RNA, 19 nt, Artificial Sequence
  Description of Artificial Sequence: Synthetic oligonucleotide
aggguaguaucgcacuugu

SEQ ID NO: 1995413 - RNA, 19 nt, Artificial Sequence
  Description of Artificial Sequence: Synthetic oligonucleotide
gaucagggcacgguagaag

SEQ ID NO: 1995414 - RNA, 19 nt, Artificial Sequence
  Description of Artificial Sequence: Synthetic oligonucleotide
cuauccgccucucuuccag

SEQ ID NO: 1995415 - RNA, 19 nt, Artificial Sequence
  Description of Artificial Sequence: Synthetic oligonucleotide
augaggucggcaguggcag

SEQ ID NO: 1995416 - RNA, 19 nt, Artificial Sequence
  Description of Artificial Sequence: Synthetic oligonucleotide
agacacgagggccauggga

SEQ ID NO: 1995417 - RNA, 19 nt, Artificial Sequence
  Description of Artificial Sequence: Synthetic oligonucleotide
gauguugcacucagccucc

SEQ ID NO: 1995418 - RNA, 19 nt, Artificial Sequence
  Description of Artificial Sequence: Synthetic oligonucleotide
caggcuucccgauccagag

SEQ ID NO: 1995419 - RNA, 19 nt, Artificial Sequence
  Description of Artificial Sequence: Synthetic oligonucleotide
caggguuagcuuuccacug

SEQ ID NO: 1995420 - RNA, 19 nt, Artificial Sequence
  Description of Artificial Sequence: Synthetic oligonucleotide
uucacucuagcagccaccu

SEQ ID NO: 1995421 - RNA, 19 nt, Artificial Sequence
  Description of Artificial Sequence: Synthetic oligonucleotide
ucguggguuuucuggaugu

SEQ ID NO: 1995422 - RNA, 19 nt, Artificial Sequence
  Description of Artificial Sequence: Synthetic oligonucleotide
agcacgucgcgcuggcaac

SEQ ID NO: 1995423 - RNA, 19 nt, Artificial Sequence
  Description of Artificial Sequence: Synthetic oligonucleotide
cagcuaucuuauccaaugc

SEQ ID NO: 1995424 - RNA, 19 nt, Artificial Sequence
  Description of Artificial Sequence: Synthetic oligonucleotide
uguucaccaaguugugcuc

SEQ ID NO: 1995425 - RNA, 19 nt, Artificial Sequence
  Description of Artificial Sequence: Synthetic oligonucleotide
ugaugcgccgccgacucag

SEQ ID NO: 1995426 - RNA, 19 nt, Artificial Sequence
  Description of Artificial Sequence: Synthetic oligonucleotide
cauggcuguaacugacuac

SEQ ID NO: 1995427 - RNA, 19 nt, Artificial Sequence
  Description of Artificial Sequence: Synthetic oligonucleotide
gacugaguagucauccuga

SEQ ID NO: 1995428 - RNA, 19 nt, Artificial Sequence
  Description of Artificial Sequence: Synthetic oligonucleotide
cuucagcuaggauccacug

SEQ ID NO: 1995429 - RNA, 19 nt, Artificial Sequence
  Description of Artificial Sequence: Synthetic oligonucleotide
guagaagcagguggucugg

SEQ ID NO: 1995430 - RNA, 19 nt, Artificial Sequence
  Description of Artificial Sequence: Synthetic oligonucleotide
cagaggggcagggucaugg

SEQ ID NO: 1995431 - RNA, 19 nt, Artificial Sequence
  Description of Artificial Sequence: Synthetic oligonucleotide
cugcgcauggucuuccgug

SEQ ID NO: 1995432 - RNA, 19 nt, Artificial Sequence
  Description of Artificial Sequence: Synthetic oligonucleotide
agggaagaguauuuauuuu

SEQ ID NO: 1995433 - RNA, 19 nt, Artificial Sequence
  Description of Artificial Sequence: Synthetic oligonucleotide
gaucagcugaugcagcucu

SEQ ID NO: 1995434 - RNA, 19 nt, Artificial Sequence
  Description of Artificial Sequence: Synthetic oligonucleotide
caggaacucguuuguugcc

SEQ ID NO: 1995435 - RNA, 19 nt, Artificial Sequence
  Description of Artificial Sequence: Synthetic oligonucleotide
caaguugugcucacuccuc

SEQ ID NO: 1995436 - RNA, 19 nt, Artificial Sequence
  Description of Artificial Sequence: Synthetic oligonucleotide
gauauagggccagcaccag

SEQ ID NO: 1995437 - RNA, 19 nt, Artificial Sequence
  Description of Artificial Sequence: Synthetic oligonucleotide
uacuuguugguagcauggc

SEQ ID NO: 1995438 - RNA, 19 nt, Artificial Sequence
  Description of Artificial Sequence: Synthetic oligonucleotide
caccuugucuccagguuug

SEQ ID NO: 1995439 - RNA, 19 nt, Artificial Sequence
  Description of Artificial Sequence: Synthetic oligonucleotide
ggacugaguagucauccug

SEQ ID NO: 1995440 - RNA, 19 nt, Artificial Sequence
  Description of Artificial Sequence: Synthetic oligonucleotide
ucuggggauauagggccag

SEQ ID NO: 1995441 - RNA, 19 nt, Artificial Sequence
  Description of Artificial Sequence: Synthetic oligonucleotide
cauccugaggccgcugugg

SEQ ID NO: 1995442 - RNA, 19 nt, Artificial Sequence
  Description of Artificial Sequence: Synthetic oligonucleotide
uucaccaaguugugcucac

SEQ ID NO: 1995443 - RNA, 19 nt, Artificial Sequence
  Description of Artificial Sequence: Synthetic oligonucleotide
cugcauaggaagugucuuc

SEQ ID NO: 1995444 - RNA, 19 nt, Artificial Sequence
  Description of Artificial Sequence: Synthetic oligonucleotide
acugacuacuucagcuagg

SEQ ID NO: 1995445 - RNA, 19 nt, Artificial Sequence
  Description of Artificial Sequence: Synthetic oligonucleotide
agucugcauucgcucgugg

SEQ ID NO: 1995446 - RNA, 19 nt, Artificial Sequence
  Description of Artificial Sequence: Synthetic oligonucleotide
agguggucuggggauauag

SEQ ID NO: 1995447 - RNA, 19 nt, Artificial Sequence
  Description of Artificial Sequence: Synthetic oligonucleotide
cuuuccacuggggcagugg

SEQ ID NO: 1995448 - RNA, 19 nt, Artificial Sequence
  Description of Artificial Sequence: Synthetic oligonucleotide
uguugcacucagccuccgc

SEQ ID NO: 1995449 - RNA, 19 nt, Artificial Sequence
  Description of Artificial Sequence: Synthetic oligonucleotide
ugggaugaugcgccgccga

SEQ ID NO: 1995450 - RNA, 19 nt, Artificial Sequence
  Description of Artificial Sequence: Synthetic oligonucleotide
accacguaccucugggcca

SEQ ID NO: 1995451 - RNA, 19 nt, Artificial Sequence
  Description of Artificial Sequence: Synthetic oligonucleotide
gaggggaguagccgucugc

SEQ ID NO: 1995452 - RNA, 19 nt, Artificial Sequence
  Description of Artificial Sequence: Synthetic oligonucleotide
aacugcgauggcgggaaca

SEQ ID NO: 1995453 - RNA, 19 nt, Artificial Sequence
  Description of Artificial Sequence: Synthetic oligonucleotide
aguagccgucugcauagga

SEQ ID NO: 1995454 - RNA, 19 nt, Artificial Sequence
  Description of Artificial Sequence: Synthetic oligonucleotide
cuaggauccacugcucauc

SEQ ID NO: 1995455 - RNA, 19 nt, Artificial Sequence
  Description of Artificial Sequence: Synthetic oligonucleotide
uaccucugggccacauuga

SEQ ID NO: 1995456 - RNA, 19 nt, Artificial Sequence
  Description of Artificial Sequence: Synthetic oligonucleotide
cuucccgauccagaggggc

SEQ ID NO: 1995457 - RNA, 19 nt, Artificial Sequence
  Description of Artificial Sequence: Synthetic oligonucleotide
gcagacacgagggccaugg

SEQ ID NO: 1995458 - RNA, 19 nt, Artificial Sequence
  Description of Artificial Sequence: Synthetic oligonucleotide
gaggccacgcaacuuuguc

SEQ ID NO: 1995459 - RNA, 19 nt, Artificial Sequence
  Description of Artificial Sequence: Synthetic oligonucleotide
gguuugcuugaucagcuga

SEQ ID NO: 1995460 - RNA, 19 nt, Artificial Sequence
  Description of Artificial Sequence: Synthetic oligonucleotide
gaacaggagagucgcugga

SEQ ID NO: 1995461 - RNA, 19 nt, Artificial Sequence
  Description of Artificial Sequence: Synthetic oligonucleotide
ucugcgcauggucuuccgu

SEQ ID NO: 1995462 - RNA, 19 nt, Artificial Sequence
  Description of Artificial Sequence: Synthetic oligonucleotide
aguugugcucacuccucga

SEQ ID NO: 1995463 - RNA, 19 nt, Artificial Sequence
  Description of Artificial Sequence: Synthetic oligonucleotide
gugagaagcucugcaauuc

SEQ ID NO: 1995464 - RNA, 19 nt, Artificial Sequence
  Description of Artificial Sequence: Synthetic oligonucleotide
caugggacgggucugugaa

SEQ ID NO: 1995465 - RNA, 19 nt, Artificial Sequence
  Description of Artificial Sequence: Synthetic oligonucleotide
uuggccgcuauccgccucu

SEQ ID NO: 1995466 - RNA, 19 nt, Artificial Sequence
  Description of Artificial Sequence: Synthetic oligonucleotide
cagacucaagccagccagc

SEQ ID NO: 1995467 - RNA, 19 nt, Artificial Sequence
  Description of Artificial Sequence: Synthetic oligonucleotide
ucuuguucucagucugcau

SEQ ID NO: 1995468 - RNA, 19 nt, Artificial Sequence
  Description of Artificial Sequence: Synthetic oligonucleotide
cucguggguuuucuggaug

SEQ ID NO: 1995469 - RNA, 19 nt, Artificial Sequence
  Description of Artificial Sequence: Synthetic oligonucleotide
uggggauauagggccagca

SEQ ID NO: 1995470 - RNA, 19 nt, Artificial Sequence
  Description of Artificial Sequence: Synthetic oligonucleotide
aggaacucguuuguugccu

SEQ ID NO: 1995471 - RNA, 19 nt, Artificial Sequence
  Description of Artificial Sequence: Synthetic oligonucleotide
caucagcacgccucugcgc

SEQ ID NO: 1995472 - RNA, 19 nt, Artificial Sequence
  Description of Artificial Sequence: Synthetic oligonucleotide
agagucgcuggaacgcuuc

SEQ ID NO: 1995473 - RNA, 19 nt, Artificial Sequence
  Description of Artificial Sequence: Synthetic oligonucleotide
acuucagcuaggauccacu

SEQ ID NO: 1995474 - RNA, 19 nt, Artificial Sequence
  Description of Artificial Sequence: Synthetic oligonucleotide
gaaggacaucgagucuggg

SEQ ID NO: 1995475 - RNA, 19 nt, Artificial Sequence
  Description of Artificial Sequence: Synthetic oligonucleotide
caugaggucggcaguggca

SEQ ID NO: 1995476 - RNA, 19 nt, Artificial Sequence
  Description of Artificial Sequence: Synthetic oligonucleotide
ggauauagggccagcacca

SEQ ID NO: 1995477 - RNA, 19 nt, Artificial Sequence
  Description of Artificial Sequence: Synthetic oligonucleotide
gacuugaucucagcuaucu

SEQ ID NO: 1995478 - RNA, 19 nt, Artificial Sequence
  Description of Artificial Sequence: Synthetic oligonucleotide
aguccccugaggcuggaau

SEQ ID NO: 1995479 - RNA, 19 nt, Artificial Sequence
  Description of Artificial Sequence: Synthetic oligonucleotide
uaccucauacuuguuggua

SEQ ID NO: 1995480 - RNA, 19 nt, Artificial Sequence
  Description of Artificial Sequence: Synthetic oligonucleotide
ucgagcguucuuccugggu

SEQ ID NO: 1995481 - RNA, 19 nt, Artificial Sequence
  Description of Artificial Sequence: Synthetic oligonucleotide
uacuucagcuaggauccac

SEQ ID NO: 1995482 - RNA, 19 nt, Artificial Sequence
  Description of Artificial Sequence: Synthetic oligonucleotide
ucgcuggaacgcuuccuca

SEQ ID NO: 1995483 - RNA, 19 nt, Artificial Sequence
  Description of Artificial Sequence: Synthetic oligonucleotide
cauuguagagaccugcgau

SEQ ID NO: 1995484 - RNA, 19 nt, Artificial Sequence
  Description of Artificial Sequence: Synthetic oligonucleotide
uauccgccucucuuccagc

SEQ ID NO: 1995485 - RNA, 19 nt, Artificial Sequence
  Description of Artificial Sequence: Synthetic oligonucleotide
cuuggcgguuguguagagg

SEQ ID NO: 1995486 - RNA, 19 nt, Artificial Sequence
  Description of Artificial Sequence: Synthetic oligonucleotide
gaacucguuuguugccuuc

SEQ ID NO: 1995487 - RNA, 19 nt, Artificial Sequence
  Description of Artificial Sequence: Synthetic oligonucleotide
ccgguaauaaggagaaauc

SEQ ID NO: 1995488 - RNA, 19 nt, Artificial Sequence
  Description of Artificial Sequence: Synthetic oligonucleotide
uucgcucguggguuuucug

SEQ ID NO: 1995489 - RNA, 19 nt, Artificial Sequence
  Description of Artificial Sequence: Synthetic oligonucleotide
gucgcuggaacgcuuccuc

SEQ ID NO: 1995490 - RNA, 19 nt, Artificial Sequence
  Description of Artificial Sequence: Synthetic oligonucleotide
cugacuacuucagcuagga

SEQ ID NO: 1995491 - RNA, 19 nt, Artificial Sequence
  Description of Artificial Sequence: Synthetic oligonucleotide
acgucgcgcuggcaacugc

SEQ ID NO: 1995492 - RNA, 19 nt, Artificial Sequence
  Description of Artificial Sequence: Synthetic oligonucleotide
guaguaucgcacuuguguu

SEQ ID NO: 1995493 - RNA, 19 nt, Artificial Sequence
  Description of Artificial Sequence: Synthetic oligonucleotide
gagucgcuggaacgcuucc

SEQ ID NO: 1995494 - RNA, 19 nt, Artificial Sequence
  Description of Artificial Sequence: Synthetic oligonucleotide
ugacuacuucagcuaggau

SEQ ID NO: 1995495 - RNA, 19 nt, Artificial Sequence
  Description of Artificial Sequence: Synthetic oligonucleotide
gguuguguagaggccacgc

SEQ ID NO: 1995496 - RNA, 19 nt, Artificial Sequence
  Description of Artificial Sequence: Synthetic oligonucleotide
gcaauucgggaaucagcag

SEQ ID NO: 1995497 - RNA, 19 nt, Artificial Sequence
  Description of Artificial Sequence: Synthetic oligonucleotide
acaggguaguaucgcacuu

SEQ ID NO: 1995498 - RNA, 19 nt, Artificial Sequence
  Description of Artificial Sequence: Synthetic oligonucleotide
gcgaucuuggccgcuaucc

SEQ ID NO: 1995499 - RNA, 19 nt, Artificial Sequence
  Description of Artificial Sequence: Synthetic oligonucleotide
uggcagacucaagccagcc

SEQ ID NO: 1995500 - RNA, 19 nt, Artificial Sequence
  Description of Artificial Sequence: Synthetic oligonucleotide
gagucauuguagagaccug

SEQ ID NO: 1995501 - RNA, 19 nt, Artificial Sequence
  Description of Artificial Sequence: Synthetic oligonucleotide
caggguaguaucgcacuug

SEQ ID NO: 1995502 - RNA, 19 nt, Artificial Sequence
  Description of Artificial Sequence: Synthetic oligonucleotide
cacuccucgagcguucuuc

SEQ ID NO: 1995503 - RNA, 19 nt, Artificial Sequence
  Description of Artificial Sequence: Synthetic oligonucleotide
aggggaguagccgucugca

SEQ ID NO: 1995504 - RNA, 19 nt, Artificial Sequence
  Description of Artificial Sequence: Synthetic oligonucleotide
uaucgcacuuguguucgaa

SEQ ID NO: 1995505 - RNA, 19 nt, Artificial Sequence
  Description of Artificial Sequence: Synthetic oligonucleotide
cuccgagucauuguagaga

SEQ ID NO: 1995506 - RNA, 19 nt, Artificial Sequence
  Description of Artificial Sequence: Synthetic oligonucleotide
acgguagaagcaggugguc

SEQ ID NO: 1995507 - RNA, 19 nt, Artificial Sequence
  Description of Artificial Sequence: Synthetic oligonucleotide
gcuuuucggaggauguugc

SEQ ID NO: 1995508 - RNA, 19 nt, Artificial Sequence
  Description of Artificial Sequence: Synthetic oligonucleotide
ugcgccgccgacucagggu

SEQ ID NO: 1995509 - RNA, 19 nt, Artificial Sequence
  Description of Artificial Sequence: Synthetic oligonucleotide
gaggucggcaguggcagac

SEQ ID NO: 1995510 - RNA, 19 nt, Artificial Sequence
  Description of Artificial Sequence: Synthetic oligonucleotide
gacucaagccagccagcca

SEQ ID NO: 1995511 - RNA, 19 nt, Artificial Sequence
  Description of Artificial Sequence: Synthetic oligonucleotide
guucaccaaguugugcuca

SEQ ID NO: 1995512 - RNA, 19 nt, Artificial Sequence
  Description of Artificial Sequence: Synthetic oligonucleotide
augggacgggucugugaag

SEQ ID NO: 1995513 - RNA, 19 nt, Artificial Sequence
  Description of Artificial Sequence: Synthetic oligonucleotide
cuuuucggaggauguugca

SEQ ID NO: 1995514 - RNA, 19 nt, Artificial Sequence
  Description of Artificial Sequence: Synthetic oligonucleotide
gcuggaauggcuccacaga

SEQ ID NO: 1995515 - RNA, 19 nt, Artificial Sequence
  Description of Artificial Sequence: Synthetic oligonucleotide
ggggauauagggccagcac

SEQ ID NO: 1995516 - RNA, 19 nt, Artificial Sequence
  Description of Artificial Sequence: Synthetic oligonucleotide
cacgccucugcgcaugguc

SEQ ID NO: 1995517 - RNA, 19 nt, Artificial Sequence
  Description of Artificial Sequence: Synthetic oligonucleotide
gcgcuggcaacugcgaugg

SEQ ID NO: 1995518 - RNA, 19 nt, Artificial Sequence
  Description of Artificial Sequence: Synthetic oligonucleotide
augcgccgccgacucaggg

SEQ ID NO: 1995519 - RNA, 19 nt, Artificial Sequence
  Description of Artificial Sequence: Synthetic oligonucleotide
cucugcgcauggucuuccg

SEQ ID NO: 1995520 - RNA, 19 nt, Artificial Sequence
  Description of Artificial Sequence: Synthetic oligonucleotide
agacuugaucucagcuauc

SEQ ID NO: 1995521 - RNA, 19 nt, Artificial Sequence
  Description of Artificial Sequence: Synthetic oligonucleotide
guagaggccacgcaacuuu

SEQ ID NO: 1995522 - RNA, 19 nt, Artificial Sequence
  Description of Artificial Sequence: Synthetic oligonucleotide
guagccgucugcauaggaa

SEQ ID NO: 1995523 - RNA, 19 nt, Artificial Sequence
  Description of Artificial Sequence: Synthetic oligonucleotide
cagagacuugaucucagcu

SEQ ID NO: 1995524 - RNA, 19 nt, Artificial Sequence
  Description of Artificial Sequence: Synthetic oligonucleotide
gguguguggaucagggcac

SEQ ID NO: 1995525 - RNA, 19 nt, Artificial Sequence
  Description of Artificial Sequence: Synthetic oligonucleotide
gucaccaggcuucccgauc

SEQ ID NO: 1995526 - RNA, 19 nt, Artificial Sequence
  Description of Artificial Sequence: Synthetic oligonucleotide
ugcgaucuuggccgcuauc

SEQ ID NO: 1995527 - RNA, 19 nt, Artificial Sequence
  Description of Artificial Sequence: Synthetic oligonucleotide
cucauacuuguugguagca

SEQ ID NO: 1995528 - RNA, 19 nt, Artificial Sequence
  Description of Artificial Sequence: Synthetic oligonucleotide
ugucaccaggcuucccgau

SEQ ID NO: 1995529 - RNA, 19 nt, Artificial Sequence
  Description of Artificial Sequence: Synthetic oligonucleotide
ucggaggauguugcacuca

SEQ ID NO: 1995530 - RNA, 19 nt, Artificial Sequence
  Description of Artificial Sequence: Synthetic oligonucleotide
gacaucgagucugggguaa

SEQ ID NO: 1995531 - RNA, 19 nt, Artificial Sequence
  Description of Artificial Sequence: Synthetic oligonucleotide
cucgagcguucuuccuggg

SEQ ID NO: 1995532 - RNA, 19 nt, Artificial Sequence
  Description of Artificial Sequence: Synthetic oligonucleotide
gaguagccgucugcauagg

SEQ ID NO: 1995533 - RNA, 19 nt, Artificial Sequence
  Description of Artificial Sequence: Synthetic oligonucleotide
ucuuggccgcuauccgccu

SEQ ID NO: 1995534 - RNA, 19 nt, Artificial Sequence
  Description of Artificial Sequence: Synthetic oligonucleotide
ugcauucgcucguggguuu

SEQ ID NO: 1995535 - RNA, 19 nt, Artificial Sequence
  Description of Artificial Sequence: Synthetic oligonucleotide
cacgguagaagcagguggu

SEQ ID NO: 1995536 - RNA, 19 nt, Artificial Sequence
  Description of Artificial Sequence: Synthetic oligonucleotide
gcgggaacaggagagucgc

SEQ ID NO: 1995537 - RNA, 19 nt, Artificial Sequence
  Description of Artificial Sequence: Synthetic oligonucleotide
accuugucuccagguuugg

SEQ ID NO: 1995538 - RNA, 19 nt, Artificial Sequence
  Description of Artificial Sequence: Synthetic oligonucleotide
ggcuccgagucauuguaga

SEQ ID NO: 1995539 - RNA, 19 nt, Artificial Sequence
  Description of Artificial Sequence: Synthetic oligonucleotide
ugaggucggcaguggcaga

SEQ ID NO: 1995540 - RNA, 19 nt, Artificial Sequence
  Description of Artificial Sequence: Synthetic oligonucleotide
gcuccuuacaagccaccac

SEQ ID NO: 1995541 - RNA, 19 nt, Artificial Sequence
  Description of Artificial Sequence: Synthetic oligonucleotide
auucgcucguggguuuucu

SEQ ID NO: 1995542 - RNA, 19 nt, Artificial Sequence
  Description of Artificial Sequence: Synthetic oligonucleotide
guuagagggaagaguauuu

SEQ ID NO: 1995543 - RNA, 19 nt, Artificial Sequence
  Description of Artificial Sequence: Synthetic oligonucleotide
cacauaguccccugaggcu

SEQ ID NO: 1995544 - RNA, 19 nt, Artificial Sequence
  Description of Artificial Sequence: Synthetic oligonucleotide
ucgcgcuggcaacugcgau

SEQ ID NO: 1995545 - RNA, 19 nt, Artificial Sequence
  Description of Artificial Sequence: Synthetic oligonucleotide
gggucugucucaggguuag

SEQ ID NO: 1995546 - RNA, 19 nt, Artificial Sequence
  Description of Artificial Sequence: Synthetic oligonucleotide
cacaggguaguaucgcacu

SEQ ID NO: 1995547 - RNA, 19 nt, Artificial Sequence
  Description of Artificial Sequence: Synthetic oligonucleotide
caacuuuguccgguaauaa

SEQ ID NO: 1995548 - RNA, 19 nt, Artificial Sequence
  Description of Artificial Sequence: Synthetic oligonucleotide
cagacacgagggccauggg

SEQ ID NO: 1995549 - RNA, 19 nt, Artificial Sequence
  Description of Artificial Sequence: Synthetic oligonucleotide
gaugcgccgccgacucagg

SEQ ID NO: 1995550 - RNA, 19 nt, Artificial Sequence
  Description of Artificial Sequence: Synthetic oligonucleotide
aaagcacgucgcgcuggca

SEQ ID NO: 1995551 - RNA, 19 nt, Artificial Sequence
  Description of Artificial Sequence: Synthetic oligonucleotide
gaccugcgaucuuggccgc

SEQ ID NO: 1995552 - RNA, 19 nt, Artificial Sequence
  Description of Artificial Sequence: Synthetic oligonucleotide
gugggaugaugcgccgccg

SEQ ID NO: 1995553 - RNA, 19 nt, Artificial Sequence
  Description of Artificial Sequence: Synthetic oligonucleotide
agucgcuggaacgcuuccu

SEQ ID NO: 1995554 - RNA, 19 nt, Artificial Sequence
  Description of Artificial Sequence: Synthetic oligonucleotide
ggguuuucuggauguucac

SEQ ID NO: 1995555 - RNA, 19 nt, Artificial Sequence
  Description of Artificial Sequence: Synthetic oligonucleotide
acgcaacuuuguccgguaa

SEQ ID NO: 1995556 - RNA, 19 nt, Artificial Sequence
  Description of Artificial Sequence: Synthetic oligonucleotide
cacuggggcagugggauga

SEQ ID NO: 1995557 - RNA, 19 nt, Artificial Sequence
  Description of Artificial Sequence: Synthetic oligonucleotide
cagcuaggauccacugcuc

SEQ ID NO: 1995558 - RNA, 19 nt, Artificial Sequence
  Description of Artificial Sequence: Synthetic oligonucleotide
gggaguagccgucugcaua

SEQ ID NO: 1995559 - RNA, 19 nt, Artificial Sequence
  Description of Artificial Sequence: Synthetic oligonucleotide
auguugcacucagccuccg

SEQ ID NO: 1995560 - RNA, 19 nt, Artificial Sequence
  Description of Artificial Sequence: Synthetic oligonucleotide
gaggaggggaguagccguc

SEQ ID NO: 1995561 - RNA, 19 nt, Artificial Sequence
  Description of Artificial Sequence: Synthetic oligonucleotide
cagugggaugaugcgccgc

SEQ ID NO: 1995562 - RNA, 19 nt, Artificial Sequence
  Description of Artificial Sequence: Synthetic oligonucleotide
caaggccucagggucuguc

SEQ ID NO: 1995563 - RNA, 19 nt, Artificial Sequence
  Description of Artificial Sequence: Synthetic oligonucleotide
agccgucugcauaggaagu

SEQ ID NO: 1995564 - RNA, 19 nt, Artificial Sequence
  Description of Artificial Sequence: Synthetic oligonucleotide
uguugguagcauggcugua

SEQ ID NO: 1995565 - RNA, 19 nt, Artificial Sequence
  Description of Artificial Sequence: Synthetic oligonucleotide
aggcuggaauggcuccaca

SEQ ID NO: 1995566 - RNA, 19 nt, Artificial Sequence
  Description of Artificial Sequence: Synthetic oligonucleotide
auggcgggaacaggagagu

SEQ ID NO: 1995567 - RNA, 19 nt, Artificial Sequence
  Description of Artificial Sequence: Synthetic oligonucleotide
ucagcacgccucugcgcau

SEQ ID NO: 1995568 - RNA, 19 nt, Artificial Sequence
  Description of Artificial Sequence: Synthetic oligonucleotide
cgaucuuggccgcuauccg

SEQ ID NO: 1995569 - RNA, 19 nt, Artificial Sequence
  Description of Artificial Sequence: Synthetic oligonucleotide
gcaacuuuguccgguaaua

SEQ ID NO: 1995570 - RNA, 19 nt, Artificial Sequence
  Description of Artificial Sequence: Synthetic oligonucleotide
gcuggaacgcuuccucaca

SEQ ID NO: 1995571 - RNA, 19 nt, Artificial Sequence
  Description of Artificial Sequence: Synthetic oligonucleotide
cugcgauggcgggaacagg

SEQ ID NO: 1995572 - RNA, 19 nt, Artificial Sequence
  Description of Artificial Sequence: Synthetic oligonucleotide
cuucugaaacaaggccuca

SEQ ID NO: 1995573 - RNA, 19 nt, Artificial Sequence
  Description of Artificial Sequence: Synthetic oligonucleotide
cagucugcauucgcucgug

SEQ ID NO: 1995574 - RNA, 19 nt, Artificial Sequence
  Description of Artificial Sequence: Synthetic oligonucleotide
ccucacaggguaguaucgc

SEQ ID NO: 1995575 - RNA, 19 nt, Artificial Sequence
  Description of Artificial Sequence: Synthetic oligonucleotide
ggcacgguagaagcaggug

SEQ ID NO: 1995576 - RNA, 19 nt, Artificial Sequence
  Description of Artificial Sequence: Synthetic oligonucleotide
gcgccgccgacucagggug

SEQ ID NO: 1995577 - RNA, 19 nt, Artificial Sequence
  Description of Artificial Sequence: Synthetic oligonucleotide
aggaggggaguagccgucu

SEQ ID NO: 1995578 - RNA, 19 nt, Artificial Sequence
  Description of Artificial Sequence: Synthetic oligonucleotide
gugugucucucuuugccuu

SEQ ID NO: 1995579 - RNA, 19 nt, Artificial Sequence
  Description of Artificial Sequence: Synthetic oligonucleotide
agaggccacgcaacuuugu

SEQ ID NO: 1995580 - RNA, 19 nt, Artificial Sequence
  Description of Artificial Sequence: Synthetic oligonucleotide
ggcagacucaagccagcca

SEQ ID NO: 1995581 - RNA, 19 nt, Artificial Sequence
  Description of Artificial Sequence: Synthetic oligonucleotide
gggaugaugcgccgccgac

SEQ ID NO: 1995582 - RNA, 19 nt, Artificial Sequence
  Description of Artificial Sequence: Synthetic oligonucleotide
gcuaucuuauccaaugcuu

SEQ ID NO: 1995583 - RNA, 19 nt, Artificial Sequence
  Description of Artificial Sequence: Synthetic oligonucleotide
cuuggccgcuauccgccuc

SEQ ID NO: 1995584 - RNA, 19 nt, Artificial Sequence
  Description of Artificial Sequence: Synthetic oligonucleotide
gccgucugcauaggaagug

SEQ ID NO: 1995585 - RNA, 19 nt, Artificial Sequence
  Description of Artificial Sequence: Synthetic oligonucleotide
gaacgcuuccucacagggu

SEQ ID NO: 1995586 - RNA, 19 nt, Artificial Sequence
  Description of Artificial Sequence: Synthetic oligonucleotide
augaugcgccgccgacuca

SEQ ID NO: 1995587 - RNA, 19 nt, Artificial Sequence
  Description of Artificial Sequence: Synthetic oligonucleotide
gcacucagccuccgcauca

SEQ ID NO: 1995588 - RNA, 19 nt, Artificial Sequence
  Description of Artificial Sequence: Synthetic oligonucleotide
cucagcuaucuuauccaau

SEQ ID NO: 1995589 - RNA, 19 nt, Artificial Sequence
  Description of Artificial Sequence: Synthetic oligonucleotide
ccaccacguaccucugggc

SEQ ID NO: 1995590 - RNA, 19 nt, Artificial Sequence
  Description of Artificial Sequence: Synthetic oligonucleotide
cgucgcgcuggcaacugcg

SEQ ID NO: 1995591 - RNA, 19 nt, Artificial Sequence
  Description of Artificial Sequence: Synthetic oligonucleotide
agucauccugaggccgcug

SEQ ID NO: 1995592 - RNA, 19 nt, Artificial Sequence
  Description of Artificial Sequence: Synthetic oligonucleotide
guaucgcacuuguguucga

SEQ ID NO: 1995593 - RNA, 19 nt, Artificial Sequence
  Description of Artificial Sequence: Synthetic oligonucleotide
gccacgcaacuuuguccgg

SEQ ID NO: 1995594 - RNA, 19 nt, Artificial Sequence
  Description of Artificial Sequence: Synthetic oligonucleotide
cacgcaacuuuguccggua

SEQ ID NO: 1995595 - RNA, 19 nt, Artificial Sequence
  Description of Artificial Sequence: Synthetic oligonucleotide
cgagucauuguagagaccu

SEQ ID NO: 1995596 - RNA, 19 nt, Artificial Sequence
  Description of Artificial Sequence: Synthetic oligonucleotide
gucuggggauauagggcca

SEQ ID NO: 1995597 - RNA, 19 nt, Artificial Sequence
  Description of Artificial Sequence: Synthetic oligonucleotide
gcauaggaagugucuucaa

SEQ ID NO: 1995598 - RNA, 19 nt, Artificial Sequence
  Description of Artificial Sequence: Synthetic oligonucleotide
gcgauggcgggaacaggag

SEQ ID NO: 1995599 - RNA, 19 nt, Artificial Sequence
  Description of Artificial Sequence: Synthetic oligonucleotide
cgcuauccgccucucuucc

SEQ ID NO: 1995600 - RNA, 19 nt, Artificial Sequence
  Description of Artificial Sequence: Synthetic oligonucleotide
cacgucgcgcuggcaacug

SEQ ID NO: 1995601 - RNA, 19 nt, Artificial Sequence
  Description of Artificial Sequence: Synthetic oligonucleotide
ccgagucauuguagagacc

SEQ ID NO: 1995602 - RNA, 19 nt, Artificial Sequence
  Description of Artificial Sequence: Synthetic oligonucleotide
acaucgagucugggguaaa

SEQ ID NO: 1995603 - RNA, 19 nt, Artificial Sequence
  Description of Artificial Sequence: Synthetic oligonucleotide
ccgcuauccgccucucuuc

SEQ ID NO: 1995604 - RNA, 19 nt, Artificial Sequence
  Description of Artificial Sequence: Synthetic oligonucleotide
aggucggcaguggcagacu

SEQ ID NO: 1995605 - RNA, 19 nt, Artificial Sequence
  Description of Artificial Sequence: Synthetic oligonucleotide
cgggaaucagcagacacga

SEQ ID NO: 1995606 - RNA, 19 nt, Artificial Sequence
  Description of Artificial Sequence: Synthetic oligonucleotide
ggacaucgagucuggggua

SEQ ID NO: 1995607 - RNA, 19 nt, Artificial Sequence
  Description of Artificial Sequence: Synthetic oligonucleotide
cguuuguugccuucuccca

SEQ ID NO: 1995608 - RNA, 19 nt, Artificial Sequence
  Description of Artificial Sequence: Synthetic oligonucleotide
caucgagucugggguaaaa

SEQ ID NO: 1995609 - RNA, 19 nt, Artificial Sequence
  Description of Artificial Sequence: Synthetic oligonucleotide
caacugcgauggcgggaac

SEQ ID NO: 1995610 - RNA, 19 nt, Artificial Sequence
  Description of Artificial Sequence: Synthetic oligonucleotide
cuucucccaugaggucggc

SEQ ID NO: 1995611 - RNA, 19 nt, Artificial Sequence
  Description of Artificial Sequence: Synthetic oligonucleotide
cugacugcugcagcagugu

SEQ ID NO: 1995612 - RNA, 19 nt, Artificial Sequence
  Description of Artificial Sequence: Synthetic oligonucleotide
gucgcgcuggcaacugcga

SEQ ID NO: 1995613 - RNA, 19 nt, Artificial Sequence
  Description of Artificial Sequence: Synthetic oligonucleotide
cuuccucacaggguaguau

SEQ ID NO: 1995614 - RNA, 19 nt, Artificial Sequence
  Description of Artificial Sequence: Synthetic oligonucleotide
gcuucccgauccagagggg

SEQ ID NO: 1995615 - RNA, 19 nt, Artificial Sequence
  Description of Artificial Sequence: Synthetic oligonucleotide
cuggggcagugggaugaug

SEQ ID NO: 1995616 - RNA, 19 nt, Artificial Sequence
  Description of Artificial Sequence: Synthetic oligonucleotide
ggucugugaaggacaucga

SEQ ID NO: 1995617 - RNA, 19 nt, Artificial Sequence
  Description of Artificial Sequence: Synthetic oligonucleotide
guguggaucagggcacggu

SEQ ID NO: 1995618 - RNA, 19 nt, Artificial Sequence
  Description of Artificial Sequence: Synthetic oligonucleotide
agccuccgcaucagccuug

SEQ ID NO: 1995619 - RNA, 19 nt, Artificial Sequence
  Description of Artificial Sequence: Synthetic oligonucleotide
gcuauccgccucucuucca

SEQ ID NO: 1995620 - RNA, 19 nt, Artificial Sequence
  Description of Artificial Sequence: Synthetic oligonucleotide
cgguaauaaggagaaaucu

SEQ ID NO: 1995621 - RNA, 19 nt, Artificial Sequence
  Description of Artificial Sequence: Synthetic oligonucleotide
ggcaacugcgauggcggga

SEQ ID NO: 1995622 - RNA, 19 nt, Artificial Sequence
  Description of Artificial Sequence: Synthetic oligonucleotide
agggucugucucaggguua

SEQ ID NO: 1995623 - RNA, 19 nt, Artificial Sequence
  Description of Artificial Sequence: Synthetic oligonucleotide
ccacguaccucugggccac

SEQ ID NO: 1995624 - RNA, 19 nt, Artificial Sequence
  Description of Artificial Sequence: Synthetic oligonucleotide
gggacgggucugugaagga

SEQ ID NO: 1995625 - RNA, 19 nt, Artificial Sequence
  Description of Artificial Sequence: Synthetic oligonucleotide
ccgacucagggugugucuc

SEQ ID NO: 1995626 - RNA, 19 nt, Artificial Sequence
  Description of Artificial Sequence: Synthetic oligonucleotide
ccgauccagaggggcaggg

SEQ ID NO: 1995627 - RNA, 19 nt, Artificial Sequence
  Description of Artificial Sequence: Synthetic oligonucleotide
ccucugcgcauggucuucc

SEQ ID NO: 1995628 - RNA, 19 nt, Artificial Sequence
  Description of Artificial Sequence: Synthetic oligonucleotide
gggucauggcugacugcug

SEQ ID NO: 1995629 - RNA, 19 nt, Artificial Sequence
  Description of Artificial Sequence: Synthetic oligonucleotide
gcgguuguguagaggccac

SEQ ID NO: 1995630 - RNA, 19 nt, Artificial Sequence
  Description of Artificial Sequence: Synthetic oligonucleotide
acguaccucugggccacau

SEQ ID NO: 1995631 - RNA, 19 nt, Artificial Sequence
  Description of Artificial Sequence: Synthetic oligonucleotide
gggcuccuuacaagccacc

SEQ ID NO: 1995632 - RNA, 19 nt, Artificial Sequence
  Description of Artificial Sequence: Synthetic oligonucleotide
gugcucacuccucgagcgu

SEQ ID NO: 1995633 - RNA, 19 nt, Artificial Sequence
  Description of Artificial Sequence: Synthetic oligonucleotide
cugcauucgcucguggguu

SEQ ID NO: 1995634 - RNA, 19 nt, Artificial Sequence
  Description of Artificial Sequence: Synthetic oligonucleotide
ccuuacaagccaccacgua

SEQ ID NO: 1995635 - RNA, 19 nt, Artificial Sequence
  Description of Artificial Sequence: Synthetic oligonucleotide
ggaacucguuuguugccuu

SEQ ID NO: 1995636 - RNA, 19 nt, Artificial Sequence
  Description of Artificial Sequence: Synthetic oligonucleotide
accugcgaucuuggccgcu

SEQ ID NO: 1995637 - RNA, 19 nt, Artificial Sequence
  Description of Artificial Sequence: Synthetic oligonucleotide
ggcugacugcugcagcagu

SEQ ID NO: 1995638 - RNA, 19 nt, Artificial Sequence
  Description of Artificial Sequence: Synthetic oligonucleotide
ggagagucgcuggaacgcu

SEQ ID NO: 1995639 - RNA, 19 nt, Artificial Sequence
  Description of Artificial Sequence: Synthetic oligonucleotide
cagugucaucagcacgccu

SEQ ID NO: 1995640 - RNA, 19 nt, Artificial Sequence
  Description of Artificial Sequence: Synthetic oligonucleotide
cgcucguggguuuucugga

SEQ ID NO: 1995641 - RNA, 19 nt, Artificial Sequence
  Description of Artificial Sequence: Synthetic oligonucleotide
gggccaugggacgggucug

SEQ ID NO: 1995642 - RNA, 19 nt, Artificial Sequence
  Description of Artificial Sequence: Synthetic oligonucleotide
ggaugaugcgccgccgacu

SEQ ID NO: 1995643 - RNA, 19 nt, Artificial Sequence
  Description of Artificial Sequence: Synthetic oligonucleotide
ccgccucucuuccagcaga

SEQ ID NO: 1995644 - RNA, 19 nt, Artificial Sequence
  Description of Artificial Sequence: Synthetic oligonucleotide
gagagucgcuggaacgcuu

SEQ ID NO: 1995645 - RNA, 19 nt, Artificial Sequence
  Description of Artificial Sequence: Synthetic oligonucleotide
cuccucgagcguucuuccu

SEQ ID NO: 1995646 - RNA, 19 nt, Artificial Sequence
  Description of Artificial Sequence: Synthetic oligonucleotide
gcacuuguguucgaagguu

SEQ ID NO: 1995647 - RNA, 19 nt, Artificial Sequence
  Description of Artificial Sequence: Synthetic oligonucleotide
guccgguaauaaggagaaa

SEQ ID NO: 1995648 - RNA, 19 nt, Artificial Sequence
  Description of Artificial Sequence: Synthetic oligonucleotide
uggccgcuauccgccucuc

SEQ ID NO: 1995649 - RNA, 19 nt, Artificial Sequence
  Description of Artificial Sequence: Synthetic oligonucleotide
gccgacucagggugugucu

SEQ ID NO: 1995650 - RNA, 19 nt, Artificial Sequence
  Description of Artificial Sequence: Synthetic oligonucleotide
gccaugggacgggucugug

SEQ ID NO: 1995651 - RNA, 19 nt, Artificial Sequence
  Description of Artificial Sequence: Synthetic oligonucleotide
cucacuccucgagcguucu

SEQ ID NO: 1995652 - RNA, 19 nt, Artificial Sequence
  Description of Artificial Sequence: Synthetic oligonucleotide
gccgccgacucagggugug

SEQ ID NO: 1995653 - RNA, 19 nt, Artificial Sequence
  Description of Artificial Sequence: Synthetic oligonucleotide
gcucguggguuuucuggau

SEQ ID NO: 1995654 - RNA, 19 nt, Artificial Sequence
  Description of Artificial Sequence: Synthetic oligonucleotide
caucuaccucauacuuguu

SEQ ID NO: 1995655 - RNA, 19 nt, Artificial Sequence
  Description of Artificial Sequence: Synthetic oligonucleotide
cgguuguguagaggccacg

SEQ ID NO: 1995656 - RNA, 19 nt, Artificial Sequence
  Description of Artificial Sequence: Synthetic oligonucleotide
caagccagccagccagcuu

SEQ ID NO: 1995657 - RNA, 19 nt, Artificial Sequence
  Description of Artificial Sequence: Synthetic oligonucleotide
cuccagguuuggccacaua

SEQ ID NO: 1995658 - RNA, 19 nt, Artificial Sequence
  Description of Artificial Sequence: Synthetic oligonucleotide
cgagcguucuuccuggguu

SEQ ID NO: 1995659 - RNA, 19 nt, Artificial Sequence
  Description of Artificial Sequence: Synthetic oligonucleotide
ggggaguagccgucugcau

SEQ ID NO: 1995660 - RNA, 19 nt, Artificial Sequence
  Description of Artificial Sequence: Synthetic oligonucleotide
gggcacgguagaagcaggu

SEQ ID NO: 1995661 - RNA, 19 nt, Artificial Sequence
  Description of Artificial Sequence: Synthetic oligonucleotide
gccucucuuccagcagaga

SEQ ID NO: 1995662 - RNA, 19 nt, Artificial Sequence
  Description of Artificial Sequence: Synthetic oligonucleotide
ccuccgcaucagccuuggc

SEQ ID NO: 1995663 - RNA, 19 nt, Artificial Sequence
  Description of Artificial Sequence: Synthetic oligonucleotide
cgccgacucaggguguguc

SEQ ID NO: 1995664 - RNA, 19 nt, Artificial Sequence
  Description of Artificial Sequence: Synthetic oligonucleotide
cagguggucuggggauaua

SEQ ID NO: 1995665 - RNA, 19 nt, Artificial Sequence
  Description of Artificial Sequence: Synthetic oligonucleotide
gcagguggucuggggauau

SEQ ID NO: 1995666 - RNA, 19 nt, Artificial Sequence
  Description of Artificial Sequence: Synthetic oligonucleotide
cacguaccucugggccaca

SEQ ID NO: 1995667 - RNA, 19 nt, Artificial Sequence
  Description of Artificial Sequence: Synthetic oligonucleotide
gcacgucgcgcuggcaacu

SEQ ID NO: 1995668 - RNA, 19 nt, Artificial Sequence
  Description of Artificial Sequence: Synthetic oligonucleotide
ggccgcuauccgccucucu

SEQ ID NO: 1995669 - RNA, 19 nt, Artificial Sequence
  Description of Artificial Sequence: Synthetic oligonucleotide
cgacucagggugugucucu

SEQ ID NO: 1995670 - RNA, 19 nt, Artificial Sequence
  Description of Artificial Sequence: Synthetic oligonucleotide
gcauucgcucguggguuuu

SEQ ID NO: 1995671 - RNA, 19 nt, Artificial Sequence
  Description of Artificial Sequence: Synthetic oligonucleotide
ccgcaucagccuuggcggu

SEQ ID NO: 1995672 - RNA, 19 nt, Artificial Sequence
  Description of Artificial Sequence: Synthetic oligonucleotide
cgggucugugaaggacauc

SEQ ID NO: 1995673 - RNA, 19 nt, Artificial Sequence
  Description of Artificial Sequence: Synthetic oligonucleotide
cgauccagaggggcagggu

SEQ ID NO: 1995674 - RNA, 19 nt, Artificial Sequence
  Description of Artificial Sequence: Synthetic oligonucleotide
ccgccgacucagggugugu

SEQ ID NO: 1995675 - RNA, 19 nt, Artificial Sequence
  Description of Artificial Sequence: Synthetic oligonucleotide
cgccgccgacucagggugu

SEQ ID NO: 1995676 - RNA, 19 nt, Artificial Sequence
  Description of Artificial Sequence: Synthetic oligonucleotide
uuugauacaacauaaaauc

SEQ ID NO: 1995677 - RNA, 19 nt, Artificial Sequence
  Description of Artificial Sequence: Synthetic oligonucleotide
auagccaacagccaggacg

SEQ ID NO: 1995678 - RNA, 19 nt, Artificial Sequence
  Description of Artificial Sequence: Synthetic oligonucleotide
aagugaaacuuuucuaugg

SEQ ID NO: 1995679 - RNA, 19 nt, Artificial Sequence
  Description of Artificial Sequence: Synthetic oligonucleotide
aaugucuucagucuguagu

SEQ ID NO: 1995680 - RNA, 19 nt, Artificial Sequence
  Description of Artificial Sequence: Synthetic oligonucleotide
uuuuaugacaggaagugcu

SEQ ID NO: 1995681 - RNA, 19 nt, Artificial Sequence
  Description of Artificial Sequence: Synthetic oligonucleotide
cauaaaaucaucagucacc

SEQ ID NO: 1995682 - RNA, 19 nt, Artificial Sequence
  Description of Artificial Sequence: Synthetic oligonucleotide
acauaaaaucaucagucac

SEQ ID NO: 1995683 - RNA, 19 nt, Artificial Sequence
  Description of Artificial Sequence: Synthetic oligonucleotide
aaggguacgugucuucucc

SEQ ID NO: 1995684 - RNA, 19 nt, Artificial Sequence
  Description of Artificial Sequence: Synthetic oligonucleotide
uucaaucccauuuuaaaug

SEQ ID NO: 1995685 - RNA, 19 nt, Artificial Sequence
  Description of Artificial Sequence: Synthetic oligonucleotide
aauucugaggcuccgacca

SEQ ID NO: 1995686 - RNA, 19 nt, Artificial Sequence
  Description of Artificial Sequence: Synthetic oligonucleotide
agugaaacuuuucuauggc

SEQ ID NO: 1995687 - RNA, 19 nt, Artificial Sequence
  Description of Artificial Sequence: Synthetic oligonucleotide
uacaggauguacucgaagg

SEQ ID NO: 1995688 - RNA, 19 nt, Artificial Sequence
  Description of Artificial Sequence: Synthetic oligonucleotide
caugguuuaccuuaucugg

SEQ ID NO: 1995689 - RNA, 19 nt, Artificial Sequence
  Description of Artificial Sequence: Synthetic oligonucleotide
cucuccauagccaacagcc

SEQ ID NO: 1995690 - RNA, 19 nt, Artificial Sequence
  Description of Artificial Sequence: Synthetic oligonucleotide
uuugccuaccauuaguugc

SEQ ID NO: 1995691 - RNA, 19 nt, Artificial Sequence
  Description of Artificial Sequence: Synthetic oligonucleotide
ugagcuguaugucuuuugg

SEQ ID NO: 1995692 - RNA, 19 nt, Artificial Sequence
  Description of Artificial Sequence: Synthetic oligonucleotide
agguaguuaccuuuggugg

SEQ ID NO: 1995693 - RNA, 19 nt, Artificial Sequence
  Description of Artificial Sequence: Synthetic oligonucleotide
ugaaaacugguucaauccc

SEQ ID NO: 1995694 - RNA, 19 nt, Artificial Sequence
  Description of Artificial Sequence: Synthetic oligonucleotide
ugaaacuuuucuauggcgu

SEQ ID NO: 1995695 - RNA, 19 nt, Artificial Sequence
  Description of Artificial Sequence: Synthetic oligonucleotide
ugauacaacauaaaaucau

SEQ ID NO: 1995696 - RNA, 19 nt, Artificial Sequence
  Description of Artificial Sequence: Synthetic oligonucleotide
cugaaaacugguucaaucc

SEQ ID NO: 1995697 - RNA, 19 nt, Artificial Sequence
  Description of Artificial Sequence: Synthetic oligonucleotide
uugauacaacauaaaauca

SEQ ID NO: 1995698 - RNA, 19 nt, Artificial Sequence
  Description of Artificial Sequence: Synthetic oligonucleotide
ugaagugaaacuuuucuau

SEQ ID NO: 1995699 - RNA, 19 nt, Artificial Sequence
  Description of Artificial Sequence: Synthetic oligonucleotide
uguauagugccacagcuuc

SEQ ID NO: 1995700 - RNA, 19 nt, Artificial Sequence
  Description of Artificial Sequence: Synthetic oligonucleotide
acaggauguacucgaaggc

SEQ ID NO: 1995701 - RNA, 19 nt, Artificial Sequence
  Description of Artificial Sequence: Synthetic oligonucleotide
uugagugugauguuggcga

SEQ ID NO: 1995702 - RNA, 19 nt, Artificial Sequence
  Description of Artificial Sequence: Synthetic oligonucleotide
cuuaucuggaguuuuauga

SEQ ID NO: 1995703 - RNA, 19 nt, Artificial Sequence
  Description of Artificial Sequence: Synthetic oligonucleotide
uccuugacgaaugcgaugg

SEQ ID NO: 1995704 - RNA, 19 nt, Artificial Sequence
  Description of Artificial Sequence: Synthetic oligonucleotide
cauuaguugccuuugcagc

SEQ ID NO: 1995705 - RNA, 19 nt, Artificial Sequence
  Description of Artificial Sequence: Synthetic oligonucleotide
ugggauuuccaucgaaggg

SEQ ID NO: 1995706 - RNA, 19 nt, Artificial Sequence
  Description of Artificial Sequence: Synthetic oligonucleotide
acacauguucuuuccacgc

SEQ ID NO: 1995707 - RNA, 19 nt, Artificial Sequence
  Description of Artificial Sequence: Synthetic oligonucleotide
cuuuccacgcucaaugagg

SEQ ID NO: 1995708 - RNA, 19 nt, Artificial Sequence
  Description of Artificial Sequence: Synthetic oligonucleotide
gagguaguuaccuuuggug

SEQ ID NO: 1995709 - RNA, 19 nt, Artificial Sequence
  Description of Artificial Sequence: Synthetic oligonucleotide
ucgucauugagugugaugu

SEQ ID NO: 1995710 - RNA, 19 nt, Artificial Sequence
  Description of Artificial Sequence: Synthetic oligonucleotide
uuuaugacaggaagugcug

SEQ ID NO: 1995711 - RNA, 19 nt, Artificial Sequence
  Description of Artificial Sequence: Synthetic oligonucleotide
ugaacaauucugaggcucc

SEQ ID NO: 1995712 - RNA, 19 nt, Artificial Sequence
  Description of Artificial Sequence: Synthetic oligonucleotide
ucaaucccauuuuaaaugu

SEQ ID NO: 1995713 - RNA, 19 nt, Artificial Sequence
  Description of Artificial Sequence: Synthetic oligonucleotide
ugugugguuccucugguug

SEQ ID NO: 1995714 - RNA, 19 nt, Artificial Sequence
  Description of Artificial Sequence: Synthetic oligonucleotide
uguaguuguauuccacuga

SEQ ID NO: 1995715 - RNA, 19 nt, Artificial Sequence
  Description of Artificial Sequence: Synthetic oligonucleotide
ggcugaacaauucugaggc

SEQ ID NO: 1995716 - RNA, 19 nt, Artificial Sequence
  Description of Artificial Sequence: Synthetic oligonucleotide
agcuguaugucuuuuggug

SEQ ID NO: 1995717 - RNA, 19 nt, Artificial Sequence
  Description of Artificial Sequence: Synthetic oligonucleotide
guaguuguauuccacugag

SEQ ID NO: 1995718 - RNA, 19 nt, Artificial Sequence
  Description of Artificial Sequence: Synthetic oligonucleotide
uuaucuggaguuuuaugac

SEQ ID NO: 1995719 - RNA, 19 nt, Artificial Sequence
  Description of Artificial Sequence: Synthetic oligonucleotide
ugcguuuuauuucagcaaa

SEQ ID NO: 1995720 - RNA, 19 nt, Artificial Sequence
  Description of Artificial Sequence: Synthetic oligonucleotide
acuugcguuuuauuucagc

SEQ ID NO: 1995721 - RNA, 19 nt, Artificial Sequence
  Description of Artificial Sequence: Synthetic oligonucleotide
uucgcagccgugauuauug

SEQ ID NO: 1995722 - RNA, 19 nt, Artificial Sequence
  Description of Artificial Sequence: Synthetic oligonucleotide
aacugguucaaucccauuu

SEQ ID NO: 1995723 - RNA, 19 nt, Artificial Sequence
  Description of Artificial Sequence: Synthetic oligonucleotide
uuggcgacguccuugacga

SEQ ID NO: 1995724 - RNA, 19 nt, Artificial Sequence
  Description of Artificial Sequence: Synthetic oligonucleotide
gugaaacuuuucuauggcg

SEQ ID NO: 1995725 - RNA, 19 nt, Artificial Sequence
  Description of Artificial Sequence: Synthetic oligonucleotide
uuuucacgauccaguaggg

SEQ ID NO: 1995726 - RNA, 19 nt, Artificial Sequence
  Description of Artificial Sequence: Synthetic oligonucleotide
ucuuuccacgcucaaugag

SEQ ID NO: 1995727 - RNA, 19 nt, Artificial Sequence
  Description of Artificial Sequence: Synthetic oligonucleotide
caugucugaaaacugguuc

SEQ ID NO: 1995728 - RNA, 19 nt, Artificial Sequence
  Description of Artificial Sequence: Synthetic oligonucleotide
aaucccauuuuaaaugugu

SEQ ID NO: 1995729 - RNA, 19 nt, Artificial Sequence
  Description of Artificial Sequence: Synthetic oligonucleotide
cacaggguuguauagugcc

SEQ ID NO: 1995730 - RNA, 19 nt, Artificial Sequence
  Description of Artificial Sequence: Synthetic oligonucleotide
uugccuaccauuaguugcc

SEQ ID NO: 1995731 - RNA, 19 nt, Artificial Sequence
  Description of Artificial Sequence: Synthetic oligonucleotide
gugggauuuccaucgaagg

SEQ ID NO: 1995732 - RNA, 19 nt, Artificial Sequence
  Description of Artificial Sequence: Synthetic oligonucleotide
cacaguuuccuccagggug

SEQ ID NO: 1995733 - RNA, 19 nt, Artificial Sequence
  Description of Artificial Sequence: Synthetic oligonucleotide
uaucuggaguuuuaugaca

SEQ ID NO: 1995734 - RNA, 19 nt, Artificial Sequence
  Description of Artificial Sequence: Synthetic oligonucleotide
auuuccaucgaagggcugg

SEQ ID NO: 1995735 - RNA, 19 nt, Artificial Sequence
  Description of Artificial Sequence: Synthetic oligonucleotide
ugggcauguaucuuccucc

SEQ ID NO: 1995736 - RNA, 19 nt, Artificial Sequence
  Description of Artificial Sequence: Synthetic oligonucleotide
uucacgauccaguagggua

SEQ ID NO: 1995737 - RNA, 19 nt, Artificial Sequence
  Description of Artificial Sequence: Synthetic oligonucleotide
uccacgcucaaugaggaag

SEQ ID NO: 1995738 - RNA, 19 nt, Artificial Sequence
  Description of Artificial Sequence: Synthetic oligonucleotide
uuuccacgcucaaugagga

SEQ ID NO: 1995739 - RNA, 19 nt, Artificial Sequence
  Description of Artificial Sequence: Synthetic oligonucleotide
uucuauggcguucacgguc

SEQ ID NO: 1995740 - RNA, 19 nt, Artificial Sequence
  Description of Artificial Sequence: Synthetic oligonucleotide
ugcugagacaaaauuuccu

SEQ ID NO: 1995741 - RNA, 19 nt, Artificial Sequence
  Description of Artificial Sequence: Synthetic oligonucleotide
ugguuuaccuuaucuggag

SEQ ID NO: 1995742 - RNA, 19 nt, Artificial Sequence
  Description of Artificial Sequence: Synthetic oligonucleotide
cuugcguuuuauuucagca

SEQ ID NO: 1995743 - RNA, 19 nt, Artificial Sequence
  Description of Artificial Sequence: Synthetic oligonucleotide
auugagugugauguuggcg

SEQ ID NO: 1995744 - RNA, 19 nt, Artificial Sequence
  Description of Artificial Sequence: Synthetic oligonucleotide
guuggcgacguccuugacg

SEQ ID NO: 1995745 - RNA, 19 nt, Artificial Sequence
  Description of Artificial Sequence: Synthetic oligonucleotide
uuuaucuccccaguuggug

SEQ ID NO: 1995746 - RNA, 19 nt, Artificial Sequence
  Description of Artificial Sequence: Synthetic oligonucleotide
uaccuuugguggcugaaca

SEQ ID NO: 1995747 - RNA, 19 nt, Artificial Sequence
  Description of Artificial Sequence: Synthetic oligonucleotide
cauccuugccucuguaagg

SEQ ID NO: 1995748 - RNA, 19 nt, Artificial Sequence
  Description of Artificial Sequence: Synthetic oligonucleotide
uggcaaaugucuucagucu

SEQ ID NO: 1995749 - RNA, 19 nt, Artificial Sequence
  Description of Artificial Sequence: Synthetic oligonucleotide
agcaucuucccacuggcga

SEQ ID NO: 1995750 - RNA, 19 nt, Artificial Sequence
  Description of Artificial Sequence: Synthetic oligonucleotide
agccuuggcuuauaccugg

SEQ ID NO: 1995751 - RNA, 19 nt, Artificial Sequence
  Description of Artificial Sequence: Synthetic oligonucleotide
ugucauccaugacuugaag

SEQ ID NO: 1995752 - RNA, 19 nt, Artificial Sequence
  Description of Artificial Sequence: Synthetic oligonucleotide
uggaguuuuaugacaggaa

SEQ ID NO: 1995753 - RNA, 19 nt, Artificial Sequence
  Description of Artificial Sequence: Synthetic oligonucleotide
aaguacccuuuaucucccc

SEQ ID NO: 1995754 - RNA, 19 nt, Artificial Sequence
  Description of Artificial Sequence: Synthetic oligonucleotide
ugggugaauuuccccacag

SEQ ID NO: 1995755 - RNA, 19 nt, Artificial Sequence
  Description of Artificial Sequence: Synthetic oligonucleotide
uccgccaguccauggaggg

SEQ ID NO: 1995756 - RNA, 19 nt, Artificial Sequence
  Description of Artificial Sequence: Synthetic oligonucleotide
uaaaugugugguuccucug

SEQ ID NO: 1995757 - RNA, 19 nt, Artificial Sequence
  Description of Artificial Sequence: Synthetic oligonucleotide
aacuuuucuauggcguuca

SEQ ID NO: 1995758 - RNA, 19 nt, Artificial Sequence
  Description of Artificial Sequence: Synthetic oligonucleotide
cuucccacuggcgauagcc

SEQ ID NO: 1995759 - RNA, 19 nt, Artificial Sequence
  Description of Artificial Sequence: Synthetic oligonucleotide
ucacgauccaguaggguau

SEQ ID NO: 1995760 - RNA, 19 nt, Artificial Sequence
  Description of Artificial Sequence: Synthetic oligonucleotide
gguacuugcguuuuauuuc

SEQ ID NO: 1995761 - RNA, 19 nt, Artificial Sequence
  Description of Artificial Sequence: Synthetic oligonucleotide
uugacgaaugcgauggcuu

SEQ ID NO: 1995762 - RNA, 19 nt, Artificial Sequence
  Description of Artificial Sequence: Synthetic oligonucleotide
guacuugcguuuuauuuca

SEQ ID NO: 1995763 - RNA, 19 nt, Artificial Sequence
  Description of Artificial Sequence: Synthetic oligonucleotide
aaugaggaaguacccuuua

SEQ ID NO: 1995764 - RNA, 19 nt, Artificial Sequence
  Description of Artificial Sequence: Synthetic oligonucleotide
ucucccaugaugcccuugu

SEQ ID NO: 1995765 - RNA, 19 nt, Artificial Sequence
  Description of Artificial Sequence: Synthetic oligonucleotide
uacgugucuucucccauga

SEQ ID NO: 1995766 - RNA, 19 nt, Artificial Sequence
  Description of Artificial Sequence: Synthetic oligonucleotide
ucacuuugccuaccauuag

SEQ ID NO: 1995767 - RNA, 19 nt, Artificial Sequence
  Description of Artificial Sequence: Synthetic oligonucleotide
cagucuguaguuguauucc

SEQ ID NO: 1995768 - RNA, 19 nt, Artificial Sequence
  Description of Artificial Sequence: Synthetic oligonucleotide
uugcguuuuauuucagcaa

SEQ ID NO: 1995769 - RNA, 19 nt, Artificial Sequence
  Description of Artificial Sequence: Synthetic oligonucleotide
cuugaagugaaacuuuucu

SEQ ID NO: 1995770 - RNA, 19 nt, Artificial Sequence
  Description of Artificial Sequence: Synthetic oligonucleotide
gaaaacugguucaauccca

SEQ ID NO: 1995771 - RNA, 19 nt, Artificial Sequence
  Description of Artificial Sequence: Synthetic oligonucleotide
guugugggcauguaucuuc

SEQ ID NO: 1995772 - RNA, 19 nt, Artificial Sequence
  Description of Artificial Sequence: Synthetic oligonucleotide
uaggguauuccauccuucu

SEQ ID NO: 1995773 - RNA, 19 nt, Artificial Sequence
  Description of Artificial Sequence: Synthetic oligonucleotide
ucugguugugggcauguau

SEQ ID NO: 1995774 - RNA, 19 nt, Artificial Sequence
  Description of Artificial Sequence: Synthetic oligonucleotide
guuguauagugccacagcu

SEQ ID NO: 1995775 - RNA, 19 nt, Artificial Sequence
  Description of Artificial Sequence: Synthetic oligonucleotide
ugacuugaagugaaacuuu

SEQ ID NO: 1995776 - RNA, 19 nt, Artificial Sequence
  Description of Artificial Sequence: Synthetic oligonucleotide
gacggcaugguuuaccuua

SEQ ID NO: 1995777 - RNA, 19 nt, Artificial Sequence
  Description of Artificial Sequence: Synthetic oligonucleotide
cuuugccuaccauuaguug

SEQ ID NO: 1995778 - RNA, 19 nt, Artificial Sequence
  Description of Artificial Sequence: Synthetic oligonucleotide
guacccuuuaucuccccag

SEQ ID NO: 1995779 - RNA, 19 nt, Artificial Sequence
  Description of Artificial Sequence: Synthetic oligonucleotide
cuugccucuguaaggguac

SEQ ID NO: 1995780 - RNA, 19 nt, Artificial Sequence
  Description of Artificial Sequence: Synthetic oligonucleotide
cuggcgauagccacagcag

SEQ ID NO: 1995781 - RNA, 19 nt, Artificial Sequence
  Description of Artificial Sequence: Synthetic oligonucleotide
caauucugaggcuccgacc

SEQ ID NO: 1995782 - RNA, 19 nt, Artificial Sequence
  Description of Artificial Sequence: Synthetic oligonucleotide
gaaguucugggcacagucc

SEQ ID NO: 1995783 - RNA, 19 nt, Artificial Sequence
  Description of Artificial Sequence: Synthetic oligonucleotide
aggguacgugucuucuccc

SEQ ID NO: 1995784 - RNA, 19 nt, Artificial Sequence
  Description of Artificial Sequence: Synthetic oligonucleotide
accauuaguugccuuugca

SEQ ID NO: 1995785 - RNA, 19 nt, Artificial Sequence
  Description of Artificial Sequence: Synthetic oligonucleotide
guuuuaugacaggaagugc

SEQ ID NO: 1995786 - RNA, 19 nt, Artificial Sequence
  Description of Artificial Sequence: Synthetic oligonucleotide
augcccuuguuguacagga

SEQ ID NO: 1995787 - RNA, 19 nt, Artificial Sequence
  Description of Artificial Sequence: Synthetic oligonucleotide
uaguuguauuccacugagc

SEQ ID NO: 1995788 - RNA, 19 nt, Artificial Sequence
  Description of Artificial Sequence: Synthetic oligonucleotide
cugaacaauucugaggcuc

SEQ ID NO: 1995789 - RNA, 19 nt, Artificial Sequence
  Description of Artificial Sequence: Synthetic oligonucleotide
gguaguuaccuuugguggc

SEQ ID NO: 1995790 - RNA, 19 nt, Artificial Sequence
  Description of Artificial Sequence: Synthetic oligonucleotide
gcuguaugucuuuuggugc

SEQ ID NO: 1995791 - RNA, 19 nt, Artificial Sequence
  Description of Artificial Sequence: Synthetic oligonucleotide
caggauguacucgaaggcc

SEQ ID NO: 1995792 - RNA, 19 nt, Artificial Sequence
  Description of Artificial Sequence: Synthetic oligonucleotide
ccuuuaucuccccaguugg

SEQ ID NO: 1995793 - RNA, 19 nt, Artificial Sequence
  Description of Artificial Sequence: Synthetic oligonucleotide
gggauuuccaucgaagggc

SEQ ID NO: 1995794 - RNA, 19 nt, Artificial Sequence
  Description of Artificial Sequence: Synthetic oligonucleotide
guacaggauguacucgaag

SEQ ID NO: 1995795 - RNA, 19 nt, Artificial Sequence
  Description of Artificial Sequence: Synthetic oligonucleotide
aaagcucacaggguuguau

SEQ ID NO: 1995796 - RNA, 19 nt, Artificial Sequence
  Description of Artificial Sequence: Synthetic oligonucleotide
uccgaccagagguacuugc

SEQ ID NO: 1995797 - RNA, 19 nt, Artificial Sequence
  Description of Artificial Sequence: Synthetic oligonucleotide
cauugagugugauguuggc

SEQ ID NO: 1995798 - RNA, 19 nt, Artificial Sequence
  Description of Artificial Sequence: Synthetic oligonucleotide
gaugcccuuguuguacagg

SEQ ID NO: 1995799 - RNA, 19 nt, Artificial Sequence
  Description of Artificial Sequence: Synthetic oligonucleotide
uuuaaaugugugguuccuc

SEQ ID NO: 1995800 - RNA, 19 nt, Artificial Sequence
  Description of Artificial Sequence: Synthetic oligonucleotide
aagcucacaggguuguaua

SEQ ID NO: 1995801 - RNA, 19 nt, Artificial Sequence
  Description of Artificial Sequence: Synthetic oligonucleotide
ucaugucugaaaacugguu

SEQ ID NO: 1995802 - RNA, 19 nt, Artificial Sequence
  Description of Artificial Sequence: Synthetic oligonucleotide
uggcgauagccacagcaga

SEQ ID NO: 1995803 - RNA, 19 nt, Artificial Sequence
  Description of Artificial Sequence: Synthetic oligonucleotide
uguacucgaaggccuggcu

SEQ ID NO: 1995804 - RNA, 19 nt, Artificial Sequence
  Description of Artificial Sequence: Synthetic oligonucleotide
aaaacugguucaaucccau

SEQ ID NO: 1995805 - RNA, 19 nt, Artificial Sequence
  Description of Artificial Sequence: Synthetic oligonucleotide
gaacaauucugaggcuccg

SEQ ID NO: 1995806 - RNA, 19 nt, Artificial Sequence
  Description of Artificial Sequence: Synthetic oligonucleotide
uuguauagugccacagcuu

SEQ ID NO: 1995807 - RNA, 19 nt, Artificial Sequence
  Description of Artificial Sequence: Synthetic oligonucleotide
guacucgaaggccuggcug

SEQ ID NO: 1995808 - RNA, 19 nt, Artificial Sequence
  Description of Artificial Sequence: Synthetic oligonucleotide
gcaugguuuaccuuaucug

SEQ ID NO: 1995809 - RNA, 19 nt, Artificial Sequence
  Description of Artificial Sequence: Synthetic oligonucleotide
uguacaggauguacucgaa

SEQ ID NO: 1995810 - RNA, 19 nt, Artificial Sequence
  Description of Artificial Sequence: Synthetic oligonucleotide
uagugccacagcuuccacc

SEQ ID NO: 1995811 - RNA, 19 nt, Artificial Sequence
  Description of Artificial Sequence: Synthetic oligonucleotide
agucuguaguuguauucca

SEQ ID NO: 1995812 - RNA, 19 nt, Artificial Sequence
  Description of Artificial Sequence: Synthetic oligonucleotide
uaccauuaguugccuuugc

SEQ ID NO: 1995813 - RNA, 19 nt, Artificial Sequence
  Description of Artificial Sequence: Synthetic oligonucleotide
gaaguacccuuuaucuccc

SEQ ID NO: 1995814 - RNA, 19 nt, Artificial Sequence
  Description of Artificial Sequence: Synthetic oligonucleotide
aguaggguauuccauccuu

SEQ ID NO: 1995815 - RNA, 19 nt, Artificial Sequence
  Description of Artificial Sequence: Synthetic oligonucleotide
ggcguucacggucagcucg

SEQ ID NO: 1995816 - RNA, 19 nt, Artificial Sequence
  Description of Artificial Sequence: Synthetic oligonucleotide
cucacuuugccuaccauua

SEQ ID NO: 1995817 - RNA, 19 nt, Artificial Sequence
  Description of Artificial Sequence: Synthetic oligonucleotide
uguaaggguacgugucuuc

SEQ ID NO: 1995818 - RNA, 19 nt, Artificial Sequence
  Description of Artificial Sequence: Synthetic oligonucleotide
caccucaaaggcaaagcuc

SEQ ID NO: 1995819 - RNA, 19 nt, Artificial Sequence
  Description of Artificial Sequence: Synthetic oligonucleotide
ccauuaguugccuuugcag

SEQ ID NO: 1995820 - RNA, 19 nt, Artificial Sequence
  Description of Artificial Sequence: Synthetic oligonucleotide
ugcagccuuggcuuauacc

SEQ ID NO: 1995821 - RNA, 19 nt, Artificial Sequence
  Description of Artificial Sequence: Synthetic oligonucleotide
cgcucaaugaggaaguacc

SEQ ID NO: 1995822 - RNA, 19 nt, Artificial Sequence
  Description of Artificial Sequence: Synthetic oligonucleotide
auguacucgaaggccuggc

SEQ ID NO: 1995823 - RNA, 19 nt, Artificial Sequence
  Description of Artificial Sequence: Synthetic oligonucleotide
ucgaaggccuggcugggga

SEQ ID NO: 1995824 - RNA, 19 nt, Artificial Sequence
  Description of Artificial Sequence: Synthetic oligonucleotide
aggacggcaugguuuaccu

SEQ ID NO: 1995825 - RNA, 19 nt, Artificial Sequence
  Description of Artificial Sequence: Synthetic oligonucleotide
gacguccuugacgaaugcg

SEQ ID NO: 1995826 - RNA, 19 nt, Artificial Sequence
  Description of Artificial Sequence: Synthetic oligonucleotide
guucaaucccauuuuaaau

SEQ ID NO: 1995827 - RNA, 19 nt, Artificial Sequence
  Description of Artificial Sequence: Synthetic oligonucleotide
acuuuucuauggcguucac

SEQ ID NO: 1995828 - RNA, 19 nt, Artificial Sequence
  Description of Artificial Sequence: Synthetic oligonucleotide
agugugauguuggcgacgu

SEQ ID NO: 1995829 - RNA, 19 nt, Artificial Sequence
  Description of Artificial Sequence: Synthetic oligonucleotide
uuuaccuuaucuggaguuu

SEQ ID NO: 1995830 - RNA, 19 nt, Artificial Sequence
  Description of Artificial Sequence: Synthetic oligonucleotide
gguuguauagugccacagc

SEQ ID NO: 1995831 - RNA, 19 nt, Artificial Sequence
  Description of Artificial Sequence: Synthetic oligonucleotide
uccuucgcagccgugauua

SEQ ID NO: 1995832 - RNA, 19 nt, Artificial Sequence
  Description of Artificial Sequence: Synthetic oligonucleotide
aguacccuuuaucucccca

SEQ ID NO: 1995833 - RNA, 19 nt, Artificial Sequence
  Description of Artificial Sequence: Synthetic oligonucleotide
agcucugggugaauuuccc

SEQ ID NO: 1995834 - RNA, 19 nt, Artificial Sequence
  Description of Artificial Sequence: Synthetic oligonucleotide
caugacuugaagugaaacu

SEQ ID NO: 1995835 - RNA, 19 nt, Artificial Sequence
  Description of Artificial Sequence: Synthetic oligonucleotide
ggugcugugucauccauga

SEQ ID NO: 1995836 - RNA, 19 nt, Artificial Sequence
  Description of Artificial Sequence: Synthetic oligonucleotide
uucuuccgccaguccaugg

SEQ ID NO: 1995837 - RNA, 19 nt, Artificial Sequence
  Description of Artificial Sequence: Synthetic oligonucleotide
ugagugugauguuggcgac

SEQ ID NO: 1995838 - RNA, 19 nt, Artificial Sequence
  Description of Artificial Sequence: Synthetic oligonucleotide
auagugccacagcuuccac

SEQ ID NO: 1995839 - RNA, 19 nt, Artificial Sequence
  Description of Artificial Sequence: Synthetic oligonucleotide
gucaccucaaaggcaaagc

SEQ ID NO: 1995840 - RNA, 19 nt, Artificial Sequence
  Description of Artificial Sequence: Synthetic oligonucleotide
uuauuucagcaaaggucau

SEQ ID NO: 1995841 - RNA, 19 nt, Artificial Sequence
  Description of Artificial Sequence: Synthetic oligonucleotide
caaucccauuuuaaaugug

SEQ ID NO: 1995842 - RNA, 19 nt, Artificial Sequence
  Description of Artificial Sequence: Synthetic oligonucleotide
gcagccgugauuauugaag

SEQ ID NO: 1995843 - RNA, 19 nt, Artificial Sequence
  Description of Artificial Sequence: Synthetic oligonucleotide
gccuucucgucauugagug

SEQ ID NO: 1995844 - RNA, 19 nt, Artificial Sequence
  Description of Artificial Sequence: Synthetic oligonucleotide
uuucuauggcguucacggu

SEQ ID NO: 1995845 - RNA, 19 nt, Artificial Sequence
  Description of Artificial Sequence: Synthetic oligonucleotide
aggcaaagcucacaggguu

SEQ ID NO: 1995846 - RNA, 19 nt, Artificial Sequence
  Description of Artificial Sequence: Synthetic oligonucleotide
acgcucaaugaggaaguac

SEQ ID NO: 1995847 - RNA, 19 nt, Artificial Sequence
  Description of Artificial Sequence: Synthetic oligonucleotide
uggugcugugucauccaug

SEQ ID NO: 1995848 - RNA, 19 nt, Artificial Sequence
  Description of Artificial Sequence: Synthetic oligonucleotide
uacuugcguuuuauuucag

SEQ ID NO: 1995849 - RNA, 19 nt, Artificial Sequence
  Description of Artificial Sequence: Synthetic oligonucleotide
cacucagcagccaggcccc

SEQ ID NO: 1995850 - RNA, 19 nt, Artificial Sequence
  Description of Artificial Sequence: Synthetic oligonucleotide
uucagucuguaguuguauu

SEQ ID NO: 1995851 - RNA, 19 nt, Artificial Sequence
  Description of Artificial Sequence: Synthetic oligonucleotide
aucccauuuuaaaugugug

SEQ ID NO: 1995852 - RNA, 19 nt, Artificial Sequence
  Description of Artificial Sequence: Synthetic oligonucleotide
cuaccauuaguugccuuug

SEQ ID NO: 1995853 - RNA, 19 nt, Artificial Sequence
  Description of Artificial Sequence: Synthetic oligonucleotide
ugucugaaaacugguucaa

SEQ ID NO: 1995854 - RNA, 19 nt, Artificial Sequence
  Description of Artificial Sequence: Synthetic oligonucleotide
uccagggugggauuuccau

SEQ ID NO: 1995855 - RNA, 19 nt, Artificial Sequence
  Description of Artificial Sequence: Synthetic oligonucleotide
uucucgucauugaguguga

SEQ ID NO: 1995856 - RNA, 19 nt, Artificial Sequence
  Description of Artificial Sequence: Synthetic oligonucleotide
gagugugauguuggcgacg

SEQ ID NO: 1995857 - RNA, 19 nt, Artificial Sequence
  Description of Artificial Sequence: Synthetic oligonucleotide
aguuggugccccaagaguu

SEQ ID NO: 1995858 - RNA, 19 nt, Artificial Sequence
  Description of Artificial Sequence: Synthetic oligonucleotide
ggugggauuuccaucgaag

SEQ ID NO: 1995859 - RNA, 19 nt, Artificial Sequence
  Description of Artificial Sequence: Synthetic oligonucleotide
guacgugucuucucccaug

SEQ ID NO: 1995860 - RNA, 19 nt, Artificial Sequence
  Description of Artificial Sequence: Synthetic oligonucleotide
uuuccaucgaagggcuggc

SEQ ID NO: 1995861 - RNA, 19 nt, Artificial Sequence
  Description of Artificial Sequence: Synthetic oligonucleotide
augguuuaccuuaucugga

SEQ ID NO: 1995862 - RNA, 19 nt, Artificial Sequence
  Description of Artificial Sequence: Synthetic oligonucleotide
acguccuugacgaaugcga

SEQ ID NO: 1995863 - RNA, 19 nt, Artificial Sequence
  Description of Artificial Sequence: Synthetic oligonucleotide
ugacgaaugcgauggcuuu

SEQ ID NO: 1995864 - RNA, 19 nt, Artificial Sequence
  Description of Artificial Sequence: Synthetic oligonucleotide
ucacggucagcucgguggu

SEQ ID NO: 1995865 - RNA, 19 nt, Artificial Sequence
  Description of Artificial Sequence: Synthetic oligonucleotide
ggggagaccuccuucgcag

SEQ ID NO: 1995866 - RNA, 19 nt, Artificial Sequence
  Description of Artificial Sequence: Synthetic oligonucleotide
auguuggcgacguccuuga

SEQ ID NO: 1995867 - RNA, 19 nt, Artificial Sequence
  Description of Artificial Sequence: Synthetic oligonucleotide
gaguuuuaugacaggaagu

SEQ ID NO: 1995868 - RNA, 19 nt, Artificial Sequence
  Description of Artificial Sequence: Synthetic oligonucleotide
uaaggguacgugucuucuc

SEQ ID NO: 1995869 - RNA, 19 nt, Artificial Sequence
  Description of Artificial Sequence: Synthetic oligonucleotide
uuaccuuaucuggaguuuu

SEQ ID NO: 1995870 - RNA, 19 nt, Artificial Sequence
  Description of Artificial Sequence: Synthetic oligonucleotide
gucgaacuugcagugacca

SEQ ID NO: 1995871 - RNA, 19 nt, Artificial Sequence
  Description of Artificial Sequence: Synthetic oligonucleotide
aaacugguucaaucccauu

SEQ ID NO: 1995872 - RNA, 19 nt, Artificial Sequence
  Description of Artificial Sequence: Synthetic oligonucleotide
uguucuuuccacgcucaau

SEQ ID NO: 1995873 - RNA, 19 nt, Artificial Sequence
  Description of Artificial Sequence: Synthetic oligonucleotide
uaccuuaucuggaguuuua

SEQ ID NO: 1995874 - RNA, 19 nt, Artificial Sequence
  Description of Artificial Sequence: Synthetic oligonucleotide
aucgccuucucgucauuga

SEQ ID NO: 1995875 - RNA, 19 nt, Artificial Sequence
  Description of Artificial Sequence: Synthetic oligonucleotide
uuucacgauccaguagggu

SEQ ID NO: 1995876 - RNA, 19 nt, Artificial Sequence
  Description of Artificial Sequence: Synthetic oligonucleotide
gcccuuguuguacaggaug

SEQ ID NO: 1995877 - RNA, 19 nt, Artificial Sequence
  Description of Artificial Sequence: Synthetic oligonucleotide
ccaguuguuggcaaauguc

SEQ ID NO: 1995878 - RNA, 19 nt, Artificial Sequence
  Description of Artificial Sequence: Synthetic oligonucleotide
aggucaugucugaaaacug

SEQ ID NO: 1995879 - RNA, 19 nt, Artificial Sequence
  Description of Artificial Sequence: Synthetic oligonucleotide
cguuuuauuucagcaaagg

SEQ ID NO: 1995880 - RNA, 19 nt, Artificial Sequence
  Description of Artificial Sequence: Synthetic oligonucleotide
ucagcucggugguggcccg

SEQ ID NO: 1995881 - RNA, 19 nt, Artificial Sequence
  Description of Artificial Sequence: Synthetic oligonucleotide
guuccucugguugugggca

SEQ ID NO: 1995882 - RNA, 19 nt, Artificial Sequence
  Description of Artificial Sequence: Synthetic oligonucleotide
agagguacuugcguuuuau

SEQ ID NO: 1995883 - RNA, 19 nt, Artificial Sequence
  Description of Artificial Sequence: Synthetic oligonucleotide
accagagguacuugcguuu

SEQ ID NO: 1995884 - RNA, 19 nt, Artificial Sequence
  Description of Artificial Sequence: Synthetic oligonucleotide
acuuugccuaccauuaguu

SEQ ID NO: 1995885 - RNA, 19 nt, Artificial Sequence
  Description of Artificial Sequence: Synthetic oligonucleotide
guauagugccacagcuucc

SEQ ID NO: 1995886 - RNA, 19 nt, Artificial Sequence
  Description of Artificial Sequence: Synthetic oligonucleotide
gucuuuuggugcuguguca

SEQ ID NO: 1995887 - RNA, 19 nt, Artificial Sequence
  Description of Artificial Sequence: Synthetic oligonucleotide
gugccacggagguaguuac

SEQ ID NO: 1995888 - RNA, 19 nt, Artificial Sequence
  Description of Artificial Sequence: Synthetic oligonucleotide
gccgugauuauugaaguuc

SEQ ID NO: 1995889 - RNA, 19 nt, Artificial Sequence
  Description of Artificial Sequence: Synthetic oligonucleotide
accuuugguggcugaacaa

SEQ ID NO: 1995890 - RNA, 19 nt, Artificial Sequence
  Description of Artificial Sequence: Synthetic oligonucleotide
uuucuuccgccaguccaug

SEQ ID NO: 1995891 - RNA, 19 nt, Artificial Sequence
  Description of Artificial Sequence: Synthetic oligonucleotide
uugccucuguaaggguacg

SEQ ID NO: 1995892 - RNA, 19 nt, Artificial Sequence
  Description of Artificial Sequence: Synthetic oligonucleotide
ggguauuccauccuucucu

SEQ ID NO: 1995893 - RNA, 19 nt, Artificial Sequence
  Description of Artificial Sequence: Synthetic oligonucleotide
uugcagccuuggcuuauac

SEQ ID NO: 1995894 - RNA, 19 nt, Artificial Sequence
  Description of Artificial Sequence: Synthetic oligonucleotide
ccuuaucuggaguuuuaug

SEQ ID NO: 1995895 - RNA, 19 nt, Artificial Sequence
  Description of Artificial Sequence: Synthetic oligonucleotide
cuuuuggugcugugucauc

SEQ ID NO: 1995896 - RNA, 19 nt, Artificial Sequence
  Description of Artificial Sequence: Synthetic oligonucleotide
aguuaccuuugguggcuga

SEQ ID NO: 1995897 - RNA, 19 nt, Artificial Sequence
  Description of Artificial Sequence: Synthetic oligonucleotide
ggugaauuuccccacaguu

SEQ ID NO: 1995898 - RNA, 19 nt, Artificial Sequence
  Description of Artificial Sequence: Synthetic oligonucleotide
ugcuggaguaaaugccuuu

SEQ ID NO: 1995899 - RNA, 19 nt, Artificial Sequence
  Description of Artificial Sequence: Synthetic oligonucleotide
cauccaugacuugaaguga

SEQ ID NO: 1995900 - RNA, 19 nt, Artificial Sequence
  Description of Artificial Sequence: Synthetic oligonucleotide
cagugaccauccuugccuc

SEQ ID NO: 1995901 - RNA, 19 nt, Artificial Sequence
  Description of Artificial Sequence: Synthetic oligonucleotide
agugaccauccuugccucu

SEQ ID NO: 1995902 - RNA, 19 nt, Artificial Sequence
  Description of Artificial Sequence: Synthetic oligonucleotide
acggagguaguuaccuuug

SEQ ID NO: 1995903 - RNA, 19 nt, Artificial Sequence
  Description of Artificial Sequence: Synthetic oligonucleotide
uccuccaguuguuggcaaa

SEQ ID NO: 1995904 - RNA, 19 nt, Artificial Sequence
  Description of Artificial Sequence: Synthetic oligonucleotide
agugccacggagguaguua

SEQ ID NO: 1995905 - RNA, 19 nt, Artificial Sequence
  Description of Artificial Sequence: Synthetic oligonucleotide
ucgaacuugcagugaccau

SEQ ID NO: 1995906 - RNA, 19 nt, Artificial Sequence
  Description of Artificial Sequence: Synthetic oligonucleotide
ggcccgggcacucagcagc

SEQ ID NO: 1995907 - RNA, 19 nt, Artificial Sequence
  Description of Artificial Sequence: Synthetic oligonucleotide
gugaccauccuugccucug

SEQ ID NO: 1995908 - RNA, 19 nt, Artificial Sequence
  Description of Artificial Sequence: Synthetic oligonucleotide
ggguuguauagugccacag

SEQ ID NO: 1995909 - RNA, 19 nt, Artificial Sequence
  Description of Artificial Sequence: Synthetic oligonucleotide
ggagaccuccuucgcagcc

SEQ ID NO: 1995910 - RNA, 19 nt, Artificial Sequence
  Description of Artificial Sequence: Synthetic oligonucleotide
uaguuaccuuugguggcug

SEQ ID NO: 1995911 - RNA, 19 nt, Artificial Sequence
  Description of Artificial Sequence: Synthetic oligonucleotide
ugguggcccgggcacucag

SEQ ID NO: 1995912 - RNA, 19 nt, Artificial Sequence
  Description of Artificial Sequence: Synthetic oligonucleotide
gagcuguaugucuuuuggu

SEQ ID NO: 1995913 - RNA, 19 nt, Artificial Sequence
  Description of Artificial Sequence: Synthetic oligonucleotide
accuuaucuggaguuuuau

SEQ ID NO: 1995914 - RNA, 19 nt, Artificial Sequence
  Description of Artificial Sequence: Synthetic oligonucleotide
aggcuccgaccagagguac

SEQ ID NO: 1995915 - RNA, 19 nt, Artificial Sequence
  Description of Artificial Sequence: Synthetic oligonucleotide
uuccuccaguuguuggcaa

SEQ ID NO: 1995916 - RNA, 19 nt, Artificial Sequence
  Description of Artificial Sequence: Synthetic oligonucleotide
gcucaaugaggaaguaccc

SEQ ID NO: 1995917 - RNA, 19 nt, Artificial Sequence
  Description of Artificial Sequence: Synthetic oligonucleotide
ccgaccagagguacuugcg

SEQ ID NO: 1995918 - RNA, 19 nt, Artificial Sequence
  Description of Artificial Sequence: Synthetic oligonucleotide
aggcagccaggccacacau

SEQ ID NO: 1995919 - RNA, 19 nt, Artificial Sequence
  Description of Artificial Sequence: Synthetic oligonucleotide
agccgugauuauugaaguu

SEQ ID NO: 1995920 - RNA, 19 nt, Artificial Sequence
  Description of Artificial Sequence: Synthetic oligonucleotide
ccaugacuugaagugaaac

SEQ ID NO: 1995921 - RNA, 19 nt, Artificial Sequence
  Description of Artificial Sequence: Synthetic oligonucleotide
ucgcagccgugauuauuga

SEQ ID NO: 1995922 - RNA, 19 nt, Artificial Sequence
  Description of Artificial Sequence: Synthetic oligonucleotide
ugcccuuguuguacaggau

SEQ ID NO: 1995923 - RNA, 19 nt, Artificial Sequence
  Description of Artificial Sequence: Synthetic oligonucleotide
accuccuucgcagccguga

SEQ ID NO: 1995924 - RNA, 19 nt, Artificial Sequence
  Description of Artificial Sequence: Synthetic oligonucleotide
ggcauguaucuuccuccag

SEQ ID NO: 1995925 - RNA, 19 nt, Artificial Sequence
  Description of Artificial Sequence: Synthetic oligonucleotide
auguucuuuccacgcucaa

SEQ ID NO: 1995926 - RNA, 19 nt, Artificial Sequence
  Description of Artificial Sequence: Synthetic oligonucleotide
cugagacaaaauuuccuuu

SEQ ID NO: 1995927 - RNA, 19 nt, Artificial Sequence
  Description of Artificial Sequence: Synthetic oligonucleotide
agcaaaggucaugucugaa

SEQ ID NO: 1995928 - RNA, 19 nt, Artificial Sequence
  Description of Artificial Sequence: Synthetic oligonucleotide
gacuugaagugaaacuuuu

SEQ ID NO: 1995929 - RNA, 19 nt, Artificial Sequence
  Description of Artificial Sequence: Synthetic oligonucleotide
ggcgauagccacagcagac

SEQ ID NO: 1995930 - RNA, 19 nt, Artificial Sequence
  Description of Artificial Sequence: Synthetic oligonucleotide
gcucugggugaauuucccc

SEQ ID NO: 1995931 - RNA, 19 nt, Artificial Sequence
  Description of Artificial Sequence: Synthetic oligonucleotide
guaguuaccuuugguggcu

SEQ ID NO: 1995932 - RNA, 19 nt, Artificial Sequence
  Description of Artificial Sequence: Synthetic oligonucleotide
uguuggcgacguccuugac

SEQ ID NO: 1995933 - RNA, 19 nt, Artificial Sequence
  Description of Artificial Sequence: Synthetic oligonucleotide
augugugguuccucugguu

SEQ ID NO: 1995934 - RNA, 19 nt, Artificial Sequence
  Description of Artificial Sequence: Synthetic oligonucleotide
guaaggguacgugucuucu

SEQ ID NO: 1995935 - RNA, 19 nt, Artificial Sequence
  Description of Artificial Sequence: Synthetic oligonucleotide
cagccgugauuauugaagu

SEQ ID NO: 1995936 - RNA, 19 nt, Artificial Sequence
  Description of Artificial Sequence: Synthetic oligonucleotide
cacuuugccuaccauuagu

SEQ ID NO: 1995937 - RNA, 19 nt, Artificial Sequence
  Description of Artificial Sequence: Synthetic oligonucleotide
cugguucaaucccauuuua

SEQ ID NO: 1995938 - RNA, 19 nt, Artificial Sequence
  Description of Artificial Sequence: Synthetic oligonucleotide
cgaacuugcagugaccauc

SEQ ID NO: 1995939 - RNA, 19 nt, Artificial Sequence
  Description of Artificial Sequence: Synthetic oligonucleotide
uuccacgcucaaugaggaa

SEQ ID NO: 1995940 - RNA, 19 nt, Artificial Sequence
  Description of Artificial Sequence: Synthetic oligonucleotide
uuugcagccuuggcuuaua

SEQ ID NO: 1995941 - RNA, 19 nt, Artificial Sequence
  Description of Artificial Sequence: Synthetic oligonucleotide
cuugacgaaugcgauggcu

SEQ ID NO: 1995942 - RNA, 19 nt, Artificial Sequence
  Description of Artificial Sequence: Synthetic oligonucleotide
ugccucuguaaggguacgu

SEQ ID NO: 1995943 - RNA, 19 nt, Artificial Sequence
  Description of Artificial Sequence: Synthetic oligonucleotide
agccaggacggcaugguuu

SEQ ID NO: 1995944 - RNA, 19 nt, Artificial Sequence
  Description of Artificial Sequence: Synthetic oligonucleotide
agggugggauuuccaucga

SEQ ID NO: 1995945 - RNA, 19 nt, Artificial Sequence
  Description of Artificial Sequence: Synthetic oligonucleotide
cagagacagcaucuuccca

SEQ ID NO: 1995946 - RNA, 19 nt, Artificial Sequence
  Description of Artificial Sequence: Synthetic oligonucleotide
ugccuaccauuaguugccu

SEQ ID NO: 1995947 - RNA, 19 nt, Artificial Sequence
  Description of Artificial Sequence: Synthetic oligonucleotide
cugggugaauuuccccaca

SEQ ID NO: 1995948 - RNA, 19 nt, Artificial Sequence
  Description of Artificial Sequence: Synthetic oligonucleotide
cuauggcguucacggucag

SEQ ID NO: 1995949 - RNA, 19 nt, Artificial Sequence
  Description of Artificial Sequence: Synthetic oligonucleotide
gggcauguaucuuccucca

SEQ ID NO: 1995950 - RNA, 19 nt, Artificial Sequence
  Description of Artificial Sequence: Synthetic oligonucleotide
ccagggugggauuuccauc

SEQ ID NO: 1995951 - RNA, 19 nt, Artificial Sequence
  Description of Artificial Sequence: Synthetic oligonucleotide
uuccaucgaagggcuggcu

SEQ ID NO: 1995952 - RNA, 19 nt, Artificial Sequence
  Description of Artificial Sequence: Synthetic oligonucleotide
ggagguaguuaccuuuggu

SEQ ID NO: 1995953 - RNA, 19 nt, Artificial Sequence
  Description of Artificial Sequence: Synthetic oligonucleotide
ggucgaacuugcagugacc

SEQ ID NO: 1995954 - RNA, 19 nt, Artificial Sequence
  Description of Artificial Sequence: Synthetic oligonucleotide
uggcguucacggucagcuc

SEQ ID NO: 1995955 - RNA, 19 nt, Artificial Sequence
  Description of Artificial Sequence: Synthetic oligonucleotide
ggguacgugucuucuccca

SEQ ID NO: 1995956 - RNA, 19 nt, Artificial Sequence
  Description of Artificial Sequence: Synthetic oligonucleotide
caccaucgccuucucguca

SEQ ID NO: 1995957 - RNA, 19 nt, Artificial Sequence
  Description of Artificial Sequence: Synthetic oligonucleotide
aucgaagggcuggcuccuc

SEQ ID NO: 1995958 - RNA, 19 nt, Artificial Sequence
  Description of Artificial Sequence: Synthetic oligonucleotide
gcgacguccuugacgaaug

SEQ ID NO: 1995959 - RNA, 19 nt, Artificial Sequence
  Description of Artificial Sequence: Synthetic oligonucleotide
cacggagguaguuaccuuu

SEQ ID NO: 1995960 - RNA, 19 nt, Artificial Sequence
  Description of Artificial Sequence: Synthetic oligonucleotide
aggaagugcuggaguaaau

SEQ ID NO: 1995961 - RNA, 19 nt, Artificial Sequence
  Description of Artificial Sequence: Synthetic oligonucleotide
cucggugguggcccgggca

SEQ ID NO: 1995962 - RNA, 19 nt, Artificial Sequence
  Description of Artificial Sequence: Synthetic oligonucleotide
ggcuccucacuuugccuac

SEQ ID NO: 1995963 - RNA, 19 nt, Artificial Sequence
  Description of Artificial Sequence: Synthetic oligonucleotide
uuccuccagggugggauuu

SEQ ID NO: 1995964 - RNA, 19 nt, Artificial Sequence
  Description of Artificial Sequence: Synthetic oligonucleotide
ccucaaaggcaaagcucac

SEQ ID NO: 1995965 - RNA, 19 nt, Artificial Sequence
  Description of Artificial Sequence: Synthetic oligonucleotide
cgugauuauugaaguucug

SEQ ID NO: 1995966 - RNA, 19 nt, Artificial Sequence
  Description of Artificial Sequence: Synthetic oligonucleotide
gggcacucagcagccaggc

SEQ ID NO: 1995967 - RNA, 19 nt, Artificial Sequence
  Description of Artificial Sequence: Synthetic oligonucleotide
ggauuuccaucgaagggcu

SEQ ID NO: 1995968 - RNA, 19 nt, Artificial Sequence
  Description of Artificial Sequence: Synthetic oligonucleotide
gaggcuccgaccagaggua

SEQ ID NO: 1995969 - RNA, 19 nt, Artificial Sequence
  Description of Artificial Sequence: Synthetic oligonucleotide
ccacuggcgauagccacag

SEQ ID NO: 1995970 - RNA, 19 nt, Artificial Sequence
  Description of Artificial Sequence: Synthetic oligonucleotide
acgugucuucucccaugau

SEQ ID NO: 1995971 - RNA, 19 nt, Artificial Sequence
  Description of Artificial Sequence: Synthetic oligonucleotide
ccccacaguuuccuccagg

SEQ ID NO: 1995972 - RNA, 19 nt, Artificial Sequence
  Description of Artificial Sequence: Synthetic oligonucleotide
gcaaaugucuucagucugu

SEQ ID NO: 1995973 - RNA, 19 nt, Artificial Sequence
  Description of Artificial Sequence: Synthetic oligonucleotide
acggcaugguuuaccuuau

SEQ ID NO: 1995974 - RNA, 19 nt, Artificial Sequence
  Description of Artificial Sequence: Synthetic oligonucleotide
ccgugauuauugaaguucu

SEQ ID NO: 1995975 - RNA, 19 nt, Artificial Sequence
  Description of Artificial Sequence: Synthetic oligonucleotide
ggcacucagcagccaggcc

SEQ ID NO: 1995976 - RNA, 19 nt, Artificial Sequence
  Description of Artificial Sequence: Synthetic oligonucleotide
cgauagccacagcagacuc

SEQ ID NO: 1995977 - RNA, 19 nt, Artificial Sequence
  Description of Artificial Sequence: Synthetic oligonucleotide
uccccaguuggugccccaa

SEQ ID NO: 1995978 - RNA, 19 nt, Artificial Sequence
  Description of Artificial Sequence: Synthetic oligonucleotide
gggaugggguaggaggcac

SEQ ID NO: 1995979 - RNA, 19 nt, Artificial Sequence
  Description of Artificial Sequence: Synthetic oligonucleotide
cuccgaccagagguacuug

SEQ ID NO: 1995980 - RNA, 19 nt, Artificial Sequence
  Description of Artificial Sequence: Synthetic oligonucleotide
cggagguaguuaccuuugg

SEQ ID NO: 1995981 - RNA, 19 nt, Artificial Sequence
  Description of Artificial Sequence: Synthetic oligonucleotide
ccgggcacucagcagccag

SEQ ID NO: 1995982 - RNA, 19 nt, Artificial Sequence
  Description of Artificial Sequence: Synthetic oligonucleotide
ccuugacgaaugcgauggc

SEQ ID NO: 1995983 - RNA, 19 nt, Artificial Sequence
  Description of Artificial Sequence: Synthetic oligonucleotide
ccuaccauuaguugccuuu

SEQ ID NO: 1995984 - RNA, 19 nt, Artificial Sequence
  Description of Artificial Sequence: Synthetic oligonucleotide
ccuugccucuguaagggua

SEQ ID NO: 1995985 - RNA, 19 nt, Artificial Sequence
  Description of Artificial Sequence: Synthetic oligonucleotide
gccaacagccaggacggca

SEQ ID NO: 1995986 - RNA, 19 nt, Artificial Sequence
  Description of Artificial Sequence: Synthetic oligonucleotide
caguaggguauuccauccu

SEQ ID NO: 1995987 - RNA, 19 nt, Artificial Sequence
  Description of Artificial Sequence: Synthetic oligonucleotide
gacgaaugcgauggcuuuu

SEQ ID NO: 1995988 - RNA, 19 nt, Artificial Sequence
  Description of Artificial Sequence: Synthetic oligonucleotide
caucuucccacuggcgaua

SEQ ID NO: 1995989 - RNA, 19 nt, Artificial Sequence
  Description of Artificial Sequence: Synthetic oligonucleotide
gggugggauuuccaucgaa

SEQ ID NO: 1995990 - RNA, 19 nt, Artificial Sequence
  Description of Artificial Sequence: Synthetic oligonucleotide
gguacgugucuucucccau

SEQ ID NO: 1995991 - RNA, 19 nt, Artificial Sequence
  Description of Artificial Sequence: Synthetic oligonucleotide
gggugaauuuccccacagu

SEQ ID NO: 1995992 - RNA, 19 nt, Artificial Sequence
  Description of Artificial Sequence: Synthetic oligonucleotide
cgggcacucagcagccagg

SEQ ID NO: 1995993 - RNA, 19 nt, Artificial Sequence
  Description of Artificial Sequence: Synthetic oligonucleotide
gcaucuucccacuggcgau

SEQ ID NO: 1995994 - RNA, 19 nt, Artificial Sequence
  Description of Artificial Sequence: Synthetic oligonucleotide
gugugauguuggcgacguc

SEQ ID NO: 1995995 - RNA, 19 nt, Artificial Sequence
  Description of Artificial Sequence: Synthetic oligonucleotide
gcugaacaauucugaggcu

SEQ ID NO: 1995996 - RNA, 19 nt, Artificial Sequence
  Description of Artificial Sequence: Synthetic oligonucleotide
gccacggagguaguuaccu

SEQ ID NO: 1995997 - RNA, 19 nt, Artificial Sequence
  Description of Artificial Sequence: Synthetic oligonucleotide
cccaguuggugccccaaga

SEQ ID NO: 1995998 - RNA, 19 nt, Artificial Sequence
  Description of Artificial Sequence: Synthetic oligonucleotide
ggguaaggggccagugcca

SEQ ID NO: 1995999 - RNA, 19 nt, Artificial Sequence
  Description of Artificial Sequence: Synthetic oligonucleotide
guuggugccccaagaguuu

SEQ ID NO: 1996000 - RNA, 19 nt, Artificial Sequence
  Description of Artificial Sequence: Synthetic oligonucleotide
cccacuggcgauagccaca

SEQ ID NO: 1996001 - RNA, 19 nt, Artificial Sequence
  Description of Artificial Sequence: Synthetic oligonucleotide
cagagguacuugcguuuua

SEQ ID NO: 1996002 - RNA, 19 nt, Artificial Sequence
  Description of Artificial Sequence: Synthetic oligonucleotide
cacggucagcucgguggug

SEQ ID NO: 1996003 - RNA, 19 nt, Artificial Sequence
  Description of Artificial Sequence: Synthetic oligonucleotide
ccacgcucaaugaggaagu

SEQ ID NO: 1996004 - RNA, 19 nt, Artificial Sequence
  Description of Artificial Sequence: Synthetic oligonucleotide
uggcgacguccuugacgaa

SEQ ID NO: 1996005 - RNA, 19 nt, Artificial Sequence
  Description of Artificial Sequence: Synthetic oligonucleotide
gcuccucacuuugccuacc

SEQ ID NO: 1996006 - RNA, 19 nt, Artificial Sequence
  Description of Artificial Sequence: Synthetic oligonucleotide
ccccgugguggagaaaguc

SEQ ID NO: 1996007 - RNA, 19 nt, Artificial Sequence
  Description of Artificial Sequence: Synthetic oligonucleotide
cagcucggugguggcccgg

SEQ ID NO: 1996008 - RNA, 19 nt, Artificial Sequence
  Description of Artificial Sequence: Synthetic oligonucleotide
ggggucgaacuugcaguga

SEQ ID NO: 1996009 - RNA, 19 nt, Artificial Sequence
  Description of Artificial Sequence: Synthetic oligonucleotide
cacugagcuguaugucuuu

SEQ ID NO: 1996010 - RNA, 19 nt, Artificial Sequence
  Description of Artificial Sequence: Synthetic oligonucleotide
cgacguccuugacgaaugc

SEQ ID NO: 1996011 - RNA, 19 nt, Artificial Sequence
  Description of Artificial Sequence: Synthetic oligonucleotide
cuuugcagccuuggcuuau

SEQ ID NO: 1996012 - RNA, 19 nt, Artificial Sequence
  Description of Artificial Sequence: Synthetic oligonucleotide
caaagcucacaggguugua

SEQ ID NO: 1996013 - RNA, 19 nt, Artificial Sequence
  Description of Artificial Sequence: Synthetic oligonucleotide
cuucgcagccgugauuauu

SEQ ID NO: 1996014 - RNA, 19 nt, Artificial Sequence
  Description of Artificial Sequence: Synthetic oligonucleotide
ggcgacguccuugacgaau

SEQ ID NO: 1996015 - RNA, 19 nt, Artificial Sequence
  Description of Artificial Sequence: Synthetic oligonucleotide
ccgccaguccauggagggg

SEQ ID NO: 1996016 - RNA, 19 nt, Artificial Sequence
  Description of Artificial Sequence: Synthetic oligonucleotide
cacgcucaaugaggaagua

SEQ ID NO: 1996017 - RNA, 19 nt, Artificial Sequence
  Description of Artificial Sequence: Synthetic oligonucleotide
ccaugaugcccuuguugua

SEQ ID NO: 1996018 - RNA, 19 nt, Artificial Sequence
  Description of Artificial Sequence: Synthetic oligonucleotide
ccuuugguggcugaacaau

SEQ ID NO: 1996019 - RNA, 19 nt, Artificial Sequence
  Description of Artificial Sequence: Synthetic oligonucleotide
gcccgggcacucagcagcc

SEQ ID NO: 1996020 - RNA, 19 nt, Artificial Sequence
  Description of Artificial Sequence: Synthetic oligonucleotide
gccccggcgcacagcagcc

SEQ ID NO: 1996021 - RNA, 19 nt, Artificial Sequence
  Description of Artificial Sequence: Synthetic oligonucleotide
aggggagcucugggugaau

SEQ ID NO: 1996022 - RNA, 19 nt, Artificial Sequence
  Description of Artificial Sequence: Synthetic oligonucleotide
gguugugggcauguaucuu

SEQ ID NO: 1996023 - RNA, 19 nt, Artificial Sequence
  Description of Artificial Sequence: Synthetic oligonucleotide
gcuccgaccagagguacuu

SEQ ID NO: 1996024 - RNA, 19 nt, Artificial Sequence
  Description of Artificial Sequence: Synthetic oligonucleotide
ccacaguuuccuccagggu

SEQ ID NO: 1996025 - RNA, 19 nt, Artificial Sequence
  Description of Artificial Sequence: Synthetic oligonucleotide
cgaccagagguacuugcgu

SEQ ID NO: 1996026 - RNA, 19 nt, Artificial Sequence
  Description of Artificial Sequence: Synthetic oligonucleotide
cguccuugacgaaugcgau

SEQ ID NO: 1996027 - RNA, 19 nt, Artificial Sequence
  Description of Artificial Sequence: Synthetic oligonucleotide
cgcagccgugauuauugaa

SEQ ID NO: 1996028 - RNA, 19 nt, Artificial Sequence
  Description of Artificial Sequence: Synthetic oligonucleotide
ccaggacggcaugguuuac

SEQ ID NO: 1996029 - RNA, 19 nt, Artificial Sequence
  Description of Artificial Sequence: Synthetic oligonucleotide
cacgauccaguaggguauu

SEQ ID NO: 1996030 - RNA, 19 nt, Artificial Sequence
  Description of Artificial Sequence: Synthetic oligonucleotide
ggacggcaugguuuaccuu

SEQ ID NO: 1996031 - RNA, 19 nt, Artificial Sequence
  Description of Artificial Sequence: Synthetic oligonucleotide
ggggagcucugggugaauu

SEQ ID NO: 1996032 - RNA, 19 nt, Artificial Sequence
  Description of Artificial Sequence: Synthetic oligonucleotide
ccggcgcacagcagccaca

SEQ ID NO: 1996033 - RNA, 19 nt, Artificial Sequence
  Description of Artificial Sequence: Synthetic oligonucleotide
cuucucccaugaugcccuu

SEQ ID NO: 1996034 - RNA, 19 nt, Artificial Sequence
  Description of Artificial Sequence: Synthetic oligonucleotide
gccuaccauuaguugccuu

SEQ ID NO: 1996035 - RNA, 19 nt, Artificial Sequence
  Description of Artificial Sequence: Synthetic oligonucleotide
ggcuccgaccagagguacu

SEQ ID NO: 1996036 - RNA, 19 nt, Artificial Sequence
  Description of Artificial Sequence: Synthetic oligonucleotide
ccuccuucgcagccgugau

SEQ ID NO: 1996037 - RNA, 19 nt, Artificial Sequence
  Description of Artificial Sequence: Synthetic oligonucleotide
ccacggagguaguuaccuu

SEQ ID NO: 1996038 - RNA, 19 nt, Artificial Sequence
  Description of Artificial Sequence: Synthetic oligonucleotide
ggccagugccacggaggua

SEQ ID NO: 1996039 - RNA, 19 nt, Artificial Sequence
  Description of Artificial Sequence: Synthetic oligonucleotide
ccuucgcagccgugauuau

SEQ ID NO: 1996040 - RNA, 19 nt, Artificial Sequence
  Description of Artificial Sequence: Synthetic oligonucleotide
agucuuucuauauacaugc

SEQ ID NO: 1996041 - RNA, 19 nt, Artificial Sequence
  Description of Artificial Sequence: Synthetic oligonucleotide
aagaauauaauccuccuga

SEQ ID NO: 1996042 - RNA, 19 nt, Artificial Sequence
  Description of Artificial Sequence: Synthetic oligonucleotide
uguaagaauauaauccucc

SEQ ID NO: 1996043 - RNA, 19 nt, Artificial Sequence
  Description of Artificial Sequence: Synthetic oligonucleotide
aaagucuccaccccgcggc

SEQ ID NO: 1996044 - RNA, 19 nt, Artificial Sequence
  Description of Artificial Sequence: Synthetic oligonucleotide
accuguaagaauauaaucc

SEQ ID NO: 1996045 - RNA, 19 nt, Artificial Sequence
  Description of Artificial Sequence: Synthetic oligonucleotide
aggaaugucagcaucaugc

SEQ ID NO: 1996046 - RNA, 19 nt, Artificial Sequence
  Description of Artificial Sequence: Synthetic oligonucleotide
auuucugacacucuggaug

SEQ ID NO: 1996047 - RNA, 19 nt, Artificial Sequence
  Description of Artificial Sequence: Synthetic oligonucleotide
uaauccuccugacagagag

SEQ ID NO: 1996048 - RNA, 19 nt, Artificial Sequence
  Description of Artificial Sequence: Synthetic oligonucleotide
uuaagcaucgcacugcugu

SEQ ID NO: 1996049 - RNA, 19 nt, Artificial Sequence
  Description of Artificial Sequence: Synthetic oligonucleotide
uguagugccguuuguagcg

SEQ ID NO: 1996050 - RNA, 19 nt, Artificial Sequence
  Description of Artificial Sequence: Synthetic oligonucleotide
ucauucacugguauguucc

SEQ ID NO: 1996051 - RNA, 19 nt, Artificial Sequence
  Description of Artificial Sequence: Synthetic oligonucleotide
ugaacaguccuuaugggcu

SEQ ID NO: 1996052 - RNA, 19 nt, Artificial Sequence
  Description of Artificial Sequence: Synthetic oligonucleotide
auuuacaguagaugugaac

SEQ ID NO: 1996053 - RNA, 19 nt, Artificial Sequence
  Description of Artificial Sequence: Synthetic oligonucleotide
caaacuuuauuuacaguag

SEQ ID NO: 1996054 - RNA, 19 nt, Artificial Sequence
  Description of Artificial Sequence: Synthetic oligonucleotide
auacaugcuaaccuguaag

SEQ ID NO: 1996055 - RNA, 19 nt, Artificial Sequence
  Description of Artificial Sequence: Synthetic oligonucleotide
agaauauaauccuccugac

SEQ ID NO: 1996056 - RNA, 19 nt, Artificial Sequence
  Description of Artificial Sequence: Synthetic oligonucleotide
uaagaauauaauccuccug

SEQ ID NO: 1996057 - RNA, 19 nt, Artificial Sequence
  Description of Artificial Sequence: Synthetic oligonucleotide
aaugcacacgcugaggcuc

SEQ ID NO: 1996058 - RNA, 19 nt, Artificial Sequence
  Description of Artificial Sequence: Synthetic oligonucleotide
uacaguauccaucauucaa

SEQ ID NO: 1996059 - RNA, 19 nt, Artificial Sequence
  Description of Artificial Sequence: Synthetic oligonucleotide
agagagauuuacaguaucc

SEQ ID NO: 1996060 - RNA, 19 nt, Artificial Sequence
  Description of Artificial Sequence: Synthetic oligonucleotide
uucuauauacaugcuaacc

SEQ ID NO: 1996061 - RNA, 19 nt, Artificial Sequence
  Description of Artificial Sequence: Synthetic oligonucleotide
gacagagagauuuacagua

SEQ ID NO: 1996062 - RNA, 19 nt, Artificial Sequence
  Description of Artificial Sequence: Synthetic oligonucleotide
uuacaguagaugugaacag

SEQ ID NO: 1996063 - RNA, 19 nt, Artificial Sequence
  Description of Artificial Sequence: Synthetic oligonucleotide
uuucugacacucuggauga

SEQ ID NO: 1996064 - RNA, 19 nt, Artificial Sequence
  Description of Artificial Sequence: Synthetic oligonucleotide
cuuucuauauacaugcuaa

SEQ ID NO: 1996065 - RNA, 19 nt, Artificial Sequence
  Description of Artificial Sequence: Synthetic oligonucleotide
uccgcgaugaggcagcagc

SEQ ID NO: 1996066 - RNA, 19 nt, Artificial Sequence
  Description of Artificial Sequence: Synthetic oligonucleotide
cugucauuaagcaucgcac

SEQ ID NO: 1996067 - RNA, 19 nt, Artificial Sequence
  Description of Artificial Sequence: Synthetic oligonucleotide
aguagaugugaacaguccu

SEQ ID NO: 1996068 - RNA, 19 nt, Artificial Sequence
  Description of Artificial Sequence: Synthetic oligonucleotide
ucgauguccagcuugaguu

SEQ ID NO: 1996069 - RNA, 19 nt, Artificial Sequence
  Description of Artificial Sequence: Synthetic oligonucleotide
uuuguagcgucggagagug

SEQ ID NO: 1996070 - RNA, 19 nt, Artificial Sequence
  Description of Artificial Sequence: Synthetic oligonucleotide
cuuguagugccguuuguag

SEQ ID NO: 1996071 - RNA, 19 nt, Artificial Sequence
  Description of Artificial Sequence: Synthetic oligonucleotide
gaugaaguaggcaagcguc

SEQ ID NO: 1996072 - RNA, 19 nt, Artificial Sequence
  Description of Artificial Sequence: Synthetic oligonucleotide
aagucgcagauguacaggu

SEQ ID NO: 1996073 - RNA, 19 nt, Artificial Sequence
  Description of Artificial Sequence: Synthetic oligonucleotide
uccuuaugggcugagaugu

SEQ ID NO: 1996074 - RNA, 19 nt, Artificial Sequence
  Description of Artificial Sequence: Synthetic oligonucleotide
ugucauuaagcaucgcacu

SEQ ID NO: 1996075 - RNA, 19 nt, Artificial Sequence
  Description of Artificial Sequence: Synthetic oligonucleotide
cuugaguuucuucugcgag

SEQ ID NO: 1996076 - RNA, 19 nt, Artificial Sequence
  Description of Artificial Sequence: Synthetic oligonucleotide
ugcacccuuuugcugaagg

SEQ ID NO: 1996077 - RNA, 19 nt, Artificial Sequence
  Description of Artificial Sequence: Synthetic oligonucleotide
uuuuguggaagucgcagau

SEQ ID NO: 1996078 - RNA, 19 nt, Artificial Sequence
  Description of Artificial Sequence: Synthetic oligonucleotide
aaccucaggaaugucagca

SEQ ID NO: 1996079 - RNA, 19 nt, Artificial Sequence
  Description of Artificial Sequence: Synthetic oligonucleotide
auuuacaguauccaucauu

SEQ ID NO: 1996080 - RNA, 19 nt, Artificial Sequence
  Description of Artificial Sequence: Synthetic oligonucleotide
uucacugguauguuccuga

SEQ ID NO: 1996081 - RNA, 19 nt, Artificial Sequence
  Description of Artificial Sequence: Synthetic oligonucleotide
gagaguguucaccugcagc

SEQ ID NO: 1996082 - RNA, 19 nt, Artificial Sequence
  Description of Artificial Sequence: Synthetic oligonucleotide
uuucuauauacaugcuaac

SEQ ID NO: 1996083 - RNA, 19 nt, Artificial Sequence
  Description of Artificial Sequence: Synthetic oligonucleotide
cugaaggaggcguugcccg

SEQ ID NO: 1996084 - RNA, 19 nt, Artificial Sequence
  Description of Artificial Sequence: Synthetic oligonucleotide
agaugaaguaggcaagcgu

SEQ ID NO: 1996085 - RNA, 19 nt, Artificial Sequence
  Description of Artificial Sequence: Synthetic oligonucleotide
acaguagaugugaacaguc

SEQ ID NO: 1996086 - RNA, 19 nt, Artificial Sequence
  Description of Artificial Sequence: Synthetic oligonucleotide
gucauuaagcaucgcacug

SEQ ID NO: 1996087 - RNA, 19 nt, Artificial Sequence
  Description of Artificial Sequence: Synthetic oligonucleotide
guauccaucauucaaacuu

SEQ ID NO: 1996088 - RNA, 19 nt, Artificial Sequence
  Description of Artificial Sequence: Synthetic oligonucleotide
gucgcagauguacaggugc

SEQ ID NO: 1996089 - RNA, 19 nt, Artificial Sequence
  Description of Artificial Sequence: Synthetic oligonucleotide
uuguagugccguuuguagc

SEQ ID NO: 1996090 - RNA, 19 nt, Artificial Sequence
  Description of Artificial Sequence: Synthetic oligonucleotide
aagcaucgcacugcugucc

SEQ ID NO: 1996091 - RNA, 19 nt, Artificial Sequence
  Description of Artificial Sequence: Synthetic oligonucleotide
uuguaggccacuccgccgc

SEQ ID NO: 1996092 - RNA, 19 nt, Artificial Sequence
  Description of Artificial Sequence: Synthetic oligonucleotide
auuguaggccacuccgccg

SEQ ID NO: 1996093 - RNA, 19 nt, Artificial Sequence
  Description of Artificial Sequence: Synthetic oligonucleotide
uguccucuccccaaggccu

SEQ ID NO: 1996094 - RNA, 19 nt, Artificial Sequence
  Description of Artificial Sequence: Synthetic oligonucleotide
uggucugcagcuuguagug

SEQ ID NO: 1996095 - RNA, 19 nt, Artificial Sequence
  Description of Artificial Sequence: Synthetic oligonucleotide
gugccugacgcucuugucg

SEQ ID NO: 1996096 - RNA, 19 nt, Artificial Sequence
  Description of Artificial Sequence: Synthetic oligonucleotide
ugcgagaugcucuucugca

SEQ ID NO: 1996097 - RNA, 19 nt, Artificial Sequence
  Description of Artificial Sequence: Synthetic oligonucleotide
cagaucaaccucaggaaug

SEQ ID NO: 1996098 - RNA, 19 nt, Artificial Sequence
  Description of Artificial Sequence: Synthetic oligonucleotide
uuaugggcugagaugugca

SEQ ID NO: 1996099 - RNA, 19 nt, Artificial Sequence
  Description of Artificial Sequence: Synthetic oligonucleotide
uucaaacuuuauuuacagu

SEQ ID NO: 1996100 - RNA, 19 nt, Artificial Sequence
  Description of Artificial Sequence: Synthetic oligonucleotide
ugaagccguucauuguagg

SEQ ID NO: 1996101 - RNA, 19 nt, Artificial Sequence
  Description of Artificial Sequence: Synthetic oligonucleotide
gaagucgcagauguacagg

SEQ ID NO: 1996102 - RNA, 19 nt, Artificial Sequence
  Description of Artificial Sequence: Synthetic oligonucleotide
ugaagugucggcucacagu

SEQ ID NO: 1996103 - RNA, 19 nt, Artificial Sequence
  Description of Artificial Sequence: Synthetic oligonucleotide
ucuggucugcagcuuguag

SEQ ID NO: 1996104 - RNA, 19 nt, Artificial Sequence
  Description of Artificial Sequence: Synthetic oligonucleotide
ugugcagacaccaccuguc

SEQ ID NO: 1996105 - RNA, 19 nt, Artificial Sequence
  Description of Artificial Sequence: Synthetic oligonucleotide
cauuguaggccacuccgcc

SEQ ID NO: 1996106 - RNA, 19 nt, Artificial Sequence
  Description of Artificial Sequence: Synthetic oligonucleotide
caguagaugugaacagucc

SEQ ID NO: 1996107 - RNA, 19 nt, Artificial Sequence
  Description of Artificial Sequence: Synthetic oligonucleotide
ucuucggugcugaagccgu

SEQ ID NO: 1996108 - RNA, 19 nt, Artificial Sequence
  Description of Artificial Sequence: Synthetic oligonucleotide
uggaacagaucaaccucag

SEQ ID NO: 1996109 - RNA, 19 nt, Artificial Sequence
  Description of Artificial Sequence: Synthetic oligonucleotide
uggaagucgcagauguaca

SEQ ID NO: 1996110 - RNA, 19 nt, Artificial Sequence
  Description of Artificial Sequence: Synthetic oligonucleotide
auauaauccuccugacaga

SEQ ID NO: 1996111 - RNA, 19 nt, Artificial Sequence
  Description of Artificial Sequence: Synthetic oligonucleotide
ucgccguccgcgaugaggc

SEQ ID NO: 1996112 - RNA, 19 nt, Artificial Sequence
  Description of Artificial Sequence: Synthetic oligonucleotide
acagaucaaccucaggaau

SEQ ID NO: 1996113 - RNA, 19 nt, Artificial Sequence
  Description of Artificial Sequence: Synthetic oligonucleotide
caguauccaucauucaaac

SEQ ID NO: 1996114 - RNA, 19 nt, Artificial Sequence
  Description of Artificial Sequence: Synthetic oligonucleotide
uccagucugcuccuguuac

SEQ ID NO: 1996115 - RNA, 19 nt, Artificial Sequence
  Description of Artificial Sequence: Synthetic oligonucleotide
gauguacaggugccugacg

SEQ ID NO: 1996116 - RNA, 19 nt, Artificial Sequence
  Description of Artificial Sequence: Synthetic oligonucleotide
ugggccuuguugaagccug

SEQ ID NO: 1996117 - RNA, 19 nt, Artificial Sequence
  Description of Artificial Sequence: Synthetic oligonucleotide
  modified_base (4)..(4): a, c, u, g, unknown or other
gugnccccgggucagacgc

SEQ ID NO: 1996118 - RNA, 19 nt, Artificial Sequence
  Description of Artificial Sequence: Synthetic oligonucleotide
uaggcaagcgucucuuucu

SEQ ID NO: 1996119 - RNA, 19 nt, Artificial Sequence
  Description of Artificial Sequence: Synthetic oligonucleotide
ugguauguuccugaagugu

SEQ ID NO: 1996120 - RNA, 19 nt, Artificial Sequence
  Description of Artificial Sequence: Synthetic oligonucleotide
uacaguagaugugaacagu

SEQ ID NO: 1996121 - RNA, 19 nt, Artificial Sequence
  Description of Artificial Sequence: Synthetic oligonucleotide
cuuaugggcugagaugugc

SEQ ID NO: 1996122 - RNA, 19 nt, Artificial Sequence
  Description of Artificial Sequence: Synthetic oligonucleotide
guagaugaaguaggcaagc

SEQ ID NO: 1996123 - RNA, 19 nt, Artificial Sequence
  Description of Artificial Sequence: Synthetic oligonucleotide
gaacaguccuuaugggcug

SEQ ID NO: 1996124 - RNA, 19 nt, Artificial Sequence
  Description of Artificial Sequence: Synthetic oligonucleotide
guauguuccugaagugucg

SEQ ID NO: 1996125 - RNA, 19 nt, Artificial Sequence
  Description of Artificial Sequence: Synthetic oligonucleotide
ucgcagauguacaggugcc

SEQ ID NO: 1996126 - RNA, 19 nt, Artificial Sequence
  Description of Artificial Sequence: Synthetic oligonucleotide
uuacaguauccaucauuca

SEQ ID NO: 1996127 - RNA, 19 nt, Artificial Sequence
  Description of Artificial Sequence: Synthetic oligonucleotide
aguauccaucauucaaacu

SEQ ID NO: 1996128 - RNA, 19 nt, Artificial Sequence
  Description of Artificial Sequence: Synthetic oligonucleotide
gaugaggcagcagcucugg

SEQ ID NO: 1996129 - RNA, 19 nt, Artificial Sequence
  Description of Artificial Sequence: Synthetic oligonucleotide
acccuuuugcugaaggagg

SEQ ID NO: 1996130 - RNA, 19 nt, Artificial Sequence
  Description of Artificial Sequence: Synthetic oligonucleotide
uccgauuucugguccaguc

SEQ ID NO: 1996131 - RNA, 19 nt, Artificial Sequence
  Description of Artificial Sequence: Synthetic oligonucleotide
aaccugccguguccgggcc

SEQ ID NO: 1996132 - RNA, 19 nt, Artificial Sequence
  Description of Artificial Sequence: Synthetic oligonucleotide
ucggcucacaguuucugcu

SEQ ID NO: 1996133 - RNA, 19 nt, Artificial Sequence
  Description of Artificial Sequence: Synthetic oligonucleotide
caccugucauuaagcaucg

SEQ ID NO: 1996134 - RNA, 19 nt, Artificial Sequence
  Description of Artificial Sequence: Synthetic oligonucleotide
acacgcugaggcuccggcc

SEQ ID NO: 1996135 - RNA, 19 nt, Artificial Sequence
  Description of Artificial Sequence: Synthetic oligonucleotide
uccaucauucaaacuuuau

SEQ ID NO: 1996136 - RNA, 19 nt, Artificial Sequence
  Description of Artificial Sequence: Synthetic oligonucleotide
gacgcucuugucgaugucc

SEQ ID NO: 1996137 - RNA, 19 nt, Artificial Sequence
  Description of Artificial Sequence: Synthetic oligonucleotide
guggaagucgcagauguac

SEQ ID NO: 1996138 - RNA, 19 nt, Artificial Sequence
  Description of Artificial Sequence: Synthetic oligonucleotide
cacuccgccgcugugagcc

SEQ ID NO: 1996139 - RNA, 19 nt, Artificial Sequence
  Description of Artificial Sequence: Synthetic oligonucleotide
ccaccugucauuaagcauc

SEQ ID NO: 1996140 - RNA, 19 nt, Artificial Sequence
  Description of Artificial Sequence: Synthetic oligonucleotide
cugaagccguucauuguag

SEQ ID NO: 1996141 - RNA, 19 nt, Artificial Sequence
  Description of Artificial Sequence: Synthetic oligonucleotide
uguacaggugccugacgcu

SEQ ID NO: 1996142 - RNA, 19 nt, Artificial Sequence
  Description of Artificial Sequence: Synthetic oligonucleotide
cuggaacagaucaaccuca

SEQ ID NO: 1996143 - RNA, 19 nt, Artificial Sequence
  Description of Artificial Sequence: Synthetic oligonucleotide
cacccuuuugcugaaggag

SEQ ID NO: 1996144 - RNA, 19 nt, Artificial Sequence
  Description of Artificial Sequence: Synthetic oligonucleotide
cucauucacugguauguuc

SEQ ID NO: 1996145 - RNA, 19 nt, Artificial Sequence
  Description of Artificial Sequence: Synthetic oligonucleotide
agccguucauuguaggcca

SEQ ID NO: 1996146 - RNA, 19 nt, Artificial Sequence
  Description of Artificial Sequence: Synthetic oligonucleotide
ucugcgagaugcucuucug

SEQ ID NO: 1996147 - RNA, 19 nt, Artificial Sequence
  Description of Artificial Sequence: Synthetic oligonucleotide
uuccugaagugucggcuca

SEQ ID NO: 1996148 - RNA, 19 nt, Artificial Sequence
  Description of Artificial Sequence: Synthetic oligonucleotide
aggcaagcgucucuuucuc

SEQ ID NO: 1996149 - RNA, 19 nt, Artificial Sequence
  Description of Artificial Sequence: Synthetic oligonucleotide
uuuguggaagucgcagaug

SEQ ID NO: 1996150 - RNA, 19 nt, Artificial Sequence
  Description of Artificial Sequence: Synthetic oligonucleotide
ugccugacgcucuugucga

SEQ ID NO: 1996151 - RNA, 19 nt, Artificial Sequence
  Description of Artificial Sequence: Synthetic oligonucleotide
uguagcgucggagaguguu

SEQ ID NO: 1996152 - RNA, 19 nt, Artificial Sequence
  Description of Artificial Sequence: Synthetic oligonucleotide
uauuucugacacucuggau

SEQ ID NO: 1996153 - RNA, 19 nt, Artificial Sequence
  Description of Artificial Sequence: Synthetic oligonucleotide
ucuuucucauucacuggua

SEQ ID NO: 1996154 - RNA, 19 nt, Artificial Sequence
  Description of Artificial Sequence: Synthetic oligonucleotide
augcuaaccuguaagaaua

SEQ ID NO: 1996155 - RNA, 19 nt, Artificial Sequence
  Description of Artificial Sequence: Synthetic oligonucleotide
caaagucuccaccccgcgg

SEQ ID NO: 1996156 - RNA, 19 nt, Artificial Sequence
  Description of Artificial Sequence: Synthetic oligonucleotide
guaagaauauaauccuccu

SEQ ID NO: 1996157 - RNA, 19 nt, Artificial Sequence
  Description of Artificial Sequence: Synthetic oligonucleotide
ggugccucacuccagcugc

SEQ ID NO: 1996158 - RNA, 19 nt, Artificial Sequence
  Description of Artificial Sequence: Synthetic oligonucleotide
gaaccugccguguccgggc

SEQ ID NO: 1996159 - RNA, 19 nt, Artificial Sequence
  Description of Artificial Sequence: Synthetic oligonucleotide
cacgcugaggcuccggccc

SEQ ID NO: 1996160 - RNA, 19 nt, Artificial Sequence
  Description of Artificial Sequence: Synthetic oligonucleotide
uagaugugaacaguccuua

SEQ ID NO: 1996161 - RNA, 19 nt, Artificial Sequence
  Description of Artificial Sequence: Synthetic oligonucleotide
cugguauguuccugaagug

SEQ ID NO: 1996162 - RNA, 19 nt, Artificial Sequence
  Description of Artificial Sequence: Synthetic oligonucleotide
ugaaggaggcguugcccgc

SEQ ID NO: 1996163 - RNA, 19 nt, Artificial Sequence
  Description of Artificial Sequence: Synthetic oligonucleotide
cugaagugucggcucacag

SEQ ID NO: 1996164 - RNA, 19 nt, Artificial Sequence
  Description of Artificial Sequence: Synthetic oligonucleotide
gauuucugguccagucugc

SEQ ID NO: 1996165 - RNA, 19 nt, Artificial Sequence
  Description of Artificial Sequence: Synthetic oligonucleotide
uaagcaucgcacugcuguc

SEQ ID NO: 1996166 - RNA, 19 nt, Artificial Sequence
  Description of Artificial Sequence: Synthetic oligonucleotide
uggugccucacuccagcug

SEQ ID NO: 1996167 - RNA, 19 nt, Artificial Sequence
  Description of Artificial Sequence: Synthetic oligonucleotide
gaaggaggcguugcccgcg

SEQ ID NO: 1996168 - RNA, 19 nt, Artificial Sequence
  Description of Artificial Sequence: Synthetic oligonucleotide
cugcgagaugcucuucugc

SEQ ID NO: 1996169 - RNA, 19 nt, Artificial Sequence
  Description of Artificial Sequence: Synthetic oligonucleotide
cucaggggaaucuccacca

SEQ ID NO: 1996170 - RNA, 19 nt, Artificial Sequence
  Description of Artificial Sequence: Synthetic oligonucleotide
ugcuaaccuguaagaauau

SEQ ID NO: 1996171 - RNA, 19 nt, Artificial Sequence
  Description of Artificial Sequence: Synthetic oligonucleotide
acaugcuaaccuguaagaa

SEQ ID NO: 1996172 - RNA, 19 nt, Artificial Sequence
  Description of Artificial Sequence: Synthetic oligonucleotide
ucugacacucuggaugaaa

SEQ ID NO: 1996173 - RNA, 19 nt, Artificial Sequence
  Description of Artificial Sequence: Synthetic oligonucleotide
uguuacucuucaccaugua

SEQ ID NO: 1996174 - RNA, 19 nt, Artificial Sequence
  Description of Artificial Sequence: Synthetic oligonucleotide
cuucugcacccuuuugcug

SEQ ID NO: 1996175 - RNA, 19 nt, Artificial Sequence
  Description of Artificial Sequence: Synthetic oligonucleotide
uccugacagagagauuuac

SEQ ID NO: 1996176 - RNA, 19 nt, Artificial Sequence
  Description of Artificial Sequence: Synthetic oligonucleotide
agugccguuuguagcgucg

SEQ ID NO: 1996177 - RNA, 19 nt, Artificial Sequence
  Description of Artificial Sequence: Synthetic oligonucleotide
aucacucgucuuccucuuc

SEQ ID NO: 1996178 - RNA, 19 nt, Artificial Sequence
  Description of Artificial Sequence: Synthetic oligonucleotide
uccuguuacucuucaccau

SEQ ID NO: 1996179 - RNA, 19 nt, Artificial Sequence
  Description of Artificial Sequence: Synthetic oligonucleotide
gguauguuccugaaguguc

SEQ ID NO: 1996180 - RNA, 19 nt, Artificial Sequence
  Description of Artificial Sequence: Synthetic oligonucleotide
agcaucgcacugcuguccu

SEQ ID NO: 1996181 - RNA, 19 nt, Artificial Sequence
  Description of Artificial Sequence: Synthetic oligonucleotide
gcuagcugggccuuguuga

SEQ ID NO: 1996182 - RNA, 19 nt, Artificial Sequence
  Description of Artificial Sequence: Synthetic oligonucleotide
aaguaggcaagcgucucuu

SEQ ID NO: 1996183 - RNA, 19 nt, Artificial Sequence
  Description of Artificial Sequence: Synthetic oligonucleotide
caugcuaaccuguaagaau

SEQ ID NO: 1996184 - RNA, 19 nt, Artificial Sequence
  Description of Artificial Sequence: Synthetic oligonucleotide
agaugugaacaguccuuau

SEQ ID NO: 1996185 - RNA, 19 nt, Artificial Sequence
  Description of Artificial Sequence: Synthetic oligonucleotide
cucgccguccgcgaugagg

SEQ ID NO: 1996186 - RNA, 19 nt, Artificial Sequence
  Description of Artificial Sequence: Synthetic oligonucleotide
cauguagaugaaguaggca

SEQ ID NO: 1996187 - RNA, 19 nt, Artificial Sequence
  Description of Artificial Sequence: Synthetic oligonucleotide
cuucaccauguagaugaag

SEQ ID NO: 1996188 - RNA, 19 nt, Artificial Sequence
  Description of Artificial Sequence: Synthetic oligonucleotide
augcacacgcugaggcucc

SEQ ID NO: 1996189 - RNA, 19 nt, Artificial Sequence
  Description of Artificial Sequence: Synthetic oligonucleotide
uuucugguccagucugcuc

SEQ ID NO: 1996190 - RNA, 19 nt, Artificial Sequence
  Description of Artificial Sequence: Synthetic oligonucleotide
cagcuuguagugccguuug

SEQ ID NO: 1996191 - RNA, 19 nt, Artificial Sequence
  Description of Artificial Sequence: Synthetic oligonucleotide
aagucuccaccccgcggcu

SEQ ID NO: 1996192 - RNA, 19 nt, Artificial Sequence
  Description of Artificial Sequence: Synthetic oligonucleotide
uccaccccgcggcuccucg

SEQ ID NO: 1996193 - RNA, 19 nt, Artificial Sequence
  Description of Artificial Sequence: Synthetic oligonucleotide
ugcucaggggaaucuccac

SEQ ID NO: 1996194 - RNA, 19 nt, Artificial Sequence
  Description of Artificial Sequence: Synthetic oligonucleotide
agcgucggagaguguucac

SEQ ID NO: 1996195 - RNA, 19 nt, Artificial Sequence
  Description of Artificial Sequence: Synthetic oligonucleotide
guugaagccuggucugguc

SEQ ID NO: 1996196 - RNA, 19 nt, Artificial Sequence
  Description of Artificial Sequence: Synthetic oligonucleotide
cuugcugcccuccgauuuc

SEQ ID NO: 1996197 - RNA, 19 nt, Artificial Sequence
  Description of Artificial Sequence: Synthetic oligonucleotide
gucagacgcgcucugagcu

SEQ ID NO: 1996198 - RNA, 19 nt, Artificial Sequence
  Description of Artificial Sequence: Synthetic oligonucleotide
agcugcuugcugcccuccg

SEQ ID NO: 1996199 - RNA, 19 nt, Artificial Sequence
  Description of Artificial Sequence: Synthetic oligonucleotide
  modified_base (3)..(3): a, c, u, g, unknown or other
ugnccccgggucagacgcg

SEQ ID NO: 1996200 - RNA, 19 nt, Artificial Sequence
  Description of Artificial Sequence: Synthetic oligonucleotide
caggaaugucagcaucaug

SEQ ID NO: 1996201 - RNA, 19 nt, Artificial Sequence
  Description of Artificial Sequence: Synthetic oligonucleotide
ugguccagucugcuccugu

SEQ ID NO: 1996202 - RNA, 19 nt, Artificial Sequence
  Description of Artificial Sequence: Synthetic oligonucleotide
uagcgucggagaguguuca

SEQ ID NO: 1996203 - RNA, 19 nt, Artificial Sequence
  Description of Artificial Sequence: Synthetic oligonucleotide
uaggccacuccgccgcugu

SEQ ID NO: 1996204 - RNA, 19 nt, Artificial Sequence
  Description of Artificial Sequence: Synthetic oligonucleotide
gcucaggggaaucuccacc

SEQ ID NO: 1996205 - RNA, 19 nt, Artificial Sequence
  Description of Artificial Sequence: Synthetic oligonucleotide
aacaguccuuaugggcuga

SEQ ID NO: 1996206 - RNA, 19 nt, Artificial Sequence
  Description of Artificial Sequence: Synthetic oligonucleotide
caccaccugucauuaagca

SEQ ID NO: 1996207 - RNA, 19 nt, Artificial Sequence
  Description of Artificial Sequence: Synthetic oligonucleotide
ccuguaagaauauaauccu

SEQ ID NO: 1996208 - RNA, 19 nt, Artificial Sequence
  Description of Artificial Sequence: Synthetic oligonucleotide
ucaugcucaggggaaucuc

SEQ ID NO: 1996209 - RNA, 19 nt, Artificial Sequence
  Description of Artificial Sequence: Synthetic oligonucleotide
gaaguaggcaagcgucucu

SEQ ID NO: 1996210 - RNA, 19 nt, Artificial Sequence
  Description of Artificial Sequence: Synthetic oligonucleotide
gaggcguugcccgcgggcc

SEQ ID NO: 1996211 - RNA, 19 nt, Artificial Sequence
  Description of Artificial Sequence: Synthetic oligonucleotide
acucuucaccauguagaug

SEQ ID NO: 1996212 - RNA, 19 nt, Artificial Sequence
  Description of Artificial Sequence: Synthetic oligonucleotide
ucagacgcgcucugagcuc

SEQ ID NO: 1996213 - RNA, 19 nt, Artificial Sequence
  Description of Artificial Sequence: Synthetic oligonucleotide
ugcccuccgauuucugguc

SEQ ID NO: 1996214 - RNA, 19 nt, Artificial Sequence
  Description of Artificial Sequence: Synthetic oligonucleotide
acagagagauuuacaguau

SEQ ID NO: 1996215 - RNA, 19 nt, Artificial Sequence
  Description of Artificial Sequence: Synthetic oligonucleotide
gaagccuggucuggucugc

SEQ ID NO: 1996216 - RNA, 19 nt, Artificial Sequence
  Description of Artificial Sequence: Synthetic oligonucleotide
ccugucauuaagcaucgca

SEQ ID NO: 1996217 - RNA, 19 nt, Artificial Sequence
  Description of Artificial Sequence: Synthetic oligonucleotide
cccuuuugcugaaggaggc

SEQ ID NO: 1996218 - RNA, 19 nt, Artificial Sequence
  Description of Artificial Sequence: Synthetic oligonucleotide
aucgcacugcuguccucuc

SEQ ID NO: 1996219 - RNA, 19 nt, Artificial Sequence
  Description of Artificial Sequence: Synthetic oligonucleotide
agcaucaugcucaggggaa

SEQ ID NO: 1996220 - RNA, 19 nt, Artificial Sequence
  Description of Artificial Sequence: Synthetic oligonucleotide
gccgcugugagccccgcgg

SEQ ID NO: 1996221 - RNA, 19 nt, Artificial Sequence
  Description of Artificial Sequence: Synthetic oligonucleotide
cagacgcgcucugagcucc

SEQ ID NO: 1996222 - RNA, 19 nt, Artificial Sequence
  Description of Artificial Sequence: Synthetic oligonucleotide
aauccuccugacagagaga

SEQ ID NO: 1996223 - RNA, 19 nt, Artificial Sequence
  Description of Artificial Sequence: Synthetic oligonucleotide
augggcugagaugugcaga

SEQ ID NO: 1996224 - RNA, 19 nt, Artificial Sequence
  Description of Artificial Sequence: Synthetic oligonucleotide
gaaugcacacgcugaggcu

SEQ ID NO: 1996225 - RNA, 19 nt, Artificial Sequence
  Description of Artificial Sequence: Synthetic oligonucleotide
ucugcuagcugggccuugu

SEQ ID NO: 1996226 - RNA, 19 nt, Artificial Sequence
  Description of Artificial Sequence: Synthetic oligonucleotide
ucugcacccuuuugcugaa

SEQ ID NO: 1996227 - RNA, 19 nt, Artificial Sequence
  Description of Artificial Sequence: Synthetic oligonucleotide
caggggaaucuccaccauc

SEQ ID NO: 1996228 - RNA, 19 nt, Artificial Sequence
  Description of Artificial Sequence: Synthetic oligonucleotide
guacaggugccugacgcuc

SEQ ID NO: 1996229 - RNA, 19 nt, Artificial Sequence
  Description of Artificial Sequence: Synthetic oligonucleotide
gucggagaguguucaccug

SEQ ID NO: 1996230 - RNA, 19 nt, Artificial Sequence
  Description of Artificial Sequence: Synthetic oligonucleotide
  modified_base (13)..(13): a, c, u, g, unknown or other
agucccacggugnccccgg

SEQ ID NO: 1996231 - RNA, 19 nt, Artificial Sequence
  Description of Artificial Sequence: Synthetic oligonucleotide
acgcgcucugagcuccgcg

SEQ ID NO: 1996232 - RNA, 19 nt, Artificial Sequence
  Description of Artificial Sequence: Synthetic oligonucleotide
gcggcuguccucuucggug

SEQ ID NO: 1996233 - RNA, 19 nt, Artificial Sequence
  Description of Artificial Sequence: Synthetic oligonucleotide
ggucagacgcgcucugagc

SEQ ID NO: 1996234 - RNA, 19 nt, Artificial Sequence
  Description of Artificial Sequence: Synthetic oligonucleotide
ugccguuuguagcgucgga

SEQ ID NO: 1996235 - RNA, 19 nt, Artificial Sequence
  Description of Artificial Sequence: Synthetic oligonucleotide
cucuugucgauguccagcu

SEQ ID NO: 1996236 - RNA, 19 nt, Artificial Sequence
  Description of Artificial Sequence: Synthetic oligonucleotide
uccgccgcugugagccccg

SEQ ID NO: 1996237 - RNA, 19 nt, Artificial Sequence
  Description of Artificial Sequence: Synthetic oligonucleotide
cauuaagcaucgcacugcu

SEQ ID NO: 1996238 - RNA, 19 nt, Artificial Sequence
  Description of Artificial Sequence: Synthetic oligonucleotide
accugccguguccgggccc

SEQ ID NO: 1996239 - RNA, 19 nt, Artificial Sequence
  Description of Artificial Sequence: Synthetic oligonucleotide
guugcccgcgggccggacg

SEQ ID NO: 1996240 - RNA, 19 nt, Artificial Sequence
  Description of Artificial Sequence: Synthetic oligonucleotide
gggucagacgcgcucugag

SEQ ID NO: 1996241 - RNA, 19 nt, Artificial Sequence
  Description of Artificial Sequence: Synthetic oligonucleotide
  modified_base (5)..(5): a, c, u, g, unknown or other
ggugnccccgggucagacg

SEQ ID NO: 1996242 - RNA, 19 nt, Artificial Sequence
  Description of Artificial Sequence: Synthetic oligonucleotide
gugccguuuguagcgucgg

SEQ ID NO: 1996243 - RNA, 19 nt, Artificial Sequence
  Description of Artificial Sequence: Synthetic oligonucleotide
gggaaugcacacgcugagg

SEQ ID NO: 1996244 - RNA, 19 nt, Artificial Sequence
  Description of Artificial Sequence: Synthetic oligonucleotide
aggcguugcccgcgggccg

SEQ ID NO: 1996245 - RNA, 19 nt, Artificial Sequence
  Description of Artificial Sequence: Synthetic oligonucleotide
cucuggugccucacuccag

SEQ ID NO: 1996246 - RNA, 19 nt, Artificial Sequence
  Description of Artificial Sequence: Synthetic oligonucleotide
agccccgcggggcagcucu

SEQ ID NO: 1996247 - RNA, 19 nt, Artificial Sequence
  Description of Artificial Sequence: Synthetic oligonucleotide
gccgggaaugcacacgcug

SEQ ID NO: 1996248 - RNA, 19 nt, Artificial Sequence
  Description of Artificial Sequence: Synthetic oligonucleotide
acuccgccgcugugagccc

SEQ ID NO: 1996249 - RNA, 19 nt, Artificial Sequence
  Description of Artificial Sequence: Synthetic oligonucleotide
gcagauguacaggugccug

SEQ ID NO: 1996250 - RNA, 19 nt, Artificial Sequence
  Description of Artificial Sequence: Synthetic oligonucleotide
uguaggccacuccgccgcu

SEQ ID NO: 1996251 - RNA, 19 nt, Artificial Sequence
  Description of Artificial Sequence: Synthetic oligonucleotide
gucgauguccagcuugagu

SEQ ID NO: 1996252 - RNA, 19 nt, Artificial Sequence
  Description of Artificial Sequence: Synthetic oligonucleotide
  modified_base (16)..(16): a, c, u, g, unknown or other
ccgagucccacggugnccc

SEQ ID NO: 1996253 - RNA, 19 nt, Artificial Sequence
  Description of Artificial Sequence: Synthetic oligonucleotide
gcugaaggaggcguugccc

SEQ ID NO: 1996254 - RNA, 19 nt, Artificial Sequence
  Description of Artificial Sequence: Synthetic oligonucleotide
gccguuuguagcgucggag

SEQ ID NO: 1996255 - RNA, 19 nt, Artificial Sequence
  Description of Artificial Sequence: Synthetic oligonucleotide
caucaugcucaggggaauc

SEQ ID NO: 1996256 - RNA, 19 nt, Artificial Sequence
  Description of Artificial Sequence: Synthetic oligonucleotide
cugacacucuggaugaaau

SEQ ID NO: 1996257 - RNA, 19 nt, Artificial Sequence
  Description of Artificial Sequence: Synthetic oligonucleotide
cuuuugcugaaggaggcgu

SEQ ID NO: 1996258 - RNA, 19 nt, Artificial Sequence
  Description of Artificial Sequence: Synthetic oligonucleotide
accugucauuaagcaucgc

SEQ ID NO: 1996259 - RNA, 19 nt, Artificial Sequence
  Description of Artificial Sequence: Synthetic oligonucleotide
gcugagaugugcagacacc

SEQ ID NO: 1996260 - RNA, 19 nt, Artificial Sequence
  Description of Artificial Sequence: Synthetic oligonucleotide
  modified_base (2)..(2): a, c, u, g, unknown or other
gnccccgggucagacgcgc

SEQ ID NO: 1996261 - RNA, 19 nt, Artificial Sequence
  Description of Artificial Sequence: Synthetic oligonucleotide
uccggcccgggcucgcgag

SEQ ID NO: 1996262 - RNA, 19 nt, Artificial Sequence
  Description of Artificial Sequence: Synthetic oligonucleotide
cguuuguagcgucggagag

SEQ ID NO: 1996263 - RNA, 19 nt, Artificial Sequence
  Description of Artificial Sequence: Synthetic oligonucleotide
uguucaccugcagcuggaa

SEQ ID NO: 1996264 - RNA, 19 nt, Artificial Sequence
  Description of Artificial Sequence: Synthetic oligonucleotide
cuccgcgaggcccggcugc

SEQ ID NO: 1996265 - RNA, 19 nt, Artificial Sequence
  Description of Artificial Sequence: Synthetic oligonucleotide
uagugccguuuguagcguc

SEQ ID NO: 1996266 - RNA, 19 nt, Artificial Sequence
  Description of Artificial Sequence: Synthetic oligonucleotide
gccgcaaagucuccacccc

SEQ ID NO: 1996267 - RNA, 19 nt, Artificial Sequence
  Description of Artificial Sequence: Synthetic oligonucleotide
ccugacagagagauuuaca

SEQ ID NO: 1996268 - RNA, 19 nt, Artificial Sequence
  Description of Artificial Sequence: Synthetic oligonucleotide
  modified_base (11)..(11): a, c, u, g, unknown or other
ucccacggugnccccgggu

SEQ ID NO: 1996269 - RNA, 19 nt, Artificial Sequence
  Description of Artificial Sequence: Synthetic oligonucleotide
caccccgcggcuccucgcg

SEQ ID NO: 1996270 - RNA, 19 nt, Artificial Sequence
  Description of Artificial Sequence: Synthetic oligonucleotide
uggccguagcccggggcgg

SEQ ID NO: 1996271 - RNA, 19 nt, Artificial Sequence
  Description of Artificial Sequence: Synthetic oligonucleotide
ugacgcucuugucgauguc

SEQ ID NO: 1996272 - RNA, 19 nt, Artificial Sequence
  Description of Artificial Sequence: Synthetic oligonucleotide
ugcagcuuguagugccguu

SEQ ID NO: 1996273 - RNA, 19 nt, Artificial Sequence
  Description of Artificial Sequence: Synthetic oligonucleotide
guagaugugaacaguccuu

SEQ ID NO: 1996274 - RNA, 19 nt, Artificial Sequence
  Description of Artificial Sequence: Synthetic oligonucleotide
guagcgucggagaguguuc

SEQ ID NO: 1996275 - RNA, 19 nt, Artificial Sequence
  Description of Artificial Sequence: Synthetic oligonucleotide
  modified_base (10)..(10): a, c, u, g, unknown or other
cccacggugnccccggguc

SEQ ID NO: 1996276 - RNA, 19 nt, Artificial Sequence
  Description of Artificial Sequence: Synthetic oligonucleotide
uccugaagugucggcucac

SEQ ID NO: 1996277 - RNA, 19 nt, Artificial Sequence
  Description of Artificial Sequence: Synthetic oligonucleotide
ccucaggaaugucagcauc

SEQ ID NO: 1996278 - RNA, 19 nt, Artificial Sequence
  Description of Artificial Sequence: Synthetic oligonucleotide
  modified_base (8)..(8): a, c, u, g, unknown or other
cacggugnccccgggucag

SEQ ID NO: 1996279 - RNA, 19 nt, Artificial Sequence
  Description of Artificial Sequence: Synthetic oligonucleotide
aagccuggucuggucugca

SEQ ID NO: 1996280 - RNA, 19 nt, Artificial Sequence
  Description of Artificial Sequence: Synthetic oligonucleotide
aggaggcguugcccgcggg

SEQ ID NO: 1996281 - RNA, 19 nt, Artificial Sequence
  Description of Artificial Sequence: Synthetic oligonucleotide
ccgcaaagucuccaccccg

SEQ ID NO: 1996282 - RNA, 19 nt, Artificial Sequence
  Description of Artificial Sequence: Synthetic oligonucleotide
ugagcuccgcgaggcccgg

SEQ ID NO: 1996283 - RNA, 19 nt, Artificial Sequence
  Description of Artificial Sequence: Synthetic oligonucleotide
gcgagaugcucuucugcac

SEQ ID NO: 1996284 - RNA, 19 nt, Artificial Sequence
  Description of Artificial Sequence: Synthetic oligonucleotide
gcgucucuuucucauucac

SEQ ID NO: 1996285 - RNA, 19 nt, Artificial Sequence
  Description of Artificial Sequence: Synthetic oligonucleotide
ggaggcguugcccgcgggc

SEQ ID NO: 1996286 - RNA, 19 nt, Artificial Sequence
  Description of Artificial Sequence: Synthetic oligonucleotide
guuuguagcgucggagagu

SEQ ID NO: 1996287 - RNA, 19 nt, Artificial Sequence
  Description of Artificial Sequence: Synthetic oligonucleotide
uuucugcuagcugggccuu

SEQ ID NO: 1996288 - RNA, 19 nt, Artificial Sequence
  Description of Artificial Sequence: Synthetic oligonucleotide
cauucacugguauguuccu

SEQ ID NO: 1996289 - RNA, 19 nt, Artificial Sequence
  Description of Artificial Sequence: Synthetic oligonucleotide
ccucgaaccugccgugucc

SEQ ID NO: 1996290 - RNA, 19 nt, Artificial Sequence
  Description of Artificial Sequence: Synthetic oligonucleotide
gccuuguugaagccugguc

SEQ ID NO: 1996291 - RNA, 19 nt, Artificial Sequence
  Description of Artificial Sequence: Synthetic oligonucleotide
cgcaaagucuccaccccgc

SEQ ID NO: 1996292 - RNA, 19 nt, Artificial Sequence
  Description of Artificial Sequence: Synthetic oligonucleotide
gccacuccgccgcugugag

SEQ ID NO: 1996293 - RNA, 19 nt, Artificial Sequence
  Description of Artificial Sequence: Synthetic oligonucleotide
ccgccgggaaugcacacgc

SEQ ID NO: 1996294 - RNA, 19 nt, Artificial Sequence
  Description of Artificial Sequence: Synthetic oligonucleotide
gcgucggagaguguucacc

SEQ ID NO: 1996295 - RNA, 19 nt, Artificial Sequence
  Description of Artificial Sequence: Synthetic oligonucleotide
gcacccuuuugcugaagga

SEQ ID NO: 1996296 - RNA, 19 nt, Artificial Sequence
  Description of Artificial Sequence: Synthetic oligonucleotide
cgccgcaaagucuccaccc

SEQ ID NO: 1996297 - RNA, 19 nt, Artificial Sequence
  Description of Artificial Sequence: Synthetic oligonucleotide
agacaccaccugucauuaa

SEQ ID NO: 1996298 - RNA, 19 nt, Artificial Sequence
  Description of Artificial Sequence: Synthetic oligonucleotide
guccagucugcuccuguua

SEQ ID NO: 1996299 - RNA, 19 nt, Artificial Sequence
  Description of Artificial Sequence: Synthetic oligonucleotide
uuguagcgucggagagugu

SEQ ID NO: 1996300 - RNA, 19 nt, Artificial Sequence
  Description of Artificial Sequence: Synthetic oligonucleotide
ccguuuguagcgucggaga

SEQ ID NO: 1996301 - RNA, 19 nt, Artificial Sequence
  Description of Artificial Sequence: Synthetic oligonucleotide
aggccucuggugccucacu

SEQ ID NO: 1996302 - RNA, 19 nt, Artificial Sequence
  Description of Artificial Sequence: Synthetic oligonucleotide
uucugacacucuggaugaa

SEQ ID NO: 1996303 - RNA, 19 nt, Artificial Sequence
  Description of Artificial Sequence: Synthetic oligonucleotide
ggucugcagcuuguagugc

SEQ ID NO: 1996304 - RNA, 19 nt, Artificial Sequence
  Description of Artificial Sequence: Synthetic oligonucleotide
ccggacgcagcgcucgccg

SEQ ID NO: 1996305 - RNA, 19 nt, Artificial Sequence
  Description of Artificial Sequence: Synthetic oligonucleotide
gcaagcgucucuuucucau

SEQ ID NO: 1996306 - RNA, 19 nt, Artificial Sequence
  Description of Artificial Sequence: Synthetic oligonucleotide
ggcaagcgucucuuucuca

SEQ ID NO: 1996307 - RNA, 19 nt, Artificial Sequence
  Description of Artificial Sequence: Synthetic oligonucleotide
gcccuccgauuucuggucc

SEQ ID NO: 1996308 - RNA, 19 nt, Artificial Sequence
  Description of Artificial Sequence: Synthetic oligonucleotide
gcgcucugagcuccgcgag

SEQ ID NO: 1996309 - RNA, 19 nt, Artificial Sequence
  Description of Artificial Sequence: Synthetic oligonucleotide
ggccucuggugccucacuc

SEQ ID NO: 1996310 - RNA, 19 nt, Artificial Sequence
  Description of Artificial Sequence: Synthetic oligonucleotide
  modified_base (12)..(12): a, c, u, g, unknown or other
gucccacggugnccccggg

SEQ ID NO: 1996311 - RNA, 19 nt, Artificial Sequence
  Description of Artificial Sequence: Synthetic oligonucleotide
ccuuaugggcugagaugug

SEQ ID NO: 1996312 - RNA, 19 nt, Artificial Sequence
  Description of Artificial Sequence: Synthetic oligonucleotide
caucgcacugcuguccucu

SEQ ID NO: 1996313 - RNA, 19 nt, Artificial Sequence
  Description of Artificial Sequence: Synthetic oligonucleotide
cucuggccguagcccgggg

SEQ ID NO: 1996314 - RNA, 19 nt, Artificial Sequence
  Description of Artificial Sequence: Synthetic oligonucleotide
cuccugacagagagauuua

SEQ ID NO: 1996315 - RNA, 19 nt, Artificial Sequence
  Description of Artificial Sequence: Synthetic oligonucleotide
gcuuguagugccguuugua

SEQ ID NO: 1996316 - RNA, 19 nt, Artificial Sequence
  Description of Artificial Sequence: Synthetic oligonucleotide
guagcccggggcggcggcg

SEQ ID NO: 1996317 - RNA, 19 nt, Artificial Sequence
  Description of Artificial Sequence: Synthetic oligonucleotide
gcgccgcaaagucuccacc

SEQ ID NO: 1996318 - RNA, 19 nt, Artificial Sequence
  Description of Artificial Sequence: Synthetic oligonucleotide
gcgaugaggcagcagcucu

SEQ ID NO: 1996319 - RNA, 19 nt, Artificial Sequence
  Description of Artificial Sequence: Synthetic oligonucleotide
ccguccgcgaugaggcagc

SEQ ID NO: 1996320 - RNA, 19 nt, Artificial Sequence
  Description of Artificial Sequence: Synthetic oligonucleotide
gacgcgcucugagcuccgc

SEQ ID NO: 1996321 - RNA, 19 nt, Artificial Sequence
  Description of Artificial Sequence: Synthetic oligonucleotide
cgggaaugcacacgcugag

SEQ ID NO: 1996322 - RNA, 19 nt, Artificial Sequence
  Description of Artificial Sequence: Synthetic oligonucleotide
agcgcucgccguccgcgau

SEQ ID NO: 1996323 - RNA, 19 nt, Artificial Sequence
  Description of Artificial Sequence: Synthetic oligonucleotide
agccccugggccgccccgg

SEQ ID NO: 1996324 - RNA, 19 nt, Artificial Sequence
  Description of Artificial Sequence: Synthetic oligonucleotide
aggccacuccgccgcugug

SEQ ID NO: 1996325 - RNA, 19 nt, Artificial Sequence
  Description of Artificial Sequence: Synthetic oligonucleotide
cugugagccccgcggggca

SEQ ID NO: 1996326 - RNA, 19 nt, Artificial Sequence
  Description of Artificial Sequence: Synthetic oligonucleotide
gggccggacgcagcgcucg

SEQ ID NO: 1996327 - RNA, 19 nt, Artificial Sequence
  Description of Artificial Sequence: Synthetic oligonucleotide
gcgcccgagucccacggug

SEQ ID NO: 1996328 - RNA, 19 nt, Artificial Sequence
  Description of Artificial Sequence: Synthetic oligonucleotide
ccucuggugccucacucca

SEQ ID NO: 1996329 - RNA, 19 nt, Artificial Sequence
  Description of Artificial Sequence: Synthetic oligonucleotide
guaggccacuccgccgcug

SEQ ID NO: 1996330 - RNA, 19 nt, Artificial Sequence
  Description of Artificial Sequence: Synthetic oligonucleotide
ccugacgcucuugucgaug

SEQ ID NO: 1996331 - RNA, 19 nt, Artificial Sequence
  Description of Artificial Sequence: Synthetic oligonucleotide
gcuaaccuguaagaauaua

SEQ ID NO: 1996332 - RNA, 19 nt, Artificial Sequence
  Description of Artificial Sequence: Synthetic oligonucleotide
gccguguccgggccccgcg

SEQ ID NO: 1996333 - RNA, 19 nt, Artificial Sequence
  Description of Artificial Sequence: Synthetic oligonucleotide
cgaaccugccguguccggg

SEQ ID NO: 1996334 - RNA, 19 nt, Artificial Sequence
  Description of Artificial Sequence: Synthetic oligonucleotide
agacgcgcucugagcuccg

SEQ ID NO: 1996335 - RNA, 19 nt, Artificial Sequence
  Description of Artificial Sequence: Synthetic oligonucleotide
ggcguugcccgcgggccgg

SEQ ID NO: 1996336 - RNA, 19 nt, Artificial Sequence
  Description of Artificial Sequence: Synthetic oligonucleotide
ugccguguccgggccccgc

SEQ ID NO: 1996337 - RNA, 19 nt, Artificial Sequence
  Description of Artificial Sequence: Synthetic oligonucleotide
cguucauuguaggccacuc

SEQ ID NO: 1996338 - RNA, 19 nt, Artificial Sequence
  Description of Artificial Sequence: Synthetic oligonucleotide
ccgcugugagccccgcggg

SEQ ID NO: 1996339 - RNA, 19 nt, Artificial Sequence
  Description of Artificial Sequence: Synthetic oligonucleotide
guagugccguuuguagcgu

SEQ ID NO: 1996340 - RNA, 19 nt, Artificial Sequence
  Description of Artificial Sequence: Synthetic oligonucleotide
caucacucgucuuccucuu

SEQ ID NO: 1996341 - RNA, 19 nt, Artificial Sequence
  Description of Artificial Sequence: Synthetic oligonucleotide
  modified_base (7)..(7): a, c, u, g, unknown or other
acggugnccccgggucaga

SEQ ID NO: 1996342 - RNA, 19 nt, Artificial Sequence
  Description of Artificial Sequence: Synthetic oligonucleotide
  modified_base (18)..(18): a, c, u, g, unknown or other
gcccgagucccacggugnc

SEQ ID NO: 1996343 - RNA, 19 nt, Artificial Sequence
  Description of Artificial Sequence: Synthetic oligonucleotide
cugcacccuuuugcugaag

SEQ ID NO: 1996344 - RNA, 19 nt, Artificial Sequence
  Description of Artificial Sequence: Synthetic oligonucleotide
gccucgaaccugccguguc

SEQ ID NO: 1996345 - RNA, 19 nt, Artificial Sequence
  Description of Artificial Sequence: Synthetic oligonucleotide
gggcccuucgcggcugucc

SEQ ID NO: 1996346 - RNA, 19 nt, Artificial Sequence
  Description of Artificial Sequence: Synthetic oligonucleotide
ccuccgauuucugguccag

SEQ ID NO: 1996347 - RNA, 19 nt, Artificial Sequence
  Description of Artificial Sequence: Synthetic oligonucleotide
ggcccggccucgaaccugc

SEQ ID NO: 1996348 - RNA, 19 nt, Artificial Sequence
  Description of Artificial Sequence: Synthetic oligonucleotide
cugcuugcugcccuccgau

SEQ ID NO: 1996349 - RNA, 19 nt, Artificial Sequence
  Description of Artificial Sequence: Synthetic oligonucleotide
cccggccucgaaccugccg

SEQ ID NO: 1996350 - RNA, 19 nt, Artificial Sequence
  Description of Artificial Sequence: Synthetic oligonucleotide
ucuccaccccgcggcuccu

SEQ ID NO: 1996351 - RNA, 19 nt, Artificial Sequence
  Description of Artificial Sequence: Synthetic oligonucleotide
caagcgucucuuucucauu

SEQ ID NO: 1996352 - RNA, 19 nt, Artificial Sequence
  Description of Artificial Sequence: Synthetic oligonucleotide
cccgcggcagccccugggc

SEQ ID NO: 1996353 - RNA, 19 nt, Artificial Sequence
  Description of Artificial Sequence: Synthetic oligonucleotide
cgggauccgggcccggccg

SEQ ID NO: 1996354 - RNA, 19 nt, Artificial Sequence
  Description of Artificial Sequence: Synthetic oligonucleotide
ccgauuucugguccagucu

SEQ ID NO: 1996355 - RNA, 19 nt, Artificial Sequence
  Description of Artificial Sequence: Synthetic oligonucleotide
ggccccgccgggaaugcac

SEQ ID NO: 1996356 - RNA, 19 nt, Artificial Sequence
  Description of Artificial Sequence: Synthetic oligonucleotide
cgccgcgccgcaaagucuc

SEQ ID NO: 1996357 - RNA, 19 nt, Artificial Sequence
  Description of Artificial Sequence: Synthetic oligonucleotide
ggccacuccgccgcuguga

SEQ ID NO: 1996358 - RNA, 19 nt, Artificial Sequence
  Description of Artificial Sequence: Synthetic oligonucleotide
gcuccgcgaggcccggcug

SEQ ID NO: 1996359 - RNA, 19 nt, Artificial Sequence
  Description of Artificial Sequence: Synthetic oligonucleotide
cgcgccgcaaagucuccac

SEQ ID NO: 1996360 - RNA, 19 nt, Artificial Sequence
  Description of Artificial Sequence: Synthetic oligonucleotide
cccgcggggcagcucuccg

SEQ ID NO: 1996361 - RNA, 19 nt, Artificial Sequence
  Description of Artificial Sequence: Synthetic oligonucleotide
cgucggagaguguucaccu

SEQ ID NO: 1996362 - RNA, 19 nt, Artificial Sequence
  Description of Artificial Sequence: Synthetic oligonucleotide
ccguguccgggccccgcgg

SEQ ID NO: 1996363 - RNA, 19 nt, Artificial Sequence
  Description of Artificial Sequence: Synthetic oligonucleotide
gguccagucugcuccuguu

SEQ ID NO: 1996364 - RNA, 19 nt, Artificial Sequence
  Description of Artificial Sequence: Synthetic oligonucleotide
gcaucgcacugcuguccuc

SEQ ID NO: 1996365 - RNA, 19 nt, Artificial Sequence
  Description of Artificial Sequence: Synthetic oligonucleotide
ggcccuucgcggcuguccu

SEQ ID NO: 1996366 - RNA, 19 nt, Artificial Sequence
  Description of Artificial Sequence: Synthetic oligonucleotide
ccggccucgaaccugccgu

SEQ ID NO: 1996367 - RNA, 19 nt, Artificial Sequence
  Description of Artificial Sequence: Synthetic oligonucleotide
cgcgccgcgccgcaaaguc

SEQ ID NO: 1996368 - RNA, 19 nt, Artificial Sequence
  Description of Artificial Sequence: Synthetic oligonucleotide
ccugaagugucggcucaca

SEQ ID NO: 1996369 - RNA, 19 nt, Artificial Sequence
  Description of Artificial Sequence: Synthetic oligonucleotide
ccccgcggcagccccuggg

SEQ ID NO: 1996370 - RNA, 19 nt, Artificial Sequence
  Description of Artificial Sequence: Synthetic oligonucleotide
  modified_base (9)..(9): a, c, u, g, unknown or other
ccacggugnccccggguca

SEQ ID NO: 1996371 - RNA, 19 nt, Artificial Sequence
  Description of Artificial Sequence: Synthetic oligonucleotide
gccguucauuguaggccac

SEQ ID NO: 1996372 - RNA, 19 nt, Artificial Sequence
  Description of Artificial Sequence: Synthetic oligonucleotide
cguguccgggccccgcggc

SEQ ID NO: 1996373 - RNA, 19 nt, Artificial Sequence
  Description of Artificial Sequence: Synthetic oligonucleotide
gagcuccgcgaggcccggc

SEQ ID NO: 1996374 - RNA, 19 nt, Artificial Sequence
  Description of Artificial Sequence: Synthetic oligonucleotide
cugccguguccgggccccg

SEQ ID NO: 1996375 - RNA, 19 nt, Artificial Sequence
  Description of Artificial Sequence: Synthetic oligonucleotide
cugcagcuuguagugccgu

SEQ ID NO: 1996376 - RNA, 19 nt, Artificial Sequence
  Description of Artificial Sequence: Synthetic oligonucleotide
cuccgcgccgcgccgcaaa

SEQ ID NO: 1996377 - RNA, 19 nt, Artificial Sequence
  Description of Artificial Sequence: Synthetic oligonucleotide
cgcgcucugagcuccgcga

SEQ ID NO: 1996378 - RNA, 19 nt, Artificial Sequence
  Description of Artificial Sequence: Synthetic oligonucleotide
ggccggacgcagcgcucgc

SEQ ID NO: 1996379 - RNA, 19 nt, Artificial Sequence
  Description of Artificial Sequence: Synthetic oligonucleotide
ggccguagcccggggcggc

SEQ ID NO: 1996380 - RNA, 19 nt, Artificial Sequence
  Description of Artificial Sequence: Synthetic oligonucleotide
gccguagcccggggcggcg

SEQ ID NO: 1996381 - RNA, 19 nt, Artificial Sequence
  Description of Artificial Sequence: Synthetic oligonucleotide
gucagccccgcgcccgagu

SEQ ID NO: 1996382 - RNA, 19 nt, Artificial Sequence
  Description of Artificial Sequence: Synthetic oligonucleotide
cuccgauuucugguccagu

SEQ ID NO: 1996383 - RNA, 19 nt, Artificial Sequence
  Description of Artificial Sequence: Synthetic oligonucleotide
ccacuccgccgcugugagc

SEQ ID NO: 1996384 - RNA, 19 nt, Artificial Sequence
  Description of Artificial Sequence: Synthetic oligonucleotide
cgcggggcagcucuccguc

SEQ ID NO: 1996385 - RNA, 19 nt, Artificial Sequence
  Description of Artificial Sequence: Synthetic oligonucleotide
cuccggcccgggcucgcga

SEQ ID NO: 1996386 - RNA, 19 nt, Artificial Sequence
  Description of Artificial Sequence: Synthetic oligonucleotide
ggucuggucugcagcuugu

SEQ ID NO: 1996387 - RNA, 19 nt, Artificial Sequence
  Description of Artificial Sequence: Synthetic oligonucleotide
ccaccccgcggcuccucgc

SEQ ID NO: 1996388 - RNA, 19 nt, Artificial Sequence
  Description of Artificial Sequence: Synthetic oligonucleotide
ccccgggucagacgcgcuc

SEQ ID NO: 1996389 - RNA, 19 nt, Artificial Sequence
  Description of Artificial Sequence: Synthetic oligonucleotide
caccaucaucacucgucuu

SEQ ID NO: 1996390 - RNA, 19 nt, Artificial Sequence
  Description of Artificial Sequence: Synthetic oligonucleotide
cgcgaugaggcagcagcuc

SEQ ID NO: 1996391 - RNA, 19 nt, Artificial Sequence
  Description of Artificial Sequence: Synthetic oligonucleotide
gcaucaugcucaggggaau

SEQ ID NO: 1996392 - RNA, 19 nt, Artificial Sequence
  Description of Artificial Sequence: Synthetic oligonucleotide
gccggacgcagcgcucgcc

SEQ ID NO: 1996393 - RNA, 19 nt, Artificial Sequence
  Description of Artificial Sequence: Synthetic oligonucleotide
gcuccggcccgggcucgcg

SEQ ID NO: 1996394 - RNA, 19 nt, Artificial Sequence
  Description of Artificial Sequence: Synthetic oligonucleotide
cggccucgaaccugccgug

SEQ ID NO: 1996395 - RNA, 19 nt, Artificial Sequence
  Description of Artificial Sequence: Synthetic oligonucleotide
cuccaccccgcggcuccuc

SEQ ID NO: 1996396 - RNA, 19 nt, Artificial Sequence
  Description of Artificial Sequence: Synthetic oligonucleotide
ggggccccgccgggaaugc

SEQ ID NO: 1996397 - RNA, 19 nt, Artificial Sequence
  Description of Artificial Sequence: Synthetic oligonucleotide
  modified_base (19)..(19): a, c, u, g, unknown or other
cgcccgagucccacggugn

SEQ ID NO: 1996398 - RNA, 19 nt, Artificial Sequence
  Description of Artificial Sequence: Synthetic oligonucleotide
gcccuucgcggcuguccuc

SEQ ID NO: 1996399 - RNA, 19 nt, Artificial Sequence
  Description of Artificial Sequence: Synthetic oligonucleotide
gccccgccgggaaugcaca

SEQ ID NO: 1996400 - RNA, 19 nt, Artificial Sequence
  Description of Artificial Sequence: Synthetic oligonucleotide
ccguagcccggggcggcgg

SEQ ID NO: 1996401 - RNA, 19 nt, Artificial Sequence
  Description of Artificial Sequence: Synthetic oligonucleotide
gccgcgccgcaaagucucc

SEQ ID NO: 1996402 - RNA, 19 nt, Artificial Sequence
  Description of Artificial Sequence: Synthetic oligonucleotide
ccgcgaugaggcagcagcu

SEQ ID NO: 1996403 - RNA, 19 nt, Artificial Sequence
  Description of Artificial Sequence: Synthetic oligonucleotide
caccaggccucuggugccu

SEQ ID NO: 1996404 - RNA, 19 nt, Artificial Sequence
  Description of Artificial Sequence: Synthetic oligonucleotide
  modified_base (6)..(6): a, c, u, g, unknown or other
cggugnccccgggucagac

SEQ ID NO: 1996405 - RNA, 19 nt, Artificial Sequence
  Description of Artificial Sequence: Synthetic oligonucleotide
gcucgccguccgcgaugag

SEQ ID NO: 1996406 - RNA, 19 nt, Artificial Sequence
  Description of Artificial Sequence: Synthetic oligonucleotide
ccccgcggggcagcucucc

SEQ ID NO: 1996407 - RNA, 19 nt, Artificial Sequence
  Description of Artificial Sequence: Synthetic oligonucleotide
ccgggcucgcgagccuccc

SEQ ID NO: 1996408 - RNA, 19 nt, Artificial Sequence
  Description of Artificial Sequence: Synthetic oligonucleotide
ggccucgaaccugccgugu

SEQ ID NO: 1996409 - RNA, 19 nt, Artificial Sequence
  Description of Artificial Sequence: Synthetic oligonucleotide
ggggcccggccucgaaccu

SEQ ID NO: 1996410 - RNA, 19 nt, Artificial Sequence
  Description of Artificial Sequence: Synthetic oligonucleotide
ccgggcccggccgcccugg

SEQ ID NO: 1996411 - RNA, 19 nt, Artificial Sequence
  Description of Artificial Sequence: Synthetic oligonucleotide
ccguucauuguaggccacu

SEQ ID NO: 1996412 - RNA, 19 nt, Artificial Sequence
  Description of Artificial Sequence: Synthetic oligonucleotide
cggggccccgccgggaaug

SEQ ID NO: 1996413 - RNA, 19 nt, Artificial Sequence
  Description of Artificial Sequence: Synthetic oligonucleotide
gccugacgcucuugucgau

SEQ ID NO: 1996414 - RNA, 19 nt, Artificial Sequence
  Description of Artificial Sequence: Synthetic oligonucleotide
cgcucgccguccgcgauga

SEQ ID NO: 1996415 - RNA, 19 nt, Artificial Sequence
  Description of Artificial Sequence: Synthetic oligonucleotide
cccgggucagacgcgcucu

SEQ ID NO: 1996416 - RNA, 19 nt, Artificial Sequence
  Description of Artificial Sequence: Synthetic oligonucleotide
cgggccggacgcagcgcuc

SEQ ID NO: 1996417 - RNA, 19 nt, Artificial Sequence
  Description of Artificial Sequence: Synthetic oligonucleotide
cgggucagacgcgcucuga

SEQ ID NO: 1996418 - RNA, 19 nt, Artificial Sequence
  Description of Artificial Sequence: Synthetic oligonucleotide
gcgccgcgccgcaaagucu

SEQ ID NO: 1996419 - RNA, 19 nt, Artificial Sequence
  Description of Artificial Sequence: Synthetic oligonucleotide
gggccccgccgggaaugca

SEQ ID NO: 1996420 - RNA, 19 nt, Artificial Sequence
  Description of Artificial Sequence: Synthetic oligonucleotide
ccgcggggcagcucuccgu

SEQ ID NO: 1996421 - RNA, 19 nt, Artificial Sequence
  Description of Artificial Sequence: Synthetic oligonucleotide
ccccgccggcucccgccug

SEQ ID NO: 1996422 - RNA, 19 nt, Artificial Sequence
  Description of Artificial Sequence: Synthetic oligonucleotide
cgcggcuguccucuucggu

SEQ ID NO: 1996423 - RNA, 19 nt, Artificial Sequence
  Description of Artificial Sequence: Synthetic oligonucleotide
ccgccucaccaggccucug

SEQ ID NO: 1996424 - RNA, 19 nt, Artificial Sequence
  Description of Artificial Sequence: Synthetic oligonucleotide
gcguugcccgcgggccgga

SEQ ID NO: 1996425 - RNA, 19 nt, Artificial Sequence
  Description of Artificial Sequence: Synthetic oligonucleotide
cccggccgcccuggggcuc

SEQ ID NO: 1996426 - RNA, 19 nt, Artificial Sequence
  Description of Artificial Sequence: Synthetic oligonucleotide
cguccgcgaugaggcagca

SEQ ID NO: 1996427 - RNA, 19 nt, Artificial Sequence
  Description of Artificial Sequence: Synthetic oligonucleotide
cguugcccgcgggccggac

SEQ ID NO: 1996428 - RNA, 19 nt, Artificial Sequence
  Description of Artificial Sequence: Synthetic oligonucleotide
cgccgggaaugcacacgcu

SEQ ID NO: 1996429 - RNA, 19 nt, Artificial Sequence
  Description of Artificial Sequence: Synthetic oligonucleotide
ccuucgcggcuguccucuu

SEQ ID NO: 1996430 - RNA, 19 nt, Artificial Sequence
  Description of Artificial Sequence: Synthetic oligonucleotide
cgcgcccgagucccacggu

SEQ ID NO: 1996431 - RNA, 19 nt, Artificial Sequence
  Description of Artificial Sequence: Synthetic oligonucleotide
  modified_base (1)..(1): a, c, u, g, unknown or other
nccccgggucagacgcgcu

SEQ ID NO: 1996432 - RNA, 19 nt, Artificial Sequence
  Description of Artificial Sequence: Synthetic oligonucleotide
aauuagauaaacuucuugg

SEQ ID NO: 1996433 - RNA, 19 nt, Artificial Sequence
  Description of Artificial Sequence: Synthetic oligonucleotide
ugaaugaucauacuugugg

SEQ ID NO: 1996434 - RNA, 19 nt, Artificial Sequence
  Description of Artificial Sequence: Synthetic oligonucleotide
ugcucuaugacuuuaauca

SEQ ID NO: 1996435 - RNA, 19 nt, Artificial Sequence
  Description of Artificial Sequence: Synthetic oligonucleotide
uuuuguauaaagcaagaca

SEQ ID NO: 1996436 - RNA, 19 nt, Artificial Sequence
  Description of Artificial Sequence: Synthetic oligonucleotide
auucuuaauuccuaagacc

SEQ ID NO: 1996437 - RNA, 19 nt, Artificial Sequence
  Description of Artificial Sequence: Synthetic oligonucleotide
aaugaucauacuugugggc

SEQ ID NO: 1996438 - RNA, 19 nt, Artificial Sequence
  Description of Artificial Sequence: Synthetic oligonucleotide
uauagaauuagauaaacuu

SEQ ID NO: 1996439 - RNA, 19 nt, Artificial Sequence
  Description of Artificial Sequence: Synthetic oligonucleotide
aacuagguugccuuuggcc

SEQ ID NO: 1996440 - RNA, 19 nt, Artificial Sequence
  Description of Artificial Sequence: Synthetic oligonucleotide
auaugauucuuccaugggc

SEQ ID NO: 1996441 - RNA, 19 nt, Artificial Sequence
  Description of Artificial Sequence: Synthetic oligonucleotide
uagaauuagauaaacuucu

SEQ ID NO: 1996442 - RNA, 19 nt, Artificial Sequence
  Description of Artificial Sequence: Synthetic oligonucleotide
acuagguugccuuuggccc

SEQ ID NO: 1996443 - RNA, 19 nt, Artificial Sequence
  Description of Artificial Sequence: Synthetic oligonucleotide
ucugaaagaacucuggaaa

SEQ ID NO: 1996444 - RNA, 19 nt, Artificial Sequence
  Description of Artificial Sequence: Synthetic oligonucleotide
uauucuuaauuccuaagac

SEQ ID NO: 1996445 - RNA, 19 nt, Artificial Sequence
  Description of Artificial Sequence: Synthetic oligonucleotide
aauacaauuuccccuggug

SEQ ID NO: 1996446 - RNA, 19 nt, Artificial Sequence
  Description of Artificial Sequence: Synthetic oligonucleotide
ucauaugauucuuccaugg

SEQ ID NO: 1996447 - RNA, 19 nt, Artificial Sequence
  Description of Artificial Sequence: Synthetic oligonucleotide
uaugacuuuaaucaccacu

SEQ ID NO: 1996448 - RNA, 19 nt, Artificial Sequence
  Description of Artificial Sequence: Synthetic oligonucleotide
uccgucaucacauugaaaa

SEQ ID NO: 1996449 - RNA, 19 nt, Artificial Sequence
  Description of Artificial Sequence: Synthetic oligonucleotide
uuacuuugauuccugaagc

SEQ ID NO: 1996450 - RNA, 19 nt, Artificial Sequence
  Description of Artificial Sequence: Synthetic oligonucleotide
uuuuguauucuuaauuccu

SEQ ID NO: 1996451 - RNA, 19 nt, Artificial Sequence
  Description of Artificial Sequence: Synthetic oligonucleotide
ugauguguaacuagguugc

SEQ ID NO: 1996452 - RNA, 19 nt, Artificial Sequence
  Description of Artificial Sequence: Synthetic oligonucleotide
ucuucggugaacagcaagg

SEQ ID NO: 1996453 - RNA, 19 nt, Artificial Sequence
  Description of Artificial Sequence: Synthetic oligonucleotide
agcuugacgauccuguggc

SEQ ID NO: 1996454 - RNA, 19 nt, Artificial Sequence
  Description of Artificial Sequence: Synthetic oligonucleotide
guuacuuugauuccugaag

SEQ ID NO: 1996455 - RNA, 19 nt, Artificial Sequence
  Description of Artificial Sequence: Synthetic oligonucleotide
auagaauuagauaaacuuc

SEQ ID NO: 1996456 - RNA, 19 nt, Artificial Sequence
  Description of Artificial Sequence: Synthetic oligonucleotide
ucggauguggacaauuagg

SEQ ID NO: 1996457 - RNA, 19 nt, Artificial Sequence
  Description of Artificial Sequence: Synthetic oligonucleotide
aguuugcccuaucaaaugc

SEQ ID NO: 1996458 - RNA, 19 nt, Artificial Sequence
  Description of Artificial Sequence: Synthetic oligonucleotide
ucuaugacuuuaaucacca

SEQ ID NO: 1996459 - RNA, 19 nt, Artificial Sequence
  Description of Artificial Sequence: Synthetic oligonucleotide
cucauggacagcuagacug

SEQ ID NO: 1996460 - RNA, 19 nt, Artificial Sequence
  Description of Artificial Sequence: Synthetic oligonucleotide
uaugauucuuccaugggcu

SEQ ID NO: 1996461 - RNA, 19 nt, Artificial Sequence
  Description of Artificial Sequence: Synthetic oligonucleotide
agauuucccacauuccugg

SEQ ID NO: 1996462 - RNA, 19 nt, Artificial Sequence
  Description of Artificial Sequence: Synthetic oligonucleotide
gaauuagauaaacuucuug

SEQ ID NO: 1996463 - RNA, 19 nt, Artificial Sequence
  Description of Artificial Sequence: Synthetic oligonucleotide
gcaaauggcacauucauag

SEQ ID NO: 1996464 - RNA, 19 nt, Artificial Sequence
  Description of Artificial Sequence: Synthetic oligonucleotide
aaucauagaccuucugucu

SEQ ID NO: 1996465 - RNA, 19 nt, Artificial Sequence
  Description of Artificial Sequence: Synthetic oligonucleotide
auuagauaaacuucuuggu

SEQ ID NO: 1996466 - RNA, 19 nt, Artificial Sequence
  Description of Artificial Sequence: Synthetic oligonucleotide
uggaaacccaaacaugucc

SEQ ID NO: 1996467 - RNA, 19 nt, Artificial Sequence
  Description of Artificial Sequence: Synthetic oligonucleotide
uccgugacaguccagcagg

SEQ ID NO: 1996468 - RNA, 19 nt, Artificial Sequence
  Description of Artificial Sequence: Synthetic oligonucleotide
uacagggugagccuuuggg

SEQ ID NO: 1996469 - RNA, 19 nt, Artificial Sequence
  Description of Artificial Sequence: Synthetic oligonucleotide
uuugggagcagcuucuuug

SEQ ID NO: 1996470 - RNA, 19 nt, Artificial Sequence
  Description of Artificial Sequence: Synthetic oligonucleotide
cugauguguaacuagguug

SEQ ID NO: 1996471 - RNA, 19 nt, Artificial Sequence
  Description of Artificial Sequence: Synthetic oligonucleotide
ucuauagggcuucucacca

SEQ ID NO: 1996472 - RNA, 19 nt, Artificial Sequence
  Description of Artificial Sequence: Synthetic oligonucleotide
uagauaaacuucuugguua

SEQ ID NO: 1996473 - RNA, 19 nt, Artificial Sequence
  Description of Artificial Sequence: Synthetic oligonucleotide
aaucccagcuugacgaucc

SEQ ID NO: 1996474 - RNA, 19 nt, Artificial Sequence
  Description of Artificial Sequence: Synthetic oligonucleotide
gaaagaacucuggaaaucc

SEQ ID NO: 1996475 - RNA, 19 nt, Artificial Sequence
  Description of Artificial Sequence: Synthetic oligonucleotide
ugcagaauacaauuucccc

SEQ ID NO: 1996476 - RNA, 19 nt, Artificial Sequence
  Description of Artificial Sequence: Synthetic oligonucleotide
ucaaaugcugguccuuccg

SEQ ID NO: 1996477 - RNA, 19 nt, Artificial Sequence
  Description of Artificial Sequence: Synthetic oligonucleotide
uuagauaaacuucuugguu

SEQ ID NO: 1996478 - RNA, 19 nt, Artificial Sequence
  Description of Artificial Sequence: Synthetic oligonucleotide
uguguauucgcugaugugu

SEQ ID NO: 1996479 - RNA, 19 nt, Artificial Sequence
  Description of Artificial Sequence: Synthetic oligonucleotide
aaugcuacauucugggcau

SEQ ID NO: 1996480 - RNA, 19 nt, Artificial Sequence
  Description of Artificial Sequence: Synthetic oligonucleotide
aaagaacucuggaaauccc

SEQ ID NO: 1996481 - RNA, 19 nt, Artificial Sequence
  Description of Artificial Sequence: Synthetic oligonucleotide
uccuuucugacugaaagcc

SEQ ID NO: 1996482 - RNA, 19 nt, Artificial Sequence
  Description of Artificial Sequence: Synthetic oligonucleotide
uguuggaaacccaaacaug

SEQ ID NO: 1996483 - RNA, 19 nt, Artificial Sequence
  Description of Artificial Sequence: Synthetic oligonucleotide
aauuaggcuuccuuucuga

SEQ ID NO: 1996484 - RNA, 19 nt, Artificial Sequence
  Description of Artificial Sequence: Synthetic oligonucleotide
ucugaaugaucauacuugu

SEQ ID NO: 1996485 - RNA, 19 nt, Artificial Sequence
  Description of Artificial Sequence: Synthetic oligonucleotide
auuuccacuuacccuauag

SEQ ID NO: 1996486 - RNA, 19 nt, Artificial Sequence
  Description of Artificial Sequence: Synthetic oligonucleotide
cuuccuuugacgagagugg

SEQ ID NO: 1996487 - RNA, 19 nt, Artificial Sequence
  Description of Artificial Sequence: Synthetic oligonucleotide
ucggugaacagcaagguua

SEQ ID NO: 1996488 - RNA, 19 nt, Artificial Sequence
  Description of Artificial Sequence: Synthetic oligonucleotide
auacuugugggcuuccguc

SEQ ID NO: 1996489 - RNA, 19 nt, Artificial Sequence
  Description of Artificial Sequence: Synthetic oligonucleotide
agcuguuggaaacccaaac

SEQ ID NO: 1996490 - RNA, 19 nt, Artificial Sequence
  Description of Artificial Sequence: Synthetic oligonucleotide
uguauaaagcaagacauuu

SEQ ID NO: 1996491 - RNA, 19 nt, Artificial Sequence
  Description of Artificial Sequence: Synthetic oligonucleotide
uaagaccuuccuuugacga

SEQ ID NO: 1996492 - RNA, 19 nt, Artificial Sequence
  Description of Artificial Sequence: Synthetic oligonucleotide
agugucuuugaaucugggg

SEQ ID NO: 1996493 - RNA, 19 nt, Artificial Sequence
  Description of Artificial Sequence: Synthetic oligonucleotide
cucuaugacuuuaaucacc

SEQ ID NO: 1996494 - RNA, 19 nt, Artificial Sequence
  Description of Artificial Sequence: Synthetic oligonucleotide
caaucauagaccuucuguc

SEQ ID NO: 1996495 - RNA, 19 nt, Artificial Sequence
  Description of Artificial Sequence: Synthetic oligonucleotide
uuacccuauagaauuagau

SEQ ID NO: 1996496 - RNA, 19 nt, Artificial Sequence
  Description of Artificial Sequence: Synthetic oligonucleotide
auaaacuucuugguuacag

SEQ ID NO: 1996497 - RNA, 19 nt, Artificial Sequence
  Description of Artificial Sequence: Synthetic oligonucleotide
auacaauuuccccuggugu

SEQ ID NO: 1996498 - RNA, 19 nt, Artificial Sequence
  Description of Artificial Sequence: Synthetic oligonucleotide
ucaguuugcccuaucaaau

SEQ ID NO: 1996499 - RNA, 19 nt, Artificial Sequence
  Description of Artificial Sequence: Synthetic oligonucleotide
ucuugaguaccgcagcggc

SEQ ID NO: 1996500 - RNA, 19 nt, Artificial Sequence
  Description of Artificial Sequence: Synthetic oligonucleotide
guauucuuaauuccuaaga

SEQ ID NO: 1996501 - RNA, 19 nt, Artificial Sequence
  Description of Artificial Sequence: Synthetic oligonucleotide
agaccuucugucucacucc

SEQ ID NO: 1996502 - RNA, 19 nt, Artificial Sequence
  Description of Artificial Sequence: Synthetic oligonucleotide
ucucaugcaacguuagacu

SEQ ID NO: 1996503 - RNA, 19 nt, Artificial Sequence
  Description of Artificial Sequence: Synthetic oligonucleotide
uuuguauucuuaauuccua

SEQ ID NO: 1996504 - RNA, 19 nt, Artificial Sequence
  Description of Artificial Sequence: Synthetic oligonucleotide
uuugccggaaagauuuccc

SEQ ID NO: 1996505 - RNA, 19 nt, Artificial Sequence
  Description of Artificial Sequence: Synthetic oligonucleotide
uguggccucugaaugauca

SEQ ID NO: 1996506 - RNA, 19 nt, Artificial Sequence
  Description of Artificial Sequence: Synthetic oligonucleotide
acaucuauagggcuucuca

SEQ ID NO: 1996507 - RNA, 19 nt, Artificial Sequence
  Description of Artificial Sequence: Synthetic oligonucleotide
acgcauagggcuucagacc

SEQ ID NO: 1996508 - RNA, 19 nt, Artificial Sequence
  Description of Artificial Sequence: Synthetic oligonucleotide
aucaaaugcugguccuucc

SEQ ID NO: 1996509 - RNA, 19 nt, Artificial Sequence
  Description of Artificial Sequence: Synthetic oligonucleotide
uuugcccuaucaaaugcug

SEQ ID NO: 1996510 - RNA, 19 nt, Artificial Sequence
  Description of Artificial Sequence: Synthetic oligonucleotide
auaucuuccgugacagucc

SEQ ID NO: 1996511 - RNA, 19 nt, Artificial Sequence
  Description of Artificial Sequence: Synthetic oligonucleotide
gacaauuaggcuuccuuuc

SEQ ID NO: 1996512 - RNA, 19 nt, Artificial Sequence
  Description of Artificial Sequence: Synthetic oligonucleotide
uagaccuucugucucacuc

SEQ ID NO: 1996513 - RNA, 19 nt, Artificial Sequence
  Description of Artificial Sequence: Synthetic oligonucleotide
cauaugauucuuccauggg

SEQ ID NO: 1996514 - RNA, 19 nt, Artificial Sequence
  Description of Artificial Sequence: Synthetic oligonucleotide
aagucaguuugcccuauca

SEQ ID NO: 1996515 - RNA, 19 nt, Artificial Sequence
  Description of Artificial Sequence: Synthetic oligonucleotide
uuuccacuuacccuauaga

SEQ ID NO: 1996516 - RNA, 19 nt, Artificial Sequence
  Description of Artificial Sequence: Synthetic oligonucleotide
uccaccuucucucuucuga

SEQ ID NO: 1996517 - RNA, 19 nt, Artificial Sequence
  Description of Artificial Sequence: Synthetic oligonucleotide
ugaaucuggggacuuuugu

SEQ ID NO: 1996518 - RNA, 19 nt, Artificial Sequence
  Description of Artificial Sequence: Synthetic oligonucleotide
uugcccuaucaaaugcugg

SEQ ID NO: 1996519 - RNA, 19 nt, Artificial Sequence
  Description of Artificial Sequence: Synthetic oligonucleotide
uuugauuccugaagcuucu

SEQ ID NO: 1996520 - RNA, 19 nt, Artificial Sequence
  Description of Artificial Sequence: Synthetic oligonucleotide
cuaagaccuuccuuugacg

SEQ ID NO: 1996521 - RNA, 19 nt, Artificial Sequence
  Description of Artificial Sequence: Synthetic oligonucleotide
uugggagcagcuucuuugg

SEQ ID NO: 1996522 - RNA, 19 nt, Artificial Sequence
  Description of Artificial Sequence: Synthetic oligonucleotide
ucauggacagcuagacugc

SEQ ID NO: 1996523 - RNA, 19 nt, Artificial Sequence
  Description of Artificial Sequence: Synthetic oligonucleotide
uacccuauagaauuagaua

SEQ ID NO: 1996524 - RNA, 19 nt, Artificial Sequence
  Description of Artificial Sequence: Synthetic oligonucleotide
ggaaaucccagcuugacga

SEQ ID NO: 1996525 - RNA, 19 nt, Artificial Sequence
  Description of Artificial Sequence: Synthetic oligonucleotide
uccacuuacccuauagaau

SEQ ID NO: 1996526 - RNA, 19 nt, Artificial Sequence
  Description of Artificial Sequence: Synthetic oligonucleotide
cacgcauagggcuucagac

SEQ ID NO: 1996527 - RNA, 19 nt, Artificial Sequence
  Description of Artificial Sequence: Synthetic oligonucleotide
cuuaauuccuaagaccuuc

SEQ ID NO: 1996528 - RNA, 19 nt, Artificial Sequence
  Description of Artificial Sequence: Synthetic oligonucleotide
aagauuucccacauuccug

SEQ ID NO: 1996529 - RNA, 19 nt, Artificial Sequence
  Description of Artificial Sequence: Synthetic oligonucleotide
uggagucucucauggacag

SEQ ID NO: 1996530 - RNA, 19 nt, Artificial Sequence
  Description of Artificial Sequence: Synthetic oligonucleotide
uuccggaagaauuuccacu

SEQ ID NO: 1996531 - RNA, 19 nt, Artificial Sequence
  Description of Artificial Sequence: Synthetic oligonucleotide
cauaucuuccgugacaguc

SEQ ID NO: 1996532 - RNA, 19 nt, Artificial Sequence
  Description of Artificial Sequence: Synthetic oligonucleotide
uugacgagagugguuacag

SEQ ID NO: 1996533 - RNA, 19 nt, Artificial Sequence
  Description of Artificial Sequence: Synthetic oligonucleotide
ugggcuuccgucaucacau

SEQ ID NO: 1996534 - RNA, 19 nt, Artificial Sequence
  Description of Artificial Sequence: Synthetic oligonucleotide
agaauacaauuuccccugg

SEQ ID NO: 1996535 - RNA, 19 nt, Artificial Sequence
  Description of Artificial Sequence: Synthetic oligonucleotide
aauggcacauucauagggu

SEQ ID NO: 1996536 - RNA, 19 nt, Artificial Sequence
  Description of Artificial Sequence: Synthetic oligonucleotide
acaauuaggcuuccuuucu

SEQ ID NO: 1996537 - RNA, 19 nt, Artificial Sequence
  Description of Artificial Sequence: Synthetic oligonucleotide
ugauucuuccaugggcugg

SEQ ID NO: 1996538 - RNA, 19 nt, Artificial Sequence
  Description of Artificial Sequence: Synthetic oligonucleotide
ugggaacacgcauagggcu

SEQ ID NO: 1996539 - RNA, 19 nt, Artificial Sequence
  Description of Artificial Sequence: Synthetic oligonucleotide
aaagucaguuugcccuauc

SEQ ID NO: 1996540 - RNA, 19 nt, Artificial Sequence
  Description of Artificial Sequence: Synthetic oligonucleotide
uuacagaggguuuuguauu

SEQ ID NO: 1996541 - RNA, 19 nt, Artificial Sequence
  Description of Artificial Sequence: Synthetic oligonucleotide
ucaugcaacguuagacuac

SEQ ID NO: 1996542 - RNA, 19 nt, Artificial Sequence
  Description of Artificial Sequence: Synthetic oligonucleotide
ucuuccgugacaguccagc

SEQ ID NO: 1996543 - RNA, 19 nt, Artificial Sequence
  Description of Artificial Sequence: Synthetic oligonucleotide
ucuuuggugcacagccagg

SEQ ID NO: 1996544 - RNA, 19 nt, Artificial Sequence
  Description of Artificial Sequence: Synthetic oligonucleotide
augaucauacuugugggcu

SEQ ID NO: 1996545 - RNA, 19 nt, Artificial Sequence
  Description of Artificial Sequence: Synthetic oligonucleotide
cucucaugcaacguuagac

SEQ ID NO: 1996546 - RNA, 19 nt, Artificial Sequence
  Description of Artificial Sequence: Synthetic oligonucleotide
caugcaacguuagacuacc

SEQ ID NO: 1996547 - RNA, 19 nt, Artificial Sequence
  Description of Artificial Sequence: Synthetic oligonucleotide
uuaggcuuccuuucugacu

SEQ ID NO: 1996548 - RNA, 19 nt, Artificial Sequence
  Description of Artificial Sequence: Synthetic oligonucleotide
uacuuugauuccugaagcu

SEQ ID NO: 1996549 - RNA, 19 nt, Artificial Sequence
  Description of Artificial Sequence: Synthetic oligonucleotide
caaaugcugguccuuccgg

SEQ ID NO: 1996550 - RNA, 19 nt, Artificial Sequence
  Description of Artificial Sequence: Synthetic oligonucleotide
caucuauagggcuucucac

SEQ ID NO: 1996551 - RNA, 19 nt, Artificial Sequence
  Description of Artificial Sequence: Synthetic oligonucleotide
ugaaagaacucuggaaauc

SEQ ID NO: 1996552 - RNA, 19 nt, Artificial Sequence
  Description of Artificial Sequence: Synthetic oligonucleotide
ugaacucggauguggacaa

SEQ ID NO: 1996553 - RNA, 19 nt, Artificial Sequence
  Description of Artificial Sequence: Synthetic oligonucleotide
aaaucccagcuugacgauc

SEQ ID NO: 1996554 - RNA, 19 nt, Artificial Sequence
  Description of Artificial Sequence: Synthetic oligonucleotide
uggacagcuagacugccuc

SEQ ID NO: 1996555 - RNA, 19 nt, Artificial Sequence
  Description of Artificial Sequence: Synthetic oligonucleotide
ugcccuaucaaaugcuggu

SEQ ID NO: 1996556 - RNA, 19 nt, Artificial Sequence
  Description of Artificial Sequence: Synthetic oligonucleotide
ucagaccugugugaacucg

SEQ ID NO: 1996557 - RNA, 19 nt, Artificial Sequence
  Description of Artificial Sequence: Synthetic oligonucleotide
uggacaauuaggcuuccuu

SEQ ID NO: 1996558 - RNA, 19 nt, Artificial Sequence
  Description of Artificial Sequence: Synthetic oligonucleotide
aagaacucuggaaauccca

SEQ ID NO: 1996559 - RNA, 19 nt, Artificial Sequence
  Description of Artificial Sequence: Synthetic oligonucleotide
cagggugagccuuugggag

SEQ ID NO: 1996560 - RNA, 19 nt, Artificial Sequence
  Description of Artificial Sequence: Synthetic oligonucleotide
ucucucauggacagcuaga

SEQ ID NO: 1996561 - RNA, 19 nt, Artificial Sequence
  Description of Artificial Sequence: Synthetic oligonucleotide
uuuugccggaaagauuucc

SEQ ID NO: 1996562 - RNA, 19 nt, Artificial Sequence
  Description of Artificial Sequence: Synthetic oligonucleotide
aggagagucuuccuguagu

SEQ ID NO: 1996563 - RNA, 19 nt, Artificial Sequence
  Description of Artificial Sequence: Synthetic oligonucleotide
uccggaagaauuuccacuu

SEQ ID NO: 1996564 - RNA, 19 nt, Artificial Sequence
  Description of Artificial Sequence: Synthetic oligonucleotide
auccuguggccucugaaug

SEQ ID NO: 1996565 - RNA, 19 nt, Artificial Sequence
  Description of Artificial Sequence: Synthetic oligonucleotide
uuguauaaagcaagacauu

SEQ ID NO: 1996566 - RNA, 19 nt, Artificial Sequence
  Description of Artificial Sequence: Synthetic oligonucleotide
uggucuugaguaccgcagc

SEQ ID NO: 1996567 - RNA, 19 nt, Artificial Sequence
  Description of Artificial Sequence: Synthetic oligonucleotide
aacagcaagguuacuuuga

SEQ ID NO: 1996568 - RNA, 19 nt, Artificial Sequence
  Description of Artificial Sequence: Synthetic oligonucleotide
cuugaguaccgcagcggcg

SEQ ID NO: 1996569 - RNA, 19 nt, Artificial Sequence
  Description of Artificial Sequence: Synthetic oligonucleotide
auguggacaauuaggcuuc

SEQ ID NO: 1996570 - RNA, 19 nt, Artificial Sequence
  Description of Artificial Sequence: Synthetic oligonucleotide
agcuucucuggcaaauggc

SEQ ID NO: 1996571 - RNA, 19 nt, Artificial Sequence
  Description of Artificial Sequence: Synthetic oligonucleotide
ugacgagagugguuacagg

SEQ ID NO: 1996572 - RNA, 19 nt, Artificial Sequence
  Description of Artificial Sequence: Synthetic oligonucleotide
uccuguagugucuuugaau

SEQ ID NO: 1996573 - RNA, 19 nt, Artificial Sequence
  Description of Artificial Sequence: Synthetic oligonucleotide
caggguagcuguuggaaac

SEQ ID NO: 1996574 - RNA, 19 nt, Artificial Sequence
  Description of Artificial Sequence: Synthetic oligonucleotide
agaacucuggaaaucccag

SEQ ID NO: 1996575 - RNA, 19 nt, Artificial Sequence
  Description of Artificial Sequence: Synthetic oligonucleotide
uacuugugggcuuccguca

SEQ ID NO: 1996576 - RNA, 19 nt, Artificial Sequence
  Description of Artificial Sequence: Synthetic oligonucleotide
guagugucuuugaaucugg

SEQ ID NO: 1996577 - RNA, 19 nt, Artificial Sequence
  Description of Artificial Sequence: Synthetic oligonucleotide
acagagauagggugucucu

SEQ ID NO: 1996578 - RNA, 19 nt, Artificial Sequence
  Description of Artificial Sequence: Synthetic oligonucleotide
uucuugguuacagaggguu

SEQ ID NO: 1996579 - RNA, 19 nt, Artificial Sequence
  Description of Artificial Sequence: Synthetic oligonucleotide
uccaugcagaauacaauuu

SEQ ID NO: 1996580 - RNA, 19 nt, Artificial Sequence
  Description of Artificial Sequence: Synthetic oligonucleotide
cuuuggugcacagccaggc

SEQ ID NO: 1996581 - RNA, 19 nt, Artificial Sequence
  Description of Artificial Sequence: Synthetic oligonucleotide
uacagaggguuuuguauuc

SEQ ID NO: 1996582 - RNA, 19 nt, Artificial Sequence
  Description of Artificial Sequence: Synthetic oligonucleotide
guuggaaacccaaacaugu

SEQ ID NO: 1996583 - RNA, 19 nt, Artificial Sequence
  Description of Artificial Sequence: Synthetic oligonucleotide
ugcaacguuagacuaccuu

SEQ ID NO: 1996584 - RNA, 19 nt, Artificial Sequence
  Description of Artificial Sequence: Synthetic oligonucleotide
ugagccuuugggagcagcu

SEQ ID NO: 1996585 - RNA, 19 nt, Artificial Sequence
  Description of Artificial Sequence: Synthetic oligonucleotide
gucaguuugcccuaucaaa

SEQ ID NO: 1996586 - RNA, 19 nt, Artificial Sequence
  Description of Artificial Sequence: Synthetic oligonucleotide
cugcucuaugacuuuaauc

SEQ ID NO: 1996587 - RNA, 19 nt, Artificial Sequence
  Description of Artificial Sequence: Synthetic oligonucleotide
acuuacccuauagaauuag

SEQ ID NO: 1996588 - RNA, 19 nt, Artificial Sequence
  Description of Artificial Sequence: Synthetic oligonucleotide
gacuuuaaucaccacuucu

SEQ ID NO: 1996589 - RNA, 19 nt, Artificial Sequence
  Description of Artificial Sequence: Synthetic oligonucleotide
ucucacuccaggagagucu

SEQ ID NO: 1996590 - RNA, 19 nt, Artificial Sequence
  Description of Artificial Sequence: Synthetic oligonucleotide
ugacuuuaaucaccacuuc

SEQ ID NO: 1996591 - RNA, 19 nt, Artificial Sequence
  Description of Artificial Sequence: Synthetic oligonucleotide
uuggaaacccaaacauguc

SEQ ID NO: 1996592 - RNA, 19 nt, Artificial Sequence
  Description of Artificial Sequence: Synthetic oligonucleotide
uuacagggugagccuuugg

SEQ ID NO: 1996593 - RNA, 19 nt, Artificial Sequence
  Description of Artificial Sequence: Synthetic oligonucleotide
cuuccggaagaauuuccac

SEQ ID NO: 1996594 - RNA, 19 nt, Artificial Sequence
  Description of Artificial Sequence: Synthetic oligonucleotide
cagaccugugugaacucgg

SEQ ID NO: 1996595 - RNA, 19 nt, Artificial Sequence
  Description of Artificial Sequence: Synthetic oligonucleotide
acuuuaaucaccacuucuu

SEQ ID NO: 1996596 - RNA, 19 nt, Artificial Sequence
  Description of Artificial Sequence: Synthetic oligonucleotide
cucggauguggacaauuag

SEQ ID NO: 1996597 - RNA, 19 nt, Artificial Sequence
  Description of Artificial Sequence: Synthetic oligonucleotide
guguggaagcucuuccugc

SEQ ID NO: 1996598 - RNA, 19 nt, Artificial Sequence
  Description of Artificial Sequence: Synthetic oligonucleotide
caguuugcccuaucaaaug

SEQ ID NO: 1996599 - RNA, 19 nt, Artificial Sequence
  Description of Artificial Sequence: Synthetic oligonucleotide
uuugacgagagugguuaca

SEQ ID NO: 1996600 - RNA, 19 nt, Artificial Sequence
  Description of Artificial Sequence: Synthetic oligonucleotide
uccacuccugcucuaugac

SEQ ID NO: 1996601 - RNA, 19 nt, Artificial Sequence
  Description of Artificial Sequence: Synthetic oligonucleotide
cugucucacuccaggagag

SEQ ID NO: 1996602 - RNA, 19 nt, Artificial Sequence
  Description of Artificial Sequence: Synthetic oligonucleotide
uaucaaaugcugguccuuc

SEQ ID NO: 1996603 - RNA, 19 nt, Artificial Sequence
  Description of Artificial Sequence: Synthetic oligonucleotide
guuacagaggguuuuguau

SEQ ID NO: 1996604 - RNA, 19 nt, Artificial Sequence
  Description of Artificial Sequence: Synthetic oligonucleotide
augggcuggucuugaguac

SEQ ID NO: 1996605 - RNA, 19 nt, Artificial Sequence
  Description of Artificial Sequence: Synthetic oligonucleotide
augauucuuccaugggcug

SEQ ID NO: 1996606 - RNA, 19 nt, Artificial Sequence
  Description of Artificial Sequence: Synthetic oligonucleotide
ucucucaugcaacguuaga

SEQ ID NO: 1996607 - RNA, 19 nt, Artificial Sequence
  Description of Artificial Sequence: Synthetic oligonucleotide
agucaguuugcccuaucaa

SEQ ID NO: 1996608 - RNA, 19 nt, Artificial Sequence
  Description of Artificial Sequence: Synthetic oligonucleotide
ugcugguccuuccggaaga

SEQ ID NO: 1996609 - RNA, 19 nt, Artificial Sequence
  Description of Artificial Sequence: Synthetic oligonucleotide
cagcuugacgauccugugg

SEQ ID NO: 1996610 - RNA, 19 nt, Artificial Sequence
  Description of Artificial Sequence: Synthetic oligonucleotide
caauuaggcuuccuuucug

SEQ ID NO: 1996611 - RNA, 19 nt, Artificial Sequence
  Description of Artificial Sequence: Synthetic oligonucleotide
ggcauaucuuccgugacag

SEQ ID NO: 1996612 - RNA, 19 nt, Artificial Sequence
  Description of Artificial Sequence: Synthetic oligonucleotide
cuauagaauuagauaaacu

SEQ ID NO: 1996613 - RNA, 19 nt, Artificial Sequence
  Description of Artificial Sequence: Synthetic oligonucleotide
uuuggugcacagccaggcu

SEQ ID NO: 1996614 - RNA, 19 nt, Artificial Sequence
  Description of Artificial Sequence: Synthetic oligonucleotide
ucauacuugugggcuuccg

SEQ ID NO: 1996615 - RNA, 19 nt, Artificial Sequence
  Description of Artificial Sequence: Synthetic oligonucleotide
cucucauggacagcuagac

SEQ ID NO: 1996616 - RNA, 19 nt, Artificial Sequence
  Description of Artificial Sequence: Synthetic oligonucleotide
uccuguggccucugaauga

SEQ ID NO: 1996617 - RNA, 19 nt, Artificial Sequence
  Description of Artificial Sequence: Synthetic oligonucleotide
ggucuugaguaccgcagcg

SEQ ID NO: 1996618 - RNA, 19 nt, Artificial Sequence
  Description of Artificial Sequence: Synthetic oligonucleotide
cugccucucugacuaaagc

SEQ ID NO: 1996619 - RNA, 19 nt, Artificial Sequence
  Description of Artificial Sequence: Synthetic oligonucleotide
ccuauagaauuagauaaac

SEQ ID NO: 1996620 - RNA, 19 nt, Artificial Sequence
  Description of Artificial Sequence: Synthetic oligonucleotide
ugggcauaucuuccgugac

SEQ ID NO: 1996621 - RNA, 19 nt, Artificial Sequence
  Description of Artificial Sequence: Synthetic oligonucleotide
uaaucaccacuucuucaua

SEQ ID NO: 1996622 - RNA, 19 nt, Artificial Sequence
  Description of Artificial Sequence: Synthetic oligonucleotide
gaagcuucucuggcaaaug

SEQ ID NO: 1996623 - RNA, 19 nt, Artificial Sequence
  Description of Artificial Sequence: Synthetic oligonucleotide
uugacgauccuguggccuc

SEQ ID NO: 1996624 - RNA, 19 nt, Artificial Sequence
  Description of Artificial Sequence: Synthetic oligonucleotide
uugguuacagaggguuuug

SEQ ID NO: 1996625 - RNA, 19 nt, Artificial Sequence
  Description of Artificial Sequence: Synthetic oligonucleotide
uguauucgcugauguguaa

SEQ ID NO: 1996626 - RNA, 19 nt, Artificial Sequence
  Description of Artificial Sequence: Synthetic oligonucleotide
ggaagaauuuccacuuacc

SEQ ID NO: 1996627 - RNA, 19 nt, Artificial Sequence
  Description of Artificial Sequence: Synthetic oligonucleotide
agaccuuccuuugacgaga

SEQ ID NO: 1996628 - RNA, 19 nt, Artificial Sequence
  Description of Artificial Sequence: Synthetic oligonucleotide
ggacuuuuguuccaccuuc

SEQ ID NO: 1996629 - RNA, 19 nt, Artificial Sequence
  Description of Artificial Sequence: Synthetic oligonucleotide
cuuacccuauagaauuaga

SEQ ID NO: 1996630 - RNA, 19 nt, Artificial Sequence
  Description of Artificial Sequence: Synthetic oligonucleotide
uuccuguagugucuuugaa

SEQ ID NO: 1996631 - RNA, 19 nt, Artificial Sequence
  Description of Artificial Sequence: Synthetic oligonucleotide
uucggugaacagcaagguu

SEQ ID NO: 1996632 - RNA, 19 nt, Artificial Sequence
  Description of Artificial Sequence: Synthetic oligonucleotide
ugggcuggucuugaguacc

SEQ ID NO: 1996633 - RNA, 19 nt, Artificial Sequence
  Description of Artificial Sequence: Synthetic oligonucleotide
gucuugaguaccgcagcgg

SEQ ID NO: 1996634 - RNA, 19 nt, Artificial Sequence
  Description of Artificial Sequence: Synthetic oligonucleotide
ugaucauacuugugggcuu

SEQ ID NO: 1996635 - RNA, 19 nt, Artificial Sequence
  Description of Artificial Sequence: Synthetic oligonucleotide
uugugggcuuccgucauca

SEQ ID NO: 1996636 - RNA, 19 nt, Artificial Sequence
  Description of Artificial Sequence: Synthetic oligonucleotide
guauucgcugauguguaac

SEQ ID NO: 1996637 - RNA, 19 nt, Artificial Sequence
  Description of Artificial Sequence: Synthetic oligonucleotide
ucuggggacuuuuguucca

SEQ ID NO: 1996638 - RNA, 19 nt, Artificial Sequence
  Description of Artificial Sequence: Synthetic oligonucleotide
uuccuuugacgagaguggu

SEQ ID NO: 1996639 - RNA, 19 nt, Artificial Sequence
  Description of Artificial Sequence: Synthetic oligonucleotide
acagcuagacugccucucu

SEQ ID NO: 1996640 - RNA, 19 nt, Artificial Sequence
  Description of Artificial Sequence: Synthetic oligonucleotide
gcagugggaacacgcauag

SEQ ID NO: 1996641 - RNA, 19 nt, Artificial Sequence
  Description of Artificial Sequence: Synthetic oligonucleotide
gauguguaacuagguugcc

SEQ ID NO: 1996642 - RNA, 19 nt, Artificial Sequence
  Description of Artificial Sequence: Synthetic oligonucleotide
gaucauacuugugggcuuc

SEQ ID NO: 1996643 - RNA, 19 nt, Artificial Sequence
  Description of Artificial Sequence: Synthetic oligonucleotide
aguaccgcagcggcgcgcg

SEQ ID NO: 1996644 - RNA, 19 nt, Artificial Sequence
  Description of Artificial Sequence: Synthetic oligonucleotide
gcaagguuacuuugauucc

SEQ ID NO: 1996645 - RNA, 19 nt, Artificial Sequence
  Description of Artificial Sequence: Synthetic oligonucleotide
gugggaacacgcauagggc

SEQ ID NO: 1996646 - RNA, 19 nt, Artificial Sequence
  Description of Artificial Sequence: Synthetic oligonucleotide
gcagaauacaauuuccccu

SEQ ID NO: 1996647 - RNA, 19 nt, Artificial Sequence
  Description of Artificial Sequence: Synthetic oligonucleotide
ggagagucuuccuguagug

SEQ ID NO: 1996648 - RNA, 19 nt, Artificial Sequence
  Description of Artificial Sequence: Synthetic oligonucleotide
aacucggauguggacaauu

SEQ ID NO: 1996649 - RNA, 19 nt, Artificial Sequence
  Description of Artificial Sequence: Synthetic oligonucleotide
cucaugcaacguuagacua

SEQ ID NO: 1996650 - RNA, 19 nt, Artificial Sequence
  Description of Artificial Sequence: Synthetic oligonucleotide
auguguaacuagguugccu

SEQ ID NO: 1996651 - RNA, 19 nt, Artificial Sequence
  Description of Artificial Sequence: Synthetic oligonucleotide
cccuaucaaaugcuggucc

SEQ ID NO: 1996652 - RNA, 19 nt, Artificial Sequence
  Description of Artificial Sequence: Synthetic oligonucleotide
aaaagucaguuugcccuau

SEQ ID NO: 1996653 - RNA, 19 nt, Artificial Sequence
  Description of Artificial Sequence: Synthetic oligonucleotide
cuuugacgagagugguuac

SEQ ID NO: 1996654 - RNA, 19 nt, Artificial Sequence
  Description of Artificial Sequence: Synthetic oligonucleotide
cuaugacuuuaaucaccac

SEQ ID NO: 1996655 - RNA, 19 nt, Artificial Sequence
  Description of Artificial Sequence: Synthetic oligonucleotide
uagcuguuggaaacccaaa

SEQ ID NO: 1996656 - RNA, 19 nt, Artificial Sequence
  Description of Artificial Sequence: Synthetic oligonucleotide
guauaaagcaagacauuua

SEQ ID NO: 1996657 - RNA, 19 nt, Artificial Sequence
  Description of Artificial Sequence: Synthetic oligonucleotide
uggcaaucauagaccuucu

SEQ ID NO: 1996658 - RNA, 19 nt, Artificial Sequence
  Description of Artificial Sequence: Synthetic oligonucleotide
gugacaguccagcagggua

SEQ ID NO: 1996659 - RNA, 19 nt, Artificial Sequence
  Description of Artificial Sequence: Synthetic oligonucleotide
uccagcaggguagcuguug

SEQ ID NO: 1996660 - RNA, 19 nt, Artificial Sequence
  Description of Artificial Sequence: Synthetic oligonucleotide
cucccucucugugugaaac

SEQ ID NO: 1996661 - RNA, 19 nt, Artificial Sequence
  Description of Artificial Sequence: Synthetic oligonucleotide
guagcuguuggaaacccaa

SEQ ID NO: 1996662 - RNA, 19 nt, Artificial Sequence
  Description of Artificial Sequence: Synthetic oligonucleotide
gcaaucauagaccuucugu

SEQ ID NO: 1996663 - RNA, 19 nt, Artificial Sequence
  Description of Artificial Sequence: Synthetic oligonucleotide
aauuuccacuuacccuaua

SEQ ID NO: 1996664 - RNA, 19 nt, Artificial Sequence
  Description of Artificial Sequence: Synthetic oligonucleotide
cuguuggaaacccaaacau

SEQ ID NO: 1996665 - RNA, 19 nt, Artificial Sequence
  Description of Artificial Sequence: Synthetic oligonucleotide
caggagagucuuccuguag

SEQ ID NO: 1996666 - RNA, 19 nt, Artificial Sequence
  Description of Artificial Sequence: Synthetic oligonucleotide
gcucuaugacuuuaaucac

SEQ ID NO: 1996667 - RNA, 19 nt, Artificial Sequence
  Description of Artificial Sequence: Synthetic oligonucleotide
gacagcuagacugccucuc

SEQ ID NO: 1996668 - RNA, 19 nt, Artificial Sequence
  Description of Artificial Sequence: Synthetic oligonucleotide
gugggcuuccgucaucaca

SEQ ID NO: 1996669 - RNA, 19 nt, Artificial Sequence
  Description of Artificial Sequence: Synthetic oligonucleotide
agcaggguagcuguuggaa

SEQ ID NO: 1996670 - RNA, 19 nt, Artificial Sequence
  Description of Artificial Sequence: Synthetic oligonucleotide
ucccucucugugugaaacu

SEQ ID NO: 1996671 - RNA, 19 nt, Artificial Sequence
  Description of Artificial Sequence: Synthetic oligonucleotide
cuucagaccugugugaacu

SEQ ID NO: 1996672 - RNA, 19 nt, Artificial Sequence
  Description of Artificial Sequence: Synthetic oligonucleotide
uuccgucaucacauugaaa

SEQ ID NO: 1996673 - RNA, 19 nt, Artificial Sequence
  Description of Artificial Sequence: Synthetic oligonucleotide
ggcacauucauaggguuuc

SEQ ID NO: 1996674 - RNA, 19 nt, Artificial Sequence
  Description of Artificial Sequence: Synthetic oligonucleotide
uccuuugacgagagugguu

SEQ ID NO: 1996675 - RNA, 19 nt, Artificial Sequence
  Description of Artificial Sequence: Synthetic oligonucleotide
ugggagcagcuucuuuggu

SEQ ID NO: 1996676 - RNA, 19 nt, Artificial Sequence
  Description of Artificial Sequence: Synthetic oligonucleotide
ucucaccacugugaacucu

SEQ ID NO: 1996677 - RNA, 19 nt, Artificial Sequence
  Description of Artificial Sequence: Synthetic oligonucleotide
ugguuacagaggguuuugu

SEQ ID NO: 1996678 - RNA, 19 nt, Artificial Sequence
  Description of Artificial Sequence: Synthetic oligonucleotide
gaccuuccuuugacgagag

SEQ ID NO: 1996679 - RNA, 19 nt, Artificial Sequence
  Description of Artificial Sequence: Synthetic oligonucleotide
gucucacuccaggagaguc

SEQ ID NO: 1996680 - RNA, 19 nt, Artificial Sequence
  Description of Artificial Sequence: Synthetic oligonucleotide
uggccucugaaugaucaua

SEQ ID NO: 1996681 - RNA, 19 nt, Artificial Sequence
  Description of Artificial Sequence: Synthetic oligonucleotide
guuacagggugagccuuug

SEQ ID NO: 1996682 - RNA, 19 nt, Artificial Sequence
  Description of Artificial Sequence: Synthetic oligonucleotide
ugcuacauucugggcauau

SEQ ID NO: 1996683 - RNA, 19 nt, Artificial Sequence
  Description of Artificial Sequence: Synthetic oligonucleotide
uguggacaauuaggcuucc

SEQ ID NO: 1996684 - RNA, 19 nt, Artificial Sequence
  Description of Artificial Sequence: Synthetic oligonucleotide
guggagucucucauggaca

SEQ ID NO: 1996685 - RNA, 19 nt, Artificial Sequence
  Description of Artificial Sequence: Synthetic oligonucleotide
gagauagggugucucuccu

SEQ ID NO: 1996686 - RNA, 19 nt, Artificial Sequence
  Description of Artificial Sequence: Synthetic oligonucleotide
ggcaaucauagaccuucug

SEQ ID NO: 1996687 - RNA, 19 nt, Artificial Sequence
  Description of Artificial Sequence: Synthetic oligonucleotide
ggccucugaaugaucauac

SEQ ID NO: 1996688 - RNA, 19 nt, Artificial Sequence
  Description of Artificial Sequence: Synthetic oligonucleotide
gcuagacugccucucugac

SEQ ID NO: 1996689 - RNA, 19 nt, Artificial Sequence
  Description of Artificial Sequence: Synthetic oligonucleotide
cagcuagacugccucucug

SEQ ID NO: 1996690 - RNA, 19 nt, Artificial Sequence
  Description of Artificial Sequence: Synthetic oligonucleotide
auucgcugauguguaacua

SEQ ID NO: 1996691 - RNA, 19 nt, Artificial Sequence
  Description of Artificial Sequence: Synthetic oligonucleotide
cuuccgugacaguccagca

SEQ ID NO: 1996692 - RNA, 19 nt, Artificial Sequence
  Description of Artificial Sequence: Synthetic oligonucleotide
gcaacguuagacuaccuuu

SEQ ID NO: 1996693 - RNA, 19 nt, Artificial Sequence
  Description of Artificial Sequence: Synthetic oligonucleotide
uuccaccuucucucuucug

SEQ ID NO: 1996694 - RNA, 19 nt, Artificial Sequence
  Description of Artificial Sequence: Synthetic oligonucleotide
uagguugccuuuggcccug

SEQ ID NO: 1996695 - RNA, 19 nt, Artificial Sequence
  Description of Artificial Sequence: Synthetic oligonucleotide
ggcuuccgucaucacauug

SEQ ID NO: 1996696 - RNA, 19 nt, Artificial Sequence
  Description of Artificial Sequence: Synthetic oligonucleotide
ugguuacagggugagccuu

SEQ ID NO: 1996697 - RNA, 19 nt, Artificial Sequence
  Description of Artificial Sequence: Synthetic oligonucleotide
caagguuacuuugauuccu

SEQ ID NO: 1996698 - RNA, 19 nt, Artificial Sequence
  Description of Artificial Sequence: Synthetic oligonucleotide
gugaacagcaagguuacuu

SEQ ID NO: 1996699 - RNA, 19 nt, Artificial Sequence
  Description of Artificial Sequence: Synthetic oligonucleotide
ugucucacuccaggagagu

SEQ ID NO: 1996700 - RNA, 19 nt, Artificial Sequence
  Description of Artificial Sequence: Synthetic oligonucleotide
caacguuagacuaccuuuu

SEQ ID NO: 1996701 - RNA, 19 nt, Artificial Sequence
  Description of Artificial Sequence: Synthetic oligonucleotide
guguauucgcugaugugua

SEQ ID NO: 1996702 - RNA, 19 nt, Artificial Sequence
  Description of Artificial Sequence: Synthetic oligonucleotide
gagugguuacagggugagc

SEQ ID NO: 1996703 - RNA, 19 nt, Artificial Sequence
  Description of Artificial Sequence: Synthetic oligonucleotide
gcuuccgucaucacauuga

SEQ ID NO: 1996704 - RNA, 19 nt, Artificial Sequence
  Description of Artificial Sequence: Synthetic oligonucleotide
ugacgauccuguggccucu

SEQ ID NO: 1996705 - RNA, 19 nt, Artificial Sequence
  Description of Artificial Sequence: Synthetic oligonucleotide
gaaaucccagcuugacgau

SEQ ID NO: 1996706 - RNA, 19 nt, Artificial Sequence
  Description of Artificial Sequence: Synthetic oligonucleotide
gggcauaucuuccgugaca

SEQ ID NO: 1996707 - RNA, 19 nt, Artificial Sequence
  Description of Artificial Sequence: Synthetic oligonucleotide
uugauuccugaagcuucuc

SEQ ID NO: 1996708 - RNA, 19 nt, Artificial Sequence
  Description of Artificial Sequence: Synthetic oligonucleotide
cauacuugugggcuuccgu

SEQ ID NO: 1996709 - RNA, 19 nt, Artificial Sequence
  Description of Artificial Sequence: Synthetic oligonucleotide
ggacaauuaggcuuccuuu

SEQ ID NO: 1996710 - RNA, 19 nt, Artificial Sequence
  Description of Artificial Sequence: Synthetic oligonucleotide
agaccugugugaacucgga

SEQ ID NO: 1996711 - RNA, 19 nt, Artificial Sequence
  Description of Artificial Sequence: Synthetic oligonucleotide
cuugugggcuuccgucauc

SEQ ID NO: 1996712 - RNA, 19 nt, Artificial Sequence
  Description of Artificial Sequence: Synthetic oligonucleotide
guuugcccuaucaaaugcu

SEQ ID NO: 1996713 - RNA, 19 nt, Artificial Sequence
  Description of Artificial Sequence: Synthetic oligonucleotide
gcuggucuugaguaccgca

SEQ ID NO: 1996714 - RNA, 19 nt, Artificial Sequence
  Description of Artificial Sequence: Synthetic oligonucleotide
ucacaucuauagggcuucu

SEQ ID NO: 1996715 - RNA, 19 nt, Artificial Sequence
  Description of Artificial Sequence: Synthetic oligonucleotide
cuagguugccuuuggcccu

SEQ ID NO: 1996716 - RNA, 19 nt, Artificial Sequence
  Description of Artificial Sequence: Synthetic oligonucleotide
uaccgcagcggcgcgcgcc

SEQ ID NO: 1996717 - RNA, 19 nt, Artificial Sequence
  Description of Artificial Sequence: Synthetic oligonucleotide
ugugggcuuccgucaucac

SEQ ID NO: 1996718 - RNA, 19 nt, Artificial Sequence
  Description of Artificial Sequence: Synthetic oligonucleotide
acuccugcucuaugacuuu

SEQ ID NO: 1996719 - RNA, 19 nt, Artificial Sequence
  Description of Artificial Sequence: Synthetic oligonucleotide
gugguuacagggugagccu

SEQ ID NO: 1996720 - RNA, 19 nt, Artificial Sequence
  Description of Artificial Sequence: Synthetic oligonucleotide
ccacuuacccuauagaauu

SEQ ID NO: 1996721 - RNA, 19 nt, Artificial Sequence
  Description of Artificial Sequence: Synthetic oligonucleotide
cacuuacccuauagaauua

SEQ ID NO: 1996722 - RNA, 19 nt, Artificial Sequence
  Description of Artificial Sequence: Synthetic oligonucleotide
ccuuccggaagaauuucca

SEQ ID NO: 1996723 - RNA, 19 nt, Artificial Sequence
  Description of Artificial Sequence: Synthetic oligonucleotide
ggguagcuguuggaaaccc

SEQ ID NO: 1996724 - RNA, 19 nt, Artificial Sequence
  Description of Artificial Sequence: Synthetic oligonucleotide
gacuuuuguuccaccuucu

SEQ ID NO: 1996725 - RNA, 19 nt, Artificial Sequence
  Description of Artificial Sequence: Synthetic oligonucleotide
auggacagcuagacugccu

SEQ ID NO: 1996726 - RNA, 19 nt, Artificial Sequence
  Description of Artificial Sequence: Synthetic oligonucleotide
cuugacgauccuguggccu

SEQ ID NO: 1996727 - RNA, 19 nt, Artificial Sequence
  Description of Artificial Sequence: Synthetic oligonucleotide
gugagccuuugggagcagc

SEQ ID NO: 1996728 - RNA, 19 nt, Artificial Sequence
  Description of Artificial Sequence: Synthetic oligonucleotide
cucucugugugaaacucuu

SEQ ID NO: 1996729 - RNA, 19 nt, Artificial Sequence
  Description of Artificial Sequence: Synthetic oligonucleotide
cagugggaacacgcauagg

SEQ ID NO: 1996730 - RNA, 19 nt, Artificial Sequence
  Description of Artificial Sequence: Synthetic oligonucleotide
cggugaacagcaagguuac

SEQ ID NO: 1996731 - RNA, 19 nt, Artificial Sequence
  Description of Artificial Sequence: Synthetic oligonucleotide
ccuuugacgagagugguua

SEQ ID NO: 1996732 - RNA, 19 nt, Artificial Sequence
  Description of Artificial Sequence: Synthetic oligonucleotide
caauuuccccuggugugga

SEQ ID NO: 1996733 - RNA, 19 nt, Artificial Sequence
  Description of Artificial Sequence: Synthetic oligonucleotide
gcaggguagcuguuggaaa

SEQ ID NO: 1996734 - RNA, 19 nt, Artificial Sequence
  Description of Artificial Sequence: Synthetic oligonucleotide
aucccagcuugacgauccu

SEQ ID NO: 1996735 - RNA, 19 nt, Artificial Sequence
  Description of Artificial Sequence: Synthetic oligonucleotide
gaguaccgcagcggcgcgc

SEQ ID NO: 1996736 - RNA, 19 nt, Artificial Sequence
  Description of Artificial Sequence: Synthetic oligonucleotide
acgauccuguggccucuga

SEQ ID NO: 1996737 - RNA, 19 nt, Artificial Sequence
  Description of Artificial Sequence: Synthetic oligonucleotide
gcuugacgauccuguggcc

SEQ ID NO: 1996738 - RNA, 19 nt, Artificial Sequence
  Description of Artificial Sequence: Synthetic oligonucleotide
caccuucucucuucugaaa

SEQ ID NO: 1996739 - RNA, 19 nt, Artificial Sequence
  Description of Artificial Sequence: Synthetic oligonucleotide
ggaacacgcauagggcuuc

SEQ ID NO: 1996740 - RNA, 19 nt, Artificial Sequence
  Description of Artificial Sequence: Synthetic oligonucleotide
cuucggugaacagcaaggu

SEQ ID NO: 1996741 - RNA, 19 nt, Artificial Sequence
  Description of Artificial Sequence: Synthetic oligonucleotide
accuuccuuugacgagagu

SEQ ID NO: 1996742 - RNA, 19 nt, Artificial Sequence
  Description of Artificial Sequence: Synthetic oligonucleotide
gaccugugugaacucggau

SEQ ID NO: 1996743 - RNA, 19 nt, Artificial Sequence
  Description of Artificial Sequence: Synthetic oligonucleotide
gaacacgcauagggcuuca

SEQ ID NO: 1996744 - RNA, 19 nt, Artificial Sequence
  Description of Artificial Sequence: Synthetic oligonucleotide
gacgauccuguggccucug

SEQ ID NO: 1996745 - RNA, 19 nt, Artificial Sequence
  Description of Artificial Sequence: Synthetic oligonucleotide
gguagcuguuggaaaccca

SEQ ID NO: 1996746 - RNA, 19 nt, Artificial Sequence
  Description of Artificial Sequence: Synthetic oligonucleotide
ccuaucaaaugcugguccu

SEQ ID NO: 1996747 - RNA, 19 nt, Artificial Sequence
  Description of Artificial Sequence: Synthetic oligonucleotide
gcuacauucugggcauauc

SEQ ID NO: 1996748 - RNA, 19 nt, Artificial Sequence
  Description of Artificial Sequence: Synthetic oligonucleotide
ggcuucagaccugugugaa

SEQ ID NO: 1996749 - RNA, 19 nt, Artificial Sequence
  Description of Artificial Sequence: Synthetic oligonucleotide
cagcaggguagcuguugga

SEQ ID NO: 1996750 - RNA, 19 nt, Artificial Sequence
  Description of Artificial Sequence: Synthetic oligonucleotide
aucuuccgugacaguccag

SEQ ID NO: 1996751 - RNA, 19 nt, Artificial Sequence
  Description of Artificial Sequence: Synthetic oligonucleotide
gcccuaucaaaugcugguc

SEQ ID NO: 1996752 - RNA, 19 nt, Artificial Sequence
  Description of Artificial Sequence: Synthetic oligonucleotide
ccucugaaugaucauacuu

SEQ ID NO: 1996753 - RNA, 19 nt, Artificial Sequence
  Description of Artificial Sequence: Synthetic oligonucleotide
augcaacguuagacuaccu

SEQ ID NO: 1996754 - RNA, 19 nt, Artificial Sequence
  Description of Artificial Sequence: Synthetic oligonucleotide
cuaucaaaugcugguccuu

SEQ ID NO: 1996755 - RNA, 19 nt, Artificial Sequence
  Description of Artificial Sequence: Synthetic oligonucleotide
ccaccuucucucuucugaa

SEQ ID NO: 1996756 - RNA, 19 nt, Artificial Sequence
  Description of Artificial Sequence: Synthetic oligonucleotide
cgcauagggcuucagaccu

SEQ ID NO: 1996757 - RNA, 19 nt, Artificial Sequence
  Description of Artificial Sequence: Synthetic oligonucleotide
ggcuggucuugaguaccgc

SEQ ID NO: 1996758 - RNA, 19 nt, Artificial Sequence
  Description of Artificial Sequence: Synthetic oligonucleotide
ggauucucucaugcaacgu

SEQ ID NO: 1996759 - RNA, 19 nt, Artificial Sequence
  Description of Artificial Sequence: Synthetic oligonucleotide
guggccucugaaugaucau

SEQ ID NO: 1996760 - RNA, 19 nt, Artificial Sequence
  Description of Artificial Sequence: Synthetic oligonucleotide
ccacacuggccacagagau

SEQ ID NO: 1996761 - RNA, 19 nt, Artificial Sequence
  Description of Artificial Sequence: Synthetic oligonucleotide
ggacagcuagacugccucu

SEQ ID NO: 1996762 - RNA, 19 nt, Artificial Sequence
  Description of Artificial Sequence: Synthetic oligonucleotide
ggccacagagauagggugu

SEQ ID NO: 1996763 - RNA, 19 nt, Artificial Sequence
  Description of Artificial Sequence: Synthetic oligonucleotide
gccucugaaugaucauacu

SEQ ID NO: 1996764 - RNA, 19 nt, Artificial Sequence
  Description of Artificial Sequence: Synthetic oligonucleotide
guaccgcagcggcgcgcgc

SEQ ID NO: 1996765 - RNA, 19 nt, Artificial Sequence
  Description of Artificial Sequence: Synthetic oligonucleotide
ggugagccuuugggagcag

SEQ ID NO: 1996766 - RNA, 19 nt, Artificial Sequence
  Description of Artificial Sequence: Synthetic oligonucleotide
gggaacacgcauagggcuu

SEQ ID NO: 1996767 - RNA, 19 nt, Artificial Sequence
  Description of Artificial Sequence: Synthetic oligonucleotide
gcauaucuuccgugacagu

SEQ ID NO: 1996768 - RNA, 19 nt, Artificial Sequence
  Description of Artificial Sequence: Synthetic oligonucleotide
ccacuccugcucuaugacu

SEQ ID NO: 1996769 - RNA, 19 nt, Artificial Sequence
  Description of Artificial Sequence: Synthetic oligonucleotide
ccggaagaauuuccacuua

SEQ ID NO: 1996770 - RNA, 19 nt, Artificial Sequence
  Description of Artificial Sequence: Synthetic oligonucleotide
gaacucggauguggacaau

SEQ ID NO: 1996771 - RNA, 19 nt, Artificial Sequence
  Description of Artificial Sequence: Synthetic oligonucleotide
ccaugggcuggucuugagu

SEQ ID NO: 1996772 - RNA, 19 nt, Artificial Sequence
  Description of Artificial Sequence: Synthetic oligonucleotide
agguugccuuuggcccuga

SEQ ID NO: 1996773 - RNA, 19 nt, Artificial Sequence
  Description of Artificial Sequence: Synthetic oligonucleotide
gcucccucucugugugaaa

SEQ ID NO: 1996774 - RNA, 19 nt, Artificial Sequence
  Description of Artificial Sequence: Synthetic oligonucleotide
ccugcucuaugacuuuaau

SEQ ID NO: 1996775 - RNA, 19 nt, Artificial Sequence
  Description of Artificial Sequence: Synthetic oligonucleotide
gcggcgcgcgcccgcagac

SEQ ID NO: 1996776 - RNA, 19 nt, Artificial Sequence
  Description of Artificial Sequence: Synthetic oligonucleotide
gguuacagggugagccuuu

SEQ ID NO: 1996777 - RNA, 19 nt, Artificial Sequence
  Description of Artificial Sequence: Synthetic oligonucleotide
cgauccuguggccucugaa

SEQ ID NO: 1996778 - RNA, 19 nt, Artificial Sequence
  Description of Artificial Sequence: Synthetic oligonucleotide
gguugccuuuggcccugaa

SEQ ID NO: 1996779 - RNA, 19 nt, Artificial Sequence
  Description of Artificial Sequence: Synthetic oligonucleotide
cgcugauguguaacuaggu

SEQ ID NO: 1996780 - RNA, 19 nt, Artificial Sequence
  Description of Artificial Sequence: Synthetic oligonucleotide
ggugaacagcaagguuacu

SEQ ID NO: 1996781 - RNA, 19 nt, Artificial Sequence
  Description of Artificial Sequence: Synthetic oligonucleotide
gggcuuccgucaucacauu

SEQ ID NO: 1996782 - RNA, 19 nt, Artificial Sequence
  Description of Artificial Sequence: Synthetic oligonucleotide
cgugacaguccagcagggu

SEQ ID NO: 1996783 - RNA, 19 nt, Artificial Sequence
  Description of Artificial Sequence: Synthetic oligonucleotide
cggcgcgcgcccgcagaca

SEQ ID NO: 1996784 - RNA, 19 nt, Artificial Sequence
  Description of Artificial Sequence: Synthetic oligonucleotide
uccagcacuaccuugaagg

SEQ ID NO: 1996785 - RNA, 19 nt, Artificial Sequence
  Description of Artificial Sequence: Synthetic oligonucleotide
agacaguagaaccacaggg

SEQ ID NO: 1996786 - RNA, 19 nt, Artificial Sequence
  Description of Artificial Sequence: Synthetic oligonucleotide
acaguagaaccacagggcc

SEQ ID NO: 1996787 - RNA, 19 nt, Artificial Sequence
  Description of Artificial Sequence: Synthetic oligonucleotide
cuugcaugaacucugugcc

SEQ ID NO: 1996788 - RNA, 19 nt, Artificial Sequence
  Description of Artificial Sequence: Synthetic oligonucleotide
ucuugcaugaacucugugc

SEQ ID NO: 1996789 - RNA, 19 nt, Artificial Sequence
  Description of Artificial Sequence: Synthetic oligonucleotide
auagcgugggcucuguagc

SEQ ID NO: 1996790 - RNA, 19 nt, Artificial Sequence
  Description of Artificial Sequence: Synthetic oligonucleotide
ugcaaaaguauaccucggg

SEQ ID NO: 1996791 - RNA, 19 nt, Artificial Sequence
  Description of Artificial Sequence: Synthetic oligonucleotide
gaaagcgguaggcagaagc

SEQ ID NO: 1996792 - RNA, 19 nt, Artificial Sequence
  Description of Artificial Sequence: Synthetic oligonucleotide
uucgguauccuccaucagc

SEQ ID NO: 1996793 - RNA, 19 nt, Artificial Sequence
  Description of Artificial Sequence: Synthetic oligonucleotide
ugugguuugcucugaacag

SEQ ID NO: 1996794 - RNA, 19 nt, Artificial Sequence
  Description of Artificial Sequence: Synthetic oligonucleotide
ugagccgagagauggagag

SEQ ID NO: 1996795 - RNA, 19 nt, Artificial Sequence
  Description of Artificial Sequence: Synthetic oligonucleotide
ucgguauccuccaucagcc

SEQ ID NO: 1996796 - RNA, 19 nt, Artificial Sequence
  Description of Artificial Sequence: Synthetic oligonucleotide
ucaccaucgaugcucagca

SEQ ID NO: 1996797 - RNA, 19 nt, Artificial Sequence
  Description of Artificial Sequence: Synthetic oligonucleotide
uauagcgugggcucuguag

SEQ ID NO: 1996798 - RNA, 19 nt, Artificial Sequence
  Description of Artificial Sequence: Synthetic oligonucleotide
cagaccaggggcaugaaag

SEQ ID NO: 1996799 - RNA, 19 nt, Artificial Sequence
  Description of Artificial Sequence: Synthetic oligonucleotide
caacuguccauucuguugc

SEQ ID NO: 1996800 - RNA, 19 nt, Artificial Sequence
  Description of Artificial Sequence: Synthetic oligonucleotide
ucuccuacagccacgccag

SEQ ID NO: 1996801 - RNA, 19 nt, Artificial Sequence
  Description of Artificial Sequence: Synthetic oligonucleotide
ugagcacgugggcagagcg

SEQ ID NO: 1996802 - RNA, 19 nt, Artificial Sequence
  Description of Artificial Sequence: Synthetic oligonucleotide
auacuuuucccuugacuuc

SEQ ID NO: 1996803 - RNA, 19 nt, Artificial Sequence
  Description of Artificial Sequence: Synthetic oligonucleotide
uuuuagcagggcaugcuca

SEQ ID NO: 1996804 - RNA, 19 nt, Artificial Sequence
  Description of Artificial Sequence: Synthetic oligonucleotide
ugcguucucaccaucgaug

SEQ ID NO: 1996805 - RNA, 19 nt, Artificial Sequence
  Description of Artificial Sequence: Synthetic oligonucleotide
caaggaugcggaaggagcg

SEQ ID NO: 1996806 - RNA, 19 nt, Artificial Sequence
  Description of Artificial Sequence: Synthetic oligonucleotide
uucauguaguccucauccg

SEQ ID NO: 1996807 - RNA, 19 nt, Artificial Sequence
  Description of Artificial Sequence: Synthetic oligonucleotide
agaccaggggcaugaaagc

SEQ ID NO: 1996808 - RNA, 19 nt, Artificial Sequence
  Description of Artificial Sequence: Synthetic oligonucleotide
cacauugaaguccuugccc

SEQ ID NO: 1996809 - RNA, 19 nt, Artificial Sequence
  Description of Artificial Sequence: Synthetic oligonucleotide
agaaccacagggccaagag

SEQ ID NO: 1996810 - RNA, 19 nt, Artificial Sequence
  Description of Artificial Sequence: Synthetic oligonucleotide
agagaaaggaaagcagagg

SEQ ID NO: 1996811 - RNA, 19 nt, Artificial Sequence
  Description of Artificial Sequence: Synthetic oligonucleotide
uguccauucuguugcgggg

SEQ ID NO: 1996812 - RNA, 19 nt, Artificial Sequence
  Description of Artificial Sequence: Synthetic oligonucleotide
ugguuugcucugaacaggc

SEQ ID NO: 1996813 - RNA, 19 nt, Artificial Sequence
  Description of Artificial Sequence: Synthetic oligonucleotide
uuggugcaaaaguauaccu

SEQ ID NO: 1996814 - RNA, 19 nt, Artificial Sequence
  Description of Artificial Sequence: Synthetic oligonucleotide
cuuguucugggccucaaug

SEQ ID NO: 1996815 - RNA, 19 nt, Artificial Sequence
  Description of Artificial Sequence: Synthetic oligonucleotide
aaugggugcccugggaggg

SEQ ID NO: 1996816 - RNA, 19 nt, Artificial Sequence
  Description of Artificial Sequence: Synthetic oligonucleotide
cuuggugcaaaaguauacc

SEQ ID NO: 1996817 - RNA, 19 nt, Artificial Sequence
  Description of Artificial Sequence: Synthetic oligonucleotide
agcgggacuggccuguccc

SEQ ID NO: 1996818 - RNA, 19 nt, Artificial Sequence
  Description of Artificial Sequence: Synthetic oligonucleotide
ugucagacgaagccaggcc

SEQ ID NO: 1996819 - RNA, 19 nt, Artificial Sequence
  Description of Artificial Sequence: Synthetic oligonucleotide
acauacuuuucccuugacu

SEQ ID NO: 1996820 - RNA, 19 nt, Artificial Sequence
  Description of Artificial Sequence: Synthetic oligonucleotide
acaggcgcggaucuuguuc

SEQ ID NO: 1996821 - RNA, 19 nt, Artificial Sequence
  Description of Artificial Sequence: Synthetic oligonucleotide
uggugcaaaaguauaccuc

SEQ ID NO: 1996822 - RNA, 19 nt, Artificial Sequence
  Description of Artificial Sequence: Synthetic oligonucleotide
ugaggcgcuccccacaggc

SEQ ID NO: 1996823 - RNA, 19 nt, Artificial Sequence
  Description of Artificial Sequence: Synthetic oligonucleotide
ggagguucagaccaggggc

SEQ ID NO: 1996824 - RNA, 19 nt, Artificial Sequence
  Description of Artificial Sequence: Synthetic oligonucleotide
cuguccauucuguugcggg

SEQ ID NO: 1996825 - RNA, 19 nt, Artificial Sequence
  Description of Artificial Sequence: Synthetic oligonucleotide
gggaggguaacagagaaag

SEQ ID NO: 1996826 - RNA, 19 nt, Artificial Sequence
  Description of Artificial Sequence: Synthetic oligonucleotide
ucaaugugugugaggcucc

SEQ ID NO: 1996827 - RNA, 19 nt, Artificial Sequence
  Description of Artificial Sequence: Synthetic oligonucleotide
agccgagagauggagaggg

SEQ ID NO: 1996828 - RNA, 19 nt, Artificial Sequence
  Description of Artificial Sequence: Synthetic oligonucleotide
uuguucugggccucaaugu

SEQ ID NO: 1996829 - RNA, 19 nt, Artificial Sequence
  Description of Artificial Sequence: Synthetic oligonucleotide
uugacuucuucauguaguc

SEQ ID NO: 1996830 - RNA, 19 nt, Artificial Sequence
  Description of Artificial Sequence: Synthetic oligonucleotide
uguugagggaggcgcuugg

SEQ ID NO: 1996831 - RNA, 19 nt, Artificial Sequence
  Description of Artificial Sequence: Synthetic oligonucleotide
acuaccuugaaggaaucca

SEQ ID NO: 1996832 - RNA, 19 nt, Artificial Sequence
  Description of Artificial Sequence: Synthetic oligonucleotide
uguagcuccaggacauacu

SEQ ID NO: 1996833 - RNA, 19 nt, Artificial Sequence
  Description of Artificial Sequence: Synthetic oligonucleotide
aaagcgguaggcagaagcu

SEQ ID NO: 1996834 - RNA, 19 nt, Artificial Sequence
  Description of Artificial Sequence: Synthetic oligonucleotide
gucagacgaagccaggccc

SEQ ID NO: 1996835 - RNA, 19 nt, Artificial Sequence
  Description of Artificial Sequence: Synthetic oligonucleotide
cugggcucugcuaagcccc

SEQ ID NO: 1996836 - RNA, 19 nt, Artificial Sequence
  Description of Artificial Sequence: Synthetic oligonucleotide
uccgggucuugcaugaacu

SEQ ID NO: 1996837 - RNA, 19 nt, Artificial Sequence
  Description of Artificial Sequence: Synthetic oligonucleotide
aggacauacuuuucccuug

SEQ ID NO: 1996838 - RNA, 19 nt, Artificial Sequence
  Description of Artificial Sequence: Synthetic oligonucleotide
uguugcggggugcugucag

SEQ ID NO: 1996839 - RNA, 19 nt, Artificial Sequence
  Description of Artificial Sequence: Synthetic oligonucleotide
cucaaugugugugaggcuc

SEQ ID NO: 1996840 - RNA, 19 nt, Artificial Sequence
  Description of Artificial Sequence: Synthetic oligonucleotide
cugugguuugcucugaaca

SEQ ID NO: 1996841 - RNA, 19 nt, Artificial Sequence
  Description of Artificial Sequence: Synthetic oligonucleotide
caguaggagguucagacca

SEQ ID NO: 1996842 - RNA, 19 nt, Artificial Sequence
  Description of Artificial Sequence: Synthetic oligonucleotide
aggcgcuccccacaggcgc

SEQ ID NO: 1996843 - RNA, 19 nt, Artificial Sequence
  Description of Artificial Sequence: Synthetic oligonucleotide
cagugucagacgaagccag

SEQ ID NO: 1996844 - RNA, 19 nt, Artificial Sequence
  Description of Artificial Sequence: Synthetic oligonucleotide
cauacuuuucccuugacuu

SEQ ID NO: 1996845 - RNA, 19 nt, Artificial Sequence
  Description of Artificial Sequence: Synthetic oligonucleotide
aacaacuguccauucuguu

SEQ ID NO: 1996846 - RNA, 19 nt, Artificial Sequence
  Description of Artificial Sequence: Synthetic oligonucleotide
ugacugcacguugagcacg

SEQ ID NO: 1996847 - RNA, 19 nt, Artificial Sequence
  Description of Artificial Sequence: Synthetic oligonucleotide
ugugugugaggcucccugc

SEQ ID NO: 1996848 - RNA, 19 nt, Artificial Sequence
  Description of Artificial Sequence: Synthetic oligonucleotide
aaggaugcggaaggagcgg

SEQ ID NO: 1996849 - RNA, 19 nt, Artificial Sequence
  Description of Artificial Sequence: Synthetic oligonucleotide
uuuagcagggcaugcucaa

SEQ ID NO: 1996850 - RNA, 19 nt, Artificial Sequence
  Description of Artificial Sequence: Synthetic oligonucleotide
acguugagcacgugggcag

SEQ ID NO: 1996851 - RNA, 19 nt, Artificial Sequence
  Description of Artificial Sequence: Synthetic oligonucleotide
ucauccgggucuugcauga

SEQ ID NO: 1996852 - RNA, 19 nt, Artificial Sequence
  Description of Artificial Sequence: Synthetic oligonucleotide
cucugugcccgugaggugg

SEQ ID NO: 1996853 - RNA, 19 nt, Artificial Sequence
  Description of Artificial Sequence: Synthetic oligonucleotide
ugucugaacaacuguccau

SEQ ID NO: 1996854 - RNA, 19 nt, Artificial Sequence
  Description of Artificial Sequence: Synthetic oligonucleotide
uggagaggggcacauugaa

SEQ ID NO: 1996855 - RNA, 19 nt, Artificial Sequence
  Description of Artificial Sequence: Synthetic oligonucleotide
auccgggucuugcaugaac

SEQ ID NO: 1996856 - RNA, 19 nt, Artificial Sequence
  Description of Artificial Sequence: Synthetic oligonucleotide
gugguuugcucugaacagg

SEQ ID NO: 1996857 - RNA, 19 nt, Artificial Sequence
  Description of Artificial Sequence: Synthetic oligonucleotide
agcgguaggcagaagcugg

SEQ ID NO: 1996858 - RNA, 19 nt, Artificial Sequence
  Description of Artificial Sequence: Synthetic oligonucleotide
gaacucugugcccgugagg

SEQ ID NO: 1996859 - RNA, 19 nt, Artificial Sequence
  Description of Artificial Sequence: Synthetic oligonucleotide
uaagccccaggcugaggcg

SEQ ID NO: 1996860 - RNA, 19 nt, Artificial Sequence
  Description of Artificial Sequence: Synthetic oligonucleotide
gccaguaggagguucagac

SEQ ID NO: 1996861 - RNA, 19 nt, Artificial Sequence
  Description of Artificial Sequence: Synthetic oligonucleotide
caugaaagcgguaggcaga

SEQ ID NO: 1996862 - RNA, 19 nt, Artificial Sequence
  Description of Artificial Sequence: Synthetic oligonucleotide
agggccaggcuaugacugc

SEQ ID NO: 1996863 - RNA, 19 nt, Artificial Sequence
  Description of Artificial Sequence: Synthetic oligonucleotide
cuggaggcaccaaugggug

SEQ ID NO: 1996864 - RNA, 19 nt, Artificial Sequence
  Description of Artificial Sequence: Synthetic oligonucleotide
gugugugaggcucccugcg

SEQ ID NO: 1996865 - RNA, 19 nt, Artificial Sequence
  Description of Artificial Sequence: Synthetic oligonucleotide
gguauccuccaucagccgc

SEQ ID NO: 1996866 - RNA, 19 nt, Artificial Sequence
  Description of Artificial Sequence: Synthetic oligonucleotide
ucugugcccgugagguggg

SEQ ID NO: 1996867 - RNA, 19 nt, Artificial Sequence
  Description of Artificial Sequence: Synthetic oligonucleotide
aggcgcuuggugcaaaagu

SEQ ID NO: 1996868 - RNA, 19 nt, Artificial Sequence
  Description of Artificial Sequence: Synthetic oligonucleotide
cucugaacaggcugggcuc

SEQ ID NO: 1996869 - RNA, 19 nt, Artificial Sequence
  Description of Artificial Sequence: Synthetic oligonucleotide
aagcgguaggcagaagcug

SEQ ID NO: 1996870 - RNA, 19 nt, Artificial Sequence
  Description of Artificial Sequence: Synthetic oligonucleotide
ugugugaggcucccugcgu

SEQ ID NO: 1996871 - RNA, 19 nt, Artificial Sequence
  Description of Artificial Sequence: Synthetic oligonucleotide
gccucaaugugugugaggc

SEQ ID NO: 1996872 - RNA, 19 nt, Artificial Sequence
  Description of Artificial Sequence: Synthetic oligonucleotide
ucggggaccagcugucuga

SEQ ID NO: 1996873 - RNA, 19 nt, Artificial Sequence
  Description of Artificial Sequence: Synthetic oligonucleotide
agccacgccagccugugca

SEQ ID NO: 1996874 - RNA, 19 nt, Artificial Sequence
  Description of Artificial Sequence: Synthetic oligonucleotide
gaggcguguauagcguggg

SEQ ID NO: 1996875 - RNA, 19 nt, Artificial Sequence
  Description of Artificial Sequence: Synthetic oligonucleotide
gugcaaaaguauaccucgg

SEQ ID NO: 1996876 - RNA, 19 nt, Artificial Sequence
  Description of Artificial Sequence: Synthetic oligonucleotide
cucauccgggucuugcaug

SEQ ID NO: 1996877 - RNA, 19 nt, Artificial Sequence
  Description of Artificial Sequence: Synthetic oligonucleotide
ucagaccaggggcaugaaa

SEQ ID NO: 1996878 - RNA, 19 nt, Artificial Sequence
  Description of Artificial Sequence: Synthetic oligonucleotide
aggcguguauagcgugggc

SEQ ID NO: 1996879 - RNA, 19 nt, Artificial Sequence
  Description of Artificial Sequence: Synthetic oligonucleotide
guaggagguucagaccagg

SEQ ID NO: 1996880 - RNA, 19 nt, Artificial Sequence
  Description of Artificial Sequence: Synthetic oligonucleotide
gguggugccagucccggag

SEQ ID NO: 1996881 - RNA, 19 nt, Artificial Sequence
  Description of Artificial Sequence: Synthetic oligonucleotide
uccuacagccacgccagcc

SEQ ID NO: 1996882 - RNA, 19 nt, Artificial Sequence
  Description of Artificial Sequence: Synthetic oligonucleotide
aggcuaugacugcacguug

SEQ ID NO: 1996883 - RNA, 19 nt, Artificial Sequence
  Description of Artificial Sequence: Synthetic oligonucleotide
cuaugacugcacguugagc

SEQ ID NO: 1996884 - RNA, 19 nt, Artificial Sequence
  Description of Artificial Sequence: Synthetic oligonucleotide
aggaugcggaaggagcggg

SEQ ID NO: 1996885 - RNA, 19 nt, Artificial Sequence
  Description of Artificial Sequence: Synthetic oligonucleotide
gcaaggaugcggaaggagc

SEQ ID NO: 1996886 - RNA, 19 nt, Artificial Sequence
  Description of Artificial Sequence: Synthetic oligonucleotide
gacauacuuuucccuugac

SEQ ID NO: 1996887 - RNA, 19 nt, Artificial Sequence
  Description of Artificial Sequence: Synthetic oligonucleotide
agucuccuacagccacgcc

SEQ ID NO: 1996888 - RNA, 19 nt, Artificial Sequence
  Description of Artificial Sequence: Synthetic oligonucleotide
uugccuccaggggugagcc

SEQ ID NO: 1996889 - RNA, 19 nt, Artificial Sequence
  Description of Artificial Sequence: Synthetic oligonucleotide
aaagggccgggccgucuug

SEQ ID NO: 1996890 - RNA, 19 nt, Artificial Sequence
  Description of Artificial Sequence: Synthetic oligonucleotide
agggccuucugugguuugc

SEQ ID NO: 1996891 - RNA, 19 nt, Artificial Sequence
  Description of Artificial Sequence: Synthetic oligonucleotide
gggugcugucaguaggugg

SEQ ID NO: 1996892 - RNA, 19 nt, Artificial Sequence
  Description of Artificial Sequence: Synthetic oligonucleotide
gaugcggaaggagcgggac

SEQ ID NO: 1996893 - RNA, 19 nt, Artificial Sequence
  Description of Artificial Sequence: Synthetic oligonucleotide
gcuaugacugcacguugag

SEQ ID NO: 1996894 - RNA, 19 nt, Artificial Sequence
  Description of Artificial Sequence: Synthetic oligonucleotide
gugucagacgaagccaggc

SEQ ID NO: 1996895 - RNA, 19 nt, Artificial Sequence
  Description of Artificial Sequence: Synthetic oligonucleotide
ucuuguucugggccucaau

SEQ ID NO: 1996896 - RNA, 19 nt, Artificial Sequence
  Description of Artificial Sequence: Synthetic oligonucleotide
ugcggggugcugucaguag

SEQ ID NO: 1996897 - RNA, 19 nt, Artificial Sequence
  Description of Artificial Sequence: Synthetic oligonucleotide
uuguugagggaggcgcuug

SEQ ID NO: 1996898 - RNA, 19 nt, Artificial Sequence
  Description of Artificial Sequence: Synthetic oligonucleotide
ggaaggcagugucagacga

SEQ ID NO: 1996899 - RNA, 19 nt, Artificial Sequence
  Description of Artificial Sequence: Synthetic oligonucleotide
augcucaaggcagugcaga

SEQ ID NO: 1996900 - RNA, 19 nt, Artificial Sequence
  Description of Artificial Sequence: Synthetic oligonucleotide
cccggaggcguguauagcg

SEQ ID NO: 1996901 - RNA, 19 nt, Artificial Sequence
  Description of Artificial Sequence: Synthetic oligonucleotide
ggcgggaggggucagggcc

SEQ ID NO: 1996902 - RNA, 19 nt, Artificial Sequence
  Description of Artificial Sequence: Synthetic oligonucleotide
gagguucagaccaggggca

SEQ ID NO: 1996903 - RNA, 19 nt, Artificial Sequence
  Description of Artificial Sequence: Synthetic oligonucleotide
gagggaggcgcuuggugca

SEQ ID NO: 1996904 - RNA, 19 nt, Artificial Sequence
  Description of Artificial Sequence: Synthetic oligonucleotide
ugggugcccggcugggccg

SEQ ID NO: 1996905 - RNA, 19 nt, Artificial Sequence
  Description of Artificial Sequence: Synthetic oligonucleotide
aucggggaccagcugucug

SEQ ID NO: 1996906 - RNA, 19 nt, Artificial Sequence
  Description of Artificial Sequence: Synthetic oligonucleotide
aguaggagguucagaccag

SEQ ID NO: 1996907 - RNA, 19 nt, Artificial Sequence
  Description of Artificial Sequence: Synthetic oligonucleotide
agugucagacgaagccagg

SEQ ID NO: 1996908 - RNA, 19 nt, Artificial Sequence
  Description of Artificial Sequence: Synthetic oligonucleotide
guucagaccaggggcauga

SEQ ID NO: 1996909 - RNA, 19 nt, Artificial Sequence
  Description of Artificial Sequence: Synthetic oligonucleotide
augaaagcgguaggcagaa

SEQ ID NO: 1996910 - RNA, 19 nt, Artificial Sequence
  Description of Artificial Sequence: Synthetic oligonucleotide
caguagaaccacagggcca

SEQ ID NO: 1996911 - RNA, 19 nt, Artificial Sequence
  Description of Artificial Sequence: Synthetic oligonucleotide
cuguagcuccaggacauac

SEQ ID NO: 1996912 - RNA, 19 nt, Artificial Sequence
  Description of Artificial Sequence: Synthetic oligonucleotide
uagcgugggcucuguagcu

SEQ ID NO: 1996913 - RNA, 19 nt, Artificial Sequence
  Description of Artificial Sequence: Synthetic oligonucleotide
gcaugcucaaggcagugca

SEQ ID NO: 1996914 - RNA, 19 nt, Artificial Sequence
  Description of Artificial Sequence: Synthetic oligonucleotide
gagccgagagauggagagg

SEQ ID NO: 1996915 - RNA, 19 nt, Artificial Sequence
  Description of Artificial Sequence: Synthetic oligonucleotide
guggugccagucccggagg

SEQ ID NO: 1996916 - RNA, 19 nt, Artificial Sequence
  Description of Artificial Sequence: Synthetic oligonucleotide
cacuaccuugaaggaaucc

SEQ ID NO: 1996917 - RNA, 19 nt, Artificial Sequence
  Description of Artificial Sequence: Synthetic oligonucleotide
gucuucgguauccuccauc

SEQ ID NO: 1996918 - RNA, 19 nt, Artificial Sequence
  Description of Artificial Sequence: Synthetic oligonucleotide
uccccacaggcgcggaucu

SEQ ID NO: 1996919 - RNA, 19 nt, Artificial Sequence
  Description of Artificial Sequence: Synthetic oligonucleotide
ggaggcaccaaugggugcc

SEQ ID NO: 1996920 - RNA, 19 nt, Artificial Sequence
  Description of Artificial Sequence: Synthetic oligonucleotide
uguauagcgugggcucugu

SEQ ID NO: 1996921 - RNA, 19 nt, Artificial Sequence
  Description of Artificial Sequence: Synthetic oligonucleotide
agcgcugguggugccaguc

SEQ ID NO: 1996922 - RNA, 19 nt, Artificial Sequence
  Description of Artificial Sequence: Synthetic oligonucleotide
cagucuccuacagccacgc

SEQ ID NO: 1996923 - RNA, 19 nt, Artificial Sequence
  Description of Artificial Sequence: Synthetic oligonucleotide
ggcucuguagcuccaggac

SEQ ID NO: 1996924 - RNA, 19 nt, Artificial Sequence
  Description of Artificial Sequence: Synthetic oligonucleotide
gggucuugcaugaacucug

SEQ ID NO: 1996925 - RNA, 19 nt, Artificial Sequence
  Description of Artificial Sequence: Synthetic oligonucleotide
cuucgguauccuccaucag

SEQ ID NO: 1996926 - RNA, 19 nt, Artificial Sequence
  Description of Artificial Sequence: Synthetic oligonucleotide
ugaacaggcugggcucugc

SEQ ID NO: 1996927 - RNA, 19 nt, Artificial Sequence
  Description of Artificial Sequence: Synthetic oligonucleotide
cacgugggcagagcgcugg

SEQ ID NO: 1996928 - RNA, 19 nt, Artificial Sequence
  Description of Artificial Sequence: Synthetic oligonucleotide
gccggaagccccaaggugc

SEQ ID NO: 1996929 - RNA, 19 nt, Artificial Sequence
  Description of Artificial Sequence: Synthetic oligonucleotide
ccaguaggagguucagacc

SEQ ID NO: 1996930 - RNA, 19 nt, Artificial Sequence
  Description of Artificial Sequence: Synthetic oligonucleotide
gaggcgcuuggugcaaaag

SEQ ID NO: 1996931 - RNA, 19 nt, Artificial Sequence
  Description of Artificial Sequence: Synthetic oligonucleotide
agcgugggcucuguagcuc

SEQ ID NO: 1996932 - RNA, 19 nt, Artificial Sequence
  Description of Artificial Sequence: Synthetic oligonucleotide
aggggcacauugaaguccu

SEQ ID NO: 1996933 - RNA, 19 nt, Artificial Sequence
  Description of Artificial Sequence: Synthetic oligonucleotide
uugagcacgugggcagagc

SEQ ID NO: 1996934 - RNA, 19 nt, Artificial Sequence
  Description of Artificial Sequence: Synthetic oligonucleotide
augcggaaggagcgggacu

SEQ ID NO: 1996935 - RNA, 19 nt, Artificial Sequence
  Description of Artificial Sequence: Synthetic oligonucleotide
gaaggaauccauggugccu

SEQ ID NO: 1996936 - RNA, 19 nt, Artificial Sequence
  Description of Artificial Sequence: Synthetic oligonucleotide
gcucuguagcuccaggaca

SEQ ID NO: 1996937 - RNA, 19 nt, Artificial Sequence
  Description of Artificial Sequence: Synthetic oligonucleotide
ugcuaagccccaggcugag

SEQ ID NO: 1996938 - RNA, 19 nt, Artificial Sequence
  Description of Artificial Sequence: Synthetic oligonucleotide
ggaggcguguauagcgugg

SEQ ID NO: 1996939 - RNA, 19 nt, Artificial Sequence
  Description of Artificial Sequence: Synthetic oligonucleotide
gcaccaaugggugcccugg

SEQ ID NO: 1996940 - RNA, 19 nt, Artificial Sequence
  Description of Artificial Sequence: Synthetic oligonucleotide
ggacauacuuuucccuuga

SEQ ID NO: 1996941 - RNA, 19 nt, Artificial Sequence
  Description of Artificial Sequence: Synthetic oligonucleotide
gcucugcuaagccccaggc

SEQ ID NO: 1996942 - RNA, 19 nt, Artificial Sequence
  Description of Artificial Sequence: Synthetic oligonucleotide
gcggggugcugucaguagg

SEQ ID NO: 1996943 - RNA, 19 nt, Artificial Sequence
  Description of Artificial Sequence: Synthetic oligonucleotide
guagcuccaggacauacuu

SEQ ID NO: 1996944 - RNA, 19 nt, Artificial Sequence
  Description of Artificial Sequence: Synthetic oligonucleotide
cuugcagccggaagcccca

SEQ ID NO: 1996945 - RNA, 19 nt, Artificial Sequence
  Description of Artificial Sequence: Synthetic oligonucleotide
cuaccuugaaggaauccau

SEQ ID NO: 1996946 - RNA, 19 nt, Artificial Sequence
  Description of Artificial Sequence: Synthetic oligonucleotide
ugggcucugcuaagcccca

SEQ ID NO: 1996947 - RNA, 19 nt, Artificial Sequence
  Description of Artificial Sequence: Synthetic oligonucleotide
ggcaaggaugcggaaggag

SEQ ID NO: 1996948 - RNA, 19 nt, Artificial Sequence
  Description of Artificial Sequence: Synthetic oligonucleotide
gaugcucagcacccagucu

SEQ ID NO: 1996949 - RNA, 19 nt, Artificial Sequence
  Description of Artificial Sequence: Synthetic oligonucleotide
gcucccugcguucucacca

SEQ ID NO: 1996950 - RNA, 19 nt, Artificial Sequence
  Description of Artificial Sequence: Synthetic oligonucleotide
gcugaggcgcuccccacag

SEQ ID NO: 1996951 - RNA, 19 nt, Artificial Sequence
  Description of Artificial Sequence: Synthetic oligonucleotide
cccugcguucucaccaucg

SEQ ID NO: 1996952 - RNA, 19 nt, Artificial Sequence
  Description of Artificial Sequence: Synthetic oligonucleotide
gcgcggaucuuguucuggg

SEQ ID NO: 1996953 - RNA, 19 nt, Artificial Sequence
  Description of Artificial Sequence: Synthetic oligonucleotide
ugugcccgugaggugggca

SEQ ID NO: 1996954 - RNA, 19 nt, Artificial Sequence
  Description of Artificial Sequence: Synthetic oligonucleotide
gcguguauagcgugggcuc

SEQ ID NO: 1996955 - RNA, 19 nt, Artificial Sequence
  Description of Artificial Sequence: Synthetic oligonucleotide
cugcuaagccccaggcuga

SEQ ID NO: 1996956 - RNA, 19 nt, Artificial Sequence
  Description of Artificial Sequence: Synthetic oligonucleotide
gagccuugcugggauccgc

SEQ ID NO: 1996957 - RNA, 19 nt, Artificial Sequence
  Description of Artificial Sequence: Synthetic oligonucleotide
cucuguagcuccaggacau

SEQ ID NO: 1996958 - RNA, 19 nt, Artificial Sequence
  Description of Artificial Sequence: Synthetic oligonucleotide
guguauagcgugggcucug

SEQ ID NO: 1996959 - RNA, 19 nt, Artificial Sequence
  Description of Artificial Sequence: Synthetic oligonucleotide
gggcacauugaaguccuug

SEQ ID NO: 1996960 - RNA, 19 nt, Artificial Sequence
  Description of Artificial Sequence: Synthetic oligonucleotide
gcuggcaucggggaccagc

SEQ ID NO: 1996961 - RNA, 19 nt, Artificial Sequence
  Description of Artificial Sequence: Synthetic oligonucleotide
uugcuggcaucggggacca

SEQ ID NO: 1996962 - RNA, 19 nt, Artificial Sequence
  Description of Artificial Sequence: Synthetic oligonucleotide
cagugcagaccuggcagac

SEQ ID NO: 1996963 - RNA, 19 nt, Artificial Sequence
  Description of Artificial Sequence: Synthetic oligonucleotide
ucccggaggcguguauagc

SEQ ID NO: 1996964 - RNA, 19 nt, Artificial Sequence
  Description of Artificial Sequence: Synthetic oligonucleotide
gcagugucagacgaagcca

SEQ ID NO: 1996965 - RNA, 19 nt, Artificial Sequence
  Description of Artificial Sequence: Synthetic oligonucleotide
aagggccgggccgucuugu

SEQ ID NO: 1996966 - RNA, 19 nt, Artificial Sequence
  Description of Artificial Sequence: Synthetic oligonucleotide
gucugaacaacuguccauu

SEQ ID NO: 1996967 - RNA, 19 nt, Artificial Sequence
  Description of Artificial Sequence: Synthetic oligonucleotide
ugcccgugaggugggcaag

SEQ ID NO: 1996968 - RNA, 19 nt, Artificial Sequence
  Description of Artificial Sequence: Synthetic oligonucleotide
ucagggccuucugugguuu

SEQ ID NO: 1996969 - RNA, 19 nt, Artificial Sequence
  Description of Artificial Sequence: Synthetic oligonucleotide
gagcgggacuggccugucc

SEQ ID NO: 1996970 - RNA, 19 nt, Artificial Sequence
  Description of Artificial Sequence: Synthetic oligonucleotide
gggagccuugcugggaucc

SEQ ID NO: 1996971 - RNA, 19 nt, Artificial Sequence
  Description of Artificial Sequence: Synthetic oligonucleotide
uugcggggugcugucagua

SEQ ID NO: 1996972 - RNA, 19 nt, Artificial Sequence
  Description of Artificial Sequence: Synthetic oligonucleotide
ggcagagcgcugguggugc

SEQ ID NO: 1996973 - RNA, 19 nt, Artificial Sequence
  Description of Artificial Sequence: Synthetic oligonucleotide
caggacauacuuuucccuu

SEQ ID NO: 1996974 - RNA, 19 nt, Artificial Sequence
  Description of Artificial Sequence: Synthetic oligonucleotide
gccaagagggaaggcagug

SEQ ID NO: 1996975 - RNA, 19 nt, Artificial Sequence
  Description of Artificial Sequence: Synthetic oligonucleotide
caucagccgcugcuugcug

SEQ ID NO: 1996976 - RNA, 19 nt, Artificial Sequence
  Description of Artificial Sequence: Synthetic oligonucleotide
caccaucgaugcucagcac

SEQ ID NO: 1996977 - RNA, 19 nt, Artificial Sequence
  Description of Artificial Sequence: Synthetic oligonucleotide
aggccaguaggagguucag

SEQ ID NO: 1996978 - RNA, 19 nt, Artificial Sequence
  Description of Artificial Sequence: Synthetic oligonucleotide
cugaggcgcuccccacagg

SEQ ID NO: 1996979 - RNA, 19 nt, Artificial Sequence
  Description of Artificial Sequence: Synthetic oligonucleotide
cagcuuugccuccaggggu

SEQ ID NO: 1996980 - RNA, 19 nt, Artificial Sequence
  Description of Artificial Sequence: Synthetic oligonucleotide
agcaggcuggaaagggcca

SEQ ID NO: 1996981 - RNA, 19 nt, Artificial Sequence
  Description of Artificial Sequence: Synthetic oligonucleotide
ugguggugccagucccgga

SEQ ID NO: 1996982 - RNA, 19 nt, Artificial Sequence
  Description of Artificial Sequence: Synthetic oligonucleotide
ggcgcggaucuuguucugg

SEQ ID NO: 1996983 - RNA, 19 nt, Artificial Sequence
  Description of Artificial Sequence: Synthetic oligonucleotide
uggccugucccuggccgug

SEQ ID NO: 1996984 - RNA, 19 nt, Artificial Sequence
  Description of Artificial Sequence: Synthetic oligonucleotide
ggcuaugacugcacguuga

SEQ ID NO: 1996985 - RNA, 19 nt, Artificial Sequence
  Description of Artificial Sequence: Synthetic oligonucleotide
aggagcgggacuggccugu

SEQ ID NO: 1996986 - RNA, 19 nt, Artificial Sequence
  Description of Artificial Sequence: Synthetic oligonucleotide
ucccugcguucucaccauc

SEQ ID NO: 1996987 - RNA, 19 nt, Artificial Sequence
  Description of Artificial Sequence: Synthetic oligonucleotide
caggcgcggaucuuguucu

SEQ ID NO: 1996988 - RNA, 19 nt, Artificial Sequence
  Description of Artificial Sequence: Synthetic oligonucleotide
guucugggccucaaugugu

SEQ ID NO: 1996989 - RNA, 19 nt, Artificial Sequence
  Description of Artificial Sequence: Synthetic oligonucleotide
ggugccagucccggaggcg

SEQ ID NO: 1996990 - RNA, 19 nt, Artificial Sequence
  Description of Artificial Sequence: Synthetic oligonucleotide
ggcgcuuggugcaaaagua

SEQ ID NO: 1996991 - RNA, 19 nt, Artificial Sequence
  Description of Artificial Sequence: Synthetic oligonucleotide
gccgucuuguugagggagg

SEQ ID NO: 1996992 - RNA, 19 nt, Artificial Sequence
  Description of Artificial Sequence: Synthetic oligonucleotide
ucuguagcuccaggacaua

SEQ ID NO: 1996993 - RNA, 19 nt, Artificial Sequence
  Description of Artificial Sequence: Synthetic oligonucleotide
ggcaugcucaaggcagugc

SEQ ID NO: 1996994 - RNA, 19 nt, Artificial Sequence
  Description of Artificial Sequence: Synthetic oligonucleotide
gcuggaggcaccaaugggu

SEQ ID NO: 1996995 - RNA, 19 nt, Artificial Sequence
  Description of Artificial Sequence: Synthetic oligonucleotide
cuccccacaggcgcggauc

SEQ ID NO: 1996996 - RNA, 19 nt, Artificial Sequence
  Description of Artificial Sequence: Synthetic oligonucleotide
ggccgggccgucuuguuga

SEQ ID NO: 1996997 - RNA, 19 nt, Artificial Sequence
  Description of Artificial Sequence: Synthetic oligonucleotide
cuuugccuccaggggugag

SEQ ID NO: 1996998 - RNA, 19 nt, Artificial Sequence
  Description of Artificial Sequence: Synthetic oligonucleotide
gugcccgugaggugggcaa

SEQ ID NO: 1996999 - RNA, 19 nt, Artificial Sequence
  Description of Artificial Sequence: Synthetic oligonucleotide
aggcgcggaucuuguucug

SEQ ID NO: 1997000 - RNA, 19 nt, Artificial Sequence
  Description of Artificial Sequence: Synthetic oligonucleotide
agucccggaggcguguaua

SEQ ID NO: 1997001 - RNA, 19 nt, Artificial Sequence
  Description of Artificial Sequence: Synthetic oligonucleotide
aucggcgggaggggucagg

SEQ ID NO: 1997002 - RNA, 19 nt, Artificial Sequence
  Description of Artificial Sequence: Synthetic oligonucleotide
gcuugcuggcaucggggac

SEQ ID NO: 1997003 - RNA, 19 nt, Artificial Sequence
  Description of Artificial Sequence: Synthetic oligonucleotide
ggagccuugcugggauccg

SEQ ID NO: 1997004 - RNA, 19 nt, Artificial Sequence
  Description of Artificial Sequence: Synthetic oligonucleotide
agguucagaccaggggcau

SEQ ID NO: 1997005 - RNA, 19 nt, Artificial Sequence
  Description of Artificial Sequence: Synthetic oligonucleotide
cuccuacagccacgccagc

SEQ ID NO: 1997006 - RNA, 19 nt, Artificial Sequence
  Description of Artificial Sequence: Synthetic oligonucleotide
uucagaccaggggcaugaa

SEQ ID NO: 1997007 - RNA, 19 nt, Artificial Sequence
  Description of Artificial Sequence: Synthetic oligonucleotide
cagcugucugaacaacugu

SEQ ID NO: 1997008 - RNA, 19 nt, Artificial Sequence
  Description of Artificial Sequence: Synthetic oligonucleotide
caggggugagccgagagau

SEQ ID NO: 1997009 - RNA, 19 nt, Artificial Sequence
  Description of Artificial Sequence: Synthetic oligonucleotide
gacugcacguugagcacgu

SEQ ID NO: 1997010 - RNA, 19 nt, Artificial Sequence
  Description of Artificial Sequence: Synthetic oligonucleotide
aggcgggcugccaggacca

SEQ ID NO: 1997011 - RNA, 19 nt, Artificial Sequence
  Description of Artificial Sequence: Synthetic oligonucleotide
gguucagaccaggggcaug

SEQ ID NO: 1997012 - RNA, 19 nt, Artificial Sequence
  Description of Artificial Sequence: Synthetic oligonucleotide
cucagcacccagucuccua

SEQ ID NO: 1997013 - RNA, 19 nt, Artificial Sequence
  Description of Artificial Sequence: Synthetic oligonucleotide
acgugggcagagcgcuggu

SEQ ID NO: 1997014 - RNA, 19 nt, Artificial Sequence
  Description of Artificial Sequence: Synthetic oligonucleotide
caggcuaugacugcacguu

SEQ ID NO: 1997015 - RNA, 19 nt, Artificial Sequence
  Description of Artificial Sequence: Synthetic oligonucleotide
ggcguguauagcgugggcu

SEQ ID NO: 1997016 - RNA, 19 nt, Artificial Sequence
  Description of Artificial Sequence: Synthetic oligonucleotide
cauucuguugcggggugcu

SEQ ID NO: 1997017 - RNA, 19 nt, Artificial Sequence
  Description of Artificial Sequence: Synthetic oligonucleotide
aucuuguucugggccucaa

SEQ ID NO: 1997018 - RNA, 19 nt, Artificial Sequence
  Description of Artificial Sequence: Synthetic oligonucleotide
ccgucuuguugagggaggc

SEQ ID NO: 1997019 - RNA, 19 nt, Artificial Sequence
  Description of Artificial Sequence: Synthetic oligonucleotide
ccgggucuugcaugaacuc

SEQ ID NO: 1997020 - RNA, 19 nt, Artificial Sequence
  Description of Artificial Sequence: Synthetic oligonucleotide
guauagcgugggcucugua

SEQ ID NO: 1997021 - RNA, 19 nt, Artificial Sequence
  Description of Artificial Sequence: Synthetic oligonucleotide
ggucagggccuucuguggu

SEQ ID NO: 1997022 - RNA, 19 nt, Artificial Sequence
  Description of Artificial Sequence: Synthetic oligonucleotide
gggccgggccgucuuguug

SEQ ID NO: 1997023 - RNA, 19 nt, Artificial Sequence
  Description of Artificial Sequence: Synthetic oligonucleotide
ccccuugcagccggaagcc

SEQ ID NO: 1997024 - RNA, 19 nt, Artificial Sequence
  Description of Artificial Sequence: Synthetic oligonucleotide
agauggagaggggcacauu

SEQ ID NO: 1997025 - RNA, 19 nt, Artificial Sequence
  Description of Artificial Sequence: Synthetic oligonucleotide
gccgagagauggagagggg

SEQ ID NO: 1997026 - RNA, 19 nt, Artificial Sequence
  Description of Artificial Sequence: Synthetic oligonucleotide
ggcgcuccccacaggcgcg

SEQ ID NO: 1997027 - RNA, 19 nt, Artificial Sequence
  Description of Artificial Sequence: Synthetic oligonucleotide
gcgcugguggugccagucc

SEQ ID NO: 1997028 - RNA, 19 nt, Artificial Sequence
  Description of Artificial Sequence: Synthetic oligonucleotide
ccauucuguugcggggugc

SEQ ID NO: 1997029 - RNA, 19 nt, Artificial Sequence
  Description of Artificial Sequence: Synthetic oligonucleotide
gcuaagccccaggcugagg

SEQ ID NO: 1997030 - RNA, 19 nt, Artificial Sequence
  Description of Artificial Sequence: Synthetic oligonucleotide
caucgaugcucagcaccca

SEQ ID NO: 1997031 - RNA, 19 nt, Artificial Sequence
  Description of Artificial Sequence: Synthetic oligonucleotide
ggugccccaaagggccggg

SEQ ID NO: 1997032 - RNA, 19 nt, Artificial Sequence
  Description of Artificial Sequence: Synthetic oligonucleotide
ggaucggcgggagggguca

SEQ ID NO: 1997033 - RNA, 19 nt, Artificial Sequence
  Description of Artificial Sequence: Synthetic oligonucleotide
cagcacccagucuccuaca

SEQ ID NO: 1997034 - RNA, 19 nt, Artificial Sequence
  Description of Artificial Sequence: Synthetic oligonucleotide
gcugggccgcggcucggcg

SEQ ID NO: 1997035 - RNA, 19 nt, Artificial Sequence
  Description of Artificial Sequence: Synthetic oligonucleotide
cacgccagccugugcagcu

SEQ ID NO: 1997036 - RNA, 19 nt, Artificial Sequence
  Description of Artificial Sequence: Synthetic oligonucleotide
ccaggacauacuuuucccu

SEQ ID NO: 1997037 - RNA, 19 nt, Artificial Sequence
  Description of Artificial Sequence: Synthetic oligonucleotide
cagccacgccagccugugc

SEQ ID NO: 1997038 - RNA, 19 nt, Artificial Sequence
  Description of Artificial Sequence: Synthetic oligonucleotide
guugcggggugcugucagu

SEQ ID NO: 1997039 - RNA, 19 nt, Artificial Sequence
  Description of Artificial Sequence: Synthetic oligonucleotide
cgguauccuccaucagccg

SEQ ID NO: 1997040 - RNA, 19 nt, Artificial Sequence
  Description of Artificial Sequence: Synthetic oligonucleotide
gggugccccaaagggccgg

SEQ ID NO: 1997041 - RNA, 19 nt, Artificial Sequence
  Description of Artificial Sequence: Synthetic oligonucleotide
ccugcguucucaccaucga

SEQ ID NO: 1997042 - RNA, 19 nt, Artificial Sequence
  Description of Artificial Sequence: Synthetic oligonucleotide
cugcguucucaccaucgau

SEQ ID NO: 1997043 - RNA, 19 nt, Artificial Sequence
  Description of Artificial Sequence: Synthetic oligonucleotide
ccaggggugagccgagaga

SEQ ID NO: 1997044 - RNA, 19 nt, Artificial Sequence
  Description of Artificial Sequence: Synthetic oligonucleotide
cgucuuguugagggaggcg

SEQ ID NO: 1997045 - RNA, 19 nt, Artificial Sequence
  Description of Artificial Sequence: Synthetic oligonucleotide
guugagggaggcgcuuggu

SEQ ID NO: 1997046 - RNA, 19 nt, Artificial Sequence
  Description of Artificial Sequence: Synthetic oligonucleotide
gcagagcgcugguggugcc

SEQ ID NO: 1997047 - RNA, 19 nt, Artificial Sequence
  Description of Artificial Sequence: Synthetic oligonucleotide
gcaucggggaccagcuguc

SEQ ID NO: 1997048 - RNA, 19 nt, Artificial Sequence
  Description of Artificial Sequence: Synthetic oligonucleotide
cggaggcguguauagcgug

SEQ ID NO: 1997049 - RNA, 19 nt, Artificial Sequence
  Description of Artificial Sequence: Synthetic oligonucleotide
ggaggcgcuuggugcaaaa

SEQ ID NO: 1997050 - RNA, 19 nt, Artificial Sequence
  Description of Artificial Sequence: Synthetic oligonucleotide
agggaggcgcuuggugcaa

SEQ ID NO: 1997051 - RNA, 19 nt, Artificial Sequence
  Description of Artificial Sequence: Synthetic oligonucleotide
ggaugcggaaggagcggga

SEQ ID NO: 1997052 - RNA, 19 nt, Artificial Sequence
  Description of Artificial Sequence: Synthetic oligonucleotide
gcacuaccuugaaggaauc

SEQ ID NO: 1997053 - RNA, 19 nt, Artificial Sequence
  Description of Artificial Sequence: Synthetic oligonucleotide
gucccuggccguggccgcc

SEQ ID NO: 1997054 - RNA, 19 nt, Artificial Sequence
  Description of Artificial Sequence: Synthetic oligonucleotide
ccgcugcuugcuggcaucg

SEQ ID NO: 1997055 - RNA, 19 nt, Artificial Sequence
  Description of Artificial Sequence: Synthetic oligonucleotide
agggccgggccgucuuguu

SEQ ID NO: 1997056 - RNA, 19 nt, Artificial Sequence
  Description of Artificial Sequence: Synthetic oligonucleotide
gugaggcucccugcguucu

SEQ ID NO: 1997057 - RNA, 19 nt, Artificial Sequence
  Description of Artificial Sequence: Synthetic oligonucleotide
gugccccaaagggccgggc

SEQ ID NO: 1997058 - RNA, 19 nt, Artificial Sequence
  Description of Artificial Sequence: Synthetic oligonucleotide
cagagcgcugguggugcca

SEQ ID NO: 1997059 - RNA, 19 nt, Artificial Sequence
  Description of Artificial Sequence: Synthetic oligonucleotide
ccaggcuaugacugcacgu

SEQ ID NO: 1997060 - RNA, 19 nt, Artificial Sequence
  Description of Artificial Sequence: Synthetic oligonucleotide
ggggaccagcugucugaac

SEQ ID NO: 1997061 - RNA, 19 nt, Artificial Sequence
  Description of Artificial Sequence: Synthetic oligonucleotide
cugugcccgugaggugggc

SEQ ID NO: 1997062 - RNA, 19 nt, Artificial Sequence
  Description of Artificial Sequence: Synthetic oligonucleotide
cuguugcggggugcuguca

SEQ ID NO: 1997063 - RNA, 19 nt, Artificial Sequence
  Description of Artificial Sequence: Synthetic oligonucleotide
cuuguugagggaggcgcuu

SEQ ID NO: 1997064 - RNA, 19 nt, Artificial Sequence
  Description of Artificial Sequence: Synthetic oligonucleotide
gccgggccgucuuguugag

SEQ ID NO: 1997065 - RNA, 19 nt, Artificial Sequence
  Description of Artificial Sequence: Synthetic oligonucleotide
gcgguaggcagaagcugga

SEQ ID NO: 1997066 - RNA, 19 nt, Artificial Sequence
  Description of Artificial Sequence: Synthetic oligonucleotide
cucccugcguucucaccau

SEQ ID NO: 1997067 - RNA, 19 nt, Artificial Sequence
  Description of Artificial Sequence: Synthetic oligonucleotide
gggaucggcgggagggguc

SEQ ID NO: 1997068 - RNA, 19 nt, Artificial Sequence
  Description of Artificial Sequence: Synthetic oligonucleotide
ccacgccagccugugcagc

SEQ ID NO: 1997069 - RNA, 19 nt, Artificial Sequence
  Description of Artificial Sequence: Synthetic oligonucleotide
ggaggggucagggccuucu

SEQ ID NO: 1997070 - RNA, 19 nt, Artificial Sequence
  Description of Artificial Sequence: Synthetic oligonucleotide
gugcccggcugggccgcgg

SEQ ID NO: 1997071 - RNA, 19 nt, Artificial Sequence
  Description of Artificial Sequence: Synthetic oligonucleotide
acgccagccugugcagcuu

SEQ ID NO: 1997072 - RNA, 19 nt, Artificial Sequence
  Description of Artificial Sequence: Synthetic oligonucleotide
gcgcuuggugcaaaaguau

SEQ ID NO: 1997073 - RNA, 19 nt, Artificial Sequence
  Description of Artificial Sequence: Synthetic oligonucleotide
cgguaggcagaagcuggag

SEQ ID NO: 1997074 - RNA, 19 nt, Artificial Sequence
  Description of Artificial Sequence: Synthetic oligonucleotide
gccguggccgccagucuuc

SEQ ID NO: 1997075 - RNA, 19 nt, Artificial Sequence
  Description of Artificial Sequence: Synthetic oligonucleotide
ccguggccgccagucuucg

SEQ ID NO: 1997076 - RNA, 19 nt, Artificial Sequence
  Description of Artificial Sequence: Synthetic oligonucleotide
gcgcuccccacaggcgcgg

SEQ ID NO: 1997077 - RNA, 19 nt, Artificial Sequence
  Description of Artificial Sequence: Synthetic oligonucleotide
cauccgggucuugcaugaa

SEQ ID NO: 1997078 - RNA, 19 nt, Artificial Sequence
  Description of Artificial Sequence: Synthetic oligonucleotide
ccucaaugugugugaggcu

SEQ ID NO: 1997079 - RNA, 19 nt, Artificial Sequence
  Description of Artificial Sequence: Synthetic oligonucleotide
cuccaggggugagccgaga

SEQ ID NO: 1997080 - RNA, 19 nt, Artificial Sequence
  Description of Artificial Sequence: Synthetic oligonucleotide
ggccaagagggaaggcagu

SEQ ID NO: 1997081 - RNA, 19 nt, Artificial Sequence
  Description of Artificial Sequence: Synthetic oligonucleotide
gagcgcugguggugccagu

SEQ ID NO: 1997082 - RNA, 19 nt, Artificial Sequence
  Description of Artificial Sequence: Synthetic oligonucleotide
caucggggaccagcugucu

SEQ ID NO: 1997083 - RNA, 19 nt, Artificial Sequence
  Description of Artificial Sequence: Synthetic oligonucleotide
ccggaggcguguauagcgu

SEQ ID NO: 1997084 - RNA, 19 nt, Artificial Sequence
  Description of Artificial Sequence: Synthetic oligonucleotide
gggugcccggcugggccgc

SEQ ID NO: 1997085 - RNA, 19 nt, Artificial Sequence
  Description of Artificial Sequence: Synthetic oligonucleotide
cguggccgccagucuucgg

SEQ ID NO: 1997086 - RNA, 19 nt, Artificial Sequence
  Description of Artificial Sequence: Synthetic oligonucleotide
ccgggccgucuuguugagg

SEQ ID NO: 1997087 - RNA, 19 nt, Artificial Sequence
  Description of Artificial Sequence: Synthetic oligonucleotide
ccggaagccccaaggugcu

SEQ ID NO: 1997088 - RNA, 19 nt, Artificial Sequence
  Description of Artificial Sequence: Synthetic oligonucleotide
ggugcccggcugggccgcg

SEQ ID NO: 1997089 - RNA, 19 nt, Artificial Sequence
  Description of Artificial Sequence: Synthetic oligonucleotide
gcgggacuggccugucccu

SEQ ID NO: 1997090 - RNA, 19 nt, Artificial Sequence
  Description of Artificial Sequence: Synthetic oligonucleotide
ggagcgggacuggccuguc

SEQ ID NO: 1997091 - RNA, 19 nt, Artificial Sequence
  Description of Artificial Sequence: Synthetic oligonucleotide
ccacaggcgcggaucuugu

SEQ ID NO: 1997092 - RNA, 19 nt, Artificial Sequence
  Description of Artificial Sequence: Synthetic oligonucleotide
cgggucuugcaugaacucu

SEQ ID NO: 1997093 - RNA, 19 nt, Artificial Sequence
  Description of Artificial Sequence: Synthetic oligonucleotide
cccgugaggugggcaagga

SEQ ID NO: 1997094 - RNA, 19 nt, Artificial Sequence
  Description of Artificial Sequence: Synthetic oligonucleotide
ggggaucggcgggaggggu

SEQ ID NO: 1997095 - RNA, 19 nt, Artificial Sequence
  Description of Artificial Sequence: Synthetic oligonucleotide
cguguauagcgugggcucu

SEQ ID NO: 1997096 - RNA, 19 nt, Artificial Sequence
  Description of Artificial Sequence: Synthetic oligonucleotide
gggaggcgcuuggugcaaa

SEQ ID NO: 1997097 - RNA, 19 nt, Artificial Sequence
  Description of Artificial Sequence: Synthetic oligonucleotide
cagucccggaggcguguau

SEQ ID NO: 1997098 - RNA, 19 nt, Artificial Sequence
  Description of Artificial Sequence: Synthetic oligonucleotide
gcucagcacccagucuccu

SEQ ID NO: 1997099 - RNA, 19 nt, Artificial Sequence
  Description of Artificial Sequence: Synthetic oligonucleotide
ccgggagccuugcugggau

SEQ ID NO: 1997100 - RNA, 19 nt, Artificial Sequence
  Description of Artificial Sequence: Synthetic oligonucleotide
gccagucccggaggcgugu

SEQ ID NO: 1997101 - RNA, 19 nt, Artificial Sequence
  Description of Artificial Sequence: Synthetic oligonucleotide
ccgugaggugggcaaggau

SEQ ID NO: 1997102 - RNA, 19 nt, Artificial Sequence
  Description of Artificial Sequence: Synthetic oligonucleotide
gcuccccacaggcgcggau

SEQ ID NO: 1997103 - RNA, 19 nt, Artificial Sequence
  Description of Artificial Sequence: Synthetic oligonucleotide
cggggaccagcugucugaa

SEQ ID NO: 1997104 - RNA, 19 nt, Artificial Sequence
  Description of Artificial Sequence: Synthetic oligonucleotide
gggccgcggcucggcggcc

SEQ ID NO: 1997105 - RNA, 19 nt, Artificial Sequence
  Description of Artificial Sequence: Synthetic oligonucleotide
ccagucccggaggcgugua

SEQ ID NO: 1997106 - RNA, 19 nt, Artificial Sequence
  Description of Artificial Sequence: Synthetic oligonucleotide
gcccugugccaggcgggcu

SEQ ID NO: 1997107 - RNA, 19 nt, Artificial Sequence
  Description of Artificial Sequence: Synthetic oligonucleotide
ggggcacauugaaguccuu

SEQ ID NO: 1997108 - RNA, 19 nt, Artificial Sequence
  Description of Artificial Sequence: Synthetic oligonucleotide
ggccgcggcucggcggccu

SEQ ID NO: 1997109 - RNA, 19 nt, Artificial Sequence
  Description of Artificial Sequence: Synthetic oligonucleotide
ccuggccguggccgccagu

SEQ ID NO: 1997110 - RNA, 19 nt, Artificial Sequence
  Description of Artificial Sequence: Synthetic oligonucleotide
ccccacaggcgcggaucuu

SEQ ID NO: 1997111 - RNA, 19 nt, Artificial Sequence
  Description of Artificial Sequence: Synthetic oligonucleotide
uuuaacaauucaaagagag

SEQ ID NO: 1997112 - RNA, 19 nt, Artificial Sequence
  Description of Artificial Sequence: Synthetic oligonucleotide
gaauauaucauguagccag

SEQ ID NO: 1997113 - RNA, 19 nt, Artificial Sequence
  Description of Artificial Sequence: Synthetic oligonucleotide
ucuaaggucuucuauaucg

SEQ ID NO: 1997114 - RNA, 19 nt, Artificial Sequence
  Description of Artificial Sequence: Synthetic oligonucleotide
aauaagugcacuucuacag

SEQ ID NO: 1997115 - RNA, 19 nt, Artificial Sequence
  Description of Artificial Sequence: Synthetic oligonucleotide
uguuacaggaauaaaugag

SEQ ID NO: 1997116 - RNA, 19 nt, Artificial Sequence
  Description of Artificial Sequence: Synthetic oligonucleotide
aaagcuaugcuguuacagg

SEQ ID NO: 1997117 - RNA, 19 nt, Artificial Sequence
  Description of Artificial Sequence: Synthetic oligonucleotide
auauuuauuaaguguuggc

SEQ ID NO: 1997118 - RNA, 19 nt, Artificial Sequence
  Description of Artificial Sequence: Synthetic oligonucleotide
uuuuauagguguaauugag

SEQ ID NO: 1997119 - RNA, 19 nt, Artificial Sequence
  Description of Artificial Sequence: Synthetic oligonucleotide
ucuuauauuuauuaagugu

SEQ ID NO: 1997120 - RNA, 19 nt, Artificial Sequence
  Description of Artificial Sequence: Synthetic oligonucleotide
uuguagaccaccaaaagac

SEQ ID NO: 1997121 - RNA, 19 nt, Artificial Sequence
  Description of Artificial Sequence: Synthetic oligonucleotide
aaguaacuuacuuguagac

SEQ ID NO: 1997122 - RNA, 19 nt, Artificial Sequence
  Description of Artificial Sequence: Synthetic oligonucleotide
ucaaguaacuuacuuguag

SEQ ID NO: 1997123 - RNA, 19 nt, Artificial Sequence
  Description of Artificial Sequence: Synthetic oligonucleotide
uuuauagguguaauugagg

SEQ ID NO: 1997124 - RNA, 19 nt, Artificial Sequence
  Description of Artificial Sequence: Synthetic oligonucleotide
uaucgaaacaccaaaacau

SEQ ID NO: 1997125 - RNA, 19 nt, Artificial Sequence
  Description of Artificial Sequence: Synthetic oligonucleotide
ugucuuauauuuauuaagu

SEQ ID NO: 1997126 - RNA, 19 nt, Artificial Sequence
  Description of Artificial Sequence: Synthetic oligonucleotide
aauaacugucaccauagca

SEQ ID NO: 1997127 - RNA, 19 nt, Artificial Sequence
  Description of Artificial Sequence: Synthetic oligonucleotide
auaacuuuccuauaugucu

SEQ ID NO: 1997128 - RNA, 19 nt, Artificial Sequence
  Description of Artificial Sequence: Synthetic oligonucleotide
gagaauauaucauguagcc

SEQ ID NO: 1997129 - RNA, 19 nt, Artificial Sequence
  Description of Artificial Sequence: Synthetic oligonucleotide
uacacuagguucuacaagc

SEQ ID NO: 1997130 - RNA, 19 nt, Artificial Sequence
  Description of Artificial Sequence: Synthetic oligonucleotide
uauauuuauuaaguguugg

SEQ ID NO: 1997131 - RNA, 19 nt, Artificial Sequence
  Description of Artificial Sequence: Synthetic oligonucleotide
auaucauguagccaggguc

SEQ ID NO: 1997132 - RNA, 19 nt, Artificial Sequence
  Description of Artificial Sequence: Synthetic oligonucleotide
ucuucuauaucgaaacacc

SEQ ID NO: 1997133 - RNA, 19 nt, Artificial Sequence
  Description of Artificial Sequence: Synthetic oligonucleotide
agagaauauaucauguagc

SEQ ID NO: 1997134 - RNA, 19 nt, Artificial Sequence
  Description of Artificial Sequence: Synthetic oligonucleotide
accaccaaaagacagguag

SEQ ID NO: 1997135 - RNA, 19 nt, Artificial Sequence
  Description of Artificial Sequence: Synthetic oligonucleotide
uuaaguguuggcuucauaa

SEQ ID NO: 1997136 - RNA, 19 nt, Artificial Sequence
  Description of Artificial Sequence: Synthetic oligonucleotide
aggucuucuauaucgaaac

SEQ ID NO: 1997137 - RNA, 19 nt, Artificial Sequence
  Description of Artificial Sequence: Synthetic oligonucleotide
aaauaagugcacuucuaca

SEQ ID NO: 1997138 - RNA, 19 nt, Artificial Sequence
  Description of Artificial Sequence: Synthetic oligonucleotide
aauuucccagcuuucaugu

SEQ ID NO: 1997139 - RNA, 19 nt, Artificial Sequence
  Description of Artificial Sequence: Synthetic oligonucleotide
ucuauaucgaaacaccaaa

SEQ ID NO: 1997140 - RNA, 19 nt, Artificial Sequence
  Description of Artificial Sequence: Synthetic oligonucleotide
aaaagcuaugcuguuacag

SEQ ID NO: 1997141 - RNA, 19 nt, Artificial Sequence
  Description of Artificial Sequence: Synthetic oligonucleotide
ugcuuuagcauuuuccgag

SEQ ID NO: 1997142 - RNA, 19 nt, Artificial Sequence
  Description of Artificial Sequence: Synthetic oligonucleotide
uuauauuuauuaaguguug

SEQ ID NO: 1997143 - RNA, 19 nt, Artificial Sequence
  Description of Artificial Sequence: Synthetic oligonucleotide
acagcauagacuuucuaag

SEQ ID NO: 1997144 - RNA, 19 nt, Artificial Sequence
  Description of Artificial Sequence: Synthetic oligonucleotide
aaauaacugucaccauagc

SEQ ID NO: 1997145 - RNA, 19 nt, Artificial Sequence
  Description of Artificial Sequence: Synthetic oligonucleotide
aauccuuagaaaugcucag

SEQ ID NO: 1997146 - RNA, 19 nt, Artificial Sequence
  Description of Artificial Sequence: Synthetic oligonucleotide
uugauuucgauaggaaugg

SEQ ID NO: 1997147 - RNA, 19 nt, Artificial Sequence
  Description of Artificial Sequence: Synthetic oligonucleotide
aguaacuuacuuguagacc

SEQ ID NO: 1997148 - RNA, 19 nt, Artificial Sequence
  Description of Artificial Sequence: Synthetic oligonucleotide
aaagaaagccgagcgauuc

SEQ ID NO: 1997149 - RNA, 19 nt, Artificial Sequence
  Description of Artificial Sequence: Synthetic oligonucleotide
uccuauaugucuccugagg

SEQ ID NO: 1997150 - RNA, 19 nt, Artificial Sequence
  Description of Artificial Sequence: Synthetic oligonucleotide
uuaauaucccauaaauaaa

SEQ ID NO: 1997151 - RNA, 19 nt, Artificial Sequence
  Description of Artificial Sequence: Synthetic oligonucleotide
agucuuagcaaccaaagaa

SEQ ID NO: 1997152 - RNA, 19 nt, Artificial Sequence
  Description of Artificial Sequence: Synthetic oligonucleotide
uuucuaguaguuccaagug

SEQ ID NO: 1997153 - RNA, 19 nt, Artificial Sequence
  Description of Artificial Sequence: Synthetic oligonucleotide
uguaguagucucagaaucc

SEQ ID NO: 1997154 - RNA, 19 nt, Artificial Sequence
  Description of Artificial Sequence: Synthetic oligonucleotide
aagaaagccgagcgauucc

SEQ ID NO: 1997155 - RNA, 19 nt, Artificial Sequence
  Description of Artificial Sequence: Synthetic oligonucleotide
uuuccuauaugucuccuga

SEQ ID NO: 1997156 - RNA, 19 nt, Artificial Sequence
  Description of Artificial Sequence: Synthetic oligonucleotide
aaaguuaugcauguguuaa

SEQ ID NO: 1997157 - RNA, 19 nt, Artificial Sequence
  Description of Artificial Sequence: Synthetic oligonucleotide
aauaaaugagcccuaucuu

SEQ ID NO: 1997158 - RNA, 19 nt, Artificial Sequence
  Description of Artificial Sequence: Synthetic oligonucleotide
gaaugucuggugcugaugc

SEQ ID NO: 1997159 - RNA, 19 nt, Artificial Sequence
  Description of Artificial Sequence: Synthetic oligonucleotide
gaaauaagugcacuucuac

SEQ ID NO: 1997160 - RNA, 19 nt, Artificial Sequence
  Description of Artificial Sequence: Synthetic oligonucleotide
ucuaguaguuccaaguguc

SEQ ID NO: 1997161 - RNA, 19 nt, Artificial Sequence
  Description of Artificial Sequence: Synthetic oligonucleotide
uuuucugacccucaaguaa

SEQ ID NO: 1997162 - RNA, 19 nt, Artificial Sequence
  Description of Artificial Sequence: Synthetic oligonucleotide
ucuucuacaccaccguucc

SEQ ID NO: 1997163 - RNA, 19 nt, Artificial Sequence
  Description of Artificial Sequence: Synthetic oligonucleotide
aaugucuggugcugaugcc

SEQ ID NO: 1997164 - RNA, 19 nt, Artificial Sequence
  Description of Artificial Sequence: Synthetic oligonucleotide
uuuuaacaauucaaagaga

SEQ ID NO: 1997165 - RNA, 19 nt, Artificial Sequence
  Description of Artificial Sequence: Synthetic oligonucleotide
agaaaugcucagcuuguac

SEQ ID NO: 1997166 - RNA, 19 nt, Artificial Sequence
  Description of Artificial Sequence: Synthetic oligonucleotide
ugaaacucaacucuaccau

SEQ ID NO: 1997167 - RNA, 19 nt, Artificial Sequence
  Description of Artificial Sequence: Synthetic oligonucleotide
uaucauguagccagggucu

SEQ ID NO: 1997168 - RNA, 19 nt, Artificial Sequence
  Description of Artificial Sequence: Synthetic oligonucleotide
acaggaauaaaugagcccu

SEQ ID NO: 1997169 - RNA, 19 nt, Artificial Sequence
  Description of Artificial Sequence: Synthetic oligonucleotide
uuuucagaaauaagugcac

SEQ ID NO: 1997170 - RNA, 19 nt, Artificial Sequence
  Description of Artificial Sequence: Synthetic oligonucleotide
aauucaaagagagaauaua

SEQ ID NO: 1997171 - RNA, 19 nt, Artificial Sequence
  Description of Artificial Sequence: Synthetic oligonucleotide
aauauaucauguagccagg

SEQ ID NO: 1997172 - RNA, 19 nt, Artificial Sequence
  Description of Artificial Sequence: Synthetic oligonucleotide
uaaaugagcccuaucuuaa

SEQ ID NO: 1997173 - RNA, 19 nt, Artificial Sequence
  Description of Artificial Sequence: Synthetic oligonucleotide
uucagagucgguacaaaac

SEQ ID NO: 1997174 - RNA, 19 nt, Artificial Sequence
  Description of Artificial Sequence: Synthetic oligonucleotide
ucgucaaugcucuugauuu

SEQ ID NO: 1997175 - RNA, 19 nt, Artificial Sequence
  Description of Artificial Sequence: Synthetic oligonucleotide
uccuguaguagucucagaa

SEQ ID NO: 1997176 - RNA, 19 nt, Artificial Sequence
  Description of Artificial Sequence: Synthetic oligonucleotide
uuagaaaugcucagcuugu

SEQ ID NO: 1997177 - RNA, 19 nt, Artificial Sequence
  Description of Artificial Sequence: Synthetic oligonucleotide
ugacccucaaguaacuuac

SEQ ID NO: 1997178 - RNA, 19 nt, Artificial Sequence
  Description of Artificial Sequence: Synthetic oligonucleotide
uuacuuguagaccaccaaa

SEQ ID NO: 1997179 - RNA, 19 nt, Artificial Sequence
  Description of Artificial Sequence: Synthetic oligonucleotide
agacagguagcuauuauuc

SEQ ID NO: 1997180 - RNA, 19 nt, Artificial Sequence
  Description of Artificial Sequence: Synthetic oligonucleotide
accaaaacaugcuuuaaaa

SEQ ID NO: 1997181 - RNA, 19 nt, Artificial Sequence
  Description of Artificial Sequence: Synthetic oligonucleotide
ugggugacugugaacauca

SEQ ID NO: 1997182 - RNA, 19 nt, Artificial Sequence
  Description of Artificial Sequence: Synthetic oligonucleotide
uauuccugacagcauagac

SEQ ID NO: 1997183 - RNA, 19 nt, Artificial Sequence
  Description of Artificial Sequence: Synthetic oligonucleotide
uaacuuuccuauaugucuc

SEQ ID NO: 1997184 - RNA, 19 nt, Artificial Sequence
  Description of Artificial Sequence: Synthetic oligonucleotide
auuucgauaggaauggcug

SEQ ID NO: 1997185 - RNA, 19 nt, Artificial Sequence
  Description of Artificial Sequence: Synthetic oligonucleotide
aaaugagcccuaucuuaag

SEQ ID NO: 1997186 - RNA, 19 nt, Artificial Sequence
  Description of Artificial Sequence: Synthetic oligonucleotide
acuuguagaccaccaaaag

SEQ ID NO: 1997187 - RNA, 19 nt, Artificial Sequence
  Description of Artificial Sequence: Synthetic oligonucleotide
uauuucuaguaguuccaag

SEQ ID NO: 1997188 - RNA, 19 nt, Artificial Sequence
  Description of Artificial Sequence: Synthetic oligonucleotide
uucuauaucgaaacaccaa

SEQ ID NO: 1997189 - RNA, 19 nt, Artificial Sequence
  Description of Artificial Sequence: Synthetic oligonucleotide
uacaggaauaaaugagccc

SEQ ID NO: 1997190 - RNA, 19 nt, Artificial Sequence
  Description of Artificial Sequence: Synthetic oligonucleotide
aguuccaagugucuuauau

SEQ ID NO: 1997191 - RNA, 19 nt, Artificial Sequence
  Description of Artificial Sequence: Synthetic oligonucleotide
aagucuuagcaaccaaaga

SEQ ID NO: 1997192 - RNA, 19 nt, Artificial Sequence
  Description of Artificial Sequence: Synthetic oligonucleotide
auaacugucaccauagcaa

SEQ ID NO: 1997193 - RNA, 19 nt, Artificial Sequence
  Description of Artificial Sequence: Synthetic oligonucleotide
uuucucaggcuggugagcg

SEQ ID NO: 1997194 - RNA, 19 nt, Artificial Sequence
  Description of Artificial Sequence: Synthetic oligonucleotide
uacuuguagaccaccaaaa

SEQ ID NO: 1997195 - RNA, 19 nt, Artificial Sequence
  Description of Artificial Sequence: Synthetic oligonucleotide
aguagucucagaauccgac

SEQ ID NO: 1997196 - RNA, 19 nt, Artificial Sequence
  Description of Artificial Sequence: Synthetic oligonucleotide
ugugguauucggcaccggc

SEQ ID NO: 1997197 - RNA, 19 nt, Artificial Sequence
  Description of Artificial Sequence: Synthetic oligonucleotide
uuccugacagcauagacuu

SEQ ID NO: 1997198 - RNA, 19 nt, Artificial Sequence
  Description of Artificial Sequence: Synthetic oligonucleotide
cauuuuccgaguuuuaaca

SEQ ID NO: 1997199 - RNA, 19 nt, Artificial Sequence
  Description of Artificial Sequence: Synthetic oligonucleotide
uagucucagaauccgaccu

SEQ ID NO: 1997200 - RNA, 19 nt, Artificial Sequence
  Description of Artificial Sequence: Synthetic oligonucleotide
uuuggauuuguagucgggc

SEQ ID NO: 1997201 - RNA, 19 nt, Artificial Sequence
  Description of Artificial Sequence: Synthetic oligonucleotide
auacacuagguucuacaag

SEQ ID NO: 1997202 - RNA, 19 nt, Artificial Sequence
  Description of Artificial Sequence: Synthetic oligonucleotide
aagacagguagcuauuauu

SEQ ID NO: 1997203 - RNA, 19 nt, Artificial Sequence
  Description of Artificial Sequence: Synthetic oligonucleotide
gaucucuucuacaccaccg

SEQ ID NO: 1997204 - RNA, 19 nt, Artificial Sequence
  Description of Artificial Sequence: Synthetic oligonucleotide
uauaucauguagccagggu

SEQ ID NO: 1997205 - RNA, 19 nt, Artificial Sequence
  Description of Artificial Sequence: Synthetic oligonucleotide
cauuucugaaacucaacuc

SEQ ID NO: 1997206 - RNA, 19 nt, Artificial Sequence
  Description of Artificial Sequence: Synthetic oligonucleotide
uuucgauaggaauggcugc

SEQ ID NO: 1997207 - RNA, 19 nt, Artificial Sequence
  Description of Artificial Sequence: Synthetic oligonucleotide
agaaucaaguccuuggcuu

SEQ ID NO: 1997208 - RNA, 19 nt, Artificial Sequence
  Description of Artificial Sequence: Synthetic oligonucleotide
cuguaguagucucagaauc

SEQ ID NO: 1997209 - RNA, 19 nt, Artificial Sequence
  Description of Artificial Sequence: Synthetic oligonucleotide
uuguagucgggcucugugg

SEQ ID NO: 1997210 - RNA, 19 nt, Artificial Sequence
  Description of Artificial Sequence: Synthetic oligonucleotide
gacagguagcuauuauucc

SEQ ID NO: 1997211 - RNA, 19 nt, Artificial Sequence
  Description of Artificial Sequence: Synthetic oligonucleotide
cuuauauuuauuaaguguu

SEQ ID NO: 1997212 - RNA, 19 nt, Artificial Sequence
  Description of Artificial Sequence: Synthetic oligonucleotide
aaaacccagucuuuggauu

SEQ ID NO: 1997213 - RNA, 19 nt, Artificial Sequence
  Description of Artificial Sequence: Synthetic oligonucleotide
aggaaaacccagucuuugg

SEQ ID NO: 1997214 - RNA, 19 nt, Artificial Sequence
  Description of Artificial Sequence: Synthetic oligonucleotide
uccgaguuuuaacaauuca

SEQ ID NO: 1997215 - RNA, 19 nt, Artificial Sequence
  Description of Artificial Sequence: Synthetic oligonucleotide
aauggcugccggccuuucc

SEQ ID NO: 1997216 - RNA, 19 nt, Artificial Sequence
  Description of Artificial Sequence: Synthetic oligonucleotide
gacagcauagacuuucuaa

SEQ ID NO: 1997217 - RNA, 19 nt, Artificial Sequence
  Description of Artificial Sequence: Synthetic oligonucleotide
cuuuuauagguguaauuga

SEQ ID NO: 1997218 - RNA, 19 nt, Artificial Sequence
  Description of Artificial Sequence: Synthetic oligonucleotide
guaguagucucagaauccg

SEQ ID NO: 1997219 - RNA, 19 nt, Artificial Sequence
  Description of Artificial Sequence: Synthetic oligonucleotide
cagcauagacuuucuaagg

SEQ ID NO: 1997220 - RNA, 19 nt, Artificial Sequence
  Description of Artificial Sequence: Synthetic oligonucleotide
uuagcaaccaaagaauauu

SEQ ID NO: 1997221 - RNA, 19 nt, Artificial Sequence
  Description of Artificial Sequence: Synthetic oligonucleotide
aaagacagguagcuauuau

SEQ ID NO: 1997222 - RNA, 19 nt, Artificial Sequence
  Description of Artificial Sequence: Synthetic oligonucleotide
gguacaaaaccugagaauc

SEQ ID NO: 1997223 - RNA, 19 nt, Artificial Sequence
  Description of Artificial Sequence: Synthetic oligonucleotide
uuucccagcuuucauguau

SEQ ID NO: 1997224 - RNA, 19 nt, Artificial Sequence
  Description of Artificial Sequence: Synthetic oligonucleotide
ugagcccuaucuuaagucu

SEQ ID NO: 1997225 - RNA, 19 nt, Artificial Sequence
  Description of Artificial Sequence: Synthetic oligonucleotide
auucuguuuucagagucgg

SEQ ID NO: 1997226 - RNA, 19 nt, Artificial Sequence
  Description of Artificial Sequence: Synthetic oligonucleotide
aaagccgagcgauuccugu

SEQ ID NO: 1997227 - RNA, 19 nt, Artificial Sequence
  Description of Artificial Sequence: Synthetic oligonucleotide
cuauaugucuccugaggug

SEQ ID NO: 1997228 - RNA, 19 nt, Artificial Sequence
  Description of Artificial Sequence: Synthetic oligonucleotide
auaagugcacuucuacaga

SEQ ID NO: 1997229 - RNA, 19 nt, Artificial Sequence
  Description of Artificial Sequence: Synthetic oligonucleotide
uuuccgaguuuuaacaauu

SEQ ID NO: 1997230 - RNA, 19 nt, Artificial Sequence
  Description of Artificial Sequence: Synthetic oligonucleotide
ugguauucggcaccggcug

SEQ ID NO: 1997231 - RNA, 19 nt, Artificial Sequence
  Description of Artificial Sequence: Synthetic oligonucleotide
aucuuaagucuuagcaacc

SEQ ID NO: 1997232 - RNA, 19 nt, Artificial Sequence
  Description of Artificial Sequence: Synthetic oligonucleotide
uuggauuuguagucgggcu

SEQ ID NO: 1997233 - RNA, 19 nt, Artificial Sequence
  Description of Artificial Sequence: Synthetic oligonucleotide
uucuacaccaccguuccca

SEQ ID NO: 1997234 - RNA, 19 nt, Artificial Sequence
  Description of Artificial Sequence: Synthetic oligonucleotide
uccucggaaugucuggugc

SEQ ID NO: 1997235 - RNA, 19 nt, Artificial Sequence
  Description of Artificial Sequence: Synthetic oligonucleotide
uuuuccgaguuuuaacaau

SEQ ID NO: 1997236 - RNA, 19 nt, Artificial Sequence
  Description of Artificial Sequence: Synthetic oligonucleotide
cucaacucuaccaucaaaa

SEQ ID NO: 1997237 - RNA, 19 nt, Artificial Sequence
  Description of Artificial Sequence: Synthetic oligonucleotide
cuucaaaccuuuuauaggu

SEQ ID NO: 1997238 - RNA, 19 nt, Artificial Sequence
  Description of Artificial Sequence: Synthetic oligonucleotide
cuuguagaccaccaaaaga

SEQ ID NO: 1997239 - RNA, 19 nt, Artificial Sequence
  Description of Artificial Sequence: Synthetic oligonucleotide
cuaccugaguucuuggcug

SEQ ID NO: 1997240 - RNA, 19 nt, Artificial Sequence
  Description of Artificial Sequence: Synthetic oligonucleotide
aaucaaguccuuggcuuuc

SEQ ID NO: 1997241 - RNA, 19 nt, Artificial Sequence
  Description of Artificial Sequence: Synthetic oligonucleotide
uaacugucaccauagcaaa

SEQ ID NO: 1997242 - RNA, 19 nt, Artificial Sequence
  Description of Artificial Sequence: Synthetic oligonucleotide
agugcacuucuacagagaa

SEQ ID NO: 1997243 - RNA, 19 nt, Artificial Sequence
  Description of Artificial Sequence: Synthetic oligonucleotide
cacuucuacagagaaaaug

SEQ ID NO: 1997244 - RNA, 19 nt, Artificial Sequence
  Description of Artificial Sequence: Synthetic oligonucleotide
uuucagaaauaagugcacu

SEQ ID NO: 1997245 - RNA, 19 nt, Artificial Sequence
  Description of Artificial Sequence: Synthetic oligonucleotide
aaacccagucuuuggauuu

SEQ ID NO: 1997246 - RNA, 19 nt, Artificial Sequence
  Description of Artificial Sequence: Synthetic oligonucleotide
cuuuggauuuguagucggg

SEQ ID NO: 1997247 - RNA, 19 nt, Artificial Sequence
  Description of Artificial Sequence: Synthetic oligonucleotide
guagaccaccaaaagacag

SEQ ID NO: 1997248 - RNA, 19 nt, Artificial Sequence
  Description of Artificial Sequence: Synthetic oligonucleotide
ugcgucagcccuucaaacc

SEQ ID NO: 1997249 - RNA, 19 nt, Artificial Sequence
  Description of Artificial Sequence: Synthetic oligonucleotide
cuaucuuaagucuuagcaa

SEQ ID NO: 1997250 - RNA, 19 nt, Artificial Sequence
  Description of Artificial Sequence: Synthetic oligonucleotide
gaacaucacucauaauuuc

SEQ ID NO: 1997251 - RNA, 19 nt, Artificial Sequence
  Description of Artificial Sequence: Synthetic oligonucleotide
agcaaaacagcugcuuuag

SEQ ID NO: 1997252 - RNA, 19 nt, Artificial Sequence
  Description of Artificial Sequence: Synthetic oligonucleotide
auauaucauguagccaggg

SEQ ID NO: 1997253 - RNA, 19 nt, Artificial Sequence
  Description of Artificial Sequence: Synthetic oligonucleotide
uucgauaggaauggcugcc

SEQ ID NO: 1997254 - RNA, 19 nt, Artificial Sequence
  Description of Artificial Sequence: Synthetic oligonucleotide
aaacaugcuuuaaaauccu

SEQ ID NO: 1997255 - RNA, 19 nt, Artificial Sequence
  Description of Artificial Sequence: Synthetic oligonucleotide
cuucuauaucgaaacacca

SEQ ID NO: 1997256 - RNA, 19 nt, Artificial Sequence
  Description of Artificial Sequence: Synthetic oligonucleotide
auagcaaaacagcugcuuu

SEQ ID NO: 1997257 - RNA, 19 nt, Artificial Sequence
  Description of Artificial Sequence: Synthetic oligonucleotide
ugacugugaacaucacuca

SEQ ID NO: 1997258 - RNA, 19 nt, Artificial Sequence
  Description of Artificial Sequence: Synthetic oligonucleotide
auuauuccugacagcauag

SEQ ID NO: 1997259 - RNA, 19 nt, Artificial Sequence
  Description of Artificial Sequence: Synthetic oligonucleotide
aaaccuuuuauagguguaa

SEQ ID NO: 1997260 - RNA, 19 nt, Artificial Sequence
  Description of Artificial Sequence: Synthetic oligonucleotide
agaugcagcuaccugaguu

SEQ ID NO: 1997261 - RNA, 19 nt, Artificial Sequence
  Description of Artificial Sequence: Synthetic oligonucleotide
guagucucagaauccgacc

SEQ ID NO: 1997262 - RNA, 19 nt, Artificial Sequence
  Description of Artificial Sequence: Synthetic oligonucleotide
acuuucuaaggucuucuau

SEQ ID NO: 1997263 - RNA, 19 nt, Artificial Sequence
  Description of Artificial Sequence: Synthetic oligonucleotide
gucuucuauaucgaaacac

SEQ ID NO: 1997264 - RNA, 19 nt, Artificial Sequence
  Description of Artificial Sequence: Synthetic oligonucleotide
uagcaaccaaagaauauuu

SEQ ID NO: 1997265 - RNA, 19 nt, Artificial Sequence
  Description of Artificial Sequence: Synthetic oligonucleotide
aacaauucaaagagagaau

SEQ ID NO: 1997266 - RNA, 19 nt, Artificial Sequence
  Description of Artificial Sequence: Synthetic oligonucleotide
uauguggggauggagccgc

SEQ ID NO: 1997267 - RNA, 19 nt, Artificial Sequence
  Description of Artificial Sequence: Synthetic oligonucleotide
gcuguuacaggaauaaaug

SEQ ID NO: 1997268 - RNA, 19 nt, Artificial Sequence
  Description of Artificial Sequence: Synthetic oligonucleotide
uguggccccagucuacacc

SEQ ID NO: 1997269 - RNA, 19 nt, Artificial Sequence
  Description of Artificial Sequence: Synthetic oligonucleotide
gcuauuauuccugacagca

SEQ ID NO: 1997270 - RNA, 19 nt, Artificial Sequence
  Description of Artificial Sequence: Synthetic oligonucleotide
uacaaaaccugagaaucaa

SEQ ID NO: 1997271 - RNA, 19 nt, Artificial Sequence
  Description of Artificial Sequence: Synthetic oligonucleotide
auuccugacagcauagacu

SEQ ID NO: 1997272 - RNA, 19 nt, Artificial Sequence
  Description of Artificial Sequence: Synthetic oligonucleotide
ccuaucuuaagucuuagca

SEQ ID NO: 1997273 - RNA, 19 nt, Artificial Sequence
  Description of Artificial Sequence: Synthetic oligonucleotide
agagacaggcacuucugga

SEQ ID NO: 1997274 - RNA, 19 nt, Artificial Sequence
  Description of Artificial Sequence: Synthetic oligonucleotide
uuccuauaugucuccugag

SEQ ID NO: 1997275 - RNA, 19 nt, Artificial Sequence
  Description of Artificial Sequence: Synthetic oligonucleotide
aucgaaacaccaaaacaug

SEQ ID NO: 1997276 - RNA, 19 nt, Artificial Sequence
  Description of Artificial Sequence: Synthetic oligonucleotide
uuauuaaguguuggcuuca

SEQ ID NO: 1997277 - RNA, 19 nt, Artificial Sequence
  Description of Artificial Sequence: Synthetic oligonucleotide
uucggcaccggcuguaaga

SEQ ID NO: 1997278 - RNA, 19 nt, Artificial Sequence
  Description of Artificial Sequence: Synthetic oligonucleotide
cucuucuacaccaccguuc

SEQ ID NO: 1997279 - RNA, 19 nt, Artificial Sequence
  Description of Artificial Sequence: Synthetic oligonucleotide
aguaguuccaagugucuua

SEQ ID NO: 1997280 - RNA, 19 nt, Artificial Sequence
  Description of Artificial Sequence: Synthetic oligonucleotide
aguuaugcauguguuaaaa

SEQ ID NO: 1997281 - RNA, 19 nt, Artificial Sequence
  Description of Artificial Sequence: Synthetic oligonucleotide
agguucuacaagcagcuuu

SEQ ID NO: 1997282 - RNA, 19 nt, Artificial Sequence
  Description of Artificial Sequence: Synthetic oligonucleotide
agcccuucaaaccuuuuau

SEQ ID NO: 1997283 - RNA, 19 nt, Artificial Sequence
  Description of Artificial Sequence: Synthetic oligonucleotide
uggccauuucugaaacuca

SEQ ID NO: 1997284 - RNA, 19 nt, Artificial Sequence
  Description of Artificial Sequence: Synthetic oligonucleotide
aucucuucuacaccaccgu

SEQ ID NO: 1997285 - RNA, 19 nt, Artificial Sequence
  Description of Artificial Sequence: Synthetic oligonucleotide
ucgauaggaauggcugccg

SEQ ID NO: 1997286 - RNA, 19 nt, Artificial Sequence
  Description of Artificial Sequence: Synthetic oligonucleotide
auuuuguaauaaaaccuaa

SEQ ID NO: 1997287 - RNA, 19 nt, Artificial Sequence
  Description of Artificial Sequence: Synthetic oligonucleotide
gauggagccgcgcugcguc

SEQ ID NO: 1997288 - RNA, 19 nt, Artificial Sequence
  Description of Artificial Sequence: Synthetic oligonucleotide
uaguagucucagaauccga

SEQ ID NO: 1997289 - RNA, 19 nt, Artificial Sequence
  Description of Artificial Sequence: Synthetic oligonucleotide
cuauaucgaaacaccaaaa

SEQ ID NO: 1997290 - RNA, 19 nt, Artificial Sequence
  Description of Artificial Sequence: Synthetic oligonucleotide
aaaagacagguagcuauua

SEQ ID NO: 1997291 - RNA, 19 nt, Artificial Sequence
  Description of Artificial Sequence: Synthetic oligonucleotide
aguucuuggcuguggguga

SEQ ID NO: 1997292 - RNA, 19 nt, Artificial Sequence
  Description of Artificial Sequence: Synthetic oligonucleotide
cauagacuuucuaaggucu

SEQ ID NO: 1997293 - RNA, 19 nt, Artificial Sequence
  Description of Artificial Sequence: Synthetic oligonucleotide
agcgauuccuguaguaguc

SEQ ID NO: 1997294 - RNA, 19 nt, Artificial Sequence
  Description of Artificial Sequence: Synthetic oligonucleotide
uucuaaggucuucuauauc

SEQ ID NO: 1997295 - RNA, 19 nt, Artificial Sequence
  Description of Artificial Sequence: Synthetic oligonucleotide
uugaucucuucuacaccac

SEQ ID NO: 1997296 - RNA, 19 nt, Artificial Sequence
  Description of Artificial Sequence: Synthetic oligonucleotide
gucgguacaaaaccugaga

SEQ ID NO: 1997297 - RNA, 19 nt, Artificial Sequence
  Description of Artificial Sequence: Synthetic oligonucleotide
aaccuuuuauagguguaau

SEQ ID NO: 1997298 - RNA, 19 nt, Artificial Sequence
  Description of Artificial Sequence: Synthetic oligonucleotide
agaccaccaaaagacaggu

SEQ ID NO: 1997299 - RNA, 19 nt, Artificial Sequence
  Description of Artificial Sequence: Synthetic oligonucleotide
uccaagugucuuauauuua

SEQ ID NO: 1997300 - RNA, 19 nt, Artificial Sequence
  Description of Artificial Sequence: Synthetic oligonucleotide
agccgagcgauuccuguag

SEQ ID NO: 1997301 - RNA, 19 nt, Artificial Sequence
  Description of Artificial Sequence: Synthetic oligonucleotide
caaaguuggaggugucguc

SEQ ID NO: 1997302 - RNA, 19 nt, Artificial Sequence
  Description of Artificial Sequence: Synthetic oligonucleotide
acaaaguuaugcauguguu

SEQ ID NO: 1997303 - RNA, 19 nt, Artificial Sequence
  Description of Artificial Sequence: Synthetic oligonucleotide
cuaaggucuucuauaucga

SEQ ID NO: 1997304 - RNA, 19 nt, Artificial Sequence
  Description of Artificial Sequence: Synthetic oligonucleotide
agacuuucuaaggucuucu

SEQ ID NO: 1997305 - RNA, 19 nt, Artificial Sequence
  Description of Artificial Sequence: Synthetic oligonucleotide
uagccagggucuuuucuga

SEQ ID NO: 1997306 - RNA, 19 nt, Artificial Sequence
  Description of Artificial Sequence: Synthetic oligonucleotide
uuauuccugacagcauaga

SEQ ID NO: 1997307 - RNA, 19 nt, Artificial Sequence
  Description of Artificial Sequence: Synthetic oligonucleotide
ugaguucuuggcugugggu

SEQ ID NO: 1997308 - RNA, 19 nt, Artificial Sequence
  Description of Artificial Sequence: Synthetic oligonucleotide
gcaaccaaagaauauuuua

SEQ ID NO: 1997309 - RNA, 19 nt, Artificial Sequence
  Description of Artificial Sequence: Synthetic oligonucleotide
uggaggugucgucaaugcu

SEQ ID NO: 1997310 - RNA, 19 nt, Artificial Sequence
  Description of Artificial Sequence: Synthetic oligonucleotide
gagaaucaaguccuuggcu

SEQ ID NO: 1997311 - RNA, 19 nt, Artificial Sequence
  Description of Artificial Sequence: Synthetic oligonucleotide
agaaagccgagcgauuccu

SEQ ID NO: 1997312 - RNA, 19 nt, Artificial Sequence
  Description of Artificial Sequence: Synthetic oligonucleotide
agaauccgaccuguggaag

SEQ ID NO: 1997313 - RNA, 19 nt, Artificial Sequence
  Description of Artificial Sequence: Synthetic oligonucleotide
gcauuuuccgaguuuuaac

SEQ ID NO: 1997314 - RNA, 19 nt, Artificial Sequence
  Description of Artificial Sequence: Synthetic oligonucleotide
ucucuucuacaccaccguu

SEQ ID NO: 1997315 - RNA, 19 nt, Artificial Sequence
  Description of Artificial Sequence: Synthetic oligonucleotide
acucaacucuaccaucaaa

SEQ ID NO: 1997316 - RNA, 19 nt, Artificial Sequence
  Description of Artificial Sequence: Synthetic oligonucleotide
ggaaaacccagucuuugga

SEQ ID NO: 1997317 - RNA, 19 nt, Artificial Sequence
  Description of Artificial Sequence: Synthetic oligonucleotide
gauuucgauaggaauggcu

SEQ ID NO: 1997318 - RNA, 19 nt, Artificial Sequence
  Description of Artificial Sequence: Synthetic oligonucleotide
acuuacuuguagaccacca

SEQ ID NO: 1997319 - RNA, 19 nt, Artificial Sequence
  Description of Artificial Sequence: Synthetic oligonucleotide
agguagcuauuauuccuga

SEQ ID NO: 1997320 - RNA, 19 nt, Artificial Sequence
  Description of Artificial Sequence: Synthetic oligonucleotide
ugucuggugcugaugccau

SEQ ID NO: 1997321 - RNA, 19 nt, Artificial Sequence
  Description of Artificial Sequence: Synthetic oligonucleotide
caaaguuaugcauguguua

SEQ ID NO: 1997322 - RNA, 19 nt, Artificial Sequence
  Description of Artificial Sequence: Synthetic oligonucleotide
caucacucauaauuuccca

SEQ ID NO: 1997323 - RNA, 19 nt, Artificial Sequence
  Description of Artificial Sequence: Synthetic oligonucleotide
ucuuggcugugggugacug

SEQ ID NO: 1997324 - RNA, 19 nt, Artificial Sequence
  Description of Artificial Sequence: Synthetic oligonucleotide
ugauuucgauaggaauggc

SEQ ID NO: 1997325 - RNA, 19 nt, Artificial Sequence
  Description of Artificial Sequence: Synthetic oligonucleotide
ucuacaccaccguucccaa

SEQ ID NO: 1997326 - RNA, 19 nt, Artificial Sequence
  Description of Artificial Sequence: Synthetic oligonucleotide
cccucaaguaacuuacuug

SEQ ID NO: 1997327 - RNA, 19 nt, Artificial Sequence
  Description of Artificial Sequence: Synthetic oligonucleotide
cucauaauuucccagcuuu

SEQ ID NO: 1997328 - RNA, 19 nt, Artificial Sequence
  Description of Artificial Sequence: Synthetic oligonucleotide
uaggaauggcugccggccu

SEQ ID NO: 1997329 - RNA, 19 nt, Artificial Sequence
  Description of Artificial Sequence: Synthetic oligonucleotide
cuacacccucaaagaaggg

SEQ ID NO: 1997330 - RNA, 19 nt, Artificial Sequence
  Description of Artificial Sequence: Synthetic oligonucleotide
agucgguacaaaaccugag

SEQ ID NO: 1997331 - RNA, 19 nt, Artificial Sequence
  Description of Artificial Sequence: Synthetic oligonucleotide
gagucgguacaaaaccuga

SEQ ID NO: 1997332 - RNA, 19 nt, Artificial Sequence
  Description of Artificial Sequence: Synthetic oligonucleotide
acccucaaguaacuuacuu

SEQ ID NO: 1997333 - RNA, 19 nt, Artificial Sequence
  Description of Artificial Sequence: Synthetic oligonucleotide
augucuggugcugaugcca

SEQ ID NO: 1997334 - RNA, 19 nt, Artificial Sequence
  Description of Artificial Sequence: Synthetic oligonucleotide
agaaauaagugcacuucua

SEQ ID NO: 1997335 - RNA, 19 nt, Artificial Sequence
  Description of Artificial Sequence: Synthetic oligonucleotide
cugcgucagcccuucaaac

SEQ ID NO: 1997336 - RNA, 19 nt, Artificial Sequence
  Description of Artificial Sequence: Synthetic oligonucleotide
auuaaguguuggcuucaua

SEQ ID NO: 1997337 - RNA, 19 nt, Artificial Sequence
  Description of Artificial Sequence: Synthetic oligonucleotide
aacagcugcuuuagcauuu

SEQ ID NO: 1997338 - RNA, 19 nt, Artificial Sequence
  Description of Artificial Sequence: Synthetic oligonucleotide
aauccgaccuguggaaguu

SEQ ID NO: 1997339 - RNA, 19 nt, Artificial Sequence
  Description of Artificial Sequence: Synthetic oligonucleotide
ggaggugucgucaaugcuc

SEQ ID NO: 1997340 - RNA, 19 nt, Artificial Sequence
  Description of Artificial Sequence: Synthetic oligonucleotide
uaguaguuccaagugucuu

SEQ ID NO: 1997341 - RNA, 19 nt, Artificial Sequence
  Description of Artificial Sequence: Synthetic oligonucleotide
gguucuacaagcagcuuuc

SEQ ID NO: 1997342 - RNA, 19 nt, Artificial Sequence
  Description of Artificial Sequence: Synthetic oligonucleotide
aagccgagcgauuccugua

SEQ ID NO: 1997343 - RNA, 19 nt, Artificial Sequence
  Description of Artificial Sequence: Synthetic oligonucleotide
caccaaaacaugcuuuaaa

SEQ ID NO: 1997344 - RNA, 19 nt, Artificial Sequence
  Description of Artificial Sequence: Synthetic oligonucleotide
accguucccaauucuguuu

SEQ ID NO: 1997345 - RNA, 19 nt, Artificial Sequence
  Description of Artificial Sequence: Synthetic oligonucleotide
ccaccaaaagacagguagc

SEQ ID NO: 1997346 - RNA, 19 nt, Artificial Sequence
  Description of Artificial Sequence: Synthetic oligonucleotide
ggagaugcagcuaccugag

SEQ ID NO: 1997347 - RNA, 19 nt, Artificial Sequence
  Description of Artificial Sequence: Synthetic oligonucleotide
cuuuucugacccucaagua

SEQ ID NO: 1997348 - RNA, 19 nt, Artificial Sequence
  Description of Artificial Sequence: Synthetic oligonucleotide
cucuugauuucgauaggaa

SEQ ID NO: 1997349 - RNA, 19 nt, Artificial Sequence
  Description of Artificial Sequence: Synthetic oligonucleotide
agcgccagcguccucggaa

SEQ ID NO: 1997350 - RNA, 19 nt, Artificial Sequence
  Description of Artificial Sequence: Synthetic oligonucleotide
cagcucauaacuuuccuau

SEQ ID NO: 1997351 - RNA, 19 nt, Artificial Sequence
  Description of Artificial Sequence: Synthetic oligonucleotide
caaaccuuuuauaggugua

SEQ ID NO: 1997352 - RNA, 19 nt, Artificial Sequence
  Description of Artificial Sequence: Synthetic oligonucleotide
gagcgauuccuguaguagu

SEQ ID NO: 1997353 - RNA, 19 nt, Artificial Sequence
  Description of Artificial Sequence: Synthetic oligonucleotide
gaauccgaccuguggaagu

SEQ ID NO: 1997354 - RNA, 19 nt, Artificial Sequence
  Description of Artificial Sequence: Synthetic oligonucleotide
cacuucuggaggggaaugc

SEQ ID NO: 1997355 - RNA, 19 nt, Artificial Sequence
  Description of Artificial Sequence: Synthetic oligonucleotide
uauuaaguguuggcuucau

SEQ ID NO: 1997356 - RNA, 19 nt, Artificial Sequence
  Description of Artificial Sequence: Synthetic oligonucleotide
ggaauaaaugagcccuauc

SEQ ID NO: 1997357 - RNA, 19 nt, Artificial Sequence
  Description of Artificial Sequence: Synthetic oligonucleotide
ggugucgucaaugcucuug

SEQ ID NO: 1997358 - RNA, 19 nt, Artificial Sequence
  Description of Artificial Sequence: Synthetic oligonucleotide
cuacagagaaaaugaauuu

SEQ ID NO: 1997359 - RNA, 19 nt, Artificial Sequence
  Description of Artificial Sequence: Synthetic oligonucleotide
aggaauaaaugagcccuau

SEQ ID NO: 1997360 - RNA, 19 nt, Artificial Sequence
  Description of Artificial Sequence: Synthetic oligonucleotide
gguagcuauuauuccugac

SEQ ID NO: 1997361 - RNA, 19 nt, Artificial Sequence
  Description of Artificial Sequence: Synthetic oligonucleotide
gaaagccgagcgauuccug

SEQ ID NO: 1997362 - RNA, 19 nt, Artificial Sequence
  Description of Artificial Sequence: Synthetic oligonucleotide
uucucaggcuggugagcgc

SEQ ID NO: 1997363 - RNA, 19 nt, Artificial Sequence
  Description of Artificial Sequence: Synthetic oligonucleotide
uagcauuuuccgaguuuua

SEQ ID NO: 1997364 - RNA, 19 nt, Artificial Sequence
  Description of Artificial Sequence: Synthetic oligonucleotide
auucggcaccggcuguaag

SEQ ID NO: 1997365 - RNA, 19 nt, Artificial Sequence
  Description of Artificial Sequence: Synthetic oligonucleotide
ccucaaguaacuuacuugu

SEQ ID NO: 1997366 - RNA, 19 nt, Artificial Sequence
  Description of Artificial Sequence: Synthetic oligonucleotide
ucggaaugucuggugcuga

SEQ ID NO: 1997367 - RNA, 19 nt, Artificial Sequence
  Description of Artificial Sequence: Synthetic oligonucleotide
ucccagcuuucauguaugu

SEQ ID NO: 1997368 - RNA, 19 nt, Artificial Sequence
  Description of Artificial Sequence: Synthetic oligonucleotide
guacaaaguuaugcaugug

SEQ ID NO: 1997369 - RNA, 19 nt, Artificial Sequence
  Description of Artificial Sequence: Synthetic oligonucleotide
ccgaguuuuaacaauucaa

SEQ ID NO: 1997370 - RNA, 19 nt, Artificial Sequence
  Description of Artificial Sequence: Synthetic oligonucleotide
ccuaaauauuucuaguagu

SEQ ID NO: 1997371 - RNA, 19 nt, Artificial Sequence
  Description of Artificial Sequence: Synthetic oligonucleotide
gacucagggaagucaucaa

SEQ ID NO: 1997372 - RNA, 19 nt, Artificial Sequence
  Description of Artificial Sequence: Synthetic oligonucleotide
gacuuucuaaggucuucua

SEQ ID NO: 1997373 - RNA, 19 nt, Artificial Sequence
  Description of Artificial Sequence: Synthetic oligonucleotide
cucggaaugucuggugcug

SEQ ID NO: 1997374 - RNA, 19 nt, Artificial Sequence
  Description of Artificial Sequence: Synthetic oligonucleotide
augcagcuaccugaguucu

SEQ ID NO: 1997375 - RNA, 19 nt, Artificial Sequence
  Description of Artificial Sequence: Synthetic oligonucleotide
agccgcgcugcgucagccc

SEQ ID NO: 1997376 - RNA, 19 nt, Artificial Sequence
  Description of Artificial Sequence: Synthetic oligonucleotide
uuccuguaguagucucaga

SEQ ID NO: 1997377 - RNA, 19 nt, Artificial Sequence
  Description of Artificial Sequence: Synthetic oligonucleotide
gacugugaacaucacucau

SEQ ID NO: 1997378 - RNA, 19 nt, Artificial Sequence
  Description of Artificial Sequence: Synthetic oligonucleotide
cagaauccgaccuguggaa

SEQ ID NO: 1997379 - RNA, 19 nt, Artificial Sequence
  Description of Artificial Sequence: Synthetic oligonucleotide
gauuuguagucgggcucug

SEQ ID NO: 1997380 - RNA, 19 nt, Artificial Sequence
  Description of Artificial Sequence: Synthetic oligonucleotide
ucggcaccggcuguaagau

SEQ ID NO: 1997381 - RNA, 19 nt, Artificial Sequence
  Description of Artificial Sequence: Synthetic oligonucleotide
uagaaaugcucagcuugua

SEQ ID NO: 1997382 - RNA, 19 nt, Artificial Sequence
  Description of Artificial Sequence: Synthetic oligonucleotide
cuucuacaccaccguuccc

SEQ ID NO: 1997383 - RNA, 19 nt, Artificial Sequence
  Description of Artificial Sequence: Synthetic oligonucleotide
agcaaccaaagaauauuuu

SEQ ID NO: 1997384 - RNA, 19 nt, Artificial Sequence
  Description of Artificial Sequence: Synthetic oligonucleotide
gcagcuaccugaguucuug

SEQ ID NO: 1997385 - RNA, 19 nt, Artificial Sequence
  Description of Artificial Sequence: Synthetic oligonucleotide
cuaugcuguuacaggaaua

SEQ ID NO: 1997386 - RNA, 19 nt, Artificial Sequence
  Description of Artificial Sequence: Synthetic oligonucleotide
guccucggaaugucuggug

SEQ ID NO: 1997387 - RNA, 19 nt, Artificial Sequence
  Description of Artificial Sequence: Synthetic oligonucleotide
gaggugucgucaaugcucu

SEQ ID NO: 1997388 - RNA, 19 nt, Artificial Sequence
  Description of Artificial Sequence: Synthetic oligonucleotide
gcaaaacagcugcuuuagc

SEQ ID NO: 1997389 - RNA, 19 nt, Artificial Sequence
  Description of Artificial Sequence: Synthetic oligonucleotide
cuaguaguuccaagugucu

SEQ ID NO: 1997390 - RNA, 19 nt, Artificial Sequence
  Description of Artificial Sequence: Synthetic oligonucleotide
ggucuucuauaucgaaaca

SEQ ID NO: 1997391 - RNA, 19 nt, Artificial Sequence
  Description of Artificial Sequence: Synthetic oligonucleotide
agcguccucggaaugucug

SEQ ID NO: 1997392 - RNA, 19 nt, Artificial Sequence
  Description of Artificial Sequence: Synthetic oligonucleotide
ugucagacucagggaaguc

SEQ ID NO: 1997393 - RNA, 19 nt, Artificial Sequence
  Description of Artificial Sequence: Synthetic oligonucleotide
uguggggauggagccgcgc

SEQ ID NO: 1997394 - RNA, 19 nt, Artificial Sequence
  Description of Artificial Sequence: Synthetic oligonucleotide
auuuguagucgggcucugu

SEQ ID NO: 1997395 - RNA, 19 nt, Artificial Sequence
  Description of Artificial Sequence: Synthetic oligonucleotide
ugucgucaaugcucuugau

SEQ ID NO: 1997396 - RNA, 19 nt, Artificial Sequence
  Description of Artificial Sequence: Synthetic oligonucleotide
agcuaugcuguuacaggaa

SEQ ID NO: 1997397 - RNA, 19 nt, Artificial Sequence
  Description of Artificial Sequence: Synthetic oligonucleotide
gcguccucggaaugucugg

SEQ ID NO: 1997398 - RNA, 19 nt, Artificial Sequence
  Description of Artificial Sequence: Synthetic oligonucleotide
ucccugauguggccccagu

SEQ ID NO: 1997399 - RNA, 19 nt, Artificial Sequence
  Description of Artificial Sequence: Synthetic oligonucleotide
ccauuucugaaacucaacu

SEQ ID NO: 1997400 - RNA, 19 nt, Artificial Sequence
  Description of Artificial Sequence: Synthetic oligonucleotide
ggaaugucuggugcugaug

SEQ ID NO: 1997401 - RNA, 19 nt, Artificial Sequence
  Description of Artificial Sequence: Synthetic oligonucleotide
cccuaucuuaagucuuagc

SEQ ID NO: 1997402 - RNA, 19 nt, Artificial Sequence
  Description of Artificial Sequence: Synthetic oligonucleotide
gcuaccugaguucuuggcu

SEQ ID NO: 1997403 - RNA, 19 nt, Artificial Sequence
  Description of Artificial Sequence: Synthetic oligonucleotide
uggcugccggccuuucccu

SEQ ID NO: 1997404 - RNA, 19 nt, Artificial Sequence
  Description of Artificial Sequence: Synthetic oligonucleotide
aggaauggcugccggccuu

SEQ ID NO: 1997405 - RNA, 19 nt, Artificial Sequence
  Description of Artificial Sequence: Synthetic oligonucleotide
caaaagacagguagcuauu

SEQ ID NO: 1997406 - RNA, 19 nt, Artificial Sequence
  Description of Artificial Sequence: Synthetic oligonucleotide
caggaauaaaugagcccua

SEQ ID NO: 1997407 - RNA, 19 nt, Artificial Sequence
  Description of Artificial Sequence: Synthetic oligonucleotide
ggggaaugccaguguuucc

SEQ ID NO: 1997408 - RNA, 19 nt, Artificial Sequence
  Description of Artificial Sequence: Synthetic oligonucleotide
uggagccgcgcugcgucag

SEQ ID NO: 1997409 - RNA, 19 nt, Artificial Sequence
  Description of Artificial Sequence: Synthetic oligonucleotide
cgagcgauuccuguaguag

SEQ ID NO: 1997410 - RNA, 19 nt, Artificial Sequence
  Description of Artificial Sequence: Synthetic oligonucleotide
guucuacaagcagcuuuca

SEQ ID NO: 1997411 - RNA, 19 nt, Artificial Sequence
  Description of Artificial Sequence: Synthetic oligonucleotide
ccugagaaucaaguccuug

SEQ ID NO: 1997412 - RNA, 19 nt, Artificial Sequence
  Description of Artificial Sequence: Synthetic oligonucleotide
ggcaccggcuguaagaugu

SEQ ID NO: 1997413 - RNA, 19 nt, Artificial Sequence
  Description of Artificial Sequence: Synthetic oligonucleotide
cgauaggaauggcugccgg

SEQ ID NO: 1997414 - RNA, 19 nt, Artificial Sequence
  Description of Artificial Sequence: Synthetic oligonucleotide
gcugcgucagcccuucaaa

SEQ ID NO: 1997415 - RNA, 19 nt, Artificial Sequence
  Description of Artificial Sequence: Synthetic oligonucleotide
cagggaagucaucaaaguu

SEQ ID NO: 1997416 - RNA, 19 nt, Artificial Sequence
  Description of Artificial Sequence: Synthetic oligonucleotide
cagcccuucaaaccuuuua

SEQ ID NO: 1997417 - RNA, 19 nt, Artificial Sequence
  Description of Artificial Sequence: Synthetic oligonucleotide
agcccuaucuuaagucuua

SEQ ID NO: 1997418 - RNA, 19 nt, Artificial Sequence
  Description of Artificial Sequence: Synthetic oligonucleotide
ggccauuucugaaacucaa

SEQ ID NO: 1997419 - RNA, 19 nt, Artificial Sequence
  Description of Artificial Sequence: Synthetic oligonucleotide
gcuaugcuguuacaggaau

SEQ ID NO: 1997420 - RNA, 19 nt, Artificial Sequence
  Description of Artificial Sequence: Synthetic oligonucleotide
gagccgcgcugcgucagcc

SEQ ID NO: 1997421 - RNA, 19 nt, Artificial Sequence
  Description of Artificial Sequence: Synthetic oligonucleotide
gcgucagcccuucaaaccu

SEQ ID NO: 1997422 - RNA, 19 nt, Artificial Sequence
  Description of Artificial Sequence: Synthetic oligonucleotide
gcugugggugacugugaac

SEQ ID NO: 1997423 - RNA, 19 nt, Artificial Sequence
  Description of Artificial Sequence: Synthetic oligonucleotide
cugugguauucggcaccgg

SEQ ID NO: 1997424 - RNA, 19 nt, Artificial Sequence
  Description of Artificial Sequence: Synthetic oligonucleotide
gggauggagccgcgcugcg

SEQ ID NO: 1997425 - RNA, 19 nt, Artificial Sequence
  Description of Artificial Sequence: Synthetic oligonucleotide
cuuuagcauuuuccgaguu

SEQ ID NO: 1997426 - RNA, 19 nt, Artificial Sequence
  Description of Artificial Sequence: Synthetic oligonucleotide
gcccuaucuuaagucuuag

SEQ ID NO: 1997427 - RNA, 19 nt, Artificial Sequence
  Description of Artificial Sequence: Synthetic oligonucleotide
cgaaacaccaaaacaugcu

SEQ ID NO: 1997428 - RNA, 19 nt, Artificial Sequence
  Description of Artificial Sequence: Synthetic oligonucleotide
cgauuccuguaguagucuc

SEQ ID NO: 1997429 - RNA, 19 nt, Artificial Sequence
  Description of Artificial Sequence: Synthetic oligonucleotide
ggcugugggugacugugaa

SEQ ID NO: 1997430 - RNA, 19 nt, Artificial Sequence
  Description of Artificial Sequence: Synthetic oligonucleotide
gugcacuucuacagagaaa

SEQ ID NO: 1997431 - RNA, 19 nt, Artificial Sequence
  Description of Artificial Sequence: Synthetic oligonucleotide
guauucggcaccggcugua

SEQ ID NO: 1997432 - RNA, 19 nt, Artificial Sequence
  Description of Artificial Sequence: Synthetic oligonucleotide
ccggcuguaagaugucaga

SEQ ID NO: 1997433 - RNA, 19 nt, Artificial Sequence
  Description of Artificial Sequence: Synthetic oligonucleotide
gagaugcagcuaccugagu

SEQ ID NO: 1997434 - RNA, 19 nt, Artificial Sequence
  Description of Artificial Sequence: Synthetic oligonucleotide
cauggccauuucugaaacu

SEQ ID NO: 1997435 - RNA, 19 nt, Artificial Sequence
  Description of Artificial Sequence: Synthetic oligonucleotide
ccaguguuuccuuccagcu

SEQ ID NO: 1997436 - RNA, 19 nt, Artificial Sequence
  Description of Artificial Sequence: Synthetic oligonucleotide
gggcucugugguauucggc

SEQ ID NO: 1997437 - RNA, 19 nt, Artificial Sequence
  Description of Artificial Sequence: Synthetic oligonucleotide
gucgggcucugugguauuc

SEQ ID NO: 1997438 - RNA, 19 nt, Artificial Sequence
  Description of Artificial Sequence: Synthetic oligonucleotide
agucgggcucugugguauu

SEQ ID NO: 1997439 - RNA, 19 nt, Artificial Sequence
  Description of Artificial Sequence: Synthetic oligonucleotide
gaccaccaaaagacaggua

SEQ ID NO: 1997440 - RNA, 19 nt, Artificial Sequence
  Description of Artificial Sequence: Synthetic oligonucleotide
caccggcuguaagauguca

SEQ ID NO: 1997441 - RNA, 19 nt, Artificial Sequence
  Description of Artificial Sequence: Synthetic oligonucleotide
agcagcuuucauggccauu

SEQ ID NO: 1997442 - RNA, 19 nt, Artificial Sequence
  Description of Artificial Sequence: Synthetic oligonucleotide
gcugccggccuuucccuga

SEQ ID NO: 1997443 - RNA, 19 nt, Artificial Sequence
  Description of Artificial Sequence: Synthetic oligonucleotide
gguauucggcaccggcugu

SEQ ID NO: 1997444 - RNA, 19 nt, Artificial Sequence
  Description of Artificial Sequence: Synthetic oligonucleotide
cccugauguggccccaguc

SEQ ID NO: 1997445 - RNA, 19 nt, Artificial Sequence
  Description of Artificial Sequence: Synthetic oligonucleotide
auccgaccuguggaaguuu

SEQ ID NO: 1997446 - RNA, 19 nt, Artificial Sequence
  Description of Artificial Sequence: Synthetic oligonucleotide
caccguucccaauucuguu

SEQ ID NO: 1997447 - RNA, 19 nt, Artificial Sequence
  Description of Artificial Sequence: Synthetic oligonucleotide
gccggccuuucccugaugu

SEQ ID NO: 1997448 - RNA, 19 nt, Artificial Sequence
  Description of Artificial Sequence: Synthetic oligonucleotide
ggagccgcgcugcgucagc

SEQ ID NO: 1997449 - RNA, 19 nt, Artificial Sequence
  Description of Artificial Sequence: Synthetic oligonucleotide
ccggccuuucccugaugug

SEQ ID NO: 1997450 - RNA, 19 nt, Artificial Sequence
  Description of Artificial Sequence: Synthetic oligonucleotide
ccagcguccucggaauguc

SEQ ID NO: 1997451 - RNA, 19 nt, Artificial Sequence
  Description of Artificial Sequence: Synthetic oligonucleotide
aggugucgucaaugcucuu

SEQ ID NO: 1997452 - RNA, 19 nt, Artificial Sequence
  Description of Artificial Sequence: Synthetic oligonucleotide
gccuggagaugcagcuacc

SEQ ID NO: 1997453 - RNA, 19 nt, Artificial Sequence
  Description of Artificial Sequence: Synthetic oligonucleotide
gagcgccagcguccucgga

SEQ ID NO: 1997454 - RNA, 19 nt, Artificial Sequence
  Description of Artificial Sequence: Synthetic oligonucleotide
gcgauuccuguaguagucu

SEQ ID NO: 1997455 - RNA, 19 nt, Artificial Sequence
  Description of Artificial Sequence: Synthetic oligonucleotide
gggugacugugaacaucac

SEQ ID NO: 1997456 - RNA, 19 nt, Artificial Sequence
  Description of Artificial Sequence: Synthetic oligonucleotide
cagggucuuuucugacccu

SEQ ID NO: 1997457 - RNA, 19 nt, Artificial Sequence
  Description of Artificial Sequence: Synthetic oligonucleotide
gccccagucuacacccuca

SEQ ID NO: 1997458 - RNA, 19 nt, Artificial Sequence
  Description of Artificial Sequence: Synthetic oligonucleotide
cagcguccucggaaugucu

SEQ ID NO: 1997459 - RNA, 19 nt, Artificial Sequence
  Description of Artificial Sequence: Synthetic oligonucleotide
ccucggaaugucuggugcu

SEQ ID NO: 1997460 - RNA, 19 nt, Artificial Sequence
  Description of Artificial Sequence: Synthetic oligonucleotide
gucagcccuucaaaccuuu

SEQ ID NO: 1997461 - RNA, 19 nt, Artificial Sequence
  Description of Artificial Sequence: Synthetic oligonucleotide
ccgagcgauuccuguagua

SEQ ID NO: 1997462 - RNA, 19 nt, Artificial Sequence
  Description of Artificial Sequence: Synthetic oligonucleotide
gccagcguccucggaaugu

SEQ ID NO: 1997463 - RNA, 19 nt, Artificial Sequence
  Description of Artificial Sequence: Synthetic oligonucleotide
gccgcgcugcgucagcccu

SEQ ID NO: 1997464 - RNA, 19 nt, Artificial Sequence
  Description of Artificial Sequence: Synthetic oligonucleotide
gccgagcgauuccuguagu

SEQ ID NO: 1997465 - RNA, 19 nt, Artificial Sequence
  Description of Artificial Sequence: Synthetic oligonucleotide
gcaccggcuguaagauguc

SEQ ID NO: 1997466 - RNA, 19 nt, Artificial Sequence
  Description of Artificial Sequence: Synthetic oligonucleotide
ccguucccaauucuguuuu

SEQ ID NO: 1997467 - RNA, 19 nt, Artificial Sequence
  Description of Artificial Sequence: Synthetic oligonucleotide
ggauggagccgcgcugcgu

SEQ ID NO: 1997468 - RNA, 19 nt, Artificial Sequence
  Description of Artificial Sequence: Synthetic oligonucleotide
gcgccagcguccucggaau

SEQ ID NO: 1997469 - RNA, 19 nt, Artificial Sequence
  Description of Artificial Sequence: Synthetic oligonucleotide
gcacuucuacagagaaaau

SEQ ID NO: 1997470 - RNA, 19 nt, Artificial Sequence
  Description of Artificial Sequence: Synthetic oligonucleotide
ggaauggcugccggccuuu

SEQ ID NO: 1997471 - RNA, 19 nt, Artificial Sequence
  Description of Artificial Sequence: Synthetic oligonucleotide
ccgaccuguggaaguuucu

SEQ ID NO: 1997472 - RNA, 19 nt, Artificial Sequence
  Description of Artificial Sequence: Synthetic oligonucleotide
cgcugcgucagcccuucaa

SEQ ID NO: 1997473 - RNA, 19 nt, Artificial Sequence
  Description of Artificial Sequence: Synthetic oligonucleotide
cgccagcguccucggaaug

SEQ ID NO: 1997474 - RNA, 19 nt, Artificial Sequence
  Description of Artificial Sequence: Synthetic oligonucleotide
cgcgcugcgucagcccuuc

SEQ ID NO: 1997475 - RNA, 19 nt, Artificial Sequence
  Description of Artificial Sequence: Synthetic oligonucleotide
cggaaugucuggugcugau

SEQ ID NO: 1997476 - RNA, 19 nt, Artificial Sequence
  Description of Artificial Sequence: Synthetic oligonucleotide
cguccucggaaugucuggu

SEQ ID NO: 1997477 - RNA, 19 nt, Artificial Sequence
  Description of Artificial Sequence: Synthetic oligonucleotide
gcgcugcgucagcccuuca

SEQ ID NO: 1997478 - RNA, 19 nt, Artificial Sequence
  Description of Artificial Sequence: Synthetic oligonucleotide
ccgcgcugcgucagcccuu

SEQ ID NO: 1997479 - RNA, 19 nt, Artificial Sequence
  Description of Artificial Sequence: Synthetic oligonucleotide
aaaccaacguccuaggaac

SEQ ID NO: 1997480 - RNA, 19 nt, Artificial Sequence
  Description of Artificial Sequence: Synthetic oligonucleotide
aaacuuauugacaaugggc

SEQ ID NO: 1997481 - RNA, 19 nt, Artificial Sequence
  Description of Artificial Sequence: Synthetic oligonucleotide
aaacuuuaaacuucggcag

SEQ ID NO: 1997482 - RNA, 19 nt, Artificial Sequence
  Description of Artificial Sequence: Synthetic oligonucleotide
agaaacuuuaaacuucggc

SEQ ID NO: 1997483 - RNA, 19 nt, Artificial Sequence
  Description of Artificial Sequence: Synthetic oligonucleotide
agaauggggagucacaggc

SEQ ID NO: 1997484 - RNA, 19 nt, Artificial Sequence
  Description of Artificial Sequence: Synthetic oligonucleotide
gaaacuuuaaacuucggca

SEQ ID NO: 1997485 - RNA, 19 nt, Artificial Sequence
  Description of Artificial Sequence: Synthetic oligonucleotide
augaaaaggucccugagac

SEQ ID NO: 1997486 - RNA, 19 nt, Artificial Sequence
  Description of Artificial Sequence: Synthetic oligonucleotide
uuauuggucagguuggacg

SEQ ID NO: 1997487 - RNA, 19 nt, Artificial Sequence
  Description of Artificial Sequence: Synthetic oligonucleotide
ucaauuaauuguuucauac

SEQ ID NO: 1997488 - RNA, 19 nt, Artificial Sequence
  Description of Artificial Sequence: Synthetic oligonucleotide
aauuguuucauacacucaa

SEQ ID NO: 1997489 - RNA, 19 nt, Artificial Sequence
  Description of Artificial Sequence: Synthetic oligonucleotide
uaaacuuauugacaauggg

SEQ ID NO: 1997490 - RNA, 19 nt, Artificial Sequence
  Description of Artificial Sequence: Synthetic oligonucleotide
aagcauugagucccgaagc

SEQ ID NO: 1997491 - RNA, 19 nt, Artificial Sequence
  Description of Artificial Sequence: Synthetic oligonucleotide
gaaaucucguacuagauca

SEQ ID NO: 1997492 - RNA, 19 nt, Artificial Sequence
  Description of Artificial Sequence: Synthetic oligonucleotide
aaauaaaggcuuuauuggu

SEQ ID NO: 1997493 - RNA, 19 nt, Artificial Sequence
  Description of Artificial Sequence: Synthetic oligonucleotide
caaagguucacaaagcuac

SEQ ID NO: 1997494 - RNA, 19 nt, Artificial Sequence
  Description of Artificial Sequence: Synthetic oligonucleotide
aaaccugggagucaagauc

SEQ ID NO: 1997495 - RNA, 19 nt, Artificial Sequence
  Description of Artificial Sequence: Synthetic oligonucleotide
uauaucauccaaccuauga

SEQ ID NO: 1997496 - RNA, 19 nt, Artificial Sequence
  Description of Artificial Sequence: Synthetic oligonucleotide
aaaguugucguggaaucgc

SEQ ID NO: 1997497 - RNA, 19 nt, Artificial Sequence
  Description of Artificial Sequence: Synthetic oligonucleotide
ucguacuagaucaucaaag

SEQ ID NO: 1997498 - RNA, 19 nt, Artificial Sequence
  Description of Artificial Sequence: Synthetic oligonucleotide
acguccuaggaacaaaucc

SEQ ID NO: 1997499 - RNA, 19 nt, Artificial Sequence
  Description of Artificial Sequence: Synthetic oligonucleotide
uacccugucagauacagcc

SEQ ID NO: 1997500 - RNA, 19 nt, Artificial Sequence
  Description of Artificial Sequence: Synthetic oligonucleotide
aggucaaagaagcucauuc

SEQ ID NO: 1997501 - RNA, 19 nt, Artificial Sequence
  Description of Artificial Sequence: Synthetic oligonucleotide
aacuuuaaacuucggcagg

SEQ ID NO: 1997502 - RNA, 19 nt, Artificial Sequence
  Description of Artificial Sequence: Synthetic oligonucleotide
gaaaaggucccugagaccc

SEQ ID NO: 1997503 - RNA, 19 nt, Artificial Sequence
  Description of Artificial Sequence: Synthetic oligonucleotide
ucuuggaugacucuccaug

SEQ ID NO: 1997504 - RNA, 19 nt, Artificial Sequence
  Description of Artificial Sequence: Synthetic oligonucleotide
augagaaccacucgacugc

SEQ ID NO: 1997505 - RNA, 19 nt, Artificial Sequence
  Description of Artificial Sequence: Synthetic oligonucleotide
cuaaacuuauugacaaugg

SEQ ID NO: 1997506 - RNA, 19 nt, Artificial Sequence
  Description of Artificial Sequence: Synthetic oligonucleotide
uaagcauugagucccgaag

SEQ ID NO: 1997507 - RNA, 19 nt, Artificial Sequence
  Description of Artificial Sequence: Synthetic oligonucleotide
aauaaaggcuuuauugguc

SEQ ID NO: 1997508 - RNA, 19 nt, Artificial Sequence
  Description of Artificial Sequence: Synthetic oligonucleotide
aagaaguggaccgagaccu

SEQ ID NO: 1997509 - RNA, 19 nt, Artificial Sequence
  Description of Artificial Sequence: Synthetic oligonucleotide
aagcuaaacuuauugacaa

SEQ ID NO: 1997510 - RNA, 19 nt, Artificial Sequence
  Description of Artificial Sequence: Synthetic oligonucleotide
aaaaggucaaagaagcuca

SEQ ID NO: 1997511 - RNA, 19 nt, Artificial Sequence
  Description of Artificial Sequence: Synthetic oligonucleotide
auugaaaucucguacuaga

SEQ ID NO: 1997512 - RNA, 19 nt, Artificial Sequence
  Description of Artificial Sequence: Synthetic oligonucleotide
uuuggguugggguugaaga

SEQ ID NO: 1997513 - RNA, 19 nt, Artificial Sequence
  Description of Artificial Sequence: Synthetic oligonucleotide
gaaggcaagguccaggccc

SEQ ID NO: 1997514 - RNA, 19 nt, Artificial Sequence
  Description of Artificial Sequence: Synthetic oligonucleotide
ugaaggcucacaaagguuc

SEQ ID NO: 1997515 - RNA, 19 nt, Artificial Sequence
  Description of Artificial Sequence: Synthetic oligonucleotide
uacuuaagcauugaguccc

SEQ ID NO: 1997516 - RNA, 19 nt, Artificial Sequence
  Description of Artificial Sequence: Synthetic oligonucleotide
aagaagcucauuccuguag

SEQ ID NO: 1997517 - RNA, 19 nt, Artificial Sequence
  Description of Artificial Sequence: Synthetic oligonucleotide
ugaaguugaaaccgaauuc

SEQ ID NO: 1997518 - RNA, 19 nt, Artificial Sequence
  Description of Artificial Sequence: Synthetic oligonucleotide
accuauagcucccucgacc

SEQ ID NO: 1997519 - RNA, 19 nt, Artificial Sequence
  Description of Artificial Sequence: Synthetic oligonucleotide
ugaucuuggucacagagau

SEQ ID NO: 1997520 - RNA, 19 nt, Artificial Sequence
  Description of Artificial Sequence: Synthetic oligonucleotide
agagcugaagaucuuuccg

SEQ ID NO: 1997521 - RNA, 19 nt, Artificial Sequence
  Description of Artificial Sequence: Synthetic oligonucleotide
ugcccuagaaacuuuaaac

SEQ ID NO: 1997522 - RNA, 19 nt, Artificial Sequence
  Description of Artificial Sequence: Synthetic oligonucleotide
gaccugaaggcucacaaag

SEQ ID NO: 1997523 - RNA, 19 nt, Artificial Sequence
  Description of Artificial Sequence: Synthetic oligonucleotide
gguacuuaagcauugaguc

SEQ ID NO: 1997524 - RNA, 19 nt, Artificial Sequence
  Description of Artificial Sequence: Synthetic oligonucleotide
uguuucugacccaugaccu

SEQ ID NO: 1997525 - RNA, 19 nt, Artificial Sequence
  Description of Artificial Sequence: Synthetic oligonucleotide
accgaauuccuccggaggc

SEQ ID NO: 1997526 - RNA, 19 nt, Artificial Sequence
  Description of Artificial Sequence: Synthetic oligonucleotide
aaagcuaaacuuauugaca

SEQ ID NO: 1997527 - RNA, 19 nt, Artificial Sequence
  Description of Artificial Sequence: Synthetic oligonucleotide
auugacaaugggcaacagg

SEQ ID NO: 1997528 - RNA, 19 nt, Artificial Sequence
  Description of Artificial Sequence: Synthetic oligonucleotide
ugacccaugaccuggaagu

SEQ ID NO: 1997529 - RNA, 19 nt, Artificial Sequence
  Description of Artificial Sequence: Synthetic oligonucleotide
aauaggauuuggguugggg

SEQ ID NO: 1997530 - RNA, 19 nt, Artificial Sequence
  Description of Artificial Sequence: Synthetic oligonucleotide
aaaccuauagcucccucga

SEQ ID NO: 1997531 - RNA, 19 nt, Artificial Sequence
  Description of Artificial Sequence: Synthetic oligonucleotide
ucagauacagccaggguuc

SEQ ID NO: 1997532 - RNA, 19 nt, Artificial Sequence
  Description of Artificial Sequence: Synthetic oligonucleotide
ugggcugaaguugaaaccg

SEQ ID NO: 1997533 - RNA, 19 nt, Artificial Sequence
  Description of Artificial Sequence: Synthetic oligonucleotide
aaccgaauuccuccggagg

SEQ ID NO: 1997534 - RNA, 19 nt, Artificial Sequence
  Description of Artificial Sequence: Synthetic oligonucleotide
auaaaggcuuuauugguca

SEQ ID NO: 1997535 - RNA, 19 nt, Artificial Sequence
  Description of Artificial Sequence: Synthetic oligonucleotide
aauggggagucacaggcca

SEQ ID NO: 1997536 - RNA, 19 nt, Artificial Sequence
  Description of Artificial Sequence: Synthetic oligonucleotide
aaaaggggucauccagagc

SEQ ID NO: 1997537 - RNA, 19 nt, Artificial Sequence
  Description of Artificial Sequence: Synthetic oligonucleotide
agucacaggccauauauca

SEQ ID NO: 1997538 - RNA, 19 nt, Artificial Sequence
  Description of Artificial Sequence: Synthetic oligonucleotide
aaagauccuggguugguga

SEQ ID NO: 1997539 - RNA, 19 nt, Artificial Sequence
  Description of Artificial Sequence: Synthetic oligonucleotide
uuagugaucuuggucacag

SEQ ID NO: 1997540 - RNA, 19 nt, Artificial Sequence
  Description of Artificial Sequence: Synthetic oligonucleotide
acucaagacccuuaggaug

SEQ ID NO: 1997541 - RNA, 19 nt, Artificial Sequence
  Description of Artificial Sequence: Synthetic oligonucleotide
cauccaaccuaugaaaagg

SEQ ID NO: 1997542 - RNA, 19 nt, Artificial Sequence
  Description of Artificial Sequence: Synthetic oligonucleotide
caaaccuauagcucccucg

SEQ ID NO: 1997543 - RNA, 19 nt, Artificial Sequence
  Description of Artificial Sequence: Synthetic oligonucleotide
uugaaaccgaauuccuccg

SEQ ID NO: 1997544 - RNA, 19 nt, Artificial Sequence
  Description of Artificial Sequence: Synthetic oligonucleotide
ugaaaucucguacuagauc

SEQ ID NO: 1997545 - RNA, 19 nt, Artificial Sequence
  Description of Artificial Sequence: Synthetic oligonucleotide
gaaaaggggucauccagag

SEQ ID NO: 1997546 - RNA, 19 nt, Artificial Sequence
  Description of Artificial Sequence: Synthetic oligonucleotide
uaucauccaaccuaugaaa

SEQ ID NO: 1997547 - RNA, 19 nt, Artificial Sequence
  Description of Artificial Sequence: Synthetic oligonucleotide
cugaagaucuuuccgagac

SEQ ID NO: 1997548 - RNA, 19 nt, Artificial Sequence
  Description of Artificial Sequence: Synthetic oligonucleotide
aucuuuccgagacuggauc

SEQ ID NO: 1997549 - RNA, 19 nt, Artificial Sequence
  Description of Artificial Sequence: Synthetic oligonucleotide
agagaugcucuugaaauag

SEQ ID NO: 1997550 - RNA, 19 nt, Artificial Sequence
  Description of Artificial Sequence: Synthetic oligonucleotide
guggaaaggaccugaaggc

SEQ ID NO: 1997551 - RNA, 19 nt, Artificial Sequence
  Description of Artificial Sequence: Synthetic oligonucleotide
aaagguucacaaagcuacc

SEQ ID NO: 1997552 - RNA, 19 nt, Artificial Sequence
  Description of Artificial Sequence: Synthetic oligonucleotide
ucgacugccagcuugcgcu

SEQ ID NO: 1997553 - RNA, 19 nt, Artificial Sequence
  Description of Artificial Sequence: Synthetic oligonucleotide
ugaugggucacuguggucu

SEQ ID NO: 1997554 - RNA, 19 nt, Artificial Sequence
  Description of Artificial Sequence: Synthetic oligonucleotide
agcauugagucccgaagcg

SEQ ID NO: 1997555 - RNA, 19 nt, Artificial Sequence
  Description of Artificial Sequence: Synthetic oligonucleotide
aaaggcuuuauuggucagg

SEQ ID NO: 1997556 - RNA, 19 nt, Artificial Sequence
  Description of Artificial Sequence: Synthetic oligonucleotide
uugucguggaaucgcaugc

SEQ ID NO: 1997557 - RNA, 19 nt, Artificial Sequence
  Description of Artificial Sequence: Synthetic oligonucleotide
aaaccgaauuccuccggag

SEQ ID NO: 1997558 - RNA, 19 nt, Artificial Sequence
  Description of Artificial Sequence: Synthetic oligonucleotide
auaggauuuggguuggggu

SEQ ID NO: 1997559 - RNA, 19 nt, Artificial Sequence
  Description of Artificial Sequence: Synthetic oligonucleotide
agcucaauuaauuguuuca

SEQ ID NO: 1997560 - RNA, 19 nt, Artificial Sequence
  Description of Artificial Sequence: Synthetic oligonucleotide
gaagaugcuauugaaaucu

SEQ ID NO: 1997561 - RNA, 19 nt, Artificial Sequence
  Description of Artificial Sequence: Synthetic oligonucleotide
uauugaaaucucguacuag

SEQ ID NO: 1997562 - RNA, 19 nt, Artificial Sequence
  Description of Artificial Sequence: Synthetic oligonucleotide
acaaugggcaacaggaagg

SEQ ID NO: 1997563 - RNA, 19 nt, Artificial Sequence
  Description of Artificial Sequence: Synthetic oligonucleotide
agguucacaaagcuaccgg

SEQ ID NO: 1997564 - RNA, 19 nt, Artificial Sequence
  Description of Artificial Sequence: Synthetic oligonucleotide
ugaaaccgaauuccuccgg

SEQ ID NO: 1997565 - RNA, 19 nt, Artificial Sequence
  Description of Artificial Sequence: Synthetic oligonucleotide
gaagcgucugcccuucccg

SEQ ID NO: 1997566 - RNA, 19 nt, Artificial Sequence
  Description of Artificial Sequence: Synthetic oligonucleotide
uucacaaagcuaccgggac

SEQ ID NO: 1997567 - RNA, 19 nt, Artificial Sequence
  Description of Artificial Sequence: Synthetic oligonucleotide
uuggucacagagaugcucu

SEQ ID NO: 1997568 - RNA, 19 nt, Artificial Sequence
  Description of Artificial Sequence: Synthetic oligonucleotide
uaauuguuucauacacuca

SEQ ID NO: 1997569 - RNA, 19 nt, Artificial Sequence
  Description of Artificial Sequence: Synthetic oligonucleotide
aaucucguacuagaucauc

SEQ ID NO: 1997570 - RNA, 19 nt, Artificial Sequence
  Description of Artificial Sequence: Synthetic oligonucleotide
acgaaugacagacuggcaa

SEQ ID NO: 1997571 - RNA, 19 nt, Artificial Sequence
  Description of Artificial Sequence: Synthetic oligonucleotide
ucuagaauggggagucaca

SEQ ID NO: 1997572 - RNA, 19 nt, Artificial Sequence
  Description of Artificial Sequence: Synthetic oligonucleotide
aagcuaccgggaccgaaac

SEQ ID NO: 1997573 - RNA, 19 nt, Artificial Sequence
  Description of Artificial Sequence: Synthetic oligonucleotide
aagcgucugcccuucccgc

SEQ ID NO: 1997574 - RNA, 19 nt, Artificial Sequence
  Description of Artificial Sequence: Synthetic oligonucleotide
agagugggaaggcaagguc

SEQ ID NO: 1997575 - RNA, 19 nt, Artificial Sequence
  Description of Artificial Sequence: Synthetic oligonucleotide
gaaauaggauuuggguugg

SEQ ID NO: 1997576 - RNA, 19 nt, Artificial Sequence
  Description of Artificial Sequence: Synthetic oligonucleotide
agaaccacucgacugccag

SEQ ID NO: 1997577 - RNA, 19 nt, Artificial Sequence
  Description of Artificial Sequence: Synthetic oligonucleotide
uccuaggaacaaauccagg

SEQ ID NO: 1997578 - RNA, 19 nt, Artificial Sequence
  Description of Artificial Sequence: Synthetic oligonucleotide
guacuuaagcauugagucc

SEQ ID NO: 1997579 - RNA, 19 nt, Artificial Sequence
  Description of Artificial Sequence: Synthetic oligonucleotide
aaaagccccggaaaagguc

SEQ ID NO: 1997580 - RNA, 19 nt, Artificial Sequence
  Description of Artificial Sequence: Synthetic oligonucleotide
uuauugacaaugggcaaca

SEQ ID NO: 1997581 - RNA, 19 nt, Artificial Sequence
  Description of Artificial Sequence: Synthetic oligonucleotide
uacacucaagacccuuagg

SEQ ID NO: 1997582 - RNA, 19 nt, Artificial Sequence
  Description of Artificial Sequence: Synthetic oligonucleotide
uggguacuuaagcauugag

SEQ ID NO: 1997583 - RNA, 19 nt, Artificial Sequence
  Description of Artificial Sequence: Synthetic oligonucleotide
cacaaagcuaccgggaccg

SEQ ID NO: 1997584 - RNA, 19 nt, Artificial Sequence
  Description of Artificial Sequence: Synthetic oligonucleotide
uagaaacuuuaaacuucgg

SEQ ID NO: 1997585 - RNA, 19 nt, Artificial Sequence
  Description of Artificial Sequence: Synthetic oligonucleotide
ccaaccuaugaaaaggucc

SEQ ID NO: 1997586 - RNA, 19 nt, Artificial Sequence
  Description of Artificial Sequence: Synthetic oligonucleotide
accgaaaccaacguccuag

SEQ ID NO: 1997587 - RNA, 19 nt, Artificial Sequence
  Description of Artificial Sequence: Synthetic oligonucleotide
aggacaugagaaccacucg

SEQ ID NO: 1997588 - RNA, 19 nt, Artificial Sequence
  Description of Artificial Sequence: Synthetic oligonucleotide
ggguugaagaaguggaccg

SEQ ID NO: 1997589 - RNA, 19 nt, Artificial Sequence
  Description of Artificial Sequence: Synthetic oligonucleotide
gauacagccaggguucagc

SEQ ID NO: 1997590 - RNA, 19 nt, Artificial Sequence
  Description of Artificial Sequence: Synthetic oligonucleotide
uugaaaucucguacuagau

SEQ ID NO: 1997591 - RNA, 19 nt, Artificial Sequence
  Description of Artificial Sequence: Synthetic oligonucleotide
cuugaaauaggauuugggu

SEQ ID NO: 1997592 - RNA, 19 nt, Artificial Sequence
  Description of Artificial Sequence: Synthetic oligonucleotide
cuagaauggggagucacag

SEQ ID NO: 1997593 - RNA, 19 nt, Artificial Sequence
  Description of Artificial Sequence: Synthetic oligonucleotide
gcaaaagcucaauuaauug

SEQ ID NO: 1997594 - RNA, 19 nt, Artificial Sequence
  Description of Artificial Sequence: Synthetic oligonucleotide
guugggguugaagaagugg

SEQ ID NO: 1997595 - RNA, 19 nt, Artificial Sequence
  Description of Artificial Sequence: Synthetic oligonucleotide
caccagguguuucugaccc

SEQ ID NO: 1997596 - RNA, 19 nt, Artificial Sequence
  Description of Artificial Sequence: Synthetic oligonucleotide
ggcuuagugaucuugguca

SEQ ID NO: 1997597 - RNA, 19 nt, Artificial Sequence
  Description of Artificial Sequence: Synthetic oligonucleotide
aaguggaccgagaccuucc

SEQ ID NO: 1997598 - RNA, 19 nt, Artificial Sequence
  Description of Artificial Sequence: Synthetic oligonucleotide
aaagccccggaaaagguca

SEQ ID NO: 1997599 - RNA, 19 nt, Artificial Sequence
  Description of Artificial Sequence: Synthetic oligonucleotide
ucgcaugccuucuucuggg

SEQ ID NO: 1997600 - RNA, 19 nt, Artificial Sequence
  Description of Artificial Sequence: Synthetic oligonucleotide
ucaucccuccgaagaaggg

SEQ ID NO: 1997601 - RNA, 19 nt, Artificial Sequence
  Description of Artificial Sequence: Synthetic oligonucleotide
uucuggaacuguccugugc

SEQ ID NO: 1997602 - RNA, 19 nt, Artificial Sequence
  Description of Artificial Sequence: Synthetic oligonucleotide
gcuaaacuuauugacaaug

SEQ ID NO: 1997603 - RNA, 19 nt, Artificial Sequence
  Description of Artificial Sequence: Synthetic oligonucleotide
cugggcugaaguugaaacc

SEQ ID NO: 1997604 - RNA, 19 nt, Artificial Sequence
  Description of Artificial Sequence: Synthetic oligonucleotide
ucggcaggacaugagaacc

SEQ ID NO: 1997605 - RNA, 19 nt, Artificial Sequence
  Description of Artificial Sequence: Synthetic oligonucleotide
cucaagacccuuaggauga

SEQ ID NO: 1997606 - RNA, 19 nt, Artificial Sequence
  Description of Artificial Sequence: Synthetic oligonucleotide
uccacuaccccaucuggcu

SEQ ID NO: 1997607 - RNA, 19 nt, Artificial Sequence
  Description of Artificial Sequence: Synthetic oligonucleotide
uguggucucucuccguccc

SEQ ID NO: 1997608 - RNA, 19 nt, Artificial Sequence
  Description of Artificial Sequence: Synthetic oligonucleotide
uccgagguccacgaaagcc

SEQ ID NO: 1997609 - RNA, 19 nt, Artificial Sequence
  Description of Artificial Sequence: Synthetic oligonucleotide
accaucaaaccuauagcuc

SEQ ID NO: 1997610 - RNA, 19 nt, Artificial Sequence
  Description of Artificial Sequence: Synthetic oligonucleotide
aaaaggucccugagacccc

SEQ ID NO: 1997611 - RNA, 19 nt, Artificial Sequence
  Description of Artificial Sequence: Synthetic oligonucleotide
uuaagcauugagucccgaa

SEQ ID NO: 1997612 - RNA, 19 nt, Artificial Sequence
  Description of Artificial Sequence: Synthetic oligonucleotide
uaaaggcuuuauuggucag

SEQ ID NO: 1997613 - RNA, 19 nt, Artificial Sequence
  Description of Artificial Sequence: Synthetic oligonucleotide
agaugcuauugaaaucucg

SEQ ID NO: 1997614 - RNA, 19 nt, Artificial Sequence
  Description of Artificial Sequence: Synthetic oligonucleotide
ucucgagucaucccuccga

SEQ ID NO: 1997615 - RNA, 19 nt, Artificial Sequence
  Description of Artificial Sequence: Synthetic oligonucleotide
gaagggaucucuguggcuc

SEQ ID NO: 1997616 - RNA, 19 nt, Artificial Sequence
  Description of Artificial Sequence: Synthetic oligonucleotide
gguuggacgaaugacagac

SEQ ID NO: 1997617 - RNA, 19 nt, Artificial Sequence
  Description of Artificial Sequence: Synthetic oligonucleotide
agucccgaagcgucugccc

SEQ ID NO: 1997618 - RNA, 19 nt, Artificial Sequence
  Description of Artificial Sequence: Synthetic oligonucleotide
ggccauauaucauccaacc

SEQ ID NO: 1997619 - RNA, 19 nt, Artificial Sequence
  Description of Artificial Sequence: Synthetic oligonucleotide
ugagaaccaucaaaccuau

SEQ ID NO: 1997620 - RNA, 19 nt, Artificial Sequence
  Description of Artificial Sequence: Synthetic oligonucleotide
caaaguugucguggaaucg

SEQ ID NO: 1997621 - RNA, 19 nt, Artificial Sequence
  Description of Artificial Sequence: Synthetic oligonucleotide
uggcaaaagcucaauuaau

SEQ ID NO: 1997622 - RNA, 19 nt, Artificial Sequence
  Description of Artificial Sequence: Synthetic oligonucleotide
aagaugcuauugaaaucuc

SEQ ID NO: 1997623 - RNA, 19 nt, Artificial Sequence
  Description of Artificial Sequence: Synthetic oligonucleotide
ugaagaucuuuccgagacu

SEQ ID NO: 1997624 - RNA, 19 nt, Artificial Sequence
  Description of Artificial Sequence: Synthetic oligonucleotide
uaaacuucggcaggacaug

SEQ ID NO: 1997625 - RNA, 19 nt, Artificial Sequence
  Description of Artificial Sequence: Synthetic oligonucleotide
cucuugaaauaggauuugg

SEQ ID NO: 1997626 - RNA, 19 nt, Artificial Sequence
  Description of Artificial Sequence: Synthetic oligonucleotide
aacguccuaggaacaaauc

SEQ ID NO: 1997627 - RNA, 19 nt, Artificial Sequence
  Description of Artificial Sequence: Synthetic oligonucleotide
acuucggcaggacaugaga

SEQ ID NO: 1997628 - RNA, 19 nt, Artificial Sequence
  Description of Artificial Sequence: Synthetic oligonucleotide
cugagaaccaucaaaccua

SEQ ID NO: 1997629 - RNA, 19 nt, Artificial Sequence
  Description of Artificial Sequence: Synthetic oligonucleotide
aaguugaaaccgaauuccu

SEQ ID NO: 1997630 - RNA, 19 nt, Artificial Sequence
  Description of Artificial Sequence: Synthetic oligonucleotide
acaugagaaccacucgacu

SEQ ID NO: 1997631 - RNA, 19 nt, Artificial Sequence
  Description of Artificial Sequence: Synthetic oligonucleotide
ugggcaacaggaagggagu

SEQ ID NO: 1997632 - RNA, 19 nt, Artificial Sequence
  Description of Artificial Sequence: Synthetic oligonucleotide
gaaaccgaauuccuccgga

SEQ ID NO: 1997633 - RNA, 19 nt, Artificial Sequence
  Description of Artificial Sequence: Synthetic oligonucleotide
aaagaagcucauuccugua

SEQ ID NO: 1997634 - RNA, 19 nt, Artificial Sequence
  Description of Artificial Sequence: Synthetic oligonucleotide
aagcucauuccuguaggug

SEQ ID NO: 1997635 - RNA, 19 nt, Artificial Sequence
  Description of Artificial Sequence: Synthetic oligonucleotide
gacaugagaaccacucgac

SEQ ID NO: 1997636 - RNA, 19 nt, Artificial Sequence
  Description of Artificial Sequence: Synthetic oligonucleotide
ugggagucaagaucauugu

SEQ ID NO: 1997637 - RNA, 19 nt, Artificial Sequence
  Description of Artificial Sequence: Synthetic oligonucleotide
gaugcuauugaaaucucgu

SEQ ID NO: 1997638 - RNA, 19 nt, Artificial Sequence
  Description of Artificial Sequence: Synthetic oligonucleotide
uauagcucccucgacccca

SEQ ID NO: 1997639 - RNA, 19 nt, Artificial Sequence
  Description of Artificial Sequence: Synthetic oligonucleotide
acuagaucaucaaagccaa

SEQ ID NO: 1997640 - RNA, 19 nt, Artificial Sequence
  Description of Artificial Sequence: Synthetic oligonucleotide
uucggcaggacaugagaac

SEQ ID NO: 1997641 - RNA, 19 nt, Artificial Sequence
  Description of Artificial Sequence: Synthetic oligonucleotide
gagaugcucuugaaauagg

SEQ ID NO: 1997642 - RNA, 19 nt, Artificial Sequence
  Description of Artificial Sequence: Synthetic oligonucleotide
aggccauauaucauccaac

SEQ ID NO: 1997643 - RNA, 19 nt, Artificial Sequence
  Description of Artificial Sequence: Synthetic oligonucleotide
cuggcaaaagcucaauuaa

SEQ ID NO: 1997644 - RNA, 19 nt, Artificial Sequence
  Description of Artificial Sequence: Synthetic oligonucleotide
agcuaccgggaccgaaacc

SEQ ID NO: 1997645 - RNA, 19 nt, Artificial Sequence
  Description of Artificial Sequence: Synthetic oligonucleotide
ccggaaaaggucaaagaag

SEQ ID NO: 1997646 - RNA, 19 nt, Artificial Sequence
  Description of Artificial Sequence: Synthetic oligonucleotide
aauuccuccggaggcugag

SEQ ID NO: 1997647 - RNA, 19 nt, Artificial Sequence
  Description of Artificial Sequence: Synthetic oligonucleotide
uguggcuccgagguccacg

SEQ ID NO: 1997648 - RNA, 19 nt, Artificial Sequence
  Description of Artificial Sequence: Synthetic oligonucleotide
cuggcucuagaauggggag

SEQ ID NO: 1997649 - RNA, 19 nt, Artificial Sequence
  Description of Artificial Sequence: Synthetic oligonucleotide
cguacuagaucaucaaagc

SEQ ID NO: 1997650 - RNA, 19 nt, Artificial Sequence
  Description of Artificial Sequence: Synthetic oligonucleotide
gggaccgaaaccaacgucc

SEQ ID NO: 1997651 - RNA, 19 nt, Artificial Sequence
  Description of Artificial Sequence: Synthetic oligonucleotide
uccuguaggugcccuagaa

SEQ ID NO: 1997652 - RNA, 19 nt, Artificial Sequence
  Description of Artificial Sequence: Synthetic oligonucleotide
ccuauagcucccucgaccc

SEQ ID NO: 1997653 - RNA, 19 nt, Artificial Sequence
  Description of Artificial Sequence: Synthetic oligonucleotide
cacagugcggugcuccucc

SEQ ID NO: 1997654 - RNA, 19 nt, Artificial Sequence
  Description of Artificial Sequence: Synthetic oligonucleotide
aaauaggauuuggguuggg

SEQ ID NO: 1997655 - RNA, 19 nt, Artificial Sequence
  Description of Artificial Sequence: Synthetic oligonucleotide
aaagcucaauuaauuguuu

SEQ ID NO: 1997656 - RNA, 19 nt, Artificial Sequence
  Description of Artificial Sequence: Synthetic oligonucleotide
accgagaccuuccugggaa

SEQ ID NO: 1997657 - RNA, 19 nt, Artificial Sequence
  Description of Artificial Sequence: Synthetic oligonucleotide
aaagcuaccgggaccgaaa

SEQ ID NO: 1997658 - RNA, 19 nt, Artificial Sequence
  Description of Artificial Sequence: Synthetic oligonucleotide
ucaucucgagucaucccuc

SEQ ID NO: 1997659 - RNA, 19 nt, Artificial Sequence
  Description of Artificial Sequence: Synthetic oligonucleotide
agaugcucuugaaauagga

SEQ ID NO: 1997660 - RNA, 19 nt, Artificial Sequence
  Description of Artificial Sequence: Synthetic oligonucleotide
gacccuuaggaugacacaa

SEQ ID NO: 1997661 - RNA, 19 nt, Artificial Sequence
  Description of Artificial Sequence: Synthetic oligonucleotide
caugaccuggaaguucagg

SEQ ID NO: 1997662 - RNA, 19 nt, Artificial Sequence
  Description of Artificial Sequence: Synthetic oligonucleotide
ugacugucuggguacuuaa

SEQ ID NO: 1997663 - RNA, 19 nt, Artificial Sequence
  Description of Artificial Sequence: Synthetic oligonucleotide
augcuauugaaaucucgua

SEQ ID NO: 1997664 - RNA, 19 nt, Artificial Sequence
  Description of Artificial Sequence: Synthetic oligonucleotide
accgggaccgaaaccaacg

SEQ ID NO: 1997665 - RNA, 19 nt, Artificial Sequence
  Description of Artificial Sequence: Synthetic oligonucleotide
caaucuggagcugguuugg

SEQ ID NO: 1997666 - RNA, 19 nt, Artificial Sequence
  Description of Artificial Sequence: Synthetic oligonucleotide
aucucgagucaucccuccg

SEQ ID NO: 1997667 - RNA, 19 nt, Artificial Sequence
  Description of Artificial Sequence: Synthetic oligonucleotide
uggaucacuucuggaacug

SEQ ID NO: 1997668 - RNA, 19 nt, Artificial Sequence
  Description of Artificial Sequence: Synthetic oligonucleotide
cugacccaugaccuggaag

SEQ ID NO: 1997669 - RNA, 19 nt, Artificial Sequence
  Description of Artificial Sequence: Synthetic oligonucleotide
gaaaggaccugaaggcuca

SEQ ID NO: 1997670 - RNA, 19 nt, Artificial Sequence
  Description of Artificial Sequence: Synthetic oligonucleotide
ucaagaucauuguccucuc

SEQ ID NO: 1997671 - RNA, 19 nt, Artificial Sequence
  Description of Artificial Sequence: Synthetic oligonucleotide
ggacaugagaaccacucga

SEQ ID NO: 1997672 - RNA, 19 nt, Artificial Sequence
  Description of Artificial Sequence: Synthetic oligonucleotide
uggucagguuggacgaaug

SEQ ID NO: 1997673 - RNA, 19 nt, Artificial Sequence
  Description of Artificial Sequence: Synthetic oligonucleotide
aucucguacuagaucauca

SEQ ID NO: 1997674 - RNA, 19 nt, Artificial Sequence
  Description of Artificial Sequence: Synthetic oligonucleotide
gaaccacucgacugccagc

SEQ ID NO: 1997675 - RNA, 19 nt, Artificial Sequence
  Description of Artificial Sequence: Synthetic oligonucleotide
accccaucuggcuuaguga

SEQ ID NO: 1997676 - RNA, 19 nt, Artificial Sequence
  Description of Artificial Sequence: Synthetic oligonucleotide
caucucgagucaucccucc

SEQ ID NO: 1997677 - RNA, 19 nt, Artificial Sequence
  Description of Artificial Sequence: Synthetic oligonucleotide
gucagauacagccaggguu

SEQ ID NO: 1997678 - RNA, 19 nt, Artificial Sequence
  Description of Artificial Sequence: Synthetic oligonucleotide
gucagguuggacgaaugac

SEQ ID NO: 1997679 - RNA, 19 nt, Artificial Sequence
  Description of Artificial Sequence: Synthetic oligonucleotide
ucucucuccgucccucacu

SEQ ID NO: 1997680 - RNA, 19 nt, Artificial Sequence
  Description of Artificial Sequence: Synthetic oligonucleotide
cacucgacugccagcuugc

SEQ ID NO: 1997681 - RNA, 19 nt, Artificial Sequence
  Description of Artificial Sequence: Synthetic oligonucleotide
caaagaagcucauuccugu

SEQ ID NO: 1997682 - RNA, 19 nt, Artificial Sequence
  Description of Artificial Sequence: Synthetic oligonucleotide
ugucguggaaucgcaugcc

SEQ ID NO: 1997683 - RNA, 19 nt, Artificial Sequence
  Description of Artificial Sequence: Synthetic oligonucleotide
guuggugacugucugggua

SEQ ID NO: 1997684 - RNA, 19 nt, Artificial Sequence
  Description of Artificial Sequence: Synthetic oligonucleotide
uucauacacucaagacccu

SEQ ID NO: 1997685 - RNA, 19 nt, Artificial Sequence
  Description of Artificial Sequence: Synthetic oligonucleotide
ucucaccagguguuucuga

SEQ ID NO: 1997686 - RNA, 19 nt, Artificial Sequence
  Description of Artificial Sequence: Synthetic oligonucleotide
gcuugcgcuacccugucag

SEQ ID NO: 1997687 - RNA, 19 nt, Artificial Sequence
  Description of Artificial Sequence: Synthetic oligonucleotide
agaccuuccugggaaaccu

SEQ ID NO: 1997688 - RNA, 19 nt, Artificial Sequence
  Description of Artificial Sequence: Synthetic oligonucleotide
ccgagguccacgaaagccg

SEQ ID NO: 1997689 - RNA, 19 nt, Artificial Sequence
  Description of Artificial Sequence: Synthetic oligonucleotide
agcgucugcccuucccgcg

SEQ ID NO: 1997690 - RNA, 19 nt, Artificial Sequence
  Description of Artificial Sequence: Synthetic oligonucleotide
gaauggggagucacaggcc

SEQ ID NO: 1997691 - RNA, 19 nt, Artificial Sequence
  Description of Artificial Sequence: Synthetic oligonucleotide
aaaggaccugaaggcucac

SEQ ID NO: 1997692 - RNA, 19 nt, Artificial Sequence
  Description of Artificial Sequence: Synthetic oligonucleotide
cucuagaauggggagucac

SEQ ID NO: 1997693 - RNA, 19 nt, Artificial Sequence
  Description of Artificial Sequence: Synthetic oligonucleotide
uuccuccggaggcugagaa

SEQ ID NO: 1997694 - RNA, 19 nt, Artificial Sequence
  Description of Artificial Sequence: Synthetic oligonucleotide
ccauauaucauccaaccua

SEQ ID NO: 1997695 - RNA, 19 nt, Artificial Sequence
  Description of Artificial Sequence: Synthetic oligonucleotide
aucauccaaccuaugaaaa

SEQ ID NO: 1997696 - RNA, 19 nt, Artificial Sequence
  Description of Artificial Sequence: Synthetic oligonucleotide
agacccuuaggaugacaca

SEQ ID NO: 1997697 - RNA, 19 nt, Artificial Sequence
  Description of Artificial Sequence: Synthetic oligonucleotide
aaguugucguggaaucgca

SEQ ID NO: 1997698 - RNA, 19 nt, Artificial Sequence
  Description of Artificial Sequence: Synthetic oligonucleotide
uauugacaaugggcaacag

SEQ ID NO: 1997699 - RNA, 19 nt, Artificial Sequence
  Description of Artificial Sequence: Synthetic oligonucleotide
agcuaaacuuauugacaau

SEQ ID NO: 1997700 - RNA, 19 nt, Artificial Sequence
  Description of Artificial Sequence: Synthetic oligonucleotide
cuucccgcggucucucacc

SEQ ID NO: 1997701 - RNA, 19 nt, Artificial Sequence
  Description of Artificial Sequence: Synthetic oligonucleotide
acugucuaccacagugcgg

SEQ ID NO: 1997702 - RNA, 19 nt, Artificial Sequence
  Description of Artificial Sequence: Synthetic oligonucleotide
ucgagucaucccuccgaag

SEQ ID NO: 1997703 - RNA, 19 nt, Artificial Sequence
  Description of Artificial Sequence: Synthetic oligonucleotide
uccgagacuggaucacuuc

SEQ ID NO: 1997704 - RNA, 19 nt, Artificial Sequence
  Description of Artificial Sequence: Synthetic oligonucleotide
cucuccgucccucacuguc

SEQ ID NO: 1997705 - RNA, 19 nt, Artificial Sequence
  Description of Artificial Sequence: Synthetic oligonucleotide
aucuggcuuagugaucuug

SEQ ID NO: 1997706 - RNA, 19 nt, Artificial Sequence
  Description of Artificial Sequence: Synthetic oligonucleotide
cugaaguugaaaccgaauu

SEQ ID NO: 1997707 - RNA, 19 nt, Artificial Sequence
  Description of Artificial Sequence: Synthetic oligonucleotide
acuuaagcauugagucccg

SEQ ID NO: 1997708 - RNA, 19 nt, Artificial Sequence
  Description of Artificial Sequence: Synthetic oligonucleotide
acccaugaccuggaaguuc

SEQ ID NO: 1997709 - RNA, 19 nt, Artificial Sequence
  Description of Artificial Sequence: Synthetic oligonucleotide
aucucacugaagaugcuau

SEQ ID NO: 1997710 - RNA, 19 nt, Artificial Sequence
  Description of Artificial Sequence: Synthetic oligonucleotide
cuguggucucucuccgucc

SEQ ID NO: 1997711 - RNA, 19 nt, Artificial Sequence
  Description of Artificial Sequence: Synthetic oligonucleotide
aaaggucaaagaagcucau

SEQ ID NO: 1997712 - RNA, 19 nt, Artificial Sequence
  Description of Artificial Sequence: Synthetic oligonucleotide
cuauagcucccucgacccc

SEQ ID NO: 1997713 - RNA, 19 nt, Artificial Sequence
  Description of Artificial Sequence: Synthetic oligonucleotide
gaaguggaccgagaccuuc

SEQ ID NO: 1997714 - RNA, 19 nt, Artificial Sequence
  Description of Artificial Sequence: Synthetic oligonucleotide
uucccgcggucucucacca

SEQ ID NO: 1997715 - RNA, 19 nt, Artificial Sequence
  Description of Artificial Sequence: Synthetic oligonucleotide
gagucaucccuccgaagaa

SEQ ID NO: 1997716 - RNA, 19 nt, Artificial Sequence
  Description of Artificial Sequence: Synthetic oligonucleotide
cuacccugucagauacagc

SEQ ID NO: 1997717 - RNA, 19 nt, Artificial Sequence
  Description of Artificial Sequence: Synthetic oligonucleotide
cuucggcaggacaugagaa

SEQ ID NO: 1997718 - RNA, 19 nt, Artificial Sequence
  Description of Artificial Sequence: Synthetic oligonucleotide
gcuacccugucagauacag

SEQ ID NO: 1997719 - RNA, 19 nt, Artificial Sequence
  Description of Artificial Sequence: Synthetic oligonucleotide
cacaaagguucacaaagcu

SEQ ID NO: 1997720 - RNA, 19 nt, Artificial Sequence
  Description of Artificial Sequence: Synthetic oligonucleotide
ucauacacucaagacccuu

SEQ ID NO: 1997721 - RNA, 19 nt, Artificial Sequence
  Description of Artificial Sequence: Synthetic oligonucleotide
uuccgagacuggaucacuu

SEQ ID NO: 1997722 - RNA, 19 nt, Artificial Sequence
  Description of Artificial Sequence: Synthetic oligonucleotide
aguggaccgagaccuuccu

SEQ ID NO: 1997723 - RNA, 19 nt, Artificial Sequence
  Description of Artificial Sequence: Synthetic oligonucleotide
cucgacugccagcuugcgc

SEQ ID NO: 1997724 - RNA, 19 nt, Artificial Sequence
  Description of Artificial Sequence: Synthetic oligonucleotide
uaccgggaccgaaaccaac

SEQ ID NO: 1997725 - RNA, 19 nt, Artificial Sequence
  Description of Artificial Sequence: Synthetic oligonucleotide
gcuaccgggaccgaaacca

SEQ ID NO: 1997726 - RNA, 19 nt, Artificial Sequence
  Description of Artificial Sequence: Synthetic oligonucleotide
ccuccggaggcugagaacc

SEQ ID NO: 1997727 - RNA, 19 nt, Artificial Sequence
  Description of Artificial Sequence: Synthetic oligonucleotide
cauacacucaagacccuua

SEQ ID NO: 1997728 - RNA, 19 nt, Artificial Sequence
  Description of Artificial Sequence: Synthetic oligonucleotide
gaagcucauuccuguaggu

SEQ ID NO: 1997729 - RNA, 19 nt, Artificial Sequence
  Description of Artificial Sequence: Synthetic oligonucleotide
uuccuguaggugcccuaga

SEQ ID NO: 1997730 - RNA, 19 nt, Artificial Sequence
  Description of Artificial Sequence: Synthetic oligonucleotide
ugcgcuacccugucagaua

SEQ ID NO: 1997731 - RNA, 19 nt, Artificial Sequence
  Description of Artificial Sequence: Synthetic oligonucleotide
agguuggacgaaugacaga

SEQ ID NO: 1997732 - RNA, 19 nt, Artificial Sequence
  Description of Artificial Sequence: Synthetic oligonucleotide
cucccucgaccccacgugc

SEQ ID NO: 1997733 - RNA, 19 nt, Artificial Sequence
  Description of Artificial Sequence: Synthetic oligonucleotide
aaccaacguccuaggaaca

SEQ ID NO: 1997734 - RNA, 19 nt, Artificial Sequence
  Description of Artificial Sequence: Synthetic oligonucleotide
auugagucccgaagcgucu

SEQ ID NO: 1997735 - RNA, 19 nt, Artificial Sequence
  Description of Artificial Sequence: Synthetic oligonucleotide
ggaccgagaccuuccuggg

SEQ ID NO: 1997736 - RNA, 19 nt, Artificial Sequence
  Description of Artificial Sequence: Synthetic oligonucleotide
uagugaucuuggucacaga

SEQ ID NO: 1997737 - RNA, 19 nt, Artificial Sequence
  Description of Artificial Sequence: Synthetic oligonucleotide
agcucccucgaccccacgu

SEQ ID NO: 1997738 - RNA, 19 nt, Artificial Sequence
  Description of Artificial Sequence: Synthetic oligonucleotide
gagucacaggccauauauc

SEQ ID NO: 1997739 - RNA, 19 nt, Artificial Sequence
  Description of Artificial Sequence: Synthetic oligonucleotide
uugcgcuacccugucagau

SEQ ID NO: 1997740 - RNA, 19 nt, Artificial Sequence
  Description of Artificial Sequence: Synthetic oligonucleotide
auauaucauccaaccuaug

SEQ ID NO: 1997741 - RNA, 19 nt, Artificial Sequence
  Description of Artificial Sequence: Synthetic oligonucleotide
ucugacccaugaccuggaa

SEQ ID NO: 1997742 - RNA, 19 nt, Artificial Sequence
  Description of Artificial Sequence: Synthetic oligonucleotide
gaccccacgugccucuguc

SEQ ID NO: 1997743 - RNA, 19 nt, Artificial Sequence
  Description of Artificial Sequence: Synthetic oligonucleotide
gcuuagugaucuuggucac

SEQ ID NO: 1997744 - RNA, 19 nt, Artificial Sequence
  Description of Artificial Sequence: Synthetic oligonucleotide
cagagaugcucuugaaaua

SEQ ID NO: 1997745 - RNA, 19 nt, Artificial Sequence
  Description of Artificial Sequence: Synthetic oligonucleotide
uuggucagguuggacgaau

SEQ ID NO: 1997746 - RNA, 19 nt, Artificial Sequence
  Description of Artificial Sequence: Synthetic oligonucleotide
uccuccggaggcugagaac

SEQ ID NO: 1997747 - RNA, 19 nt, Artificial Sequence
  Description of Artificial Sequence: Synthetic oligonucleotide
aucccuccgaagaagggau

SEQ ID NO: 1997748 - RNA, 19 nt, Artificial Sequence
  Description of Artificial Sequence: Synthetic oligonucleotide
caucccuccgaagaaggga

SEQ ID NO: 1997749 - RNA, 19 nt, Artificial Sequence
  Description of Artificial Sequence: Synthetic oligonucleotide
gcuccgagguccacgaaag

SEQ ID NO: 1997750 - RNA, 19 nt, Artificial Sequence
  Description of Artificial Sequence: Synthetic oligonucleotide
gauucaggucuuggaugac

SEQ ID NO: 1997751 - RNA, 19 nt, Artificial Sequence
  Description of Artificial Sequence: Synthetic oligonucleotide
ggcucuagaauggggaguc

SEQ ID NO: 1997752 - RNA, 19 nt, Artificial Sequence
  Description of Artificial Sequence: Synthetic oligonucleotide
auagcucccucgaccccac

SEQ ID NO: 1997753 - RNA, 19 nt, Artificial Sequence
  Description of Artificial Sequence: Synthetic oligonucleotide
agauacagccaggguucag

SEQ ID NO: 1997754 - RNA, 19 nt, Artificial Sequence
  Description of Artificial Sequence: Synthetic oligonucleotide
gacgaaugacagacuggca

SEQ ID NO: 1997755 - RNA, 19 nt, Artificial Sequence
  Description of Artificial Sequence: Synthetic oligonucleotide
ggucagguuggacgaauga

SEQ ID NO: 1997756 - RNA, 19 nt, Artificial Sequence
  Description of Artificial Sequence: Synthetic oligonucleotide
guggcuccgagguccacga

SEQ ID NO: 1997757 - RNA, 19 nt, Artificial Sequence
  Description of Artificial Sequence: Synthetic oligonucleotide
cccggaaaaggucaaagaa

SEQ ID NO: 1997758 - RNA, 19 nt, Artificial Sequence
  Description of Artificial Sequence: Synthetic oligonucleotide
ggcucacaaagguucacaa

SEQ ID NO: 1997759 - RNA, 19 nt, Artificial Sequence
  Description of Artificial Sequence: Synthetic oligonucleotide
acuaccccaucuggcuuag

SEQ ID NO: 1997760 - RNA, 19 nt, Artificial Sequence
  Description of Artificial Sequence: Synthetic oligonucleotide
cuuuauuggucagguugga

SEQ ID NO: 1997761 - RNA, 19 nt, Artificial Sequence
  Description of Artificial Sequence: Synthetic oligonucleotide
ccgaaaccaacguccuagg

SEQ ID NO: 1997762 - RNA, 19 nt, Artificial Sequence
  Description of Artificial Sequence: Synthetic oligonucleotide
gcgcuacccugucagauac

SEQ ID NO: 1997763 - RNA, 19 nt, Artificial Sequence
  Description of Artificial Sequence: Synthetic oligonucleotide
agguccacgaaagccgaaa

SEQ ID NO: 1997764 - RNA, 19 nt, Artificial Sequence
  Description of Artificial Sequence: Synthetic oligonucleotide
cuccgagguccacgaaagc

SEQ ID NO: 1997765 - RNA, 19 nt, Artificial Sequence
  Description of Artificial Sequence: Synthetic oligonucleotide
accaacguccuaggaacaa

SEQ ID NO: 1997766 - RNA, 19 nt, Artificial Sequence
  Description of Artificial Sequence: Synthetic oligonucleotide
cuggaucacuucuggaacu

SEQ ID NO: 1997767 - RNA, 19 nt, Artificial Sequence
  Description of Artificial Sequence: Synthetic oligonucleotide
gaccgagaccuuccuggga

SEQ ID NO: 1997768 - RNA, 19 nt, Artificial Sequence
  Description of Artificial Sequence: Synthetic oligonucleotide
guccucucuggcucuagaa

SEQ ID NO: 1997769 - RNA, 19 nt, Artificial Sequence
  Description of Artificial Sequence: Synthetic oligonucleotide
uuguccucucuggcucuag

SEQ ID NO: 1997770 - RNA, 19 nt, Artificial Sequence
  Description of Artificial Sequence: Synthetic oligonucleotide
ucccuccgaagaagggauc

SEQ ID NO: 1997771 - RNA, 19 nt, Artificial Sequence
  Description of Artificial Sequence: Synthetic oligonucleotide
acucgacugccagcuugcg

SEQ ID NO: 1997772 - RNA, 19 nt, Artificial Sequence
  Description of Artificial Sequence: Synthetic oligonucleotide
cccgcggucucucaccagg

SEQ ID NO: 1997773 - RNA, 19 nt, Artificial Sequence
  Description of Artificial Sequence: Synthetic oligonucleotide
cucgagucaucccuccgaa

SEQ ID NO: 1997774 - RNA, 19 nt, Artificial Sequence
  Description of Artificial Sequence: Synthetic oligonucleotide
ucaagacccuuaggaugac

SEQ ID NO: 1997775 - RNA, 19 nt, Artificial Sequence
  Description of Artificial Sequence: Synthetic oligonucleotide
cguggaaucgcaugccuuc

SEQ ID NO: 1997776 - RNA, 19 nt, Artificial Sequence
  Description of Artificial Sequence: Synthetic oligonucleotide
ggucacagagaugcucuug

SEQ ID NO: 1997777 - RNA, 19 nt, Artificial Sequence
  Description of Artificial Sequence: Synthetic oligonucleotide
uggucacagagaugcucuu

SEQ ID NO: 1997778 - RNA, 19 nt, Artificial Sequence
  Description of Artificial Sequence: Synthetic oligonucleotide
aggauggaaaaggggucau

SEQ ID NO: 1997779 - RNA, 19 nt, Artificial Sequence
  Description of Artificial Sequence: Synthetic oligonucleotide
uggugacugucuggguacu

SEQ ID NO: 1997780 - RNA, 19 nt, Artificial Sequence
  Description of Artificial Sequence: Synthetic oligonucleotide
caacguccuaggaacaaau

SEQ ID NO: 1997781 - RNA, 19 nt, Artificial Sequence
  Description of Artificial Sequence: Synthetic oligonucleotide
ggcaaaagcucaauuaauu

SEQ ID NO: 1997782 - RNA, 19 nt, Artificial Sequence
  Description of Artificial Sequence: Synthetic oligonucleotide
cuugcgcuacccugucaga

SEQ ID NO: 1997783 - RNA, 19 nt, Artificial Sequence
  Description of Artificial Sequence: Synthetic oligonucleotide
agcuugcgcuacccuguca

SEQ ID NO: 1997784 - RNA, 19 nt, Artificial Sequence
  Description of Artificial Sequence: Synthetic oligonucleotide
aguugucguggaaucgcau

SEQ ID NO: 1997785 - RNA, 19 nt, Artificial Sequence
  Description of Artificial Sequence: Synthetic oligonucleotide
guaggugcccuagaaacuu

SEQ ID NO: 1997786 - RNA, 19 nt, Artificial Sequence
  Description of Artificial Sequence: Synthetic oligonucleotide
gccccggaaaaggucaaag

SEQ ID NO: 1997787 - RNA, 19 nt, Artificial Sequence
  Description of Artificial Sequence: Synthetic oligonucleotide
gcgucugcccuucccgcgg

SEQ ID NO: 1997788 - RNA, 19 nt, Artificial Sequence
  Description of Artificial Sequence: Synthetic oligonucleotide
ucucuccgucccucacugu

SEQ ID NO: 1997789 - RNA, 19 nt, Artificial Sequence
  Description of Artificial Sequence: Synthetic oligonucleotide
cacuaccccaucuggcuua

SEQ ID NO: 1997790 - RNA, 19 nt, Artificial Sequence
  Description of Artificial Sequence: Synthetic oligonucleotide
auuggucagguuggacgaa

SEQ ID NO: 1997791 - RNA, 19 nt, Artificial Sequence
  Description of Artificial Sequence: Synthetic oligonucleotide
acccuuaggaugacacaaa

SEQ ID NO: 1997792 - RNA, 19 nt, Artificial Sequence
  Description of Artificial Sequence: Synthetic oligonucleotide
ggaacaaauccaggaugga

SEQ ID NO: 1997793 - RNA, 19 nt, Artificial Sequence
  Description of Artificial Sequence: Synthetic oligonucleotide
gguccacgaaagccgaaaa

SEQ ID NO: 1997794 - RNA, 19 nt, Artificial Sequence
  Description of Artificial Sequence: Synthetic oligonucleotide
cuuaagcauugagucccga

SEQ ID NO: 1997795 - RNA, 19 nt, Artificial Sequence
  Description of Artificial Sequence: Synthetic oligonucleotide
gcuuccugaugggucacug

SEQ ID NO: 1997796 - RNA, 19 nt, Artificial Sequence
  Description of Artificial Sequence: Synthetic oligonucleotide
ggcuccgagguccacgaaa

SEQ ID NO: 1997797 - RNA, 19 nt, Artificial Sequence
  Description of Artificial Sequence: Synthetic oligonucleotide
acagugcggugcuccucca

SEQ ID NO: 1997798 - RNA, 19 nt, Artificial Sequence
  Description of Artificial Sequence: Synthetic oligonucleotide
ugcuuccugaugggucacu

SEQ ID NO: 1997799 - RNA, 19 nt, Artificial Sequence
  Description of Artificial Sequence: Synthetic oligonucleotide
gccauauaucauccaaccu

SEQ ID NO: 1997800 - RNA, 19 nt, Artificial Sequence
  Description of Artificial Sequence: Synthetic oligonucleotide
cuggguacuuaagcauuga

SEQ ID NO: 1997801 - RNA, 19 nt, Artificial Sequence
  Description of Artificial Sequence: Synthetic oligonucleotide
gagaaccacucgacugcca

SEQ ID NO: 1997802 - RNA, 19 nt, Artificial Sequence
  Description of Artificial Sequence: Synthetic oligonucleotide
ccugaaggcucacaaaggu

SEQ ID NO: 1997803 - RNA, 19 nt, Artificial Sequence
  Description of Artificial Sequence: Synthetic oligonucleotide
gaccgaaaccaacguccua

SEQ ID NO: 1997804 - RNA, 19 nt, Artificial Sequence
  Description of Artificial Sequence: Synthetic oligonucleotide
cugaaggcucacaaagguu

SEQ ID NO: 1997805 - RNA, 19 nt, Artificial Sequence
  Description of Artificial Sequence: Synthetic oligonucleotide
uccgucccucacugucuac

SEQ ID NO: 1997806 - RNA, 19 nt, Artificial Sequence
  Description of Artificial Sequence: Synthetic oligonucleotide
ucccgcggucucucaccag

SEQ ID NO: 1997807 - RNA, 19 nt, Artificial Sequence
  Description of Artificial Sequence: Synthetic oligonucleotide
caaagcuaccgggaccgaa

SEQ ID NO: 1997808 - RNA, 19 nt, Artificial Sequence
  Description of Artificial Sequence: Synthetic oligonucleotide
cuaccgggaccgaaaccaa

SEQ ID NO: 1997809 - RNA, 19 nt, Artificial Sequence
  Description of Artificial Sequence: Synthetic oligonucleotide
gcggugcuccuccacuacc

SEQ ID NO: 1997810 - RNA, 19 nt, Artificial Sequence
  Description of Artificial Sequence: Synthetic oligonucleotide
cagugcggugcuccuccac

SEQ ID NO: 1997811 - RNA, 19 nt, Artificial Sequence
  Description of Artificial Sequence: Synthetic oligonucleotide
gacugccagcuugcgcuac

SEQ ID NO: 1997812 - RNA, 19 nt, Artificial Sequence
  Description of Artificial Sequence: Synthetic oligonucleotide
auuccuccggaggcugaga

SEQ ID NO: 1997813 - RNA, 19 nt, Artificial Sequence
  Description of Artificial Sequence: Synthetic oligonucleotide
gguugggguugaagaagug

SEQ ID NO: 1997814 - RNA, 19 nt, Artificial Sequence
  Description of Artificial Sequence: Synthetic oligonucleotide
cuccgaagaagggaucucu

SEQ ID NO: 1997815 - RNA, 19 nt, Artificial Sequence
  Description of Artificial Sequence: Synthetic oligonucleotide
cauuccuguaggugcccua

SEQ ID NO: 1997816 - RNA, 19 nt, Artificial Sequence
  Description of Artificial Sequence: Synthetic oligonucleotide
cagcuugcgcuacccuguc

SEQ ID NO: 1997817 - RNA, 19 nt, Artificial Sequence
  Description of Artificial Sequence: Synthetic oligonucleotide
caagacccuuaggaugaca

SEQ ID NO: 1997818 - RNA, 19 nt, Artificial Sequence
  Description of Artificial Sequence: Synthetic oligonucleotide
aggugcccuagaaacuuua

SEQ ID NO: 1997819 - RNA, 19 nt, Artificial Sequence
  Description of Artificial Sequence: Synthetic oligonucleotide
cuccggaggcugagaacca

SEQ ID NO: 1997820 - RNA, 19 nt, Artificial Sequence
  Description of Artificial Sequence: Synthetic oligonucleotide
acaaagcuaccgggaccga

SEQ ID NO: 1997821 - RNA, 19 nt, Artificial Sequence
  Description of Artificial Sequence: Synthetic oligonucleotide
gucacaggccauauaucau

SEQ ID NO: 1997822 - RNA, 19 nt, Artificial Sequence
  Description of Artificial Sequence: Synthetic oligonucleotide
cugcccuucccgcggucuc

SEQ ID NO: 1997823 - RNA, 19 nt, Artificial Sequence
  Description of Artificial Sequence: Synthetic oligonucleotide
cugggaaaccugggaguca

SEQ ID NO: 1997824 - RNA, 19 nt, Artificial Sequence
  Description of Artificial Sequence: Synthetic oligonucleotide
cccuuaggaugacacaaaa

SEQ ID NO: 1997825 - RNA, 19 nt, Artificial Sequence
  Description of Artificial Sequence: Synthetic oligonucleotide
gggcaacaggaagggagug

SEQ ID NO: 1997826 - RNA, 19 nt, Artificial Sequence
  Description of Artificial Sequence: Synthetic oligonucleotide
guuggacgaaugacagacu

SEQ ID NO: 1997827 - RNA, 19 nt, Artificial Sequence
  Description of Artificial Sequence: Synthetic oligonucleotide
cgaagcgucugcccuuccc

SEQ ID NO: 1997828 - RNA, 19 nt, Artificial Sequence
  Description of Artificial Sequence: Synthetic oligonucleotide
ccaucuggcuuagugaucu

SEQ ID NO: 1997829 - RNA, 19 nt, Artificial Sequence
  Description of Artificial Sequence: Synthetic oligonucleotide
gugcggugcuccuccacua

SEQ ID NO: 1997830 - RNA, 19 nt, Artificial Sequence
  Description of Artificial Sequence: Synthetic oligonucleotide
gcggucucucaccaggugu

SEQ ID NO: 1997831 - RNA, 19 nt, Artificial Sequence
  Description of Artificial Sequence: Synthetic oligonucleotide
uggcuccgagguccacgaa

SEQ ID NO: 1997832 - RNA, 19 nt, Artificial Sequence
  Description of Artificial Sequence: Synthetic oligonucleotide
ucgaccccacgugccucug

SEQ ID NO: 1997833 - RNA, 19 nt, Artificial Sequence
  Description of Artificial Sequence: Synthetic oligonucleotide
ggauuuggguugggguuga

SEQ ID NO: 1997834 - RNA, 19 nt, Artificial Sequence
  Description of Artificial Sequence: Synthetic oligonucleotide
ggaguggaaaggaccugaa

SEQ ID NO: 1997835 - RNA, 19 nt, Artificial Sequence
  Description of Artificial Sequence: Synthetic oligonucleotide
accacucgacugccagcuu

SEQ ID NO: 1997836 - RNA, 19 nt, Artificial Sequence
  Description of Artificial Sequence: Synthetic oligonucleotide
ggguugggguugaagaagu

SEQ ID NO: 1997837 - RNA, 19 nt, Artificial Sequence
  Description of Artificial Sequence: Synthetic oligonucleotide
ccuucccgcggucucucac

SEQ ID NO: 1997838 - RNA, 19 nt, Artificial Sequence
  Description of Artificial Sequence: Synthetic oligonucleotide
gccuucuucugggcugaag

SEQ ID NO: 1997839 - RNA, 19 nt, Artificial Sequence
  Description of Artificial Sequence: Synthetic oligonucleotide
cuccgucccucacugucua

SEQ ID NO: 1997840 - RNA, 19 nt, Artificial Sequence
  Description of Artificial Sequence: Synthetic oligonucleotide
gagguccacgaaagccgaa

SEQ ID NO: 1997841 - RNA, 19 nt, Artificial Sequence
  Description of Artificial Sequence: Synthetic oligonucleotide
gauuuggguugggguugaa

SEQ ID NO: 1997842 - RNA, 19 nt, Artificial Sequence
  Description of Artificial Sequence: Synthetic oligonucleotide
cucgaccccacgugccucu

SEQ ID NO: 1997843 - RNA, 19 nt, Artificial Sequence
  Description of Artificial Sequence: Synthetic oligonucleotide
ccagcuugcgcuacccugu

SEQ ID NO: 1997844 - RNA, 19 nt, Artificial Sequence
  Description of Artificial Sequence: Synthetic oligonucleotide
gcauugagucccgaagcgu

SEQ ID NO: 1997845 - RNA, 19 nt, Artificial Sequence
  Description of Artificial Sequence: Synthetic oligonucleotide
agccccggaaaaggucaaa

SEQ ID NO: 1997846 - RNA, 19 nt, Artificial Sequence
  Description of Artificial Sequence: Synthetic oligonucleotide
ccgagacuggaucacuucu

SEQ ID NO: 1997847 - RNA, 19 nt, Artificial Sequence
  Description of Artificial Sequence: Synthetic oligonucleotide
ggaccgaaaccaacguccu

SEQ ID NO: 1997848 - RNA, 19 nt, Artificial Sequence
  Description of Artificial Sequence: Synthetic oligonucleotide
gacccaugaccuggaaguu

SEQ ID NO: 1997849 - RNA, 19 nt, Artificial Sequence
  Description of Artificial Sequence: Synthetic oligonucleotide
cgaaaccaacguccuagga

SEQ ID NO: 1997850 - RNA, 19 nt, Artificial Sequence
  Description of Artificial Sequence: Synthetic oligonucleotide
accugggagucaagaucau

SEQ ID NO: 1997851 - RNA, 19 nt, Artificial Sequence
  Description of Artificial Sequence: Synthetic oligonucleotide
gggagucacaggccauaua

SEQ ID NO: 1997852 - RNA, 19 nt, Artificial Sequence
  Description of Artificial Sequence: Synthetic oligonucleotide
cgggaccgaaaccaacguc

SEQ ID NO: 1997853 - RNA, 19 nt, Artificial Sequence
  Description of Artificial Sequence: Synthetic oligonucleotide
cgagaccuuccugggaaac

SEQ ID NO: 1997854 - RNA, 19 nt, Artificial Sequence
  Description of Artificial Sequence: Synthetic oligonucleotide
ggaucacuucuggaacugu

SEQ ID NO: 1997855 - RNA, 19 nt, Artificial Sequence
  Description of Artificial Sequence: Synthetic oligonucleotide
ccaacguccuaggaacaaa

SEQ ID NO: 1997856 - RNA, 19 nt, Artificial Sequence
  Description of Artificial Sequence: Synthetic oligonucleotide
cccaaucuggagcugguuu

SEQ ID NO: 1997857 - RNA, 19 nt, Artificial Sequence
  Description of Artificial Sequence: Synthetic oligonucleotide
cuguggcuccgagguccac

SEQ ID NO: 1997858 - RNA, 19 nt, Artificial Sequence
  Description of Artificial Sequence: Synthetic oligonucleotide
cccgaagcgucugcccuuc

SEQ ID NO: 1997859 - RNA, 19 nt, Artificial Sequence
  Description of Artificial Sequence: Synthetic oligonucleotide
cgcggucucucaccaggug

SEQ ID NO: 1997860 - RNA, 19 nt, Artificial Sequence
  Description of Artificial Sequence: Synthetic oligonucleotide
ccucgaccccacgugccuc

SEQ ID NO: 1997861 - RNA, 19 nt, Artificial Sequence
  Description of Artificial Sequence: Synthetic oligonucleotide
ccccucaaagauccugggu

SEQ ID NO: 1997862 - RNA, 19 nt, Artificial Sequence
  Description of Artificial Sequence: Synthetic oligonucleotide
ccgagaccuuccugggaaa

SEQ ID NO: 1997863 - RNA, 19 nt, Artificial Sequence
  Description of Artificial Sequence: Synthetic oligonucleotide
ccgggaccgaaaccaacgu

SEQ ID NO: 1997864 - RNA, 19 nt, Artificial Sequence
  Description of Artificial Sequence: Synthetic oligonucleotide
ccgaauuccuccggaggcu

SEQ ID NO: 1997865 - RNA, 19 nt, Artificial Sequence
  Description of Artificial Sequence: Synthetic oligonucleotide
ggucucucaccagguguuu

SEQ ID NO: 1997866 - RNA, 19 nt, Artificial Sequence
  Description of Artificial Sequence: Synthetic oligonucleotide
ccacuaccccaucuggcuu

SEQ ID NO: 1997867 - RNA, 19 nt, Artificial Sequence
  Description of Artificial Sequence: Synthetic oligonucleotide
cgcuacccugucagauaca

SEQ ID NO: 1997868 - RNA, 19 nt, Artificial Sequence
  Description of Artificial Sequence: Synthetic oligonucleotide
ccccacgugccucugucuu

SEQ ID NO: 1997869 - RNA, 19 nt, Artificial Sequence
  Description of Artificial Sequence: Synthetic oligonucleotide
cccucgaccccacgugccu

SEQ ID NO: 1997870 - RNA, 19 nt, Artificial Sequence
  Description of Artificial Sequence: Synthetic oligonucleotide
cgacugccagcuugcgcua

SEQ ID NO: 1997871 - RNA, 19 nt, Artificial Sequence
  Description of Artificial Sequence: Synthetic oligonucleotide
cuaccccaucuggcuuagu

SEQ ID NO: 1997872 - RNA, 19 nt, Artificial Sequence
  Description of Artificial Sequence: Synthetic oligonucleotide
cgucugcccuucccgcggu

SEQ ID NO: 1997873 - RNA, 19 nt, Artificial Sequence
  Description of Artificial Sequence: Synthetic oligonucleotide
guuacuaagagauugaggc

SEQ ID NO: 1997874 - RNA, 19 nt, Artificial Sequence
  Description of Artificial Sequence: Synthetic oligonucleotide
uuagaauuagccacgaccg

SEQ ID NO: 1997875 - RNA, 19 nt, Artificial Sequence
  Description of Artificial Sequence: Synthetic oligonucleotide
aaugaaucacgcucaaggg

SEQ ID NO: 1997876 - RNA, 19 nt, Artificial Sequence
  Description of Artificial Sequence: Synthetic oligonucleotide
cuuagaauuagccacgacc

SEQ ID NO: 1997877 - RNA, 19 nt, Artificial Sequence
  Description of Artificial Sequence: Synthetic oligonucleotide
caaugaaucacgcucaagg

SEQ ID NO: 1997878 - RNA, 19 nt, Artificial Sequence
  Description of Artificial Sequence: Synthetic oligonucleotide
uguucaaugaaucacgcuc

SEQ ID NO: 1997879 - RNA, 19 nt, Artificial Sequence
  Description of Artificial Sequence: Synthetic oligonucleotide
aacucuggcuccuauaauc

SEQ ID NO: 1997880 - RNA, 19 nt, Artificial Sequence
  Description of Artificial Sequence: Synthetic oligonucleotide
aaaugcuuuggguaugagg

SEQ ID NO: 1997881 - RNA, 19 nt, Artificial Sequence
  Description of Artificial Sequence: Synthetic oligonucleotide
agaaagaacaggcacagcu

SEQ ID NO: 1997882 - RNA, 19 nt, Artificial Sequence
  Description of Artificial Sequence: Synthetic oligonucleotide
aaagauaggcaagagagga

SEQ ID NO: 1997883 - RNA, 19 nt, Artificial Sequence
  Description of Artificial Sequence: Synthetic oligonucleotide
augaaucacgcucaagggc

SEQ ID NO: 1997884 - RNA, 19 nt, Artificial Sequence
  Description of Artificial Sequence: Synthetic oligonucleotide
aauaugaguaauauuaaaa

SEQ ID NO: 1997885 - RNA, 19 nt, Artificial Sequence
  Description of Artificial Sequence: Synthetic oligonucleotide
aaugcugagaaacagcguu

SEQ ID NO: 1997886 - RNA, 19 nt, Artificial Sequence
  Description of Artificial Sequence: Synthetic oligonucleotide
uguccauaccugaaaaggg

SEQ ID NO: 1997887 - RNA, 19 nt, Artificial Sequence
  Description of Artificial Sequence: Synthetic oligonucleotide
aagaaccaggcccauaaag

SEQ ID NO: 1997888 - RNA, 19 nt, Artificial Sequence
  Description of Artificial Sequence: Synthetic oligonucleotide
acuuguguauugucgauac

SEQ ID NO: 1997889 - RNA, 19 nt, Artificial Sequence
  Description of Artificial Sequence: Synthetic oligonucleotide
acugauuggguagagaggg

SEQ ID NO: 1997890 - RNA, 19 nt, Artificial Sequence
  Description of Artificial Sequence: Synthetic oligonucleotide
aaauaugaguaauauuaaa

SEQ ID NO: 1997891 - RNA, 19 nt, Artificial Sequence
  Description of Artificial Sequence: Synthetic oligonucleotide
auugucgauacagugacac

SEQ ID NO: 1997892 - RNA, 19 nt, Artificial Sequence
  Description of Artificial Sequence: Synthetic oligonucleotide
ugaaucacgcucaagggcu

SEQ ID NO: 1997893 - RNA, 19 nt, Artificial Sequence
  Description of Artificial Sequence: Synthetic oligonucleotide
ugcuucguuacuaagagau

SEQ ID NO: 1997894 - RNA, 19 nt, Artificial Sequence
  Description of Artificial Sequence: Synthetic oligonucleotide
ucaccaaagacacagcccu

SEQ ID NO: 1997895 - RNA, 19 nt, Artificial Sequence
  Description of Artificial Sequence: Synthetic oligonucleotide
uacagugacacuaacguau

SEQ ID NO: 1997896 - RNA, 19 nt, Artificial Sequence
  Description of Artificial Sequence: Synthetic oligonucleotide
aucggcuccagucugauag

SEQ ID NO: 1997897 - RNA, 19 nt, Artificial Sequence
  Description of Artificial Sequence: Synthetic oligonucleotide
cauccaacuucucagagcc

SEQ ID NO: 1997898 - RNA, 19 nt, Artificial Sequence
  Description of Artificial Sequence: Synthetic oligonucleotide
agcauaugugguuugggac

SEQ ID NO: 1997899 - RNA, 19 nt, Artificial Sequence
  Description of Artificial Sequence: Synthetic oligonucleotide
uuguguauugucgauacag

SEQ ID NO: 1997900 - RNA, 19 nt, Artificial Sequence
  Description of Artificial Sequence: Synthetic oligonucleotide
uaaacuuguguauugucga

SEQ ID NO: 1997901 - RNA, 19 nt, Artificial Sequence
  Description of Artificial Sequence: Synthetic oligonucleotide
agauaggcaagagaggagc

SEQ ID NO: 1997902 - RNA, 19 nt, Artificial Sequence
  Description of Artificial Sequence: Synthetic oligonucleotide
aacagcguuucuuagaauu

SEQ ID NO: 1997903 - RNA, 19 nt, Artificial Sequence
  Description of Artificial Sequence: Synthetic oligonucleotide
guaaacuuguguauugucg

SEQ ID NO: 1997904 - RNA, 19 nt, Artificial Sequence
  Description of Artificial Sequence: Synthetic oligonucleotide
uguguuucagccagcuugg

SEQ ID NO: 1997905 - RNA, 19 nt, Artificial Sequence
  Description of Artificial Sequence: Synthetic oligonucleotide
acugagaccagaaagaaca

SEQ ID NO: 1997906 - RNA, 19 nt, Artificial Sequence
  Description of Artificial Sequence: Synthetic oligonucleotide
ugcaauaggaacugcacac

SEQ ID NO: 1997907 - RNA, 19 nt, Artificial Sequence
  Description of Artificial Sequence: Synthetic oligonucleotide
uaaugcuucguuacuaaga

SEQ ID NO: 1997908 - RNA, 19 nt, Artificial Sequence
  Description of Artificial Sequence: Synthetic oligonucleotide
gauacagugacacuaacgu

SEQ ID NO: 1997909 - RNA, 19 nt, Artificial Sequence
  Description of Artificial Sequence: Synthetic oligonucleotide
gaggguacggcagaaaagg

SEQ ID NO: 1997910 - RNA, 19 nt, Artificial Sequence
  Description of Artificial Sequence: Synthetic oligonucleotide
aucguuuugugccaugguc

SEQ ID NO: 1997911 - RNA, 19 nt, Artificial Sequence
  Description of Artificial Sequence: Synthetic oligonucleotide
aagggcuaagaaccaggcc

SEQ ID NO: 1997912 - RNA, 19 nt, Artificial Sequence
  Description of Artificial Sequence: Synthetic oligonucleotide
acauccaacuucucagagc

SEQ ID NO: 1997913 - RNA, 19 nt, Artificial Sequence
  Description of Artificial Sequence: Synthetic oligonucleotide
uguagcuaaacagcuauug

SEQ ID NO: 1997914 - RNA, 19 nt, Artificial Sequence
  Description of Artificial Sequence: Synthetic oligonucleotide
ugaacuugaggguacggca

SEQ ID NO: 1997915 - RNA, 19 nt, Artificial Sequence
  Description of Artificial Sequence: Synthetic oligonucleotide
cuaacugcagucauccaag

SEQ ID NO: 1997916 - RNA, 19 nt, Artificial Sequence
  Description of Artificial Sequence: Synthetic oligonucleotide
guauugucgauacagugac

SEQ ID NO: 1997917 - RNA, 19 nt, Artificial Sequence
  Description of Artificial Sequence: Synthetic oligonucleotide
uggaugugauuccuggcgg

SEQ ID NO: 1997918 - RNA, 19 nt, Artificial Sequence
  Description of Artificial Sequence: Synthetic oligonucleotide
agcuaaacagcuauugaac

SEQ ID NO: 1997919 - RNA, 19 nt, Artificial Sequence
  Description of Artificial Sequence: Synthetic oligonucleotide
ugugcaauaggaacugcac

SEQ ID NO: 1997920 - RNA, 19 nt, Artificial Sequence
  Description of Artificial Sequence: Synthetic oligonucleotide
agugggacaguguucaaug

SEQ ID NO: 1997921 - RNA, 19 nt, Artificial Sequence
  Description of Artificial Sequence: Synthetic oligonucleotide
aaucuucacgcagguaggc

SEQ ID NO: 1997922 - RNA, 19 nt, Artificial Sequence
  Description of Artificial Sequence: Synthetic oligonucleotide
ugcacacagggucaugccg

SEQ ID NO: 1997923 - RNA, 19 nt, Artificial Sequence
  Description of Artificial Sequence: Synthetic oligonucleotide
ucaacucuggcuccuauaa

SEQ ID NO: 1997924 - RNA, 19 nt, Artificial Sequence
  Description of Artificial Sequence: Synthetic oligonucleotide
guuauagaggccugaucgg

SEQ ID NO: 1997925 - RNA, 19 nt, Artificial Sequence
  Description of Artificial Sequence: Synthetic oligonucleotide
ucguuuugugccauggucu

SEQ ID NO: 1997926 - RNA, 19 nt, Artificial Sequence
  Description of Artificial Sequence: Synthetic oligonucleotide
uaucaaugcugagaaacag

SEQ ID NO: 1997927 - RNA, 19 nt, Artificial Sequence
  Description of Artificial Sequence: Synthetic oligonucleotide
agaauuagccacgaccggg

SEQ ID NO: 1997928 - RNA, 19 nt, Artificial Sequence
  Description of Artificial Sequence: Synthetic oligonucleotide
aggcuaacugcagucaucc

SEQ ID NO: 1997929 - RNA, 19 nt, Artificial Sequence
  Description of Artificial Sequence: Synthetic oligonucleotide
auaaucaccugccacacuu

SEQ ID NO: 1997930 - RNA, 19 nt, Artificial Sequence
  Description of Artificial Sequence: Synthetic oligonucleotide
aauuagccacgaccgggac

SEQ ID NO: 1997931 - RNA, 19 nt, Artificial Sequence
  Description of Artificial Sequence: Synthetic oligonucleotide
cuucguuacuaagagauug

SEQ ID NO: 1997932 - RNA, 19 nt, Artificial Sequence
  Description of Artificial Sequence: Synthetic oligonucleotide
uugacgucaucucaacucu

SEQ ID NO: 1997933 - RNA, 19 nt, Artificial Sequence
  Description of Artificial Sequence: Synthetic oligonucleotide
aagacugagaccagaaaga

SEQ ID NO: 1997934 - RNA, 19 nt, Artificial Sequence
  Description of Artificial Sequence: Synthetic oligonucleotide
uagaauuagccacgaccgg

SEQ ID NO: 1997935 - RNA, 19 nt, Artificial Sequence
  Description of Artificial Sequence: Synthetic oligonucleotide
ugaaaagggaggcuacgcu

SEQ ID NO: 1997936 - RNA, 19 nt, Artificial Sequence
  Description of Artificial Sequence: Synthetic oligonucleotide
uccuauaaucaccugccac

SEQ ID NO: 1997937 - RNA, 19 nt, Artificial Sequence
  Description of Artificial Sequence: Synthetic oligonucleotide
gaaacagcguuucuuagaa

SEQ ID NO: 1997938 - RNA, 19 nt, Artificial Sequence
  Description of Artificial Sequence: Synthetic oligonucleotide
aguguucaaugaaucacgc

SEQ ID NO: 1997939 - RNA, 19 nt, Artificial Sequence
  Description of Artificial Sequence: Synthetic oligonucleotide
gaccagaaagaacaggcac

SEQ ID NO: 1997940 - RNA, 19 nt, Artificial Sequence
  Description of Artificial Sequence: Synthetic oligonucleotide
uguguauugucgauacagu

SEQ ID NO: 1997941 - RNA, 19 nt, Artificial Sequence
  Description of Artificial Sequence: Synthetic oligonucleotide
uacuaagagauugaggcuc

SEQ ID NO: 1997942 - RNA, 19 nt, Artificial Sequence
  Description of Artificial Sequence: Synthetic oligonucleotide
agagccgccaucccgcggc

SEQ ID NO: 1997943 - RNA, 19 nt, Artificial Sequence
  Description of Artificial Sequence: Synthetic oligonucleotide
acgcucaagggcuaagaac

SEQ ID NO: 1997944 - RNA, 19 nt, Artificial Sequence
  Description of Artificial Sequence: Synthetic oligonucleotide
ugagaaacagcguuucuua

SEQ ID NO: 1997945 - RNA, 19 nt, Artificial Sequence
  Description of Artificial Sequence: Synthetic oligonucleotide
uuugggacagaaaggugga

SEQ ID NO: 1997946 - RNA, 19 nt, Artificial Sequence
  Description of Artificial Sequence: Synthetic oligonucleotide
uauacucagugauugcuuc

SEQ ID NO: 1997947 - RNA, 19 nt, Artificial Sequence
  Description of Artificial Sequence: Synthetic oligonucleotide
uuccuggcgguuauagagg

SEQ ID NO: 1997948 - RNA, 19 nt, Artificial Sequence
  Description of Artificial Sequence: Synthetic oligonucleotide
agccuuuguauacucagug

SEQ ID NO: 1997949 - RNA, 19 nt, Artificial Sequence
  Description of Artificial Sequence: Synthetic oligonucleotide
cauaccugaaaagggaggc

SEQ ID NO: 1997950 - RNA, 19 nt, Artificial Sequence
  Description of Artificial Sequence: Synthetic oligonucleotide
uucguuacuaagagauuga

SEQ ID NO: 1997951 - RNA, 19 nt, Artificial Sequence
  Description of Artificial Sequence: Synthetic oligonucleotide
aacguauaaacagccuuug

SEQ ID NO: 1997952 - RNA, 19 nt, Artificial Sequence
  Description of Artificial Sequence: Synthetic oligonucleotide
guuggggugacacuaggug

SEQ ID NO: 1997953 - RNA, 19 nt, Artificial Sequence
  Description of Artificial Sequence: Synthetic oligonucleotide
uccgauuucugugcaauag

SEQ ID NO: 1997954 - RNA, 19 nt, Artificial Sequence
  Description of Artificial Sequence: Synthetic oligonucleotide
agugauugcuuccaucaga

SEQ ID NO: 1997955 - RNA, 19 nt, Artificial Sequence
  Description of Artificial Sequence: Synthetic oligonucleotide
uuagccacgaccgggacac

SEQ ID NO: 1997956 - RNA, 19 nt, Artificial Sequence
  Description of Artificial Sequence: Synthetic oligonucleotide
uuacuaagagauugaggcu

SEQ ID NO: 1997957 - RNA, 19 nt, Artificial Sequence
  Description of Artificial Sequence: Synthetic oligonucleotide
uugaggguacggcagaaaa

SEQ ID NO: 1997958 - RNA, 19 nt, Artificial Sequence
  Description of Artificial Sequence: Synthetic oligonucleotide
ucaucguuuugugccaugg

SEQ ID NO: 1997959 - RNA, 19 nt, Artificial Sequence
  Description of Artificial Sequence: Synthetic oligonucleotide
uagguggaggccaucaccu

SEQ ID NO: 1997960 - RNA, 19 nt, Artificial Sequence
  Description of Artificial Sequence: Synthetic oligonucleotide
aaucaccugccacacuuca

SEQ ID NO: 1997961 - RNA, 19 nt, Artificial Sequence
  Description of Artificial Sequence: Synthetic oligonucleotide
uuauagaggccugaucggc

SEQ ID NO: 1997962 - RNA, 19 nt, Artificial Sequence
  Description of Artificial Sequence: Synthetic oligonucleotide
auuaaugcuucguuacuaa

SEQ ID NO: 1997963 - RNA, 19 nt, Artificial Sequence
  Description of Artificial Sequence: Synthetic oligonucleotide
aaccuguugucuccuaaga

SEQ ID NO: 1997964 - RNA, 19 nt, Artificial Sequence
  Description of Artificial Sequence: Synthetic oligonucleotide
acuaagagauugaggcucc

SEQ ID NO: 1997965 - RNA, 19 nt, Artificial Sequence
  Description of Artificial Sequence: Synthetic oligonucleotide
agcuauugaacuugagggu

SEQ ID NO: 1997966 - RNA, 19 nt, Artificial Sequence
  Description of Artificial Sequence: Synthetic oligonucleotide
gaaccuguugucuccuaag

SEQ ID NO: 1997967 - RNA, 19 nt, Artificial Sequence
  Description of Artificial Sequence: Synthetic oligonucleotide
aaagguggaggugcuaucu

SEQ ID NO: 1997968 - RNA, 19 nt, Artificial Sequence
  Description of Artificial Sequence: Synthetic oligonucleotide
aaagggaggcuacgcuccg

SEQ ID NO: 1997969 - RNA, 19 nt, Artificial Sequence
  Description of Artificial Sequence: Synthetic oligonucleotide
uugaacuugaggguacggc

SEQ ID NO: 1997970 - RNA, 19 nt, Artificial Sequence
  Description of Artificial Sequence: Synthetic oligonucleotide
cauccaagugguuuccagc

SEQ ID NO: 1997971 - RNA, 19 nt, Artificial Sequence
  Description of Artificial Sequence: Synthetic oligonucleotide
ugucgauacagugacacua

SEQ ID NO: 1997972 - RNA, 19 nt, Artificial Sequence
  Description of Artificial Sequence: Synthetic oligonucleotide
uaaagacugagaccagaaa

SEQ ID NO: 1997973 - RNA, 19 nt, Artificial Sequence
  Description of Artificial Sequence: Synthetic oligonucleotide
acgucaucucaacucuggc

SEQ ID NO: 1997974 - RNA, 19 nt, Artificial Sequence
  Description of Artificial Sequence: Synthetic oligonucleotide
uauagaggccugaucggcu

SEQ ID NO: 1997975 - RNA, 19 nt, Artificial Sequence
  Description of Artificial Sequence: Synthetic oligonucleotide
aaacuuguguauugucgau

SEQ ID NO: 1997976 - RNA, 19 nt, Artificial Sequence
  Description of Artificial Sequence: Synthetic oligonucleotide
uuccccacugauuggguag

SEQ ID NO: 1997977 - RNA, 19 nt, Artificial Sequence
  Description of Artificial Sequence: Synthetic oligonucleotide
gacgucaucucaacucugg

SEQ ID NO: 1997978 - RNA, 19 nt, Artificial Sequence
  Description of Artificial Sequence: Synthetic oligonucleotide
ugauuggguagagagggca

SEQ ID NO: 1997979 - RNA, 19 nt, Artificial Sequence
  Description of Artificial Sequence: Synthetic oligonucleotide
accuguugucuccuaagag

SEQ ID NO: 1997980 - RNA, 19 nt, Artificial Sequence
  Description of Artificial Sequence: Synthetic oligonucleotide
aagaguuggggugacacua

SEQ ID NO: 1997981 - RNA, 19 nt, Artificial Sequence
  Description of Artificial Sequence: Synthetic oligonucleotide
ugucuccuaagaguugggg

SEQ ID NO: 1997982 - RNA, 19 nt, Artificial Sequence
  Description of Artificial Sequence: Synthetic oligonucleotide
ucguuacuaagagauugag

SEQ ID NO: 1997983 - RNA, 19 nt, Artificial Sequence
  Description of Artificial Sequence: Synthetic oligonucleotide
ugcuuugacgucaucucaa

SEQ ID NO: 1997984 - RNA, 19 nt, Artificial Sequence
  Description of Artificial Sequence: Synthetic oligonucleotide
ggugacacuagguggaggc

SEQ ID NO: 1997985 - RNA, 19 nt, Artificial Sequence
  Description of Artificial Sequence: Synthetic oligonucleotide
acaaaaggcuucuggucug

SEQ ID NO: 1997986 - RNA, 19 nt, Artificial Sequence
  Description of Artificial Sequence: Synthetic oligonucleotide
gaacuugaggguacggcag

SEQ ID NO: 1997987 - RNA, 19 nt, Artificial Sequence
  Description of Artificial Sequence: Synthetic oligonucleotide
acuugaaaauaugaguaau

SEQ ID NO: 1997988 - RNA, 19 nt, Artificial Sequence
  Description of Artificial Sequence: Synthetic oligonucleotide
uuguauacucagugauugc

SEQ ID NO: 1997989 - RNA, 19 nt, Artificial Sequence
  Description of Artificial Sequence: Synthetic oligonucleotide
aagauaggcaagagaggag

SEQ ID NO: 1997990 - RNA, 19 nt, Artificial Sequence
  Description of Artificial Sequence: Synthetic oligonucleotide
ugcuaucugucaccaaaga

SEQ ID NO: 1997991 - RNA, 19 nt, Artificial Sequence
  Description of Artificial Sequence: Synthetic oligonucleotide
auaggcaagagaggagccg

SEQ ID NO: 1997992 - RNA, 19 nt, Artificial Sequence
  Description of Artificial Sequence: Synthetic oligonucleotide
cuaagaaccaggcccauaa

SEQ ID NO: 1997993 - RNA, 19 nt, Artificial Sequence
  Description of Artificial Sequence: Synthetic oligonucleotide
ucuucacgcagguaggcau

SEQ ID NO: 1997994 - RNA, 19 nt, Artificial Sequence
  Description of Artificial Sequence: Synthetic oligonucleotide
ucaucucaacucuggcucc

SEQ ID NO: 1997995 - RNA, 19 nt, Artificial Sequence
  Description of Artificial Sequence: Synthetic oligonucleotide
guagcuaaacagcuauuga

SEQ ID NO: 1997996 - RNA, 19 nt, Artificial Sequence
  Description of Artificial Sequence: Synthetic oligonucleotide
aagaacaggcacagcucac

SEQ ID NO: 1997997 - RNA, 19 nt, Artificial Sequence
  Description of Artificial Sequence: Synthetic oligonucleotide
ccacacuucaucuuccucc

SEQ ID NO: 1997998 - RNA, 19 nt, Artificial Sequence
  Description of Artificial Sequence: Synthetic oligonucleotide
cgcucaagggcuaagaacc

SEQ ID NO: 1997999 - RNA, 19 nt, Artificial Sequence
  Description of Artificial Sequence: Synthetic oligonucleotide
ccacugauuggguagagag

SEQ ID NO: 1998000 - RNA, 19 nt, Artificial Sequence
  Description of Artificial Sequence: Synthetic oligonucleotide
ccgaauccagccaucaucg

SEQ ID NO: 1998001 - RNA, 19 nt, Artificial Sequence
  Description of Artificial Sequence: Synthetic oligonucleotide
ggcccauaaagacugagac

SEQ ID NO: 1998002 - RNA, 19 nt, Artificial Sequence
  Description of Artificial Sequence: Synthetic oligonucleotide
uccuggcgguuauagaggc

SEQ ID NO: 1998003 - RNA, 19 nt, Artificial Sequence
  Description of Artificial Sequence: Synthetic oligonucleotide
uuuugugccauggucuuau

SEQ ID NO: 1998004 - RNA, 19 nt, Artificial Sequence
  Description of Artificial Sequence: Synthetic oligonucleotide
cuauaaucaccugccacac

SEQ ID NO: 1998005 - RNA, 19 nt, Artificial Sequence
  Description of Artificial Sequence: Synthetic oligonucleotide
agagcauaugugguuuggg

SEQ ID NO: 1998006 - RNA, 19 nt, Artificial Sequence
  Description of Artificial Sequence: Synthetic oligonucleotide
uggaggugcuaucugucac

SEQ ID NO: 1998007 - RNA, 19 nt, Artificial Sequence
  Description of Artificial Sequence: Synthetic oligonucleotide
gauaggcaagagaggagcc

SEQ ID NO: 1998008 - RNA, 19 nt, Artificial Sequence
  Description of Artificial Sequence: Synthetic oligonucleotide
gguacggcagaaaaggccc

SEQ ID NO: 1998009 - RNA, 19 nt, Artificial Sequence
  Description of Artificial Sequence: Synthetic oligonucleotide
ucagcccucucuucacccg

SEQ ID NO: 1998010 - RNA, 19 nt, Artificial Sequence
  Description of Artificial Sequence: Synthetic oligonucleotide
ugacaggcuaacugcaguc

SEQ ID NO: 1998011 - RNA, 19 nt, Artificial Sequence
  Description of Artificial Sequence: Synthetic oligonucleotide
ugacuucaccagcuggaug

SEQ ID NO: 1998012 - RNA, 19 nt, Artificial Sequence
  Description of Artificial Sequence: Synthetic oligonucleotide
uaagaguuggggugacacu

SEQ ID NO: 1998013 - RNA, 19 nt, Artificial Sequence
  Description of Artificial Sequence: Synthetic oligonucleotide
ugacacuagguggaggcca

SEQ ID NO: 1998014 - RNA, 19 nt, Artificial Sequence
  Description of Artificial Sequence: Synthetic oligonucleotide
ucaaugaaucacgcucaag

SEQ ID NO: 1998015 - RNA, 19 nt, Artificial Sequence
  Description of Artificial Sequence: Synthetic oligonucleotide
ucuuagaauuagccacgac

SEQ ID NO: 1998016 - RNA, 19 nt, Artificial Sequence
  Description of Artificial Sequence: Synthetic oligonucleotide
uacucagugauugcuucca

SEQ ID NO: 1998017 - RNA, 19 nt, Artificial Sequence
  Description of Artificial Sequence: Synthetic oligonucleotide
uauaaucaccugccacacu

SEQ ID NO: 1998018 - RNA, 19 nt, Artificial Sequence
  Description of Artificial Sequence: Synthetic oligonucleotide
cccauaaagacugagacca

SEQ ID NO: 1998019 - RNA, 19 nt, Artificial Sequence
  Description of Artificial Sequence: Synthetic oligonucleotide
auugaacuugaggguacgg

SEQ ID NO: 1998020 - RNA, 19 nt, Artificial Sequence
  Description of Artificial Sequence: Synthetic oligonucleotide
guucaaugaaucacgcuca

SEQ ID NO: 1998021 - RNA, 19 nt, Artificial Sequence
  Description of Artificial Sequence: Synthetic oligonucleotide
ugcuuuggguaugagguaa

SEQ ID NO: 1998022 - RNA, 19 nt, Artificial Sequence
  Description of Artificial Sequence: Synthetic oligonucleotide
ugugauuccuggcgguuau

SEQ ID NO: 1998023 - RNA, 19 nt, Artificial Sequence
  Description of Artificial Sequence: Synthetic oligonucleotide
agggaggcuacgcuccggg

SEQ ID NO: 1998024 - RNA, 19 nt, Artificial Sequence
  Description of Artificial Sequence: Synthetic oligonucleotide
ucgauacagugacacuaac

SEQ ID NO: 1998025 - RNA, 19 nt, Artificial Sequence
  Description of Artificial Sequence: Synthetic oligonucleotide
cugagaccagaaagaacag

SEQ ID NO: 1998026 - RNA, 19 nt, Artificial Sequence
  Description of Artificial Sequence: Synthetic oligonucleotide
cagucauccaagugguuuc

SEQ ID NO: 1998027 - RNA, 19 nt, Artificial Sequence
  Description of Artificial Sequence: Synthetic oligonucleotide
uauugucgauacagugaca

SEQ ID NO: 1998028 - RNA, 19 nt, Artificial Sequence
  Description of Artificial Sequence: Synthetic oligonucleotide
ugcuuuccccacugauugg

SEQ ID NO: 1998029 - RNA, 19 nt, Artificial Sequence
  Description of Artificial Sequence: Synthetic oligonucleotide
auaaagacugagaccagaa

SEQ ID NO: 1998030 - RNA, 19 nt, Artificial Sequence
  Description of Artificial Sequence: Synthetic oligonucleotide
uucuuagaauuagccacga

SEQ ID NO: 1998031 - RNA, 19 nt, Artificial Sequence
  Description of Artificial Sequence: Synthetic oligonucleotide
cucuucuggcccagguugg

SEQ ID NO: 1998032 - RNA, 19 nt, Artificial Sequence
  Description of Artificial Sequence: Synthetic oligonucleotide
agaaagguggaggugcuau

SEQ ID NO: 1998033 - RNA, 19 nt, Artificial Sequence
  Description of Artificial Sequence: Synthetic oligonucleotide
ugacgucaucucaacucug

SEQ ID NO: 1998034 - RNA, 19 nt, Artificial Sequence
  Description of Artificial Sequence: Synthetic oligonucleotide
aacuuguguauugucgaua

SEQ ID NO: 1998035 - RNA, 19 nt, Artificial Sequence
  Description of Artificial Sequence: Synthetic oligonucleotide
auuagccacgaccgggaca

SEQ ID NO: 1998036 - RNA, 19 nt, Artificial Sequence
  Description of Artificial Sequence: Synthetic oligonucleotide
agagauugaggcuccgauu

SEQ ID NO: 1998037 - RNA, 19 nt, Artificial Sequence
  Description of Artificial Sequence: Synthetic oligonucleotide
gaauuagccacgaccggga

SEQ ID NO: 1998038 - RNA, 19 nt, Artificial Sequence
  Description of Artificial Sequence: Synthetic oligonucleotide
ccuauaaucaccugccaca

SEQ ID NO: 1998039 - RNA, 19 nt, Artificial Sequence
  Description of Artificial Sequence: Synthetic oligonucleotide
aaccaggcccauaaagacu

SEQ ID NO: 1998040 - RNA, 19 nt, Artificial Sequence
  Description of Artificial Sequence: Synthetic oligonucleotide
aaacagcuauugaacuuga

SEQ ID NO: 1998041 - RNA, 19 nt, Artificial Sequence
  Description of Artificial Sequence: Synthetic oligonucleotide
acguauaaacagccuuugu

SEQ ID NO: 1998042 - RNA, 19 nt, Artificial Sequence
  Description of Artificial Sequence: Synthetic oligonucleotide
ggugcuaucugucaccaaa

SEQ ID NO: 1998043 - RNA, 19 nt, Artificial Sequence
  Description of Artificial Sequence: Synthetic oligonucleotide
ucuuaucaaugcugagaaa

SEQ ID NO: 1998044 - RNA, 19 nt, Artificial Sequence
  Description of Artificial Sequence: Synthetic oligonucleotide
uguauuccugcugcuuuga

SEQ ID NO: 1998045 - RNA, 19 nt, Artificial Sequence
  Description of Artificial Sequence: Synthetic oligonucleotide
auacagugacacuaacgua

SEQ ID NO: 1998046 - RNA, 19 nt, Artificial Sequence
  Description of Artificial Sequence: Synthetic oligonucleotide
agaaccuguugucuccuaa

SEQ ID NO: 1998047 - RNA, 19 nt, Artificial Sequence
  Description of Artificial Sequence: Synthetic oligonucleotide
aaacagcguuucuuagaau

SEQ ID NO: 1998048 - RNA, 19 nt, Artificial Sequence
  Description of Artificial Sequence: Synthetic oligonucleotide
uaagagauugaggcuccga

SEQ ID NO: 1998049 - RNA, 19 nt, Artificial Sequence
  Description of Artificial Sequence: Synthetic oligonucleotide
acccgcuuccugcauuuuc

SEQ ID NO: 1998050 - RNA, 19 nt, Artificial Sequence
  Description of Artificial Sequence: Synthetic oligonucleotide
aggguacggcagaaaaggc

SEQ ID NO: 1998051 - RNA, 19 nt, Artificial Sequence
  Description of Artificial Sequence: Synthetic oligonucleotide
uaaucaccugccacacuuc

SEQ ID NO: 1998052 - RNA, 19 nt, Artificial Sequence
  Description of Artificial Sequence: Synthetic oligonucleotide
gcuccuauaaucaccugcc

SEQ ID NO: 1998053 - RNA, 19 nt, Artificial Sequence
  Description of Artificial Sequence: Synthetic oligonucleotide
cugugcaauaggaacugca

SEQ ID NO: 1998054 - RNA, 19 nt, Artificial Sequence
  Description of Artificial Sequence: Synthetic oligonucleotide
cagcguuucuuagaauuag

SEQ ID NO: 1998055 - RNA, 19 nt, Artificial Sequence
  Description of Artificial Sequence: Synthetic oligonucleotide
acuaacguauaaacagccu

SEQ ID NO: 1998056 - RNA, 19 nt, Artificial Sequence
  Description of Artificial Sequence: Synthetic oligonucleotide
ucggcuccagucugauagg

SEQ ID NO: 1998057 - RNA, 19 nt, Artificial Sequence
  Description of Artificial Sequence: Synthetic oligonucleotide
uaagaaccaggcccauaaa

SEQ ID NO: 1998058 - RNA, 19 nt, Artificial Sequence
  Description of Artificial Sequence: Synthetic oligonucleotide
cacaaaaggcuucuggucu

SEQ ID NO: 1998059 - RNA, 19 nt, Artificial Sequence
  Description of Artificial Sequence: Synthetic oligonucleotide
uugaggcuccgauuucugu

SEQ ID NO: 1998060 - RNA, 19 nt, Artificial Sequence
  Description of Artificial Sequence: Synthetic oligonucleotide
cucacaaaaggcuucuggu

SEQ ID NO: 1998061 - RNA, 19 nt, Artificial Sequence
  Description of Artificial Sequence: Synthetic oligonucleotide
uugucgauacagugacacu

SEQ ID NO: 1998062 - RNA, 19 nt, Artificial Sequence
  Description of Artificial Sequence: Synthetic oligonucleotide
gaggcuacgcuccgggaca

SEQ ID NO: 1998063 - RNA, 19 nt, Artificial Sequence
  Description of Artificial Sequence: Synthetic oligonucleotide
agaacaggcacagcucaca

SEQ ID NO: 1998064 - RNA, 19 nt, Artificial Sequence
  Description of Artificial Sequence: Synthetic oligonucleotide
cagagcauaugugguuugg

SEQ ID NO: 1998065 - RNA, 19 nt, Artificial Sequence
  Description of Artificial Sequence: Synthetic oligonucleotide
cguuacuaagagauugagg

SEQ ID NO: 1998066 - RNA, 19 nt, Artificial Sequence
  Description of Artificial Sequence: Synthetic oligonucleotide
cauaaagacugagaccaga

SEQ ID NO: 1998067 - RNA, 19 nt, Artificial Sequence
  Description of Artificial Sequence: Synthetic oligonucleotide
gacugagaccagaaagaac

SEQ ID NO: 1998068 - RNA, 19 nt, Artificial Sequence
  Description of Artificial Sequence: Synthetic oligonucleotide
cgauacagugacacuaacg

SEQ ID NO: 1998069 - RNA, 19 nt, Artificial Sequence
  Description of Artificial Sequence: Synthetic oligonucleotide
uucucagagccgccauccc

SEQ ID NO: 1998070 - RNA, 19 nt, Artificial Sequence
  Description of Artificial Sequence: Synthetic oligonucleotide
gcaagagaggagccgagug

SEQ ID NO: 1998071 - RNA, 19 nt, Artificial Sequence
  Description of Artificial Sequence: Synthetic oligonucleotide
acucuggcuccuauaauca

SEQ ID NO: 1998072 - RNA, 19 nt, Artificial Sequence
  Description of Artificial Sequence: Synthetic oligonucleotide
acgaccgggacacgcuguc

SEQ ID NO: 1998073 - RNA, 19 nt, Artificial Sequence
  Description of Artificial Sequence: Synthetic oligonucleotide
cuaacguauaaacagccuu

SEQ ID NO: 1998074 - RNA, 19 nt, Artificial Sequence
  Description of Artificial Sequence: Synthetic oligonucleotide
uccugcugcuuugacguca

SEQ ID NO: 1998075 - RNA, 19 nt, Artificial Sequence
  Description of Artificial Sequence: Synthetic oligonucleotide
ggucuuaucaaugcugaga

SEQ ID NO: 1998076 - RNA, 19 nt, Artificial Sequence
  Description of Artificial Sequence: Synthetic oligonucleotide
agggucaugccgaauccag

SEQ ID NO: 1998077 - RNA, 19 nt, Artificial Sequence
  Description of Artificial Sequence: Synthetic oligonucleotide
agccacgaccgggacacgc

SEQ ID NO: 1998078 - RNA, 19 nt, Artificial Sequence
  Description of Artificial Sequence: Synthetic oligonucleotide
uacgcuccgggacauccaa

SEQ ID NO: 1998079 - RNA, 19 nt, Artificial Sequence
  Description of Artificial Sequence: Synthetic oligonucleotide
uucucuucuggcccagguu

SEQ ID NO: 1998080 - RNA, 19 nt, Artificial Sequence
  Description of Artificial Sequence: Synthetic oligonucleotide
uuuccccacugauugggua

SEQ ID NO: 1998081 - RNA, 19 nt, Artificial Sequence
  Description of Artificial Sequence: Synthetic oligonucleotide
acacgcuguccauaccuga

SEQ ID NO: 1998082 - RNA, 19 nt, Artificial Sequence
  Description of Artificial Sequence: Synthetic oligonucleotide
gaacaggcacagcucacaa

SEQ ID NO: 1998083 - RNA, 19 nt, Artificial Sequence
  Description of Artificial Sequence: Synthetic oligonucleotide
cuucacgcagguaggcauc

SEQ ID NO: 1998084 - RNA, 19 nt, Artificial Sequence
  Description of Artificial Sequence: Synthetic oligonucleotide
ccgauuucugugcaauagg

SEQ ID NO: 1998085 - RNA, 19 nt, Artificial Sequence
  Description of Artificial Sequence: Synthetic oligonucleotide
cugcacacagggucaugcc

SEQ ID NO: 1998086 - RNA, 19 nt, Artificial Sequence
  Description of Artificial Sequence: Synthetic oligonucleotide
aucaucguuuugugccaug

SEQ ID NO: 1998087 - RNA, 19 nt, Artificial Sequence
  Description of Artificial Sequence: Synthetic oligonucleotide
gcuaaacagcuauugaacu

SEQ ID NO: 1998088 - RNA, 19 nt, Artificial Sequence
  Description of Artificial Sequence: Synthetic oligonucleotide
ucacgcucaagggcuaaga

SEQ ID NO: 1998089 - RNA, 19 nt, Artificial Sequence
  Description of Artificial Sequence: Synthetic oligonucleotide
caaagacacagcccuccuc

SEQ ID NO: 1998090 - RNA, 19 nt, Artificial Sequence
  Description of Artificial Sequence: Synthetic oligonucleotide
gacacgcuguccauaccug

SEQ ID NO: 1998091 - RNA, 19 nt, Artificial Sequence
  Description of Artificial Sequence: Synthetic oligonucleotide
augcuucguuacuaagaga

SEQ ID NO: 1998092 - RNA, 19 nt, Artificial Sequence
  Description of Artificial Sequence: Synthetic oligonucleotide
cuaagagauugaggcuccg

SEQ ID NO: 1998093 - RNA, 19 nt, Artificial Sequence
  Description of Artificial Sequence: Synthetic oligonucleotide
caccugugacuucaccagc

SEQ ID NO: 1998094 - RNA, 19 nt, Artificial Sequence
  Description of Artificial Sequence: Synthetic oligonucleotide
gccaucaccugcuuucccc

SEQ ID NO: 1998095 - RNA, 19 nt, Artificial Sequence
  Description of Artificial Sequence: Synthetic oligonucleotide
cauuaaugcuucguuacua

SEQ ID NO: 1998096 - RNA, 19 nt, Artificial Sequence
  Description of Artificial Sequence: Synthetic oligonucleotide
agccgagugggacaguguu

SEQ ID NO: 1998097 - RNA, 19 nt, Artificial Sequence
  Description of Artificial Sequence: Synthetic oligonucleotide
gccgaauccagccaucauc

SEQ ID NO: 1998098 - RNA, 19 nt, Artificial Sequence
  Description of Artificial Sequence: Synthetic oligonucleotide
ggguacggcagaaaaggcc

SEQ ID NO: 1998099 - RNA, 19 nt, Artificial Sequence
  Description of Artificial Sequence: Synthetic oligonucleotide
ugccacacuucaucuuccu

SEQ ID NO: 1998100 - RNA, 19 nt, Artificial Sequence
  Description of Artificial Sequence: Synthetic oligonucleotide
gucuccuaagaguuggggu

SEQ ID NO: 1998101 - RNA, 19 nt, Artificial Sequence
  Description of Artificial Sequence: Synthetic oligonucleotide
cuaaacagcuauugaacuu

SEQ ID NO: 1998102 - RNA, 19 nt, Artificial Sequence
  Description of Artificial Sequence: Synthetic oligonucleotide
gauugaggcuccgauuucu

SEQ ID NO: 1998103 - RNA, 19 nt, Artificial Sequence
  Description of Artificial Sequence: Synthetic oligonucleotide
guauuccugcugcuuugac

SEQ ID NO: 1998104 - RNA, 19 nt, Artificial Sequence
  Description of Artificial Sequence: Synthetic oligonucleotide
auugaggcuccgauuucug

SEQ ID NO: 1998105 - RNA, 19 nt, Artificial Sequence
  Description of Artificial Sequence: Synthetic oligonucleotide
ggaggcuacgcuccgggac

SEQ ID NO: 1998106 - RNA, 19 nt, Artificial Sequence
  Description of Artificial Sequence: Synthetic oligonucleotide
aucuucacgcagguaggca

SEQ ID NO: 1998107 - RNA, 19 nt, Artificial Sequence
  Description of Artificial Sequence: Synthetic oligonucleotide
accugugacuucaccagcu

SEQ ID NO: 1998108 - RNA, 19 nt, Artificial Sequence
  Description of Artificial Sequence: Synthetic oligonucleotide
uggcgguuauagaggccug

SEQ ID NO: 1998109 - RNA, 19 nt, Artificial Sequence
  Description of Artificial Sequence: Synthetic oligonucleotide
caugccgaauccagccauc

SEQ ID NO: 1998110 - RNA, 19 nt, Artificial Sequence
  Description of Artificial Sequence: Synthetic oligonucleotide
ucccgcggcggacggacgc

SEQ ID NO: 1998111 - RNA, 19 nt, Artificial Sequence
  Description of Artificial Sequence: Synthetic oligonucleotide
cacgcagguaggcauccuc

SEQ ID NO: 1998112 - RNA, 19 nt, Artificial Sequence
  Description of Artificial Sequence: Synthetic oligonucleotide
ggacaguguucaaugaauc

SEQ ID NO: 1998113 - RNA, 19 nt, Artificial Sequence
  Description of Artificial Sequence: Synthetic oligonucleotide
gcuauugaacuugagggua

SEQ ID NO: 1998114 - RNA, 19 nt, Artificial Sequence
  Description of Artificial Sequence: Synthetic oligonucleotide
uacggcagaaaaggccccu

SEQ ID NO: 1998115 - RNA, 19 nt, Artificial Sequence
  Description of Artificial Sequence: Synthetic oligonucleotide
acagaaagguggaggugcu

SEQ ID NO: 1998116 - RNA, 19 nt, Artificial Sequence
  Description of Artificial Sequence: Synthetic oligonucleotide
ucacccgcuuccugcauuu

SEQ ID NO: 1998117 - RNA, 19 nt, Artificial Sequence
  Description of Artificial Sequence: Synthetic oligonucleotide
ucaagcccucaaucuucac

SEQ ID NO: 1998118 - RNA, 19 nt, Artificial Sequence
  Description of Artificial Sequence: Synthetic oligonucleotide
acagcguuucuuagaauua

SEQ ID NO: 1998119 - RNA, 19 nt, Artificial Sequence
  Description of Artificial Sequence: Synthetic oligonucleotide
aaucacgcucaagggcuaa

SEQ ID NO: 1998120 - RNA, 19 nt, Artificial Sequence
  Description of Artificial Sequence: Synthetic oligonucleotide
cagcccucucuucacccgc

SEQ ID NO: 1998121 - RNA, 19 nt, Artificial Sequence
  Description of Artificial Sequence: Synthetic oligonucleotide
ggaacugcacacaggguca

SEQ ID NO: 1998122 - RNA, 19 nt, Artificial Sequence
  Description of Artificial Sequence: Synthetic oligonucleotide
cuuuguauacucagugauu

SEQ ID NO: 1998123 - RNA, 19 nt, Artificial Sequence
  Description of Artificial Sequence: Synthetic oligonucleotide
aggcccauaaagacugaga

SEQ ID NO: 1998124 - RNA, 19 nt, Artificial Sequence
  Description of Artificial Sequence: Synthetic oligonucleotide
ggccugaucggcuccaguc

SEQ ID NO: 1998125 - RNA, 19 nt, Artificial Sequence
  Description of Artificial Sequence: Synthetic oligonucleotide
caucaccugcuuuccccac

SEQ ID NO: 1998126 - RNA, 19 nt, Artificial Sequence
  Description of Artificial Sequence: Synthetic oligonucleotide
gcccagguuggugaaaugc

SEQ ID NO: 1998127 - RNA, 19 nt, Artificial Sequence
  Description of Artificial Sequence: Synthetic oligonucleotide
uccccacugauuggguaga

SEQ ID NO: 1998128 - RNA, 19 nt, Artificial Sequence
  Description of Artificial Sequence: Synthetic oligonucleotide
gccuuuguauacucaguga

SEQ ID NO: 1998129 - RNA, 19 nt, Artificial Sequence
  Description of Artificial Sequence: Synthetic oligonucleotide
gcccucaaucuucacgcag

SEQ ID NO: 1998130 - RNA, 19 nt, Artificial Sequence
  Description of Artificial Sequence: Synthetic oligonucleotide
gugacacuagguggaggcc

SEQ ID NO: 1998131 - RNA, 19 nt, Artificial Sequence
  Description of Artificial Sequence: Synthetic oligonucleotide
gucgauacagugacacuaa

SEQ ID NO: 1998132 - RNA, 19 nt, Artificial Sequence
  Description of Artificial Sequence: Synthetic oligonucleotide
cuuguguauugucgauaca

SEQ ID NO: 1998133 - RNA, 19 nt, Artificial Sequence
  Description of Artificial Sequence: Synthetic oligonucleotide
ugccgaauccagccaucau

SEQ ID NO: 1998134 - RNA, 19 nt, Artificial Sequence
  Description of Artificial Sequence: Synthetic oligonucleotide
aucacgcucaagggcuaag

SEQ ID NO: 1998135 - RNA, 19 nt, Artificial Sequence
  Description of Artificial Sequence: Synthetic oligonucleotide
augccgaauccagccauca

SEQ ID NO: 1998136 - RNA, 19 nt, Artificial Sequence
  Description of Artificial Sequence: Synthetic oligonucleotide
uuugugccauggucuuauc

SEQ ID NO: 1998137 - RNA, 19 nt, Artificial Sequence
  Description of Artificial Sequence: Synthetic oligonucleotide
gcuacgcuccgggacaucc

SEQ ID NO: 1998138 - RNA, 19 nt, Artificial Sequence
  Description of Artificial Sequence: Synthetic oligonucleotide
gguuugggacagaaaggug

SEQ ID NO: 1998139 - RNA, 19 nt, Artificial Sequence
  Description of Artificial Sequence: Synthetic oligonucleotide
cuccuauaaucaccugcca

SEQ ID NO: 1998140 - RNA, 19 nt, Artificial Sequence
  Description of Artificial Sequence: Synthetic oligonucleotide
caagggcagaaccuguugu

SEQ ID NO: 1998141 - RNA, 19 nt, Artificial Sequence
  Description of Artificial Sequence: Synthetic oligonucleotide
guguucaaugaaucacgcu

SEQ ID NO: 1998142 - RNA, 19 nt, Artificial Sequence
  Description of Artificial Sequence: Synthetic oligonucleotide
agcccucaaucuucacgca

SEQ ID NO: 1998143 - RNA, 19 nt, Artificial Sequence
  Description of Artificial Sequence: Synthetic oligonucleotide
uccuaagaguuggggugac

SEQ ID NO: 1998144 - RNA, 19 nt, Artificial Sequence
  Description of Artificial Sequence: Synthetic oligonucleotide
cgauuucugugcaauagga

SEQ ID NO: 1998145 - RNA, 19 nt, Artificial Sequence
  Description of Artificial Sequence: Synthetic oligonucleotide
guacggcagaaaaggcccc

SEQ ID NO: 1998146 - RNA, 19 nt, Artificial Sequence
  Description of Artificial Sequence: Synthetic oligonucleotide
auccaacuucucagagccg

SEQ ID NO: 1998147 - RNA, 19 nt, Artificial Sequence
  Description of Artificial Sequence: Synthetic oligonucleotide
cuccuaagaguugggguga

SEQ ID NO: 1998148 - RNA, 19 nt, Artificial Sequence
  Description of Artificial Sequence: Synthetic oligonucleotide
ggucagcccucucuucacc

SEQ ID NO: 1998149 - RNA, 19 nt, Artificial Sequence
  Description of Artificial Sequence: Synthetic oligonucleotide
cacgcuguccauaccugaa

SEQ ID NO: 1998150 - RNA, 19 nt, Artificial Sequence
  Description of Artificial Sequence: Synthetic oligonucleotide
ggacacgcuguccauaccu

SEQ ID NO: 1998151 - RNA, 19 nt, Artificial Sequence
  Description of Artificial Sequence: Synthetic oligonucleotide
cuggcgguuauagaggccu

SEQ ID NO: 1998152 - RNA, 19 nt, Artificial Sequence
  Description of Artificial Sequence: Synthetic oligonucleotide
caucccgcggcggacggac

SEQ ID NO: 1998153 - RNA, 19 nt, Artificial Sequence
  Description of Artificial Sequence: Synthetic oligonucleotide
ggagccgagugggacagug

SEQ ID NO: 1998154 - RNA, 19 nt, Artificial Sequence
  Description of Artificial Sequence: Synthetic oligonucleotide
cacgcucaagggcuaagaa

SEQ ID NO: 1998155 - RNA, 19 nt, Artificial Sequence
  Description of Artificial Sequence: Synthetic oligonucleotide
cugacaggcuaacugcagu

SEQ ID NO: 1998156 - RNA, 19 nt, Artificial Sequence
  Description of Artificial Sequence: Synthetic oligonucleotide
ccugaucggcuccagucug

SEQ ID NO: 1998157 - RNA, 19 nt, Artificial Sequence
  Description of Artificial Sequence: Synthetic oligonucleotide
augugauuccuggcgguua

SEQ ID NO: 1998158 - RNA, 19 nt, Artificial Sequence
  Description of Artificial Sequence: Synthetic oligonucleotide
ggacagaaagguggaggug

SEQ ID NO: 1998159 - RNA, 19 nt, Artificial Sequence
  Description of Artificial Sequence: Synthetic oligonucleotide
gggcagaaccuguugucuc

SEQ ID NO: 1998160 - RNA, 19 nt, Artificial Sequence
  Description of Artificial Sequence: Synthetic oligonucleotide
accugccacacuucaucuu

SEQ ID NO: 1998161 - RNA, 19 nt, Artificial Sequence
  Description of Artificial Sequence: Synthetic oligonucleotide
cugaucggcuccagucuga

SEQ ID NO: 1998162 - RNA, 19 nt, Artificial Sequence
  Description of Artificial Sequence: Synthetic oligonucleotide
augcugagaaacagcguuu

SEQ ID NO: 1998163 - RNA, 19 nt, Artificial Sequence
  Description of Artificial Sequence: Synthetic oligonucleotide
ccuuuguauacucagugau

SEQ ID NO: 1998164 - RNA, 19 nt, Artificial Sequence
  Description of Artificial Sequence: Synthetic oligonucleotide
aggcaagagaggagccgag

SEQ ID NO: 1998165 - RNA, 19 nt, Artificial Sequence
  Description of Artificial Sequence: Synthetic oligonucleotide
agcucacaaaaggcuucug

SEQ ID NO: 1998166 - RNA, 19 nt, Artificial Sequence
  Description of Artificial Sequence: Synthetic oligonucleotide
cuuuggguaugagguaaaa

SEQ ID NO: 1998167 - RNA, 19 nt, Artificial Sequence
  Description of Artificial Sequence: Synthetic oligonucleotide
ggcggacggacgccggacg

SEQ ID NO: 1998168 - RNA, 19 nt, Artificial Sequence
  Description of Artificial Sequence: Synthetic oligonucleotide
gagccgccaucccgcggcg

SEQ ID NO: 1998169 - RNA, 19 nt, Artificial Sequence
  Description of Artificial Sequence: Synthetic oligonucleotide
cugacuggcaagggcagaa

SEQ ID NO: 1998170 - RNA, 19 nt, Artificial Sequence
  Description of Artificial Sequence: Synthetic oligonucleotide
caucagagcauaugugguu

SEQ ID NO: 1998171 - RNA, 19 nt, Artificial Sequence
  Description of Artificial Sequence: Synthetic oligonucleotide
cugagaaacagcguuucuu

SEQ ID NO: 1998172 - RNA, 19 nt, Artificial Sequence
  Description of Artificial Sequence: Synthetic oligonucleotide
gcacacagggucaugccga

SEQ ID NO: 1998173 - RNA, 19 nt, Artificial Sequence
  Description of Artificial Sequence: Synthetic oligonucleotide
aggccugaucggcuccagu

SEQ ID NO: 1998174 - RNA, 19 nt, Artificial Sequence
  Description of Artificial Sequence: Synthetic oligonucleotide
cagagccgccaucccgcgg

SEQ ID NO: 1998175 - RNA, 19 nt, Artificial Sequence
  Description of Artificial Sequence: Synthetic oligonucleotide
cagguuggugaaaugcuuu

SEQ ID NO: 1998176 - RNA, 19 nt, Artificial Sequence
  Description of Artificial Sequence: Synthetic oligonucleotide
gggugacacuagguggagg

SEQ ID NO: 1998177 - RNA, 19 nt, Artificial Sequence
  Description of Artificial Sequence: Synthetic oligonucleotide
gggcuaagaaccaggccca

SEQ ID NO: 1998178 - RNA, 19 nt, Artificial Sequence
  Description of Artificial Sequence: Synthetic oligonucleotide
caacucuugugucuguguu

SEQ ID NO: 1998179 - RNA, 19 nt, Artificial Sequence
  Description of Artificial Sequence: Synthetic oligonucleotide
accgggacacgcuguccau

SEQ ID NO: 1998180 - RNA, 19 nt, Artificial Sequence
  Description of Artificial Sequence: Synthetic oligonucleotide
gaaucacgcucaagggcua

SEQ ID NO: 1998181 - RNA, 19 nt, Artificial Sequence
  Description of Artificial Sequence: Synthetic oligonucleotide
cuacgcuccgggacaucca

SEQ ID NO: 1998182 - RNA, 19 nt, Artificial Sequence
  Description of Artificial Sequence: Synthetic oligonucleotide
acgcuccgggacauccaac

SEQ ID NO: 1998183 - RNA, 19 nt, Artificial Sequence
  Description of Artificial Sequence: Synthetic oligonucleotide
gucauccaagugguuucca

SEQ ID NO: 1998184 - RNA, 19 nt, Artificial Sequence
  Description of Artificial Sequence: Synthetic oligonucleotide
gaugugauuccuggcgguu

SEQ ID NO: 1998185 - RNA, 19 nt, Artificial Sequence
  Description of Artificial Sequence: Synthetic oligonucleotide
cagugacacuaacguauaa

SEQ ID NO: 1998186 - RNA, 19 nt, Artificial Sequence
  Description of Artificial Sequence: Synthetic oligonucleotide
ccgagugggacaguguuca

SEQ ID NO: 1998187 - RNA, 19 nt, Artificial Sequence
  Description of Artificial Sequence: Synthetic oligonucleotide
gggcucaagcccucaaucu

SEQ ID NO: 1998188 - RNA, 19 nt, Artificial Sequence
  Description of Artificial Sequence: Synthetic oligonucleotide
cuccgauuucugugcaaua

SEQ ID NO: 1998189 - RNA, 19 nt, Artificial Sequence
  Description of Artificial Sequence: Synthetic oligonucleotide
aggugcuaucugucaccaa

SEQ ID NO: 1998190 - RNA, 19 nt, Artificial Sequence
  Description of Artificial Sequence: Synthetic oligonucleotide
gggacaguguucaaugaau

SEQ ID NO: 1998191 - RNA, 19 nt, Artificial Sequence
  Description of Artificial Sequence: Synthetic oligonucleotide
caccugccacacuucaucu

SEQ ID NO: 1998192 - RNA, 19 nt, Artificial Sequence
  Description of Artificial Sequence: Synthetic oligonucleotide
ggaugugauuccuggcggu

SEQ ID NO: 1998193 - RNA, 19 nt, Artificial Sequence
  Description of Artificial Sequence: Synthetic oligonucleotide
caucguuuugugccauggu

SEQ ID NO: 1998194 - RNA, 19 nt, Artificial Sequence
  Description of Artificial Sequence: Synthetic oligonucleotide
ccuggcgguuauagaggcc

SEQ ID NO: 1998195 - RNA, 19 nt, Artificial Sequence
  Description of Artificial Sequence: Synthetic oligonucleotide
cuuuccccacugauugggu

SEQ ID NO: 1998196 - RNA, 19 nt, Artificial Sequence
  Description of Artificial Sequence: Synthetic oligonucleotide
gggacacgcuguccauacc

SEQ ID NO: 1998197 - RNA, 19 nt, Artificial Sequence
  Description of Artificial Sequence: Synthetic oligonucleotide
gaucggcuccagucugaua

SEQ ID NO: 1998198 - RNA, 19 nt, Artificial Sequence
  Description of Artificial Sequence: Synthetic oligonucleotide
gcaacucuugugucugugu

SEQ ID NO: 1998199 - RNA, 19 nt, Artificial Sequence
  Description of Artificial Sequence: Synthetic oligonucleotide
gacacuagguggaggccau

SEQ ID NO: 1998200 - RNA, 19 nt, Artificial Sequence
  Description of Artificial Sequence: Synthetic oligonucleotide
ggggugacacuagguggag

SEQ ID NO: 1998201 - RNA, 19 nt, Artificial Sequence
  Description of Artificial Sequence: Synthetic oligonucleotide
guuuugugccauggucuua

SEQ ID NO: 1998202 - RNA, 19 nt, Artificial Sequence
  Description of Artificial Sequence: Synthetic oligonucleotide
gcggacggacgccggacgc

SEQ ID NO: 1998203 - RNA, 19 nt, Artificial Sequence
  Description of Artificial Sequence: Synthetic oligonucleotide
gccaucccgcggcggacgg

SEQ ID NO: 1998204 - RNA, 19 nt, Artificial Sequence
  Description of Artificial Sequence: Synthetic oligonucleotide
ggcuaacugcagucaucca

SEQ ID NO: 1998205 - RNA, 19 nt, Artificial Sequence
  Description of Artificial Sequence: Synthetic oligonucleotide
gcucaagggcuaagaacca

SEQ ID NO: 1998206 - RNA, 19 nt, Artificial Sequence
  Description of Artificial Sequence: Synthetic oligonucleotide
ggcgguuauagaggccuga

SEQ ID NO: 1998207 - RNA, 19 nt, Artificial Sequence
  Description of Artificial Sequence: Synthetic oligonucleotide
ggacggacgccggacgcac

SEQ ID NO: 1998208 - RNA, 19 nt, Artificial Sequence
  Description of Artificial Sequence: Synthetic oligonucleotide
cuguagcuaaacagcuauu

SEQ ID NO: 1998209 - RNA, 19 nt, Artificial Sequence
  Description of Artificial Sequence: Synthetic oligonucleotide
gccugaucggcuccagucu

SEQ ID NO: 1998210 - RNA, 19 nt, Artificial Sequence
  Description of Artificial Sequence: Synthetic oligonucleotide
ggcuccagucugauaggca

SEQ ID NO: 1998211 - RNA, 19 nt, Artificial Sequence
  Description of Artificial Sequence: Synthetic oligonucleotide
ccacgaccgggacacgcug

SEQ ID NO: 1998212 - RNA, 19 nt, Artificial Sequence
  Description of Artificial Sequence: Synthetic oligonucleotide
cgguuauagaggccugauc

SEQ ID NO: 1998213 - RNA, 19 nt, Artificial Sequence
  Description of Artificial Sequence: Synthetic oligonucleotide
agagggcagugggcucaag

SEQ ID NO: 1998214 - RNA, 19 nt, Artificial Sequence
  Description of Artificial Sequence: Synthetic oligonucleotide
cagcucacaaaaggcuucu

SEQ ID NO: 1998215 - RNA, 19 nt, Artificial Sequence
  Description of Artificial Sequence: Synthetic oligonucleotide
caucucaacucuggcuccu

SEQ ID NO: 1998216 - RNA, 19 nt, Artificial Sequence
  Description of Artificial Sequence: Synthetic oligonucleotide
aggcuacgcuccgggacau

SEQ ID NO: 1998217 - RNA, 19 nt, Artificial Sequence
  Description of Artificial Sequence: Synthetic oligonucleotide
cccgcuuccugcauuuucu

SEQ ID NO: 1998218 - RNA, 19 nt, Artificial Sequence
  Description of Artificial Sequence: Synthetic oligonucleotide
gagagggcagugggcucaa

SEQ ID NO: 1998219 - RNA, 19 nt, Artificial Sequence
  Description of Artificial Sequence: Synthetic oligonucleotide
gggaggcuacgcuccggga

SEQ ID NO: 1998220 - RNA, 19 nt, Artificial Sequence
  Description of Artificial Sequence: Synthetic oligonucleotide
aucccgcggcggacggacg

SEQ ID NO: 1998221 - RNA, 19 nt, Artificial Sequence
  Description of Artificial Sequence: Synthetic oligonucleotide
cacgaccgggacacgcugu

SEQ ID NO: 1998222 - RNA, 19 nt, Artificial Sequence
  Description of Artificial Sequence: Synthetic oligonucleotide
gccgagugggacaguguuc

SEQ ID NO: 1998223 - RNA, 19 nt, Artificial Sequence
  Description of Artificial Sequence: Synthetic oligonucleotide
ccagcuugguuucugcuuu

SEQ ID NO: 1998224 - RNA, 19 nt, Artificial Sequence
  Description of Artificial Sequence: Synthetic oligonucleotide
gccgccaucccgcggcgga

SEQ ID NO: 1998225 - RNA, 19 nt, Artificial Sequence
  Description of Artificial Sequence: Synthetic oligonucleotide
gagccgagugggacagugu

SEQ ID NO: 1998226 - RNA, 19 nt, Artificial Sequence
  Description of Artificial Sequence: Synthetic oligonucleotide
cagaaagguggaggugcua

SEQ ID NO: 1998227 - RNA, 19 nt, Artificial Sequence
  Description of Artificial Sequence: Synthetic oligonucleotide
gcuaagaaccaggcccaua

SEQ ID NO: 1998228 - RNA, 19 nt, Artificial Sequence
  Description of Artificial Sequence: Synthetic oligonucleotide
gugauuccuggcgguuaua

SEQ ID NO: 1998229 - RNA, 19 nt, Artificial Sequence
  Description of Artificial Sequence: Synthetic oligonucleotide
cggcagaaaaggccccuuc

SEQ ID NO: 1998230 - RNA, 19 nt, Artificial Sequence
  Description of Artificial Sequence: Synthetic oligonucleotide
guguuucagccagcuuggu

SEQ ID NO: 1998231 - RNA, 19 nt, Artificial Sequence
  Description of Artificial Sequence: Synthetic oligonucleotide
cccacugauuggguagaga

SEQ ID NO: 1998232 - RNA, 19 nt, Artificial Sequence
  Description of Artificial Sequence: Synthetic oligonucleotide
gcuucguuacuaagagauu

SEQ ID NO: 1998233 - RNA, 19 nt, Artificial Sequence
  Description of Artificial Sequence: Synthetic oligonucleotide
cgcuccgggacauccaacu

SEQ ID NO: 1998234 - RNA, 19 nt, Artificial Sequence
  Description of Artificial Sequence: Synthetic oligonucleotide
gcccuccucauuaaugcuu

SEQ ID NO: 1998235 - RNA, 19 nt, Artificial Sequence
  Description of Artificial Sequence: Synthetic oligonucleotide
gcgguuauagaggccugau

SEQ ID NO: 1998236 - RNA, 19 nt, Artificial Sequence
  Description of Artificial Sequence: Synthetic oligonucleotide
ccaggcccauaaagacuga

SEQ ID NO: 1998237 - RNA, 19 nt, Artificial Sequence
  Description of Artificial Sequence: Synthetic oligonucleotide
ccgcggcggacggacgccg

SEQ ID NO: 1998238 - RNA, 19 nt, Artificial Sequence
  Description of Artificial Sequence: Synthetic oligonucleotide
gccacgaccgggacacgcu

SEQ ID NO: 1998239 - RNA, 19 nt, Artificial Sequence
  Description of Artificial Sequence: Synthetic oligonucleotide
cgccaucccgcggcggacg

SEQ ID NO: 1998240 - RNA, 19 nt, Artificial Sequence
  Description of Artificial Sequence: Synthetic oligonucleotide
ccugcugcuuugacgucau

SEQ ID NO: 1998241 - RNA, 19 nt, Artificial Sequence
  Description of Artificial Sequence: Synthetic oligonucleotide
ggcuacgcuccgggacauc

SEQ ID NO: 1998242 - RNA, 19 nt, Artificial Sequence
  Description of Artificial Sequence: Synthetic oligonucleotide
cgaauccagccaucaucgu

SEQ ID NO: 1998243 - RNA, 19 nt, Artificial Sequence
  Description of Artificial Sequence: Synthetic oligonucleotide
ccgggacacgcuguccaua

SEQ ID NO: 1998244 - RNA, 19 nt, Artificial Sequence
  Description of Artificial Sequence: Synthetic oligonucleotide
cggacggacgccggacgca

SEQ ID NO: 1998245 - RNA, 19 nt, Artificial Sequence
  Description of Artificial Sequence: Synthetic oligonucleotide
ccagucugauaggcagccu

SEQ ID NO: 1998246 - RNA, 19 nt, Artificial Sequence
  Description of Artificial Sequence: Synthetic oligonucleotide
ccaucccgcggcggacgga

SEQ ID NO: 1998247 - RNA, 19 nt, Artificial Sequence
  Description of Artificial Sequence: Synthetic oligonucleotide
cacccgcuuccugcauuuu

SEQ ID NO: 1998248 - RNA, 19 nt, Artificial Sequence
  Description of Artificial Sequence: Synthetic oligonucleotide
aaguagaucacacaggagc

SEQ ID NO: 1998249 - RNA, 19 nt, Artificial Sequence
  Description of Artificial Sequence: Synthetic oligonucleotide
gaaacgguggccuacaggg

SEQ ID NO: 1998250 - RNA, 19 nt, Artificial Sequence
  Description of Artificial Sequence: Synthetic oligonucleotide
agagcagcgauuuagcaac

SEQ ID NO: 1998251 - RNA, 19 nt, Artificial Sequence
  Description of Artificial Sequence: Synthetic oligonucleotide
gaauagucgagucaccugg

SEQ ID NO: 1998252 - RNA, 19 nt, Artificial Sequence
  Description of Artificial Sequence: Synthetic oligonucleotide
guuagaagcaaugaggugc

SEQ ID NO: 1998253 - RNA, 19 nt, Artificial Sequence
  Description of Artificial Sequence: Synthetic oligonucleotide
cuuaugguagacgagagcc

SEQ ID NO: 1998254 - RNA, 19 nt, Artificial Sequence
  Description of Artificial Sequence: Synthetic oligonucleotide
uguguauuugcccauggca

SEQ ID NO: 1998255 - RNA, 19 nt, Artificial Sequence
  Description of Artificial Sequence: Synthetic oligonucleotide
agcaauacaguucagugcu

SEQ ID NO: 1998256 - RNA, 19 nt, Artificial Sequence
  Description of Artificial Sequence: Synthetic oligonucleotide
ucuaccagcggguauaggc

SEQ ID NO: 1998257 - RNA, 19 nt, Artificial Sequence
  Description of Artificial Sequence: Synthetic oligonucleotide
aagugcgucagagaacucc

SEQ ID NO: 1998258 - RNA, 19 nt, Artificial Sequence
  Description of Artificial Sequence: Synthetic oligonucleotide
aacaaugcucauuuugcug

SEQ ID NO: 1998259 - RNA, 19 nt, Artificial Sequence
  Description of Artificial Sequence: Synthetic oligonucleotide
uugucaauggagcugccag

SEQ ID NO: 1998260 - RNA, 19 nt, Artificial Sequence
  Description of Artificial Sequence: Synthetic oligonucleotide
acagccgucagugaggccc

SEQ ID NO: 1998261 - RNA, 19 nt, Artificial Sequence
  Description of Artificial Sequence: Synthetic oligonucleotide
uuagaagcaaugaggugcc

SEQ ID NO: 1998262 - RNA, 19 nt, Artificial Sequence
  Description of Artificial Sequence: Synthetic oligonucleotide
gauguucgcagaauagucg

SEQ ID NO: 1998263 - RNA, 19 nt, Artificial Sequence
  Description of Artificial Sequence: Synthetic oligonucleotide
uguacaggcucuccugugg

SEQ ID NO: 1998264 - RNA, 19 nt, Artificial Sequence
  Description of Artificial Sequence: Synthetic oligonucleotide
uuaugguagacgagagccg

SEQ ID NO: 1998265 - RNA, 19 nt, Artificial Sequence
  Description of Artificial Sequence: Synthetic oligonucleotide
uggcaagaggcacugagcc

SEQ ID NO: 1998266 - RNA, 19 nt, Artificial Sequence
  Description of Artificial Sequence: Synthetic oligonucleotide
acuagugcgggccacaaga

SEQ ID NO: 1998267 - RNA, 19 nt, Artificial Sequence
  Description of Artificial Sequence: Synthetic oligonucleotide
uaagcugucccgcaaguac

SEQ ID NO: 1998268 - RNA, 19 nt, Artificial Sequence
  Description of Artificial Sequence: Synthetic oligonucleotide
uacucaggaagaaacgugu

SEQ ID NO: 1998269 - RNA, 19 nt, Artificial Sequence
  Description of Artificial Sequence: Synthetic oligonucleotide
caagcuucucuacagugcg

SEQ ID NO: 1998270 - RNA, 19 nt, Artificial Sequence
  Description of Artificial Sequence: Synthetic oligonucleotide
agugacaguggucccaccg

SEQ ID NO: 1998271 - RNA, 19 nt, Artificial Sequence
  Description of Artificial Sequence: Synthetic oligonucleotide
acauagaucucugccagcg

SEQ ID NO: 1998272 - RNA, 19 nt, Artificial Sequence
  Description of Artificial Sequence: Synthetic oligonucleotide
uagucgagucaccugggcg

SEQ ID NO: 1998273 - RNA, 19 nt, Artificial Sequence
  Description of Artificial Sequence: Synthetic oligonucleotide
uacagagcugccuugggca

SEQ ID NO: 1998274 - RNA, 19 nt, Artificial Sequence
  Description of Artificial Sequence: Synthetic oligonucleotide
aaugaggugcccuccugug

SEQ ID NO: 1998275 - RNA, 19 nt, Artificial Sequence
  Description of Artificial Sequence: Synthetic oligonucleotide
cuggcagucaagcaguagc

SEQ ID NO: 1998276 - RNA, 19 nt, Artificial Sequence
  Description of Artificial Sequence: Synthetic oligonucleotide
caauggagcugccaguugg

SEQ ID NO: 1998277 - RNA, 19 nt, Artificial Sequence
  Description of Artificial Sequence: Synthetic oligonucleotide
uguauuugcccauggcaug

SEQ ID NO: 1998278 - RNA, 19 nt, Artificial Sequence
  Description of Artificial Sequence: Synthetic oligonucleotide
ucagagaacucccugucuc

SEQ ID NO: 1998279 - RNA, 19 nt, Artificial Sequence
  Description of Artificial Sequence: Synthetic oligonucleotide
caguggaucaccacagccg

SEQ ID NO: 1998280 - RNA, 19 nt, Artificial Sequence
  Description of Artificial Sequence: Synthetic oligonucleotide
ucucuccaagagauguucg

SEQ ID NO: 1998281 - RNA, 19 nt, Artificial Sequence
  Description of Artificial Sequence: Synthetic oligonucleotide
gguauaggcgcucagcugc

SEQ ID NO: 1998282 - RNA, 19 nt, Artificial Sequence
  Description of Artificial Sequence: Synthetic oligonucleotide
aagcugucccgcaaguacc

SEQ ID NO: 1998283 - RNA, 19 nt, Artificial Sequence
  Description of Artificial Sequence: Synthetic oligonucleotide
gauacagcaucuccugcgc

SEQ ID NO: 1998284 - RNA, 19 nt, Artificial Sequence
  Description of Artificial Sequence: Synthetic oligonucleotide
auagucgagucaccugggc

SEQ ID NO: 1998285 - RNA, 19 nt, Artificial Sequence
  Description of Artificial Sequence: Synthetic oligonucleotide
cauacgcucuaccagcggg

SEQ ID NO: 1998286 - RNA, 19 nt, Artificial Sequence
  Description of Artificial Sequence: Synthetic oligonucleotide
cuaccagcggguauaggcg

SEQ ID NO: 1998287 - RNA, 19 nt, Artificial Sequence
  Description of Artificial Sequence: Synthetic oligonucleotide
agauguucgcagaauaguc

SEQ ID NO: 1998288 - RNA, 19 nt, Artificial Sequence
  Description of Artificial Sequence: Synthetic oligonucleotide
agaaacgguggccuacagg

SEQ ID NO: 1998289 - RNA, 19 nt, Artificial Sequence
  Description of Artificial Sequence: Synthetic oligonucleotide
uaugguagacgagagccgc

SEQ ID NO: 1998290 - RNA, 19 nt, Artificial Sequence
  Description of Artificial Sequence: Synthetic oligonucleotide
uggagcugccaguuggugg

SEQ ID NO: 1998291 - RNA, 19 nt, Artificial Sequence
  Description of Artificial Sequence: Synthetic oligonucleotide
cacucggccagguucaggg

SEQ ID NO: 1998292 - RNA, 19 nt, Artificial Sequence
  Description of Artificial Sequence: Synthetic oligonucleotide
ucagugcucucuccaagag

SEQ ID NO: 1998293 - RNA, 19 nt, Artificial Sequence
  Description of Artificial Sequence: Synthetic oligonucleotide
acaguggucccaccgcccc

SEQ ID NO: 1998294 - RNA, 19 nt, Artificial Sequence
  Description of Artificial Sequence: Synthetic oligonucleotide
agaauagucgagucaccug

SEQ ID NO: 1998295 - RNA, 19 nt, Artificial Sequence
  Description of Artificial Sequence: Synthetic oligonucleotide
cuacucaggaagaaacgug

SEQ ID NO: 1998296 - RNA, 19 nt, Artificial Sequence
  Description of Artificial Sequence: Synthetic oligonucleotide
accaugcacagcccagucc

SEQ ID NO: 1998297 - RNA, 19 nt, Artificial Sequence
  Description of Artificial Sequence: Synthetic oligonucleotide
agugcgucagagaacuccc

SEQ ID NO: 1998298 - RNA, 19 nt, Artificial Sequence
  Description of Artificial Sequence: Synthetic oligonucleotide
aguggaucaccacagccgu

SEQ ID NO: 1998299 - RNA, 19 nt, Artificial Sequence
  Description of Artificial Sequence: Synthetic oligonucleotide
ccaacaaugcucauuuugc

SEQ ID NO: 1998300 - RNA, 19 nt, Artificial Sequence
  Description of Artificial Sequence: Synthetic oligonucleotide
auguucgcagaauagucga

SEQ ID NO: 1998301 - RNA, 19 nt, Artificial Sequence
  Description of Artificial Sequence: Synthetic oligonucleotide
ggccacaagaaguagauca

SEQ ID NO: 1998302 - RNA, 19 nt, Artificial Sequence
  Description of Artificial Sequence: Synthetic oligonucleotide
aauagucgagucaccuggg

SEQ ID NO: 1998303 - RNA, 19 nt, Artificial Sequence
  Description of Artificial Sequence: Synthetic oligonucleotide
caucagagcagcgauuuag

SEQ ID NO: 1998304 - RNA, 19 nt, Artificial Sequence
  Description of Artificial Sequence: Synthetic oligonucleotide
guauccaagugcgucagag

SEQ ID NO: 1998305 - RNA, 19 nt, Artificial Sequence
  Description of Artificial Sequence: Synthetic oligonucleotide
gguugagcaauacaguuca

SEQ ID NO: 1998306 - RNA, 19 nt, Artificial Sequence
  Description of Artificial Sequence: Synthetic oligonucleotide
ucuccuguggggcaccaug

SEQ ID NO: 1998307 - RNA, 19 nt, Artificial Sequence
  Description of Artificial Sequence: Synthetic oligonucleotide
agucgagucaccugggcga

SEQ ID NO: 1998308 - RNA, 19 nt, Artificial Sequence
  Description of Artificial Sequence: Synthetic oligonucleotide
ccgaugaucaccaagcuuc

SEQ ID NO: 1998309 - RNA, 19 nt, Artificial Sequence
  Description of Artificial Sequence: Synthetic oligonucleotide
ugccacauacuagugcggg

SEQ ID NO: 1998310 - RNA, 19 nt, Artificial Sequence
  Description of Artificial Sequence: Synthetic oligonucleotide
uguucgcagaauagucgag

SEQ ID NO: 1998311 - RNA, 19 nt, Artificial Sequence
  Description of Artificial Sequence: Synthetic oligonucleotide
cuccaagagauguucgcag

SEQ ID NO: 1998312 - RNA, 19 nt, Artificial Sequence
  Description of Artificial Sequence: Synthetic oligonucleotide
agguuagaagcaaugaggu

SEQ ID NO: 1998313 - RNA, 19 nt, Artificial Sequence
  Description of Artificial Sequence: Synthetic oligonucleotide
gcuggguugagcaauacag

SEQ ID NO: 1998314 - RNA, 19 nt, Artificial Sequence
  Description of Artificial Sequence: Synthetic oligonucleotide
guagccgaugaucaccaag

SEQ ID NO: 1998315 - RNA, 19 nt, Artificial Sequence
  Description of Artificial Sequence: Synthetic oligonucleotide
agaagcaucugcuggcagu

SEQ ID NO: 1998316 - RNA, 19 nt, Artificial Sequence
  Description of Artificial Sequence: Synthetic oligonucleotide
acuacucaggaagaaacgu

SEQ ID NO: 1998317 - RNA, 19 nt, Artificial Sequence
  Description of Artificial Sequence: Synthetic oligonucleotide
agucccgacagcaucagag

SEQ ID NO: 1998318 - RNA, 19 nt, Artificial Sequence
  Description of Artificial Sequence: Synthetic oligonucleotide
ugacaguggucccaccgcc

SEQ ID NO: 1998319 - RNA, 19 nt, Artificial Sequence
  Description of Artificial Sequence: Synthetic oligonucleotide
ugcucucuccaagagaugu

SEQ ID NO: 1998320 - RNA, 19 nt, Artificial Sequence
  Description of Artificial Sequence: Synthetic oligonucleotide
cuugaaggaguacagagcu

SEQ ID NO: 1998321 - RNA, 19 nt, Artificial Sequence
  Description of Artificial Sequence: Synthetic oligonucleotide
aagcaguagccgaugauca

SEQ ID NO: 1998322 - RNA, 19 nt, Artificial Sequence
  Description of Artificial Sequence: Synthetic oligonucleotide
uugagcaauacaguucagu

SEQ ID NO: 1998323 - RNA, 19 nt, Artificial Sequence
  Description of Artificial Sequence: Synthetic oligonucleotide
agacgagagccgcaucucg

SEQ ID NO: 1998324 - RNA, 19 nt, Artificial Sequence
  Description of Artificial Sequence: Synthetic oligonucleotide
uccaagagauguucgcaga

SEQ ID NO: 1998325 - RNA, 19 nt, Artificial Sequence
  Description of Artificial Sequence: Synthetic oligonucleotide
gggagacuggucuugaccc

SEQ ID NO: 1998326 - RNA, 19 nt, Artificial Sequence
  Description of Artificial Sequence: Synthetic oligonucleotide
agcaguagccgaugaucac

SEQ ID NO: 1998327 - RNA, 19 nt, Artificial Sequence
  Description of Artificial Sequence: Synthetic oligonucleotide
uuuagcuggaagugacagu

SEQ ID NO: 1998328 - RNA, 19 nt, Artificial Sequence
  Description of Artificial Sequence: Synthetic oligonucleotide
agugcucucuccaagagau

SEQ ID NO: 1998329 - RNA, 19 nt, Artificial Sequence
  Description of Artificial Sequence: Synthetic oligonucleotide
aagaaacgguggccuacag

SEQ ID NO: 1998330 - RNA, 19 nt, Artificial Sequence
  Description of Artificial Sequence: Synthetic oligonucleotide
ucccgacagcaucagagca

SEQ ID NO: 1998331 - RNA, 19 nt, Artificial Sequence
  Description of Artificial Sequence: Synthetic oligonucleotide
uggaucaccacagccguca

SEQ ID NO: 1998332 - RNA, 19 nt, Artificial Sequence
  Description of Artificial Sequence: Synthetic oligonucleotide
auagaucucugccagcguu

SEQ ID NO: 1998333 - RNA, 19 nt, Artificial Sequence
  Description of Artificial Sequence: Synthetic oligonucleotide
ucgcagaauagucgaguca

SEQ ID NO: 1998334 - RNA, 19 nt, Artificial Sequence
  Description of Artificial Sequence: Synthetic oligonucleotide
uucgcagaauagucgaguc

SEQ ID NO: 1998335 - RNA, 19 nt, Artificial Sequence
  Description of Artificial Sequence: Synthetic oligonucleotide
uggggcauacgcucuacca

SEQ ID NO: 1998336 - RNA, 19 nt, Artificial Sequence
  Description of Artificial Sequence: Synthetic oligonucleotide
gaguacagagcugccuugg

SEQ ID NO: 1998337 - RNA, 19 nt, Artificial Sequence
  Description of Artificial Sequence: Synthetic oligonucleotide
agcgauuuagcaacugcag

SEQ ID NO: 1998338 - RNA, 19 nt, Artificial Sequence
  Description of Artificial Sequence: Synthetic oligonucleotide
cauccacgaagaaacggug

SEQ ID NO: 1998339 - RNA, 19 nt, Artificial Sequence
  Description of Artificial Sequence: Synthetic oligonucleotide
ucccgcaaguacccgcugg

SEQ ID NO: 1998340 - RNA, 19 nt, Artificial Sequence
  Description of Artificial Sequence: Synthetic oligonucleotide
ucaauggagcugccaguug

SEQ ID NO: 1998341 - RNA, 19 nt, Artificial Sequence
  Description of Artificial Sequence: Synthetic oligonucleotide
agcaacugcagguauccaa

SEQ ID NO: 1998342 - RNA, 19 nt, Artificial Sequence
  Description of Artificial Sequence: Synthetic oligonucleotide
uagugcgggccacaagaag

SEQ ID NO: 1998343 - RNA, 19 nt, Artificial Sequence
  Description of Artificial Sequence: Synthetic oligonucleotide
uccacuuuucuguggucca

SEQ ID NO: 1998344 - RNA, 19 nt, Artificial Sequence
  Description of Artificial Sequence: Synthetic oligonucleotide
ggugguggaagccaugcug

SEQ ID NO: 1998345 - RNA, 19 nt, Artificial Sequence
  Description of Artificial Sequence: Synthetic oligonucleotide
ugaggugcccuccugugua

SEQ ID NO: 1998346 - RNA, 19 nt, Artificial Sequence
  Description of Artificial Sequence: Synthetic oligonucleotide
agagccgcaucucgagcac

SEQ ID NO: 1998347 - RNA, 19 nt, Artificial Sequence
  Description of Artificial Sequence: Synthetic oligonucleotide
uccaagugcgucagagaac

SEQ ID NO: 1998348 - RNA, 19 nt, Artificial Sequence
  Description of Artificial Sequence: Synthetic oligonucleotide
aacucccugucuccaucag

SEQ ID NO: 1998349 - RNA, 19 nt, Artificial Sequence
  Description of Artificial Sequence: Synthetic oligonucleotide
agacuccacuuuucugugg

SEQ ID NO: 1998350 - RNA, 19 nt, Artificial Sequence
  Description of Artificial Sequence: Synthetic oligonucleotide
uugguggagcggcuaagcu

SEQ ID NO: 1998351 - RNA, 19 nt, Artificial Sequence
  Description of Artificial Sequence: Synthetic oligonucleotide
agcggcuaagcugucccgc

SEQ ID NO: 1998352 - RNA, 19 nt, Artificial Sequence
  Description of Artificial Sequence: Synthetic oligonucleotide
uaccagcggguauaggcgc

SEQ ID NO: 1998353 - RNA, 19 nt, Artificial Sequence
  Description of Artificial Sequence: Synthetic oligonucleotide
agugcgggccacaagaagu

SEQ ID NO: 1998354 - RNA, 19 nt, Artificial Sequence
  Description of Artificial Sequence: Synthetic oligonucleotide
gaggggauccacuggguuc

SEQ ID NO: 1998355 - RNA, 19 nt, Artificial Sequence
  Description of Artificial Sequence: Synthetic oligonucleotide
cagcacguggggcauacgc

SEQ ID NO: 1998356 - RNA, 19 nt, Artificial Sequence
  Description of Artificial Sequence: Synthetic oligonucleotide
acgagagccgcaucucgag

SEQ ID NO: 1998357 - RNA, 19 nt, Artificial Sequence
  Description of Artificial Sequence: Synthetic oligonucleotide
gauccacuggguucccagc

SEQ ID NO: 1998358 - RNA, 19 nt, Artificial Sequence
  Description of Artificial Sequence: Synthetic oligonucleotide
gaucaccaagcuucucuac

SEQ ID NO: 1998359 - RNA, 19 nt, Artificial Sequence
  Description of Artificial Sequence: Synthetic oligonucleotide
uuuugcuguccagggcugg

SEQ ID NO: 1998360 - RNA, 19 nt, Artificial Sequence
  Description of Artificial Sequence: Synthetic oligonucleotide
auaggcgcucagcugccuc

SEQ ID NO: 1998361 - RNA, 19 nt, Artificial Sequence
  Description of Artificial Sequence: Synthetic oligonucleotide
auccacgaagaaacggugg

SEQ ID NO: 1998362 - RNA, 19 nt, Artificial Sequence
  Description of Artificial Sequence: Synthetic oligonucleotide
caggcaggagucccgacag

SEQ ID NO: 1998363 - RNA, 19 nt, Artificial Sequence
  Description of Artificial Sequence: Synthetic oligonucleotide
agauggccaggcuggcugg

SEQ ID NO: 1998364 - RNA, 19 nt, Artificial Sequence
  Description of Artificial Sequence: Synthetic oligonucleotide
cagccuugaaggaguacag

SEQ ID NO: 1998365 - RNA, 19 nt, Artificial Sequence
  Description of Artificial Sequence: Synthetic oligonucleotide
ccuugaaggaguacagagc

SEQ ID NO: 1998366 - RNA, 19 nt, Artificial Sequence
  Description of Artificial Sequence: Synthetic oligonucleotide
ucuugggagacuggucuug

SEQ ID NO: 1998367 - RNA, 19 nt, Artificial Sequence
  Description of Artificial Sequence: Synthetic oligonucleotide
cucaggaagaaacguguca

SEQ ID NO: 1998368 - RNA, 19 nt, Artificial Sequence
  Description of Artificial Sequence: Synthetic oligonucleotide
ucagugaggcccaccacuu

SEQ ID NO: 1998369 - RNA, 19 nt, Artificial Sequence
  Description of Artificial Sequence: Synthetic oligonucleotide
ccagguuagaagcaaugag

SEQ ID NO: 1998370 - RNA, 19 nt, Artificial Sequence
  Description of Artificial Sequence: Synthetic oligonucleotide
ccaugcacagcccaguccc

SEQ ID NO: 1998371 - RNA, 19 nt, Artificial Sequence
  Description of Artificial Sequence: Synthetic oligonucleotide
ccuacaggguggcagagcc

SEQ ID NO: 1998372 - RNA, 19 nt, Artificial Sequence
  Description of Artificial Sequence: Synthetic oligonucleotide
cauuuugcuguccagggcu

SEQ ID NO: 1998373 - RNA, 19 nt, Artificial Sequence
  Description of Artificial Sequence: Synthetic oligonucleotide
gugacaguggucccaccgc

SEQ ID NO: 1998374 - RNA, 19 nt, Artificial Sequence
  Description of Artificial Sequence: Synthetic oligonucleotide
gcugccucagccaacaaug

SEQ ID NO: 1998375 - RNA, 19 nt, Artificial Sequence
  Description of Artificial Sequence: Synthetic oligonucleotide
gaagugacaguggucccac

SEQ ID NO: 1998376 - RNA, 19 nt, Artificial Sequence
  Description of Artificial Sequence: Synthetic oligonucleotide
guagaucacacaggagcag

SEQ ID NO: 1998377 - RNA, 19 nt, Artificial Sequence
  Description of Artificial Sequence: Synthetic oligonucleotide
gcccauggcaugcagcugg

SEQ ID NO: 1998378 - RNA, 19 nt, Artificial Sequence
  Description of Artificial Sequence: Synthetic oligonucleotide
gauuuagcaacugcaggua

SEQ ID NO: 1998379 - RNA, 19 nt, Artificial Sequence
  Description of Artificial Sequence: Synthetic oligonucleotide
ggcgaggggauccacuggg

SEQ ID NO: 1998380 - RNA, 19 nt, Artificial Sequence
  Description of Artificial Sequence: Synthetic oligonucleotide
agcugucccgcaaguaccc

SEQ ID NO: 1998381 - RNA, 19 nt, Artificial Sequence
  Description of Artificial Sequence: Synthetic oligonucleotide
uacuagugcgggccacaag

SEQ ID NO: 1998382 - RNA, 19 nt, Artificial Sequence
  Description of Artificial Sequence: Synthetic oligonucleotide
agcuuaugguagacgagag

SEQ ID NO: 1998383 - RNA, 19 nt, Artificial Sequence
  Description of Artificial Sequence: Synthetic oligonucleotide
ccaagcuucucuacagugc

SEQ ID NO: 1998384 - RNA, 19 nt, Artificial Sequence
  Description of Artificial Sequence: Synthetic oligonucleotide
cacauagaucucugccagc

SEQ ID NO: 1998385 - RNA, 19 nt, Artificial Sequence
  Description of Artificial Sequence: Synthetic oligonucleotide
uggcgcugccacauacuag

SEQ ID NO: 1998386 - RNA, 19 nt, Artificial Sequence
  Description of Artificial Sequence: Synthetic oligonucleotide
acauacuagugcgggccac

SEQ ID NO: 1998387 - RNA, 19 nt, Artificial Sequence
  Description of Artificial Sequence: Synthetic oligonucleotide
ggggcauacgcucuaccag

SEQ ID NO: 1998388 - RNA, 19 nt, Artificial Sequence
  Description of Artificial Sequence: Synthetic oligonucleotide
gggcauacgcucuaccagc

SEQ ID NO: 1998389 - RNA, 19 nt, Artificial Sequence
  Description of Artificial Sequence: Synthetic oligonucleotide
agcaaugaggugcccuccu

SEQ ID NO: 1998390 - RNA, 19 nt, Artificial Sequence
  Description of Artificial Sequence: Synthetic oligonucleotide
gucccgacagcaucagagc

SEQ ID NO: 1998391 - RNA, 19 nt, Artificial Sequence
  Description of Artificial Sequence: Synthetic oligonucleotide
agcaucagagcagcgauuu

SEQ ID NO: 1998392 - RNA, 19 nt, Artificial Sequence
  Description of Artificial Sequence: Synthetic oligonucleotide
ugcuggcgcugccacauac

SEQ ID NO: 1998393 - RNA, 19 nt, Artificial Sequence
  Description of Artificial Sequence: Synthetic oligonucleotide
guggccuacaggguggcag

SEQ ID NO: 1998394 - RNA, 19 nt, Artificial Sequence
  Description of Artificial Sequence: Synthetic oligonucleotide
ugcgugcugccucagccaa

SEQ ID NO: 1998395 - RNA, 19 nt, Artificial Sequence
  Description of Artificial Sequence: Synthetic oligonucleotide
ucucuacagugcgugcugc

SEQ ID NO: 1998396 - RNA, 19 nt, Artificial Sequence
  Description of Artificial Sequence: Synthetic oligonucleotide
ucugugccggugguggaag

SEQ ID NO: 1998397 - RNA, 19 nt, Artificial Sequence
  Description of Artificial Sequence: Synthetic oligonucleotide
cugccacauacuagugcgg

SEQ ID NO: 1998398 - RNA, 19 nt, Artificial Sequence
  Description of Artificial Sequence: Synthetic oligonucleotide
guagacgagagccgcaucu

SEQ ID NO: 1998399 - RNA, 19 nt, Artificial Sequence
  Description of Artificial Sequence: Synthetic oligonucleotide
cacagcccaguccccaucc

SEQ ID NO: 1998400 - RNA, 19 nt, Artificial Sequence
  Description of Artificial Sequence: Synthetic oligonucleotide
cucuacagugcgugcugcc

SEQ ID NO: 1998401 - RNA, 19 nt, Artificial Sequence
  Description of Artificial Sequence: Synthetic oligonucleotide
aagaggcacugagccacuc

SEQ ID NO: 1998402 - RNA, 19 nt, Artificial Sequence
  Description of Artificial Sequence: Synthetic oligonucleotide
ugucuccaucagcuguccc

SEQ ID NO: 1998403 - RNA, 19 nt, Artificial Sequence
  Description of Artificial Sequence: Synthetic oligonucleotide
gagauguucgcagaauagu

SEQ ID NO: 1998404 - RNA, 19 nt, Artificial Sequence
  Description of Artificial Sequence: Synthetic oligonucleotide
gcacuacucaggaagaaac

SEQ ID NO: 1998405 - RNA, 19 nt, Artificial Sequence
  Description of Artificial Sequence: Synthetic oligonucleotide
gagcggcuaagcugucccg

SEQ ID NO: 1998406 - RNA, 19 nt, Artificial Sequence
  Description of Artificial Sequence: Synthetic oligonucleotide
ggagcggcuaagcuguccc

SEQ ID NO: 1998407 - RNA, 19 nt, Artificial Sequence
  Description of Artificial Sequence: Synthetic oligonucleotide
agccaguggaucaccacag

SEQ ID NO: 1998408 - RNA, 19 nt, Artificial Sequence
  Description of Artificial Sequence: Synthetic oligonucleotide
caggcgcagaagcaucugc

SEQ ID NO: 1998409 - RNA, 19 nt, Artificial Sequence
  Description of Artificial Sequence: Synthetic oligonucleotide
gcaagaggcacugagccac

SEQ ID NO: 1998410 - RNA, 19 nt, Artificial Sequence
  Description of Artificial Sequence: Synthetic oligonucleotide
agguauccaagugcgucag

SEQ ID NO: 1998411 - RNA, 19 nt, Artificial Sequence
  Description of Artificial Sequence: Synthetic oligonucleotide
guugguggagcggcuaagc

SEQ ID NO: 1998412 - RNA, 19 nt, Artificial Sequence
  Description of Artificial Sequence: Synthetic oligonucleotide
ccagcguugccauggauac

SEQ ID NO: 1998413 - RNA, 19 nt, Artificial Sequence
  Description of Artificial Sequence: Synthetic oligonucleotide
uggccuacaggguggcaga

SEQ ID NO: 1998414 - RNA, 19 nt, Artificial Sequence
  Description of Artificial Sequence: Synthetic oligonucleotide
gacuccacuuuucuguggu

SEQ ID NO: 1998415 - RNA, 19 nt, Artificial Sequence
  Description of Artificial Sequence: Synthetic oligonucleotide
cagguauccaagugcguca

SEQ ID NO: 1998416 - RNA, 19 nt, Artificial Sequence
  Description of Artificial Sequence: Synthetic oligonucleotide
cagcuuaugguagacgaga

SEQ ID NO: 1998417 - RNA, 19 nt, Artificial Sequence
  Description of Artificial Sequence: Synthetic oligonucleotide
ugcaaggcucuugggagac

SEQ ID NO: 1998418 - RNA, 19 nt, Artificial Sequence
  Description of Artificial Sequence: Synthetic oligonucleotide
ggagcugccaguuggugga

SEQ ID NO: 1998419 - RNA, 19 nt, Artificial Sequence
  Description of Artificial Sequence: Synthetic oligonucleotide
caaugcucauuuugcuguc

SEQ ID NO: 1998420 - RNA, 19 nt, Artificial Sequence
  Description of Artificial Sequence: Synthetic oligonucleotide
agcccaguccccauccacg

SEQ ID NO: 1998421 - RNA, 19 nt, Artificial Sequence
  Description of Artificial Sequence: Synthetic oligonucleotide
agcaucuccugcgcacucg

SEQ ID NO: 1998422 - RNA, 19 nt, Artificial Sequence
  Description of Artificial Sequence: Synthetic oligonucleotide
ugcagguauccaagugcgu

SEQ ID NO: 1998423 - RNA, 19 nt, Artificial Sequence
  Description of Artificial Sequence: Synthetic oligonucleotide
cacuuuucugugguccagc

SEQ ID NO: 1998424 - RNA, 19 nt, Artificial Sequence
  Description of Artificial Sequence: Synthetic oligonucleotide
cuguacaggcucuccugug

SEQ ID NO: 1998425 - RNA, 19 nt, Artificial Sequence
  Description of Artificial Sequence: Synthetic oligonucleotide
agccgaugaucaccaagcu

SEQ ID NO: 1998426 - RNA, 19 nt, Artificial Sequence
  Description of Artificial Sequence: Synthetic oligonucleotide
caguagccgaugaucacca

SEQ ID NO: 1998427 - RNA, 19 nt, Artificial Sequence
  Description of Artificial Sequence: Synthetic oligonucleotide
gucagugaggcccaccacu

SEQ ID NO: 1998428 - RNA, 19 nt, Artificial Sequence
  Description of Artificial Sequence: Synthetic oligonucleotide
uccuguguauuugcccaug

SEQ ID NO: 1998429 - RNA, 19 nt, Artificial Sequence
  Description of Artificial Sequence: Synthetic oligonucleotide
uugacccucagggcagcag

SEQ ID NO: 1998430 - RNA, 19 nt, Artificial Sequence
  Description of Artificial Sequence: Synthetic oligonucleotide
gaggcccaccacuuggcca

SEQ ID NO: 1998431 - RNA, 19 nt, Artificial Sequence
  Description of Artificial Sequence: Synthetic oligonucleotide
ucccgccgcagccagugga

SEQ ID NO: 1998432 - RNA, 19 nt, Artificial Sequence
  Description of Artificial Sequence: Synthetic oligonucleotide
caugcacagcccagucccc

SEQ ID NO: 1998433 - RNA, 19 nt, Artificial Sequence
  Description of Artificial Sequence: Synthetic oligonucleotide
ccacugcauggcaagaggc

SEQ ID NO: 1998434 - RNA, 19 nt, Artificial Sequence
  Description of Artificial Sequence: Synthetic oligonucleotide
acgcuguacaggcucuccu

SEQ ID NO: 1998435 - RNA, 19 nt, Artificial Sequence
  Description of Artificial Sequence: Synthetic oligonucleotide
ccacauacuagugcgggcc

SEQ ID NO: 1998436 - RNA, 19 nt, Artificial Sequence
  Description of Artificial Sequence: Synthetic oligonucleotide
auuuugcuguccagggcug

SEQ ID NO: 1998437 - RNA, 19 nt, Artificial Sequence
  Description of Artificial Sequence: Synthetic oligonucleotide
ggcacugagccacucugug

SEQ ID NO: 1998438 - RNA, 19 nt, Artificial Sequence
  Description of Artificial Sequence: Synthetic oligonucleotide
uacccgcuggccuucucac

SEQ ID NO: 1998439 - RNA, 19 nt, Artificial Sequence
  Description of Artificial Sequence: Synthetic oligonucleotide
uauuugcccauggcaugca

SEQ ID NO: 1998440 - RNA, 19 nt, Artificial Sequence
  Description of Artificial Sequence: Synthetic oligonucleotide
aguugguggagcggcuaag

SEQ ID NO: 1998441 - RNA, 19 nt, Artificial Sequence
  Description of Artificial Sequence: Synthetic oligonucleotide
gcagucaagcaguagccga

SEQ ID NO: 1998442 - RNA, 19 nt, Artificial Sequence
  Description of Artificial Sequence: Synthetic oligonucleotide
ggaguacagagcugccuug

SEQ ID NO: 1998443 - RNA, 19 nt, Artificial Sequence
  Description of Artificial Sequence: Synthetic oligonucleotide
ggcagucaagcaguagccg

SEQ ID NO: 1998444 - RNA, 19 nt, Artificial Sequence
  Description of Artificial Sequence: Synthetic oligonucleotide
gccuugucaauggagcugc

SEQ ID NO: 1998445 - RNA, 19 nt, Artificial Sequence
  Description of Artificial Sequence: Synthetic oligonucleotide
gagacuggucuugacccuc

SEQ ID NO: 1998446 - RNA, 19 nt, Artificial Sequence
  Description of Artificial Sequence: Synthetic oligonucleotide
caguucagugcucucucca

SEQ ID NO: 1998447 - RNA, 19 nt, Artificial Sequence
  Description of Artificial Sequence: Synthetic oligonucleotide
ugguagacgagagccgcau

SEQ ID NO: 1998448 - RNA, 19 nt, Artificial Sequence
  Description of Artificial Sequence: Synthetic oligonucleotide
agggcacucagugccaggu

SEQ ID NO: 1998449 - RNA, 19 nt, Artificial Sequence
  Description of Artificial Sequence: Synthetic oligonucleotide
aaacgguggccuacagggu

SEQ ID NO: 1998450 - RNA, 19 nt, Artificial Sequence
  Description of Artificial Sequence: Synthetic oligonucleotide
caacaaugcucauuuugcu

SEQ ID NO: 1998451 - RNA, 19 nt, Artificial Sequence
  Description of Artificial Sequence: Synthetic oligonucleotide
agcugccuugggcaggggu

SEQ ID NO: 1998452 - RNA, 19 nt, Artificial Sequence
  Description of Artificial Sequence: Synthetic oligonucleotide
ggcauacgcucuaccagcg

SEQ ID NO: 1998453 - RNA, 19 nt, Artificial Sequence
  Description of Artificial Sequence: Synthetic oligonucleotide
ugcgggccacaagaaguag

SEQ ID NO: 1998454 - RNA, 19 nt, Artificial Sequence
  Description of Artificial Sequence: Synthetic oligonucleotide
uagacgagagccgcaucuc

SEQ ID NO: 1998455 - RNA, 19 nt, Artificial Sequence
  Description of Artificial Sequence: Synthetic oligonucleotide
gcaucuccugcgcacucgg

SEQ ID NO: 1998456 - RNA, 19 nt, Artificial Sequence
  Description of Artificial Sequence: Synthetic oligonucleotide
gcaggggucucucagucuc

SEQ ID NO: 1998457 - RNA, 19 nt, Artificial Sequence
  Description of Artificial Sequence: Synthetic oligonucleotide
gacgagagccgcaucucga

SEQ ID NO: 1998458 - RNA, 19 nt, Artificial Sequence
  Description of Artificial Sequence: Synthetic oligonucleotide
acgguggccuacagggugg

SEQ ID NO: 1998459 - RNA, 19 nt, Artificial Sequence
  Description of Artificial Sequence: Synthetic oligonucleotide
agcggguauaggcgcucag

SEQ ID NO: 1998460 - RNA, 19 nt, Artificial Sequence
  Description of Artificial Sequence: Synthetic oligonucleotide
ugcagcacguggggcauac

SEQ ID NO: 1998461 - RNA, 19 nt, Artificial Sequence
  Description of Artificial Sequence: Synthetic oligonucleotide
gcagguauccaagugcguc

SEQ ID NO: 1998462 - RNA, 19 nt, Artificial Sequence
  Description of Artificial Sequence: Synthetic oligonucleotide
aggagucccgacagcauca

SEQ ID NO: 1998463 - RNA, 19 nt, Artificial Sequence
  Description of Artificial Sequence: Synthetic oligonucleotide
cgcagaauagucgagucac

SEQ ID NO: 1998464 - RNA, 19 nt, Artificial Sequence
  Description of Artificial Sequence: Synthetic oligonucleotide
guauaggcgcucagcugcc

SEQ ID NO: 1998465 - RNA, 19 nt, Artificial Sequence
  Description of Artificial Sequence: Synthetic oligonucleotide
guacccgcuggccuucuca

SEQ ID NO: 1998466 - RNA, 19 nt, Artificial Sequence
  Description of Artificial Sequence: Synthetic oligonucleotide
agcacguggggcauacgcu

SEQ ID NO: 1998467 - RNA, 19 nt, Artificial Sequence
  Description of Artificial Sequence: Synthetic oligonucleotide
ucuugacccucagggcagc

SEQ ID NO: 1998468 - RNA, 19 nt, Artificial Sequence
  Description of Artificial Sequence: Synthetic oligonucleotide
ggcgcugccacauacuagu

SEQ ID NO: 1998469 - RNA, 19 nt, Artificial Sequence
  Description of Artificial Sequence: Synthetic oligonucleotide
guggggcauacgcucuacc

SEQ ID NO: 1998470 - RNA, 19 nt, Artificial Sequence
  Description of Artificial Sequence: Synthetic oligonucleotide
acgaagaaacgguggccua

SEQ ID NO: 1998471 - RNA, 19 nt, Artificial Sequence
  Description of Artificial Sequence: Synthetic oligonucleotide
cuugucaauggagcugcca

SEQ ID NO: 1998472 - RNA, 19 nt, Artificial Sequence
  Description of Artificial Sequence: Synthetic oligonucleotide
gaugaucaccaagcuucuc

SEQ ID NO: 1998473 - RNA, 19 nt, Artificial Sequence
  Description of Artificial Sequence: Synthetic oligonucleotide
agccuugaaggaguacaga

SEQ ID NO: 1998474 - RNA, 19 nt, Artificial Sequence
  Description of Artificial Sequence: Synthetic oligonucleotide
uggagcggcuaagcugucc

SEQ ID NO: 1998475 - RNA, 19 nt, Artificial Sequence
  Description of Artificial Sequence: Synthetic oligonucleotide
auacgcucuaccagcgggu

SEQ ID NO: 1998476 - RNA, 19 nt, Artificial Sequence
  Description of Artificial Sequence: Synthetic oligonucleotide
cccauccacgaagaaacgg

SEQ ID NO: 1998477 - RNA, 19 nt, Artificial Sequence
  Description of Artificial Sequence: Synthetic oligonucleotide
aguacccgcuggccuucuc

SEQ ID NO: 1998478 - RNA, 19 nt, Artificial Sequence
  Description of Artificial Sequence: Synthetic oligonucleotide
ucucagucuccugcagcac

SEQ ID NO: 1998479 - RNA, 19 nt, Artificial Sequence
  Description of Artificial Sequence: Synthetic oligonucleotide
cccgacagcaucagagcag

SEQ ID NO: 1998480 - RNA, 19 nt, Artificial Sequence
  Description of Artificial Sequence: Synthetic oligonucleotide
gucgagucaccugggcgag

SEQ ID NO: 1998481 - RNA, 19 nt, Artificial Sequence
  Description of Artificial Sequence: Synthetic oligonucleotide
auggagcugccaguuggug

SEQ ID NO: 1998482 - RNA, 19 nt, Artificial Sequence
  Description of Artificial Sequence: Synthetic oligonucleotide
cacgcuguacaggcucucc

SEQ ID NO: 1998483 - RNA, 19 nt, Artificial Sequence
  Description of Artificial Sequence: Synthetic oligonucleotide
acucagugccagguuagaa

SEQ ID NO: 1998484 - RNA, 19 nt, Artificial Sequence
  Description of Artificial Sequence: Synthetic oligonucleotide
cuggguugagcaauacagu

SEQ ID NO: 1998485 - RNA, 19 nt, Artificial Sequence
  Description of Artificial Sequence: Synthetic oligonucleotide
gcauacgcucuaccagcgg

SEQ ID NO: 1998486 - RNA, 19 nt, Artificial Sequence
  Description of Artificial Sequence: Synthetic oligonucleotide
cacauacuagugcgggcca

SEQ ID NO: 1998487 - RNA, 19 nt, Artificial Sequence
  Description of Artificial Sequence: Synthetic oligonucleotide
cuguccccgggcuggguug

SEQ ID NO: 1998488 - RNA, 19 nt, Artificial Sequence
  Description of Artificial Sequence: Synthetic oligonucleotide
caauacaguucagugcucu

SEQ ID NO: 1998489 - RNA, 19 nt, Artificial Sequence
  Description of Artificial Sequence: Synthetic oligonucleotide
guucgcagaauagucgagu

SEQ ID NO: 1998490 - RNA, 19 nt, Artificial Sequence
  Description of Artificial Sequence: Synthetic oligonucleotide
cagaauagucgagucaccu

SEQ ID NO: 1998491 - RNA, 19 nt, Artificial Sequence
  Description of Artificial Sequence: Synthetic oligonucleotide
cuagugcgggccacaagaa

SEQ ID NO: 1998492 - RNA, 19 nt, Artificial Sequence
  Description of Artificial Sequence: Synthetic oligonucleotide
gcagcuuaugguagacgag

SEQ ID NO: 1998493 - RNA, 19 nt, Artificial Sequence
  Description of Artificial Sequence: Synthetic oligonucleotide
gguggagcggcuaagcugu

SEQ ID NO: 1998494 - RNA, 19 nt, Artificial Sequence
  Description of Artificial Sequence: Synthetic oligonucleotide
gccacaagaaguagaucac

SEQ ID NO: 1998495 - RNA, 19 nt, Artificial Sequence
  Description of Artificial Sequence: Synthetic oligonucleotide
cagugcucucuccaagaga

SEQ ID NO: 1998496 - RNA, 19 nt, Artificial Sequence
  Description of Artificial Sequence: Synthetic oligonucleotide
cugccaguugguggagcgg

SEQ ID NO: 1998497 - RNA, 19 nt, Artificial Sequence
  Description of Artificial Sequence: Synthetic oligonucleotide
gggcuggugacugcuggcg

SEQ ID NO: 1998498 - RNA, 19 nt, Artificial Sequence
  Description of Artificial Sequence: Synthetic oligonucleotide
cacgaagaaacgguggccu

SEQ ID NO: 1998499 - RNA, 19 nt, Artificial Sequence
  Description of Artificial Sequence: Synthetic oligonucleotide
gcacguggggcauacgcuc

SEQ ID NO: 1998500 - RNA, 19 nt, Artificial Sequence
  Description of Artificial Sequence: Synthetic oligonucleotide
gucagagaacucccugucu

SEQ ID NO: 1998501 - RNA, 19 nt, Artificial Sequence
  Description of Artificial Sequence: Synthetic oligonucleotide
uauaggcgcucagcugccu

SEQ ID NO: 1998502 - RNA, 19 nt, Artificial Sequence
  Description of Artificial Sequence: Synthetic oligonucleotide
ccgacagcaucagagcagc

SEQ ID NO: 1998503 - RNA, 19 nt, Artificial Sequence
  Description of Artificial Sequence: Synthetic oligonucleotide
cauacuagugcgggccaca

SEQ ID NO: 1998504 - RNA, 19 nt, Artificial Sequence
  Description of Artificial Sequence: Synthetic oligonucleotide
auacuagugcgggccacaa

SEQ ID NO: 1998505 - RNA, 19 nt, Artificial Sequence
  Description of Artificial Sequence: Synthetic oligonucleotide
cugugccggugguggaagc

SEQ ID NO: 1998506 - RNA, 19 nt, Artificial Sequence
  Description of Artificial Sequence: Synthetic oligonucleotide
uagcaacugcagguaucca

SEQ ID NO: 1998507 - RNA, 19 nt, Artificial Sequence
  Description of Artificial Sequence: Synthetic oligonucleotide
ccucagccaacaaugcuca

SEQ ID NO: 1998508 - RNA, 19 nt, Artificial Sequence
  Description of Artificial Sequence: Synthetic oligonucleotide
uacgcucuaccagcgggua

SEQ ID NO: 1998509 - RNA, 19 nt, Artificial Sequence
  Description of Artificial Sequence: Synthetic oligonucleotide
ucgagucaccugggcgagg

SEQ ID NO: 1998510 - RNA, 19 nt, Artificial Sequence
  Description of Artificial Sequence: Synthetic oligonucleotide
ggcacucagugccagguua

SEQ ID NO: 1998511 - RNA, 19 nt, Artificial Sequence
  Description of Artificial Sequence: Synthetic oligonucleotide
ggugcagcuuaugguagac

SEQ ID NO: 1998512 - RNA, 19 nt, Artificial Sequence
  Description of Artificial Sequence: Synthetic oligonucleotide
gccagguuagaagcaauga

SEQ ID NO: 1998513 - RNA, 19 nt, Artificial Sequence
  Description of Artificial Sequence: Synthetic oligonucleotide
cuugggagacuggucuuga

SEQ ID NO: 1998514 - RNA, 19 nt, Artificial Sequence
  Description of Artificial Sequence: Synthetic oligonucleotide
aguagccgaugaucaccaa

SEQ ID NO: 1998515 - RNA, 19 nt, Artificial Sequence
  Description of Artificial Sequence: Synthetic oligonucleotide
ugcaggcaggagucccgac

SEQ ID NO: 1998516 - RNA, 19 nt, Artificial Sequence
  Description of Artificial Sequence: Synthetic oligonucleotide
ggcaagaggcacugagcca

SEQ ID NO: 1998517 - RNA, 19 nt, Artificial Sequence
  Description of Artificial Sequence: Synthetic oligonucleotide
caaugaggugcccuccugu

SEQ ID NO: 1998518 - RNA, 19 nt, Artificial Sequence
  Description of Artificial Sequence: Synthetic oligonucleotide
cuucucuacagugcgugcu

SEQ ID NO: 1998519 - RNA, 19 nt, Artificial Sequence
  Description of Artificial Sequence: Synthetic oligonucleotide
cgauuuagcaacugcaggu

SEQ ID NO: 1998520 - RNA, 19 nt, Artificial Sequence
  Description of Artificial Sequence: Synthetic oligonucleotide
uccugcgcacucggccagg

SEQ ID NO: 1998521 - RNA, 19 nt, Artificial Sequence
  Description of Artificial Sequence: Synthetic oligonucleotide
ccacgaagaaacgguggcc

SEQ ID NO: 1998522 - RNA, 19 nt, Artificial Sequence
  Description of Artificial Sequence: Synthetic oligonucleotide
cagugcgugcugccucagc

SEQ ID NO: 1998523 - RNA, 19 nt, Artificial Sequence
  Description of Artificial Sequence: Synthetic oligonucleotide
ggcuggguugagcaauaca

SEQ ID NO: 1998524 - RNA, 19 nt, Artificial Sequence
  Description of Artificial Sequence: Synthetic oligonucleotide
augguagacgagagccgca

SEQ ID NO: 1998525 - RNA, 19 nt, Artificial Sequence
  Description of Artificial Sequence: Synthetic oligonucleotide
ugccagcguugccauggau

SEQ ID NO: 1998526 - RNA, 19 nt, Artificial Sequence
  Description of Artificial Sequence: Synthetic oligonucleotide
gacugcuggcgcugccaca

SEQ ID NO: 1998527 - RNA, 19 nt, Artificial Sequence
  Description of Artificial Sequence: Synthetic oligonucleotide
caaguacccgcuggccuuc

SEQ ID NO: 1998528 - RNA, 19 nt, Artificial Sequence
  Description of Artificial Sequence: Synthetic oligonucleotide
aucccgccgcagccagugg

SEQ ID NO: 1998529 - RNA, 19 nt, Artificial Sequence
  Description of Artificial Sequence: Synthetic oligonucleotide
caagugcgucagagaacuc

SEQ ID NO: 1998530 - RNA, 19 nt, Artificial Sequence
  Description of Artificial Sequence: Synthetic oligonucleotide
cccgcaaguacccgcuggc

SEQ ID NO: 1998531 - RNA, 19 nt, Artificial Sequence
  Description of Artificial Sequence: Synthetic oligonucleotide
gguuuagcuggaagugaca

SEQ ID NO: 1998532 - RNA, 19 nt, Artificial Sequence
  Description of Artificial Sequence: Synthetic oligonucleotide
ccauccacgaagaaacggu

SEQ ID NO: 1998533 - RNA, 19 nt, Artificial Sequence
  Description of Artificial Sequence: Synthetic oligonucleotide
ucaucccgccgcagccagu

SEQ ID NO: 1998534 - RNA, 19 nt, Artificial Sequence
  Description of Artificial Sequence: Synthetic oligonucleotide
agccaacaaugcucauuuu

SEQ ID NO: 1998535 - RNA, 19 nt, Artificial Sequence
  Description of Artificial Sequence: Synthetic oligonucleotide
gucaauggagcugccaguu

SEQ ID NO: 1998536 - RNA, 19 nt, Artificial Sequence
  Description of Artificial Sequence: Synthetic oligonucleotide
ccaagugcgucagagaacu

SEQ ID NO: 1998537 - RNA, 19 nt, Artificial Sequence
  Description of Artificial Sequence: Synthetic oligonucleotide
ggcacuacucaggaagaaa

SEQ ID NO: 1998538 - RNA, 19 nt, Artificial Sequence
  Description of Artificial Sequence: Synthetic oligonucleotide
acgcucuaccagcggguau

SEQ ID NO: 1998539 - RNA, 19 nt, Artificial Sequence
  Description of Artificial Sequence: Synthetic oligonucleotide
cagucaagcaguagccgau

SEQ ID NO: 1998540 - RNA, 19 nt, Artificial Sequence
  Description of Artificial Sequence: Synthetic oligonucleotide
aggcacugagccacucugu

SEQ ID NO: 1998541 - RNA, 19 nt, Artificial Sequence
  Description of Artificial Sequence: Synthetic oligonucleotide
gcggguauaggcgcucagc

SEQ ID NO: 1998542 - RNA, 19 nt, Artificial Sequence
  Description of Artificial Sequence: Synthetic oligonucleotide
ggugacugcuggcgcugcc

SEQ ID NO: 1998543 - RNA, 19 nt, Artificial Sequence
  Description of Artificial Sequence: Synthetic oligonucleotide
gguagacgagagccgcauc

SEQ ID NO: 1998544 - RNA, 19 nt, Artificial Sequence
  Description of Artificial Sequence: Synthetic oligonucleotide
ccaagagauguucgcagaa

SEQ ID NO: 1998545 - RNA, 19 nt, Artificial Sequence
  Description of Artificial Sequence: Synthetic oligonucleotide
acagugcgugcugccucag

SEQ ID NO: 1998546 - RNA, 19 nt, Artificial Sequence
  Description of Artificial Sequence: Synthetic oligonucleotide
cuaagcugucccgcaagua

SEQ ID NO: 1998547 - RNA, 19 nt, Artificial Sequence
  Description of Artificial Sequence: Synthetic oligonucleotide
ccggugguggaagccaugc

SEQ ID NO: 1998548 - RNA, 19 nt, Artificial Sequence
  Description of Artificial Sequence: Synthetic oligonucleotide
caguugguggagcggcuaa

SEQ ID NO: 1998549 - RNA, 19 nt, Artificial Sequence
  Description of Artificial Sequence: Synthetic oligonucleotide
cgagucaccugggcgaggg

SEQ ID NO: 1998550 - RNA, 19 nt, Artificial Sequence
  Description of Artificial Sequence: Synthetic oligonucleotide
cacagccgucagugaggcc

SEQ ID NO: 1998551 - RNA, 19 nt, Artificial Sequence
  Description of Artificial Sequence: Synthetic oligonucleotide
cauagaucucugccagcgu

SEQ ID NO: 1998552 - RNA, 19 nt, Artificial Sequence
  Description of Artificial Sequence: Synthetic oligonucleotide
cgucagagaacucccuguc

SEQ ID NO: 1998553 - RNA, 19 nt, Artificial Sequence
  Description of Artificial Sequence: Synthetic oligonucleotide
gcuguacaggcucuccugu

SEQ ID NO: 1998554 - RNA, 19 nt, Artificial Sequence
  Description of Artificial Sequence: Synthetic oligonucleotide
gucccgcaaguacccgcug

SEQ ID NO: 1998555 - RNA, 19 nt, Artificial Sequence
  Description of Artificial Sequence: Synthetic oligonucleotide
cgaagaaacgguggccuac

SEQ ID NO: 1998556 - RNA, 19 nt, Artificial Sequence
  Description of Artificial Sequence: Synthetic oligonucleotide
caagagauguucgcagaau

SEQ ID NO: 1998557 - RNA, 19 nt, Artificial Sequence
  Description of Artificial Sequence: Synthetic oligonucleotide
acguggggcauacgcucua

SEQ ID NO: 1998558 - RNA, 19 nt, Artificial Sequence
  Description of Artificial Sequence: Synthetic oligonucleotide
gcugucccgcaaguacccg

SEQ ID NO: 1998559 - RNA, 19 nt, Artificial Sequence
  Description of Artificial Sequence: Synthetic oligonucleotide
uccccgggcuggguugagc

SEQ ID NO: 1998560 - RNA, 19 nt, Artificial Sequence
  Description of Artificial Sequence: Synthetic oligonucleotide
gcgucagagaacucccugu

SEQ ID NO: 1998561 - RNA, 19 nt, Artificial Sequence
  Description of Artificial Sequence: Synthetic oligonucleotide
gguauccaagugcgucaga

SEQ ID NO: 1998562 - RNA, 19 nt, Artificial Sequence
  Description of Artificial Sequence: Synthetic oligonucleotide
gcuaagcugucccgcaagu

SEQ ID NO: 1998563 - RNA, 19 nt, Artificial Sequence
  Description of Artificial Sequence: Synthetic oligonucleotide
gccagcguugccauggaua

SEQ ID NO: 1998564 - RNA, 19 nt, Artificial Sequence
  Description of Artificial Sequence: Synthetic oligonucleotide
ccgucagugaggcccacca

SEQ ID NO: 1998565 - RNA, 19 nt, Artificial Sequence
  Description of Artificial Sequence: Synthetic oligonucleotide
cagccgucagugaggccca

SEQ ID NO: 1998566 - RNA, 19 nt, Artificial Sequence
  Description of Artificial Sequence: Synthetic oligonucleotide
gugcgggccacaagaagua

SEQ ID NO: 1998567 - RNA, 19 nt, Artificial Sequence
  Description of Artificial Sequence: Synthetic oligonucleotide
caccaagcuucucuacagu

SEQ ID NO: 1998568 - RNA, 19 nt, Artificial Sequence
  Description of Artificial Sequence: Synthetic oligonucleotide
gcccaguccccauccacga

SEQ ID NO: 1998569 - RNA, 19 nt, Artificial Sequence
  Description of Artificial Sequence: Synthetic oligonucleotide
cacucagugccagguuaga

SEQ ID NO: 1998570 - RNA, 19 nt, Artificial Sequence
  Description of Artificial Sequence: Synthetic oligonucleotide
ccgggcagccuugaaggag

SEQ ID NO: 1998571 - RNA, 19 nt, Artificial Sequence
  Description of Artificial Sequence: Synthetic oligonucleotide
gcggcuaagcugucccgca

SEQ ID NO: 1998572 - RNA, 19 nt, Artificial Sequence
  Description of Artificial Sequence: Synthetic oligonucleotide
cacguggggcauacgcucu

SEQ ID NO: 1998573 - RNA, 19 nt, Artificial Sequence
  Description of Artificial Sequence: Synthetic oligonucleotide
gcaauacaguucagugcuc

SEQ ID NO: 1998574 - RNA, 19 nt, Artificial Sequence
  Description of Artificial Sequence: Synthetic oligonucleotide
accgccccaggcgcagaag

SEQ ID NO: 1998575 - RNA, 19 nt, Artificial Sequence
  Description of Artificial Sequence: Synthetic oligonucleotide
cgagagccgcaucucgagc

SEQ ID NO: 1998576 - RNA, 19 nt, Artificial Sequence
  Description of Artificial Sequence: Synthetic oligonucleotide
gcaaguacccgcuggccuu

SEQ ID NO: 1998577 - RNA, 19 nt, Artificial Sequence
  Description of Artificial Sequence: Synthetic oligonucleotide
gccauggauacagcaucuc

SEQ ID NO: 1998578 - RNA, 19 nt, Artificial Sequence
  Description of Artificial Sequence: Synthetic oligonucleotide
gccuacaggguggcagagc

SEQ ID NO: 1998579 - RNA, 19 nt, Artificial Sequence
  Description of Artificial Sequence: Synthetic oligonucleotide
agccgucagugaggcccac

SEQ ID NO: 1998580 - RNA, 19 nt, Artificial Sequence
  Description of Artificial Sequence: Synthetic oligonucleotide
gaggugcccuccuguguau

SEQ ID NO: 1998581 - RNA, 19 nt, Artificial Sequence
  Description of Artificial Sequence: Synthetic oligonucleotide
gcgggccacaagaaguaga

SEQ ID NO: 1998582 - RNA, 19 nt, Artificial Sequence
  Description of Artificial Sequence: Synthetic oligonucleotide
gcacucggccagguucagg

SEQ ID NO: 1998583 - RNA, 19 nt, Artificial Sequence
  Description of Artificial Sequence: Synthetic oligonucleotide
caagaggcacugagccacu

SEQ ID NO: 1998584 - RNA, 19 nt, Artificial Sequence
  Description of Artificial Sequence: Synthetic oligonucleotide
cuugacccucagggcagca

SEQ ID NO: 1998585 - RNA, 19 nt, Artificial Sequence
  Description of Artificial Sequence: Synthetic oligonucleotide
caguggucccaccgcccca

SEQ ID NO: 1998586 - RNA, 19 nt, Artificial Sequence
  Description of Artificial Sequence: Synthetic oligonucleotide
ugccuugggcaggggucuc

SEQ ID NO: 1998587 - RNA, 19 nt, Artificial Sequence
  Description of Artificial Sequence: Synthetic oligonucleotide
ccgcaaguacccgcuggcc

SEQ ID NO: 1998588 - RNA, 19 nt, Artificial Sequence
  Description of Artificial Sequence: Synthetic oligonucleotide
gcacagcccaguccccauc

SEQ ID NO: 1998589 - RNA, 19 nt, Artificial Sequence
  Description of Artificial Sequence: Synthetic oligonucleotide
guggggcaccaugcacagc

SEQ ID NO: 1998590 - RNA, 19 nt, Artificial Sequence
  Description of Artificial Sequence: Synthetic oligonucleotide
gggccacaagaaguagauc

SEQ ID NO: 1998591 - RNA, 19 nt, Artificial Sequence
  Description of Artificial Sequence: Synthetic oligonucleotide
gccgaugaucaccaagcuu

SEQ ID NO: 1998592 - RNA, 19 nt, Artificial Sequence
  Description of Artificial Sequence: Synthetic oligonucleotide
gggccagacuccacuuuuc

SEQ ID NO: 1998593 - RNA, 19 nt, Artificial Sequence
  Description of Artificial Sequence: Synthetic oligonucleotide
aggugcccuccuguguauu

SEQ ID NO: 1998594 - RNA, 19 nt, Artificial Sequence
  Description of Artificial Sequence: Synthetic oligonucleotide
ggccuggcgggcacuacuc

SEQ ID NO: 1998595 - RNA, 19 nt, Artificial Sequence
  Description of Artificial Sequence: Synthetic oligonucleotide
gcgcacucggccagguuca

SEQ ID NO: 1998596 - RNA, 19 nt, Artificial Sequence
  Description of Artificial Sequence: Synthetic oligonucleotide
cagcguugccauggauaca

SEQ ID NO: 1998597 - RNA, 19 nt, Artificial Sequence
  Description of Artificial Sequence: Synthetic oligonucleotide
gggcacuacucaggaagaa

SEQ ID NO: 1998598 - RNA, 19 nt, Artificial Sequence
  Description of Artificial Sequence: Synthetic oligonucleotide
cgggcacuacucaggaaga

SEQ ID NO: 1998599 - RNA, 19 nt, Artificial Sequence
  Description of Artificial Sequence: Synthetic oligonucleotide
cagcaucagagcagcgauu

SEQ ID NO: 1998600 - RNA, 19 nt, Artificial Sequence
  Description of Artificial Sequence: Synthetic oligonucleotide
ggcaggggucucucagucu

SEQ ID NO: 1998601 - RNA, 19 nt, Artificial Sequence
  Description of Artificial Sequence: Synthetic oligonucleotide
cggguauaggcgcucagcu

SEQ ID NO: 1998602 - RNA, 19 nt, Artificial Sequence
  Description of Artificial Sequence: Synthetic oligonucleotide
ccaggcgcagaagcaucug

SEQ ID NO: 1998603 - RNA, 19 nt, Artificial Sequence
  Description of Artificial Sequence: Synthetic oligonucleotide
ggcucuccuguggggcacc

SEQ ID NO: 1998604 - RNA, 19 nt, Artificial Sequence
  Description of Artificial Sequence: Synthetic oligonucleotide
gagcccgggcagccuugaa

SEQ ID NO: 1998605 - RNA, 19 nt, Artificial Sequence
  Description of Artificial Sequence: Synthetic oligonucleotide
gcgcugccacauacuagug

SEQ ID NO: 1998606 - RNA, 19 nt, Artificial Sequence
  Description of Artificial Sequence: Synthetic oligonucleotide
ggugcccuccuguguauuu

SEQ ID NO: 1998607 - RNA, 19 nt, Artificial Sequence
  Description of Artificial Sequence: Synthetic oligonucleotide
gugcgucagagaacucccu

SEQ ID NO: 1998608 - RNA, 19 nt, Artificial Sequence
  Description of Artificial Sequence: Synthetic oligonucleotide
gccgucagugaggcccacc

SEQ ID NO: 1998609 - RNA, 19 nt, Artificial Sequence
  Description of Artificial Sequence: Synthetic oligonucleotide
gcguugccauggauacagc

SEQ ID NO: 1998610 - RNA, 19 nt, Artificial Sequence
  Description of Artificial Sequence: Synthetic oligonucleotide
ccuugggcaggggucucuc

SEQ ID NO: 1998611 - RNA, 19 nt, Artificial Sequence
  Description of Artificial Sequence: Synthetic oligonucleotide
ggcgggcacuacucaggaa

SEQ ID NO: 1998612 - RNA, 19 nt, Artificial Sequence
  Description of Artificial Sequence: Synthetic oligonucleotide
cugggccagacuccacuuu

SEQ ID NO: 1998613 - RNA, 19 nt, Artificial Sequence
  Description of Artificial Sequence: Synthetic oligonucleotide
gccggugguggaagccaug

SEQ ID NO: 1998614 - RNA, 19 nt, Artificial Sequence
  Description of Artificial Sequence: Synthetic oligonucleotide
guggagcggcuaagcuguc

SEQ ID NO: 1998615 - RNA, 19 nt, Artificial Sequence
  Description of Artificial Sequence: Synthetic oligonucleotide
ccauggcaugcagcuggug

SEQ ID NO: 1998616 - RNA, 19 nt, Artificial Sequence
  Description of Artificial Sequence: Synthetic oligonucleotide
cgcaaguacccgcuggccu

SEQ ID NO: 1998617 - RNA, 19 nt, Artificial Sequence
  Description of Artificial Sequence: Synthetic oligonucleotide
ccgcagccaguggaucacc

SEQ ID NO: 1998618 - RNA, 19 nt, Artificial Sequence
  Description of Artificial Sequence: Synthetic oligonucleotide
cccaggcgcagaagcaucu

SEQ ID NO: 1998619 - RNA, 19 nt, Artificial Sequence
  Description of Artificial Sequence: Synthetic oligonucleotide
cagccacgcuguacaggcu

SEQ ID NO: 1998620 - RNA, 19 nt, Artificial Sequence
  Description of Artificial Sequence: Synthetic oligonucleotide
cguggggcauacgcucuac

SEQ ID NO: 1998621 - RNA, 19 nt, Artificial Sequence
  Description of Artificial Sequence: Synthetic oligonucleotide
ggccagguucagggcacuc

SEQ ID NO: 1998622 - RNA, 19 nt, Artificial Sequence
  Description of Artificial Sequence: Synthetic oligonucleotide
gguggccuacaggguggca

SEQ ID NO: 1998623 - RNA, 19 nt, Artificial Sequence
  Description of Artificial Sequence: Synthetic oligonucleotide
ccacgcuguacaggcucuc

SEQ ID NO: 1998624 - RNA, 19 nt, Artificial Sequence
  Description of Artificial Sequence: Synthetic oligonucleotide
ccaguugguggagcggcua

SEQ ID NO: 1998625 - RNA, 19 nt, Artificial Sequence
  Description of Artificial Sequence: Synthetic oligonucleotide
cugcuggcgcugccacaua

SEQ ID NO: 1998626 - RNA, 19 nt, Artificial Sequence
  Description of Artificial Sequence: Synthetic oligonucleotide
gcucuccuguggggcacca

SEQ ID NO: 1998627 - RNA, 19 nt, Artificial Sequence
  Description of Artificial Sequence: Synthetic oligonucleotide
ccgccgcagccaguggauc

SEQ ID NO: 1998628 - RNA, 19 nt, Artificial Sequence
  Description of Artificial Sequence: Synthetic oligonucleotide
gcaaggcucuugggagacu

SEQ ID NO: 1998629 - RNA, 19 nt, Artificial Sequence
  Description of Artificial Sequence: Synthetic oligonucleotide
cggcuaagcugucccgcaa

SEQ ID NO: 1998630 - RNA, 19 nt, Artificial Sequence
  Description of Artificial Sequence: Synthetic oligonucleotide
cgcacucggccagguucag

SEQ ID NO: 1998631 - RNA, 19 nt, Artificial Sequence
  Description of Artificial Sequence: Synthetic oligonucleotide
cgaggggauccacuggguu

SEQ ID NO: 1998632 - RNA, 19 nt, Artificial Sequence
  Description of Artificial Sequence: Synthetic oligonucleotide
cugcgcacucggccagguu

SEQ ID NO: 1998633 - RNA, 19 nt, Artificial Sequence
  Description of Artificial Sequence: Synthetic oligonucleotide
cccgccgcagccaguggau

SEQ ID NO: 1998634 - RNA, 19 nt, Artificial Sequence
  Description of Artificial Sequence: Synthetic oligonucleotide
ccugcgcacucggccaggu

SEQ ID NO: 1998635 - RNA, 19 nt, Artificial Sequence
  Description of Artificial Sequence: Synthetic oligonucleotide
aagucuauacaccuugugg

SEQ ID NO: 1998636 - RNA, 19 nt, Artificial Sequence
  Description of Artificial Sequence: Synthetic oligonucleotide
agaagcauguuccugcucc

SEQ ID NO: 1998637 - RNA, 19 nt, Artificial Sequence
  Description of Artificial Sequence: Synthetic oligonucleotide
acaagucuugcccaaaacc

SEQ ID NO: 1998638 - RNA, 19 nt, Artificial Sequence
  Description of Artificial Sequence: Synthetic oligonucleotide
ugaugcaagauaaagcgcc

SEQ ID NO: 1998639 - RNA, 19 nt, Artificial Sequence
  Description of Artificial Sequence: Synthetic oligonucleotide
aagauaaagcgcccugugc

SEQ ID NO: 1998640 - RNA, 19 nt, Artificial Sequence
  Description of Artificial Sequence: Synthetic oligonucleotide
uaggugguuauccaggagg

SEQ ID NO: 1998641 - RNA, 19 nt, Artificial Sequence
  Description of Artificial Sequence: Synthetic oligonucleotide
ucuugaugcaagauaaagc

SEQ ID NO: 1998642 - RNA, 19 nt, Artificial Sequence
  Description of Artificial Sequence: Synthetic oligonucleotide
ugaauugucuugaugcaag

SEQ ID NO: 1998643 - RNA, 19 nt, Artificial Sequence
  Description of Artificial Sequence: Synthetic oligonucleotide
ugagucagaucccaguagg

SEQ ID NO: 1998644 - RNA, 19 nt, Artificial Sequence
  Description of Artificial Sequence: Synthetic oligonucleotide
uucccuauuuuccauggcg

SEQ ID NO: 1998645 - RNA, 19 nt, Artificial Sequence
  Description of Artificial Sequence: Synthetic oligonucleotide
ugaagauugggguagggca

SEQ ID NO: 1998646 - RNA, 19 nt, Artificial Sequence
  Description of Artificial Sequence: Synthetic oligonucleotide
auugggguagggcaguugc

SEQ ID NO: 1998647 - RNA, 19 nt, Artificial Sequence
  Description of Artificial Sequence: Synthetic oligonucleotide
aaagcagagggcuuggggu

SEQ ID NO: 1998648 - RNA, 19 nt, Artificial Sequence
  Description of Artificial Sequence: Synthetic oligonucleotide
ucaaugucgucguagagac

SEQ ID NO: 1998649 - RNA, 19 nt, Artificial Sequence
  Description of Artificial Sequence: Synthetic oligonucleotide
ucgucguagagacuguugg

SEQ ID NO: 1998650 - RNA, 19 nt, Artificial Sequence
  Description of Artificial Sequence: Synthetic oligonucleotide
auugcgcucgcuuagagcu

SEQ ID NO: 1998651 - RNA, 19 nt, Artificial Sequence
  Description of Artificial Sequence: Synthetic oligonucleotide
uugucuugaugcaagauaa

SEQ ID NO: 1998652 - RNA, 19 nt, Artificial Sequence
  Description of Artificial Sequence: Synthetic oligonucleotide
guuaagucuauacaccuug

SEQ ID NO: 1998653 - RNA, 19 nt, Artificial Sequence
  Description of Artificial Sequence: Synthetic oligonucleotide
agguaugcuuugcauagcc

SEQ ID NO: 1998654 - RNA, 19 nt, Artificial Sequence
  Description of Artificial Sequence: Synthetic oligonucleotide
uguaguguggugauccuug

SEQ ID NO: 1998655 - RNA, 19 nt, Artificial Sequence
  Description of Artificial Sequence: Synthetic oligonucleotide
aacucuuccacuucuugga

SEQ ID NO: 1998656 - RNA, 19 nt, Artificial Sequence
  Description of Artificial Sequence: Synthetic oligonucleotide
uaucgcugagcucaugggg

SEQ ID NO: 1998657 - RNA, 19 nt, Artificial Sequence
  Description of Artificial Sequence: Synthetic oligonucleotide
uguagguaaggcauugcug

SEQ ID NO: 1998658 - RNA, 19 nt, Artificial Sequence
  Description of Artificial Sequence: Synthetic oligonucleotide
agacacaugcuguagaagu

SEQ ID NO: 1998659 - RNA, 19 nt, Artificial Sequence
  Description of Artificial Sequence: Synthetic oligonucleotide
ucccuauuuuccauggcgg

SEQ ID NO: 1998660 - RNA, 19 nt, Artificial Sequence
  Description of Artificial Sequence: Synthetic oligonucleotide
caugaggauccucagaagc

SEQ ID NO: 1998661 - RNA, 19 nt, Artificial Sequence
  Description of Artificial Sequence: Synthetic oligonucleotide
uguacugcagaaccugaag

SEQ ID NO: 1998662 - RNA, 19 nt, Artificial Sequence
  Description of Artificial Sequence: Synthetic oligonucleotide
agauaaagcgcccugugcu

SEQ ID NO: 1998663 - RNA, 19 nt, Artificial Sequence
  Description of Artificial Sequence: Synthetic oligonucleotide
ugcuguggagugcacagcg

SEQ ID NO: 1998664 - RNA, 19 nt, Artificial Sequence
  Description of Artificial Sequence: Synthetic oligonucleotide
cuuaucgcugagcucaugg

SEQ ID NO: 1998665 - RNA, 19 nt, Artificial Sequence
  Description of Artificial Sequence: Synthetic oligonucleotide
ucuucccuauuuuccaugg

SEQ ID NO: 1998666 - RNA, 19 nt, Artificial Sequence
  Description of Artificial Sequence: Synthetic oligonucleotide
agaaccugaagcaagaggu

SEQ ID NO: 1998667 - RNA, 19 nt, Artificial Sequence
  Description of Artificial Sequence: Synthetic oligonucleotide
uuauccaggaggcuguacu

SEQ ID NO: 1998668 - RNA, 19 nt, Artificial Sequence
  Description of Artificial Sequence: Synthetic oligonucleotide
gaagugcucaaugucgucg

SEQ ID NO: 1998669 - RNA, 19 nt, Artificial Sequence
  Description of Artificial Sequence: Synthetic oligonucleotide
acugguggagcccaugggg

SEQ ID NO: 1998670 - RNA, 19 nt, Artificial Sequence
  Description of Artificial Sequence: Synthetic oligonucleotide
ccaaaacccagguagaugg

SEQ ID NO: 1998671 - RNA, 19 nt, Artificial Sequence
  Description of Artificial Sequence: Synthetic oligonucleotide
aaggacacacccuguguag

SEQ ID NO: 1998672 - RNA, 19 nt, Artificial Sequence
  Description of Artificial Sequence: Synthetic oligonucleotide
uugaugcaagauaaagcgc

SEQ ID NO: 1998673 - RNA, 19 nt, Artificial Sequence
  Description of Artificial Sequence: Synthetic oligonucleotide
gauccgggagcucagcagg

SEQ ID NO: 1998674 - RNA, 19 nt, Artificial Sequence
  Description of Artificial Sequence: Synthetic oligonucleotide
uaagucuauacaccuugug

SEQ ID NO: 1998675 - RNA, 19 nt, Artificial Sequence
  Description of Artificial Sequence: Synthetic oligonucleotide
uuuggagcccagcauuucc

SEQ ID NO: 1998676 - RNA, 19 nt, Artificial Sequence
  Description of Artificial Sequence: Synthetic oligonucleotide
uuaucgcugagcucauggg

SEQ ID NO: 1998677 - RNA, 19 nt, Artificial Sequence
  Description of Artificial Sequence: Synthetic oligonucleotide
guucuuaucgcugagcuca

SEQ ID NO: 1998678 - RNA, 19 nt, Artificial Sequence
  Description of Artificial Sequence: Synthetic oligonucleotide
uaugcuuugcauagccaug

SEQ ID NO: 1998679 - RNA, 19 nt, Artificial Sequence
  Description of Artificial Sequence: Synthetic oligonucleotide
gucuauacaccuugugggg

SEQ ID NO: 1998680 - RNA, 19 nt, Artificial Sequence
  Description of Artificial Sequence: Synthetic oligonucleotide
ucugagguucuuaucgcug

SEQ ID NO: 1998681 - RNA, 19 nt, Artificial Sequence
  Description of Artificial Sequence: Synthetic oligonucleotide
uugaccaggaucaggcucu

SEQ ID NO: 1998682 - RNA, 19 nt, Artificial Sequence
  Description of Artificial Sequence: Synthetic oligonucleotide
gguaaggcauugcugaggg

SEQ ID NO: 1998683 - RNA, 19 nt, Artificial Sequence
  Description of Artificial Sequence: Synthetic oligonucleotide
uccggguuaagucuauaca

SEQ ID NO: 1998684 - RNA, 19 nt, Artificial Sequence
  Description of Artificial Sequence: Synthetic oligonucleotide
auugucuugaugcaagaua

SEQ ID NO: 1998685 - RNA, 19 nt, Artificial Sequence
  Description of Artificial Sequence: Synthetic oligonucleotide
uaaggcauugcugaggguc

SEQ ID NO: 1998686 - RNA, 19 nt, Artificial Sequence
  Description of Artificial Sequence: Synthetic oligonucleotide
agaauggucccaaggacac

SEQ ID NO: 1998687 - RNA, 19 nt, Artificial Sequence
  Description of Artificial Sequence: Synthetic oligonucleotide
cuguacaggaacacgcacc

SEQ ID NO: 1998688 - RNA, 19 nt, Artificial Sequence
  Description of Artificial Sequence: Synthetic oligonucleotide
aacugguggagcccauggg

SEQ ID NO: 1998689 - RNA, 19 nt, Artificial Sequence
  Description of Artificial Sequence: Synthetic oligonucleotide
gauaaagcgcccugugcug

SEQ ID NO: 1998690 - RNA, 19 nt, Artificial Sequence
  Description of Artificial Sequence: Synthetic oligonucleotide
gucuugaugcaagauaaag

SEQ ID NO: 1998691 - RNA, 19 nt, Artificial Sequence
  Description of Artificial Sequence: Synthetic oligonucleotide
agguucuuaucgcugagcu

SEQ ID NO: 1998692 - RNA, 19 nt, Artificial Sequence
  Description of Artificial Sequence: Synthetic oligonucleotide
ucguagagacuguuggugc

SEQ ID NO: 1998693 - RNA, 19 nt, Artificial Sequence
  Description of Artificial Sequence: Synthetic oligonucleotide
ugguguaguguggugaucc

SEQ ID NO: 1998694 - RNA, 19 nt, Artificial Sequence
  Description of Artificial Sequence: Synthetic oligonucleotide
ucuugcagagaaugguccc

SEQ ID NO: 1998695 - RNA, 19 nt, Artificial Sequence
  Description of Artificial Sequence: Synthetic oligonucleotide
uuaagucuauacaccuugu

SEQ ID NO: 1998696 - RNA, 19 nt, Artificial Sequence
  Description of Artificial Sequence: Synthetic oligonucleotide
auugccuguagcacugugc

SEQ ID NO: 1998697 - RNA, 19 nt, Artificial Sequence
  Description of Artificial Sequence: Synthetic oligonucleotide
agcauguuccugcuccugg

SEQ ID NO: 1998698 - RNA, 19 nt, Artificial Sequence
  Description of Artificial Sequence: Synthetic oligonucleotide
aagcaagagguccccagca

SEQ ID NO: 1998699 - RNA, 19 nt, Artificial Sequence
  Description of Artificial Sequence: Synthetic oligonucleotide
uggguguugaagccucggg

SEQ ID NO: 1998700 - RNA, 19 nt, Artificial Sequence
  Description of Artificial Sequence: Synthetic oligonucleotide
cuauuuuccauggcggggc

SEQ ID NO: 1998701 - RNA, 19 nt, Artificial Sequence
  Description of Artificial Sequence: Synthetic oligonucleotide
aagugcucaaugucgucgu

SEQ ID NO: 1998702 - RNA, 19 nt, Artificial Sequence
  Description of Artificial Sequence: Synthetic oligonucleotide
ugcuagacaggcacaggcc

SEQ ID NO: 1998703 - RNA, 19 nt, Artificial Sequence
  Description of Artificial Sequence: Synthetic oligonucleotide
cugcugacaagucuugccc

SEQ ID NO: 1998704 - RNA, 19 nt, Artificial Sequence
  Description of Artificial Sequence: Synthetic oligonucleotide
cuagauugcgcucgcuuag

SEQ ID NO: 1998705 - RNA, 19 nt, Artificial Sequence
  Description of Artificial Sequence: Synthetic oligonucleotide
aggugguuauccaggaggc

SEQ ID NO: 1998706 - RNA, 19 nt, Artificial Sequence
  Description of Artificial Sequence: Synthetic oligonucleotide
ugauccuugucgccuccgg

SEQ ID NO: 1998707 - RNA, 19 nt, Artificial Sequence
  Description of Artificial Sequence: Synthetic oligonucleotide
agagguccccagcaucacc

SEQ ID NO: 1998708 - RNA, 19 nt, Artificial Sequence
  Description of Artificial Sequence: Synthetic oligonucleotide
cuguagaaguguuucugug

SEQ ID NO: 1998709 - RNA, 19 nt, Artificial Sequence
  Description of Artificial Sequence: Synthetic oligonucleotide
uggucccaaggacacaccc

SEQ ID NO: 1998710 - RNA, 19 nt, Artificial Sequence
  Description of Artificial Sequence: Synthetic oligonucleotide
acucuuuccagguaugcuu

SEQ ID NO: 1998711 - RNA, 19 nt, Artificial Sequence
  Description of Artificial Sequence: Synthetic oligonucleotide
cuuccaccugccauguugc

SEQ ID NO: 1998712 - RNA, 19 nt, Artificial Sequence
  Description of Artificial Sequence: Synthetic oligonucleotide
cauggcggggccuucagug

SEQ ID NO: 1998713 - RNA, 19 nt, Artificial Sequence
  Description of Artificial Sequence: Synthetic oligonucleotide
ugagguucuuaucgcugag

SEQ ID NO: 1998714 - RNA, 19 nt, Artificial Sequence
  Description of Artificial Sequence: Synthetic oligonucleotide
gauugcgcucgcuuagagc

SEQ ID NO: 1998715 - RNA, 19 nt, Artificial Sequence
  Description of Artificial Sequence: Synthetic oligonucleotide
uguugaagccucgggcugg

SEQ ID NO: 1998716 - RNA, 19 nt, Artificial Sequence
  Description of Artificial Sequence: Synthetic oligonucleotide
aguaggugguuauccagga

SEQ ID NO: 1998717 - RNA, 19 nt, Artificial Sequence
  Description of Artificial Sequence: Synthetic oligonucleotide
gcuagacaggcacaggccg

SEQ ID NO: 1998718 - RNA, 19 nt, Artificial Sequence
  Description of Artificial Sequence: Synthetic oligonucleotide
guacccuagauugcgcucg

SEQ ID NO: 1998719 - RNA, 19 nt, Artificial Sequence
  Description of Artificial Sequence: Synthetic oligonucleotide
augcgcagggcccacagug

SEQ ID NO: 1998720 - RNA, 19 nt, Artificial Sequence
  Description of Artificial Sequence: Synthetic oligonucleotide
ucuugcccaaaacccaggu

SEQ ID NO: 1998721 - RNA, 19 nt, Artificial Sequence
  Description of Artificial Sequence: Synthetic oligonucleotide
uagguaaggcauugcugag

SEQ ID NO: 1998722 - RNA, 19 nt, Artificial Sequence
  Description of Artificial Sequence: Synthetic oligonucleotide
gagaauggucccaaggaca

SEQ ID NO: 1998723 - RNA, 19 nt, Artificial Sequence
  Description of Artificial Sequence: Synthetic oligonucleotide
gaugcaagauaaagcgccc

SEQ ID NO: 1998724 - RNA, 19 nt, Artificial Sequence
  Description of Artificial Sequence: Synthetic oligonucleotide
gucccaaggacacacccug

SEQ ID NO: 1998725 - RNA, 19 nt, Artificial Sequence
  Description of Artificial Sequence: Synthetic oligonucleotide
ccauguugcaugaggaucc

SEQ ID NO: 1998726 - RNA, 19 nt, Artificial Sequence
  Description of Artificial Sequence: Synthetic oligonucleotide
auggucacauccagguacc

SEQ ID NO: 1998727 - RNA, 19 nt, Artificial Sequence
  Description of Artificial Sequence: Synthetic oligonucleotide
cauggggcuguacaggaac

SEQ ID NO: 1998728 - RNA, 19 nt, Artificial Sequence
  Description of Artificial Sequence: Synthetic oligonucleotide
aaacccagguagauggugu

SEQ ID NO: 1998729 - RNA, 19 nt, Artificial Sequence
  Description of Artificial Sequence: Synthetic oligonucleotide
caguacaccuugcacuugc

SEQ ID NO: 1998730 - RNA, 19 nt, Artificial Sequence
  Description of Artificial Sequence: Synthetic oligonucleotide
aagucuugcccaaaaccca

SEQ ID NO: 1998731 - RNA, 19 nt, Artificial Sequence
  Description of Artificial Sequence: Synthetic oligonucleotide
ggcucacugacccagcucc

SEQ ID NO: 1998732 - RNA, 19 nt, Artificial Sequence
  Description of Artificial Sequence: Synthetic oligonucleotide
caagagcugggcuggagug

SEQ ID NO: 1998733 - RNA, 19 nt, Artificial Sequence
  Description of Artificial Sequence: Synthetic oligonucleotide
uauuuuccauggcggggcc

SEQ ID NO: 1998734 - RNA, 19 nt, Artificial Sequence
  Description of Artificial Sequence: Synthetic oligonucleotide
uuuuccagccugcucgcuc

SEQ ID NO: 1998735 - RNA, 19 nt, Artificial Sequence
  Description of Artificial Sequence: Synthetic oligonucleotide
ugcugacaagucuugccca

SEQ ID NO: 1998736 - RNA, 19 nt, Artificial Sequence
  Description of Artificial Sequence: Synthetic oligonucleotide
gagacuguuggugcuagac

SEQ ID NO: 1998737 - RNA, 19 nt, Artificial Sequence
  Description of Artificial Sequence: Synthetic oligonucleotide
cagcugaaggccuggagac

SEQ ID NO: 1998738 - RNA, 19 nt, Artificial Sequence
  Description of Artificial Sequence: Synthetic oligonucleotide
agacuguuggugcuagaca

SEQ ID NO: 1998739 - RNA, 19 nt, Artificial Sequence
  Description of Artificial Sequence: Synthetic oligonucleotide
gucguagagacuguuggug

SEQ ID NO: 1998740 - RNA, 19 nt, Artificial Sequence
  Description of Artificial Sequence: Synthetic oligonucleotide
auggcggggccuucagugc

SEQ ID NO: 1998741 - RNA, 19 nt, Artificial Sequence
  Description of Artificial Sequence: Synthetic oligonucleotide
uccagguacccuagauugc

SEQ ID NO: 1998742 - RNA, 19 nt, Artificial Sequence
  Description of Artificial Sequence: Synthetic oligonucleotide
agaugguguagugugguga

SEQ ID NO: 1998743 - RNA, 19 nt, Artificial Sequence
  Description of Artificial Sequence: Synthetic oligonucleotide
acugagucagaucccagua

SEQ ID NO: 1998744 - RNA, 19 nt, Artificial Sequence
  Description of Artificial Sequence: Synthetic oligonucleotide
cuguuggugcuagacaggc

SEQ ID NO: 1998745 - RNA, 19 nt, Artificial Sequence
  Description of Artificial Sequence: Synthetic oligonucleotide
gaucaggcucuucuccuug

SEQ ID NO: 1998746 - RNA, 19 nt, Artificial Sequence
  Description of Artificial Sequence: Synthetic oligonucleotide
uccuugucgccuccgggcc

SEQ ID NO: 1998747 - RNA, 19 nt, Artificial Sequence
  Description of Artificial Sequence: Synthetic oligonucleotide
agaaguguuucuguguaau

SEQ ID NO: 1998748 - RNA, 19 nt, Artificial Sequence
  Description of Artificial Sequence: Synthetic oligonucleotide
guugcgcuccaagagcugg

SEQ ID NO: 1998749 - RNA, 19 nt, Artificial Sequence
  Description of Artificial Sequence: Synthetic oligonucleotide
ucccaguaggugguuaucc

SEQ ID NO: 1998750 - RNA, 19 nt, Artificial Sequence
  Description of Artificial Sequence: Synthetic oligonucleotide
ugcacucuuuccagguaug

SEQ ID NO: 1998751 - RNA, 19 nt, Artificial Sequence
  Description of Artificial Sequence: Synthetic oligonucleotide
agauugcgcucgcuuagag

SEQ ID NO: 1998752 - RNA, 19 nt, Artificial Sequence
  Description of Artificial Sequence: Synthetic oligonucleotide
agguaaggcauugcugagg

SEQ ID NO: 1998753 - RNA, 19 nt, Artificial Sequence
  Description of Artificial Sequence: Synthetic oligonucleotide
gagugcacagcggaaguug

SEQ ID NO: 1998754 - RNA, 19 nt, Artificial Sequence
  Description of Artificial Sequence: Synthetic oligonucleotide
uggagugcacagcggaagu

SEQ ID NO: 1998755 - RNA, 19 nt, Artificial Sequence
  Description of Artificial Sequence: Synthetic oligonucleotide
cacugugcggcccuuguac

SEQ ID NO: 1998756 - RNA, 19 nt, Artificial Sequence
  Description of Artificial Sequence: Synthetic oligonucleotide
ggcaguugcgcuccaagag

SEQ ID NO: 1998757 - RNA, 19 nt, Artificial Sequence
  Description of Artificial Sequence: Synthetic oligonucleotide
ugcccaaaacccagguaga

SEQ ID NO: 1998758 - RNA, 19 nt, Artificial Sequence
  Description of Artificial Sequence: Synthetic oligonucleotide
ucuguguaaugcagcugcu

SEQ ID NO: 1998759 - RNA, 19 nt, Artificial Sequence
  Description of Artificial Sequence: Synthetic oligonucleotide
aagcagagggcuugggguu

SEQ ID NO: 1998760 - RNA, 19 nt, Artificial Sequence
  Description of Artificial Sequence: Synthetic oligonucleotide
ccggguuaagucuauacac

SEQ ID NO: 1998761 - RNA, 19 nt, Artificial Sequence
  Description of Artificial Sequence: Synthetic oligonucleotide
aggacacacccucacgcug

SEQ ID NO: 1998762 - RNA, 19 nt, Artificial Sequence
  Description of Artificial Sequence: Synthetic oligonucleotide
guguggugauccuugucgc

SEQ ID NO: 1998763 - RNA, 19 nt, Artificial Sequence
  Description of Artificial Sequence: Synthetic oligonucleotide
uugcgcuccaagagcuggg

SEQ ID NO: 1998764 - RNA, 19 nt, Artificial Sequence
  Description of Artificial Sequence: Synthetic oligonucleotide
uagaugguguaguguggug

SEQ ID NO: 1998765 - RNA, 19 nt, Artificial Sequence
  Description of Artificial Sequence: Synthetic oligonucleotide
cuccggguuaagucuauac

SEQ ID NO: 1998766 - RNA, 19 nt, Artificial Sequence
  Description of Artificial Sequence: Synthetic oligonucleotide
accuugcacuugcccaugc

SEQ ID NO: 1998767 - RNA, 19 nt, Artificial Sequence
  Description of Artificial Sequence: Synthetic oligonucleotide
ugggguagggcaguugcgc

SEQ ID NO: 1998768 - RNA, 19 nt, Artificial Sequence
  Description of Artificial Sequence: Synthetic oligonucleotide
cacaggccgagacugcugc

SEQ ID NO: 1998769 - RNA, 19 nt, Artificial Sequence
  Description of Artificial Sequence: Synthetic oligonucleotide
caagagguccccagcauca

SEQ ID NO: 1998770 - RNA, 19 nt, Artificial Sequence
  Description of Artificial Sequence: Synthetic oligonucleotide
guuucuguguaaugcagcu

SEQ ID NO: 1998771 - RNA, 19 nt, Artificial Sequence
  Description of Artificial Sequence: Synthetic oligonucleotide
ugcgcucgcuuagagcugg

SEQ ID NO: 1998772 - RNA, 19 nt, Artificial Sequence
  Description of Artificial Sequence: Synthetic oligonucleotide
uagagacuguuggugcuag

SEQ ID NO: 1998773 - RNA, 19 nt, Artificial Sequence
  Description of Artificial Sequence: Synthetic oligonucleotide
cucaaugucgucguagaga

SEQ ID NO: 1998774 - RNA, 19 nt, Artificial Sequence
  Description of Artificial Sequence: Synthetic oligonucleotide
ugucuugaugcaagauaaa

SEQ ID NO: 1998775 - RNA, 19 nt, Artificial Sequence
  Description of Artificial Sequence: Synthetic oligonucleotide
agguacccuagauugcgcu

SEQ ID NO: 1998776 - RNA, 19 nt, Artificial Sequence
  Description of Artificial Sequence: Synthetic oligonucleotide
gagcucauggggcuguaca

SEQ ID NO: 1998777 - RNA, 19 nt, Artificial Sequence
  Description of Artificial Sequence: Synthetic oligonucleotide
guacaccuugcacuugccc

SEQ ID NO: 1998778 - RNA, 19 nt, Artificial Sequence
  Description of Artificial Sequence: Synthetic oligonucleotide
uguguagguaaggcauugc

SEQ ID NO: 1998779 - RNA, 19 nt, Artificial Sequence
  Description of Artificial Sequence: Synthetic oligonucleotide
aguugaagauugggguagg

SEQ ID NO: 1998780 - RNA, 19 nt, Artificial Sequence
  Description of Artificial Sequence: Synthetic oligonucleotide
uuggugcuagacaggcaca

SEQ ID NO: 1998781 - RNA, 19 nt, Artificial Sequence
  Description of Artificial Sequence: Synthetic oligonucleotide
aagauugggguagggcagu

SEQ ID NO: 1998782 - RNA, 19 nt, Artificial Sequence
  Description of Artificial Sequence: Synthetic oligonucleotide
aggacacacccuguguagg

SEQ ID NO: 1998783 - RNA, 19 nt, Artificial Sequence
  Description of Artificial Sequence: Synthetic oligonucleotide
guugaagauugggguaggg

SEQ ID NO: 1998784 - RNA, 19 nt, Artificial Sequence
  Description of Artificial Sequence: Synthetic oligonucleotide
guaggugguuauccaggag

SEQ ID NO: 1998785 - RNA, 19 nt, Artificial Sequence
  Description of Artificial Sequence: Synthetic oligonucleotide
uguuggugcuagacaggca

SEQ ID NO: 1998786 - RNA, 19 nt, Artificial Sequence
  Description of Artificial Sequence: Synthetic oligonucleotide
guaugcuuugcauagccau

SEQ ID NO: 1998787 - RNA, 19 nt, Artificial Sequence
  Description of Artificial Sequence: Synthetic oligonucleotide
uagaaguguuucuguguaa

SEQ ID NO: 1998788 - RNA, 19 nt, Artificial Sequence
  Description of Artificial Sequence: Synthetic oligonucleotide
ugccuguagcacugugcgg

SEQ ID NO: 1998789 - RNA, 19 nt, Artificial Sequence
  Description of Artificial Sequence: Synthetic oligonucleotide
ggguguugaagccucgggc

SEQ ID NO: 1998790 - RNA, 19 nt, Artificial Sequence
  Description of Artificial Sequence: Synthetic oligonucleotide
ucagugcauccaagcuccg

SEQ ID NO: 1998791 - RNA, 19 nt, Artificial Sequence
  Description of Artificial Sequence: Synthetic oligonucleotide
ggaacacgcaccuggggug

SEQ ID NO: 1998792 - RNA, 19 nt, Artificial Sequence
  Description of Artificial Sequence: Synthetic oligonucleotide
caggauccugugaugggac

SEQ ID NO: 1998793 - RNA, 19 nt, Artificial Sequence
  Description of Artificial Sequence: Synthetic oligonucleotide
acccuguguagguaaggca

SEQ ID NO: 1998794 - RNA, 19 nt, Artificial Sequence
  Description of Artificial Sequence: Synthetic oligonucleotide
guggagugcacagcggaag

SEQ ID NO: 1998795 - RNA, 19 nt, Artificial Sequence
  Description of Artificial Sequence: Synthetic oligonucleotide
gcaguugcgcuccaagagc

SEQ ID NO: 1998796 - RNA, 19 nt, Artificial Sequence
  Description of Artificial Sequence: Synthetic oligonucleotide
cucccaguacaccuugcac

SEQ ID NO: 1998797 - RNA, 19 nt, Artificial Sequence
  Description of Artificial Sequence: Synthetic oligonucleotide
cuucccuauuuuccauggc

SEQ ID NO: 1998798 - RNA, 19 nt, Artificial Sequence
  Description of Artificial Sequence: Synthetic oligonucleotide
uggggugccccaccauugc

SEQ ID NO: 1998799 - RNA, 19 nt, Artificial Sequence
  Description of Artificial Sequence: Synthetic oligonucleotide
uaaagcgcccugugcugug

SEQ ID NO: 1998800 - RNA, 19 nt, Artificial Sequence
  Description of Artificial Sequence: Synthetic oligonucleotide
ugauggucacauccaggua

SEQ ID NO: 1998801 - RNA, 19 nt, Artificial Sequence
  Description of Artificial Sequence: Synthetic oligonucleotide
gugcucaaugucgucguag

SEQ ID NO: 1998802 - RNA, 19 nt, Artificial Sequence
  Description of Artificial Sequence: Synthetic oligonucleotide
acuugaccaggaucaggcu

SEQ ID NO: 1998803 - RNA, 19 nt, Artificial Sequence
  Description of Artificial Sequence: Synthetic oligonucleotide
gcggaaguugguuuuccag

SEQ ID NO: 1998804 - RNA, 19 nt, Artificial Sequence
  Description of Artificial Sequence: Synthetic oligonucleotide
uccagggaggacacacccu

SEQ ID NO: 1998805 - RNA, 19 nt, Artificial Sequence
  Description of Artificial Sequence: Synthetic oligonucleotide
cuuggaagaaagugcugaa

SEQ ID NO: 1998806 - RNA, 19 nt, Artificial Sequence
  Description of Artificial Sequence: Synthetic oligonucleotide
ugccauguugcaugaggau

SEQ ID NO: 1998807 - RNA, 19 nt, Artificial Sequence
  Description of Artificial Sequence: Synthetic oligonucleotide
caggaacacgcaccugggg

SEQ ID NO: 1998808 - RNA, 19 nt, Artificial Sequence
  Description of Artificial Sequence: Synthetic oligonucleotide
gaacacgcaccuggggugc

SEQ ID NO: 1998809 - RNA, 19 nt, Artificial Sequence
  Description of Artificial Sequence: Synthetic oligonucleotide
gaaccugaagcaagagguc

SEQ ID NO: 1998810 - RNA, 19 nt, Artificial Sequence
  Description of Artificial Sequence: Synthetic oligonucleotide
aagcauguuccugcuccug

SEQ ID NO: 1998811 - RNA, 19 nt, Artificial Sequence
  Description of Artificial Sequence: Synthetic oligonucleotide
acagcggaaguugguuuuc

SEQ ID NO: 1998812 - RNA, 19 nt, Artificial Sequence
  Description of Artificial Sequence: Synthetic oligonucleotide
ugcgcagggcccacaguga

SEQ ID NO: 1998813 - RNA, 19 nt, Artificial Sequence
  Description of Artificial Sequence: Synthetic oligonucleotide
gccuguagcacugugcggc

SEQ ID NO: 1998814 - RNA, 19 nt, Artificial Sequence
  Description of Artificial Sequence: Synthetic oligonucleotide
acgcugcacucuuuccagg

SEQ ID NO: 1998815 - RNA, 19 nt, Artificial Sequence
  Description of Artificial Sequence: Synthetic oligonucleotide
agcggaaguugguuuucca

SEQ ID NO: 1998816 - RNA, 19 nt, Artificial Sequence
  Description of Artificial Sequence: Synthetic oligonucleotide
uaguguggugauccuuguc

SEQ ID NO: 1998817 - RNA, 19 nt, Artificial Sequence
  Description of Artificial Sequence: Synthetic oligonucleotide
ugguggagcccauggggcu

SEQ ID NO: 1998818 - RNA, 19 nt, Artificial Sequence
  Description of Artificial Sequence: Synthetic oligonucleotide
ugcuucugauccgggagcu

SEQ ID NO: 1998819 - RNA, 19 nt, Artificial Sequence
  Description of Artificial Sequence: Synthetic oligonucleotide
cucgcuuagagcugggugu

SEQ ID NO: 1998820 - RNA, 19 nt, Artificial Sequence
  Description of Artificial Sequence: Synthetic oligonucleotide
gacugagucagaucccagu

SEQ ID NO: 1998821 - RNA, 19 nt, Artificial Sequence
  Description of Artificial Sequence: Synthetic oligonucleotide
cuggggugccccaccauug

SEQ ID NO: 1998822 - RNA, 19 nt, Artificial Sequence
  Description of Artificial Sequence: Synthetic oligonucleotide
uacccuagauugcgcucgc

SEQ ID NO: 1998823 - RNA, 19 nt, Artificial Sequence
  Description of Artificial Sequence: Synthetic oligonucleotide
gaugguguaguguggugau

SEQ ID NO: 1998824 - RNA, 19 nt, Artificial Sequence
  Description of Artificial Sequence: Synthetic oligonucleotide
cccuauuuuccauggcggg

SEQ ID NO: 1998825 - RNA, 19 nt, Artificial Sequence
  Description of Artificial Sequence: Synthetic oligonucleotide
cagugacagccccugcacc

SEQ ID NO: 1998826 - RNA, 19 nt, Artificial Sequence
  Description of Artificial Sequence: Synthetic oligonucleotide
gauccugugaugggacuga

SEQ ID NO: 1998827 - RNA, 19 nt, Artificial Sequence
  Description of Artificial Sequence: Synthetic oligonucleotide
guguagguaaggcauugcu

SEQ ID NO: 1998828 - RNA, 19 nt, Artificial Sequence
  Description of Artificial Sequence: Synthetic oligonucleotide
cagguacccuagauugcgc

SEQ ID NO: 1998829 - RNA, 19 nt, Artificial Sequence
  Description of Artificial Sequence: Synthetic oligonucleotide
ccuauuuuccauggcgggg

SEQ ID NO: 1998830 - RNA, 19 nt, Artificial Sequence
  Description of Artificial Sequence: Synthetic oligonucleotide
agcaagagguccccagcau

SEQ ID NO: 1998831 - RNA, 19 nt, Artificial Sequence
  Description of Artificial Sequence: Synthetic oligonucleotide
cacugacccagcuccauga

SEQ ID NO: 1998832 - RNA, 19 nt, Artificial Sequence
  Description of Artificial Sequence: Synthetic oligonucleotide
acacccuguguagguaagg

SEQ ID NO: 1998833 - RNA, 19 nt, Artificial Sequence
  Description of Artificial Sequence: Synthetic oligonucleotide
ccagguacccuagauugcg

SEQ ID NO: 1998834 - RNA, 19 nt, Artificial Sequence
  Description of Artificial Sequence: Synthetic oligonucleotide
caagcuccggguuaagucu

SEQ ID NO: 1998835 - RNA, 19 nt, Artificial Sequence
  Description of Artificial Sequence: Synthetic oligonucleotide
agcccauggggcugcccac

SEQ ID NO: 1998836 - RNA, 19 nt, Artificial Sequence
  Description of Artificial Sequence: Synthetic oligonucleotide
uagauugcgcucgcuuaga

SEQ ID NO: 1998837 - RNA, 19 nt, Artificial Sequence
  Description of Artificial Sequence: Synthetic oligonucleotide
uuuuccauggcggggccuu

SEQ ID NO: 1998838 - RNA, 19 nt, Artificial Sequence
  Description of Artificial Sequence: Synthetic oligonucleotide
aggauccugugaugggacu

SEQ ID NO: 1998839 - RNA, 19 nt, Artificial Sequence
  Description of Artificial Sequence: Synthetic oligonucleotide
cggguuaagucuauacacc

SEQ ID NO: 1998840 - RNA, 19 nt, Artificial Sequence
  Description of Artificial Sequence: Synthetic oligonucleotide
ugcacagcggaaguugguu

SEQ ID NO: 1998841 - RNA, 19 nt, Artificial Sequence
  Description of Artificial Sequence: Synthetic oligonucleotide
caaggacacacccugugua

SEQ ID NO: 1998842 - RNA, 19 nt, Artificial Sequence
  Description of Artificial Sequence: Synthetic oligonucleotide
gcucgcuuagagcugggug

SEQ ID NO: 1998843 - RNA, 19 nt, Artificial Sequence
  Description of Artificial Sequence: Synthetic oligonucleotide
cauugcugagggucucuuc

SEQ ID NO: 1998844 - RNA, 19 nt, Artificial Sequence
  Description of Artificial Sequence: Synthetic oligonucleotide
cugcccaccucccaguaca

SEQ ID NO: 1998845 - RNA, 19 nt, Artificial Sequence
  Description of Artificial Sequence: Synthetic oligonucleotide
uccaagcuccggguuaagu

SEQ ID NO: 1998846 - RNA, 19 nt, Artificial Sequence
  Description of Artificial Sequence: Synthetic oligonucleotide
gcucugagguucuuaucgc

SEQ ID NO: 1998847 - RNA, 19 nt, Artificial Sequence
  Description of Artificial Sequence: Synthetic oligonucleotide
augcaagauaaagcgcccu

SEQ ID NO: 1998848 - RNA, 19 nt, Artificial Sequence
  Description of Artificial Sequence: Synthetic oligonucleotide
cugugaugggacugaguca

SEQ ID NO: 1998849 - RNA, 19 nt, Artificial Sequence
  Description of Artificial Sequence: Synthetic oligonucleotide
guugaagccucgggcuggg

SEQ ID NO: 1998850 - RNA, 19 nt, Artificial Sequence
  Description of Artificial Sequence: Synthetic oligonucleotide
uugcgcucgcuuagagcug

SEQ ID NO: 1998851 - RNA, 19 nt, Artificial Sequence
  Description of Artificial Sequence: Synthetic oligonucleotide
aucccaguaggugguuauc

SEQ ID NO: 1998852 - RNA, 19 nt, Artificial Sequence
  Description of Artificial Sequence: Synthetic oligonucleotide
gcuguacaggaacacgcac

SEQ ID NO: 1998853 - RNA, 19 nt, Artificial Sequence
  Description of Artificial Sequence: Synthetic oligonucleotide
cuggguguugaagccucgg

SEQ ID NO: 1998854 - RNA, 19 nt, Artificial Sequence
  Description of Artificial Sequence: Synthetic oligonucleotide
ggguuaagucuauacaccu

SEQ ID NO: 1998855 - RNA, 19 nt, Artificial Sequence
  Description of Artificial Sequence: Synthetic oligonucleotide
uggugauccuugucgccuc

SEQ ID NO: 1998856 - RNA, 19 nt, Artificial Sequence
  Description of Artificial Sequence: Synthetic oligonucleotide
gggaggacacacccucacg

SEQ ID NO: 1998857 - RNA, 19 nt, Artificial Sequence
  Description of Artificial Sequence: Synthetic oligonucleotide
gucgucguagagacuguug

SEQ ID NO: 1998858 - RNA, 19 nt, Artificial Sequence
  Description of Artificial Sequence: Synthetic oligonucleotide
gguuuuccagccugcucgc

SEQ ID NO: 1998859 - RNA, 19 nt, Artificial Sequence
  Description of Artificial Sequence: Synthetic oligonucleotide
ugcauagccauggcuccaa

SEQ ID NO: 1998860 - RNA, 19 nt, Artificial Sequence
  Description of Artificial Sequence: Synthetic oligonucleotide
gcucauggggcuguacagg

SEQ ID NO: 1998861 - RNA, 19 nt, Artificial Sequence
  Description of Artificial Sequence: Synthetic oligonucleotide
gguagggcaguugcgcucc

SEQ ID NO: 1998862 - RNA, 19 nt, Artificial Sequence
  Description of Artificial Sequence: Synthetic oligonucleotide
uggggcuguacaggaacac

SEQ ID NO: 1998863 - RNA, 19 nt, Artificial Sequence
  Description of Artificial Sequence: Synthetic oligonucleotide
cagugcauccaagcuccgg

SEQ ID NO: 1998864 - RNA, 19 nt, Artificial Sequence
  Description of Artificial Sequence: Synthetic oligonucleotide
aggccgagacugcugcugu

SEQ ID NO: 1998865 - RNA, 19 nt, Artificial Sequence
  Description of Artificial Sequence: Synthetic oligonucleotide
uggcuccaacuugaccagg

SEQ ID NO: 1998866 - RNA, 19 nt, Artificial Sequence
  Description of Artificial Sequence: Synthetic oligonucleotide
ccucuugcagagaaugguc

SEQ ID NO: 1998867 - RNA, 19 nt, Artificial Sequence
  Description of Artificial Sequence: Synthetic oligonucleotide
ggggcuguacaggaacacg

SEQ ID NO: 1998868 - RNA, 19 nt, Artificial Sequence
  Description of Artificial Sequence: Synthetic oligonucleotide
uccaccugccauguugcau

SEQ ID NO: 1998869 - RNA, 19 nt, Artificial Sequence
  Description of Artificial Sequence: Synthetic oligonucleotide
ucuuaucgcugagcucaug

SEQ ID NO: 1998870 - RNA, 19 nt, Artificial Sequence
  Description of Artificial Sequence: Synthetic oligonucleotide
aagcgcccugugcugugga

SEQ ID NO: 1998871 - RNA, 19 nt, Artificial Sequence
  Description of Artificial Sequence: Synthetic oligonucleotide
gccaggauccugugauggg

SEQ ID NO: 1998872 - RNA, 19 nt, Artificial Sequence
  Description of Artificial Sequence: Synthetic oligonucleotide
gaggacacacccucacgcu

SEQ ID NO: 1998873 - RNA, 19 nt, Artificial Sequence
  Description of Artificial Sequence: Synthetic oligonucleotide
gccauguugcaugaggauc

SEQ ID NO: 1998874 - RNA, 19 nt, Artificial Sequence
  Description of Artificial Sequence: Synthetic oligonucleotide
gcaagagguccccagcauc

SEQ ID NO: 1998875 - RNA, 19 nt, Artificial Sequence
  Description of Artificial Sequence: Synthetic oligonucleotide
gaagcauguuccugcuccu

SEQ ID NO: 1998876 - RNA, 19 nt, Artificial Sequence
  Description of Artificial Sequence: Synthetic oligonucleotide
auguugcaugaggauccuc

SEQ ID NO: 1998877 - RNA, 19 nt, Artificial Sequence
  Description of Artificial Sequence: Synthetic oligonucleotide
gguucuuaucgcugagcuc

SEQ ID NO: 1998878 - RNA, 19 nt, Artificial Sequence
  Description of Artificial Sequence: Synthetic oligonucleotide
gguacccuagauugcgcuc

SEQ ID NO: 1998879 - RNA, 19 nt, Artificial Sequence
  Description of Artificial Sequence: Synthetic oligonucleotide
ccagaaagcagagggcuug

SEQ ID NO: 1998880 - RNA, 19 nt, Artificial Sequence
  Description of Artificial Sequence: Synthetic oligonucleotide
ccugaauugucuugaugca

SEQ ID NO: 1998881 - RNA, 19 nt, Artificial Sequence
  Description of Artificial Sequence: Synthetic oligonucleotide
gugauccuugucgccuccg

SEQ ID NO: 1998882 - RNA, 19 nt, Artificial Sequence
  Description of Artificial Sequence: Synthetic oligonucleotide
agcgcccugugcuguggag

SEQ ID NO: 1998883 - RNA, 19 nt, Artificial Sequence
  Description of Artificial Sequence: Synthetic oligonucleotide
cucagcagggcugggaaaa

SEQ ID NO: 1998884 - RNA, 19 nt, Artificial Sequence
  Description of Artificial Sequence: Synthetic oligonucleotide
acacgcaccuggggugccc

SEQ ID NO: 1998885 - RNA, 19 nt, Artificial Sequence
  Description of Artificial Sequence: Synthetic oligonucleotide
cagcggaaguugguuuucc

SEQ ID NO: 1998886 - RNA, 19 nt, Artificial Sequence
  Description of Artificial Sequence: Synthetic oligonucleotide
ggugcuagacaggcacagg

SEQ ID NO: 1998887 - RNA, 19 nt, Artificial Sequence
  Description of Artificial Sequence: Synthetic oligonucleotide
accucccaguacaccuugc

SEQ ID NO: 1998888 - RNA, 19 nt, Artificial Sequence
  Description of Artificial Sequence: Synthetic oligonucleotide
guuauccaggaggcuguac

SEQ ID NO: 1998889 - RNA, 19 nt, Artificial Sequence
  Description of Artificial Sequence: Synthetic oligonucleotide
caguugcgcuccaagagcu

SEQ ID NO: 1998890 - RNA, 19 nt, Artificial Sequence
  Description of Artificial Sequence: Synthetic oligonucleotide
caggccgagacugcugcug

SEQ ID NO: 1998891 - RNA, 19 nt, Artificial Sequence
  Description of Artificial Sequence: Synthetic oligonucleotide
cagaagcauguuccugcuc

SEQ ID NO: 1998892 - RNA, 19 nt, Artificial Sequence
  Description of Artificial Sequence: Synthetic oligonucleotide
ugcccaccucccaguacac

SEQ ID NO: 1998893 - RNA, 19 nt, Artificial Sequence
  Description of Artificial Sequence: Synthetic oligonucleotide
aagcuccggguuaagucua

SEQ ID NO: 1998894 - RNA, 19 nt, Artificial Sequence
  Description of Artificial Sequence: Synthetic oligonucleotide
ugagcucauggggcuguac

SEQ ID NO: 1998895 - RNA, 19 nt, Artificial Sequence
  Description of Artificial Sequence: Synthetic oligonucleotide
ucgcuuagagcuggguguu

SEQ ID NO: 1998896 - RNA, 19 nt, Artificial Sequence
  Description of Artificial Sequence: Synthetic oligonucleotide
caggguccccugaauuguc

SEQ ID NO: 1998897 - RNA, 19 nt, Artificial Sequence
  Description of Artificial Sequence: Synthetic oligonucleotide
guuuggagcccagcauuuc

SEQ ID NO: 1998898 - RNA, 19 nt, Artificial Sequence
  Description of Artificial Sequence: Synthetic oligonucleotide
cuugucgccuccgggccug

SEQ ID NO: 1998899 - RNA, 19 nt, Artificial Sequence
  Description of Artificial Sequence: Synthetic oligonucleotide
cucugagguucuuaucgcu

SEQ ID NO: 1998900 - RNA, 19 nt, Artificial Sequence
  Description of Artificial Sequence: Synthetic oligonucleotide
gggucaacaggguccccug

SEQ ID NO: 1998901 - RNA, 19 nt, Artificial Sequence
  Description of Artificial Sequence: Synthetic oligonucleotide
ugucgucguagagacuguu

SEQ ID NO: 1998902 - RNA, 19 nt, Artificial Sequence
  Description of Artificial Sequence: Synthetic oligonucleotide
caccauugccuguagcacu

SEQ ID NO: 1998903 - RNA, 19 nt, Artificial Sequence
  Description of Artificial Sequence: Synthetic oligonucleotide
agugcucaaugucgucgua

SEQ ID NO: 1998904 - RNA, 19 nt, Artificial Sequence
  Description of Artificial Sequence: Synthetic oligonucleotide
gugcggcccuuguacauga

SEQ ID NO: 1998905 - RNA, 19 nt, Artificial Sequence
  Description of Artificial Sequence: Synthetic oligonucleotide
cuguagcacugugcggccc

SEQ ID NO: 1998906 - RNA, 19 nt, Artificial Sequence
  Description of Artificial Sequence: Synthetic oligonucleotide
cauagccauggcuccaacu

SEQ ID NO: 1998907 - RNA, 19 nt, Artificial Sequence
  Description of Artificial Sequence: Synthetic oligonucleotide
cuugcccaaaacccaggua

SEQ ID NO: 1998908 - RNA, 19 nt, Artificial Sequence
  Description of Artificial Sequence: Synthetic oligonucleotide
acaggccgagacugcugcu

SEQ ID NO: 1998909 - RNA, 19 nt, Artificial Sequence
  Description of Artificial Sequence: Synthetic oligonucleotide
gguaugcuuugcauagcca

SEQ ID NO: 1998910 - RNA, 19 nt, Artificial Sequence
  Description of Artificial Sequence: Synthetic oligonucleotide
cccaaggacacacccugug

SEQ ID NO: 1998911 - RNA, 19 nt, Artificial Sequence
  Description of Artificial Sequence: Synthetic oligonucleotide
cacacccucacgcugcacu

SEQ ID NO: 1998912 - RNA, 19 nt, Artificial Sequence
  Description of Artificial Sequence: Synthetic oligonucleotide
acaugcuguagaaguguuu

SEQ ID NO: 1998913 - RNA, 19 nt, Artificial Sequence
  Description of Artificial Sequence: Synthetic oligonucleotide
ccuguagcacugugcggcc

SEQ ID NO: 1998914 - RNA, 19 nt, Artificial Sequence
  Description of Artificial Sequence: Synthetic oligonucleotide
gagucagaucccaguaggu

SEQ ID NO: 1998915 - RNA, 19 nt, Artificial Sequence
  Description of Artificial Sequence: Synthetic oligonucleotide
guagagacuguuggugcua

SEQ ID NO: 1998916 - RNA, 19 nt, Artificial Sequence
  Description of Artificial Sequence: Synthetic oligonucleotide
aguugcgcuccaagagcug

SEQ ID NO: 1998917 - RNA, 19 nt, Artificial Sequence
  Description of Artificial Sequence: Synthetic oligonucleotide
cgcuccaagagcugggcug

SEQ ID NO: 1998918 - RNA, 19 nt, Artificial Sequence
  Description of Artificial Sequence: Synthetic oligonucleotide
gcugacaagucuugcccaa

SEQ ID NO: 1998919 - RNA, 19 nt, Artificial Sequence
  Description of Artificial Sequence: Synthetic oligonucleotide
acccucacgcugcacucuu

SEQ ID NO: 1998920 - RNA, 19 nt, Artificial Sequence
  Description of Artificial Sequence: Synthetic oligonucleotide
gggcaguugcgcuccaaga

SEQ ID NO: 1998921 - RNA, 19 nt, Artificial Sequence
  Description of Artificial Sequence: Synthetic oligonucleotide
cuugggccucccugcugac

SEQ ID NO: 1998922 - RNA, 19 nt, Artificial Sequence
  Description of Artificial Sequence: Synthetic oligonucleotide
ccaccauugccuguagcac

SEQ ID NO: 1998923 - RNA, 19 nt, Artificial Sequence
  Description of Artificial Sequence: Synthetic oligonucleotide
ggaggcuguacugcagaac

SEQ ID NO: 1998924 - RNA, 19 nt, Artificial Sequence
  Description of Artificial Sequence: Synthetic oligonucleotide
ccccagcaucaccagaaag

SEQ ID NO: 1998925 - RNA, 19 nt, Artificial Sequence
  Description of Artificial Sequence: Synthetic oligonucleotide
gccgagacugcugcugucc

SEQ ID NO: 1998926 - RNA, 19 nt, Artificial Sequence
  Description of Artificial Sequence: Synthetic oligonucleotide
gcuuagagcuggguguuga

SEQ ID NO: 1998927 - RNA, 19 nt, Artificial Sequence
  Description of Artificial Sequence: Synthetic oligonucleotide
agaucccaguaggugguua

SEQ ID NO: 1998928 - RNA, 19 nt, Artificial Sequence
  Description of Artificial Sequence: Synthetic oligonucleotide
ccuagauugcgcucgcuua

SEQ ID NO: 1998929 - RNA, 19 nt, Artificial Sequence
  Description of Artificial Sequence: Synthetic oligonucleotide
cugcacucuuuccagguau

SEQ ID NO: 1998930 - RNA, 19 nt, Artificial Sequence
  Description of Artificial Sequence: Synthetic oligonucleotide
cauccaagcuccggguuaa

SEQ ID NO: 1998931 - RNA, 19 nt, Artificial Sequence
  Description of Artificial Sequence: Synthetic oligonucleotide
gagcccagcauuuccucuu

SEQ ID NO: 1998932 - RNA, 19 nt, Artificial Sequence
  Description of Artificial Sequence: Synthetic oligonucleotide
ggguagggcaguugcgcuc

SEQ ID NO: 1998933 - RNA, 19 nt, Artificial Sequence
  Description of Artificial Sequence: Synthetic oligonucleotide
cauccagguacccuagauu

SEQ ID NO: 1998934 - RNA, 19 nt, Artificial Sequence
  Description of Artificial Sequence: Synthetic oligonucleotide
guugguuuuccagccugcu

SEQ ID NO: 1998935 - RNA, 19 nt, Artificial Sequence
  Description of Artificial Sequence: Synthetic oligonucleotide
ggacugagucagaucccag

SEQ ID NO: 1998936 - RNA, 19 nt, Artificial Sequence
  Description of Artificial Sequence: Synthetic oligonucleotide
ggggugccccaccauugcc

SEQ ID NO: 1998937 - RNA, 19 nt, Artificial Sequence
  Description of Artificial Sequence: Synthetic oligonucleotide
caaaacccagguagauggu

SEQ ID NO: 1998938 - RNA, 19 nt, Artificial Sequence
  Description of Artificial Sequence: Synthetic oligonucleotide
uggggcucugagguucuua

SEQ ID NO: 1998939 - RNA, 19 nt, Artificial Sequence
  Description of Artificial Sequence: Synthetic oligonucleotide
cacgcaccuggggugcccc

SEQ ID NO: 1998940 - RNA, 19 nt, Artificial Sequence
  Description of Artificial Sequence: Synthetic oligonucleotide
gcccuuguacaugaugguc

SEQ ID NO: 1998941 - RNA, 19 nt, Artificial Sequence
  Description of Artificial Sequence: Synthetic oligonucleotide
ccucagaagcauguuccug

SEQ ID NO: 1998942 - RNA, 19 nt, Artificial Sequence
  Description of Artificial Sequence: Synthetic oligonucleotide
agagggcuugggguuugga

SEQ ID NO: 1998943 - RNA, 19 nt, Artificial Sequence
  Description of Artificial Sequence: Synthetic oligonucleotide
ccucacgcugcacucuuuc

SEQ ID NO: 1998944 - RNA, 19 nt, Artificial Sequence
  Description of Artificial Sequence: Synthetic oligonucleotide
gcauccaagcuccggguua

SEQ ID NO: 1998945 - RNA, 19 nt, Artificial Sequence
  Description of Artificial Sequence: Synthetic oligonucleotide
ucacuggcuggggcucuga

SEQ ID NO: 1998946 - RNA, 19 nt, Artificial Sequence
  Description of Artificial Sequence: Synthetic oligonucleotide
agcagagggcuugggguuu

SEQ ID NO: 1998947 - RNA, 19 nt, Artificial Sequence
  Description of Artificial Sequence: Synthetic oligonucleotide
ggucucuucuucccuauuu

SEQ ID NO: 1998948 - RNA, 19 nt, Artificial Sequence
  Description of Artificial Sequence: Synthetic oligonucleotide
uuuccauggcggggccuuc

SEQ ID NO: 1998949 - RNA, 19 nt, Artificial Sequence
  Description of Artificial Sequence: Synthetic oligonucleotide
ccaacuugaccaggaucag

SEQ ID NO: 1998950 - RNA, 19 nt, Artificial Sequence
  Description of Artificial Sequence: Synthetic oligonucleotide
caccuugcacuugcccaug

SEQ ID NO: 1998951 - RNA, 19 nt, Artificial Sequence
  Description of Artificial Sequence: Synthetic oligonucleotide
cacagcggaaguugguuuu

SEQ ID NO: 1998952 - RNA, 19 nt, Artificial Sequence
  Description of Artificial Sequence: Synthetic oligonucleotide
cccaguaggugguuaucca

SEQ ID NO: 1998953 - RNA, 19 nt, Artificial Sequence
  Description of Artificial Sequence: Synthetic oligonucleotide
caacaggguccccugaauu

SEQ ID NO: 1998954 - RNA, 19 nt, Artificial Sequence
  Description of Artificial Sequence: Synthetic oligonucleotide
ccaugcgcagggcccacag

SEQ ID NO: 1998955 - RNA, 19 nt, Artificial Sequence
  Description of Artificial Sequence: Synthetic oligonucleotide
cccuguguagguaaggcau

SEQ ID NO: 1998956 - RNA, 19 nt, Artificial Sequence
  Description of Artificial Sequence: Synthetic oligonucleotide
cacaugcuguagaaguguu

SEQ ID NO: 1998957 - RNA, 19 nt, Artificial Sequence
  Description of Artificial Sequence: Synthetic oligonucleotide
ggacacacccuguguaggu

SEQ ID NO: 1998958 - RNA, 19 nt, Artificial Sequence
  Description of Artificial Sequence: Synthetic oligonucleotide
cugaagcaagaggucccca

SEQ ID NO: 1998959 - RNA, 19 nt, Artificial Sequence
  Description of Artificial Sequence: Synthetic oligonucleotide
agauugggguagggcaguu

SEQ ID NO: 1998960 - RNA, 19 nt, Artificial Sequence
  Description of Artificial Sequence: Synthetic oligonucleotide
gcgcagggcccacagugac

SEQ ID NO: 1998961 - RNA, 19 nt, Artificial Sequence
  Description of Artificial Sequence: Synthetic oligonucleotide
ugcggcccuuguacaugau

SEQ ID NO: 1998962 - RNA, 19 nt, Artificial Sequence
  Description of Artificial Sequence: Synthetic oligonucleotide
gguguaguguggugauccu

SEQ ID NO: 1998963 - RNA, 19 nt, Artificial Sequence
  Description of Artificial Sequence: Synthetic oligonucleotide
gggcucugagguucuuauc

SEQ ID NO: 1998964 - RNA, 19 nt, Artificial Sequence
  Description of Artificial Sequence: Synthetic oligonucleotide
gcugcccaccucccaguac

SEQ ID NO: 1998965 - RNA, 19 nt, Artificial Sequence
  Description of Artificial Sequence: Synthetic oligonucleotide
ccucccaguacaccuugca

SEQ ID NO: 1998966 - RNA, 19 nt, Artificial Sequence
  Description of Artificial Sequence: Synthetic oligonucleotide
acccuagauugcgcucgcu

SEQ ID NO: 1998967 - RNA, 19 nt, Artificial Sequence
  Description of Artificial Sequence: Synthetic oligonucleotide
gguuaagucuauacaccuu

SEQ ID NO: 1998968 - RNA, 19 nt, Artificial Sequence
  Description of Artificial Sequence: Synthetic oligonucleotide
acgcaccuggggugcccca

SEQ ID NO: 1998969 - RNA, 19 nt, Artificial Sequence
  Description of Artificial Sequence: Synthetic oligonucleotide
cccugcugacaagucuugc

SEQ ID NO: 1998970 - RNA, 19 nt, Artificial Sequence
  Description of Artificial Sequence: Synthetic oligonucleotide
gggguuuggagcccagcau

SEQ ID NO: 1998971 - RNA, 19 nt, Artificial Sequence
  Description of Artificial Sequence: Synthetic oligonucleotide
gggguagggcaguugcgcu

SEQ ID NO: 1998972 - RNA, 19 nt, Artificial Sequence
  Description of Artificial Sequence: Synthetic oligonucleotide
cauguugcaugaggauccu

SEQ ID NO: 1998973 - RNA, 19 nt, Artificial Sequence
  Description of Artificial Sequence: Synthetic oligonucleotide
gaccaggaucaggcucuuc

SEQ ID NO: 1998974 - RNA, 19 nt, Artificial Sequence
  Description of Artificial Sequence: Synthetic oligonucleotide
gugaugggacugagucaga

SEQ ID NO: 1998975 - RNA, 19 nt, Artificial Sequence
  Description of Artificial Sequence: Synthetic oligonucleotide
caaugucgucguagagacu

SEQ ID NO: 1998976 - RNA, 19 nt, Artificial Sequence
  Description of Artificial Sequence: Synthetic oligonucleotide
ggcuggggacagcuuccac

SEQ ID NO: 1998977 - RNA, 19 nt, Artificial Sequence
  Description of Artificial Sequence: Synthetic oligonucleotide
cugggcuggaguggaggaa

SEQ ID NO: 1998978 - RNA, 19 nt, Artificial Sequence
  Description of Artificial Sequence: Synthetic oligonucleotide
agcuccggguuaagucuau

SEQ ID NO: 1998979 - RNA, 19 nt, Artificial Sequence
  Description of Artificial Sequence: Synthetic oligonucleotide
cugugcggcccuuguacau

SEQ ID NO: 1998980 - RNA, 19 nt, Artificial Sequence
  Description of Artificial Sequence: Synthetic oligonucleotide
agcuuccaccugccauguu

SEQ ID NO: 1998981 - RNA, 19 nt, Artificial Sequence
  Description of Artificial Sequence: Synthetic oligonucleotide
ccccaccauugccuguagc

SEQ ID NO: 1998982 - RNA, 19 nt, Artificial Sequence
  Description of Artificial Sequence: Synthetic oligonucleotide
guguaguguggugauccuu

SEQ ID NO: 1998983 - RNA, 19 nt, Artificial Sequence
  Description of Artificial Sequence: Synthetic oligonucleotide
ccaagagcugggcuggagu

SEQ ID NO: 1998984 - RNA, 19 nt, Artificial Sequence
  Description of Artificial Sequence: Synthetic oligonucleotide
gcucagcagggcugggaaa

SEQ ID NO: 1998985 - RNA, 19 nt, Artificial Sequence
  Description of Artificial Sequence: Synthetic oligonucleotide
ggggucaacaggguccccu

SEQ ID NO: 1998986 - RNA, 19 nt, Artificial Sequence
  Description of Artificial Sequence: Synthetic oligonucleotide
cccaguacaccuugcacuu

SEQ ID NO: 1998987 - RNA, 19 nt, Artificial Sequence
  Description of Artificial Sequence: Synthetic oligonucleotide
ccaguacaccuugcacuug

SEQ ID NO: 1998988 - RNA, 19 nt, Artificial Sequence
  Description of Artificial Sequence: Synthetic oligonucleotide
gcacagcggaaguugguuu

SEQ ID NO: 1998989 - RNA, 19 nt, Artificial Sequence
  Description of Artificial Sequence: Synthetic oligonucleotide
ggccgagacugcugcuguc

SEQ ID NO: 1998990 - RNA, 19 nt, Artificial Sequence
  Description of Artificial Sequence: Synthetic oligonucleotide
cguagagacuguuggugcu

SEQ ID NO: 1998991 - RNA, 19 nt, Artificial Sequence
  Description of Artificial Sequence: Synthetic oligonucleotide
gugcacagcggaaguuggu

SEQ ID NO: 1998992 - RNA, 19 nt, Artificial Sequence
  Description of Artificial Sequence: Synthetic oligonucleotide
ccgagacugcugcugucca

SEQ ID NO: 1998993 - RNA, 19 nt, Artificial Sequence
  Description of Artificial Sequence: Synthetic oligonucleotide
uugucgccuccgggccuga

SEQ ID NO: 1998994 - RNA, 19 nt, Artificial Sequence
  Description of Artificial Sequence: Synthetic oligonucleotide
cuccuugggccucccugcu

SEQ ID NO: 1998995 - RNA, 19 nt, Artificial Sequence
  Description of Artificial Sequence: Synthetic oligonucleotide
ugucgccuccgggccugaa

SEQ ID NO: 1998996 - RNA, 19 nt, Artificial Sequence
  Description of Artificial Sequence: Synthetic oligonucleotide
gguuauccaggaggcugua

SEQ ID NO: 1998997 - RNA, 19 nt, Artificial Sequence
  Description of Artificial Sequence: Synthetic oligonucleotide
gcucacugacccagcucca

SEQ ID NO: 1998998 - RNA, 19 nt, Artificial Sequence
  Description of Artificial Sequence: Synthetic oligonucleotide
cggggccuucagugcaucc

SEQ ID NO: 1998999 - RNA, 19 nt, Artificial Sequence
  Description of Artificial Sequence: Synthetic oligonucleotide
gcacugugcggcccuugua

SEQ ID NO: 1999000 - RNA, 19 nt, Artificial Sequence
  Description of Artificial Sequence: Synthetic oligonucleotide
gcccugugcuguggagugc

SEQ ID NO: 1999001 - RNA, 19 nt, Artificial Sequence
  Description of Artificial Sequence: Synthetic oligonucleotide
ccccugcaccuccagcuga

SEQ ID NO: 1999002 - RNA, 19 nt, Artificial Sequence
  Description of Artificial Sequence: Synthetic oligonucleotide
gccucccugcugacaaguc

SEQ ID NO: 1999003 - RNA, 19 nt, Artificial Sequence
  Description of Artificial Sequence: Synthetic oligonucleotide
ggagugcacagcggaaguu

SEQ ID NO: 1999004 - RNA, 19 nt, Artificial Sequence
  Description of Artificial Sequence: Synthetic oligonucleotide
cccugcaccuccagcugaa

SEQ ID NO: 1999005 - RNA, 19 nt, Artificial Sequence
  Description of Artificial Sequence: Synthetic oligonucleotide
cccuagauugcgcucgcuu

SEQ ID NO: 1999006 - RNA, 19 nt, Artificial Sequence
  Description of Artificial Sequence: Synthetic oligonucleotide
gcgcucgcuuagagcuggg

SEQ ID NO: 1999007 - RNA, 19 nt, Artificial Sequence
  Description of Artificial Sequence: Synthetic oligonucleotide
gcgcuccaagagcugggcu

SEQ ID NO: 1999008 - RNA, 19 nt, Artificial Sequence
  Description of Artificial Sequence: Synthetic oligonucleotide
gcuguccagggaggacaca

SEQ ID NO: 1999009 - RNA, 19 nt, Artificial Sequence
  Description of Artificial Sequence: Synthetic oligonucleotide
gcgcccugugcuguggagu

SEQ ID NO: 1999010 - RNA, 19 nt, Artificial Sequence
  Description of Artificial Sequence: Synthetic oligonucleotide
ccuggggugccccaccauu

SEQ ID NO: 1999011 - RNA, 19 nt, Artificial Sequence
  Description of Artificial Sequence: Synthetic oligonucleotide
ccgggagcucagcagggcu

SEQ ID NO: 1999012 - RNA, 19 nt, Artificial Sequence
  Description of Artificial Sequence: Synthetic oligonucleotide
guagcacugugcggcccuu

SEQ ID NO: 1999013 - RNA, 19 nt, Artificial Sequence
  Description of Artificial Sequence: Synthetic oligonucleotide
gcauugcugagggucucuu

SEQ ID NO: 1999014 - RNA, 19 nt, Artificial Sequence
  Description of Artificial Sequence: Synthetic oligonucleotide
gcuccggguuaagucuaua

SEQ ID NO: 1999015 - RNA, 19 nt, Artificial Sequence
  Description of Artificial Sequence: Synthetic oligonucleotide
gcggggccuucagugcauc

SEQ ID NO: 1999016 - RNA, 19 nt, Artificial Sequence
  Description of Artificial Sequence: Synthetic oligonucleotide
cagaucccaguaggugguu

SEQ ID NO: 1999017 - RNA, 19 nt, Artificial Sequence
  Description of Artificial Sequence: Synthetic oligonucleotide
ccuugucgccuccgggccu

SEQ ID NO: 1999018 - RNA, 19 nt, Artificial Sequence
  Description of Artificial Sequence: Synthetic oligonucleotide
cccauggggcugcccaccu

SEQ ID NO: 1999019 - RNA, 19 nt, Artificial Sequence
  Description of Artificial Sequence: Synthetic oligonucleotide
ggcggggccuucagugcau

SEQ ID NO: 1999020 - RNA, 19 nt, Artificial Sequence
  Description of Artificial Sequence: Synthetic oligonucleotide
cccaugcgcagggcccaca

SEQ ID NO: 1999021 - RNA, 19 nt, Artificial Sequence
  Description of Artificial Sequence: Synthetic oligonucleotide
cccucacgcugcacucuuu

SEQ ID NO: 1999022 - RNA, 19 nt, Artificial Sequence
  Description of Artificial Sequence: Synthetic oligonucleotide
cgcucgcuuagagcugggu

SEQ ID NO: 1999023 - RNA, 19 nt, Artificial Sequence
  Description of Artificial Sequence: Synthetic oligonucleotide
agaaauggaagucagcucc

SEQ ID NO: 1999024 - RNA, 19 nt, Artificial Sequence
  Description of Artificial Sequence: Synthetic oligonucleotide
uugaagauaccacugaggg

SEQ ID NO: 1999025 - RNA, 19 nt, Artificial Sequence
  Description of Artificial Sequence: Synthetic oligonucleotide
ugaagaaagggucagacgc

SEQ ID NO: 1999026 - RNA, 19 nt, Artificial Sequence
  Description of Artificial Sequence: Synthetic oligonucleotide
uaauaguccagguuaaagg

SEQ ID NO: 1999027 - RNA, 19 nt, Artificial Sequence
  Description of Artificial Sequence: Synthetic oligonucleotide
aauaagguccaucuuggag

SEQ ID NO: 1999028 - RNA, 19 nt, Artificial Sequence
  Description of Artificial Sequence: Synthetic oligonucleotide
gaagauaccacugagggug

SEQ ID NO: 1999029 - RNA, 19 nt, Artificial Sequence
  Description of Artificial Sequence: Synthetic oligonucleotide
acugagaugaacuuggcug

SEQ ID NO: 1999030 - RNA, 19 nt, Artificial Sequence
  Description of Artificial Sequence: Synthetic oligonucleotide
aaucccaaaacaguagccg

SEQ ID NO: 1999031 - RNA, 19 nt, Artificial Sequence
  Description of Artificial Sequence: Synthetic oligonucleotide
uguucagagggauaaaaga

SEQ ID NO: 1999032 - RNA, 19 nt, Artificial Sequence
  Description of Artificial Sequence: Synthetic oligonucleotide
uggaagucagcucccaucg

SEQ ID NO: 1999033 - RNA, 19 nt, Artificial Sequence
  Description of Artificial Sequence: Synthetic oligonucleotide
auaagguccaucuuggaga

SEQ ID NO: 1999034 - RNA, 19 nt, Artificial Sequence
  Description of Artificial Sequence: Synthetic oligonucleotide
agcuguuacaguugcaugg

SEQ ID NO: 1999035 - RNA, 19 nt, Artificial Sequence
  Description of Artificial Sequence: Synthetic oligonucleotide
uccaaaaguccucaucggg

SEQ ID NO: 1999036 - RNA, 19 nt, Artificial Sequence
  Description of Artificial Sequence: Synthetic oligonucleotide
ugaaucccaaaacaguagc

SEQ ID NO: 1999037 - RNA, 19 nt, Artificial Sequence
  Description of Artificial Sequence: Synthetic oligonucleotide
accacugagggugauaugc

SEQ ID NO: 1999038 - RNA, 19 nt, Artificial Sequence
  Description of Artificial Sequence: Synthetic oligonucleotide
ugcuaaguacuucucuugg

SEQ ID NO: 1999039 - RNA, 19 nt, Artificial Sequence
  Description of Artificial Sequence: Synthetic oligonucleotide
uuguacuaguuucucauug

SEQ ID NO: 1999040 - RNA, 19 nt, Artificial Sequence
  Description of Artificial Sequence: Synthetic oligonucleotide
ucuugaaucccaaaacagu

SEQ ID NO: 1999041 - RNA, 19 nt, Artificial Sequence
  Description of Artificial Sequence: Synthetic oligonucleotide
aaaacaguagccguuggcu

SEQ ID NO: 1999042 - RNA, 19 nt, Artificial Sequence
  Description of Artificial Sequence: Synthetic oligonucleotide
ucagagggauaaaagagac

SEQ ID NO: 1999043 - RNA, 19 nt, Artificial Sequence
  Description of Artificial Sequence: Synthetic oligonucleotide
guugacauggggcaguucc

SEQ ID NO: 1999044 - RNA, 19 nt, Artificial Sequence
  Description of Artificial Sequence: Synthetic oligonucleotide
agaacugagaugaacuugg

SEQ ID NO: 1999045 - RNA, 19 nt, Artificial Sequence
  Description of Artificial Sequence: Synthetic oligonucleotide
aacucgcucaugcccaggc

SEQ ID NO: 1999046 - RNA, 19 nt, Artificial Sequence
  Description of Artificial Sequence: Synthetic oligonucleotide
aagagacuaggcuguaguc

SEQ ID NO: 1999047 - RNA, 19 nt, Artificial Sequence
  Description of Artificial Sequence: Synthetic oligonucleotide
uugaaucccaaaacaguag

SEQ ID NO: 1999048 - RNA, 19 nt, Artificial Sequence
  Description of Artificial Sequence: Synthetic oligonucleotide
uuauccacagccuguagga

SEQ ID NO: 1999049 - RNA, 19 nt, Artificial Sequence
  Description of Artificial Sequence: Synthetic oligonucleotide
agugacugaagaaaggguc

SEQ ID NO: 1999050 - RNA, 19 nt, Artificial Sequence
  Description of Artificial Sequence: Synthetic oligonucleotide
cugagaugaacuuggcugg

SEQ ID NO: 1999051 - RNA, 19 nt, Artificial Sequence
  Description of Artificial Sequence: Synthetic oligonucleotide
ucuuggaugcccagagugg

SEQ ID NO: 1999052 - RNA, 19 nt, Artificial Sequence
  Description of Artificial Sequence: Synthetic oligonucleotide
ugcucaagcagguaggaga

SEQ ID NO: 1999053 - RNA, 19 nt, Artificial Sequence
  Description of Artificial Sequence: Synthetic oligonucleotide
guagccguuggcuuuaucc

SEQ ID NO: 1999054 - RNA, 19 nt, Artificial Sequence
  Description of Artificial Sequence: Synthetic oligonucleotide
guagugacugaagaaaggg

SEQ ID NO: 1999055 - RNA, 19 nt, Artificial Sequence
  Description of Artificial Sequence: Synthetic oligonucleotide
ucugaguuugaagauacca

SEQ ID NO: 1999056 - RNA, 19 nt, Artificial Sequence
  Description of Artificial Sequence: Synthetic oligonucleotide
aggggcucgagcuuggcgc

SEQ ID NO: 1999057 - RNA, 19 nt, Artificial Sequence
  Description of Artificial Sequence: Synthetic oligonucleotide
gaagaugcugcggagggcg

SEQ ID NO: 1999058 - RNA, 19 nt, Artificial Sequence
  Description of Artificial Sequence: Synthetic oligonucleotide
ucuucgaugaguuguacua

SEQ ID NO: 1999059 - RNA, 19 nt, Artificial Sequence
  Description of Artificial Sequence: Synthetic oligonucleotide
caugcaguacagcaggccg

SEQ ID NO: 1999060 - RNA, 19 nt, Artificial Sequence
  Description of Artificial Sequence: Synthetic oligonucleotide
uaggcuguagucuucgaug

SEQ ID NO: 1999061 - RNA, 19 nt, Artificial Sequence
  Description of Artificial Sequence: Synthetic oligonucleotide
guuugaagauaccacugag

SEQ ID NO: 1999062 - RNA, 19 nt, Artificial Sequence
  Description of Artificial Sequence: Synthetic oligonucleotide
gugagaguccacaaggugg

SEQ ID NO: 1999063 - RNA, 19 nt, Artificial Sequence
  Description of Artificial Sequence: Synthetic oligonucleotide
uacuaguuucucauugagc

SEQ ID NO: 1999064 - RNA, 19 nt, Artificial Sequence
  Description of Artificial Sequence: Synthetic oligonucleotide
ugcucuugaaucccaaaac

SEQ ID NO: 1999065 - RNA, 19 nt, Artificial Sequence
  Description of Artificial Sequence: Synthetic oligonucleotide
cugaguuugaagauaccac

SEQ ID NO: 1999066 - RNA, 19 nt, Artificial Sequence
  Description of Artificial Sequence: Synthetic oligonucleotide
ugagaguccacaaggugga

SEQ ID NO: 1999067 - RNA, 19 nt, Artificial Sequence
  Description of Artificial Sequence: Synthetic oligonucleotide
uuaaaggccagcuucccau

SEQ ID NO: 1999068 - RNA, 19 nt, Artificial Sequence
  Description of Artificial Sequence: Synthetic oligonucleotide
uuauccaaaaguccucauc

SEQ ID NO: 1999069 - RNA, 19 nt, Artificial Sequence
  Description of Artificial Sequence: Synthetic oligonucleotide
guccuggauguucagaggg

SEQ ID NO: 1999070 - RNA, 19 nt, Artificial Sequence
  Description of Artificial Sequence: Synthetic oligonucleotide
ugugccaucugggagaaga

SEQ ID NO: 1999071 - RNA, 19 nt, Artificial Sequence
  Description of Artificial Sequence: Synthetic oligonucleotide
gaugcuuccucccagccuc

SEQ ID NO: 1999072 - RNA, 19 nt, Artificial Sequence
  Description of Artificial Sequence: Synthetic oligonucleotide
uguaggacucgcuggauac

SEQ ID NO: 1999073 - RNA, 19 nt, Artificial Sequence
  Description of Artificial Sequence: Synthetic oligonucleotide
uccaucacgucgcccagcg

SEQ ID NO: 1999074 - RNA, 19 nt, Artificial Sequence
  Description of Artificial Sequence: Synthetic oligonucleotide
aucgcagcagacaucaugg

SEQ ID NO: 1999075 - RNA, 19 nt, Artificial Sequence
  Description of Artificial Sequence: Synthetic oligonucleotide
guaauaguccagguuaaag

SEQ ID NO: 1999076 - RNA, 19 nt, Artificial Sequence
  Description of Artificial Sequence: Synthetic oligonucleotide
caucacgucgcccagcgcc

SEQ ID NO: 1999077 - RNA, 19 nt, Artificial Sequence
  Description of Artificial Sequence: Synthetic oligonucleotide
ucuggauccguacccagcu

SEQ ID NO: 1999078 - RNA, 19 nt, Artificial Sequence
  Description of Artificial Sequence: Synthetic oligonucleotide
cagguuaaaggccagcuuc

SEQ ID NO: 1999079 - RNA, 19 nt, Artificial Sequence
  Description of Artificial Sequence: Synthetic oligonucleotide
agguucaccaccgccacgc

SEQ ID NO: 1999080 - RNA, 19 nt, Artificial Sequence
  Description of Artificial Sequence: Synthetic oligonucleotide
ugacgguagugacugaaga

SEQ ID NO: 1999081 - RNA, 19 nt, Artificial Sequence
  Description of Artificial Sequence: Synthetic oligonucleotide
guacuaguuucucauugag

SEQ ID NO: 1999082 - RNA, 19 nt, Artificial Sequence
  Description of Artificial Sequence: Synthetic oligonucleotide
cugaagaaagggucagacg

SEQ ID NO: 1999083 - RNA, 19 nt, Artificial Sequence
  Description of Artificial Sequence: Synthetic oligonucleotide
uccgaggaugcuaaguacu

SEQ ID NO: 1999084 - RNA, 19 nt, Artificial Sequence
  Description of Artificial Sequence: Synthetic oligonucleotide
cagaguggaggagaaaugg

SEQ ID NO: 1999085 - RNA, 19 nt, Artificial Sequence
  Description of Artificial Sequence: Synthetic oligonucleotide
agugagaguccacaaggug

SEQ ID NO: 1999086 - RNA, 19 nt, Artificial Sequence
  Description of Artificial Sequence: Synthetic oligonucleotide
cauagugcucaauaagguc

SEQ ID NO: 1999087 - RNA, 19 nt, Artificial Sequence
  Description of Artificial Sequence: Synthetic oligonucleotide
uggauccguacccagcugc

SEQ ID NO: 1999088 - RNA, 19 nt, Artificial Sequence
  Description of Artificial Sequence: Synthetic oligonucleotide
auccaaaaguccucaucgg

SEQ ID NO: 1999089 - RNA, 19 nt, Artificial Sequence
  Description of Artificial Sequence: Synthetic oligonucleotide
agguacuccaugcaguaca

SEQ ID NO: 1999090 - RNA, 19 nt, Artificial Sequence
  Description of Artificial Sequence: Synthetic oligonucleotide
uccucaucggggauggaug

SEQ ID NO: 1999091 - RNA, 19 nt, Artificial Sequence
  Description of Artificial Sequence: Synthetic oligonucleotide
uagugacugaagaaagggu

SEQ ID NO: 1999092 - RNA, 19 nt, Artificial Sequence
  Description of Artificial Sequence: Synthetic oligonucleotide
uacggcagcccuucguugg

SEQ ID NO: 1999093 - RNA, 19 nt, Artificial Sequence
  Description of Artificial Sequence: Synthetic oligonucleotide
uucucauugagcugacggu

SEQ ID NO: 1999094 - RNA, 19 nt, Artificial Sequence
  Description of Artificial Sequence: Synthetic oligonucleotide
guuacaguugcauggcuuc

SEQ ID NO: 1999095 - RNA, 19 nt, Artificial Sequence
  Description of Artificial Sequence: Synthetic oligonucleotide
cuugaaucccaaaacagua

SEQ ID NO: 1999096 - RNA, 19 nt, Artificial Sequence
  Description of Artificial Sequence: Synthetic oligonucleotide
acguggucuuccccgagcc

SEQ ID NO: 1999097 - RNA, 19 nt, Artificial Sequence
  Description of Artificial Sequence: Synthetic oligonucleotide
caaaacaguagccguuggc

SEQ ID NO: 1999098 - RNA, 19 nt, Artificial Sequence
  Description of Artificial Sequence: Synthetic oligonucleotide
aguacuucucuuggaugcc

SEQ ID NO: 1999099 - RNA, 19 nt, Artificial Sequence
  Description of Artificial Sequence: Synthetic oligonucleotide
uggcuuuauccacagccug

SEQ ID NO: 1999100 - RNA, 19 nt, Artificial Sequence
  Description of Artificial Sequence: Synthetic oligonucleotide
uucgaugaguuguacuagu

SEQ ID NO: 1999101 - RNA, 19 nt, Artificial Sequence
  Description of Artificial Sequence: Synthetic oligonucleotide
gaugaaguaguggccgcgg

SEQ ID NO: 1999102 - RNA, 19 nt, Artificial Sequence
  Description of Artificial Sequence: Synthetic oligonucleotide
aguuccacaugcagcaugg

SEQ ID NO: 1999103 - RNA, 19 nt, Artificial Sequence
  Description of Artificial Sequence: Synthetic oligonucleotide
aacaguagccguuggcuuu

SEQ ID NO: 1999104 - RNA, 19 nt, Artificial Sequence
  Description of Artificial Sequence: Synthetic oligonucleotide
ugaagauaccacugagggu

SEQ ID NO: 1999105 - RNA, 19 nt, Artificial Sequence
  Description of Artificial Sequence: Synthetic oligonucleotide
aggacuucuguguaauagu

SEQ ID NO: 1999106 - RNA, 19 nt, Artificial Sequence
  Description of Artificial Sequence: Synthetic oligonucleotide
agcuccaccugcccggggc

SEQ ID NO: 1999107 - RNA, 19 nt, Artificial Sequence
  Description of Artificial Sequence: Synthetic oligonucleotide
ugagcugacgguagugacu

SEQ ID NO: 1999108 - RNA, 19 nt, Artificial Sequence
  Description of Artificial Sequence: Synthetic oligonucleotide
gaagaaagggucagacgcc

SEQ ID NO: 1999109 - RNA, 19 nt, Artificial Sequence
  Description of Artificial Sequence: Synthetic oligonucleotide
agccguuggcuuuauccac

SEQ ID NO: 1999110 - RNA, 19 nt, Artificial Sequence
  Description of Artificial Sequence: Synthetic oligonucleotide
cucauugagcugacgguag

SEQ ID NO: 1999111 - RNA, 19 nt, Artificial Sequence
  Description of Artificial Sequence: Synthetic oligonucleotide
cuucgcugcucuugaaucc

SEQ ID NO: 1999112 - RNA, 19 nt, Artificial Sequence
  Description of Artificial Sequence: Synthetic oligonucleotide
uagccguuggcuuuaucca

SEQ ID NO: 1999113 - RNA, 19 nt, Artificial Sequence
  Description of Artificial Sequence: Synthetic oligonucleotide
ucugguccgaggaugcuaa

SEQ ID NO: 1999114 - RNA, 19 nt, Artificial Sequence
  Description of Artificial Sequence: Synthetic oligonucleotide
aucccaaaacaguagccgu

SEQ ID NO: 1999115 - RNA, 19 nt, Artificial Sequence
  Description of Artificial Sequence: Synthetic oligonucleotide
ucccacugugccaucuggg

SEQ ID NO: 1999116 - RNA, 19 nt, Artificial Sequence
  Description of Artificial Sequence: Synthetic oligonucleotide
uacccagcugcccaucacc

SEQ ID NO: 1999117 - RNA, 19 nt, Artificial Sequence
  Description of Artificial Sequence: Synthetic oligonucleotide
agccuguaggacucgcugg

SEQ ID NO: 1999118 - RNA, 19 nt, Artificial Sequence
  Description of Artificial Sequence: Synthetic oligonucleotide
aucaccgccuggccgaagg

SEQ ID NO: 1999119 - RNA, 19 nt, Artificial Sequence
  Description of Artificial Sequence: Synthetic oligonucleotide
agagacuaggcuguagucu

SEQ ID NO: 1999120 - RNA, 19 nt, Artificial Sequence
  Description of Artificial Sequence: Synthetic oligonucleotide
agacgccaggugcucaagc

SEQ ID NO: 1999121 - RNA, 19 nt, Artificial Sequence
  Description of Artificial Sequence: Synthetic oligonucleotide
cugugcaguagugagaguc

SEQ ID NO: 1999122 - RNA, 19 nt, Artificial Sequence
  Description of Artificial Sequence: Synthetic oligonucleotide
aaagggucagacgccaggu

SEQ ID NO: 1999123 - RNA, 19 nt, Artificial Sequence
  Description of Artificial Sequence: Synthetic oligonucleotide
ucgagcuuggcgcgcagcc

SEQ ID NO: 1999124 - RNA, 19 nt, Artificial Sequence
  Description of Artificial Sequence: Synthetic oligonucleotide
gagcugacgguagugacug

SEQ ID NO: 1999125 - RNA, 19 nt, Artificial Sequence
  Description of Artificial Sequence: Synthetic oligonucleotide
uccacggcgcacucguacg

SEQ ID NO: 1999126 - RNA, 19 nt, Artificial Sequence
  Description of Artificial Sequence: Synthetic oligonucleotide
caucgcagcagacaucaug

SEQ ID NO: 1999127 - RNA, 19 nt, Artificial Sequence
  Description of Artificial Sequence: Synthetic oligonucleotide
auguucagagggauaaaag

SEQ ID NO: 1999128 - RNA, 19 nt, Artificial Sequence
  Description of Artificial Sequence: Synthetic oligonucleotide
ugagaugaacuuggcuggg

SEQ ID NO: 1999129 - RNA, 19 nt, Artificial Sequence
  Description of Artificial Sequence: Synthetic oligonucleotide
uguagucuucgaugaguug

SEQ ID NO: 1999130 - RNA, 19 nt, Artificial Sequence
  Description of Artificial Sequence: Synthetic oligonucleotide
agacaucauggccuccagg

SEQ ID NO: 1999131 - RNA, 19 nt, Artificial Sequence
  Description of Artificial Sequence: Synthetic oligonucleotide
gacuaggcuguagucuucg

SEQ ID NO: 1999132 - RNA, 19 nt, Artificial Sequence
  Description of Artificial Sequence: Synthetic oligonucleotide
uggccgaaggccguggccg

SEQ ID NO: 1999133 - RNA, 19 nt, Artificial Sequence
  Description of Artificial Sequence: Synthetic oligonucleotide
uugagcugacgguagugac

SEQ ID NO: 1999134 - RNA, 19 nt, Artificial Sequence
  Description of Artificial Sequence: Synthetic oligonucleotide
uucccauagugcucaauaa

SEQ ID NO: 1999135 - RNA, 19 nt, Artificial Sequence
  Description of Artificial Sequence: Synthetic oligonucleotide
aucggggauggaugcuucc

SEQ ID NO: 1999136 - RNA, 19 nt, Artificial Sequence
  Description of Artificial Sequence: Synthetic oligonucleotide
agcgcguccaucacgucgc

SEQ ID NO: 1999137 - RNA, 19 nt, Artificial Sequence
  Description of Artificial Sequence: Synthetic oligonucleotide
ggacacagcuucuggaucc

SEQ ID NO: 1999138 - RNA, 19 nt, Artificial Sequence
  Description of Artificial Sequence: Synthetic oligonucleotide
aggagaaauggaagucagc

SEQ ID NO: 1999139 - RNA, 19 nt, Artificial Sequence
  Description of Artificial Sequence: Synthetic oligonucleotide
gagcuuggcgcgcagccag

SEQ ID NO: 1999140 - RNA, 19 nt, Artificial Sequence
  Description of Artificial Sequence: Synthetic oligonucleotide
cagagcuccaccugcccgg

SEQ ID NO: 1999141 - RNA, 19 nt, Artificial Sequence
  Description of Artificial Sequence: Synthetic oligonucleotide
cucgcucaugcccaggcag

SEQ ID NO: 1999142 - RNA, 19 nt, Artificial Sequence
  Description of Artificial Sequence: Synthetic oligonucleotide
uacuucucuuggaugccca

SEQ ID NO: 1999143 - RNA, 19 nt, Artificial Sequence
  Description of Artificial Sequence: Synthetic oligonucleotide
uggaugcuuccucccagcc

SEQ ID NO: 1999144 - RNA, 19 nt, Artificial Sequence
  Description of Artificial Sequence: Synthetic oligonucleotide
gagggauaaaagagacuag

SEQ ID NO: 1999145 - RNA, 19 nt, Artificial Sequence
  Description of Artificial Sequence: Synthetic oligonucleotide
uuggaugcccagaguggag

SEQ ID NO: 1999146 - RNA, 19 nt, Artificial Sequence
  Description of Artificial Sequence: Synthetic oligonucleotide
agaagaugcugcggagggc

SEQ ID NO: 1999147 - RNA, 19 nt, Artificial Sequence
  Description of Artificial Sequence: Synthetic oligonucleotide
ucauugagcugacgguagu

SEQ ID NO: 1999148 - RNA, 19 nt, Artificial Sequence
  Description of Artificial Sequence: Synthetic oligonucleotide
gguagugacugaagaaagg

SEQ ID NO: 1999149 - RNA, 19 nt, Artificial Sequence
  Description of Artificial Sequence: Synthetic oligonucleotide
gaguuguacuaguuucuca

SEQ ID NO: 1999150 - RNA, 19 nt, Artificial Sequence
  Description of Artificial Sequence: Synthetic oligonucleotide
uggacacagcuucuggauc

SEQ ID NO: 1999151 - RNA, 19 nt, Artificial Sequence
  Description of Artificial Sequence: Synthetic oligonucleotide
uacguggucuuccccgagc

SEQ ID NO: 1999152 - RNA, 19 nt, Artificial Sequence
  Description of Artificial Sequence: Synthetic oligonucleotide
acgguagugacugaagaaa

SEQ ID NO: 1999153 - RNA, 19 nt, Artificial Sequence
  Description of Artificial Sequence: Synthetic oligonucleotide
auugagcugacgguaguga

SEQ ID NO: 1999154 - RNA, 19 nt, Artificial Sequence
  Description of Artificial Sequence: Synthetic oligonucleotide
uaggacucgcuggauacug

SEQ ID NO: 1999155 - RNA, 19 nt, Artificial Sequence
  Description of Artificial Sequence: Synthetic oligonucleotide
auaccacugagggugauau

SEQ ID NO: 1999156 - RNA, 19 nt, Artificial Sequence
  Description of Artificial Sequence: Synthetic oligonucleotide
gacgguagugacugaagaa

SEQ ID NO: 1999157 - RNA, 19 nt, Artificial Sequence
  Description of Artificial Sequence: Synthetic oligonucleotide
gaugcuaaguacuucucuu

SEQ ID NO: 1999158 - RNA, 19 nt, Artificial Sequence
  Description of Artificial Sequence: Synthetic oligonucleotide
cugacgguagugacugaag

SEQ ID NO: 1999159 - RNA, 19 nt, Artificial Sequence
  Description of Artificial Sequence: Synthetic oligonucleotide
uucgcugcucuugaauccc

SEQ ID NO: 1999160 - RNA, 19 nt, Artificial Sequence
  Description of Artificial Sequence: Synthetic oligonucleotide
cagcgcguccaucacgucg

SEQ ID NO: 1999161 - RNA, 19 nt, Artificial Sequence
  Description of Artificial Sequence: Synthetic oligonucleotide
cugucugguccgaggaugc

SEQ ID NO: 1999162 - RNA, 19 nt, Artificial Sequence
  Description of Artificial Sequence: Synthetic oligonucleotide
guaggagagguccaggacu

SEQ ID NO: 1999163 - RNA, 19 nt, Artificial Sequence
  Description of Artificial Sequence: Synthetic oligonucleotide
uuacaguugcauggcuucc

SEQ ID NO: 1999164 - RNA, 19 nt, Artificial Sequence
  Description of Artificial Sequence: Synthetic oligonucleotide
agggugauaugccuggcuu

SEQ ID NO: 1999165 - RNA, 19 nt, Artificial Sequence
  Description of Artificial Sequence: Synthetic oligonucleotide
guagucuucgaugaguugu

SEQ ID NO: 1999166 - RNA, 19 nt, Artificial Sequence
  Description of Artificial Sequence: Synthetic oligonucleotide
aaggccagcuucccauagu

SEQ ID NO: 1999167 - RNA, 19 nt, Artificial Sequence
  Description of Artificial Sequence: Synthetic oligonucleotide
cuuggcugggucugugcag

SEQ ID NO: 1999168 - RNA, 19 nt, Artificial Sequence
  Description of Artificial Sequence: Synthetic oligonucleotide
ugcaguacagcaggccgcc

SEQ ID NO: 1999169 - RNA, 19 nt, Artificial Sequence
  Description of Artificial Sequence: Synthetic oligonucleotide
ucgaugaguuguacuaguu

SEQ ID NO: 1999170 - RNA, 19 nt, Artificial Sequence
  Description of Artificial Sequence: Synthetic oligonucleotide
ucccaaaacaguagccguu

SEQ ID NO: 1999171 - RNA, 19 nt, Artificial Sequence
  Description of Artificial Sequence: Synthetic oligonucleotide
uagucuucgaugaguugua

SEQ ID NO: 1999172 - RNA, 19 nt, Artificial Sequence
  Description of Artificial Sequence: Synthetic oligonucleotide
augaguuguacuaguuucu

SEQ ID NO: 1999173 - RNA, 19 nt, Artificial Sequence
  Description of Artificial Sequence: Synthetic oligonucleotide
gaugaacuuggcugggucu

SEQ ID NO: 1999174 - RNA, 19 nt, Artificial Sequence
  Description of Artificial Sequence: Synthetic oligonucleotide
gacgccaggugcucaagca

SEQ ID NO: 1999175 - RNA, 19 nt, Artificial Sequence
  Description of Artificial Sequence: Synthetic oligonucleotide
acuccaugcaguacagcag

SEQ ID NO: 1999176 - RNA, 19 nt, Artificial Sequence
  Description of Artificial Sequence: Synthetic oligonucleotide
uguaauaguccagguuaaa

SEQ ID NO: 1999177 - RNA, 19 nt, Artificial Sequence
  Description of Artificial Sequence: Synthetic oligonucleotide
ugcgugcagagcuccaccu

SEQ ID NO: 1999178 - RNA, 19 nt, Artificial Sequence
  Description of Artificial Sequence: Synthetic oligonucleotide
acggcagcccuucguuggc

SEQ ID NO: 1999179 - RNA, 19 nt, Artificial Sequence
  Description of Artificial Sequence: Synthetic oligonucleotide
guaguggccgcggaggggc

SEQ ID NO: 1999180 - RNA, 19 nt, Artificial Sequence
  Description of Artificial Sequence: Synthetic oligonucleotide
agucuucgaugaguuguac

SEQ ID NO: 1999181 - RNA, 19 nt, Artificial Sequence
  Description of Artificial Sequence: Synthetic oligonucleotide
ggagaagaugcugcggagg

SEQ ID NO: 1999182 - RNA, 19 nt, Artificial Sequence
  Description of Artificial Sequence: Synthetic oligonucleotide
acaagguggacagcuguca

SEQ ID NO: 1999183 - RNA, 19 nt, Artificial Sequence
  Description of Artificial Sequence: Synthetic oligonucleotide
auccguacccagcugccca

SEQ ID NO: 1999184 - RNA, 19 nt, Artificial Sequence
  Description of Artificial Sequence: Synthetic oligonucleotide
acucguacggcagcccuuc

SEQ ID NO: 1999185 - RNA, 19 nt, Artificial Sequence
  Description of Artificial Sequence: Synthetic oligonucleotide
ucucuuggaugcccagagu

SEQ ID NO: 1999186 - RNA, 19 nt, Artificial Sequence
  Description of Artificial Sequence: Synthetic oligonucleotide
agccugaggucccacugug

SEQ ID NO: 1999187 - RNA, 19 nt, Artificial Sequence
  Description of Artificial Sequence: Synthetic oligonucleotide
ucgcccacguccacggcgc

SEQ ID NO: 1999188 - RNA, 19 nt, Artificial Sequence
  Description of Artificial Sequence: Synthetic oligonucleotide
ugccaucugggagaagaug

SEQ ID NO: 1999189 - RNA, 19 nt, Artificial Sequence
  Description of Artificial Sequence: Synthetic oligonucleotide
caugcagcaugguggccag

SEQ ID NO: 1999190 - RNA, 19 nt, Artificial Sequence
  Description of Artificial Sequence: Synthetic oligonucleotide
ucaugcccaggcaguacgu

SEQ ID NO: 1999191 - RNA, 19 nt, Artificial Sequence
  Description of Artificial Sequence: Synthetic oligonucleotide
cagccuguaggacucgcug

SEQ ID NO: 1999192 - RNA, 19 nt, Artificial Sequence
  Description of Artificial Sequence: Synthetic oligonucleotide
cacaagguggacagcuguc

SEQ ID NO: 1999193 - RNA, 19 nt, Artificial Sequence
  Description of Artificial Sequence: Synthetic oligonucleotide
gaacugagaugaacuuggc

SEQ ID NO: 1999194 - RNA, 19 nt, Artificial Sequence
  Description of Artificial Sequence: Synthetic oligonucleotide
ucgcuggauacuguccuug

SEQ ID NO: 1999195 - RNA, 19 nt, Artificial Sequence
  Description of Artificial Sequence: Synthetic oligonucleotide
guccgaggaugcuaaguac

SEQ ID NO: 1999196 - RNA, 19 nt, Artificial Sequence
  Description of Artificial Sequence: Synthetic oligonucleotide
ucgcucaugcccaggcagu

SEQ ID NO: 1999197 - RNA, 19 nt, Artificial Sequence
  Description of Artificial Sequence: Synthetic oligonucleotide
acguccacggcgcacucgu

SEQ ID NO: 1999198 - RNA, 19 nt, Artificial Sequence
  Description of Artificial Sequence: Synthetic oligonucleotide
guuggccggguccagguuc

SEQ ID NO: 1999199 - RNA, 19 nt, Artificial Sequence
  Description of Artificial Sequence: Synthetic oligonucleotide
auggguggagccgggcggc

SEQ ID NO: 1999200 - RNA, 19 nt, Artificial Sequence
  Description of Artificial Sequence: Synthetic oligonucleotide
caguugcauggcuuccugc

SEQ ID NO: 1999201 - RNA, 19 nt, Artificial Sequence
  Description of Artificial Sequence: Synthetic oligonucleotide
cauugagcugacgguagug

SEQ ID NO: 1999202 - RNA, 19 nt, Artificial Sequence
  Description of Artificial Sequence: Synthetic oligonucleotide
gagacuaggcuguagucuu

SEQ ID NO: 1999203 - RNA, 19 nt, Artificial Sequence
  Description of Artificial Sequence: Synthetic oligonucleotide
ucagacgccaggugcucaa

SEQ ID NO: 1999204 - RNA, 19 nt, Artificial Sequence
  Description of Artificial Sequence: Synthetic oligonucleotide
ucguacggcagcccuucgu

SEQ ID NO: 1999205 - RNA, 19 nt, Artificial Sequence
  Description of Artificial Sequence: Synthetic oligonucleotide
guacuucucuuggaugccc

SEQ ID NO: 1999206 - RNA, 19 nt, Artificial Sequence
  Description of Artificial Sequence: Synthetic oligonucleotide
gcucaagcagguaggagag

SEQ ID NO: 1999207 - RNA, 19 nt, Artificial Sequence
  Description of Artificial Sequence: Synthetic oligonucleotide
uaaaggccagcuucccaua

SEQ ID NO: 1999208 - RNA, 19 nt, Artificial Sequence
  Description of Artificial Sequence: Synthetic oligonucleotide
gagagguccaggacuucug

SEQ ID NO: 1999209 - RNA, 19 nt, Artificial Sequence
  Description of Artificial Sequence: Synthetic oligonucleotide
ggggcagucgaagaugaag

SEQ ID NO: 1999210 - RNA, 19 nt, Artificial Sequence
  Description of Artificial Sequence: Synthetic oligonucleotide
cuuggaugcccagagugga

SEQ ID NO: 1999211 - RNA, 19 nt, Artificial Sequence
  Description of Artificial Sequence: Synthetic oligonucleotide
ggaggagaaauggaaguca

SEQ ID NO: 1999212 - RNA, 19 nt, Artificial Sequence
  Description of Artificial Sequence: Synthetic oligonucleotide
guuucucauugagcugacg

SEQ ID NO: 1999213 - RNA, 19 nt, Artificial Sequence
  Description of Artificial Sequence: Synthetic oligonucleotide
cugggucugugcaguagug

SEQ ID NO: 1999214 - RNA, 19 nt, Artificial Sequence
  Description of Artificial Sequence: Synthetic oligonucleotide
gcuguuacaguugcauggc

SEQ ID NO: 1999215 - RNA, 19 nt, Artificial Sequence
  Description of Artificial Sequence: Synthetic oligonucleotide
agggcggcguggugcgugc

SEQ ID NO: 1999216 - RNA, 19 nt, Artificial Sequence
  Description of Artificial Sequence: Synthetic oligonucleotide
gccguuggggcccaggcgc

SEQ ID NO: 1999217 - RNA, 19 nt, Artificial Sequence
  Description of Artificial Sequence: Synthetic oligonucleotide
aguccacaagguggacagc

SEQ ID NO: 1999218 - RNA, 19 nt, Artificial Sequence
  Description of Artificial Sequence: Synthetic oligonucleotide
guacggcagcccuucguug

SEQ ID NO: 1999219 - RNA, 19 nt, Artificial Sequence
  Description of Artificial Sequence: Synthetic oligonucleotide
aguacagcaggccgccguu

SEQ ID NO: 1999220 - RNA, 19 nt, Artificial Sequence
  Description of Artificial Sequence: Synthetic oligonucleotide
ggacuucuguguaauaguc

SEQ ID NO: 1999221 - RNA, 19 nt, Artificial Sequence
  Description of Artificial Sequence: Synthetic oligonucleotide
guccacggcgcacucguac

SEQ ID NO: 1999222 - RNA, 19 nt, Artificial Sequence
  Description of Artificial Sequence: Synthetic oligonucleotide
ucaucggggauggaugcuu

SEQ ID NO: 1999223 - RNA, 19 nt, Artificial Sequence
  Description of Artificial Sequence: Synthetic oligonucleotide
cuuggcgcgcagccagucc

SEQ ID NO: 1999224 - RNA, 19 nt, Artificial Sequence
  Description of Artificial Sequence: Synthetic oligonucleotide
gguacuccaugcaguacag

SEQ ID NO: 1999225 - RNA, 19 nt, Artificial Sequence
  Description of Artificial Sequence: Synthetic oligonucleotide
caauaagguccaucuugga

SEQ ID NO: 1999226 - RNA, 19 nt, Artificial Sequence
  Description of Artificial Sequence: Synthetic oligonucleotide
ugagggugauaugccuggc

SEQ ID NO: 1999227 - RNA, 19 nt, Artificial Sequence
  Description of Artificial Sequence: Synthetic oligonucleotide
ucaccgccuggccgaaggc

SEQ ID NO: 1999228 - RNA, 19 nt, Artificial Sequence
  Description of Artificial Sequence: Synthetic oligonucleotide
ucuuggagaggagguugac

SEQ ID NO: 1999229 - RNA, 19 nt, Artificial Sequence
  Description of Artificial Sequence: Synthetic oligonucleotide
ucgcugcucuugaauccca

SEQ ID NO: 1999230 - RNA, 19 nt, Artificial Sequence
  Description of Artificial Sequence: Synthetic oligonucleotide
gugcgugcagagcuccacc

SEQ ID NO: 1999231 - RNA, 19 nt, Artificial Sequence
  Description of Artificial Sequence: Synthetic oligonucleotide
agcagacaucauggccucc

SEQ ID NO: 1999232 - RNA, 19 nt, Artificial Sequence
  Description of Artificial Sequence: Synthetic oligonucleotide
uaccacugagggugauaug

SEQ ID NO: 1999233 - RNA, 19 nt, Artificial Sequence
  Description of Artificial Sequence: Synthetic oligonucleotide
gaacuuggcugggucugug

SEQ ID NO: 1999234 - RNA, 19 nt, Artificial Sequence
  Description of Artificial Sequence: Synthetic oligonucleotide
agcgcgcgcaggaacucgc

SEQ ID NO: 1999235 - RNA, 19 nt, Artificial Sequence
  Description of Artificial Sequence: Synthetic oligonucleotide
acuaggcuguagucuucga

SEQ ID NO: 1999236 - RNA, 19 nt, Artificial Sequence
  Description of Artificial Sequence: Synthetic oligonucleotide
gaacucgcucaugcccagg

SEQ ID NO: 1999237 - RNA, 19 nt, Artificial Sequence
  Description of Artificial Sequence: Synthetic oligonucleotide
ccucaucggggauggaugc

SEQ ID NO: 1999238 - RNA, 19 nt, Artificial Sequence
  Description of Artificial Sequence: Synthetic oligonucleotide
gggauggaugcuuccuccc

SEQ ID NO: 1999239 - RNA, 19 nt, Artificial Sequence
  Description of Artificial Sequence: Synthetic oligonucleotide
cagcaggccgccguugggg

SEQ ID NO: 1999240 - RNA, 19 nt, Artificial Sequence
  Description of Artificial Sequence: Synthetic oligonucleotide
agacuaggcuguagucuuc

SEQ ID NO: 1999241 - RNA, 19 nt, Artificial Sequence
  Description of Artificial Sequence: Synthetic oligonucleotide
cgguagugacugaagaaag

SEQ ID NO: 1999242 - RNA, 19 nt, Artificial Sequence
  Description of Artificial Sequence: Synthetic oligonucleotide
gguccgaggaugcuaagua

SEQ ID NO: 1999243 - RNA, 19 nt, Artificial Sequence
  Description of Artificial Sequence: Synthetic oligonucleotide
guguaauaguccagguuaa

SEQ ID NO: 1999244 - RNA, 19 nt, Artificial Sequence
  Description of Artificial Sequence: Synthetic oligonucleotide
gguuaaaggccagcuuccc

SEQ ID NO: 1999245 - RNA, 19 nt, Artificial Sequence
  Description of Artificial Sequence: Synthetic oligonucleotide
ccaaaacaguagccguugg

SEQ ID NO: 1999246 - RNA, 19 nt, Artificial Sequence
  Description of Artificial Sequence: Synthetic oligonucleotide
ccagaguggaggagaaaug

SEQ ID NO: 1999247 - RNA, 19 nt, Artificial Sequence
  Description of Artificial Sequence: Synthetic oligonucleotide
guacguggucuuccccgag

SEQ ID NO: 1999248 - RNA, 19 nt, Artificial Sequence
  Description of Artificial Sequence: Synthetic oligonucleotide
gucuucgaugaguuguacu

SEQ ID NO: 1999249 - RNA, 19 nt, Artificial Sequence
  Description of Artificial Sequence: Synthetic oligonucleotide
gcaguagugagaguccaca

SEQ ID NO: 1999250 - RNA, 19 nt, Artificial Sequence
  Description of Artificial Sequence: Synthetic oligonucleotide
gugcucaagcagguaggag

SEQ ID NO: 1999251 - RNA, 19 nt, Artificial Sequence
  Description of Artificial Sequence: Synthetic oligonucleotide
cugcugucugguccgagga

SEQ ID NO: 1999252 - RNA, 19 nt, Artificial Sequence
  Description of Artificial Sequence: Synthetic oligonucleotide
cagcugucagccugagguc

SEQ ID NO: 1999253 - RNA, 19 nt, Artificial Sequence
  Description of Artificial Sequence: Synthetic oligonucleotide
caguagugagaguccacaa

SEQ ID NO: 1999254 - RNA, 19 nt, Artificial Sequence
  Description of Artificial Sequence: Synthetic oligonucleotide
ggggcucgagcuuggcgcg

SEQ ID NO: 1999255 - RNA, 19 nt, Artificial Sequence
  Description of Artificial Sequence: Synthetic oligonucleotide
gggcaguuccacaugcagc

SEQ ID NO: 1999256 - RNA, 19 nt, Artificial Sequence
  Description of Artificial Sequence: Synthetic oligonucleotide
ggaugcuaaguacuucucu

SEQ ID NO: 1999257 - RNA, 19 nt, Artificial Sequence
  Description of Artificial Sequence: Synthetic oligonucleotide
ucccaucgcagcagacauc

SEQ ID NO: 1999258 - RNA, 19 nt, Artificial Sequence
  Description of Artificial Sequence: Synthetic oligonucleotide
acggcgcacucguacggca

SEQ ID NO: 1999259 - RNA, 19 nt, Artificial Sequence
  Description of Artificial Sequence: Synthetic oligonucleotide
guggugcgugcagagcucc

SEQ ID NO: 1999260 - RNA, 19 nt, Artificial Sequence
  Description of Artificial Sequence: Synthetic oligonucleotide
gccggguccagguucacca

SEQ ID NO: 1999261 - RNA, 19 nt, Artificial Sequence
  Description of Artificial Sequence: Synthetic oligonucleotide
ggauggaugcuuccuccca

SEQ ID NO: 1999262 - RNA, 19 nt, Artificial Sequence
  Description of Artificial Sequence: Synthetic oligonucleotide
guacccagcugcccaucac

SEQ ID NO: 1999263 - RNA, 19 nt, Artificial Sequence
  Description of Artificial Sequence: Synthetic oligonucleotide
cuggauccguacccagcug

SEQ ID NO: 1999264 - RNA, 19 nt, Artificial Sequence
  Description of Artificial Sequence: Synthetic oligonucleotide
uccguacccagcugcccau

SEQ ID NO: 1999265 - RNA, 19 nt, Artificial Sequence
  Description of Artificial Sequence: Synthetic oligonucleotide
gucuuccccgagcccgggg

SEQ ID NO: 1999266 - RNA, 19 nt, Artificial Sequence
  Description of Artificial Sequence: Synthetic oligonucleotide
ggacucgcuggauacuguc

SEQ ID NO: 1999267 - RNA, 19 nt, Artificial Sequence
  Description of Artificial Sequence: Synthetic oligonucleotide
gugcaguagugagagucca

SEQ ID NO: 1999268 - RNA, 19 nt, Artificial Sequence
  Description of Artificial Sequence: Synthetic oligonucleotide
caggcuucgcugcucuuga

SEQ ID NO: 1999269 - RNA, 19 nt, Artificial Sequence
  Description of Artificial Sequence: Synthetic oligonucleotide
cccaaaacaguagccguug

SEQ ID NO: 1999270 - RNA, 19 nt, Artificial Sequence
  Description of Artificial Sequence: Synthetic oligonucleotide
ggaagucagcucccaucgc

SEQ ID NO: 1999271 - RNA, 19 nt, Artificial Sequence
  Description of Artificial Sequence: Synthetic oligonucleotide
guacuccaugcaguacagc

SEQ ID NO: 1999272 - RNA, 19 nt, Artificial Sequence
  Description of Artificial Sequence: Synthetic oligonucleotide
gugcucaauaagguccauc

SEQ ID NO: 1999273 - RNA, 19 nt, Artificial Sequence
  Description of Artificial Sequence: Synthetic oligonucleotide
agggaggugcagagaacug

SEQ ID NO: 1999274 - RNA, 19 nt, Artificial Sequence
  Description of Artificial Sequence: Synthetic oligonucleotide
cuucucuuggaugcccaga

SEQ ID NO: 1999275 - RNA, 19 nt, Artificial Sequence
  Description of Artificial Sequence: Synthetic oligonucleotide
ggggcccaggcgcagcgcg

SEQ ID NO: 1999276 - RNA, 19 nt, Artificial Sequence
  Description of Artificial Sequence: Synthetic oligonucleotide
caccgccuggccgaaggcc

SEQ ID NO: 1999277 - RNA, 19 nt, Artificial Sequence
  Description of Artificial Sequence: Synthetic oligonucleotide
cagguacuccaugcaguac

SEQ ID NO: 1999278 - RNA, 19 nt, Artificial Sequence
  Description of Artificial Sequence: Synthetic oligonucleotide
cagcccuucguuggccggg

SEQ ID NO: 1999279 - RNA, 19 nt, Artificial Sequence
  Description of Artificial Sequence: Synthetic oligonucleotide
cucguacggcagcccuucg

SEQ ID NO: 1999280 - RNA, 19 nt, Artificial Sequence
  Description of Artificial Sequence: Synthetic oligonucleotide
gcaguacguggucuucccc

SEQ ID NO: 1999281 - RNA, 19 nt, Artificial Sequence
  Description of Artificial Sequence: Synthetic oligonucleotide
gagggcggcguggugcgug

SEQ ID NO: 1999282 - RNA, 19 nt, Artificial Sequence
  Description of Artificial Sequence: Synthetic oligonucleotide
cuguaggacucgcuggaua

SEQ ID NO: 1999283 - RNA, 19 nt, Artificial Sequence
  Description of Artificial Sequence: Synthetic oligonucleotide
gguucaccaccgccacgcg

SEQ ID NO: 1999284 - RNA, 19 nt, Artificial Sequence
  Description of Artificial Sequence: Synthetic oligonucleotide
gggaggugcagagaacuga

SEQ ID NO: 1999285 - RNA, 19 nt, Artificial Sequence
  Description of Artificial Sequence: Synthetic oligonucleotide
ugucugguccgaggaugcu

SEQ ID NO: 1999286 - RNA, 19 nt, Artificial Sequence
  Description of Artificial Sequence: Synthetic oligonucleotide
cacagcuucuggauccgua

SEQ ID NO: 1999287 - RNA, 19 nt, Artificial Sequence
  Description of Artificial Sequence: Synthetic oligonucleotide
accugcccggggcagucga

SEQ ID NO: 1999288 - RNA, 19 nt, Artificial Sequence
  Description of Artificial Sequence: Synthetic oligonucleotide
caggccgccguuggggccc

SEQ ID NO: 1999289 - RNA, 19 nt, Artificial Sequence
  Description of Artificial Sequence: Synthetic oligonucleotide
acagccuguaggacucgcu

SEQ ID NO: 1999290 - RNA, 19 nt, Artificial Sequence
  Description of Artificial Sequence: Synthetic oligonucleotide
cuaggcuguagucuucgau

SEQ ID NO: 1999291 - RNA, 19 nt, Artificial Sequence
  Description of Artificial Sequence: Synthetic oligonucleotide
cagcucgcccacguccacg

SEQ ID NO: 1999292 - RNA, 19 nt, Artificial Sequence
  Description of Artificial Sequence: Synthetic oligonucleotide
ggauccguacccagcugcc

SEQ ID NO: 1999293 - RNA, 19 nt, Artificial Sequence
  Description of Artificial Sequence: Synthetic oligonucleotide
accgccacgcgccggccga

SEQ ID NO: 1999294 - RNA, 19 nt, Artificial Sequence
  Description of Artificial Sequence: Synthetic oligonucleotide
cagagggauaaaagagacu

SEQ ID NO: 1999295 - RNA, 19 nt, Artificial Sequence
  Description of Artificial Sequence: Synthetic oligonucleotide
cacggcgcacucguacggc

SEQ ID NO: 1999296 - RNA, 19 nt, Artificial Sequence
  Description of Artificial Sequence: Synthetic oligonucleotide
cagggaggugcagagaacu

SEQ ID NO: 1999297 - RNA, 19 nt, Artificial Sequence
  Description of Artificial Sequence: Synthetic oligonucleotide
cucgagcuuggcgcgcagc

SEQ ID NO: 1999298 - RNA, 19 nt, Artificial Sequence
  Description of Artificial Sequence: Synthetic oligonucleotide
caucauggccuccaggcuu

SEQ ID NO: 1999299 - RNA, 19 nt, Artificial Sequence
  Description of Artificial Sequence: Synthetic oligonucleotide
ggcgcacucguacggcagc

SEQ ID NO: 1999300 - RNA, 19 nt, Artificial Sequence
  Description of Artificial Sequence: Synthetic oligonucleotide
ccauagugcucaauaaggu

SEQ ID NO: 1999301 - RNA, 19 nt, Artificial Sequence
  Description of Artificial Sequence: Synthetic oligonucleotide
cccuucguuggccgggucc

SEQ ID NO: 1999302 - RNA, 19 nt, Artificial Sequence
  Description of Artificial Sequence: Synthetic oligonucleotide
gcagcccuucguuggccgg

SEQ ID NO: 1999303 - RNA, 19 nt, Artificial Sequence
  Description of Artificial Sequence: Synthetic oligonucleotide
ccguuggcuuuauccacag

SEQ ID NO: 1999304 - RNA, 19 nt, Artificial Sequence
  Description of Artificial Sequence: Synthetic oligonucleotide
gagaugaacuuggcugggu

SEQ ID NO: 1999305 - RNA, 19 nt, Artificial Sequence
  Description of Artificial Sequence: Synthetic oligonucleotide
gguccaggacuucugugua

SEQ ID NO: 1999306 - RNA, 19 nt, Artificial Sequence
  Description of Artificial Sequence: Synthetic oligonucleotide
aggacucgcuggauacugu

SEQ ID NO: 1999307 - RNA, 19 nt, Artificial Sequence
  Description of Artificial Sequence: Synthetic oligonucleotide
gcgcagcgcguccaucacg

SEQ ID NO: 1999308 - RNA, 19 nt, Artificial Sequence
  Description of Artificial Sequence: Synthetic oligonucleotide
guccaucacgucgcccagc

SEQ ID NO: 1999309 - RNA, 19 nt, Artificial Sequence
  Description of Artificial Sequence: Synthetic oligonucleotide
caccgccacgcgccggccg

SEQ ID NO: 1999310 - RNA, 19 nt, Artificial Sequence
  Description of Artificial Sequence: Synthetic oligonucleotide
cuucguuggccggguccag

SEQ ID NO: 1999311 - RNA, 19 nt, Artificial Sequence
  Description of Artificial Sequence: Synthetic oligonucleotide
ccacggcgcacucguacgg

SEQ ID NO: 1999312 - RNA, 19 nt, Artificial Sequence
  Description of Artificial Sequence: Synthetic oligonucleotide
cagacgccaggugcucaag

SEQ ID NO: 1999313 - RNA, 19 nt, Artificial Sequence
  Description of Artificial Sequence: Synthetic oligonucleotide
gcugacgguagugacugaa

SEQ ID NO: 1999314 - RNA, 19 nt, Artificial Sequence
  Description of Artificial Sequence: Synthetic oligonucleotide
ggcugggucugugcaguag

SEQ ID NO: 1999315 - RNA, 19 nt, Artificial Sequence
  Description of Artificial Sequence: Synthetic oligonucleotide
gcgugcagagcuccaccug

SEQ ID NO: 1999316 - RNA, 19 nt, Artificial Sequence
  Description of Artificial Sequence: Synthetic oligonucleotide
agcugacgguagugacuga

SEQ ID NO: 1999317 - RNA, 19 nt, Artificial Sequence
  Description of Artificial Sequence: Synthetic oligonucleotide
agugcucaauaagguccau

SEQ ID NO: 1999318 - RNA, 19 nt, Artificial Sequence
  Description of Artificial Sequence: Synthetic oligonucleotide
ggugcgugcagagcuccac

SEQ ID NO: 1999319 - RNA, 19 nt, Artificial Sequence
  Description of Artificial Sequence: Synthetic oligonucleotide
cuguuacaguugcauggcu

SEQ ID NO: 1999320 - RNA, 19 nt, Artificial Sequence
  Description of Artificial Sequence: Synthetic oligonucleotide
gucagacgccaggugcuca

SEQ ID NO: 1999321 - RNA, 19 nt, Artificial Sequence
  Description of Artificial Sequence: Synthetic oligonucleotide
ggcucugaguuugaagaua

SEQ ID NO: 1999322 - RNA, 19 nt, Artificial Sequence
  Description of Artificial Sequence: Synthetic oligonucleotide
ccaggcuucgcugcucuug

SEQ ID NO: 1999323 - RNA, 19 nt, Artificial Sequence
  Description of Artificial Sequence: Synthetic oligonucleotide
gcguggugcgugcagagcu

SEQ ID NO: 1999324 - RNA, 19 nt, Artificial Sequence
  Description of Artificial Sequence: Synthetic oligonucleotide
gcucccaucgcagcagaca

SEQ ID NO: 1999325 - RNA, 19 nt, Artificial Sequence
  Description of Artificial Sequence: Synthetic oligonucleotide
caguacagcaggccgccgu

SEQ ID NO: 1999326 - RNA, 19 nt, Artificial Sequence
  Description of Artificial Sequence: Synthetic oligonucleotide
ccgaucaccgccuggccga

SEQ ID NO: 1999327 - RNA, 19 nt, Artificial Sequence
  Description of Artificial Sequence: Synthetic oligonucleotide
gucugguccgaggaugcua

SEQ ID NO: 1999328 - RNA, 19 nt, Artificial Sequence
  Description of Artificial Sequence: Synthetic oligonucleotide
cauggccuccaggcuucgc

SEQ ID NO: 1999329 - RNA, 19 nt, Artificial Sequence
  Description of Artificial Sequence: Synthetic oligonucleotide
ggcggcguggugcgugcag

SEQ ID NO: 1999330 - RNA, 19 nt, Artificial Sequence
  Description of Artificial Sequence: Synthetic oligonucleotide
ggaugcuuccucccagccu

SEQ ID NO: 1999331 - RNA, 19 nt, Artificial Sequence
  Description of Artificial Sequence: Synthetic oligonucleotide
guccucaucggggauggau

SEQ ID NO: 1999332 - RNA, 19 nt, Artificial Sequence
  Description of Artificial Sequence: Synthetic oligonucleotide
gccguuggcuuuauccaca

SEQ ID NO: 1999333 - RNA, 19 nt, Artificial Sequence
  Description of Artificial Sequence: Synthetic oligonucleotide
aggcuucgcugcucuugaa

SEQ ID NO: 1999334 - RNA, 19 nt, Artificial Sequence
  Description of Artificial Sequence: Synthetic oligonucleotide
gccgcggaggggcucgagc

SEQ ID NO: 1999335 - RNA, 19 nt, Artificial Sequence
  Description of Artificial Sequence: Synthetic oligonucleotide
gccgagcgcgcgcaggaac

SEQ ID NO: 1999336 - RNA, 19 nt, Artificial Sequence
  Description of Artificial Sequence: Synthetic oligonucleotide
ggagagguccaggacuucu

SEQ ID NO: 1999337 - RNA, 19 nt, Artificial Sequence
  Description of Artificial Sequence: Synthetic oligonucleotide
ggugauaugccuggcuuuu

SEQ ID NO: 1999338 - RNA, 19 nt, Artificial Sequence
  Description of Artificial Sequence: Synthetic oligonucleotide
agcccuucguuggccgggu

SEQ ID NO: 1999339 - RNA, 19 nt, Artificial Sequence
  Description of Artificial Sequence: Synthetic oligonucleotide
ccggggcagucgaagauga

SEQ ID NO: 1999340 - RNA, 19 nt, Artificial Sequence
  Description of Artificial Sequence: Synthetic oligonucleotide
ggcguggugcgugcagagc

SEQ ID NO: 1999341 - RNA, 19 nt, Artificial Sequence
  Description of Artificial Sequence: Synthetic oligonucleotide
ggcuucgcugcucuugaau

SEQ ID NO: 1999342 - RNA, 19 nt, Artificial Sequence
  Description of Artificial Sequence: Synthetic oligonucleotide
ggauguucagagggauaaa

SEQ ID NO: 1999343 - RNA, 19 nt, Artificial Sequence
  Description of Artificial Sequence: Synthetic oligonucleotide
ccgccguuggggcccaggc

SEQ ID NO: 1999344 - RNA, 19 nt, Artificial Sequence
  Description of Artificial Sequence: Synthetic oligonucleotide
gcaggccgccguuggggcc

SEQ ID NO: 1999345 - RNA, 19 nt, Artificial Sequence
  Description of Artificial Sequence: Synthetic oligonucleotide
caccugcccggggcagucg

SEQ ID NO: 1999346 - RNA, 19 nt, Artificial Sequence
  Description of Artificial Sequence: Synthetic oligonucleotide
cggagggcggcguggugcg

SEQ ID NO: 1999347 - RNA, 19 nt, Artificial Sequence
  Description of Artificial Sequence: Synthetic oligonucleotide
ggucuuccccgagcccggg

SEQ ID NO: 1999348 - RNA, 19 nt, Artificial Sequence
  Description of Artificial Sequence: Synthetic oligonucleotide
cccggggcagucgaagaug

SEQ ID NO: 1999349 - RNA, 19 nt, Artificial Sequence
  Description of Artificial Sequence: Synthetic oligonucleotide
ggucagacgccaggugcuc

SEQ ID NO: 1999350 - RNA, 19 nt, Artificial Sequence
  Description of Artificial Sequence: Synthetic oligonucleotide
ccuggccgaaggccguggc

SEQ ID NO: 1999351 - RNA, 19 nt, Artificial Sequence
  Description of Artificial Sequence: Synthetic oligonucleotide
gggugauaugccuggcuuu

SEQ ID NO: 1999352 - RNA, 19 nt, Artificial Sequence
  Description of Artificial Sequence: Synthetic oligonucleotide
gcacucguacggcagcccu

SEQ ID NO: 1999353 - RNA, 19 nt, Artificial Sequence
  Description of Artificial Sequence: Synthetic oligonucleotide
cccagaguggaggagaaau

SEQ ID NO: 1999354 - RNA, 19 nt, Artificial Sequence
  Description of Artificial Sequence: Synthetic oligonucleotide
gcgcacucguacggcagcc

SEQ ID NO: 1999355 - RNA, 19 nt, Artificial Sequence
  Description of Artificial Sequence: Synthetic oligonucleotide
agcuuggcgcgcagccagu

SEQ ID NO: 1999356 - RNA, 19 nt, Artificial Sequence
  Description of Artificial Sequence: Synthetic oligonucleotide
cguggugcgugcagagcuc

SEQ ID NO: 1999357 - RNA, 19 nt, Artificial Sequence
  Description of Artificial Sequence: Synthetic oligonucleotide
gggucagacgccaggugcu

SEQ ID NO: 1999358 - RNA, 19 nt, Artificial Sequence
  Description of Artificial Sequence: Synthetic oligonucleotide
uggagccgggcggcccgca

SEQ ID NO: 1999359 - RNA, 19 nt, Artificial Sequence
  Description of Artificial Sequence: Synthetic oligonucleotide
gccuggccgaaggccgugg

SEQ ID NO: 1999360 - RNA, 19 nt, Artificial Sequence
  Description of Artificial Sequence: Synthetic oligonucleotide
gguugacauggggcaguuc

SEQ ID NO: 1999361 - RNA, 19 nt, Artificial Sequence
  Description of Artificial Sequence: Synthetic oligonucleotide
ggccggguccagguucacc

SEQ ID NO: 1999362 - RNA, 19 nt, Artificial Sequence
  Description of Artificial Sequence: Synthetic oligonucleotide
cgccguuggggcccaggcg

SEQ ID NO: 1999363 - RNA, 19 nt, Artificial Sequence
  Description of Artificial Sequence: Synthetic oligonucleotide
cucaucggggauggaugcu

SEQ ID NO: 1999364 - RNA, 19 nt, Artificial Sequence
  Description of Artificial Sequence: Synthetic oligonucleotide
ggaggggcucgagcuuggc

SEQ ID NO: 1999365 - RNA, 19 nt, Artificial Sequence
  Description of Artificial Sequence: Synthetic oligonucleotide
gcccaggcaguacgugguc

SEQ ID NO: 1999366 - RNA, 19 nt, Artificial Sequence
  Description of Artificial Sequence: Synthetic oligonucleotide
cucgcuggauacuguccuu

SEQ ID NO: 1999367 - RNA, 19 nt, Artificial Sequence
  Description of Artificial Sequence: Synthetic oligonucleotide
ccccgccauggguggagcc

SEQ ID NO: 1999368 - RNA, 19 nt, Artificial Sequence
  Description of Artificial Sequence: Synthetic oligonucleotide
gguggacagcugucagccu

SEQ ID NO: 1999369 - RNA, 19 nt, Artificial Sequence
  Description of Artificial Sequence: Synthetic oligonucleotide
cacucguacggcagcccuu

SEQ ID NO: 1999370 - RNA, 19 nt, Artificial Sequence
  Description of Artificial Sequence: Synthetic oligonucleotide
cggcguggugcgugcagag

SEQ ID NO: 1999371 - RNA, 19 nt, Artificial Sequence
  Description of Artificial Sequence: Synthetic oligonucleotide
ccacagccuguaggacucg

SEQ ID NO: 1999372 - RNA, 19 nt, Artificial Sequence
  Description of Artificial Sequence: Synthetic oligonucleotide
gguuggccuccagguacuc

SEQ ID NO: 1999373 - RNA, 19 nt, Artificial Sequence
  Description of Artificial Sequence: Synthetic oligonucleotide
ccgaggaugcuaaguacuu

SEQ ID NO: 1999374 - RNA, 19 nt, Artificial Sequence
  Description of Artificial Sequence: Synthetic oligonucleotide
gcgcguccaucacgucgcc

SEQ ID NO: 1999375 - RNA, 19 nt, Artificial Sequence
  Description of Artificial Sequence: Synthetic oligonucleotide
ccgaaggccguggccggug

SEQ ID NO: 1999376 - RNA, 19 nt, Artificial Sequence
  Description of Artificial Sequence: Synthetic oligonucleotide
cgcagcgcguccaucacgu

SEQ ID NO: 1999377 - RNA, 19 nt, Artificial Sequence
  Description of Artificial Sequence: Synthetic oligonucleotide
gcagcgcguccaucacguc

SEQ ID NO: 1999378 - RNA, 19 nt, Artificial Sequence
  Description of Artificial Sequence: Synthetic oligonucleotide
gggcucgagcuuggcgcgc

SEQ ID NO: 1999379 - RNA, 19 nt, Artificial Sequence
  Description of Artificial Sequence: Synthetic oligonucleotide
cgcacucguacggcagccc

SEQ ID NO: 1999380 - RNA, 19 nt, Artificial Sequence
  Description of Artificial Sequence: Synthetic oligonucleotide
ccgagcgcgcgcaggaacu

SEQ ID NO: 1999381 - RNA, 19 nt, Artificial Sequence
  Description of Artificial Sequence: Synthetic oligonucleotide
cgcgcgcaggaacucgcuc

SEQ ID NO: 1999382 - RNA, 19 nt, Artificial Sequence
  Description of Artificial Sequence: Synthetic oligonucleotide
ccguuggggcccaggcgca

SEQ ID NO: 1999383 - RNA, 19 nt, Artificial Sequence
  Description of Artificial Sequence: Synthetic oligonucleotide
gcccacguccacggcgcac

SEQ ID NO: 1999384 - RNA, 19 nt, Artificial Sequence
  Description of Artificial Sequence: Synthetic oligonucleotide
gcgccggccgagcgcgcgc

SEQ ID NO: 1999385 - RNA, 19 nt, Artificial Sequence
  Description of Artificial Sequence: Synthetic oligonucleotide
cguacggcagcccuucguu

SEQ ID NO: 1999386 - RNA, 19 nt, Artificial Sequence
  Description of Artificial Sequence: Synthetic oligonucleotide
gcccggggcagucgaagau

SEQ ID NO: 1999387 - RNA, 19 nt, Artificial Sequence
  Description of Artificial Sequence: Synthetic oligonucleotide
cgcguccaucacgucgccc

SEQ ID NO: 1999388 - RNA, 19 nt, Artificial Sequence
  Description of Artificial Sequence: Synthetic oligonucleotide
ccguggccggugcggcccc

SEQ ID NO: 1999389 - RNA, 19 nt, Artificial Sequence
  Description of Artificial Sequence: Synthetic oligonucleotide
cccacguccacggcgcacu

SEQ ID NO: 1999390 - RNA, 19 nt, Artificial Sequence
  Description of Artificial Sequence: Synthetic oligonucleotide
gcccuucguuggccggguc

SEQ ID NO: 1999391 - RNA, 19 nt, Artificial Sequence
  Description of Artificial Sequence: Synthetic oligonucleotide
cguuggggcccaggcgcag

SEQ ID NO: 1999392 - RNA, 19 nt, Artificial Sequence
  Description of Artificial Sequence: Synthetic oligonucleotide
aggccgccguuggggccca

SEQ ID NO: 1999393 - RNA, 19 nt, Artificial Sequence
  Description of Artificial Sequence: Synthetic oligonucleotide
ggccgcggaggggcucgag

SEQ ID NO: 1999394 - RNA, 19 nt, Artificial Sequence
  Description of Artificial Sequence: Synthetic oligonucleotide
cccaggcaguacguggucu

SEQ ID NO: 1999395 - RNA, 19 nt, Artificial Sequence
  Description of Artificial Sequence: Synthetic oligonucleotide
cgagcgcgcgcaggaacuc

SEQ ID NO: 1999396 - RNA, 19 nt, Artificial Sequence
  Description of Artificial Sequence: Synthetic oligonucleotide
ccaccgccacgcgccggcc

SEQ ID NO: 1999397 - RNA, 19 nt, Artificial Sequence
  Description of Artificial Sequence: Synthetic oligonucleotide
cggccgagcgcgcgcagga

SEQ ID NO: 1999398 - RNA, 19 nt, Artificial Sequence
  Description of Artificial Sequence: Synthetic oligonucleotide
ccuguaggacucgcuggau

SEQ ID NO: 1999399 - RNA, 19 nt, Artificial Sequence
  Description of Artificial Sequence: Synthetic oligonucleotide
caguagccguuggcuuuau

SEQ ID NO: 1999400 - RNA, 19 nt, Artificial Sequence
  Description of Artificial Sequence: Synthetic oligonucleotide
cgcgcagccaguccagguu

SEQ ID NO: 1999401 - RNA, 19 nt, Artificial Sequence
  Description of Artificial Sequence: Synthetic oligonucleotide
cgcucaugcccaggcagua

SEQ ID NO: 1999402 - RNA, 19 nt, Artificial Sequence
  Description of Artificial Sequence: Synthetic oligonucleotide
gccgaaggccguggccggu

SEQ ID NO: 1999403 - RNA, 19 nt, Artificial Sequence
  Description of Artificial Sequence: Synthetic oligonucleotide
gcgcgcgcaggaacucgcu

SEQ ID NO: 1999404 - RNA, 19 nt, Artificial Sequence
  Description of Artificial Sequence: Synthetic oligonucleotide
ccgccuggccgaaggccgu

SEQ ID NO: 1999405 - RNA, 19 nt, Artificial Sequence
  Description of Artificial Sequence: Synthetic oligonucleotide
ggagggcggcguggugcgu

SEQ ID NO: 1999406 - RNA, 19 nt, Artificial Sequence
  Description of Artificial Sequence: Synthetic oligonucleotide
cgaucaccgccuggccgaa

SEQ ID NO: 1999407 - RNA, 19 nt, Artificial Sequence
  Description of Artificial Sequence: Synthetic oligonucleotide
cguccacggcgcacucgua

SEQ ID NO: 1999408 - RNA, 19 nt, Artificial Sequence
  Description of Artificial Sequence: Synthetic oligonucleotide
cguuggccggguccagguu

SEQ ID NO: 1999409 - RNA, 19 nt, Artificial Sequence
  Description of Artificial Sequence: Synthetic oligonucleotide
cgcggaggggcucgagcuu

SEQ ID NO: 1999410 - RNA, 19 nt, Artificial Sequence
  Description of Artificial Sequence: Synthetic oligonucleotide
ucuaauauguucaacaaag

SEQ ID NO: 1999411 - RNA, 19 nt, Artificial Sequence
  Description of Artificial Sequence: Synthetic oligonucleotide
ucagaaaaggauuuuaugg

SEQ ID NO: 1999412 - RNA, 19 nt, Artificial Sequence
  Description of Artificial Sequence: Synthetic oligonucleotide
ucauaaaugcuaaucaucg

SEQ ID NO: 1999413 - RNA, 19 nt, Artificial Sequence
  Description of Artificial Sequence: Synthetic oligonucleotide
uaagacuuuauuuugaaag

SEQ ID NO: 1999414 - RNA, 19 nt, Artificial Sequence
  Description of Artificial Sequence: Synthetic oligonucleotide
uucacuaagaagcugauga

SEQ ID NO: 1999415 - RNA, 19 nt, Artificial Sequence
  Description of Artificial Sequence: Synthetic oligonucleotide
uugcugaacauacagaagg

SEQ ID NO: 1999416 - RNA, 19 nt, Artificial Sequence
  Description of Artificial Sequence: Synthetic oligonucleotide
aaaugcuaaucaucgggcc

SEQ ID NO: 1999417 - RNA, 19 nt, Artificial Sequence
  Description of Artificial Sequence: Synthetic oligonucleotide
agagaagagcuuuauuucc

SEQ ID NO: 1999418 - RNA, 19 nt, Artificial Sequence
  Description of Artificial Sequence: Synthetic oligonucleotide
uuugauguuaguucccugg

SEQ ID NO: 1999419 - RNA, 19 nt, Artificial Sequence
  Description of Artificial Sequence: Synthetic oligonucleotide
ugaaagaccguaagcaagg

SEQ ID NO: 1999420 - RNA, 19 nt, Artificial Sequence
  Description of Artificial Sequence: Synthetic oligonucleotide
aaguuucugugacagcugc

SEQ ID NO: 1999421 - RNA, 19 nt, Artificial Sequence
  Description of Artificial Sequence: Synthetic oligonucleotide
acaaggugcacuuccagcc

SEQ ID NO: 1999422 - RNA, 19 nt, Artificial Sequence
  Description of Artificial Sequence: Synthetic oligonucleotide
auauguucaacaaaguggg

SEQ ID NO: 1999423 - RNA, 19 nt, Artificial Sequence
  Description of Artificial Sequence: Synthetic oligonucleotide
uaagugaaugucaucaucu

SEQ ID NO: 1999424 - RNA, 19 nt, Artificial Sequence
  Description of Artificial Sequence: Synthetic oligonucleotide
caaggaagaaguaaaacug

SEQ ID NO: 1999425 - RNA, 19 nt, Artificial Sequence
  Description of Artificial Sequence: Synthetic oligonucleotide
agaucuaauauguucaaca

SEQ ID NO: 1999426 - RNA, 19 nt, Artificial Sequence
  Description of Artificial Sequence: Synthetic oligonucleotide
uuuauggcacucauuauca

SEQ ID NO: 1999427 - RNA, 19 nt, Artificial Sequence
  Description of Artificial Sequence: Synthetic oligonucleotide
aagguucucuaguauuugc

SEQ ID NO: 1999428 - RNA, 19 nt, Artificial Sequence
  Description of Artificial Sequence: Synthetic oligonucleotide
acuuuauuuugaaagaccg

SEQ ID NO: 1999429 - RNA, 19 nt, Artificial Sequence
  Description of Artificial Sequence: Synthetic oligonucleotide
uuuuauggcacucauuauc

SEQ ID NO: 1999430 - RNA, 19 nt, Artificial Sequence
  Description of Artificial Sequence: Synthetic oligonucleotide
ucaagguagaucuaauaug

SEQ ID NO: 1999431 - RNA, 19 nt, Artificial Sequence
  Description of Artificial Sequence: Synthetic oligonucleotide
aagaccguaagcaaggaag

SEQ ID NO: 1999432 - RNA, 19 nt, Artificial Sequence
  Description of Artificial Sequence: Synthetic oligonucleotide
gaagaaguaaaacugcgca

SEQ ID NO: 1999433 - RNA, 19 nt, Artificial Sequence
  Description of Artificial Sequence: Synthetic oligonucleotide
uaacuuugauguuaguucc

SEQ ID NO: 1999434 - RNA, 19 nt, Artificial Sequence
  Description of Artificial Sequence: Synthetic oligonucleotide
aggaauacgggccuauucg

SEQ ID NO: 1999435 - RNA, 19 nt, Artificial Sequence
  Description of Artificial Sequence: Synthetic oligonucleotide
agguagaucuaauauguuc

SEQ ID NO: 1999436 - RNA, 19 nt, Artificial Sequence
  Description of Artificial Sequence: Synthetic oligonucleotide
agucuuaauguugacagcg

SEQ ID NO: 1999437 - RNA, 19 nt, Artificial Sequence
  Description of Artificial Sequence: Synthetic oligonucleotide
ugucaguuccaucacaaug

SEQ ID NO: 1999438 - RNA, 19 nt, Artificial Sequence
  Description of Artificial Sequence: Synthetic oligonucleotide
ugaugaguaaguuucugug

SEQ ID NO: 1999439 - RNA, 19 nt, Artificial Sequence
  Description of Artificial Sequence: Synthetic oligonucleotide
acugcgcagauguagauuc

SEQ ID NO: 1999440 - RNA, 19 nt, Artificial Sequence
  Description of Artificial Sequence: Synthetic oligonucleotide
ucuugcugcaaccagaaau

SEQ ID NO: 1999441 - RNA, 19 nt, Artificial Sequence
  Description of Artificial Sequence: Synthetic oligonucleotide
aaauucacuaagaagcuga

SEQ ID NO: 1999442 - RNA, 19 nt, Artificial Sequence
  Description of Artificial Sequence: Synthetic oligonucleotide
uguagauuccaaaccacca

SEQ ID NO: 1999443 - RNA, 19 nt, Artificial Sequence
  Description of Artificial Sequence: Synthetic oligonucleotide
accacaaugugacaaguag

SEQ ID NO: 1999444 - RNA, 19 nt, Artificial Sequence
  Description of Artificial Sequence: Synthetic oligonucleotide
uuccaaaccaccaaugguc

SEQ ID NO: 1999445 - RNA, 19 nt, Artificial Sequence
  Description of Artificial Sequence: Synthetic oligonucleotide
cacauaaugucacuaagug

SEQ ID NO: 1999446 - RNA, 19 nt, Artificial Sequence
  Description of Artificial Sequence: Synthetic oligonucleotide
aaaaggauuuuauggcacu

SEQ ID NO: 1999447 - RNA, 19 nt, Artificial Sequence
  Description of Artificial Sequence: Synthetic oligonucleotide
uuugcaucauaaaugcuaa

SEQ ID NO: 1999448 - RNA, 19 nt, Artificial Sequence
  Description of Artificial Sequence: Synthetic oligonucleotide
aaugcuaaucaucgggccu

SEQ ID NO: 1999449 - RNA, 19 nt, Artificial Sequence
  Description of Artificial Sequence: Synthetic oligonucleotide
uuaucaaggggacuucagc

SEQ ID NO: 1999450 - RNA, 19 nt, Artificial Sequence
  Description of Artificial Sequence: Synthetic oligonucleotide
agaaaaggauuuuauggca

SEQ ID NO: 1999451 - RNA, 19 nt, Artificial Sequence
  Description of Artificial Sequence: Synthetic oligonucleotide
cucagugugaucagaaaag

SEQ ID NO: 1999452 - RNA, 19 nt, Artificial Sequence
  Description of Artificial Sequence: Synthetic oligonucleotide
aguuccaucacaaugugug

SEQ ID NO: 1999453 - RNA, 19 nt, Artificial Sequence
  Description of Artificial Sequence: Synthetic oligonucleotide
uauggcacucauuaucaag

SEQ ID NO: 1999454 - RNA, 19 nt, Artificial Sequence
  Description of Artificial Sequence: Synthetic oligonucleotide
aucagaaaaggauuuuaug

SEQ ID NO: 1999455 - RNA, 19 nt, Artificial Sequence
  Description of Artificial Sequence: Synthetic oligonucleotide
uaaucaucgggccuccugc

SEQ ID NO: 1999456 - RNA, 19 nt, Artificial Sequence
  Description of Artificial Sequence: Synthetic oligonucleotide
caaugugugaggcagguug

SEQ ID NO: 1999457 - RNA, 19 nt, Artificial Sequence
  Description of Artificial Sequence: Synthetic oligonucleotide
aucauaaaugcuaaucauc

SEQ ID NO: 1999458 - RNA, 19 nt, Artificial Sequence
  Description of Artificial Sequence: Synthetic oligonucleotide
uuugcugaacauacagaag

SEQ ID NO: 1999459 - RNA, 19 nt, Artificial Sequence
  Description of Artificial Sequence: Synthetic oligonucleotide
aaugugugaggcagguugc

SEQ ID NO: 1999460 - RNA, 19 nt, Artificial Sequence
  Description of Artificial Sequence: Synthetic oligonucleotide
cucaggaccacaaugugac

SEQ ID NO: 1999461 - RNA, 19 nt, Artificial Sequence
  Description of Artificial Sequence: Synthetic oligonucleotide
uaucaaggggacuucagcu

SEQ ID NO: 1999462 - RNA, 19 nt, Artificial Sequence
  Description of Artificial Sequence: Synthetic oligonucleotide
ugaaaggaggcucuguaaa

SEQ ID NO: 1999463 - RNA, 19 nt, Artificial Sequence
  Description of Artificial Sequence: Synthetic oligonucleotide
uccaucacaaugugugagg

SEQ ID NO: 1999464 - RNA, 19 nt, Artificial Sequence
  Description of Artificial Sequence: Synthetic oligonucleotide
uuauuuugaaagaccguaa

SEQ ID NO: 1999465 - RNA, 19 nt, Artificial Sequence
  Description of Artificial Sequence: Synthetic oligonucleotide
aaaggauuuuauggcacuc

SEQ ID NO: 1999466 - RNA, 19 nt, Artificial Sequence
  Description of Artificial Sequence: Synthetic oligonucleotide
cauaaaugcuaaucaucgg

SEQ ID NO: 1999467 - RNA, 19 nt, Artificial Sequence
  Description of Artificial Sequence: Synthetic oligonucleotide
gauguuaguucccuggaga

SEQ ID NO: 1999468 - RNA, 19 nt, Artificial Sequence
  Description of Artificial Sequence: Synthetic oligonucleotide
uucccggucauuuaauucu

SEQ ID NO: 1999469 - RNA, 19 nt, Artificial Sequence
  Description of Artificial Sequence: Synthetic oligonucleotide
gacuuuauuuugaaagacc

SEQ ID NO: 1999470 - RNA, 19 nt, Artificial Sequence
  Description of Artificial Sequence: Synthetic oligonucleotide
aaacaguauauuugcugga

SEQ ID NO: 1999471 - RNA, 19 nt, Artificial Sequence
  Description of Artificial Sequence: Synthetic oligonucleotide
cuuaauguugacagcgaug

SEQ ID NO: 1999472 - RNA, 19 nt, Artificial Sequence
  Description of Artificial Sequence: Synthetic oligonucleotide
cuugcugcaaccagaaauc

SEQ ID NO: 1999473 - RNA, 19 nt, Artificial Sequence
  Description of Artificial Sequence: Synthetic oligonucleotide
agcaaggaagaaguaaaac

SEQ ID NO: 1999474 - RNA, 19 nt, Artificial Sequence
  Description of Artificial Sequence: Synthetic oligonucleotide
acauaaugucacuaaguga

SEQ ID NO: 1999475 - RNA, 19 nt, Artificial Sequence
  Description of Artificial Sequence: Synthetic oligonucleotide
auguuaguucccuggagag

SEQ ID NO: 1999476 - RNA, 19 nt, Artificial Sequence
  Description of Artificial Sequence: Synthetic oligonucleotide
ugcaucauaaaugcuaauc

SEQ ID NO: 1999477 - RNA, 19 nt, Artificial Sequence
  Description of Artificial Sequence: Synthetic oligonucleotide
ugauguuaguucccuggag

SEQ ID NO: 1999478 - RNA, 19 nt, Artificial Sequence
  Description of Artificial Sequence: Synthetic oligonucleotide
gaagccucccacaaggugc

SEQ ID NO: 1999479 - RNA, 19 nt, Artificial Sequence
  Description of Artificial Sequence: Synthetic oligonucleotide
uuugguaacuuugauguua

SEQ ID NO: 1999480 - RNA, 19 nt, Artificial Sequence
  Description of Artificial Sequence: Synthetic oligonucleotide
ucaucuugcugcaaccaga

SEQ ID NO: 1999481 - RNA, 19 nt, Artificial Sequence
  Description of Artificial Sequence: Synthetic oligonucleotide
ugcugaacauacagaaggc

SEQ ID NO: 1999482 - RNA, 19 nt, Artificial Sequence
  Description of Artificial Sequence: Synthetic oligonucleotide
gaacagacugaccucugag

SEQ ID NO: 1999483 - RNA, 19 nt, Artificial Sequence
  Description of Artificial Sequence: Synthetic oligonucleotide
gaaaaggauuuuauggcac

SEQ ID NO: 1999484 - RNA, 19 nt, Artificial Sequence
  Description of Artificial Sequence: Synthetic oligonucleotide
uuuuguagagaagagcuuu

SEQ ID NO: 1999485 - RNA, 19 nt, Artificial Sequence
  Description of Artificial Sequence: Synthetic oligonucleotide
aauggcguccaggaauacg

SEQ ID NO: 1999486 - RNA, 19 nt, Artificial Sequence
  Description of Artificial Sequence: Synthetic oligonucleotide
cuuugcaucauaaaugcua

SEQ ID NO: 1999487 - RNA, 19 nt, Artificial Sequence
  Description of Artificial Sequence: Synthetic oligonucleotide
aggaagaaguaaaacugcg

SEQ ID NO: 1999488 - RNA, 19 nt, Artificial Sequence
  Description of Artificial Sequence: Synthetic oligonucleotide
uugauguuaguucccugga

SEQ ID NO: 1999489 - RNA, 19 nt, Artificial Sequence
  Description of Artificial Sequence: Synthetic oligonucleotide
ucuuaauguugacagcgau

SEQ ID NO: 1999490 - RNA, 19 nt, Artificial Sequence
  Description of Artificial Sequence: Synthetic oligonucleotide
agugugaucagaaaaggau

SEQ ID NO: 1999491 - RNA, 19 nt, Artificial Sequence
  Description of Artificial Sequence: Synthetic oligonucleotide
accaccaauggucucuauc

SEQ ID NO: 1999492 - RNA, 19 nt, Artificial Sequence
  Description of Artificial Sequence: Synthetic oligonucleotide
uagauuccaaaccaccaau

SEQ ID NO: 1999493 - RNA, 19 nt, Artificial Sequence
  Description of Artificial Sequence: Synthetic oligonucleotide
gccauaaaugauuggaaag

SEQ ID NO: 1999494 - RNA, 19 nt, Artificial Sequence
  Description of Artificial Sequence: Synthetic oligonucleotide
aaguaguggcaucaucaga

SEQ ID NO: 1999495 - RNA, 19 nt, Artificial Sequence
  Description of Artificial Sequence: Synthetic oligonucleotide
aaaacugcgcagauguaga

SEQ ID NO: 1999496 - RNA, 19 nt, Artificial Sequence
  Description of Artificial Sequence: Synthetic oligonucleotide
aguaguggcaucaucagaa

SEQ ID NO: 1999497 - RNA, 19 nt, Artificial Sequence
  Description of Artificial Sequence: Synthetic oligonucleotide
ucacacauaaugucacuaa

SEQ ID NO: 1999498 - RNA, 19 nt, Artificial Sequence
  Description of Artificial Sequence: Synthetic oligonucleotide
cuaagugaaugucaucauc

SEQ ID NO: 1999499 - RNA, 19 nt, Artificial Sequence
  Description of Artificial Sequence: Synthetic oligonucleotide
gaaguuguucugucuuugc

SEQ ID NO: 1999500 - RNA, 19 nt, Artificial Sequence
  Description of Artificial Sequence: Synthetic oligonucleotide
aucuaauauguucaacaaa

SEQ ID NO: 1999501 - RNA, 19 nt, Artificial Sequence
  Description of Artificial Sequence: Synthetic oligonucleotide
uucgaaguuguucugucuu

SEQ ID NO: 1999502 - RNA, 19 nt, Artificial Sequence
  Description of Artificial Sequence: Synthetic oligonucleotide
aagcucucuuugcugaaca

SEQ ID NO: 1999503 - RNA, 19 nt, Artificial Sequence
  Description of Artificial Sequence: Synthetic oligonucleotide
aaagugguuuucauuuucu

SEQ ID NO: 1999504 - RNA, 19 nt, Artificial Sequence
  Description of Artificial Sequence: Synthetic oligonucleotide
ucccacuuguugaacagac

SEQ ID NO: 1999505 - RNA, 19 nt, Artificial Sequence
  Description of Artificial Sequence: Synthetic oligonucleotide
guagagaagagcuuuauuu

SEQ ID NO: 1999506 - RNA, 19 nt, Artificial Sequence
  Description of Artificial Sequence: Synthetic oligonucleotide
cacuaagugaaugucauca

SEQ ID NO: 1999507 - RNA, 19 nt, Artificial Sequence
  Description of Artificial Sequence: Synthetic oligonucleotide
caagguagaucuaauaugu

SEQ ID NO: 1999508 - RNA, 19 nt, Artificial Sequence
  Description of Artificial Sequence: Synthetic oligonucleotide
acaaugugacaaguagugg

SEQ ID NO: 1999509 - RNA, 19 nt, Artificial Sequence
  Description of Artificial Sequence: Synthetic oligonucleotide
gugcucucggaccagcucg

SEQ ID NO: 1999510 - RNA, 19 nt, Artificial Sequence
  Description of Artificial Sequence: Synthetic oligonucleotide
agacugaccucugagaagu

SEQ ID NO: 1999511 - RNA, 19 nt, Artificial Sequence
  Description of Artificial Sequence: Synthetic oligonucleotide
uauucgaaguuguucuguc

SEQ ID NO: 1999512 - RNA, 19 nt, Artificial Sequence
  Description of Artificial Sequence: Synthetic oligonucleotide
gacagcgaugccauaaaug

SEQ ID NO: 1999513 - RNA, 19 nt, Artificial Sequence
  Description of Artificial Sequence: Synthetic oligonucleotide
agaggagaaguagaaaggu

SEQ ID NO: 1999514 - RNA, 19 nt, Artificial Sequence
  Description of Artificial Sequence: Synthetic oligonucleotide
aaggauuuuauggcacuca

SEQ ID NO: 1999515 - RNA, 19 nt, Artificial Sequence
  Description of Artificial Sequence: Synthetic oligonucleotide
aaagaccguaagcaaggaa

SEQ ID NO: 1999516 - RNA, 19 nt, Artificial Sequence
  Description of Artificial Sequence: Synthetic oligonucleotide
cuuguugaacagacugacc

SEQ ID NO: 1999517 - RNA, 19 nt, Artificial Sequence
  Description of Artificial Sequence: Synthetic oligonucleotide
ugaacagacugaccucuga

SEQ ID NO: 1999518 - RNA, 19 nt, Artificial Sequence
  Description of Artificial Sequence: Synthetic oligonucleotide
aggcucuguaaaucucugc

SEQ ID NO: 1999519 - RNA, 19 nt, Artificial Sequence
  Description of Artificial Sequence: Synthetic oligonucleotide
augucacuaagugaauguc

SEQ ID NO: 1999520 - RNA, 19 nt, Artificial Sequence
  Description of Artificial Sequence: Synthetic oligonucleotide
acaguauauuugcuggaga

SEQ ID NO: 1999521 - RNA, 19 nt, Artificial Sequence
  Description of Artificial Sequence: Synthetic oligonucleotide
cuaguauuugcuugucauc

SEQ ID NO: 1999522 - RNA, 19 nt, Artificial Sequence
  Description of Artificial Sequence: Synthetic oligonucleotide
gguagaucuaauauguuca

SEQ ID NO: 1999523 - RNA, 19 nt, Artificial Sequence
  Description of Artificial Sequence: Synthetic oligonucleotide
auccacauguggaaauggc

SEQ ID NO: 1999524 - RNA, 19 nt, Artificial Sequence
  Description of Artificial Sequence: Synthetic oligonucleotide
aaguaaaacugcgcagaug

SEQ ID NO: 1999525 - RNA, 19 nt, Artificial Sequence
  Description of Artificial Sequence: Synthetic oligonucleotide
accguaagcaaggaagaag

SEQ ID NO: 1999526 - RNA, 19 nt, Artificial Sequence
  Description of Artificial Sequence: Synthetic oligonucleotide
ccagaauggagauggagcc

SEQ ID NO: 1999527 - RNA, 19 nt, Artificial Sequence
  Description of Artificial Sequence: Synthetic oligonucleotide
uuugcuggagaugggaauc

SEQ ID NO: 1999528 - RNA, 19 nt, Artificial Sequence
  Description of Artificial Sequence: Synthetic oligonucleotide
uguagagaagagcuuuauu

SEQ ID NO: 1999529 - RNA, 19 nt, Artificial Sequence
  Description of Artificial Sequence: Synthetic oligonucleotide
uguugaacagacugaccuc

SEQ ID NO: 1999530 - RNA, 19 nt, Artificial Sequence
  Description of Artificial Sequence: Synthetic oligonucleotide
uugggguggucacugcaag

SEQ ID NO: 1999531 - RNA, 19 nt, Artificial Sequence
  Description of Artificial Sequence: Synthetic oligonucleotide
augcuaaucaucgggccuc

SEQ ID NO: 1999532 - RNA, 19 nt, Artificial Sequence
  Description of Artificial Sequence: Synthetic oligonucleotide
ugaucagaaaaggauuuua

SEQ ID NO: 1999533 - RNA, 19 nt, Artificial Sequence
  Description of Artificial Sequence: Synthetic oligonucleotide
agagcuuuauuuccaggaa

SEQ ID NO: 1999534 - RNA, 19 nt, Artificial Sequence
  Description of Artificial Sequence: Synthetic oligonucleotide
auuggaaagugguuuucau

SEQ ID NO: 1999535 - RNA, 19 nt, Artificial Sequence
  Description of Artificial Sequence: Synthetic oligonucleotide
guaaguuucugugacagcu

SEQ ID NO: 1999536 - RNA, 19 nt, Artificial Sequence
  Description of Artificial Sequence: Synthetic oligonucleotide
uccugcuaaagcucuggca

SEQ ID NO: 1999537 - RNA, 19 nt, Artificial Sequence
  Description of Artificial Sequence: Synthetic oligonucleotide
ucgccuaagccgcugccag

SEQ ID NO: 1999538 - RNA, 19 nt, Artificial Sequence
  Description of Artificial Sequence: Synthetic oligonucleotide
aaucaucgggccuccugcu

SEQ ID NO: 1999539 - RNA, 19 nt, Artificial Sequence
  Description of Artificial Sequence: Synthetic oligonucleotide
uuugggguggucacugcaa

SEQ ID NO: 1999540 - RNA, 19 nt, Artificial Sequence
  Description of Artificial Sequence: Synthetic oligonucleotide
accaauggucucuaucaga

SEQ ID NO: 1999541 - RNA, 19 nt, Artificial Sequence
  Description of Artificial Sequence: Synthetic oligonucleotide
ggggacuucagcuuuggug

SEQ ID NO: 1999542 - RNA, 19 nt, Artificial Sequence
  Description of Artificial Sequence: Synthetic oligonucleotide
ucacugcaagcucucuuug

SEQ ID NO: 1999543 - RNA, 19 nt, Artificial Sequence
  Description of Artificial Sequence: Synthetic oligonucleotide
auauuugcuggagauggga

SEQ ID NO: 1999544 - RNA, 19 nt, Artificial Sequence
  Description of Artificial Sequence: Synthetic oligonucleotide
cuaagccgcugccaggccg

SEQ ID NO: 1999545 - RNA, 19 nt, Artificial Sequence
  Description of Artificial Sequence: Synthetic oligonucleotide
auacgggccuauucgaagu

SEQ ID NO: 1999546 - RNA, 19 nt, Artificial Sequence
  Description of Artificial Sequence: Synthetic oligonucleotide
aggauuuuauggcacucau

SEQ ID NO: 1999547 - RNA, 19 nt, Artificial Sequence
  Description of Artificial Sequence: Synthetic oligonucleotide
auuuuauggcacucauuau

SEQ ID NO: 1999548 - RNA, 19 nt, Artificial Sequence
  Description of Artificial Sequence: Synthetic oligonucleotide
acuaagugaaugucaucau

SEQ ID NO: 1999549 - RNA, 19 nt, Artificial Sequence
  Description of Artificial Sequence: Synthetic oligonucleotide
cuaaucaucgggccuccug

SEQ ID NO: 1999550 - RNA, 19 nt, Artificial Sequence
  Description of Artificial Sequence: Synthetic oligonucleotide
ugcaaccagaaauccacau

SEQ ID NO: 1999551 - RNA, 19 nt, Artificial Sequence
  Description of Artificial Sequence: Synthetic oligonucleotide
aaacugcgcagauguagau

SEQ ID NO: 1999552 - RNA, 19 nt, Artificial Sequence
  Description of Artificial Sequence: Synthetic oligonucleotide
auuaucaaggggacuucag

SEQ ID NO: 1999553 - RNA, 19 nt, Artificial Sequence
  Description of Artificial Sequence: Synthetic oligonucleotide
cuucccggucauuuaauuc

SEQ ID NO: 1999554 - RNA, 19 nt, Artificial Sequence
  Description of Artificial Sequence: Synthetic oligonucleotide
guaagcaaggaagaaguaa

SEQ ID NO: 1999555 - RNA, 19 nt, Artificial Sequence
  Description of Artificial Sequence: Synthetic oligonucleotide
gauuggaaagugguuuuca

SEQ ID NO: 1999556 - RNA, 19 nt, Artificial Sequence
  Description of Artificial Sequence: Synthetic oligonucleotide
aaaugauuggaaagugguu

SEQ ID NO: 1999557 - RNA, 19 nt, Artificial Sequence
  Description of Artificial Sequence: Synthetic oligonucleotide
guagaaagguucucuagua

SEQ ID NO: 1999558 - RNA, 19 nt, Artificial Sequence
  Description of Artificial Sequence: Synthetic oligonucleotide
gagcuuuauuuccaggaaa

SEQ ID NO: 1999559 - RNA, 19 nt, Artificial Sequence
  Description of Artificial Sequence: Synthetic oligonucleotide
uagaucuaauauguucaac

SEQ ID NO: 1999560 - RNA, 19 nt, Artificial Sequence
  Description of Artificial Sequence: Synthetic oligonucleotide
uacagaaggcccugggguc

SEQ ID NO: 1999561 - RNA, 19 nt, Artificial Sequence
  Description of Artificial Sequence: Synthetic oligonucleotide
guagauuccaaaccaccaa

SEQ ID NO: 1999562 - RNA, 19 nt, Artificial Sequence
  Description of Artificial Sequence: Synthetic oligonucleotide
ccuggagagaucuuuuccc

SEQ ID NO: 1999563 - RNA, 19 nt, Artificial Sequence
  Description of Artificial Sequence: Synthetic oligonucleotide
ugugacaaguaguggcauc

SEQ ID NO: 1999564 - RNA, 19 nt, Artificial Sequence
  Description of Artificial Sequence: Synthetic oligonucleotide
caucacugaagccucccac

SEQ ID NO: 1999565 - RNA, 19 nt, Artificial Sequence
  Description of Artificial Sequence: Synthetic oligonucleotide
ucccggucauuuaauucug

SEQ ID NO: 1999566 - RNA, 19 nt, Artificial Sequence
  Description of Artificial Sequence: Synthetic oligonucleotide
uugacagcgaugccauaaa

SEQ ID NO: 1999567 - RNA, 19 nt, Artificial Sequence
  Description of Artificial Sequence: Synthetic oligonucleotide
ugcuaaagcucuggcagca

SEQ ID NO: 1999568 - RNA, 19 nt, Artificial Sequence
  Description of Artificial Sequence: Synthetic oligonucleotide
ugucacacauaaugucacu

SEQ ID NO: 1999569 - RNA, 19 nt, Artificial Sequence
  Description of Artificial Sequence: Synthetic oligonucleotide
aaaucucugcagucuuaau

SEQ ID NO: 1999570 - RNA, 19 nt, Artificial Sequence
  Description of Artificial Sequence: Synthetic oligonucleotide
ucaucgggccuccugcuaa

SEQ ID NO: 1999571 - RNA, 19 nt, Artificial Sequence
  Description of Artificial Sequence: Synthetic oligonucleotide
gacaaguaguggcaucauc

SEQ ID NO: 1999572 - RNA, 19 nt, Artificial Sequence
  Description of Artificial Sequence: Synthetic oligonucleotide
uucugugacagcugccuau

SEQ ID NO: 1999573 - RNA, 19 nt, Artificial Sequence
  Description of Artificial Sequence: Synthetic oligonucleotide
gagagaucuuuucccauaa

SEQ ID NO: 1999574 - RNA, 19 nt, Artificial Sequence
  Description of Artificial Sequence: Synthetic oligonucleotide
aauucacuaagaagcugau

SEQ ID NO: 1999575 - RNA, 19 nt, Artificial Sequence
  Description of Artificial Sequence: Synthetic oligonucleotide
cauccuuugggguggucac

SEQ ID NO: 1999576 - RNA, 19 nt, Artificial Sequence
  Description of Artificial Sequence: Synthetic oligonucleotide
ggcacucauuaucaagggg

SEQ ID NO: 1999577 - RNA, 19 nt, Artificial Sequence
  Description of Artificial Sequence: Synthetic oligonucleotide
ggaagaaguaaaacugcgc

SEQ ID NO: 1999578 - RNA, 19 nt, Artificial Sequence
  Description of Artificial Sequence: Synthetic oligonucleotide
uggugucaguuccaucaca

SEQ ID NO: 1999579 - RNA, 19 nt, Artificial Sequence
  Description of Artificial Sequence: Synthetic oligonucleotide
uaagccgcugccaggccga

SEQ ID NO: 1999580 - RNA, 19 nt, Artificial Sequence
  Description of Artificial Sequence: Synthetic oligonucleotide
cacugcaagcucucuuugc

SEQ ID NO: 1999581 - RNA, 19 nt, Artificial Sequence
  Description of Artificial Sequence: Synthetic oligonucleotide
aggcagguugccccauuac

SEQ ID NO: 1999582 - RNA, 19 nt, Artificial Sequence
  Description of Artificial Sequence: Synthetic oligonucleotide
guagaucuaauauguucaa

SEQ ID NO: 1999583 - RNA, 19 nt, Artificial Sequence
  Description of Artificial Sequence: Synthetic oligonucleotide
aucaaggggacuucagcuu

SEQ ID NO: 1999584 - RNA, 19 nt, Artificial Sequence
  Description of Artificial Sequence: Synthetic oligonucleotide
ggcucuuuccuccagcgac

SEQ ID NO: 1999585 - RNA, 19 nt, Artificial Sequence
  Description of Artificial Sequence: Synthetic oligonucleotide
ggagccauccuuuggggug

SEQ ID NO: 1999586 - RNA, 19 nt, Artificial Sequence
  Description of Artificial Sequence: Synthetic oligonucleotide
aaccagaaauccacaugug

SEQ ID NO: 1999587 - RNA, 19 nt, Artificial Sequence
  Description of Artificial Sequence: Synthetic oligonucleotide
agaaauccacauguggaaa

SEQ ID NO: 1999588 - RNA, 19 nt, Artificial Sequence
  Description of Artificial Sequence: Synthetic oligonucleotide
gcugcaaccagaaauccac

SEQ ID NO: 1999589 - RNA, 19 nt, Artificial Sequence
  Description of Artificial Sequence: Synthetic oligonucleotide
agcgaugccauaaaugauu

SEQ ID NO: 1999590 - RNA, 19 nt, Artificial Sequence
  Description of Artificial Sequence: Synthetic oligonucleotide
uuauggcacucauuaucaa

SEQ ID NO: 1999591 - RNA, 19 nt, Artificial Sequence
  Description of Artificial Sequence: Synthetic oligonucleotide
gcacucauuaucaagggga

SEQ ID NO: 1999592 - RNA, 19 nt, Artificial Sequence
  Description of Artificial Sequence: Synthetic oligonucleotide
gucaguuccaucacaaugu

SEQ ID NO: 1999593 - RNA, 19 nt, Artificial Sequence
  Description of Artificial Sequence: Synthetic oligonucleotide
ugacagcgaugccauaaau

SEQ ID NO: 1999594 - RNA, 19 nt, Artificial Sequence
  Description of Artificial Sequence: Synthetic oligonucleotide
ucacuaagugaaugucauc

SEQ ID NO: 1999595 - RNA, 19 nt, Artificial Sequence
  Description of Artificial Sequence: Synthetic oligonucleotide
auucacuaagaagcugaug

SEQ ID NO: 1999596 - RNA, 19 nt, Artificial Sequence
  Description of Artificial Sequence: Synthetic oligonucleotide
ugcgcagauguagauucca

SEQ ID NO: 1999597 - RNA, 19 nt, Artificial Sequence
  Description of Artificial Sequence: Synthetic oligonucleotide
ucccauaaaccaucuucau

SEQ ID NO: 1999598 - RNA, 19 nt, Artificial Sequence
  Description of Artificial Sequence: Synthetic oligonucleotide
uggagagaucuuuucccau

SEQ ID NO: 1999599 - RNA, 19 nt, Artificial Sequence
  Description of Artificial Sequence: Synthetic oligonucleotide
cuaauauguucaacaaagu

SEQ ID NO: 1999600 - RNA, 19 nt, Artificial Sequence
  Description of Artificial Sequence: Synthetic oligonucleotide
ugauuggaaagugguuuuc

SEQ ID NO: 1999601 - RNA, 19 nt, Artificial Sequence
  Description of Artificial Sequence: Synthetic oligonucleotide
ucuucccggucauuuaauu

SEQ ID NO: 1999602 - RNA, 19 nt, Artificial Sequence
  Description of Artificial Sequence: Synthetic oligonucleotide
aaggugcacuuccagccuu

SEQ ID NO: 1999603 - RNA, 19 nt, Artificial Sequence
  Description of Artificial Sequence: Synthetic oligonucleotide
uaauucugucacacauaau

SEQ ID NO: 1999604 - RNA, 19 nt, Artificial Sequence
  Description of Artificial Sequence: Synthetic oligonucleotide
guugacagcgaugccauaa

SEQ ID NO: 1999605 - RNA, 19 nt, Artificial Sequence
  Description of Artificial Sequence: Synthetic oligonucleotide
agaccguaagcaaggaaga

SEQ ID NO: 1999606 - RNA, 19 nt, Artificial Sequence
  Description of Artificial Sequence: Synthetic oligonucleotide
gaaauggcguccaggaaua

SEQ ID NO: 1999607 - RNA, 19 nt, Artificial Sequence
  Description of Artificial Sequence: Synthetic oligonucleotide
uuguagagaagagcuuuau

SEQ ID NO: 1999608 - RNA, 19 nt, Artificial Sequence
  Description of Artificial Sequence: Synthetic oligonucleotide
agguucucuaguauuugcu

SEQ ID NO: 1999609 - RNA, 19 nt, Artificial Sequence
  Description of Artificial Sequence: Synthetic oligonucleotide
ucgaaguuguucugucuuu

SEQ ID NO: 1999610 - RNA, 19 nt, Artificial Sequence
  Description of Artificial Sequence: Synthetic oligonucleotide
caucauaaaugcuaaucau

SEQ ID NO: 1999611 - RNA, 19 nt, Artificial Sequence
  Description of Artificial Sequence: Synthetic oligonucleotide
gaucagaaaaggauuuuau

SEQ ID NO: 1999612 - RNA, 19 nt, Artificial Sequence
  Description of Artificial Sequence: Synthetic oligonucleotide
uucuucccggucauuuaau

SEQ ID NO: 1999613 - RNA, 19 nt, Artificial Sequence
  Description of Artificial Sequence: Synthetic oligonucleotide
guuaguucccuggagagau

SEQ ID NO: 1999614 - RNA, 19 nt, Artificial Sequence
  Description of Artificial Sequence: Synthetic oligonucleotide
cccauuaccuguaugccuc

SEQ ID NO: 1999615 - RNA, 19 nt, Artificial Sequence
  Description of Artificial Sequence: Synthetic oligonucleotide
uuuucccauaaaccaucuu

SEQ ID NO: 1999616 - RNA, 19 nt, Artificial Sequence
  Description of Artificial Sequence: Synthetic oligonucleotide
gacgggugcucucggacca

SEQ ID NO: 1999617 - RNA, 19 nt, Artificial Sequence
  Description of Artificial Sequence: Synthetic oligonucleotide
caucuugcugcaaccagaa

SEQ ID NO: 1999618 - RNA, 19 nt, Artificial Sequence
  Description of Artificial Sequence: Synthetic oligonucleotide
gaaagguucucuaguauuu

SEQ ID NO: 1999619 - RNA, 19 nt, Artificial Sequence
  Description of Artificial Sequence: Synthetic oligonucleotide
agcggggcagccguacucg

SEQ ID NO: 1999620 - RNA, 19 nt, Artificial Sequence
  Description of Artificial Sequence: Synthetic oligonucleotide
aacugcgcagauguagauu

SEQ ID NO: 1999621 - RNA, 19 nt, Artificial Sequence
  Description of Artificial Sequence: Synthetic oligonucleotide
gccuuccacacucagugug

SEQ ID NO: 1999622 - RNA, 19 nt, Artificial Sequence
  Description of Artificial Sequence: Synthetic oligonucleotide
cuggggucccacuuguuga

SEQ ID NO: 1999623 - RNA, 19 nt, Artificial Sequence
  Description of Artificial Sequence: Synthetic oligonucleotide
gaaagaccguaagcaagga

SEQ ID NO: 1999624 - RNA, 19 nt, Artificial Sequence
  Description of Artificial Sequence: Synthetic oligonucleotide
uggcucuuuccuccagcga

SEQ ID NO: 1999625 - RNA, 19 nt, Artificial Sequence
  Description of Artificial Sequence: Synthetic oligonucleotide
caaggggacuucagcuuug

SEQ ID NO: 1999626 - RNA, 19 nt, Artificial Sequence
  Description of Artificial Sequence: Synthetic oligonucleotide
agagaucuuuucccauaaa

SEQ ID NO: 1999627 - RNA, 19 nt, Artificial Sequence
  Description of Artificial Sequence: Synthetic oligonucleotide
gccuauucgaaguuguucu

SEQ ID NO: 1999628 - RNA, 19 nt, Artificial Sequence
  Description of Artificial Sequence: Synthetic oligonucleotide
ucggcagcggagcggggca

SEQ ID NO: 1999629 - RNA, 19 nt, Artificial Sequence
  Description of Artificial Sequence: Synthetic oligonucleotide
aagguagaucuaauauguu

SEQ ID NO: 1999630 - RNA, 19 nt, Artificial Sequence
  Description of Artificial Sequence: Synthetic oligonucleotide
uuaguucccuggagagauc

SEQ ID NO: 1999631 - RNA, 19 nt, Artificial Sequence
  Description of Artificial Sequence: Synthetic oligonucleotide
cacugaagccucccacaag

SEQ ID NO: 1999632 - RNA, 19 nt, Artificial Sequence
  Description of Artificial Sequence: Synthetic oligonucleotide
acucauuaucaaggggacu

SEQ ID NO: 1999633 - RNA, 19 nt, Artificial Sequence
  Description of Artificial Sequence: Synthetic oligonucleotide
agcggagcggggcagccgu

SEQ ID NO: 1999634 - RNA, 19 nt, Artificial Sequence
  Description of Artificial Sequence: Synthetic oligonucleotide
uggggucccacuuguugaa

SEQ ID NO: 1999635 - RNA, 19 nt, Artificial Sequence
  Description of Artificial Sequence: Synthetic oligonucleotide
uugcaucauaaaugcuaau

SEQ ID NO: 1999636 - RNA, 19 nt, Artificial Sequence
  Description of Artificial Sequence: Synthetic oligonucleotide
caucagaacccagaaugga

SEQ ID NO: 1999637 - RNA, 19 nt, Artificial Sequence
  Description of Artificial Sequence: Synthetic oligonucleotide
ugcuaaucaucgggccucc

SEQ ID NO: 1999638 - RNA, 19 nt, Artificial Sequence
  Description of Artificial Sequence: Synthetic oligonucleotide
cugcgcagauguagauucc

SEQ ID NO: 1999639 - RNA, 19 nt, Artificial Sequence
  Description of Artificial Sequence: Synthetic oligonucleotide
auguggaaauggcguccag

SEQ ID NO: 1999640 - RNA, 19 nt, Artificial Sequence
  Description of Artificial Sequence: Synthetic oligonucleotide
cauuaucaaggggacuuca

SEQ ID NO: 1999641 - RNA, 19 nt, Artificial Sequence
  Description of Artificial Sequence: Synthetic oligonucleotide
gucacacauaaugucacua

SEQ ID NO: 1999642 - RNA, 19 nt, Artificial Sequence
  Description of Artificial Sequence: Synthetic oligonucleotide
cucauuaucaaggggacuu

SEQ ID NO: 1999643 - RNA, 19 nt, Artificial Sequence
  Description of Artificial Sequence: Synthetic oligonucleotide
agcucucuuugcugaacau

SEQ ID NO: 1999644 - RNA, 19 nt, Artificial Sequence
  Description of Artificial Sequence: Synthetic oligonucleotide
caucgccuaagccgcugcc

SEQ ID NO: 1999645 - RNA, 19 nt, Artificial Sequence
  Description of Artificial Sequence: Synthetic oligonucleotide
gucuuaauguugacagcga

SEQ ID NO: 1999646 - RNA, 19 nt, Artificial Sequence
  Description of Artificial Sequence: Synthetic oligonucleotide
ugguaacuuugauguuagu

SEQ ID NO: 1999647 - RNA, 19 nt, Artificial Sequence
  Description of Artificial Sequence: Synthetic oligonucleotide
caggaccacaaugugacaa

SEQ ID NO: 1999648 - RNA, 19 nt, Artificial Sequence
  Description of Artificial Sequence: Synthetic oligonucleotide
ccaucacaaugugugaggc

SEQ ID NO: 1999649 - RNA, 19 nt, Artificial Sequence
  Description of Artificial Sequence: Synthetic oligonucleotide
ucuggaccaugaucuugaa

SEQ ID NO: 1999650 - RNA, 19 nt, Artificial Sequence
  Description of Artificial Sequence: Synthetic oligonucleotide
uguaugccucaggaccaca

SEQ ID NO: 1999651 - RNA, 19 nt, Artificial Sequence
  Description of Artificial Sequence: Synthetic oligonucleotide
uacgggccuauucgaaguu

SEQ ID NO: 1999652 - RNA, 19 nt, Artificial Sequence
  Description of Artificial Sequence: Synthetic oligonucleotide
ggcguccaggaauacgggc

SEQ ID NO: 1999653 - RNA, 19 nt, Artificial Sequence
  Description of Artificial Sequence: Synthetic oligonucleotide
guuguguucuuugguaacu

SEQ ID NO: 1999654 - RNA, 19 nt, Artificial Sequence
  Description of Artificial Sequence: Synthetic oligonucleotide
ggcagcacgaagcuguucu

SEQ ID NO: 1999655 - RNA, 19 nt, Artificial Sequence
  Description of Artificial Sequence: Synthetic oligonucleotide
cauuaccuguaugccucag

SEQ ID NO: 1999656 - RNA, 19 nt, Artificial Sequence
  Description of Artificial Sequence: Synthetic oligonucleotide
agcagcggcaucgccuaag

SEQ ID NO: 1999657 - RNA, 19 nt, Artificial Sequence
  Description of Artificial Sequence: Synthetic oligonucleotide
gguaacuuugauguuaguu

SEQ ID NO: 1999658 - RNA, 19 nt, Artificial Sequence
  Description of Artificial Sequence: Synthetic oligonucleotide
gcucuuuccuccagcgacg

SEQ ID NO: 1999659 - RNA, 19 nt, Artificial Sequence
  Description of Artificial Sequence: Synthetic oligonucleotide
augugacaaguaguggcau

SEQ ID NO: 1999660 - RNA, 19 nt, Artificial Sequence
  Description of Artificial Sequence: Synthetic oligonucleotide
ugacaaguaguggcaucau

SEQ ID NO: 1999661 - RNA, 19 nt, Artificial Sequence
  Description of Artificial Sequence: Synthetic oligonucleotide
ggagagaucuuuucccaua

SEQ ID NO: 1999662 - RNA, 19 nt, Artificial Sequence
  Description of Artificial Sequence: Synthetic oligonucleotide
cuuuucccauaaaccaucu

SEQ ID NO: 1999663 - RNA, 19 nt, Artificial Sequence
  Description of Artificial Sequence: Synthetic oligonucleotide
agccuuccacacucagugu

SEQ ID NO: 1999664 - RNA, 19 nt, Artificial Sequence
  Description of Artificial Sequence: Synthetic oligonucleotide
gucacugcaagcucucuuu

SEQ ID NO: 1999665 - RNA, 19 nt, Artificial Sequence
  Description of Artificial Sequence: Synthetic oligonucleotide
uccaggaauacgggccuau

SEQ ID NO: 1999666 - RNA, 19 nt, Artificial Sequence
  Description of Artificial Sequence: Synthetic oligonucleotide
aucgccuaagccgcugcca

SEQ ID NO: 1999667 - RNA, 19 nt, Artificial Sequence
  Description of Artificial Sequence: Synthetic oligonucleotide
cuguaaaucucugcagucu

SEQ ID NO: 1999668 - RNA, 19 nt, Artificial Sequence
  Description of Artificial Sequence: Synthetic oligonucleotide
agcugaugaguaaguuucu

SEQ ID NO: 1999669 - RNA, 19 nt, Artificial Sequence
  Description of Artificial Sequence: Synthetic oligonucleotide
gccuaucaucacugaagcc

SEQ ID NO: 1999670 - RNA, 19 nt, Artificial Sequence
  Description of Artificial Sequence: Synthetic oligonucleotide
acgggccuauucgaaguug

SEQ ID NO: 1999671 - RNA, 19 nt, Artificial Sequence
  Description of Artificial Sequence: Synthetic oligonucleotide
ggccuauucgaaguuguuc

SEQ ID NO: 1999672 - RNA, 19 nt, Artificial Sequence
  Description of Artificial Sequence: Synthetic oligonucleotide
gugugaucagaaaaggauu

SEQ ID NO: 1999673 - RNA, 19 nt, Artificial Sequence
  Description of Artificial Sequence: Synthetic oligonucleotide
gaccguaagcaaggaagaa

SEQ ID NO: 1999674 - RNA, 19 nt, Artificial Sequence
  Description of Artificial Sequence: Synthetic oligonucleotide
ccguaagcaaggaagaagu

SEQ ID NO: 1999675 - RNA, 19 nt, Artificial Sequence
  Description of Artificial Sequence: Synthetic oligonucleotide
gagcggggcagccguacuc

SEQ ID NO: 1999676 - RNA, 19 nt, Artificial Sequence
  Description of Artificial Sequence: Synthetic oligonucleotide
cacucagugugaucagaaa

SEQ ID NO: 1999677 - RNA, 19 nt, Artificial Sequence
  Description of Artificial Sequence: Synthetic oligonucleotide
gcggcaucgccuaagccgc

SEQ ID NO: 1999678 - RNA, 19 nt, Artificial Sequence
  Description of Artificial Sequence: Synthetic oligonucleotide
aaccaccaauggucucuau

SEQ ID NO: 1999679 - RNA, 19 nt, Artificial Sequence
  Description of Artificial Sequence: Synthetic oligonucleotide
ccuguaugccucaggacca

SEQ ID NO: 1999680 - RNA, 19 nt, Artificial Sequence
  Description of Artificial Sequence: Synthetic oligonucleotide
guaaaucucugcagucuua

SEQ ID NO: 1999681 - RNA, 19 nt, Artificial Sequence
  Description of Artificial Sequence: Synthetic oligonucleotide
ccggucauuuaauucuguc

SEQ ID NO: 1999682 - RNA, 19 nt, Artificial Sequence
  Description of Artificial Sequence: Synthetic oligonucleotide
ggagaaguagaaagguucu

SEQ ID NO: 1999683 - RNA, 19 nt, Artificial Sequence
  Description of Artificial Sequence: Synthetic oligonucleotide
gccucaggaccacaaugug

SEQ ID NO: 1999684 - RNA, 19 nt, Artificial Sequence
  Description of Artificial Sequence: Synthetic oligonucleotide
aucaucgggccuccugcua

SEQ ID NO: 1999685 - RNA, 19 nt, Artificial Sequence
  Description of Artificial Sequence: Synthetic oligonucleotide
gaggcagguugccccauua

SEQ ID NO: 1999686 - RNA, 19 nt, Artificial Sequence
  Description of Artificial Sequence: Synthetic oligonucleotide
cagaauggagauggagcca

SEQ ID NO: 1999687 - RNA, 19 nt, Artificial Sequence
  Description of Artificial Sequence: Synthetic oligonucleotide
guacucgccgcccguccac

SEQ ID NO: 1999688 - RNA, 19 nt, Artificial Sequence
  Description of Artificial Sequence: Synthetic oligonucleotide
guaugccucaggaccacaa

SEQ ID NO: 1999689 - RNA, 19 nt, Artificial Sequence
  Description of Artificial Sequence: Synthetic oligonucleotide
gccuaagccgcugccaggc

SEQ ID NO: 1999690 - RNA, 19 nt, Artificial Sequence
  Description of Artificial Sequence: Synthetic oligonucleotide
aggggacuucagcuuuggu

SEQ ID NO: 1999691 - RNA, 19 nt, Artificial Sequence
  Description of Artificial Sequence: Synthetic oligonucleotide
guucugucuuugcaucaua

SEQ ID NO: 1999692 - RNA, 19 nt, Artificial Sequence
  Description of Artificial Sequence: Synthetic oligonucleotide
gaccagcucggcagcggag

SEQ ID NO: 1999693 - RNA, 19 nt, Artificial Sequence
  Description of Artificial Sequence: Synthetic oligonucleotide
cuguaugccucaggaccac

SEQ ID NO: 1999694 - RNA, 19 nt, Artificial Sequence
  Description of Artificial Sequence: Synthetic oligonucleotide
agcgacgggugcucucgga

SEQ ID NO: 1999695 - RNA, 19 nt, Artificial Sequence
  Description of Artificial Sequence: Synthetic oligonucleotide
auggucucuaucagaucaa

SEQ ID NO: 1999696 - RNA, 19 nt, Artificial Sequence
  Description of Artificial Sequence: Synthetic oligonucleotide
gcagcggcaucgccuaagc

SEQ ID NO: 1999697 - RNA, 19 nt, Artificial Sequence
  Description of Artificial Sequence: Synthetic oligonucleotide
uacucgccgcccguccacc

SEQ ID NO: 1999698 - RNA, 19 nt, Artificial Sequence
  Description of Artificial Sequence: Synthetic oligonucleotide
uccagcgacgggugcucuc

SEQ ID NO: 1999699 - RNA, 19 nt, Artificial Sequence
  Description of Artificial Sequence: Synthetic oligonucleotide
gcugccuaucaucacugaa

SEQ ID NO: 1999700 - RNA, 19 nt, Artificial Sequence
  Description of Artificial Sequence: Synthetic oligonucleotide
aacccagaauggagaugga

SEQ ID NO: 1999701 - RNA, 19 nt, Artificial Sequence
  Description of Artificial Sequence: Synthetic oligonucleotide
agcuuuggugucaguucca

SEQ ID NO: 1999702 - RNA, 19 nt, Artificial Sequence
  Description of Artificial Sequence: Synthetic oligonucleotide
cgcccguccaccagcagcg

SEQ ID NO: 1999703 - RNA, 19 nt, Artificial Sequence
  Description of Artificial Sequence: Synthetic oligonucleotide
cucucggaccagcucggca

SEQ ID NO: 1999704 - RNA, 19 nt, Artificial Sequence
  Description of Artificial Sequence: Synthetic oligonucleotide
aucgggccuccugcuaaag

SEQ ID NO: 1999705 - RNA, 19 nt, Artificial Sequence
  Description of Artificial Sequence: Synthetic oligonucleotide
ccagcgacgggugcucucg

SEQ ID NO: 1999706 - RNA, 19 nt, Artificial Sequence
  Description of Artificial Sequence: Synthetic oligonucleotide
gcaucgccuaagccgcugc

SEQ ID NO: 1999707 - RNA, 19 nt, Artificial Sequence
  Description of Artificial Sequence: Synthetic oligonucleotide
gcgacgggugcucucggac

SEQ ID NO: 1999708 - RNA, 19 nt, Artificial Sequence
  Description of Artificial Sequence: Synthetic oligonucleotide
gugcacuuccagccuucca

SEQ ID NO: 1999709 - RNA, 19 nt, Artificial Sequence
  Description of Artificial Sequence: Synthetic oligonucleotide
cagcucggcagcggagcgg

SEQ ID NO: 1999710 - RNA, 19 nt, Artificial Sequence
  Description of Artificial Sequence: Synthetic oligonucleotide
cgaaguuguucugucuuug

SEQ ID NO: 1999711 - RNA, 19 nt, Artificial Sequence
  Description of Artificial Sequence: Synthetic oligonucleotide
gcagguugccccauuaccu

SEQ ID NO: 1999712 - RNA, 19 nt, Artificial Sequence
  Description of Artificial Sequence: Synthetic oligonucleotide
ggucucuaucagaucaaaa

SEQ ID NO: 1999713 - RNA, 19 nt, Artificial Sequence
  Description of Artificial Sequence: Synthetic oligonucleotide
ccacaaugugacaaguagu

SEQ ID NO: 1999714 - RNA, 19 nt, Artificial Sequence
  Description of Artificial Sequence: Synthetic oligonucleotide
gguggucacugcaagcucu

SEQ ID NO: 1999715 - RNA, 19 nt, Artificial Sequence
  Description of Artificial Sequence: Synthetic oligonucleotide
ccgcccguccaccagcagc

SEQ ID NO: 1999716 - RNA, 19 nt, Artificial Sequence
  Description of Artificial Sequence: Synthetic oligonucleotide
guucccuggagagaucuuu

SEQ ID NO: 1999717 - RNA, 19 nt, Artificial Sequence
  Description of Artificial Sequence: Synthetic oligonucleotide
gugaucagaaaaggauuuu

SEQ ID NO: 1999718 - RNA, 19 nt, Artificial Sequence
  Description of Artificial Sequence: Synthetic oligonucleotide
gaaggcccuggggucccac

SEQ ID NO: 1999719 - RNA, 19 nt, Artificial Sequence
  Description of Artificial Sequence: Synthetic oligonucleotide
cgacgggugcucucggacc

SEQ ID NO: 1999720 - RNA, 19 nt, Artificial Sequence
  Description of Artificial Sequence: Synthetic oligonucleotide
gcucucuuugcugaacaua

SEQ ID NO: 1999721 - RNA, 19 nt, Artificial Sequence
  Description of Artificial Sequence: Synthetic oligonucleotide
cagcggagcggggcagccg

SEQ ID NO: 1999722 - RNA, 19 nt, Artificial Sequence
  Description of Artificial Sequence: Synthetic oligonucleotide
gcuaaagcucuggcagcac

SEQ ID NO: 1999723 - RNA, 19 nt, Artificial Sequence
  Description of Artificial Sequence: Synthetic oligonucleotide
caucgggccuccugcuaaa

SEQ ID NO: 1999724 - RNA, 19 nt, Artificial Sequence
  Description of Artificial Sequence: Synthetic oligonucleotide
cucccacaaggugcacuuc

SEQ ID NO: 1999725 - RNA, 19 nt, Artificial Sequence
  Description of Artificial Sequence: Synthetic oligonucleotide
ccuaagccgcugccaggcc

SEQ ID NO: 1999726 - RNA, 19 nt, Artificial Sequence
  Description of Artificial Sequence: Synthetic oligonucleotide
ggcaucgccuaagccgcug

SEQ ID NO: 1999727 - RNA, 19 nt, Artificial Sequence
  Description of Artificial Sequence: Synthetic oligonucleotide
ggaccacaaugugacaagu

SEQ ID NO: 1999728 - RNA, 19 nt, Artificial Sequence
  Description of Artificial Sequence: Synthetic oligonucleotide
ccguacucgccgcccgucc

SEQ ID NO: 1999729 - RNA, 19 nt, Artificial Sequence
  Description of Artificial Sequence: Synthetic oligonucleotide
ggucacugcaagcucucuu

SEQ ID NO: 1999730 - RNA, 19 nt, Artificial Sequence
  Description of Artificial Sequence: Synthetic oligonucleotide
ccauuaccuguaugccuca

SEQ ID NO: 1999731 - RNA, 19 nt, Artificial Sequence
  Description of Artificial Sequence: Synthetic oligonucleotide
ggauuuuauggcacucauu

SEQ ID NO: 1999732 - RNA, 19 nt, Artificial Sequence
  Description of Artificial Sequence: Synthetic oligonucleotide
ccccauuaccuguaugccu

SEQ ID NO: 1999733 - RNA, 19 nt, Artificial Sequence
  Description of Artificial Sequence: Synthetic oligonucleotide
cgccuaagccgcugccagg

SEQ ID NO: 1999734 - RNA, 19 nt, Artificial Sequence
  Description of Artificial Sequence: Synthetic oligonucleotide
ggggucccacuuguugaac

SEQ ID NO: 1999735 - RNA, 19 nt, Artificial Sequence
  Description of Artificial Sequence: Synthetic oligonucleotide
gcggggcagccguacucgc

SEQ ID NO: 1999736 - RNA, 19 nt, Artificial Sequence
  Description of Artificial Sequence: Synthetic oligonucleotide
cguaagcaaggaagaagua

SEQ ID NO: 1999737 - RNA, 19 nt, Artificial Sequence
  Description of Artificial Sequence: Synthetic oligonucleotide
gcgcagauguagauuccaa

SEQ ID NO: 1999738 - RNA, 19 nt, Artificial Sequence
  Description of Artificial Sequence: Synthetic oligonucleotide
gcagcggagcggggcagcc

SEQ ID NO: 1999739 - RNA, 19 nt, Artificial Sequence
  Description of Artificial Sequence: Synthetic oligonucleotide
cggggcagccguacucgcc

SEQ ID NO: 1999740 - RNA, 19 nt, Artificial Sequence
  Description of Artificial Sequence: Synthetic oligonucleotide
ccagccuuccacacucagu

SEQ ID NO: 1999741 - RNA, 19 nt, Artificial Sequence
  Description of Artificial Sequence: Synthetic oligonucleotide
guccaggaauacgggccua

SEQ ID NO: 1999742 - RNA, 19 nt, Artificial Sequence
  Description of Artificial Sequence: Synthetic oligonucleotide
ggagcggggcagccguacu

SEQ ID NO: 1999743 - RNA, 19 nt, Artificial Sequence
  Description of Artificial Sequence: Synthetic oligonucleotide
gcccguccaccagcagcgg

SEQ ID NO: 1999744 - RNA, 19 nt, Artificial Sequence
  Description of Artificial Sequence: Synthetic oligonucleotide
gccguacucgccgcccguc

SEQ ID NO: 1999745 - RNA, 19 nt, Artificial Sequence
  Description of Artificial Sequence: Synthetic oligonucleotide
cgggccuauucgaaguugu

SEQ ID NO: 1999746 - RNA, 19 nt, Artificial Sequence
  Description of Artificial Sequence: Synthetic oligonucleotide
gccgcccguccaccagcag

SEQ ID NO: 1999747 - RNA, 19 nt, Artificial Sequence
  Description of Artificial Sequence: Synthetic oligonucleotide
cguacucgccgcccgucca

SEQ ID NO: 1999748 - RNA, 19 nt, Artificial Sequence
  Description of Artificial Sequence: Synthetic oligonucleotide
cccggucauuuaauucugu

SEQ ID NO: 1999749 - RNA, 19 nt, Artificial Sequence
  Description of Artificial Sequence: Synthetic oligonucleotide
cugagaagucuggcucuuu

SEQ ID NO: 1999750 - RNA, 19 nt, Artificial Sequence
  Description of Artificial Sequence: Synthetic oligonucleotide
gcucggcagcggagcgggg

SEQ ID NO: 1999751 - RNA, 19 nt, Artificial Sequence
  Description of Artificial Sequence: Synthetic oligonucleotide
cagcagcggcaucgccuaa

SEQ ID NO: 1999752 - RNA, 19 nt, Artificial Sequence
  Description of Artificial Sequence: Synthetic oligonucleotide
gcuaaucaucgggccuccu

SEQ ID NO: 1999753 - RNA, 19 nt, Artificial Sequence
  Description of Artificial Sequence: Synthetic oligonucleotide
gggccuauucgaaguuguu

SEQ ID NO: 1999754 - RNA, 19 nt, Artificial Sequence
  Description of Artificial Sequence: Synthetic oligonucleotide
cggcagcggagcggggcag

SEQ ID NO: 1999755 - RNA, 19 nt, Artificial Sequence
  Description of Artificial Sequence: Synthetic oligonucleotide
gcggagcggggcagccgua

SEQ ID NO: 1999756 - RNA, 19 nt, Artificial Sequence
  Description of Artificial Sequence: Synthetic oligonucleotide
cggcaucgccuaagccgcu

SEQ ID NO: 1999757 - RNA, 19 nt, Artificial Sequence
  Description of Artificial Sequence: Synthetic oligonucleotide
aaaugcauuuauuuaaagc

SEQ ID NO: 1999758 - RNA, 19 nt, Artificial Sequence
  Description of Artificial Sequence: Synthetic oligonucleotide
aaaacauaaggccacuugc

SEQ ID NO: 1999759 - RNA, 19 nt, Artificial Sequence
  Description of Artificial Sequence: Synthetic oligonucleotide
ucuuucacagacaauacag

SEQ ID NO: 1999760 - RNA, 19 nt, Artificial Sequence
  Description of Artificial Sequence: Synthetic oligonucleotide
aacaguuacagucccgggc

SEQ ID NO: 1999761 - RNA, 19 nt, Artificial Sequence
  Description of Artificial Sequence: Synthetic oligonucleotide
acacaaauuccucagcugc

SEQ ID NO: 1999762 - RNA, 19 nt, Artificial Sequence
  Description of Artificial Sequence: Synthetic oligonucleotide
cugaaggagacuaaggucc

SEQ ID NO: 1999763 - RNA, 19 nt, Artificial Sequence
  Description of Artificial Sequence: Synthetic oligonucleotide
aauacagugggcccagagg

SEQ ID NO: 1999764 - RNA, 19 nt, Artificial Sequence
  Description of Artificial Sequence: Synthetic oligonucleotide
ucuuguacauacacgauga

SEQ ID NO: 1999765 - RNA, 19 nt, Artificial Sequence
  Description of Artificial Sequence: Synthetic oligonucleotide
aacagccucuuguacauac

SEQ ID NO: 1999766 - RNA, 19 nt, Artificial Sequence
  Description of Artificial Sequence: Synthetic oligonucleotide
acagacaauacagugggcc

SEQ ID NO: 1999767 - RNA, 19 nt, Artificial Sequence
  Description of Artificial Sequence: Synthetic oligonucleotide
ugugggaucaagccgauca

SEQ ID NO: 1999768 - RNA, 19 nt, Artificial Sequence
  Description of Artificial Sequence: Synthetic oligonucleotide
gauaaugccugaauggucc

SEQ ID NO: 1999769 - RNA, 19 nt, Artificial Sequence
  Description of Artificial Sequence: Synthetic oligonucleotide
ugguuuauggagcugguga

SEQ ID NO: 1999770 - RNA, 19 nt, Artificial Sequence
  Description of Artificial Sequence: Synthetic oligonucleotide
aacauaaggccacuugcug

SEQ ID NO: 1999771 - RNA, 19 nt, Artificial Sequence
  Description of Artificial Sequence: Synthetic oligonucleotide
aguggauaaugccugaaug

SEQ ID NO: 1999772 - RNA, 19 nt, Artificial Sequence
  Description of Artificial Sequence: Synthetic oligonucleotide
aaacucugguuuauggagc

SEQ ID NO: 1999773 - RNA, 19 nt, Artificial Sequence
  Description of Artificial Sequence: Synthetic oligonucleotide
ugugauagagcgguguggg

SEQ ID NO: 1999774 - RNA, 19 nt, Artificial Sequence
  Description of Artificial Sequence: Synthetic oligonucleotide
augacagugugguuggaac

SEQ ID NO: 1999775 - RNA, 19 nt, Artificial Sequence
  Description of Artificial Sequence: Synthetic oligonucleotide
ugucucaaugcccuccacg

SEQ ID NO: 1999776 - RNA, 19 nt, Artificial Sequence
  Description of Artificial Sequence: Synthetic oligonucleotide
caucaugggucucugaacc

SEQ ID NO: 1999777 - RNA, 19 nt, Artificial Sequence
  Description of Artificial Sequence: Synthetic oligonucleotide
cugaagagcagccaccgcg

SEQ ID NO: 1999778 - RNA, 19 nt, Artificial Sequence
  Description of Artificial Sequence: Synthetic oligonucleotide
uguaucucagguccugaag

SEQ ID NO: 1999779 - RNA, 19 nt, Artificial Sequence
  Description of Artificial Sequence: Synthetic oligonucleotide
uccacuuccggacacacaa

SEQ ID NO: 1999780 - RNA, 19 nt, Artificial Sequence
  Description of Artificial Sequence: Synthetic oligonucleotide
auacagugggcccagagga

SEQ ID NO: 1999781 - RNA, 19 nt, Artificial Sequence
  Description of Artificial Sequence: Synthetic oligonucleotide
cagaaacucugguuuaugg

SEQ ID NO: 1999782 - RNA, 19 nt, Artificial Sequence
  Description of Artificial Sequence: Synthetic oligonucleotide
aagcagaaaggacuccaag

SEQ ID NO: 1999783 - RNA, 19 nt, Artificial Sequence
  Description of Artificial Sequence: Synthetic oligonucleotide
uacauacacgaugaacucg

SEQ ID NO: 1999784 - RNA, 19 nt, Artificial Sequence
  Description of Artificial Sequence: Synthetic oligonucleotide
cuuccggacacacaaauuc

SEQ ID NO: 1999785 - RNA, 19 nt, Artificial Sequence
  Description of Artificial Sequence: Synthetic oligonucleotide
cuugagcacauccacuucc

SEQ ID NO: 1999786 - RNA, 19 nt, Artificial Sequence
  Description of Artificial Sequence: Synthetic oligonucleotide
uggaucaugacaguguggu

SEQ ID NO: 1999787 - RNA, 19 nt, Artificial Sequence
  Description of Artificial Sequence: Synthetic oligonucleotide
aggacuccaagcugggccc

SEQ ID NO: 1999788 - RNA, 19 nt, Artificial Sequence
  Description of Artificial Sequence: Synthetic oligonucleotide
acauacacgaugaacucgg

SEQ ID NO: 1999789 - RNA, 19 nt, Artificial Sequence
  Description of Artificial Sequence: Synthetic oligonucleotide
aacucggaggccuccccgc

SEQ ID NO: 1999790 - RNA, 19 nt, Artificial Sequence
  Description of Artificial Sequence: Synthetic oligonucleotide
ucagcggaaaggcuugaag

SEQ ID NO: 1999791 - RNA, 19 nt, Artificial Sequence
  Description of Artificial Sequence: Synthetic oligonucleotide
aagccgaucaccacucucg

SEQ ID NO: 1999792 - RNA, 19 nt, Artificial Sequence
  Description of Artificial Sequence: Synthetic oligonucleotide
agacuaagguccucuagag

SEQ ID NO: 1999793 - RNA, 19 nt, Artificial Sequence
  Description of Artificial Sequence: Synthetic oligonucleotide
ggagguguaucucaggucc

SEQ ID NO: 1999794 - RNA, 19 nt, Artificial Sequence
  Description of Artificial Sequence: Synthetic oligonucleotide
agcuugugggaucaagccg

SEQ ID NO: 1999795 - RNA, 19 nt, Artificial Sequence
  Description of Artificial Sequence: Synthetic oligonucleotide
aacucugguuuauggagcu

SEQ ID NO: 1999796 - RNA, 19 nt, Artificial Sequence
  Description of Artificial Sequence: Synthetic oligonucleotide
ucuugagacagauggcaca

SEQ ID NO: 1999797 - RNA, 19 nt, Artificial Sequence
  Description of Artificial Sequence: Synthetic oligonucleotide
gagacuaagguccucuaga

SEQ ID NO: 1999798 - RNA, 19 nt, Artificial Sequence
  Description of Artificial Sequence: Synthetic oligonucleotide
cucuuguacauacacgaug

SEQ ID NO: 1999799 - RNA, 19 nt, Artificial Sequence
  Description of Artificial Sequence: Synthetic oligonucleotide
uuuauggagcuggugaaga

SEQ ID NO: 1999800 - RNA, 19 nt, Artificial Sequence
  Description of Artificial Sequence: Synthetic oligonucleotide
aauuccucagcugccagcu

SEQ ID NO: 1999801 - RNA, 19 nt, Artificial Sequence
  Description of Artificial Sequence: Synthetic oligonucleotide
ucaucggugaccuguuuca

SEQ ID NO: 1999802 - RNA, 19 nt, Artificial Sequence
  Description of Artificial Sequence: Synthetic oligonucleotide
acagcuugugggaucaagc

SEQ ID NO: 1999803 - RNA, 19 nt, Artificial Sequence
  Description of Artificial Sequence: Synthetic oligonucleotide
uuccggacacacaaauucc

SEQ ID NO: 1999804 - RNA, 19 nt, Artificial Sequence
  Description of Artificial Sequence: Synthetic oligonucleotide
aggaugagcaccuggggug

SEQ ID NO: 1999805 - RNA, 19 nt, Artificial Sequence
  Description of Artificial Sequence: Synthetic oligonucleotide
aaacauaaggccacuugcu

SEQ ID NO: 1999806 - RNA, 19 nt, Artificial Sequence
  Description of Artificial Sequence: Synthetic oligonucleotide
uguugcuucucccggggcc

SEQ ID NO: 1999807 - RNA, 19 nt, Artificial Sequence
  Description of Artificial Sequence: Synthetic oligonucleotide
acccaacucaaugaucugc

SEQ ID NO: 1999808 - RNA, 19 nt, Artificial Sequence
  Description of Artificial Sequence: Synthetic oligonucleotide
cacggcaguggcaucaugg

SEQ ID NO: 1999809 - RNA, 19 nt, Artificial Sequence
  Description of Artificial Sequence: Synthetic oligonucleotide
ugcucggcuagcuccaccg

SEQ ID NO: 1999810 - RNA, 19 nt, Artificial Sequence
  Description of Artificial Sequence: Synthetic oligonucleotide
acauaaggccacuugcugu

SEQ ID NO: 1999811 - RNA, 19 nt, Artificial Sequence
  Description of Artificial Sequence: Synthetic oligonucleotide
gacgaacuucuugagacag

SEQ ID NO: 1999812 - RNA, 19 nt, Artificial Sequence
  Description of Artificial Sequence: Synthetic oligonucleotide
uggauaaugccugaauggu

SEQ ID NO: 1999813 - RNA, 19 nt, Artificial Sequence
  Description of Artificial Sequence: Synthetic oligonucleotide
cauaaggccacuugcugug

SEQ ID NO: 1999814 - RNA, 19 nt, Artificial Sequence
  Description of Artificial Sequence: Synthetic oligonucleotide
ugaaugguccuaacccacc

SEQ ID NO: 1999815 - RNA, 19 nt, Artificial Sequence
  Description of Artificial Sequence: Synthetic oligonucleotide
ucggagguguaucucaggu

SEQ ID NO: 1999816 - RNA, 19 nt, Artificial Sequence
  Description of Artificial Sequence: Synthetic oligonucleotide
ugauagagcggugugggga

SEQ ID NO: 1999817 - RNA, 19 nt, Artificial Sequence
  Description of Artificial Sequence: Synthetic oligonucleotide
cagacaauacagugggccc

SEQ ID NO: 1999818 - RNA, 19 nt, Artificial Sequence
  Description of Artificial Sequence: Synthetic oligonucleotide
uuguacauacacgaugaac

SEQ ID NO: 1999819 - RNA, 19 nt, Artificial Sequence
  Description of Artificial Sequence: Synthetic oligonucleotide
ugcaccucucggaugugcg

SEQ ID NO: 1999820 - RNA, 19 nt, Artificial Sequence
  Description of Artificial Sequence: Synthetic oligonucleotide
guaucucagguccugaaga

SEQ ID NO: 1999821 - RNA, 19 nt, Artificial Sequence
  Description of Artificial Sequence: Synthetic oligonucleotide
auacacgaugaacucggag

SEQ ID NO: 1999822 - RNA, 19 nt, Artificial Sequence
  Description of Artificial Sequence: Synthetic oligonucleotide
ucggcuagcuccaccgagg

SEQ ID NO: 1999823 - RNA, 19 nt, Artificial Sequence
  Description of Artificial Sequence: Synthetic oligonucleotide
ugguguuugucucucuuuc

SEQ ID NO: 1999824 - RNA, 19 nt, Artificial Sequence
  Description of Artificial Sequence: Synthetic oligonucleotide
uguuugucucucuuucaca

SEQ ID NO: 1999825 - RNA, 19 nt, Artificial Sequence
  Description of Artificial Sequence: Synthetic oligonucleotide
ugaccuguuucacaacagu

SEQ ID NO: 1999826 - RNA, 19 nt, Artificial Sequence
  Description of Artificial Sequence: Synthetic oligonucleotide
uugugauagagcggugugg

SEQ ID NO: 1999827 - RNA, 19 nt, Artificial Sequence
  Description of Artificial Sequence: Synthetic oligonucleotide
agccugauggagcugacga

SEQ ID NO: 1999828 - RNA, 19 nt, Artificial Sequence
  Description of Artificial Sequence: Synthetic oligonucleotide
gauagagcgguguggggac

SEQ ID NO: 1999829 - RNA, 19 nt, Artificial Sequence
  Description of Artificial Sequence: Synthetic oligonucleotide
uccuccacgggcugaacag

SEQ ID NO: 1999830 - RNA, 19 nt, Artificial Sequence
  Description of Artificial Sequence: Synthetic oligonucleotide
cuugagacagauggcacag

SEQ ID NO: 1999831 - RNA, 19 nt, Artificial Sequence
  Description of Artificial Sequence: Synthetic oligonucleotide
cagcuugugggaucaagcc

SEQ ID NO: 1999832 - RNA, 19 nt, Artificial Sequence
  Description of Artificial Sequence: Synthetic oligonucleotide
uccggacacacaaauuccu

SEQ ID NO: 1999833 - RNA, 19 nt, Artificial Sequence
  Description of Artificial Sequence: Synthetic oligonucleotide
aaggagacuaagguccucu

SEQ ID NO: 1999834 - RNA, 19 nt, Artificial Sequence
  Description of Artificial Sequence: Synthetic oligonucleotide
uguguacacggucacuguc

SEQ ID NO: 1999835 - RNA, 19 nt, Artificial Sequence
  Description of Artificial Sequence: Synthetic oligonucleotide
ucaggcugagcuuccccgg

SEQ ID NO: 1999836 - RNA, 19 nt, Artificial Sequence
  Description of Artificial Sequence: Synthetic oligonucleotide
ucucggagguguaucucag

SEQ ID NO: 1999837 - RNA, 19 nt, Artificial Sequence
  Description of Artificial Sequence: Synthetic oligonucleotide
ugacagugugguuggaacu

SEQ ID NO: 1999838 - RNA, 19 nt, Artificial Sequence
  Description of Artificial Sequence: Synthetic oligonucleotide
cugaaugguccuaacccac

SEQ ID NO: 1999839 - RNA, 19 nt, Artificial Sequence
  Description of Artificial Sequence: Synthetic oligonucleotide
cuugugauagagcggugug

SEQ ID NO: 1999840 - RNA, 19 nt, Artificial Sequence
  Description of Artificial Sequence: Synthetic oligonucleotide
gaacccaacucaaugaucu

SEQ ID NO: 1999841 - RNA, 19 nt, Artificial Sequence
  Description of Artificial Sequence: Synthetic oligonucleotide
uccacgucaucagaggaca

SEQ ID NO: 1999842 - RNA, 19 nt, Artificial Sequence
  Description of Artificial Sequence: Synthetic oligonucleotide
ugugccgaagcagcugugg

SEQ ID NO: 1999843 - RNA, 19 nt, Artificial Sequence
  Description of Artificial Sequence: Synthetic oligonucleotide
gaacucggaggccuccccg

SEQ ID NO: 1999844 - RNA, 19 nt, Artificial Sequence
  Description of Artificial Sequence: Synthetic oligonucleotide
ugguucacagcuuguggga

SEQ ID NO: 1999845 - RNA, 19 nt, Artificial Sequence
  Description of Artificial Sequence: Synthetic oligonucleotide
aaugccugaaugguccuaa

SEQ ID NO: 1999846 - RNA, 19 nt, Artificial Sequence
  Description of Artificial Sequence: Synthetic oligonucleotide
uacacggucacugucucaa

SEQ ID NO: 1999847 - RNA, 19 nt, Artificial Sequence
  Description of Artificial Sequence: Synthetic oligonucleotide
uuauggagcuggugaagac

SEQ ID NO: 1999848 - RNA, 19 nt, Artificial Sequence
  Description of Artificial Sequence: Synthetic oligonucleotide
uguacacggucacugucuc

SEQ ID NO: 1999849 - RNA, 19 nt, Artificial Sequence
  Description of Artificial Sequence: Synthetic oligonucleotide
acugaggaguuuggggccc

SEQ ID NO: 1999850 - RNA, 19 nt, Artificial Sequence
  Description of Artificial Sequence: Synthetic oligonucleotide
ugacgaacuucuugagaca

SEQ ID NO: 1999851 - RNA, 19 nt, Artificial Sequence
  Description of Artificial Sequence: Synthetic oligonucleotide
aacugggcuccucaucggu

SEQ ID NO: 1999852 - RNA, 19 nt, Artificial Sequence
  Description of Artificial Sequence: Synthetic oligonucleotide
cuucuugagacagauggca

SEQ ID NO: 1999853 - RNA, 19 nt, Artificial Sequence
  Description of Artificial Sequence: Synthetic oligonucleotide
cucaaugcccuccacguca

SEQ ID NO: 1999854 - RNA, 19 nt, Artificial Sequence
  Description of Artificial Sequence: Synthetic oligonucleotide
ucucggaugugcgagcgca

SEQ ID NO: 1999855 - RNA, 19 nt, Artificial Sequence
  Description of Artificial Sequence: Synthetic oligonucleotide
caucagaggacaccaccag

SEQ ID NO: 1999856 - RNA, 19 nt, Artificial Sequence
  Description of Artificial Sequence: Synthetic oligonucleotide
uuuggggcccaguggauaa

SEQ ID NO: 1999857 - RNA, 19 nt, Artificial Sequence
  Description of Artificial Sequence: Synthetic oligonucleotide
cacaacaguuacagucccg

SEQ ID NO: 1999858 - RNA, 19 nt, Artificial Sequence
  Description of Artificial Sequence: Synthetic oligonucleotide
gagcaaagggcugggcugg

SEQ ID NO: 1999859 - RNA, 19 nt, Artificial Sequence
  Description of Artificial Sequence: Synthetic oligonucleotide
aucaagccgaucaccacuc

SEQ ID NO: 1999860 - RNA, 19 nt, Artificial Sequence
  Description of Artificial Sequence: Synthetic oligonucleotide
guccuaacccacccuaccc

SEQ ID NO: 1999861 - RNA, 19 nt, Artificial Sequence
  Description of Artificial Sequence: Synthetic oligonucleotide
ugugguguuugucucucuu

SEQ ID NO: 1999862 - RNA, 19 nt, Artificial Sequence
  Description of Artificial Sequence: Synthetic oligonucleotide
gaucaagccgaucaccacu

SEQ ID NO: 1999863 - RNA, 19 nt, Artificial Sequence
  Description of Artificial Sequence: Synthetic oligonucleotide
gaugugcgagcgcagccug

SEQ ID NO: 1999864 - RNA, 19 nt, Artificial Sequence
  Description of Artificial Sequence: Synthetic oligonucleotide
gccucuuguacauacacga

SEQ ID NO: 1999865 - RNA, 19 nt, Artificial Sequence
  Description of Artificial Sequence: Synthetic oligonucleotide
gaacugggcuccucaucgg

SEQ ID NO: 1999866 - RNA, 19 nt, Artificial Sequence
  Description of Artificial Sequence: Synthetic oligonucleotide
ugaacucggaggccucccc

SEQ ID NO: 1999867 - RNA, 19 nt, Artificial Sequence
  Description of Artificial Sequence: Synthetic oligonucleotide
agcugggcccuugugauag

SEQ ID NO: 1999868 - RNA, 19 nt, Artificial Sequence
  Description of Artificial Sequence: Synthetic oligonucleotide
caacaguuacagucccggg

SEQ ID NO: 1999869 - RNA, 19 nt, Artificial Sequence
  Description of Artificial Sequence: Synthetic oligonucleotide
accucucggaugugcgagc

SEQ ID NO: 1999870 - RNA, 19 nt, Artificial Sequence
  Description of Artificial Sequence: Synthetic oligonucleotide
agccgaucaccacucucgg

SEQ ID NO: 1999871 - RNA, 19 nt, Artificial Sequence
  Description of Artificial Sequence: Synthetic oligonucleotide
ucuagaguucuggggccgg

SEQ ID NO: 1999872 - RNA, 19 nt, Artificial Sequence
  Description of Artificial Sequence: Synthetic oligonucleotide
ugccccgugcaccucucgg

SEQ ID NO: 1999873 - RNA, 19 nt, Artificial Sequence
  Description of Artificial Sequence: Synthetic oligonucleotide
acaaauuccucagcugcca

SEQ ID NO: 1999874 - RNA, 19 nt, Artificial Sequence
  Description of Artificial Sequence: Synthetic oligonucleotide
auaaugccugaaugguccu

SEQ ID NO: 1999875 - RNA, 19 nt, Artificial Sequence
  Description of Artificial Sequence: Synthetic oligonucleotide
cucaucggugaccuguuuc

SEQ ID NO: 1999876 - RNA, 19 nt, Artificial Sequence
  Description of Artificial Sequence: Synthetic oligonucleotide
agcgcagccugauggagcu

SEQ ID NO: 1999877 - RNA, 19 nt, Artificial Sequence
  Description of Artificial Sequence: Synthetic oligonucleotide
cuccacgucaucagaggac

SEQ ID NO: 1999878 - RNA, 19 nt, Artificial Sequence
  Description of Artificial Sequence: Synthetic oligonucleotide
ccgaucaccacucucggag

SEQ ID NO: 1999879 - RNA, 19 nt, Artificial Sequence
  Description of Artificial Sequence: Synthetic oligonucleotide
cuccacgggcugaacagcc

SEQ ID NO: 1999880 - RNA, 19 nt, Artificial Sequence
  Description of Artificial Sequence: Synthetic oligonucleotide
gaaaggcuugaaggaggcg

SEQ ID NO: 1999881 - RNA, 19 nt, Artificial Sequence
  Description of Artificial Sequence: Synthetic oligonucleotide
agucccgggcgccauagca

SEQ ID NO: 1999882 - RNA, 19 nt, Artificial Sequence
  Description of Artificial Sequence: Synthetic oligonucleotide
acgucaucagaggacacca

SEQ ID NO: 1999883 - RNA, 19 nt, Artificial Sequence
  Description of Artificial Sequence: Synthetic oligonucleotide
acgaugaacucggaggccu

SEQ ID NO: 1999884 - RNA, 19 nt, Artificial Sequence
  Description of Artificial Sequence: Synthetic oligonucleotide
gcugaaggagacuaagguc

SEQ ID NO: 1999885 - RNA, 19 nt, Artificial Sequence
  Description of Artificial Sequence: Synthetic oligonucleotide
ggagacuaagguccucuag

SEQ ID NO: 1999886 - RNA, 19 nt, Artificial Sequence
  Description of Artificial Sequence: Synthetic oligonucleotide
guccccggugcccacaaag

SEQ ID NO: 1999887 - RNA, 19 nt, Artificial Sequence
  Description of Artificial Sequence: Synthetic oligonucleotide
aucggugaccuguuucaca

SEQ ID NO: 1999888 - RNA, 19 nt, Artificial Sequence
  Description of Artificial Sequence: Synthetic oligonucleotide
accagauggugcugcucgg

SEQ ID NO: 1999889 - RNA, 19 nt, Artificial Sequence
  Description of Artificial Sequence: Synthetic oligonucleotide
ggugaccuguuucacaaca

SEQ ID NO: 1999890 - RNA, 19 nt, Artificial Sequence
  Description of Artificial Sequence: Synthetic oligonucleotide
uggguuaggcgguccccgg

SEQ ID NO: 1999891 - RNA, 19 nt, Artificial Sequence
  Description of Artificial Sequence: Synthetic oligonucleotide
gugguuggaacugggcucc

SEQ ID NO: 1999892 - RNA, 19 nt, Artificial Sequence
  Description of Artificial Sequence: Synthetic oligonucleotide
ucucaaugcccuccacguc

SEQ ID NO: 1999893 - RNA, 19 nt, Artificial Sequence
  Description of Artificial Sequence: Synthetic oligonucleotide
ugguggguuaggcgguccc

SEQ ID NO: 1999894 - RNA, 19 nt, Artificial Sequence
  Description of Artificial Sequence: Synthetic oligonucleotide
uccaagcugggcccuugug

SEQ ID NO: 1999895 - RNA, 19 nt, Artificial Sequence
  Description of Artificial Sequence: Synthetic oligonucleotide
ugugugguguuugucucuc

SEQ ID NO: 1999896 - RNA, 19 nt, Artificial Sequence
  Description of Artificial Sequence: Synthetic oligonucleotide
gaggaugagcaccuggggu

SEQ ID NO: 1999897 - RNA, 19 nt, Artificial Sequence
  Description of Artificial Sequence: Synthetic oligonucleotide
cacggucacugucucaaug

SEQ ID NO: 1999898 - RNA, 19 nt, Artificial Sequence
  Description of Artificial Sequence: Synthetic oligonucleotide
uuaggcgguccccggugcc

SEQ ID NO: 1999899 - RNA, 19 nt, Artificial Sequence
  Description of Artificial Sequence: Synthetic oligonucleotide
ugguccuaacccacccuac

SEQ ID NO: 1999900 - RNA, 19 nt, Artificial Sequence
  Description of Artificial Sequence: Synthetic oligonucleotide
aggaggcagaaacucuggu

SEQ ID NO: 1999901 - RNA, 19 nt, Artificial Sequence
  Description of Artificial Sequence: Synthetic oligonucleotide
cucggagguguaucucagg

SEQ ID NO: 1999902 - RNA, 19 nt, Artificial Sequence
  Description of Artificial Sequence: Synthetic oligonucleotide
augguccuaacccacccua

SEQ ID NO: 1999903 - RNA, 19 nt, Artificial Sequence
  Description of Artificial Sequence: Synthetic oligonucleotide
cucggcuagcuccaccgag

SEQ ID NO: 1999904 - RNA, 19 nt, Artificial Sequence
  Description of Artificial Sequence: Synthetic oligonucleotide
ugauggagcugacgaacuu

SEQ ID NO: 1999905 - RNA, 19 nt, Artificial Sequence
  Description of Artificial Sequence: Synthetic oligonucleotide
gcugcaggaugguucacag

SEQ ID NO: 1999906 - RNA, 19 nt, Artificial Sequence
  Description of Artificial Sequence: Synthetic oligonucleotide
ucaccacucucggaggugu

SEQ ID NO: 1999907 - RNA, 19 nt, Artificial Sequence
  Description of Artificial Sequence: Synthetic oligonucleotide
cucuagaguucuggggccg

SEQ ID NO: 1999908 - RNA, 19 nt, Artificial Sequence
  Description of Artificial Sequence: Synthetic oligonucleotide
cuuucacagacaauacagu

SEQ ID NO: 1999909 - RNA, 19 nt, Artificial Sequence
  Description of Artificial Sequence: Synthetic oligonucleotide
ugcugcucggcuagcucca

SEQ ID NO: 1999910 - RNA, 19 nt, Artificial Sequence
  Description of Artificial Sequence: Synthetic oligonucleotide
auagagcgguguggggacc

SEQ ID NO: 1999911 - RNA, 19 nt, Artificial Sequence
  Description of Artificial Sequence: Synthetic oligonucleotide
cacagacaauacagugggc

SEQ ID NO: 1999912 - RNA, 19 nt, Artificial Sequence
  Description of Artificial Sequence: Synthetic oligonucleotide
ccauagcaaccacugaggc

SEQ ID NO: 1999913 - RNA, 19 nt, Artificial Sequence
  Description of Artificial Sequence: Synthetic oligonucleotide
guggguuaggcgguccccg

SEQ ID NO: 1999914 - RNA, 19 nt, Artificial Sequence
  Description of Artificial Sequence: Synthetic oligonucleotide
acccacccuacccaguggu

SEQ ID NO: 1999915 - RNA, 19 nt, Artificial Sequence
  Description of Artificial Sequence: Synthetic oligonucleotide
acuugcugugugguguuug

SEQ ID NO: 1999916 - RNA, 19 nt, Artificial Sequence
  Description of Artificial Sequence: Synthetic oligonucleotide
cucauuuguccccagggcu

SEQ ID NO: 1999917 - RNA, 19 nt, Artificial Sequence
  Description of Artificial Sequence: Synthetic oligonucleotide
gguuuauggagcuggugaa

SEQ ID NO: 1999918 - RNA, 19 nt, Artificial Sequence
  Description of Artificial Sequence: Synthetic oligonucleotide
cacauccacuuccggacac

SEQ ID NO: 1999919 - RNA, 19 nt, Artificial Sequence
  Description of Artificial Sequence: Synthetic oligonucleotide
gguccuaacccacccuacc

SEQ ID NO: 1999920 - RNA, 19 nt, Artificial Sequence
  Description of Artificial Sequence: Synthetic oligonucleotide
ucucucuuucacagacaau

SEQ ID NO: 1999921 - RNA, 19 nt, Artificial Sequence
  Description of Artificial Sequence: Synthetic oligonucleotide
ucggaugugcgagcgcagc

SEQ ID NO: 1999922 - RNA, 19 nt, Artificial Sequence
  Description of Artificial Sequence: Synthetic oligonucleotide
caagccgaucaccacucuc

SEQ ID NO: 1999923 - RNA, 19 nt, Artificial Sequence
  Description of Artificial Sequence: Synthetic oligonucleotide
acucucggagguguaucuc

SEQ ID NO: 1999924 - RNA, 19 nt, Artificial Sequence
  Description of Artificial Sequence: Synthetic oligonucleotide
ucccgggcgccauagcaac

SEQ ID NO: 1999925 - RNA, 19 nt, Artificial Sequence
  Description of Artificial Sequence: Synthetic oligonucleotide
ucaagccgaucaccacucu

SEQ ID NO: 1999926 - RNA, 19 nt, Artificial Sequence
  Description of Artificial Sequence: Synthetic oligonucleotide
gugggaucaagccgaucac

SEQ ID NO: 1999927 - RNA, 19 nt, Artificial Sequence
  Description of Artificial Sequence: Synthetic oligonucleotide
caggcugagcuuccccggg

SEQ ID NO: 1999928 - RNA, 19 nt, Artificial Sequence
  Description of Artificial Sequence: Synthetic oligonucleotide
caccucucggaugugcgag

SEQ ID NO: 1999929 - RNA, 19 nt, Artificial Sequence
  Description of Artificial Sequence: Synthetic oligonucleotide
ggcaucaugggucucugaa

SEQ ID NO: 1999930 - RNA, 19 nt, Artificial Sequence
  Description of Artificial Sequence: Synthetic oligonucleotide
ucccucggagccaccucag

SEQ ID NO: 1999931 - RNA, 19 nt, Artificial Sequence
  Description of Artificial Sequence: Synthetic oligonucleotide
agggcgggagcaaagggcu

SEQ ID NO: 1999932 - RNA, 19 nt, Artificial Sequence
  Description of Artificial Sequence: Synthetic oligonucleotide
ccgccuuguguguacacgg

SEQ ID NO: 1999933 - RNA, 19 nt, Artificial Sequence
  Description of Artificial Sequence: Synthetic oligonucleotide
uccacgggcugaacagccu

SEQ ID NO: 1999934 - RNA, 19 nt, Artificial Sequence
  Description of Artificial Sequence: Synthetic oligonucleotide
gccguguugcuucucccgg

SEQ ID NO: 1999935 - RNA, 19 nt, Artificial Sequence
  Description of Artificial Sequence: Synthetic oligonucleotide
gcugaacagccucuuguac

SEQ ID NO: 1999936 - RNA, 19 nt, Artificial Sequence
  Description of Artificial Sequence: Synthetic oligonucleotide
gagcgcagccugauggagc

SEQ ID NO: 1999937 - RNA, 19 nt, Artificial Sequence
  Description of Artificial Sequence: Synthetic oligonucleotide
agguguaucucagguccug

SEQ ID NO: 1999938 - RNA, 19 nt, Artificial Sequence
  Description of Artificial Sequence: Synthetic oligonucleotide
ggaugguucacagcuugug

SEQ ID NO: 1999939 - RNA, 19 nt, Artificial Sequence
  Description of Artificial Sequence: Synthetic oligonucleotide
uagagcgguguggggaccc

SEQ ID NO: 1999940 - RNA, 19 nt, Artificial Sequence
  Description of Artificial Sequence: Synthetic oligonucleotide
gcaucaugggucucugaac

SEQ ID NO: 1999941 - RNA, 19 nt, Artificial Sequence
  Description of Artificial Sequence: Synthetic oligonucleotide
cacgaugaacucggaggcc

SEQ ID NO: 1999942 - RNA, 19 nt, Artificial Sequence
  Description of Artificial Sequence: Synthetic oligonucleotide
cugguuuauggagcuggug

SEQ ID NO: 1999943 - RNA, 19 nt, Artificial Sequence
  Description of Artificial Sequence: Synthetic oligonucleotide
ccuaacccacccuacccag

SEQ ID NO: 1999944 - RNA, 19 nt, Artificial Sequence
  Description of Artificial Sequence: Synthetic oligonucleotide
ggauaaugccugaaugguc

SEQ ID NO: 1999945 - RNA, 19 nt, Artificial Sequence
  Description of Artificial Sequence: Synthetic oligonucleotide
ggucuccuggaucaugaca

SEQ ID NO: 1999946 - RNA, 19 nt, Artificial Sequence
  Description of Artificial Sequence: Synthetic oligonucleotide
acagucccgggcgccauag

SEQ ID NO: 1999947 - RNA, 19 nt, Artificial Sequence
  Description of Artificial Sequence: Synthetic oligonucleotide
gcggaaaggcuugaaggag

SEQ ID NO: 1999948 - RNA, 19 nt, Artificial Sequence
  Description of Artificial Sequence: Synthetic oligonucleotide
gaucaccacucucggaggu

SEQ ID NO: 1999949 - RNA, 19 nt, Artificial Sequence
  Description of Artificial Sequence: Synthetic oligonucleotide
gcugugugguguuugucuc

SEQ ID NO: 1999950 - RNA, 19 nt, Artificial Sequence
  Description of Artificial Sequence: Synthetic oligonucleotide
ggaucaagccgaucaccac

SEQ ID NO: 1999951 - RNA, 19 nt, Artificial Sequence
  Description of Artificial Sequence: Synthetic oligonucleotide
gccaccgcggcuucagcgg

SEQ ID NO: 1999952 - RNA, 19 nt, Artificial Sequence
  Description of Artificial Sequence: Synthetic oligonucleotide
cucggaugugcgagcgcag

SEQ ID NO: 1999953 - RNA, 19 nt, Artificial Sequence
  Description of Artificial Sequence: Synthetic oligonucleotide
ccucuagaguucuggggcc

SEQ ID NO: 1999954 - RNA, 19 nt, Artificial Sequence
  Description of Artificial Sequence: Synthetic oligonucleotide
ccugaaugguccuaaccca

SEQ ID NO: 1999955 - RNA, 19 nt, Artificial Sequence
  Description of Artificial Sequence: Synthetic oligonucleotide
ggucacugucucaaugccc

SEQ ID NO: 1999956 - RNA, 19 nt, Artificial Sequence
  Description of Artificial Sequence: Synthetic oligonucleotide
agagcgguguggggacccc

SEQ ID NO: 1999957 - RNA, 19 nt, Artificial Sequence
  Description of Artificial Sequence: Synthetic oligonucleotide
gcugacgaacuucuugaga

SEQ ID NO: 1999958 - RNA, 19 nt, Artificial Sequence
  Description of Artificial Sequence: Synthetic oligonucleotide
ccuuguguguacacgguca

SEQ ID NO: 1999959 - RNA, 19 nt, Artificial Sequence
  Description of Artificial Sequence: Synthetic oligonucleotide
gggaucaagccgaucacca

SEQ ID NO: 1999960 - RNA, 19 nt, Artificial Sequence
  Description of Artificial Sequence: Synthetic oligonucleotide
caccgaggccugcugcagg

SEQ ID NO: 1999961 - RNA, 19 nt, Artificial Sequence
  Description of Artificial Sequence: Synthetic oligonucleotide
ugugcgagcgcagccugau

SEQ ID NO: 1999962 - RNA, 19 nt, Artificial Sequence
  Description of Artificial Sequence: Synthetic oligonucleotide
cuagaguucuggggccggc

SEQ ID NO: 1999963 - RNA, 19 nt, Artificial Sequence
  Description of Artificial Sequence: Synthetic oligonucleotide
ggcgugcugcuccaugugc

SEQ ID NO: 1999964 - RNA, 19 nt, Artificial Sequence
  Description of Artificial Sequence: Synthetic oligonucleotide
guggggaccccucauuugu

SEQ ID NO: 1999965 - RNA, 19 nt, Artificial Sequence
  Description of Artificial Sequence: Synthetic oligonucleotide
guguugcuucucccggggc

SEQ ID NO: 1999966 - RNA, 19 nt, Artificial Sequence
  Description of Artificial Sequence: Synthetic oligonucleotide
ccucggagccaccucaggc

SEQ ID NO: 1999967 - RNA, 19 nt, Artificial Sequence
  Description of Artificial Sequence: Synthetic oligonucleotide
ggaccccucauuugucccc

SEQ ID NO: 1999968 - RNA, 19 nt, Artificial Sequence
  Description of Artificial Sequence: Synthetic oligonucleotide
cuuguacauacacgaugaa

SEQ ID NO: 1999969 - RNA, 19 nt, Artificial Sequence
  Description of Artificial Sequence: Synthetic oligonucleotide
aggagacuaagguccucua

SEQ ID NO: 1999970 - RNA, 19 nt, Artificial Sequence
  Description of Artificial Sequence: Synthetic oligonucleotide
caugugccgaagcagcugu

SEQ ID NO: 1999971 - RNA, 19 nt, Artificial Sequence
  Description of Artificial Sequence: Synthetic oligonucleotide
gaggcgugcugcuccaugu

SEQ ID NO: 1999972 - RNA, 19 nt, Artificial Sequence
  Description of Artificial Sequence: Synthetic oligonucleotide
uggcuucugggccgccgug

SEQ ID NO: 1999973 - RNA, 19 nt, Artificial Sequence
  Description of Artificial Sequence: Synthetic oligonucleotide
aagcugggcccuugugaua

SEQ ID NO: 1999974 - RNA, 19 nt, Artificial Sequence
  Description of Artificial Sequence: Synthetic oligonucleotide
ccuacccagugguugacuc

SEQ ID NO: 1999975 - RNA, 19 nt, Artificial Sequence
  Description of Artificial Sequence: Synthetic oligonucleotide
gcuucagcggaaaggcuug

SEQ ID NO: 1999976 - RNA, 19 nt, Artificial Sequence
  Description of Artificial Sequence: Synthetic oligonucleotide
caucggugaccuguuucac

SEQ ID NO: 1999977 - RNA, 19 nt, Artificial Sequence
  Description of Artificial Sequence: Synthetic oligonucleotide
cauacacgaugaacucgga

SEQ ID NO: 1999978 - RNA, 19 nt, Artificial Sequence
  Description of Artificial Sequence: Synthetic oligonucleotide
cugaacccaacucaaugau

SEQ ID NO: 1999979 - RNA, 19 nt, Artificial Sequence
  Description of Artificial Sequence: Synthetic oligonucleotide
auaaggccacuugcugugu

SEQ ID NO: 1999980 - RNA, 19 nt, Artificial Sequence
  Description of Artificial Sequence: Synthetic oligonucleotide
ugaggaguuuggggcccag

SEQ ID NO: 1999981 - RNA, 19 nt, Artificial Sequence
  Description of Artificial Sequence: Synthetic oligonucleotide
cacccuacccagugguuga

SEQ ID NO: 1999982 - RNA, 19 nt, Artificial Sequence
  Description of Artificial Sequence: Synthetic oligonucleotide
cagccugauggagcugacg

SEQ ID NO: 1999983 - RNA, 19 nt, Artificial Sequence
  Description of Artificial Sequence: Synthetic oligonucleotide
guccccagggcuccugcac

SEQ ID NO: 1999984 - RNA, 19 nt, Artificial Sequence
  Description of Artificial Sequence: Synthetic oligonucleotide
guuacagucccgggcgcca

SEQ ID NO: 1999985 - RNA, 19 nt, Artificial Sequence
  Description of Artificial Sequence: Synthetic oligonucleotide
gaccuguuucacaacaguu

SEQ ID NO: 1999986 - RNA, 19 nt, Artificial Sequence
  Description of Artificial Sequence: Synthetic oligonucleotide
acccuacccagugguugac

SEQ ID NO: 1999987 - RNA, 19 nt, Artificial Sequence
  Description of Artificial Sequence: Synthetic oligonucleotide
cuggggugagggcgggagc

SEQ ID NO: 1999988 - RNA, 19 nt, Artificial Sequence
  Description of Artificial Sequence: Synthetic oligonucleotide
uugcugugugguguuuguc

SEQ ID NO: 1999989 - RNA, 19 nt, Artificial Sequence
  Description of Artificial Sequence: Synthetic oligonucleotide
gcagaaacucugguuuaug

SEQ ID NO: 1999990 - RNA, 19 nt, Artificial Sequence
  Description of Artificial Sequence: Synthetic oligonucleotide
uggugaagaccagggucuc

SEQ ID NO: 1999991 - RNA, 19 nt, Artificial Sequence
  Description of Artificial Sequence: Synthetic oligonucleotide
acucugguuuauggagcug

SEQ ID NO: 1999992 - RNA, 19 nt, Artificial Sequence
  Description of Artificial Sequence: Synthetic oligonucleotide
aggccacuugcuguguggu

SEQ ID NO: 1999993 - RNA, 19 nt, Artificial Sequence
  Description of Artificial Sequence: Synthetic oligonucleotide
caugggucucugaacccaa

SEQ ID NO: 1999994 - RNA, 19 nt, Artificial Sequence
  Description of Artificial Sequence: Synthetic oligonucleotide
guguacacggucacugucu

SEQ ID NO: 1999995 - RNA, 19 nt, Artificial Sequence
  Description of Artificial Sequence: Synthetic oligonucleotide
ccaacucaaugaucugcug

SEQ ID NO: 1999996 - RNA, 19 nt, Artificial Sequence
  Description of Artificial Sequence: Synthetic oligonucleotide
acgaacuucuugagacaga

SEQ ID NO: 1999997 - RNA, 19 nt, Artificial Sequence
  Description of Artificial Sequence: Synthetic oligonucleotide
gugcaccucucggaugugc

SEQ ID NO: 1999998 - RNA, 19 nt, Artificial Sequence
  Description of Artificial Sequence: Synthetic oligonucleotide
ucaugacagugugguugga

SEQ ID NO: 1999999 - RNA, 19 nt, Artificial Sequence
  Description of Artificial Sequence: Synthetic oligonucleotide
gaccccucauuugucccca

SEQ ID NO: 2000000 - RNA, 19 nt, Artificial Sequence
  Description of Artificial Sequence: Synthetic oligonucleotide
ggaggcgugcugcuccaug

SEQ ID NO: 2000001 - RNA, 19 nt, Artificial Sequence
  Description of Artificial Sequence: Synthetic oligonucleotide
guacacggucacugucuca

SEQ ID NO: 2000002 - RNA, 19 nt, Artificial Sequence
  Description of Artificial Sequence: Synthetic oligonucleotide
aggaugguucacagcuugu

SEQ ID NO: 2000003 - RNA, 19 nt, Artificial Sequence
  Description of Artificial Sequence: Synthetic oligonucleotide
gaggccacggcaguggcau

SEQ ID NO: 2000004 - RNA, 19 nt, Artificial Sequence
  Description of Artificial Sequence: Synthetic oligonucleotide
acuuccggacacacaaauu

SEQ ID NO: 2000005 - RNA, 19 nt, Artificial Sequence
  Description of Artificial Sequence: Synthetic oligonucleotide
cccaaccugcuccuccacg

SEQ ID NO: 2000006 - RNA, 19 nt, Artificial Sequence
  Description of Artificial Sequence: Synthetic oligonucleotide
cacuuccggacacacaaau

SEQ ID NO: 2000007 - RNA, 19 nt, Artificial Sequence
  Description of Artificial Sequence: Synthetic oligonucleotide
gccuuguguguacacgguc

SEQ ID NO: 2000008 - RNA, 19 nt, Artificial Sequence
  Description of Artificial Sequence: Synthetic oligonucleotide
ggacaccaccagauggugc

SEQ ID NO: 2000009 - RNA, 19 nt, Artificial Sequence
  Description of Artificial Sequence: Synthetic oligonucleotide
cgaucaccacucucggagg

SEQ ID NO: 2000010 - RNA, 19 nt, Artificial Sequence
  Description of Artificial Sequence: Synthetic oligonucleotide
ggcccuugugauagagcgg

SEQ ID NO: 2000011 - RNA, 19 nt, Artificial Sequence
  Description of Artificial Sequence: Synthetic oligonucleotide
gaccagggucuccugggcu

SEQ ID NO: 2000012 - RNA, 19 nt, Artificial Sequence
  Description of Artificial Sequence: Synthetic oligonucleotide
ggccuccccgccuugugug

SEQ ID NO: 2000013 - RNA, 19 nt, Artificial Sequence
  Description of Artificial Sequence: Synthetic oligonucleotide
gcugagcuuccccgggacc

SEQ ID NO: 2000014 - RNA, 19 nt, Artificial Sequence
  Description of Artificial Sequence: Synthetic oligonucleotide
gccgccguguugcuucucc

SEQ ID NO: 2000015 - RNA, 19 nt, Artificial Sequence
  Description of Artificial Sequence: Synthetic oligonucleotide
ggugaagaccagggucucc

SEQ ID NO: 2000016 - RNA, 19 nt, Artificial Sequence
  Description of Artificial Sequence: Synthetic oligonucleotide
cugguggguuaggcggucc

SEQ ID NO: 2000017 - RNA, 19 nt, Artificial Sequence
  Description of Artificial Sequence: Synthetic oligonucleotide
cccgggacccuccuugagc

SEQ ID NO: 2000018 - RNA, 19 nt, Artificial Sequence
  Description of Artificial Sequence: Synthetic oligonucleotide
acacggucacugucucaau

SEQ ID NO: 2000019 - RNA, 19 nt, Artificial Sequence
  Description of Artificial Sequence: Synthetic oligonucleotide
guuuggggcccaguggaua

SEQ ID NO: 2000020 - RNA, 19 nt, Artificial Sequence
  Description of Artificial Sequence: Synthetic oligonucleotide
ccucucggaugugcgagcg

SEQ ID NO: 2000021 - RNA, 19 nt, Artificial Sequence
  Description of Artificial Sequence: Synthetic oligonucleotide
cacucucggagguguaucu

SEQ ID NO: 2000022 - RNA, 19 nt, Artificial Sequence
  Description of Artificial Sequence: Synthetic oligonucleotide
gcgugcugcuccaugugcc

SEQ ID NO: 2000023 - RNA, 19 nt, Artificial Sequence
  Description of Artificial Sequence: Synthetic oligonucleotide
gguguaucucagguccuga

SEQ ID NO: 2000024 - RNA, 19 nt, Artificial Sequence
  Description of Artificial Sequence: Synthetic oligonucleotide
ucugggccgccguguugcu

SEQ ID NO: 2000025 - RNA, 19 nt, Artificial Sequence
  Description of Artificial Sequence: Synthetic oligonucleotide
cccgccuuguguguacacg

SEQ ID NO: 2000026 - RNA, 19 nt, Artificial Sequence
  Description of Artificial Sequence: Synthetic oligonucleotide
caguggauaaugccugaau

SEQ ID NO: 2000027 - RNA, 19 nt, Artificial Sequence
  Description of Artificial Sequence: Synthetic oligonucleotide
ccacccuacccagugguug

SEQ ID NO: 2000028 - RNA, 19 nt, Artificial Sequence
  Description of Artificial Sequence: Synthetic oligonucleotide
ggaugagcaccugggguga

SEQ ID NO: 2000029 - RNA, 19 nt, Artificial Sequence
  Description of Artificial Sequence: Synthetic oligonucleotide
ccuugagcacauccacuuc

SEQ ID NO: 2000030 - RNA, 19 nt, Artificial Sequence
  Description of Artificial Sequence: Synthetic oligonucleotide
uugugggaucaagccgauc

SEQ ID NO: 2000031 - RNA, 19 nt, Artificial Sequence
  Description of Artificial Sequence: Synthetic oligonucleotide
cgcggcuucagcggaaagg

SEQ ID NO: 2000032 - RNA, 19 nt, Artificial Sequence
  Description of Artificial Sequence: Synthetic oligonucleotide
ggcuagcuccaccgaggcc

SEQ ID NO: 2000033 - RNA, 19 nt, Artificial Sequence
  Description of Artificial Sequence: Synthetic oligonucleotide
uccccgccuuguguguaca

SEQ ID NO: 2000034 - RNA, 19 nt, Artificial Sequence
  Description of Artificial Sequence: Synthetic oligonucleotide
ccgggacccuccuugagca

SEQ ID NO: 2000035 - RNA, 19 nt, Artificial Sequence
  Description of Artificial Sequence: Synthetic oligonucleotide
gugcgagcgcagccugaug

SEQ ID NO: 2000036 - RNA, 19 nt, Artificial Sequence
  Description of Artificial Sequence: Synthetic oligonucleotide
gggacccuccuugagcaca

SEQ ID NO: 2000037 - RNA, 19 nt, Artificial Sequence
  Description of Artificial Sequence: Synthetic oligonucleotide
ccuccacgucaucagagga

SEQ ID NO: 2000038 - RNA, 19 nt, Artificial Sequence
  Description of Artificial Sequence: Synthetic oligonucleotide
guguggggaccccucauuu

SEQ ID NO: 2000039 - RNA, 19 nt, Artificial Sequence
  Description of Artificial Sequence: Synthetic oligonucleotide
gagguguaucucagguccu

SEQ ID NO: 2000040 - RNA, 19 nt, Artificial Sequence
  Description of Artificial Sequence: Synthetic oligonucleotide
cccggugcccacaaagcca

SEQ ID NO: 2000041 - RNA, 19 nt, Artificial Sequence
  Description of Artificial Sequence: Synthetic oligonucleotide
gcaguggcaucaugggucu

SEQ ID NO: 2000042 - RNA, 19 nt, Artificial Sequence
  Description of Artificial Sequence: Synthetic oligonucleotide
augugccgaagcagcugug

SEQ ID NO: 2000043 - RNA, 19 nt, Artificial Sequence
  Description of Artificial Sequence: Synthetic oligonucleotide
cagccaccgcggcuucagc

SEQ ID NO: 2000044 - RNA, 19 nt, Artificial Sequence
  Description of Artificial Sequence: Synthetic oligonucleotide
gggucuccuggaucaugac

SEQ ID NO: 2000045 - RNA, 19 nt, Artificial Sequence
  Description of Artificial Sequence: Synthetic oligonucleotide
ccacgggcugaacagccuc

SEQ ID NO: 2000046 - RNA, 19 nt, Artificial Sequence
  Description of Artificial Sequence: Synthetic oligonucleotide
uuggggcccaguggauaau

SEQ ID NO: 2000047 - RNA, 19 nt, Artificial Sequence
  Description of Artificial Sequence: Synthetic oligonucleotide
cagucccgggcgccauagc

SEQ ID NO: 2000048 - RNA, 19 nt, Artificial Sequence
  Description of Artificial Sequence: Synthetic oligonucleotide
cuucagcggaaaggcuuga

SEQ ID NO: 2000049 - RNA, 19 nt, Artificial Sequence
  Description of Artificial Sequence: Synthetic oligonucleotide
cggaugugcgagcgcagcc

SEQ ID NO: 2000050 - RNA, 19 nt, Artificial Sequence
  Description of Artificial Sequence: Synthetic oligonucleotide
gucccgggcgccauagcaa

SEQ ID NO: 2000051 - RNA, 19 nt, Artificial Sequence
  Description of Artificial Sequence: Synthetic oligonucleotide
guggcuucugggccgccgu

SEQ ID NO: 2000052 - RNA, 19 nt, Artificial Sequence
  Description of Artificial Sequence: Synthetic oligonucleotide
augugcgagcgcagccuga

SEQ ID NO: 2000053 - RNA, 19 nt, Artificial Sequence
  Description of Artificial Sequence: Synthetic oligonucleotide
cggagguguaucucagguc

SEQ ID NO: 2000054 - RNA, 19 nt, Artificial Sequence
  Description of Artificial Sequence: Synthetic oligonucleotide
gaacagccucuuguacaua

SEQ ID NO: 2000055 - RNA, 19 nt, Artificial Sequence
  Description of Artificial Sequence: Synthetic oligonucleotide
ccacgucaucagaggacac

SEQ ID NO: 2000056 - RNA, 19 nt, Artificial Sequence
  Description of Artificial Sequence: Synthetic oligonucleotide
gagcagccaccgcggcuuc

SEQ ID NO: 2000057 - RNA, 19 nt, Artificial Sequence
  Description of Artificial Sequence: Synthetic oligonucleotide
cacgggcugaacagccucu

SEQ ID NO: 2000058 - RNA, 19 nt, Artificial Sequence
  Description of Artificial Sequence: Synthetic oligonucleotide
ggcuucagcggaaaggcuu

SEQ ID NO: 2000059 - RNA, 19 nt, Artificial Sequence
  Description of Artificial Sequence: Synthetic oligonucleotide
aggcgguccccggugccca

SEQ ID NO: 2000060 - RNA, 19 nt, Artificial Sequence
  Description of Artificial Sequence: Synthetic oligonucleotide
acgggcugaacagccucuu

SEQ ID NO: 2000061 - RNA, 19 nt, Artificial Sequence
  Description of Artificial Sequence: Synthetic oligonucleotide
ccggugcccacaaagccaa

SEQ ID NO: 2000062 - RNA, 19 nt, Artificial Sequence
  Description of Artificial Sequence: Synthetic oligonucleotide
gcgagcgcagccugaugga

SEQ ID NO: 2000063 - RNA, 19 nt, Artificial Sequence
  Description of Artificial Sequence: Synthetic oligonucleotide
ggaugugcgagcgcagccu

SEQ ID NO: 2000064 - RNA, 19 nt, Artificial Sequence
  Description of Artificial Sequence: Synthetic oligonucleotide
cuugugggaucaagccgau

SEQ ID NO: 2000065 - RNA, 19 nt, Artificial Sequence
  Description of Artificial Sequence: Synthetic oligonucleotide
accgcggcuucagcggaaa

SEQ ID NO: 2000066 - RNA, 19 nt, Artificial Sequence
  Description of Artificial Sequence: Synthetic oligonucleotide
cggcuagcuccaccgaggc

SEQ ID NO: 2000067 - RNA, 19 nt, Artificial Sequence
  Description of Artificial Sequence: Synthetic oligonucleotide
gccccgugcaccucucgga

SEQ ID NO: 2000068 - RNA, 19 nt, Artificial Sequence
  Description of Artificial Sequence: Synthetic oligonucleotide
ccgccguguugcuucuccc

SEQ ID NO: 2000069 - RNA, 19 nt, Artificial Sequence
  Description of Artificial Sequence: Synthetic oligonucleotide
gccgaucaccacucucgga

SEQ ID NO: 2000070 - RNA, 19 nt, Artificial Sequence
  Description of Artificial Sequence: Synthetic oligonucleotide
cugaggaguuuggggccca

SEQ ID NO: 2000071 - RNA, 19 nt, Artificial Sequence
  Description of Artificial Sequence: Synthetic oligonucleotide
cccaguggauaaugccuga

SEQ ID NO: 2000072 - RNA, 19 nt, Artificial Sequence
  Description of Artificial Sequence: Synthetic oligonucleotide
cccgugcaccucucggaug

SEQ ID NO: 2000073 - RNA, 19 nt, Artificial Sequence
  Description of Artificial Sequence: Synthetic oligonucleotide
cgagcgcagccugauggag

SEQ ID NO: 2000074 - RNA, 19 nt, Artificial Sequence
  Description of Artificial Sequence: Synthetic oligonucleotide
gguguggggaccccucauu

SEQ ID NO: 2000075 - RNA, 19 nt, Artificial Sequence
  Description of Artificial Sequence: Synthetic oligonucleotide
gcucggcuagcuccaccga

SEQ ID NO: 2000076 - RNA, 19 nt, Artificial Sequence
  Description of Artificial Sequence: Synthetic oligonucleotide
acccagugguugacucuaa

SEQ ID NO: 2000077 - RNA, 19 nt, Artificial Sequence
  Description of Artificial Sequence: Synthetic oligonucleotide
ccaccgaggccugcugcag

SEQ ID NO: 2000078 - RNA, 19 nt, Artificial Sequence
  Description of Artificial Sequence: Synthetic oligonucleotide
ccgaagcagcuguggcuuc

SEQ ID NO: 2000079 - RNA, 19 nt, Artificial Sequence
  Description of Artificial Sequence: Synthetic oligonucleotide
ccucuuguacauacacgau

SEQ ID NO: 2000080 - RNA, 19 nt, Artificial Sequence
  Description of Artificial Sequence: Synthetic oligonucleotide
cuccaagcugggcccuugu

SEQ ID NO: 2000081 - RNA, 19 nt, Artificial Sequence
  Description of Artificial Sequence: Synthetic oligonucleotide
ccaguggauaaugccugaa

SEQ ID NO: 2000082 - RNA, 19 nt, Artificial Sequence
  Description of Artificial Sequence: Synthetic oligonucleotide
ggguuaggcgguccccggu

SEQ ID NO: 2000083 - RNA, 19 nt, Artificial Sequence
  Description of Artificial Sequence: Synthetic oligonucleotide
aggaggcgugcugcuccau

SEQ ID NO: 2000084 - RNA, 19 nt, Artificial Sequence
  Description of Artificial Sequence: Synthetic oligonucleotide
cccagugguugacucuaaa

SEQ ID NO: 2000085 - RNA, 19 nt, Artificial Sequence
  Description of Artificial Sequence: Synthetic oligonucleotide
caccgcggcuucagcggaa

SEQ ID NO: 2000086 - RNA, 19 nt, Artificial Sequence
  Description of Artificial Sequence: Synthetic oligonucleotide
ccgggcgccauagcaacca

SEQ ID NO: 2000087 - RNA, 19 nt, Artificial Sequence
  Description of Artificial Sequence: Synthetic oligonucleotide
ccccgccuuguguguacac

SEQ ID NO: 2000088 - RNA, 19 nt, Artificial Sequence
  Description of Artificial Sequence: Synthetic oligonucleotide
ccacuuccggacacacaaa

SEQ ID NO: 2000089 - RNA, 19 nt, Artificial Sequence
  Description of Artificial Sequence: Synthetic oligonucleotide
ccacggcaguggcaucaug

SEQ ID NO: 2000090 - RNA, 19 nt, Artificial Sequence
  Description of Artificial Sequence: Synthetic oligonucleotide
ccccgggacccuccuugag

SEQ ID NO: 2000091 - RNA, 19 nt, Artificial Sequence
  Description of Artificial Sequence: Synthetic oligonucleotide
gggugagggcgggagcaaa

SEQ ID NO: 2000092 - RNA, 19 nt, Artificial Sequence
  Description of Artificial Sequence: Synthetic oligonucleotide
ccaccgcggcuucagcgga

SEQ ID NO: 2000093 - RNA, 19 nt, Artificial Sequence
  Description of Artificial Sequence: Synthetic oligonucleotide
ggcuucugggccgccgugu

SEQ ID NO: 2000094 - RNA, 19 nt, Artificial Sequence
  Description of Artificial Sequence: Synthetic oligonucleotide
ccgcggcuucagcggaaag

SEQ ID NO: 2000095 - RNA, 19 nt, Artificial Sequence
  Description of Artificial Sequence: Synthetic oligonucleotide
gacuccaagcugggcccuu

SEQ ID NO: 2000096 - RNA, 19 nt, Artificial Sequence
  Description of Artificial Sequence: Synthetic oligonucleotide
gggcgccauagcaaccacu

SEQ ID NO: 2000097 - RNA, 19 nt, Artificial Sequence
  Description of Artificial Sequence: Synthetic oligonucleotide
ggacccuccuugagcacau

SEQ ID NO: 2000098 - RNA, 19 nt, Artificial Sequence
  Description of Artificial Sequence: Synthetic oligonucleotide
ggggugagggcgggagcaa

SEQ ID NO: 2000099 - RNA, 19 nt, Artificial Sequence
  Description of Artificial Sequence: Synthetic oligonucleotide
gcuuccccgggacccuccu

SEQ ID NO: 2000100 - RNA, 19 nt, Artificial Sequence
  Description of Artificial Sequence: Synthetic oligonucleotide
ggacuccaagcugggcccu

SEQ ID NO: 2000101 - RNA, 19 nt, Artificial Sequence
  Description of Artificial Sequence: Synthetic oligonucleotide
cgggacccuccuugagcac

SEQ ID NO: 2000102 - RNA, 19 nt, Artificial Sequence
  Description of Artificial Sequence: Synthetic oligonucleotide
cgggcgccauagcaaccac

SEQ ID NO: 2000103 - RNA, 19 nt, Artificial Sequence
  Description of Artificial Sequence: Synthetic oligonucleotide
gccuccccgccuugugugu

SEQ ID NO: 2000104 - RNA, 19 nt, Artificial Sequence
  Description of Artificial Sequence: Synthetic oligonucleotide
gguccccggugcccacaaa

SEQ ID NO: 2000105 - RNA, 19 nt, Artificial Sequence
  Description of Artificial Sequence: Synthetic oligonucleotide
ccccgugcaccucucggau

SEQ ID NO: 2000106 - RNA, 19 nt, Artificial Sequence
  Description of Artificial Sequence: Synthetic oligonucleotide
cgccuuguguguacacggu

SEQ ID NO: 2000107 - RNA, 19 nt, Artificial Sequence
  Description of Artificial Sequence: Synthetic oligonucleotide
gcgguccccggugcccaca

SEQ ID NO: 2000108 - RNA, 19 nt, Artificial Sequence
  Description of Artificial Sequence: Synthetic oligonucleotide
gggccgccguguugcuucu

SEQ ID NO: 2000109 - RNA, 19 nt, Artificial Sequence
  Description of Artificial Sequence: Synthetic oligonucleotide
cccuacccagugguugacu

SEQ ID NO: 2000110 - RNA, 19 nt, Artificial Sequence
  Description of Artificial Sequence: Synthetic oligonucleotide
ggccgccguguugcuucuc

SEQ ID NO: 2000111 - RNA, 19 nt, Artificial Sequence
  Description of Artificial Sequence: Synthetic oligonucleotide
ccucaucggugaccuguuu

SEQ ID NO: 2000112 - RNA, 19 nt, Artificial Sequence
  Description of Artificial Sequence: Synthetic oligonucleotide
cugggccgccguguugcuu

SEQ ID NO: 2000113 - RNA, 19 nt, Artificial Sequence
  Description of Artificial Sequence: Synthetic oligonucleotide
cgguccccggugcccacaa

SEQ ID NO: 2000114 - RNA, 19 nt, Artificial Sequence
  Description of Artificial Sequence: Synthetic oligonucleotide
cgguguggggaccccucau

SEQ ID NO: 2000115 - RNA, 19 nt, Artificial Sequence
  Description of Artificial Sequence: Synthetic oligonucleotide
ccgaggccugcugcagggu

SEQ ID NO: 2000116 - RNA, 19 nt, Artificial Sequence
  Description of Artificial Sequence: Synthetic oligonucleotide
aagacccucagccuugugc

SEQ ID NO: 2000117 - RNA, 19 nt, Artificial Sequence
  Description of Artificial Sequence: Synthetic oligonucleotide
uguuucuugagaccguagg

SEQ ID NO: 2000118 - RNA, 19 nt, Artificial Sequence
  Description of Artificial Sequence: Synthetic oligonucleotide
caugacguggaagagaucg

SEQ ID NO: 2000119 - RNA, 19 nt, Artificial Sequence
  Description of Artificial Sequence: Synthetic oligonucleotide
aagcgguguuucuugagac

SEQ ID NO: 2000120 - RNA, 19 nt, Artificial Sequence
  Description of Artificial Sequence: Synthetic oligonucleotide
ugagucaccagccccagga

SEQ ID NO: 2000121 - RNA, 19 nt, Artificial Sequence
  Description of Artificial Sequence: Synthetic oligonucleotide
aagcgcuucccgcacaccg

SEQ ID NO: 2000122 - RNA, 19 nt, Artificial Sequence
  Description of Artificial Sequence: Synthetic oligonucleotide
gaagccgaaggucuugccg

SEQ ID NO: 2000123 - RNA, 19 nt, Artificial Sequence
  Description of Artificial Sequence: Synthetic oligonucleotide
aggagcaggucguaggcgc

SEQ ID NO: 2000124 - RNA, 19 nt, Artificial Sequence
  Description of Artificial Sequence: Synthetic oligonucleotide
gaagagaucggggaagugc

SEQ ID NO: 2000125 - RNA, 19 nt, Artificial Sequence
  Description of Artificial Sequence: Synthetic oligonucleotide
cuccuuguggcucaugacg

SEQ ID NO: 2000126 - RNA, 19 nt, Artificial Sequence
  Description of Artificial Sequence: Synthetic oligonucleotide
uuucuugagaccguaggug

SEQ ID NO: 2000127 - RNA, 19 nt, Artificial Sequence
  Description of Artificial Sequence: Synthetic oligonucleotide
acuugugagucaccagccc

SEQ ID NO: 2000128 - RNA, 19 nt, Artificial Sequence
  Description of Artificial Sequence: Synthetic oligonucleotide
aagaccuugcgggaagugg

SEQ ID NO: 2000129 - RNA, 19 nt, Artificial Sequence
  Description of Artificial Sequence: Synthetic oligonucleotide
augugcgccuccuuguggc

SEQ ID NO: 2000130 - RNA, 19 nt, Artificial Sequence
  Description of Artificial Sequence: Synthetic oligonucleotide
uacuugugagucaccagcc

SEQ ID NO: 2000131 - RNA, 19 nt, Artificial Sequence
  Description of Artificial Sequence: Synthetic oligonucleotide
uccggaaguagccaggauc

SEQ ID NO: 2000132 - RNA, 19 nt, Artificial Sequence
  Description of Artificial Sequence: Synthetic oligonucleotide
uagguguuggcgaagcccu

SEQ ID NO: 2000133 - RNA, 19 nt, Artificial Sequence
  Description of Artificial Sequence: Synthetic oligonucleotide
agcgguguuucuugagacc

SEQ ID NO: 2000134 - RNA, 19 nt, Artificial Sequence
  Description of Artificial Sequence: Synthetic oligonucleotide
gaagccgcgcuucugccgg

SEQ ID NO: 2000135 - RNA, 19 nt, Artificial Sequence
  Description of Artificial Sequence: Synthetic oligonucleotide
gagguucucgaugaagccg

SEQ ID NO: 2000136 - RNA, 19 nt, Artificial Sequence
  Description of Artificial Sequence: Synthetic oligonucleotide
gagaccguagguguuggcg

SEQ ID NO: 2000137 - RNA, 19 nt, Artificial Sequence
  Description of Artificial Sequence: Synthetic oligonucleotide
ucugccgguggcuucggcg

SEQ ID NO: 2000138 - RNA, 19 nt, Artificial Sequence
  Description of Artificial Sequence: Synthetic oligonucleotide
guuggcgaagcccucgccg

SEQ ID NO: 2000139 - RNA, 19 nt, Artificial Sequence
  Description of Artificial Sequence: Synthetic oligonucleotide
uccuuguggcucaugacgu

SEQ ID NO: 2000140 - RNA, 19 nt, Artificial Sequence
  Description of Artificial Sequence: Synthetic oligonucleotide
ugacguggaagagaucggg

SEQ ID NO: 2000141 - RNA, 19 nt, Artificial Sequence
  Description of Artificial Sequence: Synthetic oligonucleotide
aggugcacguacuugugag

SEQ ID NO: 2000142 - RNA, 19 nt, Artificial Sequence
  Description of Artificial Sequence: Synthetic oligonucleotide
cuugaaggcgcgcucgccg

SEQ ID NO: 2000143 - RNA, 19 nt, Artificial Sequence
  Description of Artificial Sequence: Synthetic oligonucleotide
aagagaucggggaagugcu

SEQ ID NO: 2000144 - RNA, 19 nt, Artificial Sequence
  Description of Artificial Sequence: Synthetic oligonucleotide
cacacgccgcacuugaagg

SEQ ID NO: 2000145 - RNA, 19 nt, Artificial Sequence
  Description of Artificial Sequence: Synthetic oligonucleotide
ugaaguugccgcaggcccc

SEQ ID NO: 2000146 - RNA, 19 nt, Artificial Sequence
  Description of Artificial Sequence: Synthetic oligonucleotide
uggcgcaucagcagcgccg

SEQ ID NO: 2000147 - RNA, 19 nt, Artificial Sequence
  Description of Artificial Sequence: Synthetic oligonucleotide
uugugagucaccagcccca

SEQ ID NO: 2000148 - RNA, 19 nt, Artificial Sequence
  Description of Artificial Sequence: Synthetic oligonucleotide
uccgggcccgccaagaccc

SEQ ID NO: 2000149 - RNA, 19 nt, Artificial Sequence
  Description of Artificial Sequence: Synthetic oligonucleotide
acacgccgcacuugaaggc

SEQ ID NO: 2000150 - RNA, 19 nt, Artificial Sequence
  Description of Artificial Sequence: Synthetic oligonucleotide
agaucggggaagugcuccc

SEQ ID NO: 2000151 - RNA, 19 nt, Artificial Sequence
  Description of Artificial Sequence: Synthetic oligonucleotide
ugccacaugagguucucga

SEQ ID NO: 2000152 - RNA, 19 nt, Artificial Sequence
  Description of Artificial Sequence: Synthetic oligonucleotide
uccuugaaguugccgcagg

SEQ ID NO: 2000153 - RNA, 19 nt, Artificial Sequence
  Description of Artificial Sequence: Synthetic oligonucleotide
guaccaggagcgcaggaag

SEQ ID NO: 2000154 - RNA, 19 nt, Artificial Sequence
  Description of Artificial Sequence: Synthetic oligonucleotide
ugggcgaagcgcuuggcgc

SEQ ID NO: 2000155 - RNA, 19 nt, Artificial Sequence
  Description of Artificial Sequence: Synthetic oligonucleotide
accaggugcacguacuugu

SEQ ID NO: 2000156 - RNA, 19 nt, Artificial Sequence
  Description of Artificial Sequence: Synthetic oligonucleotide
uugaaggcgcgcucgccgg

SEQ ID NO: 2000157 - RNA, 19 nt, Artificial Sequence
  Description of Artificial Sequence: Synthetic oligonucleotide
cagccuugugcaucaagcg

SEQ ID NO: 2000158 - RNA, 19 nt, Artificial Sequence
  Description of Artificial Sequence: Synthetic oligonucleotide
ucaagcgguguuucuugag

SEQ ID NO: 2000159 - RNA, 19 nt, Artificial Sequence
  Description of Artificial Sequence: Synthetic oligonucleotide
ugcuuccggaaguagccag

SEQ ID NO: 2000160 - RNA, 19 nt, Artificial Sequence
  Description of Artificial Sequence: Synthetic oligonucleotide
gauccuugaaguugccgca

SEQ ID NO: 2000161 - RNA, 19 nt, Artificial Sequence
  Description of Artificial Sequence: Synthetic oligonucleotide
caucaagcgguguuucuug

SEQ ID NO: 2000162 - RNA, 19 nt, Artificial Sequence
  Description of Artificial Sequence: Synthetic oligonucleotide
gcaggcguagcucagcccg

SEQ ID NO: 2000163 - RNA, 19 nt, Artificial Sequence
  Description of Artificial Sequence: Synthetic oligonucleotide
cuuguggcucaugacgugg

SEQ ID NO: 2000164 - RNA, 19 nt, Artificial Sequence
  Description of Artificial Sequence: Synthetic oligonucleotide
guagguguuggcgaagccc

SEQ ID NO: 2000165 - RNA, 19 nt, Artificial Sequence
  Description of Artificial Sequence: Synthetic oligonucleotide
cuugaaguugccgcaggcc

SEQ ID NO: 2000166 - RNA, 19 nt, Artificial Sequence
  Description of Artificial Sequence: Synthetic oligonucleotide
gaaaugcuugaagcucugg

SEQ ID NO: 2000167 - RNA, 19 nt, Artificial Sequence
  Description of Artificial Sequence: Synthetic oligonucleotide
gacguggaagagaucgggg

SEQ ID NO: 2000168 - RNA, 19 nt, Artificial Sequence
  Description of Artificial Sequence: Synthetic oligonucleotide
uucccugccaaggugcugc

SEQ ID NO: 2000169 - RNA, 19 nt, Artificial Sequence
  Description of Artificial Sequence: Synthetic oligonucleotide
agaccguagguguuggcga

SEQ ID NO: 2000170 - RNA, 19 nt, Artificial Sequence
  Description of Artificial Sequence: Synthetic oligonucleotide
uggcgcgugaggcucugcg

SEQ ID NO: 2000171 - RNA, 19 nt, Artificial Sequence
  Description of Artificial Sequence: Synthetic oligonucleotide
gagaucggggaagugcucc

SEQ ID NO: 2000172 - RNA, 19 nt, Artificial Sequence
  Description of Artificial Sequence: Synthetic oligonucleotide
gaaguugccgcaggccccg

SEQ ID NO: 2000173 - RNA, 19 nt, Artificial Sequence
  Description of Artificial Sequence: Synthetic oligonucleotide
ccggaaguagccaggaucc

SEQ ID NO: 2000174 - RNA, 19 nt, Artificial Sequence
  Description of Artificial Sequence: Synthetic oligonucleotide
agcaggcguagcucagccc

SEQ ID NO: 2000175 - RNA, 19 nt, Artificial Sequence
  Description of Artificial Sequence: Synthetic oligonucleotide
uugagaccguagguguugg

SEQ ID NO: 2000176 - RNA, 19 nt, Artificial Sequence
  Description of Artificial Sequence: Synthetic oligonucleotide
aucggggaagugcuccccg

SEQ ID NO: 2000177 - RNA, 19 nt, Artificial Sequence
  Description of Artificial Sequence: Synthetic oligonucleotide
cugccgguggcuucggcgg

SEQ ID NO: 2000178 - RNA, 19 nt, Artificial Sequence
  Description of Artificial Sequence: Synthetic oligonucleotide
cuugcgggaaguggaagag

SEQ ID NO: 2000179 - RNA, 19 nt, Artificial Sequence
  Description of Artificial Sequence: Synthetic oligonucleotide
aguccgagcaggcguagcu

SEQ ID NO: 2000180 - RNA, 19 nt, Artificial Sequence
  Description of Artificial Sequence: Synthetic oligonucleotide
cccgccaagacccucagcc

SEQ ID NO: 2000181 - RNA, 19 nt, Artificial Sequence
  Description of Artificial Sequence: Synthetic oligonucleotide
ucccagaagcgcuucccgc

SEQ ID NO: 2000182 - RNA, 19 nt, Artificial Sequence
  Description of Artificial Sequence: Synthetic oligonucleotide
acuugaaggcgcgcucgcc

SEQ ID NO: 2000183 - RNA, 19 nt, Artificial Sequence
  Description of Artificial Sequence: Synthetic oligonucleotide
gagcaggcguagcucagcc

SEQ ID NO: 2000184 - RNA, 19 nt, Artificial Sequence
  Description of Artificial Sequence: Synthetic oligonucleotide
ugcacguacuugugaguca

SEQ ID NO: 2000185 - RNA, 19 nt, Artificial Sequence
  Description of Artificial Sequence: Synthetic oligonucleotide
cuugagaccguagguguug

SEQ ID NO: 2000186 - RNA, 19 nt, Artificial Sequence
  Description of Artificial Sequence: Synthetic oligonucleotide
acaccgggcagcggaagcc

SEQ ID NO: 2000187 - RNA, 19 nt, Artificial Sequence
  Description of Artificial Sequence: Synthetic oligonucleotide
gcucuggccgcacaggccg

SEQ ID NO: 2000188 - RNA, 19 nt, Artificial Sequence
  Description of Artificial Sequence: Synthetic oligonucleotide
gcgguguuucuugagaccg

SEQ ID NO: 2000189 - RNA, 19 nt, Artificial Sequence
  Description of Artificial Sequence: Synthetic oligonucleotide
guggcuucggcggugcagg

SEQ ID NO: 2000190 - RNA, 19 nt, Artificial Sequence
  Description of Artificial Sequence: Synthetic oligonucleotide
cagccguagggcuucucgg

SEQ ID NO: 2000191 - RNA, 19 nt, Artificial Sequence
  Description of Artificial Sequence: Synthetic oligonucleotide
ggcuucucggacaugugcg

SEQ ID NO: 2000192 - RNA, 19 nt, Artificial Sequence
  Description of Artificial Sequence: Synthetic oligonucleotide
uaggcgcccgcgaagcucu

SEQ ID NO: 2000193 - RNA, 19 nt, Artificial Sequence
  Description of Artificial Sequence: Synthetic oligonucleotide
cugggcgaagcgcuuggcg

SEQ ID NO: 2000194 - RNA, 19 nt, Artificial Sequence
  Description of Artificial Sequence: Synthetic oligonucleotide
cucccagaagcgcuucccg

SEQ ID NO: 2000195 - RNA, 19 nt, Artificial Sequence
  Description of Artificial Sequence: Synthetic oligonucleotide
uguuggcgaagcccucgcc

SEQ ID NO: 2000196 - RNA, 19 nt, Artificial Sequence
  Description of Artificial Sequence: Synthetic oligonucleotide
uuccgggcccgccaagacc

SEQ ID NO: 2000197 - RNA, 19 nt, Artificial Sequence
  Description of Artificial Sequence: Synthetic oligonucleotide
caggagcgcaggaagcccc

SEQ ID NO: 2000198 - RNA, 19 nt, Artificial Sequence
  Description of Artificial Sequence: Synthetic oligonucleotide
acguacuugugagucacca

SEQ ID NO: 2000199 - RNA, 19 nt, Artificial Sequence
  Description of Artificial Sequence: Synthetic oligonucleotide
aucaagcgguguuucuuga

SEQ ID NO: 2000200 - RNA, 19 nt, Artificial Sequence
  Description of Artificial Sequence: Synthetic oligonucleotide
guuucuugagaccguaggu

SEQ ID NO: 2000201 - RNA, 19 nt, Artificial Sequence
  Description of Artificial Sequence: Synthetic oligonucleotide
ucggcggugcaggagcagg

SEQ ID NO: 2000202 - RNA, 19 nt, Artificial Sequence
  Description of Artificial Sequence: Synthetic oligonucleotide
uggaagagaucggggaagu

SEQ ID NO: 2000203 - RNA, 19 nt, Artificial Sequence
  Description of Artificial Sequence: Synthetic oligonucleotide
guagcucagcccgucgccg

SEQ ID NO: 2000204 - RNA, 19 nt, Artificial Sequence
  Description of Artificial Sequence: Synthetic oligonucleotide
caagcgguguuucuugaga

SEQ ID NO: 2000205 - RNA, 19 nt, Artificial Sequence
  Description of Artificial Sequence: Synthetic oligonucleotide
uggaccuggcgguggcgcg

SEQ ID NO: 2000206 - RNA, 19 nt, Artificial Sequence
  Description of Artificial Sequence: Synthetic oligonucleotide
aggcgucgcagccguaggg

SEQ ID NO: 2000207 - RNA, 19 nt, Artificial Sequence
  Description of Artificial Sequence: Synthetic oligonucleotide
augacguggaagagaucgg

SEQ ID NO: 2000208 - RNA, 19 nt, Artificial Sequence
  Description of Artificial Sequence: Synthetic oligonucleotide
cacgccgcacuugaaggcg

SEQ ID NO: 2000209 - RNA, 19 nt, Artificial Sequence
  Description of Artificial Sequence: Synthetic oligonucleotide
ggacaugugcgccuccuug

SEQ ID NO: 2000210 - RNA, 19 nt, Artificial Sequence
  Description of Artificial Sequence: Synthetic oligonucleotide
ucguaggcgcccgcgaagc

SEQ ID NO: 2000211 - RNA, 19 nt, Artificial Sequence
  Description of Artificial Sequence: Synthetic oligonucleotide
cacccugaugggcagccag

SEQ ID NO: 2000212 - RNA, 19 nt, Artificial Sequence
  Description of Artificial Sequence: Synthetic oligonucleotide
agagcaagacggagagagg

SEQ ID NO: 2000213 - RNA, 19 nt, Artificial Sequence
  Description of Artificial Sequence: Synthetic oligonucleotide
agccguagggcuucucgga

SEQ ID NO: 2000214 - RNA, 19 nt, Artificial Sequence
  Description of Artificial Sequence: Synthetic oligonucleotide
cugcggguagccgaagacc

SEQ ID NO: 2000215 - RNA, 19 nt, Artificial Sequence
  Description of Artificial Sequence: Synthetic oligonucleotide
gugcacguacuugugaguc

SEQ ID NO: 2000216 - RNA, 19 nt, Artificial Sequence
  Description of Artificial Sequence: Synthetic oligonucleotide
ugcacgacccggugcugcc

SEQ ID NO: 2000217 - RNA, 19 nt, Artificial Sequence
  Description of Artificial Sequence: Synthetic oligonucleotide
gaagugcuccccgcagucc

SEQ ID NO: 2000218 - RNA, 19 nt, Artificial Sequence
  Description of Artificial Sequence: Synthetic oligonucleotide
gaagaccuugcgggaagug

SEQ ID NO: 2000219 - RNA, 19 nt, Artificial Sequence
  Description of Artificial Sequence: Synthetic oligonucleotide
uuggcgcacacgccgcacu

SEQ ID NO: 2000220 - RNA, 19 nt, Artificial Sequence
  Description of Artificial Sequence: Synthetic oligonucleotide
gucguaggcgcccgcgaag

SEQ ID NO: 2000221 - RNA, 19 nt, Artificial Sequence
  Description of Artificial Sequence: Synthetic oligonucleotide
ucggggaagugcuccccgc

SEQ ID NO: 2000222 - RNA, 19 nt, Artificial Sequence
  Description of Artificial Sequence: Synthetic oligonucleotide
cucgccggugugcacgacc

SEQ ID NO: 2000223 - RNA, 19 nt, Artificial Sequence
  Description of Artificial Sequence: Synthetic oligonucleotide
gccgcagguaccaggagcg

SEQ ID NO: 2000224 - RNA, 19 nt, Artificial Sequence
  Description of Artificial Sequence: Synthetic oligonucleotide
cacuugaaggcgcgcucgc

SEQ ID NO: 2000225 - RNA, 19 nt, Artificial Sequence
  Description of Artificial Sequence: Synthetic oligonucleotide
gacccggugcugccgcagg

SEQ ID NO: 2000226 - RNA, 19 nt, Artificial Sequence
  Description of Artificial Sequence: Synthetic oligonucleotide
accgguagggccgcugcuc

SEQ ID NO: 2000227 - RNA, 19 nt, Artificial Sequence
  Description of Artificial Sequence: Synthetic oligonucleotide
uguuccgggcccgccaaga

SEQ ID NO: 2000228 - RNA, 19 nt, Artificial Sequence
  Description of Artificial Sequence: Synthetic oligonucleotide
ccacaugagguucucgaug

SEQ ID NO: 2000229 - RNA, 19 nt, Artificial Sequence
  Description of Artificial Sequence: Synthetic oligonucleotide
gcgcgugaggcucugcggg

SEQ ID NO: 2000230 - RNA, 19 nt, Artificial Sequence
  Description of Artificial Sequence: Synthetic oligonucleotide
caggagcaggucguaggcg

SEQ ID NO: 2000231 - RNA, 19 nt, Artificial Sequence
  Description of Artificial Sequence: Synthetic oligonucleotide
gcgcuuggcgcacacgccg

SEQ ID NO: 2000232 - RNA, 19 nt, Artificial Sequence
  Description of Artificial Sequence: Synthetic oligonucleotide
ucuggccgcagguggcaca

SEQ ID NO: 2000233 - RNA, 19 nt, Artificial Sequence
  Description of Artificial Sequence: Synthetic oligonucleotide
ggcacagcugaagcgcucg

SEQ ID NO: 2000234 - RNA, 19 nt, Artificial Sequence
  Description of Artificial Sequence: Synthetic oligonucleotide
cacguacuugugagucacc

SEQ ID NO: 2000235 - RNA, 19 nt, Artificial Sequence
  Description of Artificial Sequence: Synthetic oligonucleotide
guguuggcgaagcccucgc

SEQ ID NO: 2000236 - RNA, 19 nt, Artificial Sequence
  Description of Artificial Sequence: Synthetic oligonucleotide
gagcgcaggaagccccggc

SEQ ID NO: 2000237 - RNA, 19 nt, Artificial Sequence
  Description of Artificial Sequence: Synthetic oligonucleotide
agagaucggggaagugcuc

SEQ ID NO: 2000238 - RNA, 19 nt, Artificial Sequence
  Description of Artificial Sequence: Synthetic oligonucleotide
gcccgcgaagcucuggccg

SEQ ID NO: 2000239 - RNA, 19 nt, Artificial Sequence
  Description of Artificial Sequence: Synthetic oligonucleotide
agggauccuucccugccaa

SEQ ID NO: 2000240 - RNA, 19 nt, Artificial Sequence
  Description of Artificial Sequence: Synthetic oligonucleotide
uggcgguggcgcgugaggc

SEQ ID NO: 2000241 - RNA, 19 nt, Artificial Sequence
  Description of Artificial Sequence: Synthetic oligonucleotide
cuggugcaccagcuugugc

SEQ ID NO: 2000242 - RNA, 19 nt, Artificial Sequence
  Description of Artificial Sequence: Synthetic oligonucleotide
agccgguggaccuggcggu

SEQ ID NO: 2000243 - RNA, 19 nt, Artificial Sequence
  Description of Artificial Sequence: Synthetic oligonucleotide
guucucgaugaagccgaag

SEQ ID NO: 2000244 - RNA, 19 nt, Artificial Sequence
  Description of Artificial Sequence: Synthetic oligonucleotide
gaccguagguguuggcgaa

SEQ ID NO: 2000245 - RNA, 19 nt, Artificial Sequence
  Description of Artificial Sequence: Synthetic oligonucleotide
ugaaggcgcgcucgccggu

SEQ ID NO: 2000246 - RNA, 19 nt, Artificial Sequence
  Description of Artificial Sequence: Synthetic oligonucleotide
agcgcuucccgcacaccgg

SEQ ID NO: 2000247 - RNA, 19 nt, Artificial Sequence
  Description of Artificial Sequence: Synthetic oligonucleotide
acccugaugggcagccagg

SEQ ID NO: 2000248 - RNA, 19 nt, Artificial Sequence
  Description of Artificial Sequence: Synthetic oligonucleotide
ugugcgccuccuuguggcu

SEQ ID NO: 2000249 - RNA, 19 nt, Artificial Sequence
  Description of Artificial Sequence: Synthetic oligonucleotide
uggcgaagcccucgccgca

SEQ ID NO: 2000250 - RNA, 19 nt, Artificial Sequence
  Description of Artificial Sequence: Synthetic oligonucleotide
ucccgcacaccgggcagcg

SEQ ID NO: 2000251 - RNA, 19 nt, Artificial Sequence
  Description of Artificial Sequence: Synthetic oligonucleotide
accuugcgggaaguggaag

SEQ ID NO: 2000252 - RNA, 19 nt, Artificial Sequence
  Description of Artificial Sequence: Synthetic oligonucleotide
caggauccuugaaguugcc

SEQ ID NO: 2000253 - RNA, 19 nt, Artificial Sequence
  Description of Artificial Sequence: Synthetic oligonucleotide
agcgcuggggccgggccac

SEQ ID NO: 2000254 - RNA, 19 nt, Artificial Sequence
  Description of Artificial Sequence: Synthetic oligonucleotide
ucggacaugugcgccuccu

SEQ ID NO: 2000255 - RNA, 19 nt, Artificial Sequence
  Description of Artificial Sequence: Synthetic oligonucleotide
acacgccgcaccgguaggg

SEQ ID NO: 2000256 - RNA, 19 nt, Artificial Sequence
  Description of Artificial Sequence: Synthetic oligonucleotide
acgccgcacuugaaggcgc

SEQ ID NO: 2000257 - RNA, 19 nt, Artificial Sequence
  Description of Artificial Sequence: Synthetic oligonucleotide
aaggcgcgcucgccggugu

SEQ ID NO: 2000258 - RNA, 19 nt, Artificial Sequence
  Description of Artificial Sequence: Synthetic oligonucleotide
agcaggucguaggcgcccg

SEQ ID NO: 2000259 - RNA, 19 nt, Artificial Sequence
  Description of Artificial Sequence: Synthetic oligonucleotide
cacgacccggugcugccgc

SEQ ID NO: 2000260 - RNA, 19 nt, Artificial Sequence
  Description of Artificial Sequence: Synthetic oligonucleotide
uuccggaaguagccaggau

SEQ ID NO: 2000261 - RNA, 19 nt, Artificial Sequence
  Description of Artificial Sequence: Synthetic oligonucleotide
ggcgcgugaggcucugcgg

SEQ ID NO: 2000262 - RNA, 19 nt, Artificial Sequence
  Description of Artificial Sequence: Synthetic oligonucleotide
ugugccacaugagguucuc

SEQ ID NO: 2000263 - RNA, 19 nt, Artificial Sequence
  Description of Artificial Sequence: Synthetic oligonucleotide
ggggaagugcuccccgcag

SEQ ID NO: 2000264 - RNA, 19 nt, Artificial Sequence
  Description of Artificial Sequence: Synthetic oligonucleotide
caggucguaggcgcccgcg

SEQ ID NO: 2000265 - RNA, 19 nt, Artificial Sequence
  Description of Artificial Sequence: Synthetic oligonucleotide
gaggacugggcgaagcgcu

SEQ ID NO: 2000266 - RNA, 19 nt, Artificial Sequence
  Description of Artificial Sequence: Synthetic oligonucleotide
aaguugccgcaggccccgc

SEQ ID NO: 2000267 - RNA, 19 nt, Artificial Sequence
  Description of Artificial Sequence: Synthetic oligonucleotide
ggaggacugggcgaagcgc

SEQ ID NO: 2000268 - RNA, 19 nt, Artificial Sequence
  Description of Artificial Sequence: Synthetic oligonucleotide
aggucguaggcgcccgcga

SEQ ID NO: 2000269 - RNA, 19 nt, Artificial Sequence
  Description of Artificial Sequence: Synthetic oligonucleotide
cacacgccgcaccgguagg

SEQ ID NO: 2000270 - RNA, 19 nt, Artificial Sequence
  Description of Artificial Sequence: Synthetic oligonucleotide
ucucggacaugugcgccuc

SEQ ID NO: 2000271 - RNA, 19 nt, Artificial Sequence
  Description of Artificial Sequence: Synthetic oligonucleotide
gcggaagccgcgcuucugc

SEQ ID NO: 2000272 - RNA, 19 nt, Artificial Sequence
  Description of Artificial Sequence: Synthetic oligonucleotide
agccaggauccuugaaguu

SEQ ID NO: 2000273 - RNA, 19 nt, Artificial Sequence
  Description of Artificial Sequence: Synthetic oligonucleotide
caccaggugcacguacuug

SEQ ID NO: 2000274 - RNA, 19 nt, Artificial Sequence
  Description of Artificial Sequence: Synthetic oligonucleotide
gcacguacuugugagucac

SEQ ID NO: 2000275 - RNA, 19 nt, Artificial Sequence
  Description of Artificial Sequence: Synthetic oligonucleotide
gucgccggggccaccggcg

SEQ ID NO: 2000276 - RNA, 19 nt, Artificial Sequence
  Description of Artificial Sequence: Synthetic oligonucleotide
caccgggcagcggaagccg

SEQ ID NO: 2000277 - RNA, 19 nt, Artificial Sequence
  Description of Artificial Sequence: Synthetic oligonucleotide
cacggcgugcagccgccgg

SEQ ID NO: 2000278 - RNA, 19 nt, Artificial Sequence
  Description of Artificial Sequence: Synthetic oligonucleotide
aggagcgcaggaagccccg

SEQ ID NO: 2000279 - RNA, 19 nt, Artificial Sequence
  Description of Artificial Sequence: Synthetic oligonucleotide
caggugcacguacuuguga

SEQ ID NO: 2000280 - RNA, 19 nt, Artificial Sequence
  Description of Artificial Sequence: Synthetic oligonucleotide
cuuccggaaguagccagga

SEQ ID NO: 2000281 - RNA, 19 nt, Artificial Sequence
  Description of Artificial Sequence: Synthetic oligonucleotide
gccgccggagccaucagag

SEQ ID NO: 2000282 - RNA, 19 nt, Artificial Sequence
  Description of Artificial Sequence: Synthetic oligonucleotide
guuccgggcccgccaagac

SEQ ID NO: 2000283 - RNA, 19 nt, Artificial Sequence
  Description of Artificial Sequence: Synthetic oligonucleotide
gugccacaugagguucucg

SEQ ID NO: 2000284 - RNA, 19 nt, Artificial Sequence
  Description of Artificial Sequence: Synthetic oligonucleotide
accguagguguuggcgaag

SEQ ID NO: 2000285 - RNA, 19 nt, Artificial Sequence
  Description of Artificial Sequence: Synthetic oligonucleotide
cugccacccugaugggcag

SEQ ID NO: 2000286 - RNA, 19 nt, Artificial Sequence
  Description of Artificial Sequence: Synthetic oligonucleotide
gaaggcgcgcucgccggug

SEQ ID NO: 2000287 - RNA, 19 nt, Artificial Sequence
  Description of Artificial Sequence: Synthetic oligonucleotide
ggcguagcucagcccgucg

SEQ ID NO: 2000288 - RNA, 19 nt, Artificial Sequence
  Description of Artificial Sequence: Synthetic oligonucleotide
acggcgugcagccgccggu

SEQ ID NO: 2000289 - RNA, 19 nt, Artificial Sequence
  Description of Artificial Sequence: Synthetic oligonucleotide
ggugcaccagcuugugcca

SEQ ID NO: 2000290 - RNA, 19 nt, Artificial Sequence
  Description of Artificial Sequence: Synthetic oligonucleotide
cuccccgcaguccgagcag

SEQ ID NO: 2000291 - RNA, 19 nt, Artificial Sequence
  Description of Artificial Sequence: Synthetic oligonucleotide
gugcaucaagcgguguuuc

SEQ ID NO: 2000292 - RNA, 19 nt, Artificial Sequence
  Description of Artificial Sequence: Synthetic oligonucleotide
gugcacgacccggugcugc

SEQ ID NO: 2000293 - RNA, 19 nt, Artificial Sequence
  Description of Artificial Sequence: Synthetic oligonucleotide
gccggugugcacgacccgg

SEQ ID NO: 2000294 - RNA, 19 nt, Artificial Sequence
  Description of Artificial Sequence: Synthetic oligonucleotide
ccugccacccugaugggca

SEQ ID NO: 2000295 - RNA, 19 nt, Artificial Sequence
  Description of Artificial Sequence: Synthetic oligonucleotide
cgggaaguggaagagcaag

SEQ ID NO: 2000296 - RNA, 19 nt, Artificial Sequence
  Description of Artificial Sequence: Synthetic oligonucleotide
ugugcacgacccggugcug

SEQ ID NO: 2000297 - RNA, 19 nt, Artificial Sequence
  Description of Artificial Sequence: Synthetic oligonucleotide
aguugccgcaggccccgca

SEQ ID NO: 2000298 - RNA, 19 nt, Artificial Sequence
  Description of Artificial Sequence: Synthetic oligonucleotide
guaggcgcccgcgaagcuc

SEQ ID NO: 2000299 - RNA, 19 nt, Artificial Sequence
  Description of Artificial Sequence: Synthetic oligonucleotide
gcucaugacguggaagaga

SEQ ID NO: 2000300 - RNA, 19 nt, Artificial Sequence
  Description of Artificial Sequence: Synthetic oligonucleotide
gguaccaggagcgcaggaa

SEQ ID NO: 2000301 - RNA, 19 nt, Artificial Sequence
  Description of Artificial Sequence: Synthetic oligonucleotide
uggcgcacacgccgcacuu

SEQ ID NO: 2000302 - RNA, 19 nt, Artificial Sequence
  Description of Artificial Sequence: Synthetic oligonucleotide
cagggauccuucccugcca

SEQ ID NO: 2000303 - RNA, 19 nt, Artificial Sequence
  Description of Artificial Sequence: Synthetic oligonucleotide
ccgaagaccuugcgggaag

SEQ ID NO: 2000304 - RNA, 19 nt, Artificial Sequence
  Description of Artificial Sequence: Synthetic oligonucleotide
cucggacaugugcgccucc

SEQ ID NO: 2000305 - RNA, 19 nt, Artificial Sequence
  Description of Artificial Sequence: Synthetic oligonucleotide
ccuugcgggaaguggaaga

SEQ ID NO: 2000306 - RNA, 19 nt, Artificial Sequence
  Description of Artificial Sequence: Synthetic oligonucleotide
cucuggccgcacaggccgc

SEQ ID NO: 2000307 - RNA, 19 nt, Artificial Sequence
  Description of Artificial Sequence: Synthetic oligonucleotide
cacgccgcaccgguagggc

SEQ ID NO: 2000308 - RNA, 19 nt, Artificial Sequence
  Description of Artificial Sequence: Synthetic oligonucleotide
agguguuggcgaagcccuc

SEQ ID NO: 2000309 - RNA, 19 nt, Artificial Sequence
  Description of Artificial Sequence: Synthetic oligonucleotide
ggccacggcgugcagccgc

SEQ ID NO: 2000310 - RNA, 19 nt, Artificial Sequence
  Description of Artificial Sequence: Synthetic oligonucleotide
gcaggcgucgcagccguag

SEQ ID NO: 2000311 - RNA, 19 nt, Artificial Sequence
  Description of Artificial Sequence: Synthetic oligonucleotide
cucugcggguagccgaaga

SEQ ID NO: 2000312 - RNA, 19 nt, Artificial Sequence
  Description of Artificial Sequence: Synthetic oligonucleotide
ggcgcaucagcagcgccgc

SEQ ID NO: 2000313 - RNA, 19 nt, Artificial Sequence
  Description of Artificial Sequence: Synthetic oligonucleotide
cccgugguccccuggcccg

SEQ ID NO: 2000314 - RNA, 19 nt, Artificial Sequence
  Description of Artificial Sequence: Synthetic oligonucleotide
gggcgaagcgcuuggcgca

SEQ ID NO: 2000315 - RNA, 19 nt, Artificial Sequence
  Description of Artificial Sequence: Synthetic oligonucleotide
cuucggcggugcaggagca

SEQ ID NO: 2000316 - RNA, 19 nt, Artificial Sequence
  Description of Artificial Sequence: Synthetic oligonucleotide
gccguagggcuucucggac

SEQ ID NO: 2000317 - RNA, 19 nt, Artificial Sequence
  Description of Artificial Sequence: Synthetic oligonucleotide
uggcuucggcggugcagga

SEQ ID NO: 2000318 - RNA, 19 nt, Artificial Sequence
  Description of Artificial Sequence: Synthetic oligonucleotide
ccuuguggcucaugacgug

SEQ ID NO: 2000319 - RNA, 19 nt, Artificial Sequence
  Description of Artificial Sequence: Synthetic oligonucleotide
cguagcucagcccgucgcc

SEQ ID NO: 2000320 - RNA, 19 nt, Artificial Sequence
  Description of Artificial Sequence: Synthetic oligonucleotide
ccagaagcgcuucccgcac

SEQ ID NO: 2000321 - RNA, 19 nt, Artificial Sequence
  Description of Artificial Sequence: Synthetic oligonucleotide
cucgccgcaggaggagcag

SEQ ID NO: 2000322 - RNA, 19 nt, Artificial Sequence
  Description of Artificial Sequence: Synthetic oligonucleotide
gcuccccgcaguccgagca

SEQ ID NO: 2000323 - RNA, 19 nt, Artificial Sequence
  Description of Artificial Sequence: Synthetic oligonucleotide
cccgcgaagcucuggccgc

SEQ ID NO: 2000324 - RNA, 19 nt, Artificial Sequence
  Description of Artificial Sequence: Synthetic oligonucleotide
cccagaagcgcuucccgca

SEQ ID NO: 2000325 - RNA, 19 nt, Artificial Sequence
  Description of Artificial Sequence: Synthetic oligonucleotide
caguccgagcaggcguagc

SEQ ID NO: 2000326 - RNA, 19 nt, Artificial Sequence
  Description of Artificial Sequence: Synthetic oligonucleotide
cuguuccgggcccgccaag

SEQ ID NO: 2000327 - RNA, 19 nt, Artificial Sequence
  Description of Artificial Sequence: Synthetic oligonucleotide
gaccuggcgguggcgcgug

SEQ ID NO: 2000328 - RNA, 19 nt, Artificial Sequence
  Description of Artificial Sequence: Synthetic oligonucleotide
ugccacccugaugggcagc

SEQ ID NO: 2000329 - RNA, 19 nt, Artificial Sequence
  Description of Artificial Sequence: Synthetic oligonucleotide
ccguagguguuggcgaagc

SEQ ID NO: 2000330 - RNA, 19 nt, Artificial Sequence
  Description of Artificial Sequence: Synthetic oligonucleotide
ccucccagaagcgcuuccc

SEQ ID NO: 2000331 - RNA, 19 nt, Artificial Sequence
  Description of Artificial Sequence: Synthetic oligonucleotide
gugguccccuggcccgcgg

SEQ ID NO: 2000332 - RNA, 19 nt, Artificial Sequence
  Description of Artificial Sequence: Synthetic oligonucleotide
gugcuccccgcaguccgag

SEQ ID NO: 2000333 - RNA, 19 nt, Artificial Sequence
  Description of Artificial Sequence: Synthetic oligonucleotide
gcuugugccacaugagguu

SEQ ID NO: 2000334 - RNA, 19 nt, Artificial Sequence
  Description of Artificial Sequence: Synthetic oligonucleotide
gccacccugaugggcagcc

SEQ ID NO: 2000335 - RNA, 19 nt, Artificial Sequence
  Description of Artificial Sequence: Synthetic oligonucleotide
gguggaccuggcgguggcg

SEQ ID NO: 2000336 - RNA, 19 nt, Artificial Sequence
  Description of Artificial Sequence: Synthetic oligonucleotide
cagccgccggugcuccgcc

SEQ ID NO: 2000337 - RNA, 19 nt, Artificial Sequence
  Description of Artificial Sequence: Synthetic oligonucleotide
gcgcccgcgaagcucuggc

SEQ ID NO: 2000338 - RNA, 19 nt, Artificial Sequence
  Description of Artificial Sequence: Synthetic oligonucleotide
gccggagccaucagaggac

SEQ ID NO: 2000339 - RNA, 19 nt, Artificial Sequence
  Description of Artificial Sequence: Synthetic oligonucleotide
gcugaagcgcucggcgccc

SEQ ID NO: 2000340 - RNA, 19 nt, Artificial Sequence
  Description of Artificial Sequence: Synthetic oligonucleotide
gcuccgccaggcuggagga

SEQ ID NO: 2000341 - RNA, 19 nt, Artificial Sequence
  Description of Artificial Sequence: Synthetic oligonucleotide
cguagguguuggcgaagcc

SEQ ID NO: 2000342 - RNA, 19 nt, Artificial Sequence
  Description of Artificial Sequence: Synthetic oligonucleotide
ccggugcugccgcagguac

SEQ ID NO: 2000343 - RNA, 19 nt, Artificial Sequence
  Description of Artificial Sequence: Synthetic oligonucleotide
ggguagccgaagaccuugc

SEQ ID NO: 2000344 - RNA, 19 nt, Artificial Sequence
  Description of Artificial Sequence: Synthetic oligonucleotide
acgacccggugcugccgca

SEQ ID NO: 2000345 - RNA, 19 nt, Artificial Sequence
  Description of Artificial Sequence: Synthetic oligonucleotide
uccggcgcaccaggugcac

SEQ ID NO: 2000346 - RNA, 19 nt, Artificial Sequence
  Description of Artificial Sequence: Synthetic oligonucleotide
cucuggccgcagguggcac

SEQ ID NO: 2000347 - RNA, 19 nt, Artificial Sequence
  Description of Artificial Sequence: Synthetic oligonucleotide
aggcgcgcucgccggugug

SEQ ID NO: 2000348 - RNA, 19 nt, Artificial Sequence
  Description of Artificial Sequence: Synthetic oligonucleotide
ccccgugguccccuggccc

SEQ ID NO: 2000349 - RNA, 19 nt, Artificial Sequence
  Description of Artificial Sequence: Synthetic oligonucleotide
guagggcuucucggacaug

SEQ ID NO: 2000350 - RNA, 19 nt, Artificial Sequence
  Description of Artificial Sequence: Synthetic oligonucleotide
ggagcgcaggaagccccgg

SEQ ID NO: 2000351 - RNA, 19 nt, Artificial Sequence
  Description of Artificial Sequence: Synthetic oligonucleotide
gcagcggaagccgcgcuuc

SEQ ID NO: 2000352 - RNA, 19 nt, Artificial Sequence
  Description of Artificial Sequence: Synthetic oligonucleotide
gccgcgcuucugccggugg

SEQ ID NO: 2000353 - RNA, 19 nt, Artificial Sequence
  Description of Artificial Sequence: Synthetic oligonucleotide
ccgagcaggcguagcucag

SEQ ID NO: 2000354 - RNA, 19 nt, Artificial Sequence
  Description of Artificial Sequence: Synthetic oligonucleotide
gccucccagaagcgcuucc

SEQ ID NO: 2000355 - RNA, 19 nt, Artificial Sequence
  Description of Artificial Sequence: Synthetic oligonucleotide
gccgcaggaggagcagcgg

SEQ ID NO: 2000356 - RNA, 19 nt, Artificial Sequence
  Description of Artificial Sequence: Synthetic oligonucleotide
ccggccagggcgcagggca

SEQ ID NO: 2000357 - RNA, 19 nt, Artificial Sequence
  Description of Artificial Sequence: Synthetic oligonucleotide
cguggaagagaucggggaa

SEQ ID NO: 2000358 - RNA, 19 nt, Artificial Sequence
  Description of Artificial Sequence: Synthetic oligonucleotide
gcgcaccaggugcacguac

SEQ ID NO: 2000359 - RNA, 19 nt, Artificial Sequence
  Description of Artificial Sequence: Synthetic oligonucleotide
cuggccgcacaggccgcag

SEQ ID NO: 2000360 - RNA, 19 nt, Artificial Sequence
  Description of Artificial Sequence: Synthetic oligonucleotide
ccgccggagccaucagagg

SEQ ID NO: 2000361 - RNA, 19 nt, Artificial Sequence
  Description of Artificial Sequence: Synthetic oligonucleotide
ggcgugcagccgccggugc

SEQ ID NO: 2000362 - RNA, 19 nt, Artificial Sequence
  Description of Artificial Sequence: Synthetic oligonucleotide
gggaagugcuccccgcagu

SEQ ID NO: 2000363 - RNA, 19 nt, Artificial Sequence
  Description of Artificial Sequence: Synthetic oligonucleotide
cgccggagccaucagagga

SEQ ID NO: 2000364 - RNA, 19 nt, Artificial Sequence
  Description of Artificial Sequence: Synthetic oligonucleotide
ggcccgccaagacccucag

SEQ ID NO: 2000365 - RNA, 19 nt, Artificial Sequence
  Description of Artificial Sequence: Synthetic oligonucleotide
gacccucagccuugugcau

SEQ ID NO: 2000366 - RNA, 19 nt, Artificial Sequence
  Description of Artificial Sequence: Synthetic oligonucleotide
gcacgacccggugcugccg

SEQ ID NO: 2000367 - RNA, 19 nt, Artificial Sequence
  Description of Artificial Sequence: Synthetic oligonucleotide
aggacugggcgaagcgcuu

SEQ ID NO: 2000368 - RNA, 19 nt, Artificial Sequence
  Description of Artificial Sequence: Synthetic oligonucleotide
gccacaugagguucucgau

SEQ ID NO: 2000369 - RNA, 19 nt, Artificial Sequence
  Description of Artificial Sequence: Synthetic oligonucleotide
agccgcgcuucugccggug

SEQ ID NO: 2000370 - RNA, 19 nt, Artificial Sequence
  Description of Artificial Sequence: Synthetic oligonucleotide
gcaguccgagcaggcguag

SEQ ID NO: 2000371 - RNA, 19 nt, Artificial Sequence
  Description of Artificial Sequence: Synthetic oligonucleotide
ggcgcacacgccgcacuug

SEQ ID NO: 2000372 - RNA, 19 nt, Artificial Sequence
  Description of Artificial Sequence: Synthetic oligonucleotide
ccguagggcuucucggaca

SEQ ID NO: 2000373 - RNA, 19 nt, Artificial Sequence
  Description of Artificial Sequence: Synthetic oligonucleotide
cagcccgucgccggggcca

SEQ ID NO: 2000374 - RNA, 19 nt, Artificial Sequence
  Description of Artificial Sequence: Synthetic oligonucleotide
ccgcacaccgggcagcgga

SEQ ID NO: 2000375 - RNA, 19 nt, Artificial Sequence
  Description of Artificial Sequence: Synthetic oligonucleotide
aggguccggcgcaccaggu

SEQ ID NO: 2000376 - RNA, 19 nt, Artificial Sequence
  Description of Artificial Sequence: Synthetic oligonucleotide
guccggcgcaccaggugca

SEQ ID NO: 2000377 - RNA, 19 nt, Artificial Sequence
  Description of Artificial Sequence: Synthetic oligonucleotide
gggcgcagggcagcugcag

SEQ ID NO: 2000378 - RNA, 19 nt, Artificial Sequence
  Description of Artificial Sequence: Synthetic oligonucleotide
gcacaccgggcagcggaag

SEQ ID NO: 2000379 - RNA, 19 nt, Artificial Sequence
  Description of Artificial Sequence: Synthetic oligonucleotide
gcaggucguaggcgcccgc

SEQ ID NO: 2000380 - RNA, 19 nt, Artificial Sequence
  Description of Artificial Sequence: Synthetic oligonucleotide
gcgguggcgcgugaggcuc

SEQ ID NO: 2000381 - RNA, 19 nt, Artificial Sequence
  Description of Artificial Sequence: Synthetic oligonucleotide
ccaccggcggcgcccgccg

SEQ ID NO: 2000382 - RNA, 19 nt, Artificial Sequence
  Description of Artificial Sequence: Synthetic oligonucleotide
gccgaagaccuugcgggaa

SEQ ID NO: 2000383 - RNA, 19 nt, Artificial Sequence
  Description of Artificial Sequence: Synthetic oligonucleotide
ccgcgcuucugccgguggc

SEQ ID NO: 2000384 - RNA, 19 nt, Artificial Sequence
  Description of Artificial Sequence: Synthetic oligonucleotide
cgccgcacuugaaggcgcg

SEQ ID NO: 2000385 - RNA, 19 nt, Artificial Sequence
  Description of Artificial Sequence: Synthetic oligonucleotide
ggcgcccgcgaagcucugg

SEQ ID NO: 2000386 - RNA, 19 nt, Artificial Sequence
  Description of Artificial Sequence: Synthetic oligonucleotide
cgagcaggcguagcucagc

SEQ ID NO: 2000387 - RNA, 19 nt, Artificial Sequence
  Description of Artificial Sequence: Synthetic oligonucleotide
ccgcaggaggagcagcgga

SEQ ID NO: 2000388 - RNA, 19 nt, Artificial Sequence
  Description of Artificial Sequence: Synthetic oligonucleotide
agggcgcagggcagcugca

SEQ ID NO: 2000389 - RNA, 19 nt, Artificial Sequence
  Description of Artificial Sequence: Synthetic oligonucleotide
caggcguagcucagcccgu

SEQ ID NO: 2000390 - RNA, 19 nt, Artificial Sequence
  Description of Artificial Sequence: Synthetic oligonucleotide
gccccggccagggcgcagg

SEQ ID NO: 2000391 - RNA, 19 nt, Artificial Sequence
  Description of Artificial Sequence: Synthetic oligonucleotide
ggggccgcgggcgggagga

SEQ ID NO: 2000392 - RNA, 19 nt, Artificial Sequence
  Description of Artificial Sequence: Synthetic oligonucleotide
ccucgccgcaggaggagca

SEQ ID NO: 2000393 - RNA, 19 nt, Artificial Sequence
  Description of Artificial Sequence: Synthetic oligonucleotide
gguggcgcgugaggcucug

SEQ ID NO: 2000394 - RNA, 19 nt, Artificial Sequence
  Description of Artificial Sequence: Synthetic oligonucleotide
ggugcaggagcaggucgua

SEQ ID NO: 2000395 - RNA, 19 nt, Artificial Sequence
  Description of Artificial Sequence: Synthetic oligonucleotide
guggcgcgugaggcucugc

SEQ ID NO: 2000396 - RNA, 19 nt, Artificial Sequence
  Description of Artificial Sequence: Synthetic oligonucleotide
gccgcacuugaaggcgcgc

SEQ ID NO: 2000397 - RNA, 19 nt, Artificial Sequence
  Description of Artificial Sequence: Synthetic oligonucleotide
ccgcacaggccgcagccca

SEQ ID NO: 2000398 - RNA, 19 nt, Artificial Sequence
  Description of Artificial Sequence: Synthetic oligonucleotide
gggcccgccaagacccuca

SEQ ID NO: 2000399 - RNA, 19 nt, Artificial Sequence
  Description of Artificial Sequence: Synthetic oligonucleotide
cccucgccgcaggaggagc

SEQ ID NO: 2000400 - RNA, 19 nt, Artificial Sequence
  Description of Artificial Sequence: Synthetic oligonucleotide
ccgcugcuccguguggcag

SEQ ID NO: 2000401 - RNA, 19 nt, Artificial Sequence
  Description of Artificial Sequence: Synthetic oligonucleotide
cugcuccguguggcagcgc

SEQ ID NO: 2000402 - RNA, 19 nt, Artificial Sequence
  Description of Artificial Sequence: Synthetic oligonucleotide
gguucucgaugaagccgaa

SEQ ID NO: 2000403 - RNA, 19 nt, Artificial Sequence
  Description of Artificial Sequence: Synthetic oligonucleotide
gcccgccaagacccucagc

SEQ ID NO: 2000404 - RNA, 19 nt, Artificial Sequence
  Description of Artificial Sequence: Synthetic oligonucleotide
ccuguuccgggcccgccaa

SEQ ID NO: 2000405 - RNA, 19 nt, Artificial Sequence
  Description of Artificial Sequence: Synthetic oligonucleotide
gccgguggaccuggcggug

SEQ ID NO: 2000406 - RNA, 19 nt, Artificial Sequence
  Description of Artificial Sequence: Synthetic oligonucleotide
gccgccucccagaagcgcu

SEQ ID NO: 2000407 - RNA, 19 nt, Artificial Sequence
  Description of Artificial Sequence: Synthetic oligonucleotide
cggagccaucagaggacug

SEQ ID NO: 2000408 - RNA, 19 nt, Artificial Sequence
  Description of Artificial Sequence: Synthetic oligonucleotide
gccaccggcggcgcccgcc

SEQ ID NO: 2000409 - RNA, 19 nt, Artificial Sequence
  Description of Artificial Sequence: Synthetic oligonucleotide
cgguggaccuggcgguggc

SEQ ID NO: 2000410 - RNA, 19 nt, Artificial Sequence
  Description of Artificial Sequence: Synthetic oligonucleotide
ggugcuccgccaggcugga

SEQ ID NO: 2000411 - RNA, 19 nt, Artificial Sequence
  Description of Artificial Sequence: Synthetic oligonucleotide
cccgcggccccggccaggg

SEQ ID NO: 2000412 - RNA, 19 nt, Artificial Sequence
  Description of Artificial Sequence: Synthetic oligonucleotide
gcagcgcugguggcgcauc

SEQ ID NO: 2000413 - RNA, 19 nt, Artificial Sequence
  Description of Artificial Sequence: Synthetic oligonucleotide
gcgcaucagcagcgccgcc

SEQ ID NO: 2000414 - RNA, 19 nt, Artificial Sequence
  Description of Artificial Sequence: Synthetic oligonucleotide
cccugccaaggugcugccc

SEQ ID NO: 2000415 - RNA, 19 nt, Artificial Sequence
  Description of Artificial Sequence: Synthetic oligonucleotide
caccgguagggccgcugcu

SEQ ID NO: 2000416 - RNA, 19 nt, Artificial Sequence
  Description of Artificial Sequence: Synthetic oligonucleotide
gcaccaggugcacguacuu

SEQ ID NO: 2000417 - RNA, 19 nt, Artificial Sequence
  Description of Artificial Sequence: Synthetic oligonucleotide
cccgcagcgcuggggccgg

SEQ ID NO: 2000418 - RNA, 19 nt, Artificial Sequence
  Description of Artificial Sequence: Synthetic oligonucleotide
cggggaagugcuccccgca

SEQ ID NO: 2000419 - RNA, 19 nt, Artificial Sequence
  Description of Artificial Sequence: Synthetic oligonucleotide
cguagggcuucucggacau

SEQ ID NO: 2000420 - RNA, 19 nt, Artificial Sequence
  Description of Artificial Sequence: Synthetic oligonucleotide
ggcccgcggccccggccag

SEQ ID NO: 2000421 - RNA, 19 nt, Artificial Sequence
  Description of Artificial Sequence: Synthetic oligonucleotide
gcgugaggcucugcgggua

SEQ ID NO: 2000422 - RNA, 19 nt, Artificial Sequence
  Description of Artificial Sequence: Synthetic oligonucleotide
cgccggugugcacgacccg

SEQ ID NO: 2000423 - RNA, 19 nt, Artificial Sequence
  Description of Artificial Sequence: Synthetic oligonucleotide
ccgccaagacccucagccu

SEQ ID NO: 2000424 - RNA, 19 nt, Artificial Sequence
  Description of Artificial Sequence: Synthetic oligonucleotide
gcgcgcucgccggugugca

SEQ ID NO: 2000425 - RNA, 19 nt, Artificial Sequence
  Description of Artificial Sequence: Synthetic oligonucleotide
ggaccuggcgguggcgcgu

SEQ ID NO: 2000426 - RNA, 19 nt, Artificial Sequence
  Description of Artificial Sequence: Synthetic oligonucleotide
ccgucgccggggccaccgg

SEQ ID NO: 2000427 - RNA, 19 nt, Artificial Sequence
  Description of Artificial Sequence: Synthetic oligonucleotide
aggcgcccgcgaagcucug

SEQ ID NO: 2000428 - RNA, 19 nt, Artificial Sequence
  Description of Artificial Sequence: Synthetic oligonucleotide
cgacccggugcugccgcag

SEQ ID NO: 2000429 - RNA, 19 nt, Artificial Sequence
  Description of Artificial Sequence: Synthetic oligonucleotide
ccggugugcacgacccggu

SEQ ID NO: 2000430 - RNA, 19 nt, Artificial Sequence
  Description of Artificial Sequence: Synthetic oligonucleotide
cgugguccccuggcccgcg

SEQ ID NO: 2000431 - RNA, 19 nt, Artificial Sequence
  Description of Artificial Sequence: Synthetic oligonucleotide
gggccgccuggugcaccag

SEQ ID NO: 2000432 - RNA, 19 nt, Artificial Sequence
  Description of Artificial Sequence: Synthetic oligonucleotide
gcgaagcgcuuggcgcaca

SEQ ID NO: 2000433 - RNA, 19 nt, Artificial Sequence
  Description of Artificial Sequence: Synthetic oligonucleotide
ccggagccaucagaggacu

SEQ ID NO: 2000434 - RNA, 19 nt, Artificial Sequence
  Description of Artificial Sequence: Synthetic oligonucleotide
cccggccagggcgcagggc

SEQ ID NO: 2000435 - RNA, 19 nt, Artificial Sequence
  Description of Artificial Sequence: Synthetic oligonucleotide
ggcgcaccaggugcacgua

SEQ ID NO: 2000436 - RNA, 19 nt, Artificial Sequence
  Description of Artificial Sequence: Synthetic oligonucleotide
ccgcacuugaaggcgcgcu

SEQ ID NO: 2000437 - RNA, 19 nt, Artificial Sequence
  Description of Artificial Sequence: Synthetic oligonucleotide
cgcaccgguagggccgcug

SEQ ID NO: 2000438 - RNA, 19 nt, Artificial Sequence
  Description of Artificial Sequence: Synthetic oligonucleotide
cggcgugcagccgccggug

SEQ ID NO: 2000439 - RNA, 19 nt, Artificial Sequence
  Description of Artificial Sequence: Synthetic oligonucleotide
ccgcacacgccgcaccggu

SEQ ID NO: 2000440 - RNA, 19 nt, Artificial Sequence
  Description of Artificial Sequence: Synthetic oligonucleotide
cgcacaccgggcagcggaa

SEQ ID NO: 2000441 - RNA, 19 nt, Artificial Sequence
  Description of Artificial Sequence: Synthetic oligonucleotide
gcccgcgguggccccgcca

SEQ ID NO: 2000442 - RNA, 19 nt, Artificial Sequence
  Description of Artificial Sequence: Synthetic oligonucleotide
cggcgcaccaggugcacgu

SEQ ID NO: 2000443 - RNA, 19 nt, Artificial Sequence
  Description of Artificial Sequence: Synthetic oligonucleotide
cgcucgccggugugcacga

SEQ ID NO: 2000444 - RNA, 19 nt, Artificial Sequence
  Description of Artificial Sequence: Synthetic oligonucleotide
ccaagacccucagccuugu

SEQ ID NO: 2000445 - RNA, 19 nt, Artificial Sequence
  Description of Artificial Sequence: Synthetic oligonucleotide
cgcgaagcucuggccgcac

SEQ ID NO: 2000446 - RNA, 19 nt, Artificial Sequence
  Description of Artificial Sequence: Synthetic oligonucleotide
cgccgccggagccaucaga

SEQ ID NO: 2000447 - RNA, 19 nt, Artificial Sequence
  Description of Artificial Sequence: Synthetic oligonucleotide
ccgcgaagcucuggccgca

SEQ ID NO: 2000448 - RNA, 19 nt, Artificial Sequence
  Description of Artificial Sequence: Synthetic oligonucleotide
gcucgccggugugcacgac

SEQ ID NO: 2000449 - RNA, 19 nt, Artificial Sequence
  Description of Artificial Sequence: Synthetic oligonucleotide
cgaagaccuugcgggaagu

SEQ ID NO: 2000450 - RNA, 19 nt, Artificial Sequence
  Description of Artificial Sequence: Synthetic oligonucleotide
gggccgcgggcgggaggag

SEQ ID NO: 2000451 - RNA, 19 nt, Artificial Sequence
  Description of Artificial Sequence: Synthetic oligonucleotide
cccggugcugccgcaggua

SEQ ID NO: 2000452 - RNA, 19 nt, Artificial Sequence
  Description of Artificial Sequence: Synthetic oligonucleotide
ggcagcgcugguggcgcau

SEQ ID NO: 2000453 - RNA, 19 nt, Artificial Sequence
  Description of Artificial Sequence: Synthetic oligonucleotide
cgcgugaggcucugcgggu

SEQ ID NO: 2000454 - RNA, 19 nt, Artificial Sequence
  Description of Artificial Sequence: Synthetic oligonucleotide
cgccucccagaagcgcuuc

SEQ ID NO: 2000455 - RNA, 19 nt, Artificial Sequence
  Description of Artificial Sequence: Synthetic oligonucleotide
cgcacacgccgcaccggua

SEQ ID NO: 2000456 - RNA, 19 nt, Artificial Sequence
  Description of Artificial Sequence: Synthetic oligonucleotide
cgucgcagccguagggcuu

SEQ ID NO: 2000457 - RNA, 19 nt, Artificial Sequence
  Description of Artificial Sequence: Synthetic oligonucleotide
cgcgcuucugccgguggcu

SEQ ID NO: 2000458 - RNA, 19 nt, Artificial Sequence
  Description of Artificial Sequence: Synthetic oligonucleotide
ccgcggccccggccagggc

SEQ ID NO: 2000459 - RNA, 19 nt, Artificial Sequence
  Description of Artificial Sequence: Synthetic oligonucleotide
cgggcccgccaagacccuc

SEQ ID NO: 2000460 - RNA, 19 nt, Artificial Sequence
  Description of Artificial Sequence: Synthetic oligonucleotide
ccgccucccagaagcgcuu

SEQ ID NO: 2000461 - RNA, 19 nt, Artificial Sequence
  Description of Artificial Sequence: Synthetic oligonucleotide
gcccgucgccggggccacc

SEQ ID NO: 2000462 - RNA, 19 nt, Artificial Sequence
  Description of Artificial Sequence: Synthetic oligonucleotide
ccgcagcgcuggggccggg

SEQ ID NO: 2000463 - RNA, 19 nt, Artificial Sequence
  Description of Artificial Sequence: Synthetic oligonucleotide
cgguggcuucggcggugca

SEQ ID NO: 2000464 - RNA, 19 nt, Artificial Sequence
  Description of Artificial Sequence: Synthetic oligonucleotide
ccgggcccgccaagacccu

SEQ ID NO: 2000465 - RNA, 19 nt, Artificial Sequence
  Description of Artificial Sequence: Synthetic oligonucleotide
uauacuuccuuuaucgagg

SEQ ID NO: 2000466 - RNA, 19 nt, Artificial Sequence
  Description of Artificial Sequence: Synthetic oligonucleotide
uucaagcucaucuagaccc

SEQ ID NO: 2000467 - RNA, 19 nt, Artificial Sequence
  Description of Artificial Sequence: Synthetic oligonucleotide
acugcugcuaagcacagcc

SEQ ID NO: 2000468 - RNA, 19 nt, Artificial Sequence
  Description of Artificial Sequence: Synthetic oligonucleotide
uguagaaagccacagugag

SEQ ID NO: 2000469 - RNA, 19 nt, Artificial Sequence
  Description of Artificial Sequence: Synthetic oligonucleotide
augacuaugaaaaucugcc

SEQ ID NO: 2000470 - RNA, 19 nt, Artificial Sequence
  Description of Artificial Sequence: Synthetic oligonucleotide
uuaaguacuguagaaagcc

SEQ ID NO: 2000471 - RNA, 19 nt, Artificial Sequence
  Description of Artificial Sequence: Synthetic oligonucleotide
ugagaaagugcacuguagg

SEQ ID NO: 2000472 - RNA, 19 nt, Artificial Sequence
  Description of Artificial Sequence: Synthetic oligonucleotide
cuaagcacagccaagcggg

SEQ ID NO: 2000473 - RNA, 19 nt, Artificial Sequence
  Description of Artificial Sequence: Synthetic oligonucleotide
gacuaugaaaaucugccag

SEQ ID NO: 2000474 - RNA, 19 nt, Artificial Sequence
  Description of Artificial Sequence: Synthetic oligonucleotide
aaaucugccaggcccaguc

SEQ ID NO: 2000475 - RNA, 19 nt, Artificial Sequence
  Description of Artificial Sequence: Synthetic oligonucleotide
uaugagcaccaaaugaggg

SEQ ID NO: 2000476 - RNA, 19 nt, Artificial Sequence
  Description of Artificial Sequence: Synthetic oligonucleotide
uucccgaugacuaugaaaa

SEQ ID NO: 2000477 - RNA, 19 nt, Artificial Sequence
  Description of Artificial Sequence: Synthetic oligonucleotide
auauacuuccuuuaucgag

SEQ ID NO: 2000478 - RNA, 19 nt, Artificial Sequence
  Description of Artificial Sequence: Synthetic oligonucleotide
gaauuggaggccaagagag

SEQ ID NO: 2000479 - RNA, 19 nt, Artificial Sequence
  Description of Artificial Sequence: Synthetic oligonucleotide
agugguaucuccauuuucc

SEQ ID NO: 2000480 - RNA, 19 nt, Artificial Sequence
  Description of Artificial Sequence: Synthetic oligonucleotide
uagaaagccacagugaggc

SEQ ID NO: 2000481 - RNA, 19 nt, Artificial Sequence
  Description of Artificial Sequence: Synthetic oligonucleotide
uacuguacugccuugcccg

SEQ ID NO: 2000482 - RNA, 19 nt, Artificial Sequence
  Description of Artificial Sequence: Synthetic oligonucleotide
auuaguagcagguuaagua

SEQ ID NO: 2000483 - RNA, 19 nt, Artificial Sequence
  Description of Artificial Sequence: Synthetic oligonucleotide
aaguacuguagaaagccac

SEQ ID NO: 2000484 - RNA, 19 nt, Artificial Sequence
  Description of Artificial Sequence: Synthetic oligonucleotide
aaaugagggaaugggacag

SEQ ID NO: 2000485 - RNA, 19 nt, Artificial Sequence
  Description of Artificial Sequence: Synthetic oligonucleotide
auagcagcaccccauggcg

SEQ ID NO: 2000486 - RNA, 19 nt, Artificial Sequence
  Description of Artificial Sequence: Synthetic oligonucleotide
gauucaagcucaucuagac

SEQ ID NO: 2000487 - RNA, 19 nt, Artificial Sequence
  Description of Artificial Sequence: Synthetic oligonucleotide
agacacaucaaugauguug

SEQ ID NO: 2000488 - RNA, 19 nt, Artificial Sequence
  Description of Artificial Sequence: Synthetic oligonucleotide
uccgucaggagucuuuccg

SEQ ID NO: 2000489 - RNA, 19 nt, Artificial Sequence
  Description of Artificial Sequence: Synthetic oligonucleotide
ugcugcaagucagagaagg

SEQ ID NO: 2000490 - RNA, 19 nt, Artificial Sequence
  Description of Artificial Sequence: Synthetic oligonucleotide
uucaugggaucccaaacug

SEQ ID NO: 2000491 - RNA, 19 nt, Artificial Sequence
  Description of Artificial Sequence: Synthetic oligonucleotide
cuaugagcaccaaaugagg

SEQ ID NO: 2000492 - RNA, 19 nt, Artificial Sequence
  Description of Artificial Sequence: Synthetic oligonucleotide
aauggcgaucgguucuccc

SEQ ID NO: 2000493 - RNA, 19 nt, Artificial Sequence
  Description of Artificial Sequence: Synthetic oligonucleotide
ugcaagucagagaagggga

SEQ ID NO: 2000494 - RNA, 19 nt, Artificial Sequence
  Description of Artificial Sequence: Synthetic oligonucleotide
uucuccgugauuaguagca

SEQ ID NO: 2000495 - RNA, 19 nt, Artificial Sequence
  Description of Artificial Sequence: Synthetic oligonucleotide
gaugacuaugaaaaucugc

SEQ ID NO: 2000496 - RNA, 19 nt, Artificial Sequence
  Description of Artificial Sequence: Synthetic oligonucleotide
acaaccagcucuucuuucg

SEQ ID NO: 2000497 - RNA, 19 nt, Artificial Sequence
  Description of Artificial Sequence: Synthetic oligonucleotide
auuggguucggcuccauug

SEQ ID NO: 2000498 - RNA, 19 nt, Artificial Sequence
  Description of Artificial Sequence: Synthetic oligonucleotide
gagaaagugcacuguaggc

SEQ ID NO: 2000499 - RNA, 19 nt, Artificial Sequence
  Description of Artificial Sequence: Synthetic oligonucleotide
aaagaccaaacauguaaaa

SEQ ID NO: 2000500 - RNA, 19 nt, Artificial Sequence
  Description of Artificial Sequence: Synthetic oligonucleotide
caaugggucagacugcugc

SEQ ID NO: 2000501 - RNA, 19 nt, Artificial Sequence
  Description of Artificial Sequence: Synthetic oligonucleotide
aagcggguacuguacugcc

SEQ ID NO: 2000502 - RNA, 19 nt, Artificial Sequence
  Description of Artificial Sequence: Synthetic oligonucleotide
uucgcguccacacggaucu

SEQ ID NO: 2000503 - RNA, 19 nt, Artificial Sequence
  Description of Artificial Sequence: Synthetic oligonucleotide
uuuccggucacaugacccg

SEQ ID NO: 2000504 - RNA, 19 nt, Artificial Sequence
  Description of Artificial Sequence: Synthetic oligonucleotide
auggcgaucgguucucccc

SEQ ID NO: 2000505 - RNA, 19 nt, Artificial Sequence
  Description of Artificial Sequence: Synthetic oligonucleotide
uuuucgcugcuauagcagc

SEQ ID NO: 2000506 - RNA, 19 nt, Artificial Sequence
  Description of Artificial Sequence: Synthetic oligonucleotide
auacaaacucaauucagau

SEQ ID NO: 2000507 - RNA, 19 nt, Artificial Sequence
  Description of Artificial Sequence: Synthetic oligonucleotide
uaugaaaaucugccaggcc

SEQ ID NO: 2000508 - RNA, 19 nt, Artificial Sequence
  Description of Artificial Sequence: Synthetic oligonucleotide
uuaucgaggggugacaaac

SEQ ID NO: 2000509 - RNA, 19 nt, Artificial Sequence
  Description of Artificial Sequence: Synthetic oligonucleotide
ugguaucuccauuuucccg

SEQ ID NO: 2000510 - RNA, 19 nt, Artificial Sequence
  Description of Artificial Sequence: Synthetic oligonucleotide
cuggucauaaucccuagug

SEQ ID NO: 2000511 - RNA, 19 nt, Artificial Sequence
  Description of Artificial Sequence: Synthetic oligonucleotide
uccgugauuaguagcaggu

SEQ ID NO: 2000512 - RNA, 19 nt, Artificial Sequence
  Description of Artificial Sequence: Synthetic oligonucleotide
ucccaaacuguacaaccag

SEQ ID NO: 2000513 - RNA, 19 nt, Artificial Sequence
  Description of Artificial Sequence: Synthetic oligonucleotide
aacccagggcacuagaaau

SEQ ID NO: 2000514 - RNA, 19 nt, Artificial Sequence
  Description of Artificial Sequence: Synthetic oligonucleotide
auacuuccuuuaucgaggg

SEQ ID NO: 2000515 - RNA, 19 nt, Artificial Sequence
  Description of Artificial Sequence: Synthetic oligonucleotide
uggcaaggauggaagaaag

SEQ ID NO: 2000516 - RNA, 19 nt, Artificial Sequence
  Description of Artificial Sequence: Synthetic oligonucleotide
aaugggacaggagugaauu

SEQ ID NO: 2000517 - RNA, 19 nt, Artificial Sequence
  Description of Artificial Sequence: Synthetic oligonucleotide
aaccagcucuucuuucgcg

SEQ ID NO: 2000518 - RNA, 19 nt, Artificial Sequence
  Description of Artificial Sequence: Synthetic oligonucleotide
uggucauaaucccuaguga

SEQ ID NO: 2000519 - RNA, 19 nt, Artificial Sequence
  Description of Artificial Sequence: Synthetic oligonucleotide
uaaguacuguagaaagcca

SEQ ID NO: 2000520 - RNA, 19 nt, Artificial Sequence
  Description of Artificial Sequence: Synthetic oligonucleotide
ucuucuccgugauuaguag

SEQ ID NO: 2000521 - RNA, 19 nt, Artificial Sequence
  Description of Artificial Sequence: Synthetic oligonucleotide
caucugugcgagcugaagg

SEQ ID NO: 2000522 - RNA, 19 nt, Artificial Sequence
  Description of Artificial Sequence: Synthetic oligonucleotide
ugacuaugaaaaucugcca

SEQ ID NO: 2000523 - RNA, 19 nt, Artificial Sequence
  Description of Artificial Sequence: Synthetic oligonucleotide
ugcuaagcacagccaagcg

SEQ ID NO: 2000524 - RNA, 19 nt, Artificial Sequence
  Description of Artificial Sequence: Synthetic oligonucleotide
auaagcagcuauccuggag

SEQ ID NO: 2000525 - RNA, 19 nt, Artificial Sequence
  Description of Artificial Sequence: Synthetic oligonucleotide
ugugcgagcugaagguagg

SEQ ID NO: 2000526 - RNA, 19 nt, Artificial Sequence
  Description of Artificial Sequence: Synthetic oligonucleotide
cucguuuucgcugcuauag

SEQ ID NO: 2000527 - RNA, 19 nt, Artificial Sequence
  Description of Artificial Sequence: Synthetic oligonucleotide
gucauaaucccuagugagg

SEQ ID NO: 2000528 - RNA, 19 nt, Artificial Sequence
  Description of Artificial Sequence: Synthetic oligonucleotide
gaggccaagagagagggug

SEQ ID NO: 2000529 - RNA, 19 nt, Artificial Sequence
  Description of Artificial Sequence: Synthetic oligonucleotide
caauucagauucaagcuca

SEQ ID NO: 2000530 - RNA, 19 nt, Artificial Sequence
  Description of Artificial Sequence: Synthetic oligonucleotide
agugaggugccuaugagca

SEQ ID NO: 2000531 - RNA, 19 nt, Artificial Sequence
  Description of Artificial Sequence: Synthetic oligonucleotide
caggcuucuagccuuauuc

SEQ ID NO: 2000532 - RNA, 19 nt, Artificial Sequence
  Description of Artificial Sequence: Synthetic oligonucleotide
cagauucaagcucaucuag

SEQ ID NO: 2000533 - RNA, 19 nt, Artificial Sequence
  Description of Artificial Sequence: Synthetic oligonucleotide
gacgggacgaagaggaggg

SEQ ID NO: 2000534 - RNA, 19 nt, Artificial Sequence
  Description of Artificial Sequence: Synthetic oligonucleotide
aaugggucagacugcugcu

SEQ ID NO: 2000535 - RNA, 19 nt, Artificial Sequence
  Description of Artificial Sequence: Synthetic oligonucleotide
aaacccagggcacuagaaa

SEQ ID NO: 2000536 - RNA, 19 nt, Artificial Sequence
  Description of Artificial Sequence: Synthetic oligonucleotide
ggcauaagcagcuauccug

SEQ ID NO: 2000537 - RNA, 19 nt, Artificial Sequence
  Description of Artificial Sequence: Synthetic oligonucleotide
uaggcauaagcagcuaucc

SEQ ID NO: 2000538 - RNA, 19 nt, Artificial Sequence
  Description of Artificial Sequence: Synthetic oligonucleotide
guuaaguacuguagaaagc

SEQ ID NO: 2000539 - RNA, 19 nt, Artificial Sequence
  Description of Artificial Sequence: Synthetic oligonucleotide
gguucggcuccauugaggg

SEQ ID NO: 2000540 - RNA, 19 nt, Artificial Sequence
  Description of Artificial Sequence: Synthetic oligonucleotide
cuuggccccaaccucaccc

SEQ ID NO: 2000541 - RNA, 19 nt, Artificial Sequence
  Description of Artificial Sequence: Synthetic oligonucleotide
ugaggugccuaugagcacc

SEQ ID NO: 2000542 - RNA, 19 nt, Artificial Sequence
  Description of Artificial Sequence: Synthetic oligonucleotide
cugcaagucagagaagggg

SEQ ID NO: 2000543 - RNA, 19 nt, Artificial Sequence
  Description of Artificial Sequence: Synthetic oligonucleotide
ugguaauuggguucggcuc

SEQ ID NO: 2000544 - RNA, 19 nt, Artificial Sequence
  Description of Artificial Sequence: Synthetic oligonucleotide
uguaggcauaagcagcuau

SEQ ID NO: 2000545 - RNA, 19 nt, Artificial Sequence
  Description of Artificial Sequence: Synthetic oligonucleotide
augagcaccaaaugaggga

SEQ ID NO: 2000546 - RNA, 19 nt, Artificial Sequence
  Description of Artificial Sequence: Synthetic oligonucleotide
uuucccgaugacuaugaaa

SEQ ID NO: 2000547 - RNA, 19 nt, Artificial Sequence
  Description of Artificial Sequence: Synthetic oligonucleotide
aucugugcgagcugaaggu

SEQ ID NO: 2000548 - RNA, 19 nt, Artificial Sequence
  Description of Artificial Sequence: Synthetic oligonucleotide
cacggaucugagaaagugc

SEQ ID NO: 2000549 - RNA, 19 nt, Artificial Sequence
  Description of Artificial Sequence: Synthetic oligonucleotide
uacaaacucaauucagauu

SEQ ID NO: 2000550 - RNA, 19 nt, Artificial Sequence
  Description of Artificial Sequence: Synthetic oligonucleotide
gguaauuggguucggcucc

SEQ ID NO: 2000551 - RNA, 19 nt, Artificial Sequence
  Description of Artificial Sequence: Synthetic oligonucleotide
ugagcaccaaaugagggaa

SEQ ID NO: 2000552 - RNA, 19 nt, Artificial Sequence
  Description of Artificial Sequence: Synthetic oligonucleotide
ugcugcuaagcacagccaa

SEQ ID NO: 2000553 - RNA, 19 nt, Artificial Sequence
  Description of Artificial Sequence: Synthetic oligonucleotide
ucuuuccggucacaugacc

SEQ ID NO: 2000554 - RNA, 19 nt, Artificial Sequence
  Description of Artificial Sequence: Synthetic oligonucleotide
guugcuagcugucuuggca

SEQ ID NO: 2000555 - RNA, 19 nt, Artificial Sequence
  Description of Artificial Sequence: Synthetic oligonucleotide
ugccuaugagcaccaaaug

SEQ ID NO: 2000556 - RNA, 19 nt, Artificial Sequence
  Description of Artificial Sequence: Synthetic oligonucleotide
ugauuaguagcagguuaag

SEQ ID NO: 2000557 - RNA, 19 nt, Artificial Sequence
  Description of Artificial Sequence: Synthetic oligonucleotide
ucaugggaucccaaacugu

SEQ ID NO: 2000558 - RNA, 19 nt, Artificial Sequence
  Description of Artificial Sequence: Synthetic oligonucleotide
uuggguucggcuccauuga

SEQ ID NO: 2000559 - RNA, 19 nt, Artificial Sequence
  Description of Artificial Sequence: Synthetic oligonucleotide
ggucacaugacccgcggcg

SEQ ID NO: 2000560 - RNA, 19 nt, Artificial Sequence
  Description of Artificial Sequence: Synthetic oligonucleotide
gguaucuccauuuucccga

SEQ ID NO: 2000561 - RNA, 19 nt, Artificial Sequence
  Description of Artificial Sequence: Synthetic oligonucleotide
uuucgcugcuauagcagca

SEQ ID NO: 2000562 - RNA, 19 nt, Artificial Sequence
  Description of Artificial Sequence: Synthetic oligonucleotide
ccaaaugagggaaugggac

SEQ ID NO: 2000563 - RNA, 19 nt, Artificial Sequence
  Description of Artificial Sequence: Synthetic oligonucleotide
guuuucgcugcuauagcag

SEQ ID NO: 2000564 - RNA, 19 nt, Artificial Sequence
  Description of Artificial Sequence: Synthetic oligonucleotide
cuucuccgugauuaguagc

SEQ ID NO: 2000565 - RNA, 19 nt, Artificial Sequence
  Description of Artificial Sequence: Synthetic oligonucleotide
gauccccuaggucucccgg

SEQ ID NO: 2000566 - RNA, 19 nt, Artificial Sequence
  Description of Artificial Sequence: Synthetic oligonucleotide
ucguuuucgcugcuauagc

SEQ ID NO: 2000567 - RNA, 19 nt, Artificial Sequence
  Description of Artificial Sequence: Synthetic oligonucleotide
cauugagggcuuugguggg

SEQ ID NO: 2000568 - RNA, 19 nt, Artificial Sequence
  Description of Artificial Sequence: Synthetic oligonucleotide
cuauagcagcaccccaugg

SEQ ID NO: 2000569 - RNA, 19 nt, Artificial Sequence
  Description of Artificial Sequence: Synthetic oligonucleotide
acacggaucugagaaagug

SEQ ID NO: 2000570 - RNA, 19 nt, Artificial Sequence
  Description of Artificial Sequence: Synthetic oligonucleotide
caaaugagggaaugggaca

SEQ ID NO: 2000571 - RNA, 19 nt, Artificial Sequence
  Description of Artificial Sequence: Synthetic oligonucleotide
cuccgugauuaguagcagg

SEQ ID NO: 2000572 - RNA, 19 nt, Artificial Sequence
  Description of Artificial Sequence: Synthetic oligonucleotide
agacgggacgaagaggagg

SEQ ID NO: 2000573 - RNA, 19 nt, Artificial Sequence
  Description of Artificial Sequence: Synthetic oligonucleotide
gugcacuguaggcauaagc

SEQ ID NO: 2000574 - RNA, 19 nt, Artificial Sequence
  Description of Artificial Sequence: Synthetic oligonucleotide
uuccaaugggucagacugc

SEQ ID NO: 2000575 - RNA, 19 nt, Artificial Sequence
  Description of Artificial Sequence: Synthetic oligonucleotide
agugaauuggaggccaaga

SEQ ID NO: 2000576 - RNA, 19 nt, Artificial Sequence
  Description of Artificial Sequence: Synthetic oligonucleotide
guccacacggaucugagaa

SEQ ID NO: 2000577 - RNA, 19 nt, Artificial Sequence
  Description of Artificial Sequence: Synthetic oligonucleotide
ucuuccaaugggucagacu

SEQ ID NO: 2000578 - RNA, 19 nt, Artificial Sequence
  Description of Artificial Sequence: Synthetic oligonucleotide
cuagacccuggucauaauc

SEQ ID NO: 2000579 - RNA, 19 nt, Artificial Sequence
  Description of Artificial Sequence: Synthetic oligonucleotide
aaacucaauucagauucaa

SEQ ID NO: 2000580 - RNA, 19 nt, Artificial Sequence
  Description of Artificial Sequence: Synthetic oligonucleotide
caaacuguacaaccagcuc

SEQ ID NO: 2000581 - RNA, 19 nt, Artificial Sequence
  Description of Artificial Sequence: Synthetic oligonucleotide
agcuauccuggagaccugc

SEQ ID NO: 2000582 - RNA, 19 nt, Artificial Sequence
  Description of Artificial Sequence: Synthetic oligonucleotide
aggcuucuagccuuauucu

SEQ ID NO: 2000583 - RNA, 19 nt, Artificial Sequence
  Description of Artificial Sequence: Synthetic oligonucleotide
gaaagugcacuguaggcau

SEQ ID NO: 2000584 - RNA, 19 nt, Artificial Sequence
  Description of Artificial Sequence: Synthetic oligonucleotide
uacuuccuuuaucgagggg

SEQ ID NO: 2000585 - RNA, 19 nt, Artificial Sequence
  Description of Artificial Sequence: Synthetic oligonucleotide
ugugguaauuggguucggc

SEQ ID NO: 2000586 - RNA, 19 nt, Artificial Sequence
  Description of Artificial Sequence: Synthetic oligonucleotide
acggaucugagaaagugca

SEQ ID NO: 2000587 - RNA, 19 nt, Artificial Sequence
  Description of Artificial Sequence: Synthetic oligonucleotide
aaggccaauggcgaucggu

SEQ ID NO: 2000588 - RNA, 19 nt, Artificial Sequence
  Description of Artificial Sequence: Synthetic oligonucleotide
uccggucacaugacccgcg

SEQ ID NO: 2000589 - RNA, 19 nt, Artificial Sequence
  Description of Artificial Sequence: Synthetic oligonucleotide
aagaggugggguggagacg

SEQ ID NO: 2000590 - RNA, 19 nt, Artificial Sequence
  Description of Artificial Sequence: Synthetic oligonucleotide
auguugcuagcugucuugg

SEQ ID NO: 2000591 - RNA, 19 nt, Artificial Sequence
  Description of Artificial Sequence: Synthetic oligonucleotide
aguacuguagaaagccaca

SEQ ID NO: 2000592 - RNA, 19 nt, Artificial Sequence
  Description of Artificial Sequence: Synthetic oligonucleotide
ucuccauuuucccgaugac

SEQ ID NO: 2000593 - RNA, 19 nt, Artificial Sequence
  Description of Artificial Sequence: Synthetic oligonucleotide
guguucaccccuacagugg

SEQ ID NO: 2000594 - RNA, 19 nt, Artificial Sequence
  Description of Artificial Sequence: Synthetic oligonucleotide
uuucgcguccacacggauc

SEQ ID NO: 2000595 - RNA, 19 nt, Artificial Sequence
  Description of Artificial Sequence: Synthetic oligonucleotide
cuguagaaagccacaguga

SEQ ID NO: 2000596 - RNA, 19 nt, Artificial Sequence
  Description of Artificial Sequence: Synthetic oligonucleotide
uggguucggcuccauugag

SEQ ID NO: 2000597 - RNA, 19 nt, Artificial Sequence
  Description of Artificial Sequence: Synthetic oligonucleotide
ucuuucgcguccacacgga

SEQ ID NO: 2000598 - RNA, 19 nt, Artificial Sequence
  Description of Artificial Sequence: Synthetic oligonucleotide
caagcggguacuguacugc

SEQ ID NO: 2000599 - RNA, 19 nt, Artificial Sequence
  Description of Artificial Sequence: Synthetic oligonucleotide
cuggucagagauggcagcg

SEQ ID NO: 2000600 - RNA, 19 nt, Artificial Sequence
  Description of Artificial Sequence: Synthetic oligonucleotide
uccaaugggucagacugcu

SEQ ID NO: 2000601 - RNA, 19 nt, Artificial Sequence
  Description of Artificial Sequence: Synthetic oligonucleotide
aacuguacaaccagcucuu

SEQ ID NO: 2000602 - RNA, 19 nt, Artificial Sequence
  Description of Artificial Sequence: Synthetic oligonucleotide
agguuaaguacuguagaaa

SEQ ID NO: 2000603 - RNA, 19 nt, Artificial Sequence
  Description of Artificial Sequence: Synthetic oligonucleotide
uuuaucgaggggugacaaa

SEQ ID NO: 2000604 - RNA, 19 nt, Artificial Sequence
  Description of Artificial Sequence: Synthetic oligonucleotide
uguugcuagcugucuuggc

SEQ ID NO: 2000605 - RNA, 19 nt, Artificial Sequence
  Description of Artificial Sequence: Synthetic oligonucleotide
uccuuuaucgaggggugac

SEQ ID NO: 2000606 - RNA, 19 nt, Artificial Sequence
  Description of Artificial Sequence: Synthetic oligonucleotide
uccucguuuucgcugcuau

SEQ ID NO: 2000607 - RNA, 19 nt, Artificial Sequence
  Description of Artificial Sequence: Synthetic oligonucleotide
guacucaugcugcuccaug

SEQ ID NO: 2000608 - RNA, 19 nt, Artificial Sequence
  Description of Artificial Sequence: Synthetic oligonucleotide
agauucaagcucaucuaga

SEQ ID NO: 2000609 - RNA, 19 nt, Artificial Sequence
  Description of Artificial Sequence: Synthetic oligonucleotide
uggucagagauggcagcgg

SEQ ID NO: 2000610 - RNA, 19 nt, Artificial Sequence
  Description of Artificial Sequence: Synthetic oligonucleotide
aucgaggggugacaaacaa

SEQ ID NO: 2000611 - RNA, 19 nt, Artificial Sequence
  Description of Artificial Sequence: Synthetic oligonucleotide
ucucccgguguucaccccu

SEQ ID NO: 2000612 - RNA, 19 nt, Artificial Sequence
  Description of Artificial Sequence: Synthetic oligonucleotide
ccugcugcaagucagagaa

SEQ ID NO: 2000613 - RNA, 19 nt, Artificial Sequence
  Description of Artificial Sequence: Synthetic oligonucleotide
ucgaggggugacaaacaaa

SEQ ID NO: 2000614 - RNA, 19 nt, Artificial Sequence
  Description of Artificial Sequence: Synthetic oligonucleotide
accaaaugagggaauggga

SEQ ID NO: 2000615 - RNA, 19 nt, Artificial Sequence
  Description of Artificial Sequence: Synthetic oligonucleotide
aggcauaagcagcuauccu

SEQ ID NO: 2000616 - RNA, 19 nt, Artificial Sequence
  Description of Artificial Sequence: Synthetic oligonucleotide
uugcgcucaguccucacuu

SEQ ID NO: 2000617 - RNA, 19 nt, Artificial Sequence
  Description of Artificial Sequence: Synthetic oligonucleotide
aggucucccgguguucacc

SEQ ID NO: 2000618 - RNA, 19 nt, Artificial Sequence
  Description of Artificial Sequence: Synthetic oligonucleotide
uucaccccuacagugguau

SEQ ID NO: 2000619 - RNA, 19 nt, Artificial Sequence
  Description of Artificial Sequence: Synthetic oligonucleotide
cugggagucugcagcagac

SEQ ID NO: 2000620 - RNA, 19 nt, Artificial Sequence
  Description of Artificial Sequence: Synthetic oligonucleotide
caaccagcucuucuuucgc

SEQ ID NO: 2000621 - RNA, 19 nt, Artificial Sequence
  Description of Artificial Sequence: Synthetic oligonucleotide
ucuccgugauuaguagcag

SEQ ID NO: 2000622 - RNA, 19 nt, Artificial Sequence
  Description of Artificial Sequence: Synthetic oligonucleotide
cagguuaaguacuguagaa

SEQ ID NO: 2000623 - RNA, 19 nt, Artificial Sequence
  Description of Artificial Sequence: Synthetic oligonucleotide
cacuugcucaggcuucuag

SEQ ID NO: 2000624 - RNA, 19 nt, Artificial Sequence
  Description of Artificial Sequence: Synthetic oligonucleotide
ugcucaggcuucuagccuu

SEQ ID NO: 2000625 - RNA, 19 nt, Artificial Sequence
  Description of Artificial Sequence: Synthetic oligonucleotide
ggagacgggacgaagagga

SEQ ID NO: 2000626 - RNA, 19 nt, Artificial Sequence
  Description of Artificial Sequence: Synthetic oligonucleotide
aauuggguucggcuccauu

SEQ ID NO: 2000627 - RNA, 19 nt, Artificial Sequence
  Description of Artificial Sequence: Synthetic oligonucleotide
auuuucccgaugacuauga

SEQ ID NO: 2000628 - RNA, 19 nt, Artificial Sequence
  Description of Artificial Sequence: Synthetic oligonucleotide
aggagugaauuggaggcca

SEQ ID NO: 2000629 - RNA, 19 nt, Artificial Sequence
  Description of Artificial Sequence: Synthetic oligonucleotide
ucgcugcuauagcagcacc

SEQ ID NO: 2000630 - RNA, 19 nt, Artificial Sequence
  Description of Artificial Sequence: Synthetic oligonucleotide
gucacaugacccgcggcgg

SEQ ID NO: 2000631 - RNA, 19 nt, Artificial Sequence
  Description of Artificial Sequence: Synthetic oligonucleotide
gcagguuaaguacuguaga

SEQ ID NO: 2000632 - RNA, 19 nt, Artificial Sequence
  Description of Artificial Sequence: Synthetic oligonucleotide
guaggcauaagcagcuauc

SEQ ID NO: 2000633 - RNA, 19 nt, Artificial Sequence
  Description of Artificial Sequence: Synthetic oligonucleotide
gugauuaguagcagguuaa

SEQ ID NO: 2000634 - RNA, 19 nt, Artificial Sequence
  Description of Artificial Sequence: Synthetic oligonucleotide
agcagcuauccuggagacc

SEQ ID NO: 2000635 - RNA, 19 nt, Artificial Sequence
  Description of Artificial Sequence: Synthetic oligonucleotide
gguacuguacugccuugcc

SEQ ID NO: 2000636 - RNA, 19 nt, Artificial Sequence
  Description of Artificial Sequence: Synthetic oligonucleotide
gagugaauuggaggccaag

SEQ ID NO: 2000637 - RNA, 19 nt, Artificial Sequence
  Description of Artificial Sequence: Synthetic oligonucleotide
aucuagacccuggucauaa

SEQ ID NO: 2000638 - RNA, 19 nt, Artificial Sequence
  Description of Artificial Sequence: Synthetic oligonucleotide
uucgcugcuauagcagcac

SEQ ID NO: 2000639 - RNA, 19 nt, Artificial Sequence
  Description of Artificial Sequence: Synthetic oligonucleotide
acggcguccgucaggaguc

SEQ ID NO: 2000640 - RNA, 19 nt, Artificial Sequence
  Description of Artificial Sequence: Synthetic oligonucleotide
gcgagcugaagguaggcug

SEQ ID NO: 2000641 - RNA, 19 nt, Artificial Sequence
  Description of Artificial Sequence: Synthetic oligonucleotide
gauuaguagcagguuaagu

SEQ ID NO: 2000642 - RNA, 19 nt, Artificial Sequence
  Description of Artificial Sequence: Synthetic oligonucleotide
agccaagcggguacuguac

SEQ ID NO: 2000643 - RNA, 19 nt, Artificial Sequence
  Description of Artificial Sequence: Synthetic oligonucleotide
agguaggcugugguaauug

SEQ ID NO: 2000644 - RNA, 19 nt, Artificial Sequence
  Description of Artificial Sequence: Synthetic oligonucleotide
auucuucuccgugauuagu

SEQ ID NO: 2000645 - RNA, 19 nt, Artificial Sequence
  Description of Artificial Sequence: Synthetic oligonucleotide
uaucuccauuuucccgaug

SEQ ID NO: 2000646 - RNA, 19 nt, Artificial Sequence
  Description of Artificial Sequence: Synthetic oligonucleotide
uccacacggaucugagaaa

SEQ ID NO: 2000647 - RNA, 19 nt, Artificial Sequence
  Description of Artificial Sequence: Synthetic oligonucleotide
accccuacagugguaucuc

SEQ ID NO: 2000648 - RNA, 19 nt, Artificial Sequence
  Description of Artificial Sequence: Synthetic oligonucleotide
cuucaugggaucccaaacu

SEQ ID NO: 2000649 - RNA, 19 nt, Artificial Sequence
  Description of Artificial Sequence: Synthetic oligonucleotide
aucugagaaagugcacugu

SEQ ID NO: 2000650 - RNA, 19 nt, Artificial Sequence
  Description of Artificial Sequence: Synthetic oligonucleotide
gugguaauuggguucggcu

SEQ ID NO: 2000651 - RNA, 19 nt, Artificial Sequence
  Description of Artificial Sequence: Synthetic oligonucleotide
cagcucuucuuucgcgucc

SEQ ID NO: 2000652 - RNA, 19 nt, Artificial Sequence
  Description of Artificial Sequence: Synthetic oligonucleotide
acagugguaucuccauuuu

SEQ ID NO: 2000653 - RNA, 19 nt, Artificial Sequence
  Description of Artificial Sequence: Synthetic oligonucleotide
caggagugaauuggaggcc

SEQ ID NO: 2000654 - RNA, 19 nt, Artificial Sequence
  Description of Artificial Sequence: Synthetic oligonucleotide
aaaaucugccaggcccagu

SEQ ID NO: 2000655 - RNA, 19 nt, Artificial Sequence
  Description of Artificial Sequence: Synthetic oligonucleotide
uucuccccucccuugcgcu

SEQ ID NO: 2000656 - RNA, 19 nt, Artificial Sequence
  Description of Artificial Sequence: Synthetic oligonucleotide
augagggaaugggacagga

SEQ ID NO: 2000657 - RNA, 19 nt, Artificial Sequence
  Description of Artificial Sequence: Synthetic oligonucleotide
caugcugcuccaugcccug

SEQ ID NO: 2000658 - RNA, 19 nt, Artificial Sequence
  Description of Artificial Sequence: Synthetic oligonucleotide
gcuauagcagcaccccaug

SEQ ID NO: 2000659 - RNA, 19 nt, Artificial Sequence
  Description of Artificial Sequence: Synthetic oligonucleotide
gcugcuauagcagcacccc

SEQ ID NO: 2000660 - RNA, 19 nt, Artificial Sequence
  Description of Artificial Sequence: Synthetic oligonucleotide
uuccuuuaucgagggguga

SEQ ID NO: 2000661 - RNA, 19 nt, Artificial Sequence
  Description of Artificial Sequence: Synthetic oligonucleotide
guucuccccucccuugcgc

SEQ ID NO: 2000662 - RNA, 19 nt, Artificial Sequence
  Description of Artificial Sequence: Synthetic oligonucleotide
uuccggucacaugacccgc

SEQ ID NO: 2000663 - RNA, 19 nt, Artificial Sequence
  Description of Artificial Sequence: Synthetic oligonucleotide
gacggcguccgucaggagu

SEQ ID NO: 2000664 - RNA, 19 nt, Artificial Sequence
  Description of Artificial Sequence: Synthetic oligonucleotide
ucccuagugaggugccuau

SEQ ID NO: 2000665 - RNA, 19 nt, Artificial Sequence
  Description of Artificial Sequence: Synthetic oligonucleotide
aggagggacggcguccguc

SEQ ID NO: 2000666 - RNA, 19 nt, Artificial Sequence
  Description of Artificial Sequence: Synthetic oligonucleotide
ucccgaugacuaugaaaau

SEQ ID NO: 2000667 - RNA, 19 nt, Artificial Sequence
  Description of Artificial Sequence: Synthetic oligonucleotide
cuuuaucgaggggugacaa

SEQ ID NO: 2000668 - RNA, 19 nt, Artificial Sequence
  Description of Artificial Sequence: Synthetic oligonucleotide
gaagaaagaagggccugcu

SEQ ID NO: 2000669 - RNA, 19 nt, Artificial Sequence
  Description of Artificial Sequence: Synthetic oligonucleotide
ucaggcuucuagccuuauu

SEQ ID NO: 2000670 - RNA, 19 nt, Artificial Sequence
  Description of Artificial Sequence: Synthetic oligonucleotide
cuagcugucuuggcaagga

SEQ ID NO: 2000671 - RNA, 19 nt, Artificial Sequence
  Description of Artificial Sequence: Synthetic oligonucleotide
acccgcggcggccucccgc

SEQ ID NO: 2000672 - RNA, 19 nt, Artificial Sequence
  Description of Artificial Sequence: Synthetic oligonucleotide
ucgggccgggcgcucaggc

SEQ ID NO: 2000673 - RNA, 19 nt, Artificial Sequence
  Description of Artificial Sequence: Synthetic oligonucleotide
gucaggagucuuuccgguc

SEQ ID NO: 2000674 - RNA, 19 nt, Artificial Sequence
  Description of Artificial Sequence: Synthetic oligonucleotide
ggccagaagagguggggug

SEQ ID NO: 2000675 - RNA, 19 nt, Artificial Sequence
  Description of Artificial Sequence: Synthetic oligonucleotide
ugguccgaguccucguuuu

SEQ ID NO: 2000676 - RNA, 19 nt, Artificial Sequence
  Description of Artificial Sequence: Synthetic oligonucleotide
ccgaugacuaugaaaaucu

SEQ ID NO: 2000677 - RNA, 19 nt, Artificial Sequence
  Description of Artificial Sequence: Synthetic oligonucleotide
gggccgggcgcucaggcgg

SEQ ID NO: 2000678 - RNA, 19 nt, Artificial Sequence
  Description of Artificial Sequence: Synthetic oligonucleotide
aucgguucuccccucccuu

SEQ ID NO: 2000679 - RNA, 19 nt, Artificial Sequence
  Description of Artificial Sequence: Synthetic oligonucleotide
gaaggccaauggcgaucgg

SEQ ID NO: 2000680 - RNA, 19 nt, Artificial Sequence
  Description of Artificial Sequence: Synthetic oligonucleotide
ugggagucugcagcagaca

SEQ ID NO: 2000681 - RNA, 19 nt, Artificial Sequence
  Description of Artificial Sequence: Synthetic oligonucleotide
guucggcuccauugagggc

SEQ ID NO: 2000682 - RNA, 19 nt, Artificial Sequence
  Description of Artificial Sequence: Synthetic oligonucleotide
ccgucaggagucuuuccgg

SEQ ID NO: 2000683 - RNA, 19 nt, Artificial Sequence
  Description of Artificial Sequence: Synthetic oligonucleotide
gcagcuauccuggagaccu

SEQ ID NO: 2000684 - RNA, 19 nt, Artificial Sequence
  Description of Artificial Sequence: Synthetic oligonucleotide
ggaucugagaaagugcacu

SEQ ID NO: 2000685 - RNA, 19 nt, Artificial Sequence
  Description of Artificial Sequence: Synthetic oligonucleotide
ggugcuacugggguccagc

SEQ ID NO: 2000686 - RNA, 19 nt, Artificial Sequence
  Description of Artificial Sequence: Synthetic oligonucleotide
ucuagacccuggucauaau

SEQ ID NO: 2000687 - RNA, 19 nt, Artificial Sequence
  Description of Artificial Sequence: Synthetic oligonucleotide
gugccuaugagcaccaaau

SEQ ID NO: 2000688 - RNA, 19 nt, Artificial Sequence
  Description of Artificial Sequence: Synthetic oligonucleotide
ggacaggagugaauuggag

SEQ ID NO: 2000689 - RNA, 19 nt, Artificial Sequence
  Description of Artificial Sequence: Synthetic oligonucleotide
cgaggggugacaaacaaaa

SEQ ID NO: 2000690 - RNA, 19 nt, Artificial Sequence
  Description of Artificial Sequence: Synthetic oligonucleotide
cugaagguaggcuguggua

SEQ ID NO: 2000691 - RNA, 19 nt, Artificial Sequence
  Description of Artificial Sequence: Synthetic oligonucleotide
cccgaugacuaugaaaauc

SEQ ID NO: 2000692 - RNA, 19 nt, Artificial Sequence
  Description of Artificial Sequence: Synthetic oligonucleotide
cacaucaaugauguugcua

SEQ ID NO: 2000693 - RNA, 19 nt, Artificial Sequence
  Description of Artificial Sequence: Synthetic oligonucleotide
cucccuugcgcucaguccu

SEQ ID NO: 2000694 - RNA, 19 nt, Artificial Sequence
  Description of Artificial Sequence: Synthetic oligonucleotide
gugaggugccuaugagcac

SEQ ID NO: 2000695 - RNA, 19 nt, Artificial Sequence
  Description of Artificial Sequence: Synthetic oligonucleotide
ggguucggcuccauugagg

SEQ ID NO: 2000696 - RNA, 19 nt, Artificial Sequence
  Description of Artificial Sequence: Synthetic oligonucleotide
gagcugaagguaggcugug

SEQ ID NO: 2000697 - RNA, 19 nt, Artificial Sequence
  Description of Artificial Sequence: Synthetic oligonucleotide
caggaccccucucuucaug

SEQ ID NO: 2000698 - RNA, 19 nt, Artificial Sequence
  Description of Artificial Sequence: Synthetic oligonucleotide
ggaucccaaacuguacaac

SEQ ID NO: 2000699 - RNA, 19 nt, Artificial Sequence
  Description of Artificial Sequence: Synthetic oligonucleotide
caguccucacuugcucagg

SEQ ID NO: 2000700 - RNA, 19 nt, Artificial Sequence
  Description of Artificial Sequence: Synthetic oligonucleotide
guccgucaggagucuuucc

SEQ ID NO: 2000701 - RNA, 19 nt, Artificial Sequence
  Description of Artificial Sequence: Synthetic oligonucleotide
agcaccccauggcgggguc

SEQ ID NO: 2000702 - RNA, 19 nt, Artificial Sequence
  Description of Artificial Sequence: Synthetic oligonucleotide
gcuagcugucuuggcaagg

SEQ ID NO: 2000703 - RNA, 19 nt, Artificial Sequence
  Description of Artificial Sequence: Synthetic oligonucleotide
ggccaagagagaggguggg

SEQ ID NO: 2000704 - RNA, 19 nt, Artificial Sequence
  Description of Artificial Sequence: Synthetic oligonucleotide
uaggucucccgguguucac

SEQ ID NO: 2000705 - RNA, 19 nt, Artificial Sequence
  Description of Artificial Sequence: Synthetic oligonucleotide
ggauccccuaggucucccg

SEQ ID NO: 2000706 - RNA, 19 nt, Artificial Sequence
  Description of Artificial Sequence: Synthetic oligonucleotide
aaagugcacuguaggcaua

SEQ ID NO: 2000707 - RNA, 19 nt, Artificial Sequence
  Description of Artificial Sequence: Synthetic oligonucleotide
cucccgauccugguccgag

SEQ ID NO: 2000708 - RNA, 19 nt, Artificial Sequence
  Description of Artificial Sequence: Synthetic oligonucleotide
ccuagugaggugccuauga

SEQ ID NO: 2000709 - RNA, 19 nt, Artificial Sequence
  Description of Artificial Sequence: Synthetic oligonucleotide
gguggagacgggacgaaga

SEQ ID NO: 2000710 - RNA, 19 nt, Artificial Sequence
  Description of Artificial Sequence: Synthetic oligonucleotide
caccccauggcggggucgg

SEQ ID NO: 2000711 - RNA, 19 nt, Artificial Sequence
  Description of Artificial Sequence: Synthetic oligonucleotide
guaauuggguucggcucca

SEQ ID NO: 2000712 - RNA, 19 nt, Artificial Sequence
  Description of Artificial Sequence: Synthetic oligonucleotide
aggccaauggcgaucgguu

SEQ ID NO: 2000713 - RNA, 19 nt, Artificial Sequence
  Description of Artificial Sequence: Synthetic oligonucleotide
cugcuauagcagcacccca

SEQ ID NO: 2000714 - RNA, 19 nt, Artificial Sequence
  Description of Artificial Sequence: Synthetic oligonucleotide
gaucgguucuccccucccu

SEQ ID NO: 2000715 - RNA, 19 nt, Artificial Sequence
  Description of Artificial Sequence: Synthetic oligonucleotide
gugcuacugggguccagca

SEQ ID NO: 2000716 - RNA, 19 nt, Artificial Sequence
  Description of Artificial Sequence: Synthetic oligonucleotide
agggcacuagaaauacaaa

SEQ ID NO: 2000717 - RNA, 19 nt, Artificial Sequence
  Description of Artificial Sequence: Synthetic oligonucleotide
ucccgauccugguccgagu

SEQ ID NO: 2000718 - RNA, 19 nt, Artificial Sequence
  Description of Artificial Sequence: Synthetic oligonucleotide
uugcccgguccauguacuc

SEQ ID NO: 2000719 - RNA, 19 nt, Artificial Sequence
  Description of Artificial Sequence: Synthetic oligonucleotide
gcucaguccucacuugcuc

SEQ ID NO: 2000720 - RNA, 19 nt, Artificial Sequence
  Description of Artificial Sequence: Synthetic oligonucleotide
gggaucccaaacuguacaa

SEQ ID NO: 2000721 - RNA, 19 nt, Artificial Sequence
  Description of Artificial Sequence: Synthetic oligonucleotide
cuucuagccuuauucuuuu

SEQ ID NO: 2000722 - RNA, 19 nt, Artificial Sequence
  Description of Artificial Sequence: Synthetic oligonucleotide
cugcugcuaagcacagcca

SEQ ID NO: 2000723 - RNA, 19 nt, Artificial Sequence
  Description of Artificial Sequence: Synthetic oligonucleotide
ggguacuguacugccuugc

SEQ ID NO: 2000724 - RNA, 19 nt, Artificial Sequence
  Description of Artificial Sequence: Synthetic oligonucleotide
gucuuuccggucacaugac

SEQ ID NO: 2000725 - RNA, 19 nt, Artificial Sequence
  Description of Artificial Sequence: Synthetic oligonucleotide
caauggcgaucgguucucc

SEQ ID NO: 2000726 - RNA, 19 nt, Artificial Sequence
  Description of Artificial Sequence: Synthetic oligonucleotide
ucaccccuacagugguauc

SEQ ID NO: 2000727 - RNA, 19 nt, Artificial Sequence
  Description of Artificial Sequence: Synthetic oligonucleotide
ccgguccauguacucaugc

SEQ ID NO: 2000728 - RNA, 19 nt, Artificial Sequence
  Description of Artificial Sequence: Synthetic oligonucleotide
acccuggucauaaucccua

SEQ ID NO: 2000729 - RNA, 19 nt, Artificial Sequence
  Description of Artificial Sequence: Synthetic oligonucleotide
cguuuucgcugcuauagca

SEQ ID NO: 2000730 - RNA, 19 nt, Artificial Sequence
  Description of Artificial Sequence: Synthetic oligonucleotide
ggcggggucgggccgggcg

SEQ ID NO: 2000731 - RNA, 19 nt, Artificial Sequence
  Description of Artificial Sequence: Synthetic oligonucleotide
cgcugcuauagcagcaccc

SEQ ID NO: 2000732 - RNA, 19 nt, Artificial Sequence
  Description of Artificial Sequence: Synthetic oligonucleotide
ccuugcccgguccauguac

SEQ ID NO: 2000733 - RNA, 19 nt, Artificial Sequence
  Description of Artificial Sequence: Synthetic oligonucleotide
agaccugcugcaagucaga

SEQ ID NO: 2000734 - RNA, 19 nt, Artificial Sequence
  Description of Artificial Sequence: Synthetic oligonucleotide
cccagggcacuagaaauac

SEQ ID NO: 2000735 - RNA, 19 nt, Artificial Sequence
  Description of Artificial Sequence: Synthetic oligonucleotide
uccuggagaccugcugcaa

SEQ ID NO: 2000736 - RNA, 19 nt, Artificial Sequence
  Description of Artificial Sequence: Synthetic oligonucleotide
ucccgguguucaccccuac

SEQ ID NO: 2000737 - RNA, 19 nt, Artificial Sequence
  Description of Artificial Sequence: Synthetic oligonucleotide
gccugcucaucugugcgag

SEQ ID NO: 2000738 - RNA, 19 nt, Artificial Sequence
  Description of Artificial Sequence: Synthetic oligonucleotide
gcugaagguaggcuguggu

SEQ ID NO: 2000739 - RNA, 19 nt, Artificial Sequence
  Description of Artificial Sequence: Synthetic oligonucleotide
ggccaauggcgaucgguuc

SEQ ID NO: 2000740 - RNA, 19 nt, Artificial Sequence
  Description of Artificial Sequence: Synthetic oligonucleotide
ggugggguggagacgggac

SEQ ID NO: 2000741 - RNA, 19 nt, Artificial Sequence
  Description of Artificial Sequence: Synthetic oligonucleotide
cgugauuaguagcagguua

SEQ ID NO: 2000742 - RNA, 19 nt, Artificial Sequence
  Description of Artificial Sequence: Synthetic oligonucleotide
cuugcccgguccauguacu

SEQ ID NO: 2000743 - RNA, 19 nt, Artificial Sequence
  Description of Artificial Sequence: Synthetic oligonucleotide
acccagggcacuagaaaua

SEQ ID NO: 2000744 - RNA, 19 nt, Artificial Sequence
  Description of Artificial Sequence: Synthetic oligonucleotide
cuugcgcucaguccucacu

SEQ ID NO: 2000745 - RNA, 19 nt, Artificial Sequence
  Description of Artificial Sequence: Synthetic oligonucleotide
agcggguacuguacugccu

SEQ ID NO: 2000746 - RNA, 19 nt, Artificial Sequence
  Description of Artificial Sequence: Synthetic oligonucleotide
gucucccgguguucacccc

SEQ ID NO: 2000747 - RNA, 19 nt, Artificial Sequence
  Description of Artificial Sequence: Synthetic oligonucleotide
cugcucaucugugcgagcu

SEQ ID NO: 2000748 - RNA, 19 nt, Artificial Sequence
  Description of Artificial Sequence: Synthetic oligonucleotide
gacccuggucauaaucccu

SEQ ID NO: 2000749 - RNA, 19 nt, Artificial Sequence
  Description of Artificial Sequence: Synthetic oligonucleotide
ugacccgcggcggccuccc

SEQ ID NO: 2000750 - RNA, 19 nt, Artificial Sequence
  Description of Artificial Sequence: Synthetic oligonucleotide
ggucagagauggcagcggu

SEQ ID NO: 2000751 - RNA, 19 nt, Artificial Sequence
  Description of Artificial Sequence: Synthetic oligonucleotide
gccaauggcgaucgguucu

SEQ ID NO: 2000752 - RNA, 19 nt, Artificial Sequence
  Description of Artificial Sequence: Synthetic oligonucleotide
aggagucuuuccggucaca

SEQ ID NO: 2000753 - RNA, 19 nt, Artificial Sequence
  Description of Artificial Sequence: Synthetic oligonucleotide
gggacggcguccgucagga

SEQ ID NO: 2000754 - RNA, 19 nt, Artificial Sequence
  Description of Artificial Sequence: Synthetic oligonucleotide
ccgauccugguccgagucc

SEQ ID NO: 2000755 - RNA, 19 nt, Artificial Sequence
  Description of Artificial Sequence: Synthetic oligonucleotide
cuccauugagggcuuuggu

SEQ ID NO: 2000756 - RNA, 19 nt, Artificial Sequence
  Description of Artificial Sequence: Synthetic oligonucleotide
uaauuggguucggcuccau

SEQ ID NO: 2000757 - RNA, 19 nt, Artificial Sequence
  Description of Artificial Sequence: Synthetic oligonucleotide
gcgaucgguucuccccucc

SEQ ID NO: 2000758 - RNA, 19 nt, Artificial Sequence
  Description of Artificial Sequence: Synthetic oligonucleotide
ccccuacagugguaucucc

SEQ ID NO: 2000759 - RNA, 19 nt, Artificial Sequence
  Description of Artificial Sequence: Synthetic oligonucleotide
ggguggagacgggacgaag

SEQ ID NO: 2000760 - RNA, 19 nt, Artificial Sequence
  Description of Artificial Sequence: Synthetic oligonucleotide
agucugcagcagacacauc

SEQ ID NO: 2000761 - RNA, 19 nt, Artificial Sequence
  Description of Artificial Sequence: Synthetic oligonucleotide
caccccuacagugguaucu

SEQ ID NO: 2000762 - RNA, 19 nt, Artificial Sequence
  Description of Artificial Sequence: Synthetic oligonucleotide
cccgauccugguccgaguc

SEQ ID NO: 2000763 - RNA, 19 nt, Artificial Sequence
  Description of Artificial Sequence: Synthetic oligonucleotide
gguccgaguccucguuuuc

SEQ ID NO: 2000764 - RNA, 19 nt, Artificial Sequence
  Description of Artificial Sequence: Synthetic oligonucleotide
ggcuucuagccuuauucuu

SEQ ID NO: 2000765 - RNA, 19 nt, Artificial Sequence
  Description of Artificial Sequence: Synthetic oligonucleotide
gcuucuagccuuauucuuu

SEQ ID NO: 2000766 - RNA, 19 nt, Artificial Sequence
  Description of Artificial Sequence: Synthetic oligonucleotide
cuugauggggcuggcuggu

SEQ ID NO: 2000767 - RNA, 19 nt, Artificial Sequence
  Description of Artificial Sequence: Synthetic oligonucleotide
cacacggaucugagaaagu

SEQ ID NO: 2000768 - RNA, 19 nt, Artificial Sequence
  Description of Artificial Sequence: Synthetic oligonucleotide
ggccugcucaucugugcga

SEQ ID NO: 2000769 - RNA, 19 nt, Artificial Sequence
  Description of Artificial Sequence: Synthetic oligonucleotide
ucacuugcucaggcuucua

SEQ ID NO: 2000770 - RNA, 19 nt, Artificial Sequence
  Description of Artificial Sequence: Synthetic oligonucleotide
gcgguggcagcuucuucca

SEQ ID NO: 2000771 - RNA, 19 nt, Artificial Sequence
  Description of Artificial Sequence: Synthetic oligonucleotide
cggaucugagaaagugcac

SEQ ID NO: 2000772 - RNA, 19 nt, Artificial Sequence
  Description of Artificial Sequence: Synthetic oligonucleotide
ccaaugggucagacugcug

SEQ ID NO: 2000773 - RNA, 19 nt, Artificial Sequence
  Description of Artificial Sequence: Synthetic oligonucleotide
ccaauggcgaucgguucuc

SEQ ID NO: 2000774 - RNA, 19 nt, Artificial Sequence
  Description of Artificial Sequence: Synthetic oligonucleotide
auggggcuggcuggucaga

SEQ ID NO: 2000775 - RNA, 19 nt, Artificial Sequence
  Description of Artificial Sequence: Synthetic oligonucleotide
acgggacgaagaggaggga

SEQ ID NO: 2000776 - RNA, 19 nt, Artificial Sequence
  Description of Artificial Sequence: Synthetic oligonucleotide
ccuuuaucgaggggugaca

SEQ ID NO: 2000777 - RNA, 19 nt, Artificial Sequence
  Description of Artificial Sequence: Synthetic oligonucleotide
auggcggggucgggccggg

SEQ ID NO: 2000778 - RNA, 19 nt, Artificial Sequence
  Description of Artificial Sequence: Synthetic oligonucleotide
gcagcaccccauggcgggg

SEQ ID NO: 2000779 - RNA, 19 nt, Artificial Sequence
  Description of Artificial Sequence: Synthetic oligonucleotide
cgaucgguucuccccuccc

SEQ ID NO: 2000780 - RNA, 19 nt, Artificial Sequence
  Description of Artificial Sequence: Synthetic oligonucleotide
cuuucgcguccacacggau

SEQ ID NO: 2000781 - RNA, 19 nt, Artificial Sequence
  Description of Artificial Sequence: Synthetic oligonucleotide
ggagugaauuggaggccaa

SEQ ID NO: 2000782 - RNA, 19 nt, Artificial Sequence
  Description of Artificial Sequence: Synthetic oligonucleotide
gcggguacuguacugccuu

SEQ ID NO: 2000783 - RNA, 19 nt, Artificial Sequence
  Description of Artificial Sequence: Synthetic oligonucleotide
caucuagacccuggucaua

SEQ ID NO: 2000784 - RNA, 19 nt, Artificial Sequence
  Description of Artificial Sequence: Synthetic oligonucleotide
gcaccccauggcggggucg

SEQ ID NO: 2000785 - RNA, 19 nt, Artificial Sequence
  Description of Artificial Sequence: Synthetic oligonucleotide
ccucaccccagccaggacu

SEQ ID NO: 2000786 - RNA, 19 nt, Artificial Sequence
  Description of Artificial Sequence: Synthetic oligonucleotide
gccaagcggguacuguacu

SEQ ID NO: 2000787 - RNA, 19 nt, Artificial Sequence
  Description of Artificial Sequence: Synthetic oligonucleotide
ccccaaccucaccccagcc

SEQ ID NO: 2000788 - RNA, 19 nt, Artificial Sequence
  Description of Artificial Sequence: Synthetic oligonucleotide
ggcgaucgguucuccccuc

SEQ ID NO: 2000789 - RNA, 19 nt, Artificial Sequence
  Description of Artificial Sequence: Synthetic oligonucleotide
gggauccccuaggucuccc

SEQ ID NO: 2000790 - RNA, 19 nt, Artificial Sequence
  Description of Artificial Sequence: Synthetic oligonucleotide
cucccgguguucaccccua

SEQ ID NO: 2000791 - RNA, 19 nt, Artificial Sequence
  Description of Artificial Sequence: Synthetic oligonucleotide
gccgaggagggacggcguc

SEQ ID NO: 2000792 - RNA, 19 nt, Artificial Sequence
  Description of Artificial Sequence: Synthetic oligonucleotide
ggucgggccgggcgcucag

SEQ ID NO: 2000793 - RNA, 19 nt, Artificial Sequence
  Description of Artificial Sequence: Synthetic oligonucleotide
gcggcgccgaggagggacg

SEQ ID NO: 2000794 - RNA, 19 nt, Artificial Sequence
  Description of Artificial Sequence: Synthetic oligonucleotide
ggggauccccuaggucucc

SEQ ID NO: 2000795 - RNA, 19 nt, Artificial Sequence
  Description of Artificial Sequence: Synthetic oligonucleotide
gccaagagagaggguggga

SEQ ID NO: 2000796 - RNA, 19 nt, Artificial Sequence
  Description of Artificial Sequence: Synthetic oligonucleotide
cuguaggcauaagcagcua

SEQ ID NO: 2000797 - RNA, 19 nt, Artificial Sequence
  Description of Artificial Sequence: Synthetic oligonucleotide
gggcucgcuggccagcacu

SEQ ID NO: 2000798 - RNA, 19 nt, Artificial Sequence
  Description of Artificial Sequence: Synthetic oligonucleotide
guucaccccuacaguggua

SEQ ID NO: 2000799 - RNA, 19 nt, Artificial Sequence
  Description of Artificial Sequence: Synthetic oligonucleotide
cgagcugaagguaggcugu

SEQ ID NO: 2000800 - RNA, 19 nt, Artificial Sequence
  Description of Artificial Sequence: Synthetic oligonucleotide
cccgguccauguacucaug

SEQ ID NO: 2000801 - RNA, 19 nt, Artificial Sequence
  Description of Artificial Sequence: Synthetic oligonucleotide
gggcgcucaggcggcgccg

SEQ ID NO: 2000802 - RNA, 19 nt, Artificial Sequence
  Description of Artificial Sequence: Synthetic oligonucleotide
cggguacuguacugccuug

SEQ ID NO: 2000803 - RNA, 19 nt, Artificial Sequence
  Description of Artificial Sequence: Synthetic oligonucleotide
cguccgucaggagucuuuc

SEQ ID NO: 2000804 - RNA, 19 nt, Artificial Sequence
  Description of Artificial Sequence: Synthetic oligonucleotide
gcccgguccauguacucau

SEQ ID NO: 2000805 - RNA, 19 nt, Artificial Sequence
  Description of Artificial Sequence: Synthetic oligonucleotide
ggacggcguccgucaggag

SEQ ID NO: 2000806 - RNA, 19 nt, Artificial Sequence
  Description of Artificial Sequence: Synthetic oligonucleotide
ccauuuucccgaugacuau

SEQ ID NO: 2000807 - RNA, 19 nt, Artificial Sequence
  Description of Artificial Sequence: Synthetic oligonucleotide
cugguccgaguccucguuu

SEQ ID NO: 2000808 - RNA, 19 nt, Artificial Sequence
  Description of Artificial Sequence: Synthetic oligonucleotide
aggugccuaugagcaccaa

SEQ ID NO: 2000809 - RNA, 19 nt, Artificial Sequence
  Description of Artificial Sequence: Synthetic oligonucleotide
guccucguuuucgcugcua

SEQ ID NO: 2000810 - RNA, 19 nt, Artificial Sequence
  Description of Artificial Sequence: Synthetic oligonucleotide
gcucgcuggccagcacuug

SEQ ID NO: 2000811 - RNA, 19 nt, Artificial Sequence
  Description of Artificial Sequence: Synthetic oligonucleotide
ccuggucauaaucccuagu

SEQ ID NO: 2000812 - RNA, 19 nt, Artificial Sequence
  Description of Artificial Sequence: Synthetic oligonucleotide
ccucguuuucgcugcuaua

SEQ ID NO: 2000813 - RNA, 19 nt, Artificial Sequence
  Description of Artificial Sequence: Synthetic oligonucleotide
cccgguguucaccccuaca

SEQ ID NO: 2000814 - RNA, 19 nt, Artificial Sequence
  Description of Artificial Sequence: Synthetic oligonucleotide
cgcucaggcggcgccgagg

SEQ ID NO: 2000815 - RNA, 19 nt, Artificial Sequence
  Description of Artificial Sequence: Synthetic oligonucleotide
ggccgggcgcucaggcggc

SEQ ID NO: 2000816 - RNA, 19 nt, Artificial Sequence
  Description of Artificial Sequence: Synthetic oligonucleotide
cgggcgcucaggcggcgcc

SEQ ID NO: 2000817 - RNA, 19 nt, Artificial Sequence
  Description of Artificial Sequence: Synthetic oligonucleotide
gcgcucaggcggcgccgag

SEQ ID NO: 2000818 - RNA, 19 nt, Artificial Sequence
  Description of Artificial Sequence: Synthetic oligonucleotide
cgggacgaagaggagggaa

SEQ ID NO: 2000819 - RNA, 19 nt, Artificial Sequence
  Description of Artificial Sequence: Synthetic oligonucleotide
cgauccugguccgaguccu

SEQ ID NO: 2000820 - RNA, 19 nt, Artificial Sequence
  Description of Artificial Sequence: Synthetic oligonucleotide
cgguguucaccccuacagu

SEQ ID NO: 2000821 - RNA, 19 nt, Artificial Sequence
  Description of Artificial Sequence: Synthetic oligonucleotide
cgcucaguccucacuugcu

SEQ ID NO: 2000822 - RNA, 19 nt, Artificial Sequence
  Description of Artificial Sequence: Synthetic oligonucleotide
gcacagccaagcggguacu

SEQ ID NO: 2000823 - RNA, 19 nt, Artificial Sequence
  Description of Artificial Sequence: Synthetic oligonucleotide
ggggugcuacuggggucca

SEQ ID NO: 2000824 - RNA, 19 nt, Artificial Sequence
  Description of Artificial Sequence: Synthetic oligonucleotide
gggucgggccgggcgcuca

SEQ ID NO: 2000825 - RNA, 19 nt, Artificial Sequence
  Description of Artificial Sequence: Synthetic oligonucleotide
gcagcgguggcagcuucuu

SEQ ID NO: 2000826 - RNA, 19 nt, Artificial Sequence
  Description of Artificial Sequence: Synthetic oligonucleotide
cccuugcgcucaguccuca

SEQ ID NO: 2000827 - RNA, 19 nt, Artificial Sequence
  Description of Artificial Sequence: Synthetic oligonucleotide
ccugguccgaguccucguu

SEQ ID NO: 2000828 - RNA, 19 nt, Artificial Sequence
  Description of Artificial Sequence: Synthetic oligonucleotide
gcguccgucaggagucuuu

SEQ ID NO: 2000829 - RNA, 19 nt, Artificial Sequence
  Description of Artificial Sequence: Synthetic oligonucleotide
aggcggcgccgaggaggga

SEQ ID NO: 2000830 - RNA, 19 nt, Artificial Sequence
  Description of Artificial Sequence: Synthetic oligonucleotide
ccgugauuaguagcagguu

SEQ ID NO: 2000831 - RNA, 19 nt, Artificial Sequence
  Description of Artificial Sequence: Synthetic oligonucleotide
ccccuaggucucccggugu

SEQ ID NO: 2000832 - RNA, 19 nt, Artificial Sequence
  Description of Artificial Sequence: Synthetic oligonucleotide
ggcggccucccgcucccau

SEQ ID NO: 2000833 - RNA, 19 nt, Artificial Sequence
  Description of Artificial Sequence: Synthetic oligonucleotide
ccaggaccccucucuucau

SEQ ID NO: 2000834 - RNA, 19 nt, Artificial Sequence
  Description of Artificial Sequence: Synthetic oligonucleotide
ggggucgggccgggcgcuc

SEQ ID NO: 2000835 - RNA, 19 nt, Artificial Sequence
  Description of Artificial Sequence: Synthetic oligonucleotide
ggcguccgucaggagucuu

SEQ ID NO: 2000836 - RNA, 19 nt, Artificial Sequence
  Description of Artificial Sequence: Synthetic oligonucleotide
ccaggacuugaaggccaau

SEQ ID NO: 2000837 - RNA, 19 nt, Artificial Sequence
  Description of Artificial Sequence: Synthetic oligonucleotide
cgccgaggagggacggcgu

SEQ ID NO: 2000838 - RNA, 19 nt, Artificial Sequence
  Description of Artificial Sequence: Synthetic oligonucleotide
cggcguccgucaggagucu

SEQ ID NO: 2000839 - RNA, 19 nt, Artificial Sequence
  Description of Artificial Sequence: Synthetic oligonucleotide
augucuaucucuuagcucc

SEQ ID NO: 2000840 - RNA, 19 nt, Artificial Sequence
  Description of Artificial Sequence: Synthetic oligonucleotide
auggauauaggacagcucc

SEQ ID NO: 2000841 - RNA, 19 nt, Artificial Sequence
  Description of Artificial Sequence: Synthetic oligonucleotide
ugaauuuagucuucgaggg

SEQ ID NO: 2000842 - RNA, 19 nt, Artificial Sequence
  Description of Artificial Sequence: Synthetic oligonucleotide
aacugaagauuuuaaacag

SEQ ID NO: 2000843 - RNA, 19 nt, Artificial Sequence
  Description of Artificial Sequence: Synthetic oligonucleotide
aauuuagucuucgagggac

SEQ ID NO: 2000844 - RNA, 19 nt, Artificial Sequence
  Description of Artificial Sequence: Synthetic oligonucleotide
auuuuaaacagacuugcag

SEQ ID NO: 2000845 - RNA, 19 nt, Artificial Sequence
  Description of Artificial Sequence: Synthetic oligonucleotide
agauuuuaaacagacuugc

SEQ ID NO: 2000846 - RNA, 19 nt, Artificial Sequence
  Description of Artificial Sequence: Synthetic oligonucleotide
uguucuucgguucagcucc

SEQ ID NO: 2000847 - RNA, 19 nt, Artificial Sequence
  Description of Artificial Sequence: Synthetic oligonucleotide
ugucugauaacuacuaccc

SEQ ID NO: 2000848 - RNA, 19 nt, Artificial Sequence
  Description of Artificial Sequence: Synthetic oligonucleotide
aacguggcuaguaacaugc

SEQ ID NO: 2000849 - RNA, 19 nt, Artificial Sequence
  Description of Artificial Sequence: Synthetic oligonucleotide
gugaauuuagucuucgagg

SEQ ID NO: 2000850 - RNA, 19 nt, Artificial Sequence
  Description of Artificial Sequence: Synthetic oligonucleotide
uugaggucaauacugagca

SEQ ID NO: 2000851 - RNA, 19 nt, Artificial Sequence
  Description of Artificial Sequence: Synthetic oligonucleotide
ugugauaagaccugguuga

SEQ ID NO: 2000852 - RNA, 19 nt, Artificial Sequence
  Description of Artificial Sequence: Synthetic oligonucleotide
auagagucuguccaugggc

SEQ ID NO: 2000853 - RNA, 19 nt, Artificial Sequence
  Description of Artificial Sequence: Synthetic oligonucleotide
agugaauuuagucuucgag

SEQ ID NO: 2000854 - RNA, 19 nt, Artificial Sequence
  Description of Artificial Sequence: Synthetic oligonucleotide
gauaagaccugguugauga

SEQ ID NO: 2000855 - RNA, 19 nt, Artificial Sequence
  Description of Artificial Sequence: Synthetic oligonucleotide
uuaaacguggcuaguaaca

SEQ ID NO: 2000856 - RNA, 19 nt, Artificial Sequence
  Description of Artificial Sequence: Synthetic oligonucleotide
agaacuccgacgccgaacc

SEQ ID NO: 2000857 - RNA, 19 nt, Artificial Sequence
  Description of Artificial Sequence: Synthetic oligonucleotide
aaaauguguggcuaugccu

SEQ ID NO: 2000858 - RNA, 19 nt, Artificial Sequence
  Description of Artificial Sequence: Synthetic oligonucleotide
acuacuaccccucccauag

SEQ ID NO: 2000859 - RNA, 19 nt, Artificial Sequence
  Description of Artificial Sequence: Synthetic oligonucleotide
ucugauaacuacuaccccu

SEQ ID NO: 2000860 - RNA, 19 nt, Artificial Sequence
  Description of Artificial Sequence: Synthetic oligonucleotide
aaccgaaauaccuugccca

SEQ ID NO: 2000861 - RNA, 19 nt, Artificial Sequence
  Description of Artificial Sequence: Synthetic oligonucleotide
aaagucacggggucccacc

SEQ ID NO: 2000862 - RNA, 19 nt, Artificial Sequence
  Description of Artificial Sequence: Synthetic oligonucleotide
ucauguuccgcauaugucu

SEQ ID NO: 2000863 - RNA, 19 nt, Artificial Sequence
  Description of Artificial Sequence: Synthetic oligonucleotide
aaugggugaagcaccauac

SEQ ID NO: 2000864 - RNA, 19 nt, Artificial Sequence
  Description of Artificial Sequence: Synthetic oligonucleotide
uugugauaagaccugguug

SEQ ID NO: 2000865 - RNA, 19 nt, Artificial Sequence
  Description of Artificial Sequence: Synthetic oligonucleotide
uucaggccuagauaaaagg

SEQ ID NO: 2000866 - RNA, 19 nt, Artificial Sequence
  Description of Artificial Sequence: Synthetic oligonucleotide
auagcuuaaacguggcuag

SEQ ID NO: 2000867 - RNA, 19 nt, Artificial Sequence
  Description of Artificial Sequence: Synthetic oligonucleotide
uuucauguuccgcauaugu

SEQ ID NO: 2000868 - RNA, 19 nt, Artificial Sequence
  Description of Artificial Sequence: Synthetic oligonucleotide
uugcuuagcacuuuauccc

SEQ ID NO: 2000869 - RNA, 19 nt, Artificial Sequence
  Description of Artificial Sequence: Synthetic oligonucleotide
aauacugagcagccaagug

SEQ ID NO: 2000870 - RNA, 19 nt, Artificial Sequence
  Description of Artificial Sequence: Synthetic oligonucleotide
auagucaucaacugaagau

SEQ ID NO: 2000871 - RNA, 19 nt, Artificial Sequence
  Description of Artificial Sequence: Synthetic oligonucleotide
aauguguggcuaugccugc

SEQ ID NO: 2000872 - RNA, 19 nt, Artificial Sequence
  Description of Artificial Sequence: Synthetic oligonucleotide
aagauuuuaaacagacuug

SEQ ID NO: 2000873 - RNA, 19 nt, Artificial Sequence
  Description of Artificial Sequence: Synthetic oligonucleotide
acagaugucuaucucuuag

SEQ ID NO: 2000874 - RNA, 19 nt, Artificial Sequence
  Description of Artificial Sequence: Synthetic oligonucleotide
aguggguacagccuuuaac

SEQ ID NO: 2000875 - RNA, 19 nt, Artificial Sequence
  Description of Artificial Sequence: Synthetic oligonucleotide
aaaagguuuaacagauguc

SEQ ID NO: 2000876 - RNA, 19 nt, Artificial Sequence
  Description of Artificial Sequence: Synthetic oligonucleotide
ucaccagucaguccuagug

SEQ ID NO: 2000877 - RNA, 19 nt, Artificial Sequence
  Description of Artificial Sequence: Synthetic oligonucleotide
uuccgcauaugucuguagg

SEQ ID NO: 2000878 - RNA, 19 nt, Artificial Sequence
  Description of Artificial Sequence: Synthetic oligonucleotide
cauauucaggccuagauaa

SEQ ID NO: 2000879 - RNA, 19 nt, Artificial Sequence
  Description of Artificial Sequence: Synthetic oligonucleotide
cagcuaaucagugagagac

SEQ ID NO: 2000880 - RNA, 19 nt, Artificial Sequence
  Description of Artificial Sequence: Synthetic oligonucleotide
uccacuucacagcuaauca

SEQ ID NO: 2000881 - RNA, 19 nt, Artificial Sequence
  Description of Artificial Sequence: Synthetic oligonucleotide
auaacuacuaccccuccca

SEQ ID NO: 2000882 - RNA, 19 nt, Artificial Sequence
  Description of Artificial Sequence: Synthetic oligonucleotide
cuuuguucaggcaucuccc

SEQ ID NO: 2000883 - RNA, 19 nt, Artificial Sequence
  Description of Artificial Sequence: Synthetic oligonucleotide
uuuaacagaugucuaucuc

SEQ ID NO: 2000884 - RNA, 19 nt, Artificial Sequence
  Description of Artificial Sequence: Synthetic oligonucleotide
uuuauccccguuuuccugc

SEQ ID NO: 2000885 - RNA, 19 nt, Artificial Sequence
  Description of Artificial Sequence: Synthetic oligonucleotide
auaccuugcccacaucugg

SEQ ID NO: 2000886 - RNA, 19 nt, Artificial Sequence
  Description of Artificial Sequence: Synthetic oligonucleotide
ugguugaugaugguuuucg

SEQ ID NO: 2000887 - RNA, 19 nt, Artificial Sequence
  Description of Artificial Sequence: Synthetic oligonucleotide
ucaggccuagauaaaaggu

SEQ ID NO: 2000888 - RNA, 19 nt, Artificial Sequence
  Description of Artificial Sequence: Synthetic oligonucleotide
gugucugauaacuacuacc

SEQ ID NO: 2000889 - RNA, 19 nt, Artificial Sequence
  Description of Artificial Sequence: Synthetic oligonucleotide
guugaugaugguuuucggc

SEQ ID NO: 2000890 - RNA, 19 nt, Artificial Sequence
  Description of Artificial Sequence: Synthetic oligonucleotide
agugucugauaacuacuac

SEQ ID NO: 2000891 - RNA, 19 nt, Artificial Sequence
  Description of Artificial Sequence: Synthetic oligonucleotide
aggccuucugcauagcaac

SEQ ID NO: 2000892 - RNA, 19 nt, Artificial Sequence
  Description of Artificial Sequence: Synthetic oligonucleotide
cuggguuugugauaagacc

SEQ ID NO: 2000893 - RNA, 19 nt, Artificial Sequence
  Description of Artificial Sequence: Synthetic oligonucleotide
aguccuuucauguuccgca

SEQ ID NO: 2000894 - RNA, 19 nt, Artificial Sequence
  Description of Artificial Sequence: Synthetic oligonucleotide
aggagcuuccagcacauag

SEQ ID NO: 2000895 - RNA, 19 nt, Artificial Sequence
  Description of Artificial Sequence: Synthetic oligonucleotide
uuugugauaagaccugguu

SEQ ID NO: 2000896 - RNA, 19 nt, Artificial Sequence
  Description of Artificial Sequence: Synthetic oligonucleotide
gaaccugacugauccaucc

SEQ ID NO: 2000897 - RNA, 19 nt, Artificial Sequence
  Description of Artificial Sequence: Synthetic oligonucleotide
ugaagauuuuaaacagacu

SEQ ID NO: 2000898 - RNA, 19 nt, Artificial Sequence
  Description of Artificial Sequence: Synthetic oligonucleotide
ucuucgagggacuuccagc

SEQ ID NO: 2000899 - RNA, 19 nt, Artificial Sequence
  Description of Artificial Sequence: Synthetic oligonucleotide
cuucgagggacuuccagcc

SEQ ID NO: 2000900 - RNA, 19 nt, Artificial Sequence
  Description of Artificial Sequence: Synthetic oligonucleotide
cuuaaacguggcuaguaac

SEQ ID NO: 2000901 - RNA, 19 nt, Artificial Sequence
  Description of Artificial Sequence: Synthetic oligonucleotide
guggguacagccuuuaaca

SEQ ID NO: 2000902 - RNA, 19 nt, Artificial Sequence
  Description of Artificial Sequence: Synthetic oligonucleotide
gauaacuacuaccccuccc

SEQ ID NO: 2000903 - RNA, 19 nt, Artificial Sequence
  Description of Artificial Sequence: Synthetic oligonucleotide
accgaaauaccuugcccac

SEQ ID NO: 2000904 - RNA, 19 nt, Artificial Sequence
  Description of Artificial Sequence: Synthetic oligonucleotide
acagguggagccucugcgc

SEQ ID NO: 2000905 - RNA, 19 nt, Artificial Sequence
  Description of Artificial Sequence: Synthetic oligonucleotide
uauaggacagcuccugcuc

SEQ ID NO: 2000906 - RNA, 19 nt, Artificial Sequence
  Description of Artificial Sequence: Synthetic oligonucleotide
acauuuggguuccacucuc

SEQ ID NO: 2000907 - RNA, 19 nt, Artificial Sequence
  Description of Artificial Sequence: Synthetic oligonucleotide
aaacguggcuaguaacaug

SEQ ID NO: 2000908 - RNA, 19 nt, Artificial Sequence
  Description of Artificial Sequence: Synthetic oligonucleotide
acagcgcacgcucacaaag

SEQ ID NO: 2000909 - RNA, 19 nt, Artificial Sequence
  Description of Artificial Sequence: Synthetic oligonucleotide
ugcuuagcacuuuaucccc

SEQ ID NO: 2000910 - RNA, 19 nt, Artificial Sequence
  Description of Artificial Sequence: Synthetic oligonucleotide
acagccuuuaacaccggcc

SEQ ID NO: 2000911 - RNA, 19 nt, Artificial Sequence
  Description of Artificial Sequence: Synthetic oligonucleotide
ucccugauggauauaggac

SEQ ID NO: 2000912 - RNA, 19 nt, Artificial Sequence
  Description of Artificial Sequence: Synthetic oligonucleotide
cugacugauccauccaggg

SEQ ID NO: 2000913 - RNA, 19 nt, Artificial Sequence
  Description of Artificial Sequence: Synthetic oligonucleotide
gucuguaggagcuuccagc

SEQ ID NO: 2000914 - RNA, 19 nt, Artificial Sequence
  Description of Artificial Sequence: Synthetic oligonucleotide
ugauggauauaggacagcu

SEQ ID NO: 2000915 - RNA, 19 nt, Artificial Sequence
  Description of Artificial Sequence: Synthetic oligonucleotide
uccagcacauagcuuaaac

SEQ ID NO: 2000916 - RNA, 19 nt, Artificial Sequence
  Description of Artificial Sequence: Synthetic oligonucleotide
uguucagcucugauaacac

SEQ ID NO: 2000917 - RNA, 19 nt, Artificial Sequence
  Description of Artificial Sequence: Synthetic oligonucleotide
uaaacagacuugcagucuu

SEQ ID NO: 2000918 - RNA, 19 nt, Artificial Sequence
  Description of Artificial Sequence: Synthetic oligonucleotide
gaugguuuucggcagccac

SEQ ID NO: 2000919 - RNA, 19 nt, Artificial Sequence
  Description of Artificial Sequence: Synthetic oligonucleotide
aguccuagugucugauaac

SEQ ID NO: 2000920 - RNA, 19 nt, Artificial Sequence
  Description of Artificial Sequence: Synthetic oligonucleotide
aucucuuagcuccacuuca

SEQ ID NO: 2000921 - RNA, 19 nt, Artificial Sequence
  Description of Artificial Sequence: Synthetic oligonucleotide
agcauauucaggccuagau

SEQ ID NO: 2000922 - RNA, 19 nt, Artificial Sequence
  Description of Artificial Sequence: Synthetic oligonucleotide
uuucuaauuuccugauggu

SEQ ID NO: 2000923 - RNA, 19 nt, Artificial Sequence
  Description of Artificial Sequence: Synthetic oligonucleotide
aaccaagcagagaacuccg

SEQ ID NO: 2000924 - RNA, 19 nt, Artificial Sequence
  Description of Artificial Sequence: Synthetic oligonucleotide
cacuuuauccccguuuucc

SEQ ID NO: 2000925 - RNA, 19 nt, Artificial Sequence
  Description of Artificial Sequence: Synthetic oligonucleotide
cauagagucuguccauggg

SEQ ID NO: 2000926 - RNA, 19 nt, Artificial Sequence
  Description of Artificial Sequence: Synthetic oligonucleotide
ugacugauccauccagggc

SEQ ID NO: 2000927 - RNA, 19 nt, Artificial Sequence
  Description of Artificial Sequence: Synthetic oligonucleotide
uagucuucgagggacuucc

SEQ ID NO: 2000928 - RNA, 19 nt, Artificial Sequence
  Description of Artificial Sequence: Synthetic oligonucleotide
cuggucuaccacuaccucc

SEQ ID NO: 2000929 - RNA, 19 nt, Artificial Sequence
  Description of Artificial Sequence: Synthetic oligonucleotide
aauaccuugcccacaucug

SEQ ID NO: 2000930 - RNA, 19 nt, Artificial Sequence
  Description of Artificial Sequence: Synthetic oligonucleotide
cuaccuccaaccgaaauac

SEQ ID NO: 2000931 - RNA, 19 nt, Artificial Sequence
  Description of Artificial Sequence: Synthetic oligonucleotide
agcaccauacaggugggac

SEQ ID NO: 2000932 - RNA, 19 nt, Artificial Sequence
  Description of Artificial Sequence: Synthetic oligonucleotide
cugauaacuacuaccccuc

SEQ ID NO: 2000933 - RNA, 19 nt, Artificial Sequence
  Description of Artificial Sequence: Synthetic oligonucleotide
aauuuccugauggucauuu

SEQ ID NO: 2000934 - RNA, 19 nt, Artificial Sequence
  Description of Artificial Sequence: Synthetic oligonucleotide
gaugucuaucucuuagcuc

SEQ ID NO: 2000935 - RNA, 19 nt, Artificial Sequence
  Description of Artificial Sequence: Synthetic oligonucleotide
ugaugacugugucuuuccc

SEQ ID NO: 2000936 - RNA, 19 nt, Artificial Sequence
  Description of Artificial Sequence: Synthetic oligonucleotide
uaucucuuagcuccacuuc

SEQ ID NO: 2000937 - RNA, 19 nt, Artificial Sequence
  Description of Artificial Sequence: Synthetic oligonucleotide
uaugucuguaggagcuucc

SEQ ID NO: 2000938 - RNA, 19 nt, Artificial Sequence
  Description of Artificial Sequence: Synthetic oligonucleotide
aacacacagguggagccuc

SEQ ID NO: 2000939 - RNA, 19 nt, Artificial Sequence
  Description of Artificial Sequence: Synthetic oligonucleotide
ugauaacaccacuuuguuc

SEQ ID NO: 2000940 - RNA, 19 nt, Artificial Sequence
  Description of Artificial Sequence: Synthetic oligonucleotide
ugucuguaggagcuuccag

SEQ ID NO: 2000941 - RNA, 19 nt, Artificial Sequence
  Description of Artificial Sequence: Synthetic oligonucleotide
ugauaacuacuaccccucc

SEQ ID NO: 2000942 - RNA, 19 nt, Artificial Sequence
  Description of Artificial Sequence: Synthetic oligonucleotide
aagugaauuuagucuucga

SEQ ID NO: 2000943 - RNA, 19 nt, Artificial Sequence
  Description of Artificial Sequence: Synthetic oligonucleotide
uuaaacagacuugcagucu

SEQ ID NO: 2000944 - RNA, 19 nt, Artificial Sequence
  Description of Artificial Sequence: Synthetic oligonucleotide
uauucaggccuagauaaaa

SEQ ID NO: 2000945 - RNA, 19 nt, Artificial Sequence
  Description of Artificial Sequence: Synthetic oligonucleotide
cagaugucuaucucuuagc

SEQ ID NO: 2000946 - RNA, 19 nt, Artificial Sequence
  Description of Artificial Sequence: Synthetic oligonucleotide
cacagcuaaucagugagag

SEQ ID NO: 2000947 - RNA, 19 nt, Artificial Sequence
  Description of Artificial Sequence: Synthetic oligonucleotide
uucuaauuuccugaugguc

SEQ ID NO: 2000948 - RNA, 19 nt, Artificial Sequence
  Description of Artificial Sequence: Synthetic oligonucleotide
acuaccuccaaccgaaaua

SEQ ID NO: 2000949 - RNA, 19 nt, Artificial Sequence
  Description of Artificial Sequence: Synthetic oligonucleotide
caggugguuggcaaacucc

SEQ ID NO: 2000950 - RNA, 19 nt, Artificial Sequence
  Description of Artificial Sequence: Synthetic oligonucleotide
uccgcauaugucuguagga

SEQ ID NO: 2000951 - RNA, 19 nt, Artificial Sequence
  Description of Artificial Sequence: Synthetic oligonucleotide
ucuaucucuuagcuccacu

SEQ ID NO: 2000952 - RNA, 19 nt, Artificial Sequence
  Description of Artificial Sequence: Synthetic oligonucleotide
aaucagugagagacugagg

SEQ ID NO: 2000953 - RNA, 19 nt, Artificial Sequence
  Description of Artificial Sequence: Synthetic oligonucleotide
auaugucuguaggagcuuc

SEQ ID NO: 2000954 - RNA, 19 nt, Artificial Sequence
  Description of Artificial Sequence: Synthetic oligonucleotide
guugauguaguggguacag

SEQ ID NO: 2000955 - RNA, 19 nt, Artificial Sequence
  Description of Artificial Sequence: Synthetic oligonucleotide
ugagcagccaagugaauuu

SEQ ID NO: 2000956 - RNA, 19 nt, Artificial Sequence
  Description of Artificial Sequence: Synthetic oligonucleotide
cacagguggagccucugcg

SEQ ID NO: 2000957 - RNA, 19 nt, Artificial Sequence
  Description of Artificial Sequence: Synthetic oligonucleotide
uagucaucaacugaagauu

SEQ ID NO: 2000958 - RNA, 19 nt, Artificial Sequence
  Description of Artificial Sequence: Synthetic oligonucleotide
ugagaaccaagcagagaac

SEQ ID NO: 2000959 - RNA, 19 nt, Artificial Sequence
  Description of Artificial Sequence: Synthetic oligonucleotide
cacgcucacaaagucacgg

SEQ ID NO: 2000960 - RNA, 19 nt, Artificial Sequence
  Description of Artificial Sequence: Synthetic oligonucleotide
agcgcacgcucacaaaguc

SEQ ID NO: 2000961 - RNA, 19 nt, Artificial Sequence
  Description of Artificial Sequence: Synthetic oligonucleotide
agcagagaacuccgacgcc

SEQ ID NO: 2000962 - RNA, 19 nt, Artificial Sequence
  Description of Artificial Sequence: Synthetic oligonucleotide
gucaauacugagcagccaa

SEQ ID NO: 2000963 - RNA, 19 nt, Artificial Sequence
  Description of Artificial Sequence: Synthetic oligonucleotide
cauguuccgcauaugucug

SEQ ID NO: 2000964 - RNA, 19 nt, Artificial Sequence
  Description of Artificial Sequence: Synthetic oligonucleotide
ucggcagccaccccuugag

SEQ ID NO: 2000965 - RNA, 19 nt, Artificial Sequence
  Description of Artificial Sequence: Synthetic oligonucleotide
gacugugucuuucccaauc

SEQ ID NO: 2000966 - RNA, 19 nt, Artificial Sequence
  Description of Artificial Sequence: Synthetic oligonucleotide
ccagcacauagcuuaaacg

SEQ ID NO: 2000967 - RNA, 19 nt, Artificial Sequence
  Description of Artificial Sequence: Synthetic oligonucleotide
cuaccacuaccuccaaccg

SEQ ID NO: 2000968 - RNA, 19 nt, Artificial Sequence
  Description of Artificial Sequence: Synthetic oligonucleotide
cuuuauccccguuuuccug

SEQ ID NO: 2000969 - RNA, 19 nt, Artificial Sequence
  Description of Artificial Sequence: Synthetic oligonucleotide
uggguacagccuuuaacac

SEQ ID NO: 2000970 - RNA, 19 nt, Artificial Sequence
  Description of Artificial Sequence: Synthetic oligonucleotide
cuccaaccgaaauaccuug

SEQ ID NO: 2000971 - RNA, 19 nt, Artificial Sequence
  Description of Artificial Sequence: Synthetic oligonucleotide
caucuccccaaaaugugug

SEQ ID NO: 2000972 - RNA, 19 nt, Artificial Sequence
  Description of Artificial Sequence: Synthetic oligonucleotide
cacauagcuuaaacguggc

SEQ ID NO: 2000973 - RNA, 19 nt, Artificial Sequence
  Description of Artificial Sequence: Synthetic oligonucleotide
uguucaggcaucuccccaa

SEQ ID NO: 2000974 - RNA, 19 nt, Artificial Sequence
  Description of Artificial Sequence: Synthetic oligonucleotide
ucucccaguguucuucggu

SEQ ID NO: 2000975 - RNA, 19 nt, Artificial Sequence
  Description of Artificial Sequence: Synthetic oligonucleotide
agucucccaguguucuucg

SEQ ID NO: 2000976 - RNA, 19 nt, Artificial Sequence
  Description of Artificial Sequence: Synthetic oligonucleotide
ugguuuucggcagccaccc

SEQ ID NO: 2000977 - RNA, 19 nt, Artificial Sequence
  Description of Artificial Sequence: Synthetic oligonucleotide
gaauuuagucuucgaggga

SEQ ID NO: 2000978 - RNA, 19 nt, Artificial Sequence
  Description of Artificial Sequence: Synthetic oligonucleotide
ucacagcuaaucagugaga

SEQ ID NO: 2000979 - RNA, 19 nt, Artificial Sequence
  Description of Artificial Sequence: Synthetic oligonucleotide
cauagucaucaacugaaga

SEQ ID NO: 2000980 - RNA, 19 nt, Artificial Sequence
  Description of Artificial Sequence: Synthetic oligonucleotide
agcacuuuauccccguuuu

SEQ ID NO: 2000981 - RNA, 19 nt, Artificial Sequence
  Description of Artificial Sequence: Synthetic oligonucleotide
aaacagacuugcagucuuc

SEQ ID NO: 2000982 - RNA, 19 nt, Artificial Sequence
  Description of Artificial Sequence: Synthetic oligonucleotide
cauuucuaauuuccugaug

SEQ ID NO: 2000983 - RNA, 19 nt, Artificial Sequence
  Description of Artificial Sequence: Synthetic oligonucleotide
agaaccaagcagagaacuc

SEQ ID NO: 2000984 - RNA, 19 nt, Artificial Sequence
  Description of Artificial Sequence: Synthetic oligonucleotide
aacuccaucuggguuugug

SEQ ID NO: 2000985 - RNA, 19 nt, Artificial Sequence
  Description of Artificial Sequence: Synthetic oligonucleotide
aacuccgacgccgaaccug

SEQ ID NO: 2000986 - RNA, 19 nt, Artificial Sequence
  Description of Artificial Sequence: Synthetic oligonucleotide
ugauaagaccugguugaug

SEQ ID NO: 2000987 - RNA, 19 nt, Artificial Sequence
  Description of Artificial Sequence: Synthetic oligonucleotide
auaggacagcuccugcuca

SEQ ID NO: 2000988 - RNA, 19 nt, Artificial Sequence
  Description of Artificial Sequence: Synthetic oligonucleotide
acgcucacaaagucacggg

SEQ ID NO: 2000989 - RNA, 19 nt, Artificial Sequence
  Description of Artificial Sequence: Synthetic oligonucleotide
uaaacguggcuaguaacau

SEQ ID NO: 2000990 - RNA, 19 nt, Artificial Sequence
  Description of Artificial Sequence: Synthetic oligonucleotide
caccccuugaggucaauac

SEQ ID NO: 2000991 - RNA, 19 nt, Artificial Sequence
  Description of Artificial Sequence: Synthetic oligonucleotide
gucugauaacuacuacccc

SEQ ID NO: 2000992 - RNA, 19 nt, Artificial Sequence
  Description of Artificial Sequence: Synthetic oligonucleotide
auucaggccuagauaaaag

SEQ ID NO: 2000993 - RNA, 19 nt, Artificial Sequence
  Description of Artificial Sequence: Synthetic oligonucleotide
cagcacauagcuuaaacgu

SEQ ID NO: 2000994 - RNA, 19 nt, Artificial Sequence
  Description of Artificial Sequence: Synthetic oligonucleotide
ucagugagagacugagguc

SEQ ID NO: 2000995 - RNA, 19 nt, Artificial Sequence
  Description of Artificial Sequence: Synthetic oligonucleotide
cacaaagucacgggguccc

SEQ ID NO: 2000996 - RNA, 19 nt, Artificial Sequence
  Description of Artificial Sequence: Synthetic oligonucleotide
agcuccacuucacagcuaa

SEQ ID NO: 2000997 - RNA, 19 nt, Artificial Sequence
  Description of Artificial Sequence: Synthetic oligonucleotide
cagcugagaaccaagcaga

SEQ ID NO: 2000998 - RNA, 19 nt, Artificial Sequence
  Description of Artificial Sequence: Synthetic oligonucleotide
ugaggucaauacugagcag

SEQ ID NO: 2000999 - RNA, 19 nt, Artificial Sequence
  Description of Artificial Sequence: Synthetic oligonucleotide
ucaguccuuucauguuccg

SEQ ID NO: 2001000 - RNA, 19 nt, Artificial Sequence
  Description of Artificial Sequence: Synthetic oligonucleotide
ucuguccaugggcuggucu

SEQ ID NO: 2001001 - RNA, 19 nt, Artificial Sequence
  Description of Artificial Sequence: Synthetic oligonucleotide
ucgagggacuuccagccaa

SEQ ID NO: 2001002 - RNA, 19 nt, Artificial Sequence
  Description of Artificial Sequence: Synthetic oligonucleotide
cucccugauggauauagga

SEQ ID NO: 2001003 - RNA, 19 nt, Artificial Sequence
  Description of Artificial Sequence: Synthetic oligonucleotide
agcucaugggugaugacug

SEQ ID NO: 2001004 - RNA, 19 nt, Artificial Sequence
  Description of Artificial Sequence: Synthetic oligonucleotide
cauagcuuaaacguggcua

SEQ ID NO: 2001005 - RNA, 19 nt, Artificial Sequence
  Description of Artificial Sequence: Synthetic oligonucleotide
cucccauagucaucaacug

SEQ ID NO: 2001006 - RNA, 19 nt, Artificial Sequence
  Description of Artificial Sequence: Synthetic oligonucleotide
gucacggggucccaccagg

SEQ ID NO: 2001007 - RNA, 19 nt, Artificial Sequence
  Description of Artificial Sequence: Synthetic oligonucleotide
aagucacggggucccacca

SEQ ID NO: 2001008 - RNA, 19 nt, Artificial Sequence
  Description of Artificial Sequence: Synthetic oligonucleotide
gguugaugaugguuuucgg

SEQ ID NO: 2001009 - RNA, 19 nt, Artificial Sequence
  Description of Artificial Sequence: Synthetic oligonucleotide
cugcucacuguagagggcc

SEQ ID NO: 2001010 - RNA, 19 nt, Artificial Sequence
  Description of Artificial Sequence: Synthetic oligonucleotide
ucacaaagucacggggucc

SEQ ID NO: 2001011 - RNA, 19 nt, Artificial Sequence
  Description of Artificial Sequence: Synthetic oligonucleotide
cauuuggguuccacucucc

SEQ ID NO: 2001012 - RNA, 19 nt, Artificial Sequence
  Description of Artificial Sequence: Synthetic oligonucleotide
acauagcuuaaacguggcu

SEQ ID NO: 2001013 - RNA, 19 nt, Artificial Sequence
  Description of Artificial Sequence: Synthetic oligonucleotide
accuccaaccgaaauaccu

SEQ ID NO: 2001014 - RNA, 19 nt, Artificial Sequence
  Description of Artificial Sequence: Synthetic oligonucleotide
uccuugacauuuggguucc

SEQ ID NO: 2001015 - RNA, 19 nt, Artificial Sequence
  Description of Artificial Sequence: Synthetic oligonucleotide
acagcuaaucagugagaga

SEQ ID NO: 2001016 - RNA, 19 nt, Artificial Sequence
  Description of Artificial Sequence: Synthetic oligonucleotide
aacuacuaccccucccaua

SEQ ID NO: 2001017 - RNA, 19 nt, Artificial Sequence
  Description of Artificial Sequence: Synthetic oligonucleotide
agccuuuaacaccggccuc

SEQ ID NO: 2001018 - RNA, 19 nt, Artificial Sequence
  Description of Artificial Sequence: Synthetic oligonucleotide
ugggaccguguucagcucu

SEQ ID NO: 2001019 - RNA, 19 nt, Artificial Sequence
  Description of Artificial Sequence: Synthetic oligonucleotide
ggguacagccuuuaacacc

SEQ ID NO: 2001020 - RNA, 19 nt, Artificial Sequence
  Description of Artificial Sequence: Synthetic oligonucleotide
gcuaaucagugagagacug

SEQ ID NO: 2001021 - RNA, 19 nt, Artificial Sequence
  Description of Artificial Sequence: Synthetic oligonucleotide
acuucacagcuaaucagug

SEQ ID NO: 2001022 - RNA, 19 nt, Artificial Sequence
  Description of Artificial Sequence: Synthetic oligonucleotide
gcagagaacuccgacgccg

SEQ ID NO: 2001023 - RNA, 19 nt, Artificial Sequence
  Description of Artificial Sequence: Synthetic oligonucleotide
gguuugugauaagaccugg

SEQ ID NO: 2001024 - RNA, 19 nt, Artificial Sequence
  Description of Artificial Sequence: Synthetic oligonucleotide
cagucuuccuucgggaggc

SEQ ID NO: 2001025 - RNA, 19 nt, Artificial Sequence
  Description of Artificial Sequence: Synthetic oligonucleotide
uaacuacuaccccucccau

SEQ ID NO: 2001026 - RNA, 19 nt, Artificial Sequence
  Description of Artificial Sequence: Synthetic oligonucleotide
uguggcuaugccugccaac

SEQ ID NO: 2001027 - RNA, 19 nt, Artificial Sequence
  Description of Artificial Sequence: Synthetic oligonucleotide
uggagucucccaguguucu

SEQ ID NO: 2001028 - RNA, 19 nt, Artificial Sequence
  Description of Artificial Sequence: Synthetic oligonucleotide
ucugcgcuuggcacagcgc

SEQ ID NO: 2001029 - RNA, 19 nt, Artificial Sequence
  Description of Artificial Sequence: Synthetic oligonucleotide
uuucaccagucaguccuag

SEQ ID NO: 2001030 - RNA, 19 nt, Artificial Sequence
  Description of Artificial Sequence: Synthetic oligonucleotide
accacuaccuccaaccgaa

SEQ ID NO: 2001031 - RNA, 19 nt, Artificial Sequence
  Description of Artificial Sequence: Synthetic oligonucleotide
augggugaagcaccauaca

SEQ ID NO: 2001032 - RNA, 19 nt, Artificial Sequence
  Description of Artificial Sequence: Synthetic oligonucleotide
uugauguaguggguacagc

SEQ ID NO: 2001033 - RNA, 19 nt, Artificial Sequence
  Description of Artificial Sequence: Synthetic oligonucleotide
gaggucucuuccucucagc

SEQ ID NO: 2001034 - RNA, 19 nt, Artificial Sequence
  Description of Artificial Sequence: Synthetic oligonucleotide
caguccuagugucugauaa

SEQ ID NO: 2001035 - RNA, 19 nt, Artificial Sequence
  Description of Artificial Sequence: Synthetic oligonucleotide
uccuagugucugauaacua

SEQ ID NO: 2001036 - RNA, 19 nt, Artificial Sequence
  Description of Artificial Sequence: Synthetic oligonucleotide
gggacuacuuugcuuagca

SEQ ID NO: 2001037 - RNA, 19 nt, Artificial Sequence
  Description of Artificial Sequence: Synthetic oligonucleotide
gacauuuggguuccacucu

SEQ ID NO: 2001038 - RNA, 19 nt, Artificial Sequence
  Description of Artificial Sequence: Synthetic oligonucleotide
cuucacagcuaaucaguga

SEQ ID NO: 2001039 - RNA, 19 nt, Artificial Sequence
  Description of Artificial Sequence: Synthetic oligonucleotide
uucgagggacuuccagcca

SEQ ID NO: 2001040 - RNA, 19 nt, Artificial Sequence
  Description of Artificial Sequence: Synthetic oligonucleotide
uuuucggcagccaccccuu

SEQ ID NO: 2001041 - RNA, 19 nt, Artificial Sequence
  Description of Artificial Sequence: Synthetic oligonucleotide
cuagugucugauaacuacu

SEQ ID NO: 2001042 - RNA, 19 nt, Artificial Sequence
  Description of Artificial Sequence: Synthetic oligonucleotide
ggauauaggacagcuccug

SEQ ID NO: 2001043 - RNA, 19 nt, Artificial Sequence
  Description of Artificial Sequence: Synthetic oligonucleotide
agucaucaacugaagauuu

SEQ ID NO: 2001044 - RNA, 19 nt, Artificial Sequence
  Description of Artificial Sequence: Synthetic oligonucleotide
uaccuccaaccgaaauacc

SEQ ID NO: 2001045 - RNA, 19 nt, Artificial Sequence
  Description of Artificial Sequence: Synthetic oligonucleotide
guuccgcauaugucuguag

SEQ ID NO: 2001046 - RNA, 19 nt, Artificial Sequence
  Description of Artificial Sequence: Synthetic oligonucleotide
uccgacgccgaaccugacu

SEQ ID NO: 2001047 - RNA, 19 nt, Artificial Sequence
  Description of Artificial Sequence: Synthetic oligonucleotide
ggucccaccagguuuccug

SEQ ID NO: 2001048 - RNA, 19 nt, Artificial Sequence
  Description of Artificial Sequence: Synthetic oligonucleotide
ccugacugauccauccagg

SEQ ID NO: 2001049 - RNA, 19 nt, Artificial Sequence
  Description of Artificial Sequence: Synthetic oligonucleotide
ggagcuuccagcacauagc

SEQ ID NO: 2001050 - RNA, 19 nt, Artificial Sequence
  Description of Artificial Sequence: Synthetic oligonucleotide
cuaaucagugagagacuga

SEQ ID NO: 2001051 - RNA, 19 nt, Artificial Sequence
  Description of Artificial Sequence: Synthetic oligonucleotide
cacuucacagcuaaucagu

SEQ ID NO: 2001052 - RNA, 19 nt, Artificial Sequence
  Description of Artificial Sequence: Synthetic oligonucleotide
agugagagacugaggucuc

SEQ ID NO: 2001053 - RNA, 19 nt, Artificial Sequence
  Description of Artificial Sequence: Synthetic oligonucleotide
uccagccaaugggugaagc

SEQ ID NO: 2001054 - RNA, 19 nt, Artificial Sequence
  Description of Artificial Sequence: Synthetic oligonucleotide
gauguaguggguacagccu

SEQ ID NO: 2001055 - RNA, 19 nt, Artificial Sequence
  Description of Artificial Sequence: Synthetic oligonucleotide
accccucccauagucauca

SEQ ID NO: 2001056 - RNA, 19 nt, Artificial Sequence
  Description of Artificial Sequence: Synthetic oligonucleotide
gcaccauacaggugggacc

SEQ ID NO: 2001057 - RNA, 19 nt, Artificial Sequence
  Description of Artificial Sequence: Synthetic oligonucleotide
uuuagucuucgagggacuu

SEQ ID NO: 2001058 - RNA, 19 nt, Artificial Sequence
  Description of Artificial Sequence: Synthetic oligonucleotide
guuuucggcagccaccccu

SEQ ID NO: 2001059 - RNA, 19 nt, Artificial Sequence
  Description of Artificial Sequence: Synthetic oligonucleotide
uucaccagucaguccuagu

SEQ ID NO: 2001060 - RNA, 19 nt, Artificial Sequence
  Description of Artificial Sequence: Synthetic oligonucleotide
auacaggugggaccguguu

SEQ ID NO: 2001061 - RNA, 19 nt, Artificial Sequence
  Description of Artificial Sequence: Synthetic oligonucleotide
aggccuagauaaaagguuu

SEQ ID NO: 2001062 - RNA, 19 nt, Artificial Sequence
  Description of Artificial Sequence: Synthetic oligonucleotide
ccuagauaaaagguuuaac

SEQ ID NO: 2001063 - RNA, 19 nt, Artificial Sequence
  Description of Artificial Sequence: Synthetic oligonucleotide
cugggacuacuuugcuuag

SEQ ID NO: 2001064 - RNA, 19 nt, Artificial Sequence
  Description of Artificial Sequence: Synthetic oligonucleotide
cugauggauauaggacagc

SEQ ID NO: 2001065 - RNA, 19 nt, Artificial Sequence
  Description of Artificial Sequence: Synthetic oligonucleotide
auuuagucuucgagggacu

SEQ ID NO: 2001066 - RNA, 19 nt, Artificial Sequence
  Description of Artificial Sequence: Synthetic oligonucleotide
agcagccaagugaauuuag

SEQ ID NO: 2001067 - RNA, 19 nt, Artificial Sequence
  Description of Artificial Sequence: Synthetic oligonucleotide
cccauagucaucaacugaa

SEQ ID NO: 2001068 - RNA, 19 nt, Artificial Sequence
  Description of Artificial Sequence: Synthetic oligonucleotide
agucaguccuagugucuga

SEQ ID NO: 2001069 - RNA, 19 nt, Artificial Sequence
  Description of Artificial Sequence: Synthetic oligonucleotide
uccuuucauguuccgcaua

SEQ ID NO: 2001070 - RNA, 19 nt, Artificial Sequence
  Description of Artificial Sequence: Synthetic oligonucleotide
acggggucccaccagguuu

SEQ ID NO: 2001071 - RNA, 19 nt, Artificial Sequence
  Description of Artificial Sequence: Synthetic oligonucleotide
ugggacuacuuugcuuagc

SEQ ID NO: 2001072 - RNA, 19 nt, Artificial Sequence
  Description of Artificial Sequence: Synthetic oligonucleotide
ugaggaugcccaaggccuu

SEQ ID NO: 2001073 - RNA, 19 nt, Artificial Sequence
  Description of Artificial Sequence: Synthetic oligonucleotide
cccaaucuuuugcaggacc

SEQ ID NO: 2001074 - RNA, 19 nt, Artificial Sequence
  Description of Artificial Sequence: Synthetic oligonucleotide
uggcuaugccugccaacac

SEQ ID NO: 2001075 - RNA, 19 nt, Artificial Sequence
  Description of Artificial Sequence: Synthetic oligonucleotide
caguccuuucauguuccgc

SEQ ID NO: 2001076 - RNA, 19 nt, Artificial Sequence
  Description of Artificial Sequence: Synthetic oligonucleotide
cagugagagacugaggucu

SEQ ID NO: 2001077 - RNA, 19 nt, Artificial Sequence
  Description of Artificial Sequence: Synthetic oligonucleotide
auguuccgcauaugucugu

SEQ ID NO: 2001078 - RNA, 19 nt, Artificial Sequence
  Description of Artificial Sequence: Synthetic oligonucleotide
uugcgcaggugguuggcaa

SEQ ID NO: 2001079 - RNA, 19 nt, Artificial Sequence
  Description of Artificial Sequence: Synthetic oligonucleotide
uguuccgcauaugucugua

SEQ ID NO: 2001080 - RNA, 19 nt, Artificial Sequence
  Description of Artificial Sequence: Synthetic oligonucleotide
uguccaugggcuggucuac

SEQ ID NO: 2001081 - RNA, 19 nt, Artificial Sequence
  Description of Artificial Sequence: Synthetic oligonucleotide
agcuuaaacguggcuagua

SEQ ID NO: 2001082 - RNA, 19 nt, Artificial Sequence
  Description of Artificial Sequence: Synthetic oligonucleotide
ucaguccuagugucugaua

SEQ ID NO: 2001083 - RNA, 19 nt, Artificial Sequence
  Description of Artificial Sequence: Synthetic oligonucleotide
ugauccauccagggcugga

SEQ ID NO: 2001084 - RNA, 19 nt, Artificial Sequence
  Description of Artificial Sequence: Synthetic oligonucleotide
cuuucauguuccgcauaug

SEQ ID NO: 2001085 - RNA, 19 nt, Artificial Sequence
  Description of Artificial Sequence: Synthetic oligonucleotide
augucuguaggagcuucca

SEQ ID NO: 2001086 - RNA, 19 nt, Artificial Sequence
  Description of Artificial Sequence: Synthetic oligonucleotide
gcauauucaggccuagaua

SEQ ID NO: 2001087 - RNA, 19 nt, Artificial Sequence
  Description of Artificial Sequence: Synthetic oligonucleotide
ucacggggucccaccaggu

SEQ ID NO: 2001088 - RNA, 19 nt, Artificial Sequence
  Description of Artificial Sequence: Synthetic oligonucleotide
gcuuaaacguggcuaguaa

SEQ ID NO: 2001089 - RNA, 19 nt, Artificial Sequence
  Description of Artificial Sequence: Synthetic oligonucleotide
ggcaugcagguugauguag

SEQ ID NO: 2001090 - RNA, 19 nt, Artificial Sequence
  Description of Artificial Sequence: Synthetic oligonucleotide
uaguggguacagccuuuaa

SEQ ID NO: 2001091 - RNA, 19 nt, Artificial Sequence
  Description of Artificial Sequence: Synthetic oligonucleotide
cuguaggagcuuccagcac

SEQ ID NO: 2001092 - RNA, 19 nt, Artificial Sequence
  Description of Artificial Sequence: Synthetic oligonucleotide
guccuagugucugauaacu

SEQ ID NO: 2001093 - RNA, 19 nt, Artificial Sequence
  Description of Artificial Sequence: Synthetic oligonucleotide
uuucggcagccaccccuug

SEQ ID NO: 2001094 - RNA, 19 nt, Artificial Sequence
  Description of Artificial Sequence: Synthetic oligonucleotide
ccguguucagcucugauaa

SEQ ID NO: 2001095 - RNA, 19 nt, Artificial Sequence
  Description of Artificial Sequence: Synthetic oligonucleotide
uggcacagcgcacgcucac

SEQ ID NO: 2001096 - RNA, 19 nt, Artificial Sequence
  Description of Artificial Sequence: Synthetic oligonucleotide
ggguuugugauaagaccug

SEQ ID NO: 2001097 - RNA, 19 nt, Artificial Sequence
  Description of Artificial Sequence: Synthetic oligonucleotide
agcuaaucagugagagacu

SEQ ID NO: 2001098 - RNA, 19 nt, Artificial Sequence
  Description of Artificial Sequence: Synthetic oligonucleotide
cgccgaaccugacugaucc

SEQ ID NO: 2001099 - RNA, 19 nt, Artificial Sequence
  Description of Artificial Sequence: Synthetic oligonucleotide
uagcuuaaacguggcuagu

SEQ ID NO: 2001100 - RNA, 19 nt, Artificial Sequence
  Description of Artificial Sequence: Synthetic oligonucleotide
ggcuaugccugccaacaca

SEQ ID NO: 2001101 - RNA, 19 nt, Artificial Sequence
  Description of Artificial Sequence: Synthetic oligonucleotide
cuaucucuuagcuccacuu

SEQ ID NO: 2001102 - RNA, 19 nt, Artificial Sequence
  Description of Artificial Sequence: Synthetic oligonucleotide
aaccucucccugauggaua

SEQ ID NO: 2001103 - RNA, 19 nt, Artificial Sequence
  Description of Artificial Sequence: Synthetic oligonucleotide
acuccgacgccgaaccuga

SEQ ID NO: 2001104 - RNA, 19 nt, Artificial Sequence
  Description of Artificial Sequence: Synthetic oligonucleotide
uccaugcgguccacaaguu

SEQ ID NO: 2001105 - RNA, 19 nt, Artificial Sequence
  Description of Artificial Sequence: Synthetic oligonucleotide
ccgacgccgaaccugacug

SEQ ID NO: 2001106 - RNA, 19 nt, Artificial Sequence
  Description of Artificial Sequence: Synthetic oligonucleotide
auauucaggccuagauaaa

SEQ ID NO: 2001107 - RNA, 19 nt, Artificial Sequence
  Description of Artificial Sequence: Synthetic oligonucleotide
ggacuacuuugcuuagcac

SEQ ID NO: 2001108 - RNA, 19 nt, Artificial Sequence
  Description of Artificial Sequence: Synthetic oligonucleotide
caaagucacggggucccac

SEQ ID NO: 2001109 - RNA, 19 nt, Artificial Sequence
  Description of Artificial Sequence: Synthetic oligonucleotide
ccaagugaauuuagucuuc

SEQ ID NO: 2001110 - RNA, 19 nt, Artificial Sequence
  Description of Artificial Sequence: Synthetic oligonucleotide
cugccaacacacaggugga

SEQ ID NO: 2001111 - RNA, 19 nt, Artificial Sequence
  Description of Artificial Sequence: Synthetic oligonucleotide
gccaagugaauuuagucuu

SEQ ID NO: 2001112 - RNA, 19 nt, Artificial Sequence
  Description of Artificial Sequence: Synthetic oligonucleotide
caggccuagauaaaagguu

SEQ ID NO: 2001113 - RNA, 19 nt, Artificial Sequence
  Description of Artificial Sequence: Synthetic oligonucleotide
ucccaaucuuuugcaggac

SEQ ID NO: 2001114 - RNA, 19 nt, Artificial Sequence
  Description of Artificial Sequence: Synthetic oligonucleotide
agccuuccugguugcugag

SEQ ID NO: 2001115 - RNA, 19 nt, Artificial Sequence
  Description of Artificial Sequence: Synthetic oligonucleotide
ugacugugucuuucccaau

SEQ ID NO: 2001116 - RNA, 19 nt, Artificial Sequence
  Description of Artificial Sequence: Synthetic oligonucleotide
acuuugcuuagcacuuuau

SEQ ID NO: 2001117 - RNA, 19 nt, Artificial Sequence
  Description of Artificial Sequence: Synthetic oligonucleotide
cagagaacuccgacgccga

SEQ ID NO: 2001118 - RNA, 19 nt, Artificial Sequence
  Description of Artificial Sequence: Synthetic oligonucleotide
gugaagcaccauacaggug

SEQ ID NO: 2001119 - RNA, 19 nt, Artificial Sequence
  Description of Artificial Sequence: Synthetic oligonucleotide
cugauccauccagggcugg

SEQ ID NO: 2001120 - RNA, 19 nt, Artificial Sequence
  Description of Artificial Sequence: Synthetic oligonucleotide
guuugugauaagaccuggu

SEQ ID NO: 2001121 - RNA, 19 nt, Artificial Sequence
  Description of Artificial Sequence: Synthetic oligonucleotide
cuaugccugccaacacaca

SEQ ID NO: 2001122 - RNA, 19 nt, Artificial Sequence
  Description of Artificial Sequence: Synthetic oligonucleotide
guacagccuuuaacaccgg

SEQ ID NO: 2001123 - RNA, 19 nt, Artificial Sequence
  Description of Artificial Sequence: Synthetic oligonucleotide
gagcagccaagugaauuua

SEQ ID NO: 2001124 - RNA, 19 nt, Artificial Sequence
  Description of Artificial Sequence: Synthetic oligonucleotide
uuccagcacauagcuuaaa

SEQ ID NO: 2001125 - RNA, 19 nt, Artificial Sequence
  Description of Artificial Sequence: Synthetic oligonucleotide
cucucccauugccuccaug

SEQ ID NO: 2001126 - RNA, 19 nt, Artificial Sequence
  Description of Artificial Sequence: Synthetic oligonucleotide
cauacaggugggaccgugu

SEQ ID NO: 2001127 - RNA, 19 nt, Artificial Sequence
  Description of Artificial Sequence: Synthetic oligonucleotide
ccaucuggguuugugauaa

SEQ ID NO: 2001128 - RNA, 19 nt, Artificial Sequence
  Description of Artificial Sequence: Synthetic oligonucleotide
gcgcuuggcacagcgcacg

SEQ ID NO: 2001129 - RNA, 19 nt, Artificial Sequence
  Description of Artificial Sequence: Synthetic oligonucleotide
acgccgaaccugacugauc

SEQ ID NO: 2001130 - RNA, 19 nt, Artificial Sequence
  Description of Artificial Sequence: Synthetic oligonucleotide
caggugggaccguguucag

SEQ ID NO: 2001131 - RNA, 19 nt, Artificial Sequence
  Description of Artificial Sequence: Synthetic oligonucleotide
cagcucaugggugaugacu

SEQ ID NO: 2001132 - RNA, 19 nt, Artificial Sequence
  Description of Artificial Sequence: Synthetic oligonucleotide
ccaaucuuuugcaggaccu

SEQ ID NO: 2001133 - RNA, 19 nt, Artificial Sequence
  Description of Artificial Sequence: Synthetic oligonucleotide
gccuagauaaaagguuuaa

SEQ ID NO: 2001134 - RNA, 19 nt, Artificial Sequence
  Description of Artificial Sequence: Synthetic oligonucleotide
cuaccccucccauagucau

SEQ ID NO: 2001135 - RNA, 19 nt, Artificial Sequence
  Description of Artificial Sequence: Synthetic oligonucleotide
uagcuccacuucacagcua

SEQ ID NO: 2001136 - RNA, 19 nt, Artificial Sequence
  Description of Artificial Sequence: Synthetic oligonucleotide
cccaaaauguguggcuaug

SEQ ID NO: 2001137 - RNA, 19 nt, Artificial Sequence
  Description of Artificial Sequence: Synthetic oligonucleotide
ccagccaaugggugaagca

SEQ ID NO: 2001138 - RNA, 19 nt, Artificial Sequence
  Description of Artificial Sequence: Synthetic oligonucleotide
gcgguccacaaguucuuca

SEQ ID NO: 2001139 - RNA, 19 nt, Artificial Sequence
  Description of Artificial Sequence: Synthetic oligonucleotide
guaguggguacagccuuua

SEQ ID NO: 2001140 - RNA, 19 nt, Artificial Sequence
  Description of Artificial Sequence: Synthetic oligonucleotide
aaacuccaucuggguuugu

SEQ ID NO: 2001141 - RNA, 19 nt, Artificial Sequence
  Description of Artificial Sequence: Synthetic oligonucleotide
ggugccucaguccuuucau

SEQ ID NO: 2001142 - RNA, 19 nt, Artificial Sequence
  Description of Artificial Sequence: Synthetic oligonucleotide
gcucugauaacaccacuuu

SEQ ID NO: 2001143 - RNA, 19 nt, Artificial Sequence
  Description of Artificial Sequence: Synthetic oligonucleotide
uuggugccucaguccuuuc

SEQ ID NO: 2001144 - RNA, 19 nt, Artificial Sequence
  Description of Artificial Sequence: Synthetic oligonucleotide
gugggaccguguucagcuc

SEQ ID NO: 2001145 - RNA, 19 nt, Artificial Sequence
  Description of Artificial Sequence: Synthetic oligonucleotide
gaccugguugaugaugguu

SEQ ID NO: 2001146 - RNA, 19 nt, Artificial Sequence
  Description of Artificial Sequence: Synthetic oligonucleotide
ccuuuaacaccggccucag

SEQ ID NO: 2001147 - RNA, 19 nt, Artificial Sequence
  Description of Artificial Sequence: Synthetic oligonucleotide
gguuuucggcagccacccc

SEQ ID NO: 2001148 - RNA, 19 nt, Artificial Sequence
  Description of Artificial Sequence: Synthetic oligonucleotide
gacgccgaaccugacugau

SEQ ID NO: 2001149 - RNA, 19 nt, Artificial Sequence
  Description of Artificial Sequence: Synthetic oligonucleotide
acguggcuaguaacaugcu

SEQ ID NO: 2001150 - RNA, 19 nt, Artificial Sequence
  Description of Artificial Sequence: Synthetic oligonucleotide
gccaaugggugaagcacca

SEQ ID NO: 2001151 - RNA, 19 nt, Artificial Sequence
  Description of Artificial Sequence: Synthetic oligonucleotide
gcucacaaagucacggggu

SEQ ID NO: 2001152 - RNA, 19 nt, Artificial Sequence
  Description of Artificial Sequence: Synthetic oligonucleotide
gaccguguucagcucugau

SEQ ID NO: 2001153 - RNA, 19 nt, Artificial Sequence
  Description of Artificial Sequence: Synthetic oligonucleotide
caucugggacuacuuugcu

SEQ ID NO: 2001154 - RNA, 19 nt, Artificial Sequence
  Description of Artificial Sequence: Synthetic oligonucleotide
gcacgcucacaaagucacg

SEQ ID NO: 2001155 - RNA, 19 nt, Artificial Sequence
  Description of Artificial Sequence: Synthetic oligonucleotide
cacagcgcacgcucacaaa

SEQ ID NO: 2001156 - RNA, 19 nt, Artificial Sequence
  Description of Artificial Sequence: Synthetic oligonucleotide
ccauacaggugggaccgug

SEQ ID NO: 2001157 - RNA, 19 nt, Artificial Sequence
  Description of Artificial Sequence: Synthetic oligonucleotide
gcacagcgcacgcucacaa

SEQ ID NO: 2001158 - RNA, 19 nt, Artificial Sequence
  Description of Artificial Sequence: Synthetic oligonucleotide
agucuucgagggacuucca

SEQ ID NO: 2001159 - RNA, 19 nt, Artificial Sequence
  Description of Artificial Sequence: Synthetic oligonucleotide
cacuaccuccaaccgaaau

SEQ ID NO: 2001160 - RNA, 19 nt, Artificial Sequence
  Description of Artificial Sequence: Synthetic oligonucleotide
cagcgcacgcucacaaagu

SEQ ID NO: 2001161 - RNA, 19 nt, Artificial Sequence
  Description of Artificial Sequence: Synthetic oligonucleotide
gggaccguguucagcucug

SEQ ID NO: 2001162 - RNA, 19 nt, Artificial Sequence
  Description of Artificial Sequence: Synthetic oligonucleotide
ggcuggucuaccacuaccu

SEQ ID NO: 2001163 - RNA, 19 nt, Artificial Sequence
  Description of Artificial Sequence: Synthetic oligonucleotide
ccuuucauguuccgcauau

SEQ ID NO: 2001164 - RNA, 19 nt, Artificial Sequence
  Description of Artificial Sequence: Synthetic oligonucleotide
gaacuccgacgccgaaccu

SEQ ID NO: 2001165 - RNA, 19 nt, Artificial Sequence
  Description of Artificial Sequence: Synthetic oligonucleotide
gugauaagaccugguugau

SEQ ID NO: 2001166 - RNA, 19 nt, Artificial Sequence
  Description of Artificial Sequence: Synthetic oligonucleotide
accauacaggugggaccgu

SEQ ID NO: 2001167 - RNA, 19 nt, Artificial Sequence
  Description of Artificial Sequence: Synthetic oligonucleotide
ggccuagauaaaagguuua

SEQ ID NO: 2001168 - RNA, 19 nt, Artificial Sequence
  Description of Artificial Sequence: Synthetic oligonucleotide
caacacacagguggagccu

SEQ ID NO: 2001169 - RNA, 19 nt, Artificial Sequence
  Description of Artificial Sequence: Synthetic oligonucleotide
cuccgacgccgaaccugac

SEQ ID NO: 2001170 - RNA, 19 nt, Artificial Sequence
  Description of Artificial Sequence: Synthetic oligonucleotide
gcuugcgcaggugguuggc

SEQ ID NO: 2001171 - RNA, 19 nt, Artificial Sequence
  Description of Artificial Sequence: Synthetic oligonucleotide
cguguucagcucugauaac

SEQ ID NO: 2001172 - RNA, 19 nt, Artificial Sequence
  Description of Artificial Sequence: Synthetic oligonucleotide
ccggccucaggcagagcug

SEQ ID NO: 2001173 - RNA, 19 nt, Artificial Sequence
  Description of Artificial Sequence: Synthetic oligonucleotide
gcgcacgcucacaaaguca

SEQ ID NO: 2001174 - RNA, 19 nt, Artificial Sequence
  Description of Artificial Sequence: Synthetic oligonucleotide
cgaaauaccuugcccacau

SEQ ID NO: 2001175 - RNA, 19 nt, Artificial Sequence
  Description of Artificial Sequence: Synthetic oligonucleotide
ccuccaaccgaaauaccuu

SEQ ID NO: 2001176 - RNA, 19 nt, Artificial Sequence
  Description of Artificial Sequence: Synthetic oligonucleotide
gccgaaccugacugaucca

SEQ ID NO: 2001177 - RNA, 19 nt, Artificial Sequence
  Description of Artificial Sequence: Synthetic oligonucleotide
ggcacagcgcacgcucaca

SEQ ID NO: 2001178 - RNA, 19 nt, Artificial Sequence
  Description of Artificial Sequence: Synthetic oligonucleotide
ccgaaauaccuugcccaca

SEQ ID NO: 2001179 - RNA, 19 nt, Artificial Sequence
  Description of Artificial Sequence: Synthetic oligonucleotide
gcucaugggugaugacugu

SEQ ID NO: 2001180 - RNA, 19 nt, Artificial Sequence
  Description of Artificial Sequence: Synthetic oligonucleotide
cuacuaccccucccauagu

SEQ ID NO: 2001181 - RNA, 19 nt, Artificial Sequence
  Description of Artificial Sequence: Synthetic oligonucleotide
gucuguccaugggcugguc

SEQ ID NO: 2001182 - RNA, 19 nt, Artificial Sequence
  Description of Artificial Sequence: Synthetic oligonucleotide
ggaccguguucagcucuga

SEQ ID NO: 2001183 - RNA, 19 nt, Artificial Sequence
  Description of Artificial Sequence: Synthetic oligonucleotide
ggugguuggcaaacuccau

SEQ ID NO: 2001184 - RNA, 19 nt, Artificial Sequence
  Description of Artificial Sequence: Synthetic oligonucleotide
ccgaaccugacugauccau

SEQ ID NO: 2001185 - RNA, 19 nt, Artificial Sequence
  Description of Artificial Sequence: Synthetic oligonucleotide
ccccaaaauguguggcuau

SEQ ID NO: 2001186 - RNA, 19 nt, Artificial Sequence
  Description of Artificial Sequence: Synthetic oligonucleotide
cacggggucccaccagguu

SEQ ID NO: 2001187 - RNA, 19 nt, Artificial Sequence
  Description of Artificial Sequence: Synthetic oligonucleotide
ccacaucugggacuacuuu

SEQ ID NO: 2001188 - RNA, 19 nt, Artificial Sequence
  Description of Artificial Sequence: Synthetic oligonucleotide
ccacuaccuccaaccgaaa

SEQ ID NO: 2001189 - RNA, 19 nt, Artificial Sequence
  Description of Artificial Sequence: Synthetic oligonucleotide
cgacgccgaaccugacuga

SEQ ID NO: 2001190 - RNA, 19 nt, Artificial Sequence
  Description of Artificial Sequence: Synthetic oligonucleotide
ccaccccuugaggucaaua

SEQ ID NO: 2001191 - RNA, 19 nt, Artificial Sequence
  Description of Artificial Sequence: Synthetic oligonucleotide
ggcgcuugcgcaggugguu

SEQ ID NO: 2001192 - RNA, 19 nt, Artificial Sequence
  Description of Artificial Sequence: Synthetic oligonucleotide
ccuucgggaggcugcugau

SEQ ID NO: 2001193 - RNA, 19 nt, Artificial Sequence
  Description of Artificial Sequence: Synthetic oligonucleotide
ccuugacauuuggguucca

SEQ ID NO: 2001194 - RNA, 19 nt, Artificial Sequence
  Description of Artificial Sequence: Synthetic oligonucleotide
gggucccaccagguuuccu

SEQ ID NO: 2001195 - RNA, 19 nt, Artificial Sequence
  Description of Artificial Sequence: Synthetic oligonucleotide
gcuccacuucacagcuaau

SEQ ID NO: 2001196 - RNA, 19 nt, Artificial Sequence
  Description of Artificial Sequence: Synthetic oligonucleotide
ccaaugggugaagcaccau

SEQ ID NO: 2001197 - RNA, 19 nt, Artificial Sequence
  Description of Artificial Sequence: Synthetic oligonucleotide
ccccguuuuccugcugguu

SEQ ID NO: 2001198 - RNA, 19 nt, Artificial Sequence
  Description of Artificial Sequence: Synthetic oligonucleotide
gccaccccuugaggucaau

SEQ ID NO: 2001199 - RNA, 19 nt, Artificial Sequence
  Description of Artificial Sequence: Synthetic oligonucleotide
aauggaauuucucugauuc

SEQ ID NO: 2001200 - RNA, 19 nt, Artificial Sequence
  Description of Artificial Sequence: Synthetic oligonucleotide
aaagccauuagcuucugcc

SEQ ID NO: 2001201 - RNA, 19 nt, Artificial Sequence
  Description of Artificial Sequence: Synthetic oligonucleotide
agagccaaggcacacaugc

SEQ ID NO: 2001202 - RNA, 19 nt, Artificial Sequence
  Description of Artificial Sequence: Synthetic oligonucleotide
uuuggaaucuccuagaaaa

SEQ ID NO: 2001203 - RNA, 19 nt, Artificial Sequence
  Description of Artificial Sequence: Synthetic oligonucleotide
acagaguguauuuaugggc

SEQ ID NO: 2001204 - RNA, 19 nt, Artificial Sequence
  Description of Artificial Sequence: Synthetic oligonucleotide
uguauuuaugggcagaacu

SEQ ID NO: 2001205 - RNA, 19 nt, Artificial Sequence
  Description of Artificial Sequence: Synthetic oligonucleotide
gacuauuccuauuaggucc

SEQ ID NO: 2001206 - RNA, 19 nt, Artificial Sequence
  Description of Artificial Sequence: Synthetic oligonucleotide
ugacuagugaaacugaaga

SEQ ID NO: 2001207 - RNA, 19 nt, Artificial Sequence
  Description of Artificial Sequence: Synthetic oligonucleotide
aguaaguccuccuaccagc

SEQ ID NO: 2001208 - RNA, 19 nt, Artificial Sequence
  Description of Artificial Sequence: Synthetic oligonucleotide
aaaggaacgcucuuuagga

SEQ ID NO: 2001209 - RNA, 19 nt, Artificial Sequence
  Description of Artificial Sequence: Synthetic oligonucleotide
ucuuuuagaccucugccag

SEQ ID NO: 2001210 - RNA, 19 nt, Artificial Sequence
  Description of Artificial Sequence: Synthetic oligonucleotide
uguugggacaacuaaagac

SEQ ID NO: 2001211 - RNA, 19 nt, Artificial Sequence
  Description of Artificial Sequence: Synthetic oligonucleotide
uuugguauuuggaaucucc

SEQ ID NO: 2001212 - RNA, 19 nt, Artificial Sequence
  Description of Artificial Sequence: Synthetic oligonucleotide
aaggaggucauugugaaug

SEQ ID NO: 2001213 - RNA, 19 nt, Artificial Sequence
  Description of Artificial Sequence: Synthetic oligonucleotide
aagauauuguguuuccgca

SEQ ID NO: 2001214 - RNA, 19 nt, Artificial Sequence
  Description of Artificial Sequence: Synthetic oligonucleotide
gacaacuaaagacagugac

SEQ ID NO: 2001215 - RNA, 19 nt, Artificial Sequence
  Description of Artificial Sequence: Synthetic oligonucleotide
ucugcuuuguaccuggaga

SEQ ID NO: 2001216 - RNA, 19 nt, Artificial Sequence
  Description of Artificial Sequence: Synthetic oligonucleotide
aagccauuagcuucugccg

SEQ ID NO: 2001217 - RNA, 19 nt, Artificial Sequence
  Description of Artificial Sequence: Synthetic oligonucleotide
acuccugauucuuuuagac

SEQ ID NO: 2001218 - RNA, 19 nt, Artificial Sequence
  Description of Artificial Sequence: Synthetic oligonucleotide
agaaguuuguccucugcac

SEQ ID NO: 2001219 - RNA, 19 nt, Artificial Sequence
  Description of Artificial Sequence: Synthetic oligonucleotide
uauuuaugggcagaacugg

SEQ ID NO: 2001220 - RNA, 19 nt, Artificial Sequence
  Description of Artificial Sequence: Synthetic oligonucleotide
aucaagauauuguguuucc

SEQ ID NO: 2001221 - RNA, 19 nt, Artificial Sequence
  Description of Artificial Sequence: Synthetic oligonucleotide
cuuguugggacaacuaaag

SEQ ID NO: 2001222 - RNA, 19 nt, Artificial Sequence
  Description of Artificial Sequence: Synthetic oligonucleotide
caagauauuguguuuccgc

SEQ ID NO: 2001223 - RNA, 19 nt, Artificial Sequence
  Description of Artificial Sequence: Synthetic oligonucleotide
cucaguuaaagccauuagc

SEQ ID NO: 2001224 - RNA, 19 nt, Artificial Sequence
  Description of Artificial Sequence: Synthetic oligonucleotide
uccuagaaaaggcuucagg

SEQ ID NO: 2001225 - RNA, 19 nt, Artificial Sequence
  Description of Artificial Sequence: Synthetic oligonucleotide
guugcuguuugauauacug

SEQ ID NO: 2001226 - RNA, 19 nt, Artificial Sequence
  Description of Artificial Sequence: Synthetic oligonucleotide
ugacagacggcuaucauuc

SEQ ID NO: 2001227 - RNA, 19 nt, Artificial Sequence
  Description of Artificial Sequence: Synthetic oligonucleotide
ugggcuaggaaucuggagu

SEQ ID NO: 2001228 - RNA, 19 nt, Artificial Sequence
  Description of Artificial Sequence: Synthetic oligonucleotide
ugcuacuauaucccgacgc

SEQ ID NO: 2001229 - RNA, 19 nt, Artificial Sequence
  Description of Artificial Sequence: Synthetic oligonucleotide
aaagugcauaacacgaggg

SEQ ID NO: 2001230 - RNA, 19 nt, Artificial Sequence
  Description of Artificial Sequence: Synthetic oligonucleotide
cuaucauucgguugucucg

SEQ ID NO: 2001231 - RNA, 19 nt, Artificial Sequence
  Description of Artificial Sequence: Synthetic oligonucleotide
uacucuacgaaucccugcc

SEQ ID NO: 2001232 - RNA, 19 nt, Artificial Sequence
  Description of Artificial Sequence: Synthetic oligonucleotide
agacuauuccuauuagguc

SEQ ID NO: 2001233 - RNA, 19 nt, Artificial Sequence
  Description of Artificial Sequence: Synthetic oligonucleotide
uauaucccgacgcaggaga

SEQ ID NO: 2001234 - RNA, 19 nt, Artificial Sequence
  Description of Artificial Sequence: Synthetic oligonucleotide
aaguauccccgccaccgcc

SEQ ID NO: 2001235 - RNA, 19 nt, Artificial Sequence
  Description of Artificial Sequence: Synthetic oligonucleotide
gguauuuggaaucuccuag

SEQ ID NO: 2001236 - RNA, 19 nt, Artificial Sequence
  Description of Artificial Sequence: Synthetic oligonucleotide
caaagugcauaacacgagg

SEQ ID NO: 2001237 - RNA, 19 nt, Artificial Sequence
  Description of Artificial Sequence: Synthetic oligonucleotide
cuauuaggucccuuguugg

SEQ ID NO: 2001238 - RNA, 19 nt, Artificial Sequence
  Description of Artificial Sequence: Synthetic oligonucleotide
uugggacaacuaaagacag

SEQ ID NO: 2001239 - RNA, 19 nt, Artificial Sequence
  Description of Artificial Sequence: Synthetic oligonucleotide
gauauuguguuuccgcaac

SEQ ID NO: 2001240 - RNA, 19 nt, Artificial Sequence
  Description of Artificial Sequence: Synthetic oligonucleotide
cuaaagacagugacuagug

SEQ ID NO: 2001241 - RNA, 19 nt, Artificial Sequence
  Description of Artificial Sequence: Synthetic oligonucleotide
auacucuacgaaucccugc

SEQ ID NO: 2001242 - RNA, 19 nt, Artificial Sequence
  Description of Artificial Sequence: Synthetic oligonucleotide
cauauugugcccaauaaaa

SEQ ID NO: 2001243 - RNA, 19 nt, Artificial Sequence
  Description of Artificial Sequence: Synthetic oligonucleotide
uauuaggucccuuguuggg

SEQ ID NO: 2001244 - RNA, 19 nt, Artificial Sequence
  Description of Artificial Sequence: Synthetic oligonucleotide
aggcaucuaggguugaugg

SEQ ID NO: 2001245 - RNA, 19 nt, Artificial Sequence
  Description of Artificial Sequence: Synthetic oligonucleotide
aaggagacuauuccuauua

SEQ ID NO: 2001246 - RNA, 19 nt, Artificial Sequence
  Description of Artificial Sequence: Synthetic oligonucleotide
uugggaggaauauacucag

SEQ ID NO: 2001247 - RNA, 19 nt, Artificial Sequence
  Description of Artificial Sequence: Synthetic oligonucleotide
uacugauccagcagggaag

SEQ ID NO: 2001248 - RNA, 19 nt, Artificial Sequence
  Description of Artificial Sequence: Synthetic oligonucleotide
uauuguguuuccgcaaccg

SEQ ID NO: 2001249 - RNA, 19 nt, Artificial Sequence
  Description of Artificial Sequence: Synthetic oligonucleotide
accgccucgaaguaucccc

SEQ ID NO: 2001250 - RNA, 19 nt, Artificial Sequence
  Description of Artificial Sequence: Synthetic oligonucleotide
aagugcauaacacgagggu

SEQ ID NO: 2001251 - RNA, 19 nt, Artificial Sequence
  Description of Artificial Sequence: Synthetic oligonucleotide
aggaacgcucuuuaggauc

SEQ ID NO: 2001252 - RNA, 19 nt, Artificial Sequence
  Description of Artificial Sequence: Synthetic oligonucleotide
aaugagagccaaggcacac

SEQ ID NO: 2001253 - RNA, 19 nt, Artificial Sequence
  Description of Artificial Sequence: Synthetic oligonucleotide
uuuaggauccgcaccauuu

SEQ ID NO: 2001254 - RNA, 19 nt, Artificial Sequence
  Description of Artificial Sequence: Synthetic oligonucleotide
guuugauauacugauccag

SEQ ID NO: 2001255 - RNA, 19 nt, Artificial Sequence
  Description of Artificial Sequence: Synthetic oligonucleotide
gaagacaauggacagccuc

SEQ ID NO: 2001256 - RNA, 19 nt, Artificial Sequence
  Description of Artificial Sequence: Synthetic oligonucleotide
cucaaagugcauaacacga

SEQ ID NO: 2001257 - RNA, 19 nt, Artificial Sequence
  Description of Artificial Sequence: Synthetic oligonucleotide
aacuaaagacagugacuag

SEQ ID NO: 2001258 - RNA, 19 nt, Artificial Sequence
  Description of Artificial Sequence: Synthetic oligonucleotide
ggacagaguguauuuaugg

SEQ ID NO: 2001259 - RNA, 19 nt, Artificial Sequence
  Description of Artificial Sequence: Synthetic oligonucleotide
gaaaaggaacgcucuuuag

SEQ ID NO: 2001260 - RNA, 19 nt, Artificial Sequence
  Description of Artificial Sequence: Synthetic oligonucleotide
ucuggagucaggucagaag

SEQ ID NO: 2001261 - RNA, 19 nt, Artificial Sequence
  Description of Artificial Sequence: Synthetic oligonucleotide
guauuuaugggcagaacug

SEQ ID NO: 2001262 - RNA, 19 nt, Artificial Sequence
  Description of Artificial Sequence: Synthetic oligonucleotide
cagaacuggguaaaacagg

SEQ ID NO: 2001263 - RNA, 19 nt, Artificial Sequence
  Description of Artificial Sequence: Synthetic oligonucleotide
ucaagauauuguguuuccg

SEQ ID NO: 2001264 - RNA, 19 nt, Artificial Sequence
  Description of Artificial Sequence: Synthetic oligonucleotide
uuuaugggcagaacugggu

SEQ ID NO: 2001265 - RNA, 19 nt, Artificial Sequence
  Description of Artificial Sequence: Synthetic oligonucleotide
gacuagugaaacugaagac

SEQ ID NO: 2001266 - RNA, 19 nt, Artificial Sequence
  Description of Artificial Sequence: Synthetic oligonucleotide
uuggcauacucuacgaauc

SEQ ID NO: 2001267 - RNA, 19 nt, Artificial Sequence
  Description of Artificial Sequence: Synthetic oligonucleotide
acugaaggagacuauuccu

SEQ ID NO: 2001268 - RNA, 19 nt, Artificial Sequence
  Description of Artificial Sequence: Synthetic oligonucleotide
acggcuaucauucgguugu

SEQ ID NO: 2001269 - RNA, 19 nt, Artificial Sequence
  Description of Artificial Sequence: Synthetic oligonucleotide
acuauuccuauuagguccc

SEQ ID NO: 2001270 - RNA, 19 nt, Artificial Sequence
  Description of Artificial Sequence: Synthetic oligonucleotide
uccuguugcuguuugauau

SEQ ID NO: 2001271 - RNA, 19 nt, Artificial Sequence
  Description of Artificial Sequence: Synthetic oligonucleotide
aaucccugccugcugagga

SEQ ID NO: 2001272 - RNA, 19 nt, Artificial Sequence
  Description of Artificial Sequence: Synthetic oligonucleotide
uguuugauauacugaucca

SEQ ID NO: 2001273 - RNA, 19 nt, Artificial Sequence
  Description of Artificial Sequence: Synthetic oligonucleotide
aagucagcugggcaggcug

SEQ ID NO: 2001274 - RNA, 19 nt, Artificial Sequence
  Description of Artificial Sequence: Synthetic oligonucleotide
aggcacacaugccauuccc

SEQ ID NO: 2001275 - RNA, 19 nt, Artificial Sequence
  Description of Artificial Sequence: Synthetic oligonucleotide
guugggacaacuaaagaca

SEQ ID NO: 2001276 - RNA, 19 nt, Artificial Sequence
  Description of Artificial Sequence: Synthetic oligonucleotide
acagacggcuaucauucgg

SEQ ID NO: 2001277 - RNA, 19 nt, Artificial Sequence
  Description of Artificial Sequence: Synthetic oligonucleotide
ugggcaagacucuccaucc

SEQ ID NO: 2001278 - RNA, 19 nt, Artificial Sequence
  Description of Artificial Sequence: Synthetic oligonucleotide
acucaguuaaagccauuag

SEQ ID NO: 2001279 - RNA, 19 nt, Artificial Sequence
  Description of Artificial Sequence: Synthetic oligonucleotide
uuuuagaccucugccagac

SEQ ID NO: 2001280 - RNA, 19 nt, Artificial Sequence
  Description of Artificial Sequence: Synthetic oligonucleotide
uggcgcacagucuggaggg

SEQ ID NO: 2001281 - RNA, 19 nt, Artificial Sequence
  Description of Artificial Sequence: Synthetic oligonucleotide
auggcgcacagucuggagg

SEQ ID NO: 2001282 - RNA, 19 nt, Artificial Sequence
  Description of Artificial Sequence: Synthetic oligonucleotide
ucacugaccagcagcauau

SEQ ID NO: 2001283 - RNA, 19 nt, Artificial Sequence
  Description of Artificial Sequence: Synthetic oligonucleotide
aagacaauggacagccuca

SEQ ID NO: 2001284 - RNA, 19 nt, Artificial Sequence
  Description of Artificial Sequence: Synthetic oligonucleotide
agacagugacuagugaaac

SEQ ID NO: 2001285 - RNA, 19 nt, Artificial Sequence
  Description of Artificial Sequence: Synthetic oligonucleotide
cuagugaaacugaagacaa

SEQ ID NO: 2001286 - RNA, 19 nt, Artificial Sequence
  Description of Artificial Sequence: Synthetic oligonucleotide
ggagacuauuccuauuagg

SEQ ID NO: 2001287 - RNA, 19 nt, Artificial Sequence
  Description of Artificial Sequence: Synthetic oligonucleotide
ugauccagcagggaaguca

SEQ ID NO: 2001288 - RNA, 19 nt, Artificial Sequence
  Description of Artificial Sequence: Synthetic oligonucleotide
gugcauaacacgagggugg

SEQ ID NO: 2001289 - RNA, 19 nt, Artificial Sequence
  Description of Artificial Sequence: Synthetic oligonucleotide
uggcauacucuacgaaucc

SEQ ID NO: 2001290 - RNA, 19 nt, Artificial Sequence
  Description of Artificial Sequence: Synthetic oligonucleotide
ucuacgaaucccugccugc

SEQ ID NO: 2001291 - RNA, 19 nt, Artificial Sequence
  Description of Artificial Sequence: Synthetic oligonucleotide
uuaugggcagaacugggua

SEQ ID NO: 2001292 - RNA, 19 nt, Artificial Sequence
  Description of Artificial Sequence: Synthetic oligonucleotide
agaacuggguaaaacaggu

SEQ ID NO: 2001293 - RNA, 19 nt, Artificial Sequence
  Description of Artificial Sequence: Synthetic oligonucleotide
uuguugggacaacuaaaga

SEQ ID NO: 2001294 - RNA, 19 nt, Artificial Sequence
  Description of Artificial Sequence: Synthetic oligonucleotide
cagccuuggagccauggcg

SEQ ID NO: 2001295 - RNA, 19 nt, Artificial Sequence
  Description of Artificial Sequence: Synthetic oligonucleotide
uaggauccgcaccauuucc

SEQ ID NO: 2001296 - RNA, 19 nt, Artificial Sequence
  Description of Artificial Sequence: Synthetic oligonucleotide
aaaaggcuucaggaccucg

SEQ ID NO: 2001297 - RNA, 19 nt, Artificial Sequence
  Description of Artificial Sequence: Synthetic oligonucleotide
cagaguguauuuaugggca

SEQ ID NO: 2001298 - RNA, 19 nt, Artificial Sequence
  Description of Artificial Sequence: Synthetic oligonucleotide
auacugauccagcagggaa

SEQ ID NO: 2001299 - RNA, 19 nt, Artificial Sequence
  Description of Artificial Sequence: Synthetic oligonucleotide
guugauggcagguuuggga

SEQ ID NO: 2001300 - RNA, 19 nt, Artificial Sequence
  Description of Artificial Sequence: Synthetic oligonucleotide
auuuaugggcagaacuggg

SEQ ID NO: 2001301 - RNA, 19 nt, Artificial Sequence
  Description of Artificial Sequence: Synthetic oligonucleotide
uggugucauccacacagcc

SEQ ID NO: 2001302 - RNA, 19 nt, Artificial Sequence
  Description of Artificial Sequence: Synthetic oligonucleotide
uuaggauccgcaccauuuc

SEQ ID NO: 2001303 - RNA, 19 nt, Artificial Sequence
  Description of Artificial Sequence: Synthetic oligonucleotide
uaucauucgguugucucga

SEQ ID NO: 2001304 - RNA, 19 nt, Artificial Sequence
  Description of Artificial Sequence: Synthetic oligonucleotide
ugacgugguagacucuccc

SEQ ID NO: 2001305 - RNA, 19 nt, Artificial Sequence
  Description of Artificial Sequence: Synthetic oligonucleotide
aggguggguagccaagccg

SEQ ID NO: 2001306 - RNA, 19 nt, Artificial Sequence
  Description of Artificial Sequence: Synthetic oligonucleotide
uuaucaagauauuguguuu

SEQ ID NO: 2001307 - RNA, 19 nt, Artificial Sequence
  Description of Artificial Sequence: Synthetic oligonucleotide
agaguguauuuaugggcag

SEQ ID NO: 2001308 - RNA, 19 nt, Artificial Sequence
  Description of Artificial Sequence: Synthetic oligonucleotide
aagacagugacuagugaaa

SEQ ID NO: 2001309 - RNA, 19 nt, Artificial Sequence
  Description of Artificial Sequence: Synthetic oligonucleotide
aacgcucuuuaggauccgc

SEQ ID NO: 2001310 - RNA, 19 nt, Artificial Sequence
  Description of Artificial Sequence: Synthetic oligonucleotide
ucauugugaaugagagcca

SEQ ID NO: 2001311 - RNA, 19 nt, Artificial Sequence
  Description of Artificial Sequence: Synthetic oligonucleotide
gauggaugaggccggacuc

SEQ ID NO: 2001312 - RNA, 19 nt, Artificial Sequence
  Description of Artificial Sequence: Synthetic oligonucleotide
gguuuugguauuuggaauc

SEQ ID NO: 2001313 - RNA, 19 nt, Artificial Sequence
  Description of Artificial Sequence: Synthetic oligonucleotide
agcggcagaaaaggaacgc

SEQ ID NO: 2001314 - RNA, 19 nt, Artificial Sequence
  Description of Artificial Sequence: Synthetic oligonucleotide
uuccuauuaggucccuugu

SEQ ID NO: 2001315 - RNA, 19 nt, Artificial Sequence
  Description of Artificial Sequence: Synthetic oligonucleotide
aggagacuauuccuauuag

SEQ ID NO: 2001316 - RNA, 19 nt, Artificial Sequence
  Description of Artificial Sequence: Synthetic oligonucleotide
aucccgacgcaggagaugg

SEQ ID NO: 2001317 - RNA, 19 nt, Artificial Sequence
  Description of Artificial Sequence: Synthetic oligonucleotide
cauacucuacgaaucccug

SEQ ID NO: 2001318 - RNA, 19 nt, Artificial Sequence
  Description of Artificial Sequence: Synthetic oligonucleotide
cagcuuggcauacucuacg

SEQ ID NO: 2001319 - RNA, 19 nt, Artificial Sequence
  Description of Artificial Sequence: Synthetic oligonucleotide
uuaggucccuuguugggac

SEQ ID NO: 2001320 - RNA, 19 nt, Artificial Sequence
  Description of Artificial Sequence: Synthetic oligonucleotide
agccuuggagccauggcgc

SEQ ID NO: 2001321 - RNA, 19 nt, Artificial Sequence
  Description of Artificial Sequence: Synthetic oligonucleotide
guauuuggaaucuccuaga

SEQ ID NO: 2001322 - RNA, 19 nt, Artificial Sequence
  Description of Artificial Sequence: Synthetic oligonucleotide
aacacgaggguggcggguc

SEQ ID NO: 2001323 - RNA, 19 nt, Artificial Sequence
  Description of Artificial Sequence: Synthetic oligonucleotide
agauauuguguuuccgcaa

SEQ ID NO: 2001324 - RNA, 19 nt, Artificial Sequence
  Description of Artificial Sequence: Synthetic oligonucleotide
uggaauuucucugauucuu

SEQ ID NO: 2001325 - RNA, 19 nt, Artificial Sequence
  Description of Artificial Sequence: Synthetic oligonucleotide
aaggaacgcucuuuaggau

SEQ ID NO: 2001326 - RNA, 19 nt, Artificial Sequence
  Description of Artificial Sequence: Synthetic oligonucleotide
aucuccuagaaaaggcuuc

SEQ ID NO: 2001327 - RNA, 19 nt, Artificial Sequence
  Description of Artificial Sequence: Synthetic oligonucleotide
caacuaaagacagugacua

SEQ ID NO: 2001328 - RNA, 19 nt, Artificial Sequence
  Description of Artificial Sequence: Synthetic oligonucleotide
ggaaucuccuagaaaaggc

SEQ ID NO: 2001329 - RNA, 19 nt, Artificial Sequence
  Description of Artificial Sequence: Synthetic oligonucleotide
gguaaaacaggugggcuag

SEQ ID NO: 2001330 - RNA, 19 nt, Artificial Sequence
  Description of Artificial Sequence: Synthetic oligonucleotide
gagucaggucagaaggagg

SEQ ID NO: 2001331 - RNA, 19 nt, Artificial Sequence
  Description of Artificial Sequence: Synthetic oligonucleotide
ugauucuuuuagaccucug

SEQ ID NO: 2001332 - RNA, 19 nt, Artificial Sequence
  Description of Artificial Sequence: Synthetic oligonucleotide
gacggcuaucauucgguug

SEQ ID NO: 2001333 - RNA, 19 nt, Artificial Sequence
  Description of Artificial Sequence: Synthetic oligonucleotide
caucuaggguugauggcag

SEQ ID NO: 2001334 - RNA, 19 nt, Artificial Sequence
  Description of Artificial Sequence: Synthetic oligonucleotide
uaaaacaggugggcuagga

SEQ ID NO: 2001335 - RNA, 19 nt, Artificial Sequence
  Description of Artificial Sequence: Synthetic oligonucleotide
cucuuuaggauccgcacca

SEQ ID NO: 2001336 - RNA, 19 nt, Artificial Sequence
  Description of Artificial Sequence: Synthetic oligonucleotide
caguaaguccuccuaccag

SEQ ID NO: 2001337 - RNA, 19 nt, Artificial Sequence
  Description of Artificial Sequence: Synthetic oligonucleotide
uggcugacgugguagacuc

SEQ ID NO: 2001338 - RNA, 19 nt, Artificial Sequence
  Description of Artificial Sequence: Synthetic oligonucleotide
uacucaguuaaagccauua

SEQ ID NO: 2001339 - RNA, 19 nt, Artificial Sequence
  Description of Artificial Sequence: Synthetic oligonucleotide
agucaggucagaaggaggu

SEQ ID NO: 2001340 - RNA, 19 nt, Artificial Sequence
  Description of Artificial Sequence: Synthetic oligonucleotide
cuccccuugcagcaggucc

SEQ ID NO: 2001341 - RNA, 19 nt, Artificial Sequence
  Description of Artificial Sequence: Synthetic oligonucleotide
aaucuccuagaaaaggcuu

SEQ ID NO: 2001342 - RNA, 19 nt, Artificial Sequence
  Description of Artificial Sequence: Synthetic oligonucleotide
cuggguaaaacaggugggc

SEQ ID NO: 2001343 - RNA, 19 nt, Artificial Sequence
  Description of Artificial Sequence: Synthetic oligonucleotide
cugggcaagacucuccauc

SEQ ID NO: 2001344 - RNA, 19 nt, Artificial Sequence
  Description of Artificial Sequence: Synthetic oligonucleotide
ggagccauggcgcacaguc

SEQ ID NO: 2001345 - RNA, 19 nt, Artificial Sequence
  Description of Artificial Sequence: Synthetic oligonucleotide
auccgcaccauuuccuuga

SEQ ID NO: 2001346 - RNA, 19 nt, Artificial Sequence
  Description of Artificial Sequence: Synthetic oligonucleotide
ccuauuaggucccuuguug

SEQ ID NO: 2001347 - RNA, 19 nt, Artificial Sequence
  Description of Artificial Sequence: Synthetic oligonucleotide
uauacugauccagcaggga

SEQ ID NO: 2001348 - RNA, 19 nt, Artificial Sequence
  Description of Artificial Sequence: Synthetic oligonucleotide
cauucgguugucucgaaaa

SEQ ID NO: 2001349 - RNA, 19 nt, Artificial Sequence
  Description of Artificial Sequence: Synthetic oligonucleotide
cuucugccgcucaaagugc

SEQ ID NO: 2001350 - RNA, 19 nt, Artificial Sequence
  Description of Artificial Sequence: Synthetic oligonucleotide
gugacuagugaaacugaag

SEQ ID NO: 2001351 - RNA, 19 nt, Artificial Sequence
  Description of Artificial Sequence: Synthetic oligonucleotide
gacagacggcuaucauucg

SEQ ID NO: 2001352 - RNA, 19 nt, Artificial Sequence
  Description of Artificial Sequence: Synthetic oligonucleotide
cagacaacacagacagcag

SEQ ID NO: 2001353 - RNA, 19 nt, Artificial Sequence
  Description of Artificial Sequence: Synthetic oligonucleotide
uuuguaccuggagaacuga

SEQ ID NO: 2001354 - RNA, 19 nt, Artificial Sequence
  Description of Artificial Sequence: Synthetic oligonucleotide
gaggccuguccccaaggag

SEQ ID NO: 2001355 - RNA, 19 nt, Artificial Sequence
  Description of Artificial Sequence: Synthetic oligonucleotide
cagccucaauuugaaaugg

SEQ ID NO: 2001356 - RNA, 19 nt, Artificial Sequence
  Description of Artificial Sequence: Synthetic oligonucleotide
gguggugucccacuggcug

SEQ ID NO: 2001357 - RNA, 19 nt, Artificial Sequence
  Description of Artificial Sequence: Synthetic oligonucleotide
gaggucauugugaaugaga

SEQ ID NO: 2001358 - RNA, 19 nt, Artificial Sequence
  Description of Artificial Sequence: Synthetic oligonucleotide
aaaggcuucaggaccucgu

SEQ ID NO: 2001359 - RNA, 19 nt, Artificial Sequence
  Description of Artificial Sequence: Synthetic oligonucleotide
uggguaaaacaggugggcu

SEQ ID NO: 2001360 - RNA, 19 nt, Artificial Sequence
  Description of Artificial Sequence: Synthetic oligonucleotide
uccccuugcagcaggucca

SEQ ID NO: 2001361 - RNA, 19 nt, Artificial Sequence
  Description of Artificial Sequence: Synthetic oligonucleotide
auuaggucccuuguuggga

SEQ ID NO: 2001362 - RNA, 19 nt, Artificial Sequence
  Description of Artificial Sequence: Synthetic oligonucleotide
cuacuauaucccgacgcag

SEQ ID NO: 2001363 - RNA, 19 nt, Artificial Sequence
  Description of Artificial Sequence: Synthetic oligonucleotide
uaggguugauggcagguuu

SEQ ID NO: 2001364 - RNA, 19 nt, Artificial Sequence
  Description of Artificial Sequence: Synthetic oligonucleotide
agccaagccgcccggggcg

SEQ ID NO: 2001365 - RNA, 19 nt, Artificial Sequence
  Description of Artificial Sequence: Synthetic oligonucleotide
agguggcaggcaucuaggg

SEQ ID NO: 2001366 - RNA, 19 nt, Artificial Sequence
  Description of Artificial Sequence: Synthetic oligonucleotide
gauccgcaccauuuccuug

SEQ ID NO: 2001367 - RNA, 19 nt, Artificial Sequence
  Description of Artificial Sequence: Synthetic oligonucleotide
aguguauuuaugggcagaa

SEQ ID NO: 2001368 - RNA, 19 nt, Artificial Sequence
  Description of Artificial Sequence: Synthetic oligonucleotide
uuguaccuggagaacugaa

SEQ ID NO: 2001369 - RNA, 19 nt, Artificial Sequence
  Description of Artificial Sequence: Synthetic oligonucleotide
cucuacgaaucccugccug

SEQ ID NO: 2001370 - RNA, 19 nt, Artificial Sequence
  Description of Artificial Sequence: Synthetic oligonucleotide
aaaggggaagcagguuuug

SEQ ID NO: 2001371 - RNA, 19 nt, Artificial Sequence
  Description of Artificial Sequence: Synthetic oligonucleotide
gaaguauccccgccaccgc

SEQ ID NO: 2001372 - RNA, 19 nt, Artificial Sequence
  Description of Artificial Sequence: Synthetic oligonucleotide
aaaaggggaagcagguuuu

SEQ ID NO: 2001373 - RNA, 19 nt, Artificial Sequence
  Description of Artificial Sequence: Synthetic oligonucleotide
cagcggcagaaaaggaacg

SEQ ID NO: 2001374 - RNA, 19 nt, Artificial Sequence
  Description of Artificial Sequence: Synthetic oligonucleotide
uacgaaucccugccugcug

SEQ ID NO: 2001375 - RNA, 19 nt, Artificial Sequence
  Description of Artificial Sequence: Synthetic oligonucleotide
ugcauaacacgaggguggc

SEQ ID NO: 2001376 - RNA, 19 nt, Artificial Sequence
  Description of Artificial Sequence: Synthetic oligonucleotide
acgaaucccugccugcuga

SEQ ID NO: 2001377 - RNA, 19 nt, Artificial Sequence
  Description of Artificial Sequence: Synthetic oligonucleotide
cuguugcuguuugauauac

SEQ ID NO: 2001378 - RNA, 19 nt, Artificial Sequence
  Description of Artificial Sequence: Synthetic oligonucleotide
uccuauuaggucccuuguu

SEQ ID NO: 2001379 - RNA, 19 nt, Artificial Sequence
  Description of Artificial Sequence: Synthetic oligonucleotide
cucgaaguauccccgccac

SEQ ID NO: 2001380 - RNA, 19 nt, Artificial Sequence
  Description of Artificial Sequence: Synthetic oligonucleotide
uagaccucugccagacaac

SEQ ID NO: 2001381 - RNA, 19 nt, Artificial Sequence
  Description of Artificial Sequence: Synthetic oligonucleotide
ugggacaacuaaagacagu

SEQ ID NO: 2001382 - RNA, 19 nt, Artificial Sequence
  Description of Artificial Sequence: Synthetic oligonucleotide
agaacugaaggagacuauu

SEQ ID NO: 2001383 - RNA, 19 nt, Artificial Sequence
  Description of Artificial Sequence: Synthetic oligonucleotide
ucgaaguauccccgccacc

SEQ ID NO: 2001384 - RNA, 19 nt, Artificial Sequence
  Description of Artificial Sequence: Synthetic oligonucleotide
cugaaggagacuauuccua

SEQ ID NO: 2001385 - RNA, 19 nt, Artificial Sequence
  Description of Artificial Sequence: Synthetic oligonucleotide
ugccauucccacacuccug

SEQ ID NO: 2001386 - RNA, 19 nt, Artificial Sequence
  Description of Artificial Sequence: Synthetic oligonucleotide
uagccaagccgcccggggc

SEQ ID NO: 2001387 - RNA, 19 nt, Artificial Sequence
  Description of Artificial Sequence: Synthetic oligonucleotide
uuuagaccucugccagaca

SEQ ID NO: 2001388 - RNA, 19 nt, Artificial Sequence
  Description of Artificial Sequence: Synthetic oligonucleotide
gaaucuccuagaaaaggcu

SEQ ID NO: 2001389 - RNA, 19 nt, Artificial Sequence
  Description of Artificial Sequence: Synthetic oligonucleotide
agaccucugccagacaaca

SEQ ID NO: 2001390 - RNA, 19 nt, Artificial Sequence
  Description of Artificial Sequence: Synthetic oligonucleotide
acagcagggacagagugua

SEQ ID NO: 2001391 - RNA, 19 nt, Artificial Sequence
  Description of Artificial Sequence: Synthetic oligonucleotide
ggaacgcucuuuaggaucc

SEQ ID NO: 2001392 - RNA, 19 nt, Artificial Sequence
  Description of Artificial Sequence: Synthetic oligonucleotide
ugccgcucaaagugcauaa

SEQ ID NO: 2001393 - RNA, 19 nt, Artificial Sequence
  Description of Artificial Sequence: Synthetic oligonucleotide
ugguagacucucccuccug

SEQ ID NO: 2001394 - RNA, 19 nt, Artificial Sequence
  Description of Artificial Sequence: Synthetic oligonucleotide
gcucuuuaggauccgcacc

SEQ ID NO: 2001395 - RNA, 19 nt, Artificial Sequence
  Description of Artificial Sequence: Synthetic oligonucleotide
agguagugggucugggcca

SEQ ID NO: 2001396 - RNA, 19 nt, Artificial Sequence
  Description of Artificial Sequence: Synthetic oligonucleotide
ccagacaacacagacagca

SEQ ID NO: 2001397 - RNA, 19 nt, Artificial Sequence
  Description of Artificial Sequence: Synthetic oligonucleotide
ugaagacaauggacagccu

SEQ ID NO: 2001398 - RNA, 19 nt, Artificial Sequence
  Description of Artificial Sequence: Synthetic oligonucleotide
cuuggcauacucuacgaau

SEQ ID NO: 2001399 - RNA, 19 nt, Artificial Sequence
  Description of Artificial Sequence: Synthetic oligonucleotide
gcuaucauucgguugucuc

SEQ ID NO: 2001400 - RNA, 19 nt, Artificial Sequence
  Description of Artificial Sequence: Synthetic oligonucleotide
aguauccccgccaccgccg

SEQ ID NO: 2001401 - RNA, 19 nt, Artificial Sequence
  Description of Artificial Sequence: Synthetic oligonucleotide
ggagaaguuuguccucugc

SEQ ID NO: 2001402 - RNA, 19 nt, Artificial Sequence
  Description of Artificial Sequence: Synthetic oligonucleotide
gacaccgccucgaaguauc

SEQ ID NO: 2001403 - RNA, 19 nt, Artificial Sequence
  Description of Artificial Sequence: Synthetic oligonucleotide
gcuacuauaucccgacgca

SEQ ID NO: 2001404 - RNA, 19 nt, Artificial Sequence
  Description of Artificial Sequence: Synthetic oligonucleotide
cuauaucccgacgcaggag

SEQ ID NO: 2001405 - RNA, 19 nt, Artificial Sequence
  Description of Artificial Sequence: Synthetic oligonucleotide
guccccaaggaggucauug

SEQ ID NO: 2001406 - RNA, 19 nt, Artificial Sequence
  Description of Artificial Sequence: Synthetic oligonucleotide
cugacgugguagacucucc

SEQ ID NO: 2001407 - RNA, 19 nt, Artificial Sequence
  Description of Artificial Sequence: Synthetic oligonucleotide
ucugcacucauggccacau

SEQ ID NO: 2001408 - RNA, 19 nt, Artificial Sequence
  Description of Artificial Sequence: Synthetic oligonucleotide
gacagugacuagugaaacu

SEQ ID NO: 2001409 - RNA, 19 nt, Artificial Sequence
  Description of Artificial Sequence: Synthetic oligonucleotide
cugcuacuauaucccgacg

SEQ ID NO: 2001410 - RNA, 19 nt, Artificial Sequence
  Description of Artificial Sequence: Synthetic oligonucleotide
acaacacagacagcaggga

SEQ ID NO: 2001411 - RNA, 19 nt, Artificial Sequence
  Description of Artificial Sequence: Synthetic oligonucleotide
gccaguaaguccuccuacc

SEQ ID NO: 2001412 - RNA, 19 nt, Artificial Sequence
  Description of Artificial Sequence: Synthetic oligonucleotide
agaggccuguccccaagga

SEQ ID NO: 2001413 - RNA, 19 nt, Artificial Sequence
  Description of Artificial Sequence: Synthetic oligonucleotide
uuaaagccauuagcuucug

SEQ ID NO: 2001414 - RNA, 19 nt, Artificial Sequence
  Description of Artificial Sequence: Synthetic oligonucleotide
cuuuuagaccucugccaga

SEQ ID NO: 2001415 - RNA, 19 nt, Artificial Sequence
  Description of Artificial Sequence: Synthetic oligonucleotide
gaaugagagccaaggcaca

SEQ ID NO: 2001416 - RNA, 19 nt, Artificial Sequence
  Description of Artificial Sequence: Synthetic oligonucleotide
guaaaacaggugggcuagg

SEQ ID NO: 2001417 - RNA, 19 nt, Artificial Sequence
  Description of Artificial Sequence: Synthetic oligonucleotide
gaggccggacuccuccuug

SEQ ID NO: 2001418 - RNA, 19 nt, Artificial Sequence
  Description of Artificial Sequence: Synthetic oligonucleotide
aggccggacuccuccuugg

SEQ ID NO: 2001419 - RNA, 19 nt, Artificial Sequence
  Description of Artificial Sequence: Synthetic oligonucleotide
guguuuccgcaaccggugc

SEQ ID NO: 2001420 - RNA, 19 nt, Artificial Sequence
  Description of Artificial Sequence: Synthetic oligonucleotide
ccaugaggccaguaagucc

SEQ ID NO: 2001421 - RNA, 19 nt, Artificial Sequence
  Description of Artificial Sequence: Synthetic oligonucleotide
gcacacaugccauucccac

SEQ ID NO: 2001422 - RNA, 19 nt, Artificial Sequence
  Description of Artificial Sequence: Synthetic oligonucleotide
uccaucccugucugcuuug

SEQ ID NO: 2001423 - RNA, 19 nt, Artificial Sequence
  Description of Artificial Sequence: Synthetic oligonucleotide
ggcaucuaggguugauggc

SEQ ID NO: 2001424 - RNA, 19 nt, Artificial Sequence
  Description of Artificial Sequence: Synthetic oligonucleotide
ggagaacugaaggagacua

SEQ ID NO: 2001425 - RNA, 19 nt, Artificial Sequence
  Description of Artificial Sequence: Synthetic oligonucleotide
cagugacuagugaaacuga

SEQ ID NO: 2001426 - RNA, 19 nt, Artificial Sequence
  Description of Artificial Sequence: Synthetic oligonucleotide
caggcaucuaggguugaug

SEQ ID NO: 2001427 - RNA, 19 nt, Artificial Sequence
  Description of Artificial Sequence: Synthetic oligonucleotide
uaucccgacgcaggagaug

SEQ ID NO: 2001428 - RNA, 19 nt, Artificial Sequence
  Description of Artificial Sequence: Synthetic oligonucleotide
gcuaggaaucuggagucag

SEQ ID NO: 2001429 - RNA, 19 nt, Artificial Sequence
  Description of Artificial Sequence: Synthetic oligonucleotide
ugucugcuuuguaccugga

SEQ ID NO: 2001430 - RNA, 19 nt, Artificial Sequence
  Description of Artificial Sequence: Synthetic oligonucleotide
caauggacagccucaauuu

SEQ ID NO: 2001431 - RNA, 19 nt, Artificial Sequence
  Description of Artificial Sequence: Synthetic oligonucleotide
gggcuaggaaucuggaguc

SEQ ID NO: 2001432 - RNA, 19 nt, Artificial Sequence
  Description of Artificial Sequence: Synthetic oligonucleotide
cugaagcagguaguggguc

SEQ ID NO: 2001433 - RNA, 19 nt, Artificial Sequence
  Description of Artificial Sequence: Synthetic oligonucleotide
uccuaccagcuccccuugc

SEQ ID NO: 2001434 - RNA, 19 nt, Artificial Sequence
  Description of Artificial Sequence: Synthetic oligonucleotide
cacuccugauucuuuuaga

SEQ ID NO: 2001435 - RNA, 19 nt, Artificial Sequence
  Description of Artificial Sequence: Synthetic oligonucleotide
agcagcauauugugcccaa

SEQ ID NO: 2001436 - RNA, 19 nt, Artificial Sequence
  Description of Artificial Sequence: Synthetic oligonucleotide
gcagcggcagaaaaggaac

SEQ ID NO: 2001437 - RNA, 19 nt, Artificial Sequence
  Description of Artificial Sequence: Synthetic oligonucleotide
cacacaugccauucccaca

SEQ ID NO: 2001438 - RNA, 19 nt, Artificial Sequence
  Description of Artificial Sequence: Synthetic oligonucleotide
agcagggacagaguguauu

SEQ ID NO: 2001439 - RNA, 19 nt, Artificial Sequence
  Description of Artificial Sequence: Synthetic oligonucleotide
gaacgcucuuuaggauccg

SEQ ID NO: 2001440 - RNA, 19 nt, Artificial Sequence
  Description of Artificial Sequence: Synthetic oligonucleotide
ucuggaggguggguagcca

SEQ ID NO: 2001441 - RNA, 19 nt, Artificial Sequence
  Description of Artificial Sequence: Synthetic oligonucleotide
guguauuuaugggcagaac

SEQ ID NO: 2001442 - RNA, 19 nt, Artificial Sequence
  Description of Artificial Sequence: Synthetic oligonucleotide
uucccacacuccugauucu

SEQ ID NO: 2001443 - RNA, 19 nt, Artificial Sequence
  Description of Artificial Sequence: Synthetic oligonucleotide
caaccggugccgcaggaga

SEQ ID NO: 2001444 - RNA, 19 nt, Artificial Sequence
  Description of Artificial Sequence: Synthetic oligonucleotide
ggcauacucuacgaauccc

SEQ ID NO: 2001445 - RNA, 19 nt, Artificial Sequence
  Description of Artificial Sequence: Synthetic oligonucleotide
uaggucccuuguugggaca

SEQ ID NO: 2001446 - RNA, 19 nt, Artificial Sequence
  Description of Artificial Sequence: Synthetic oligonucleotide
gacgugguagacucucccu

SEQ ID NO: 2001447 - RNA, 19 nt, Artificial Sequence
  Description of Artificial Sequence: Synthetic oligonucleotide
gggacagaguguauuuaug

SEQ ID NO: 2001448 - RNA, 19 nt, Artificial Sequence
  Description of Artificial Sequence: Synthetic oligonucleotide
agacaauggacagccucaa

SEQ ID NO: 2001449 - RNA, 19 nt, Artificial Sequence
  Description of Artificial Sequence: Synthetic oligonucleotide
gguugauggcagguuuggg

SEQ ID NO: 2001450 - RNA, 19 nt, Artificial Sequence
  Description of Artificial Sequence: Synthetic oligonucleotide
acaccgccucgaaguaucc

SEQ ID NO: 2001451 - RNA, 19 nt, Artificial Sequence
  Description of Artificial Sequence: Synthetic oligonucleotide
ggccaguaaguccuccuac

SEQ ID NO: 2001452 - RNA, 19 nt, Artificial Sequence
  Description of Artificial Sequence: Synthetic oligonucleotide
agacggcuaucauucgguu

SEQ ID NO: 2001453 - RNA, 19 nt, Artificial Sequence
  Description of Artificial Sequence: Synthetic oligonucleotide
ggguaaaacaggugggcua

SEQ ID NO: 2001454 - RNA, 19 nt, Artificial Sequence
  Description of Artificial Sequence: Synthetic oligonucleotide
guggugucccacuggcuga

SEQ ID NO: 2001455 - RNA, 19 nt, Artificial Sequence
  Description of Artificial Sequence: Synthetic oligonucleotide
gcgggucacagccuuggag

SEQ ID NO: 2001456 - RNA, 19 nt, Artificial Sequence
  Description of Artificial Sequence: Synthetic oligonucleotide
ucuuuaggauccgcaccau

SEQ ID NO: 2001457 - RNA, 19 nt, Artificial Sequence
  Description of Artificial Sequence: Synthetic oligonucleotide
cccagcagcggcagaaaag

SEQ ID NO: 2001458 - RNA, 19 nt, Artificial Sequence
  Description of Artificial Sequence: Synthetic oligonucleotide
gucaggucagaaggaggug

SEQ ID NO: 2001459 - RNA, 19 nt, Artificial Sequence
  Description of Artificial Sequence: Synthetic oligonucleotide
cagacggcuaucauucggu

SEQ ID NO: 2001460 - RNA, 19 nt, Artificial Sequence
  Description of Artificial Sequence: Synthetic oligonucleotide
aggaccucguuggggaaga

SEQ ID NO: 2001461 - RNA, 19 nt, Artificial Sequence
  Description of Artificial Sequence: Synthetic oligonucleotide
agccucaauuugaaaugga

SEQ ID NO: 2001462 - RNA, 19 nt, Artificial Sequence
  Description of Artificial Sequence: Synthetic oligonucleotide
acgcucuuuaggauccgca

SEQ ID NO: 2001463 - RNA, 19 nt, Artificial Sequence
  Description of Artificial Sequence: Synthetic oligonucleotide
caggaccucguuggggaag

SEQ ID NO: 2001464 - RNA, 19 nt, Artificial Sequence
  Description of Artificial Sequence: Synthetic oligonucleotide
ccuuguugggacaacuaaa

SEQ ID NO: 2001465 - RNA, 19 nt, Artificial Sequence
  Description of Artificial Sequence: Synthetic oligonucleotide
ggggaagcagguuuuggua

SEQ ID NO: 2001466 - RNA, 19 nt, Artificial Sequence
  Description of Artificial Sequence: Synthetic oligonucleotide
accggugccgcaggagaag

SEQ ID NO: 2001467 - RNA, 19 nt, Artificial Sequence
  Description of Artificial Sequence: Synthetic oligonucleotide
gccggacuccuccuugggg

SEQ ID NO: 2001468 - RNA, 19 nt, Artificial Sequence
  Description of Artificial Sequence: Synthetic oligonucleotide
aucuggagucaggucagaa

SEQ ID NO: 2001469 - RNA, 19 nt, Artificial Sequence
  Description of Artificial Sequence: Synthetic oligonucleotide
ucucccuccuguugcuguu

SEQ ID NO: 2001470 - RNA, 19 nt, Artificial Sequence
  Description of Artificial Sequence: Synthetic oligonucleotide
cuccuaccagcuccccuug

SEQ ID NO: 2001471 - RNA, 19 nt, Artificial Sequence
  Description of Artificial Sequence: Synthetic oligonucleotide
aaccggugccgcaggagaa

SEQ ID NO: 2001472 - RNA, 19 nt, Artificial Sequence
  Description of Artificial Sequence: Synthetic oligonucleotide
uggugucccacuggcugac

SEQ ID NO: 2001473 - RNA, 19 nt, Artificial Sequence
  Description of Artificial Sequence: Synthetic oligonucleotide
ccaaggaggucauugugaa

SEQ ID NO: 2001474 - RNA, 19 nt, Artificial Sequence
  Description of Artificial Sequence: Synthetic oligonucleotide
gaccucugccagacaacac

SEQ ID NO: 2001475 - RNA, 19 nt, Artificial Sequence
  Description of Artificial Sequence: Synthetic oligonucleotide
acacgaggguggcggguca

SEQ ID NO: 2001476 - RNA, 19 nt, Artificial Sequence
  Description of Artificial Sequence: Synthetic oligonucleotide
gugccgcaggagaaguuug

SEQ ID NO: 2001477 - RNA, 19 nt, Artificial Sequence
  Description of Artificial Sequence: Synthetic oligonucleotide
gccucaauuugaaauggaa

SEQ ID NO: 2001478 - RNA, 19 nt, Artificial Sequence
  Description of Artificial Sequence: Synthetic oligonucleotide
ugggcagaacuggguaaaa

SEQ ID NO: 2001479 - RNA, 19 nt, Artificial Sequence
  Description of Artificial Sequence: Synthetic oligonucleotide
ggacaacuaaagacaguga

SEQ ID NO: 2001480 - RNA, 19 nt, Artificial Sequence
  Description of Artificial Sequence: Synthetic oligonucleotide
gguagacucucccuccugu

SEQ ID NO: 2001481 - RNA, 19 nt, Artificial Sequence
  Description of Artificial Sequence: Synthetic oligonucleotide
guaaguccuccuaccagcu

SEQ ID NO: 2001482 - RNA, 19 nt, Artificial Sequence
  Description of Artificial Sequence: Synthetic oligonucleotide
ccaguaaguccuccuacca

SEQ ID NO: 2001483 - RNA, 19 nt, Artificial Sequence
  Description of Artificial Sequence: Synthetic oligonucleotide
cacuggcugacgugguaga

SEQ ID NO: 2001484 - RNA, 19 nt, Artificial Sequence
  Description of Artificial Sequence: Synthetic oligonucleotide
gcuuuguaccuggagaacu

SEQ ID NO: 2001485 - RNA, 19 nt, Artificial Sequence
  Description of Artificial Sequence: Synthetic oligonucleotide
ccucaauuugaaauggaau

SEQ ID NO: 2001486 - RNA, 19 nt, Artificial Sequence
  Description of Artificial Sequence: Synthetic oligonucleotide
ccgccucgaaguauccccg

SEQ ID NO: 2001487 - RNA, 19 nt, Artificial Sequence
  Description of Artificial Sequence: Synthetic oligonucleotide
ccgcucaaagugcauaaca

SEQ ID NO: 2001488 - RNA, 19 nt, Artificial Sequence
  Description of Artificial Sequence: Synthetic oligonucleotide
ggcagaaaaggaacgcucu

SEQ ID NO: 2001489 - RNA, 19 nt, Artificial Sequence
  Description of Artificial Sequence: Synthetic oligonucleotide
auaucccgacgcaggagau

SEQ ID NO: 2001490 - RNA, 19 nt, Artificial Sequence
  Description of Artificial Sequence: Synthetic oligonucleotide
caccgccucgaaguauccc

SEQ ID NO: 2001491 - RNA, 19 nt, Artificial Sequence
  Description of Artificial Sequence: Synthetic oligonucleotide
gggcagaacuggguaaaac

SEQ ID NO: 2001492 - RNA, 19 nt, Artificial Sequence
  Description of Artificial Sequence: Synthetic oligonucleotide
cugauucuuuuagaccucu

SEQ ID NO: 2001493 - RNA, 19 nt, Artificial Sequence
  Description of Artificial Sequence: Synthetic oligonucleotide
ucccgacgcaggagaugga

SEQ ID NO: 2001494 - RNA, 19 nt, Artificial Sequence
  Description of Artificial Sequence: Synthetic oligonucleotide
aggucccuuguugggacaa

SEQ ID NO: 2001495 - RNA, 19 nt, Artificial Sequence
  Description of Artificial Sequence: Synthetic oligonucleotide
gcauaacacgaggguggcg

SEQ ID NO: 2001496 - RNA, 19 nt, Artificial Sequence
  Description of Artificial Sequence: Synthetic oligonucleotide
gccgcggccaucgcuacag

SEQ ID NO: 2001497 - RNA, 19 nt, Artificial Sequence
  Description of Artificial Sequence: Synthetic oligonucleotide
ggguagccaagccgcccgg

SEQ ID NO: 2001498 - RNA, 19 nt, Artificial Sequence
  Description of Artificial Sequence: Synthetic oligonucleotide
gguggcaggcaucuagggu

SEQ ID NO: 2001499 - RNA, 19 nt, Artificial Sequence
  Description of Artificial Sequence: Synthetic oligonucleotide
ggccggacuccuccuuggg

SEQ ID NO: 2001500 - RNA, 19 nt, Artificial Sequence
  Description of Artificial Sequence: Synthetic oligonucleotide
cagcagcggcagaaaagga

SEQ ID NO: 2001501 - RNA, 19 nt, Artificial Sequence
  Description of Artificial Sequence: Synthetic oligonucleotide
ccgacgcaggagauggaug

SEQ ID NO: 2001502 - RNA, 19 nt, Artificial Sequence
  Description of Artificial Sequence: Synthetic oligonucleotide
cagcagcauauugugccca

SEQ ID NO: 2001503 - RNA, 19 nt, Artificial Sequence
  Description of Artificial Sequence: Synthetic oligonucleotide
cggccaucgcuacaggaag

SEQ ID NO: 2001504 - RNA, 19 nt, Artificial Sequence
  Description of Artificial Sequence: Synthetic oligonucleotide
ggcacacaugccauuccca

SEQ ID NO: 2001505 - RNA, 19 nt, Artificial Sequence
  Description of Artificial Sequence: Synthetic oligonucleotide
cccuuguugggacaacuaa

SEQ ID NO: 2001506 - RNA, 19 nt, Artificial Sequence
  Description of Artificial Sequence: Synthetic oligonucleotide
gaagucagcugggcaggcu

SEQ ID NO: 2001507 - RNA, 19 nt, Artificial Sequence
  Description of Artificial Sequence: Synthetic oligonucleotide
cuacgaaucccugccugcu

SEQ ID NO: 2001508 - RNA, 19 nt, Artificial Sequence
  Description of Artificial Sequence: Synthetic oligonucleotide
cagccacccagcagcggca

SEQ ID NO: 2001509 - RNA, 19 nt, Artificial Sequence
  Description of Artificial Sequence: Synthetic oligonucleotide
ccucgaaguauccccgcca

SEQ ID NO: 2001510 - RNA, 19 nt, Artificial Sequence
  Description of Artificial Sequence: Synthetic oligonucleotide
ggaagcagguuuugguauu

SEQ ID NO: 2001511 - RNA, 19 nt, Artificial Sequence
  Description of Artificial Sequence: Synthetic oligonucleotide
acgaggguggcgggucaca

SEQ ID NO: 2001512 - RNA, 19 nt, Artificial Sequence
  Description of Artificial Sequence: Synthetic oligonucleotide
gccauuagcuucugccgcu

SEQ ID NO: 2001513 - RNA, 19 nt, Artificial Sequence
  Description of Artificial Sequence: Synthetic oligonucleotide
gucccuuguugggacaacu

SEQ ID NO: 2001514 - RNA, 19 nt, Artificial Sequence
  Description of Artificial Sequence: Synthetic oligonucleotide
cauucccacacuccugauu

SEQ ID NO: 2001515 - RNA, 19 nt, Artificial Sequence
  Description of Artificial Sequence: Synthetic oligonucleotide
ggggcgggacaccgccucg

SEQ ID NO: 2001516 - RNA, 19 nt, Artificial Sequence
  Description of Artificial Sequence: Synthetic oligonucleotide
accgccgcggccaucgcua

SEQ ID NO: 2001517 - RNA, 19 nt, Artificial Sequence
  Description of Artificial Sequence: Synthetic oligonucleotide
cugauccagcagggaaguc

SEQ ID NO: 2001518 - RNA, 19 nt, Artificial Sequence
  Description of Artificial Sequence: Synthetic oligonucleotide
gcgggacaccgccucgaag

SEQ ID NO: 2001519 - RNA, 19 nt, Artificial Sequence
  Description of Artificial Sequence: Synthetic oligonucleotide
cuggcugacgugguagacu

SEQ ID NO: 2001520 - RNA, 19 nt, Artificial Sequence
  Description of Artificial Sequence: Synthetic oligonucleotide
cacgaggguggcgggucac

SEQ ID NO: 2001521 - RNA, 19 nt, Artificial Sequence
  Description of Artificial Sequence: Synthetic oligonucleotide
ggcagguuugggaggaaua

SEQ ID NO: 2001522 - RNA, 19 nt, Artificial Sequence
  Description of Artificial Sequence: Synthetic oligonucleotide
gcacucauggccacauucu

SEQ ID NO: 2001523 - RNA, 19 nt, Artificial Sequence
  Description of Artificial Sequence: Synthetic oligonucleotide
ggcuaggaaucuggaguca

SEQ ID NO: 2001524 - RNA, 19 nt, Artificial Sequence
  Description of Artificial Sequence: Synthetic oligonucleotide
ggugucccacuggcugacg

SEQ ID NO: 2001525 - RNA, 19 nt, Artificial Sequence
  Description of Artificial Sequence: Synthetic oligonucleotide
gcggccaucgcuacaggaa

SEQ ID NO: 2001526 - RNA, 19 nt, Artificial Sequence
  Description of Artificial Sequence: Synthetic oligonucleotide
uggagccauggcgcacagu

SEQ ID NO: 2001527 - RNA, 19 nt, Artificial Sequence
  Description of Artificial Sequence: Synthetic oligonucleotide
cccggggcgggacaccgcc

SEQ ID NO: 2001528 - RNA, 19 nt, Artificial Sequence
  Description of Artificial Sequence: Synthetic oligonucleotide
gccuuggagccauggcgca

SEQ ID NO: 2001529 - RNA, 19 nt, Artificial Sequence
  Description of Artificial Sequence: Synthetic oligonucleotide
caaggaggucauugugaau

SEQ ID NO: 2001530 - RNA, 19 nt, Artificial Sequence
  Description of Artificial Sequence: Synthetic oligonucleotide
ccuguugcuguuugauaua

SEQ ID NO: 2001531 - RNA, 19 nt, Artificial Sequence
  Description of Artificial Sequence: Synthetic oligonucleotide
caucccugucugcuuugua

SEQ ID NO: 2001532 - RNA, 19 nt, Artificial Sequence
  Description of Artificial Sequence: Synthetic oligonucleotide
guggcgggucacagccuug

SEQ ID NO: 2001533 - RNA, 19 nt, Artificial Sequence
  Description of Artificial Sequence: Synthetic oligonucleotide
cucugcacucauggccaca

SEQ ID NO: 2001534 - RNA, 19 nt, Artificial Sequence
  Description of Artificial Sequence: Synthetic oligonucleotide
gccgcucaaagugcauaac

SEQ ID NO: 2001535 - RNA, 19 nt, Artificial Sequence
  Description of Artificial Sequence: Synthetic oligonucleotide
ccaucgcuacaggaaguuc

SEQ ID NO: 2001536 - RNA, 19 nt, Artificial Sequence
  Description of Artificial Sequence: Synthetic oligonucleotide
agcuccccuugcagcaggu

SEQ ID NO: 2001537 - RNA, 19 nt, Artificial Sequence
  Description of Artificial Sequence: Synthetic oligonucleotide
cuaggguugauggcagguu

SEQ ID NO: 2001538 - RNA, 19 nt, Artificial Sequence
  Description of Artificial Sequence: Synthetic oligonucleotide
ggauccgcaccauuuccuu

SEQ ID NO: 2001539 - RNA, 19 nt, Artificial Sequence
  Description of Artificial Sequence: Synthetic oligonucleotide
ccgcaccauuuccuugacc

SEQ ID NO: 2001540 - RNA, 19 nt, Artificial Sequence
  Description of Artificial Sequence: Synthetic oligonucleotide
cgggacaccgccucgaagu

SEQ ID NO: 2001541 - RNA, 19 nt, Artificial Sequence
  Description of Artificial Sequence: Synthetic oligonucleotide
ccauuagcuucugccgcuc

SEQ ID NO: 2001542 - RNA, 19 nt, Artificial Sequence
  Description of Artificial Sequence: Synthetic oligonucleotide
gcggcagaaaaggaacgcu

SEQ ID NO: 2001543 - RNA, 19 nt, Artificial Sequence
  Description of Artificial Sequence: Synthetic oligonucleotide
gcugggcagcuuggcauac

SEQ ID NO: 2001544 - RNA, 19 nt, Artificial Sequence
  Description of Artificial Sequence: Synthetic oligonucleotide
gguggcgggucacagccuu

SEQ ID NO: 2001545 - RNA, 19 nt, Artificial Sequence
  Description of Artificial Sequence: Synthetic oligonucleotide
ggucccuuguugggacaac

SEQ ID NO: 2001546 - RNA, 19 nt, Artificial Sequence
  Description of Artificial Sequence: Synthetic oligonucleotide
gccaagccgcccggggcgg

SEQ ID NO: 2001547 - RNA, 19 nt, Artificial Sequence
  Description of Artificial Sequence: Synthetic oligonucleotide
agccgcccggggcgggaca

SEQ ID NO: 2001548 - RNA, 19 nt, Artificial Sequence
  Description of Artificial Sequence: Synthetic oligonucleotide
cgccucgaaguauccccgc

SEQ ID NO: 2001549 - RNA, 19 nt, Artificial Sequence
  Description of Artificial Sequence: Synthetic oligonucleotide
cuauuccuauuaggucccu

SEQ ID NO: 2001550 - RNA, 19 nt, Artificial Sequence
  Description of Artificial Sequence: Synthetic oligonucleotide
ccuccuaccagcuccccuu

SEQ ID NO: 2001551 - RNA, 19 nt, Artificial Sequence
  Description of Artificial Sequence: Synthetic oligonucleotide
ggcgggucacagccuugga

SEQ ID NO: 2001552 - RNA, 19 nt, Artificial Sequence
  Description of Artificial Sequence: Synthetic oligonucleotide
ggcuaucauucgguugucu

SEQ ID NO: 2001553 - RNA, 19 nt, Artificial Sequence
  Description of Artificial Sequence: Synthetic oligonucleotide
ggccuguccccaaggaggu

SEQ ID NO: 2001554 - RNA, 19 nt, Artificial Sequence
  Description of Artificial Sequence: Synthetic oligonucleotide
ggcgggacaccgccucgaa

SEQ ID NO: 2001555 - RNA, 19 nt, Artificial Sequence
  Description of Artificial Sequence: Synthetic oligonucleotide
ccaagaggccuguccccaa

SEQ ID NO: 2001556 - RNA, 19 nt, Artificial Sequence
  Description of Artificial Sequence: Synthetic oligonucleotide
caagccgcccggggcggga

SEQ ID NO: 2001557 - RNA, 19 nt, Artificial Sequence
  Description of Artificial Sequence: Synthetic oligonucleotide
gccaucgcuacaggaaguu

SEQ ID NO: 2001558 - RNA, 19 nt, Artificial Sequence
  Description of Artificial Sequence: Synthetic oligonucleotide
gggcgggacaccgccucga

SEQ ID NO: 2001559 - RNA, 19 nt, Artificial Sequence
  Description of Artificial Sequence: Synthetic oligonucleotide
ccgcggccaucgcuacagg

SEQ ID NO: 2001560 - RNA, 19 nt, Artificial Sequence
  Description of Artificial Sequence: Synthetic oligonucleotide
cggggcgggacaccgccuc

SEQ ID NO: 2001561 - RNA, 19 nt, Artificial Sequence
  Description of Artificial Sequence: Synthetic oligonucleotide
cagcagggacagaguguau

SEQ ID NO: 2001562 - RNA, 19 nt, Artificial Sequence
  Description of Artificial Sequence: Synthetic oligonucleotide
cugggccaugaggccagua

SEQ ID NO: 2001563 - RNA, 19 nt, Artificial Sequence
  Description of Artificial Sequence: Synthetic oligonucleotide
gcagcauauugugcccaau

SEQ ID NO: 2001564 - RNA, 19 nt, Artificial Sequence
  Description of Artificial Sequence: Synthetic oligonucleotide
ccaagccgcccggggcggg

SEQ ID NO: 2001565 - RNA, 19 nt, Artificial Sequence
  Description of Artificial Sequence: Synthetic oligonucleotide
cgcccggggcgggacaccg

SEQ ID NO: 2001566 - RNA, 19 nt, Artificial Sequence
  Description of Artificial Sequence: Synthetic oligonucleotide
ccaaggcacacaugccauu

SEQ ID NO: 2001567 - RNA, 19 nt, Artificial Sequence
  Description of Artificial Sequence: Synthetic oligonucleotide
ccgccgcggccaucgcuac

SEQ ID NO: 2001568 - RNA, 19 nt, Artificial Sequence
  Description of Artificial Sequence: Synthetic oligonucleotide
gccgcccggggcgggacac

SEQ ID NO: 2001569 - RNA, 19 nt, Artificial Sequence
  Description of Artificial Sequence: Synthetic oligonucleotide
ccucguuggggaagauuuu

SEQ ID NO: 2001570 - RNA, 19 nt, Artificial Sequence
  Description of Artificial Sequence: Synthetic oligonucleotide
cucccuccuguugcuguuu

SEQ ID NO: 2001571 - RNA, 19 nt, Artificial Sequence
  Description of Artificial Sequence: Synthetic oligonucleotide
cccgacgcaggagauggau

SEQ ID NO: 2001572 - RNA, 19 nt, Artificial Sequence
  Description of Artificial Sequence: Synthetic oligonucleotide
cggcuaucauucgguuguc

SEQ ID NO: 2001573 - RNA, 19 nt, Artificial Sequence
  Description of Artificial Sequence: Synthetic oligonucleotide
ggcgcacagucuggagggu

SEQ ID NO: 2001574 - RNA, 19 nt, Artificial Sequence
  Description of Artificial Sequence: Synthetic oligonucleotide
gcccggggcgggacaccgc

SEQ ID NO: 2001575 - RNA, 19 nt, Artificial Sequence
  Description of Artificial Sequence: Synthetic oligonucleotide
ccgcccggggcgggacacc

SEQ ID NO: 2001576 - RNA, 19 nt, Artificial Sequence
  Description of Artificial Sequence: Synthetic oligonucleotide
ggaccucguuggggaagau

SEQ ID NO: 2001577 - RNA, 19 nt, Artificial Sequence
  Description of Artificial Sequence: Synthetic oligonucleotide
ccggggcgggacaccgccu

SEQ ID NO: 2001578 - RNA, 19 nt, Artificial Sequence
  Description of Artificial Sequence: Synthetic oligonucleotide
cgccgcggccaucgcuaca

SEQ ID NO: 2001579 - RNA, 19 nt, Artificial Sequence
  Description of Artificial Sequence: Synthetic oligonucleotide
aacaaaagccucuacuacc

SEQ ID NO: 2001580 - RNA, 19 nt, Artificial Sequence
  Description of Artificial Sequence: Synthetic oligonucleotide
uuagcaaugguccuggugc

SEQ ID NO: 2001581 - RNA, 19 nt, Artificial Sequence
  Description of Artificial Sequence: Synthetic oligonucleotide
agaaggggaauccagaggg

SEQ ID NO: 2001582 - RNA, 19 nt, Artificial Sequence
  Description of Artificial Sequence: Synthetic oligonucleotide
cuuaauuauugguugaccc

SEQ ID NO: 2001583 - RNA, 19 nt, Artificial Sequence
  Description of Artificial Sequence: Synthetic oligonucleotide
aaaacaaaagccucuacua

SEQ ID NO: 2001584 - RNA, 19 nt, Artificial Sequence
  Description of Artificial Sequence: Synthetic oligonucleotide
uauugguugacccaauaug

SEQ ID NO: 2001585 - RNA, 19 nt, Artificial Sequence
  Description of Artificial Sequence: Synthetic oligonucleotide
aauccagagggcucgggcc

SEQ ID NO: 2001586 - RNA, 19 nt, Artificial Sequence
  Description of Artificial Sequence: Synthetic oligonucleotide
uuuguagcgcuccugagcc

SEQ ID NO: 2001587 - RNA, 19 nt, Artificial Sequence
  Description of Artificial Sequence: Synthetic oligonucleotide
auugguugacccaauaugc

SEQ ID NO: 2001588 - RNA, 19 nt, Artificial Sequence
  Description of Artificial Sequence: Synthetic oligonucleotide
caugcaagaacuauagaag

SEQ ID NO: 2001589 - RNA, 19 nt, Artificial Sequence
  Description of Artificial Sequence: Synthetic oligonucleotide
gauaaguuccuuucgguug

SEQ ID NO: 2001590 - RNA, 19 nt, Artificial Sequence
  Description of Artificial Sequence: Synthetic oligonucleotide
aaagcucucuugcagucgg

SEQ ID NO: 2001591 - RNA, 19 nt, Artificial Sequence
  Description of Artificial Sequence: Synthetic oligonucleotide
agaggaacuccucaggagg

SEQ ID NO: 2001592 - RNA, 19 nt, Artificial Sequence
  Description of Artificial Sequence: Synthetic oligonucleotide
aaaguuggaauuauugucu

SEQ ID NO: 2001593 - RNA, 19 nt, Artificial Sequence
  Description of Artificial Sequence: Synthetic oligonucleotide
uuaauuauugguugaccca

SEQ ID NO: 2001594 - RNA, 19 nt, Artificial Sequence
  Description of Artificial Sequence: Synthetic oligonucleotide
acagccuuagcaauggucc

SEQ ID NO: 2001595 - RNA, 19 nt, Artificial Sequence
  Description of Artificial Sequence: Synthetic oligonucleotide
uggaauuauugucugguug

SEQ ID NO: 2001596 - RNA, 19 nt, Artificial Sequence
  Description of Artificial Sequence: Synthetic oligonucleotide
caaaguuggaauuauuguc

SEQ ID NO: 2001597 - RNA, 19 nt, Artificial Sequence
  Description of Artificial Sequence: Synthetic oligonucleotide
ggaauuauugucugguugg

SEQ ID NO: 2001598 - RNA, 19 nt, Artificial Sequence
  Description of Artificial Sequence: Synthetic oligonucleotide
ucaucgcucacccacuagg

SEQ ID NO: 2001599 - RNA, 19 nt, Artificial Sequence
  Description of Artificial Sequence: Synthetic oligonucleotide
ugaggaugaaaacucuuug

SEQ ID NO: 2001600 - RNA, 19 nt, Artificial Sequence
  Description of Artificial Sequence: Synthetic oligonucleotide
agguucacauucaacaugc

SEQ ID NO: 2001601 - RNA, 19 nt, Artificial Sequence
  Description of Artificial Sequence: Synthetic oligonucleotide
ucacauucaacaugcaaga

SEQ ID NO: 2001602 - RNA, 19 nt, Artificial Sequence
  Description of Artificial Sequence: Synthetic oligonucleotide
cuuauuggcauccuuagca

SEQ ID NO: 2001603 - RNA, 19 nt, Artificial Sequence
  Description of Artificial Sequence: Synthetic oligonucleotide
cuaccuuaauuauugguug

SEQ ID NO: 2001604 - RNA, 19 nt, Artificial Sequence
  Description of Artificial Sequence: Synthetic oligonucleotide
gagacagcggauaaguucc

SEQ ID NO: 2001605 - RNA, 19 nt, Artificial Sequence
  Description of Artificial Sequence: Synthetic oligonucleotide
aagaacuauagaagucccc

SEQ ID NO: 2001606 - RNA, 19 nt, Artificial Sequence
  Description of Artificial Sequence: Synthetic oligonucleotide
uucaugucaucgcucaccc

SEQ ID NO: 2001607 - RNA, 19 nt, Artificial Sequence
  Description of Artificial Sequence: Synthetic oligonucleotide
ucucuacacacacuugugc

SEQ ID NO: 2001608 - RNA, 19 nt, Artificial Sequence
  Description of Artificial Sequence: Synthetic oligonucleotide
uuauugucugguuggagcu

SEQ ID NO: 2001609 - RNA, 19 nt, Artificial Sequence
  Description of Artificial Sequence: Synthetic oligonucleotide
uuagagacagcggauaagu

SEQ ID NO: 2001610 - RNA, 19 nt, Artificial Sequence
  Description of Artificial Sequence: Synthetic oligonucleotide
ucaacaugcaagaacuaua

SEQ ID NO: 2001611 - RNA, 19 nt, Artificial Sequence
  Description of Artificial Sequence: Synthetic oligonucleotide
acauuucacccaccaaccc

SEQ ID NO: 2001612 - RNA, 19 nt, Artificial Sequence
  Description of Artificial Sequence: Synthetic oligonucleotide
ucaccaaguguacauggug

SEQ ID NO: 2001613 - RNA, 19 nt, Artificial Sequence
  Description of Artificial Sequence: Synthetic oligonucleotide
agaggccagguucacauuc

SEQ ID NO: 2001614 - RNA, 19 nt, Artificial Sequence
  Description of Artificial Sequence: Synthetic oligonucleotide
cacauuucacccaccaacc

SEQ ID NO: 2001615 - RNA, 19 nt, Artificial Sequence
  Description of Artificial Sequence: Synthetic oligonucleotide
uggagauagaguggaaggg

SEQ ID NO: 2001616 - RNA, 19 nt, Artificial Sequence
  Description of Artificial Sequence: Synthetic oligonucleotide
ucagaggaacuccucagga

SEQ ID NO: 2001617 - RNA, 19 nt, Artificial Sequence
  Description of Artificial Sequence: Synthetic oligonucleotide
caucaccaaguguacaugg

SEQ ID NO: 2001618 - RNA, 19 nt, Artificial Sequence
  Description of Artificial Sequence: Synthetic oligonucleotide
accacucgacuucucaggc

SEQ ID NO: 2001619 - RNA, 19 nt, Artificial Sequence
  Description of Artificial Sequence: Synthetic oligonucleotide
ugucgagugcucaaggaac

SEQ ID NO: 2001620 - RNA, 19 nt, Artificial Sequence
  Description of Artificial Sequence: Synthetic oligonucleotide
caagaacuauagaaguccc

SEQ ID NO: 2001621 - RNA, 19 nt, Artificial Sequence
  Description of Artificial Sequence: Synthetic oligonucleotide
agcucugguugacauauuc

SEQ ID NO: 2001622 - RNA, 19 nt, Artificial Sequence
  Description of Artificial Sequence: Synthetic oligonucleotide
uuugccuggcacaccaugc

SEQ ID NO: 2001623 - RNA, 19 nt, Artificial Sequence
  Description of Artificial Sequence: Synthetic oligonucleotide
uugcagucgggccugcugg

SEQ ID NO: 2001624 - RNA, 19 nt, Artificial Sequence
  Description of Artificial Sequence: Synthetic oligonucleotide
uuauugguugacccaauau

SEQ ID NO: 2001625 - RNA, 19 nt, Artificial Sequence
  Description of Artificial Sequence: Synthetic oligonucleotide
uguucaaagggguccuucc

SEQ ID NO: 2001626 - RNA, 19 nt, Artificial Sequence
  Description of Artificial Sequence: Synthetic oligonucleotide
aauuauugucugguuggag

SEQ ID NO: 2001627 - RNA, 19 nt, Artificial Sequence
  Description of Artificial Sequence: Synthetic oligonucleotide
acccaauaugcauucaucu

SEQ ID NO: 2001628 - RNA, 19 nt, Artificial Sequence
  Description of Artificial Sequence: Synthetic oligonucleotide
uaauuauugguugacccaa

SEQ ID NO: 2001629 - RNA, 19 nt, Artificial Sequence
  Description of Artificial Sequence: Synthetic oligonucleotide
uggaagaccugguugucag

SEQ ID NO: 2001630 - RNA, 19 nt, Artificial Sequence
  Description of Artificial Sequence: Synthetic oligonucleotide
uagccaauguuccuuccag

SEQ ID NO: 2001631 - RNA, 19 nt, Artificial Sequence
  Description of Artificial Sequence: Synthetic oligonucleotide
aguuggaauuauugucugg

SEQ ID NO: 2001632 - RNA, 19 nt, Artificial Sequence
  Description of Artificial Sequence: Synthetic oligonucleotide
aacccauugaggaugaaaa

SEQ ID NO: 2001633 - RNA, 19 nt, Artificial Sequence
  Description of Artificial Sequence: Synthetic oligonucleotide
ugcaagaacuauagaaguc

SEQ ID NO: 2001634 - RNA, 19 nt, Artificial Sequence
  Description of Artificial Sequence: Synthetic oligonucleotide
auaaguuccuuucgguugu

SEQ ID NO: 2001635 - RNA, 19 nt, Artificial Sequence
  Description of Artificial Sequence: Synthetic oligonucleotide
cuuuguagcgcuccugagc

SEQ ID NO: 2001636 - RNA, 19 nt, Artificial Sequence
  Description of Artificial Sequence: Synthetic oligonucleotide
ccaauaugcauucaucucc

SEQ ID NO: 2001637 - RNA, 19 nt, Artificial Sequence
  Description of Artificial Sequence: Synthetic oligonucleotide
uuauuggcauccuuagcac

SEQ ID NO: 2001638 - RNA, 19 nt, Artificial Sequence
  Description of Artificial Sequence: Synthetic oligonucleotide
ucuuauuggcauccuuagc

SEQ ID NO: 2001639 - RNA, 19 nt, Artificial Sequence
  Description of Artificial Sequence: Synthetic oligonucleotide
caagcgacgguacaucacc

SEQ ID NO: 2001640 - RNA, 19 nt, Artificial Sequence
  Description of Artificial Sequence: Synthetic oligonucleotide
gaagaccugguugucagag

SEQ ID NO: 2001641 - RNA, 19 nt, Artificial Sequence
  Description of Artificial Sequence: Synthetic oligonucleotide
uguacauggugcuucuccu

SEQ ID NO: 2001642 - RNA, 19 nt, Artificial Sequence
  Description of Artificial Sequence: Synthetic oligonucleotide
gacgguacaucaccaagug

SEQ ID NO: 2001643 - RNA, 19 nt, Artificial Sequence
  Description of Artificial Sequence: Synthetic oligonucleotide
uacaucaccaaguguacau

SEQ ID NO: 2001644 - RNA, 19 nt, Artificial Sequence
  Description of Artificial Sequence: Synthetic oligonucleotide
uugguugacccaauaugca

SEQ ID NO: 2001645 - RNA, 19 nt, Artificial Sequence
  Description of Artificial Sequence: Synthetic oligonucleotide
ucucucucucucuacacac

SEQ ID NO: 2001646 - RNA, 19 nt, Artificial Sequence
  Description of Artificial Sequence: Synthetic oligonucleotide
agcggauaaguuccuuucg

SEQ ID NO: 2001647 - RNA, 19 nt, Artificial Sequence
  Description of Artificial Sequence: Synthetic oligonucleotide
acccauugaggaugaaaac

SEQ ID NO: 2001648 - RNA, 19 nt, Artificial Sequence
  Description of Artificial Sequence: Synthetic oligonucleotide
ggaugaaaacucuuuggag

SEQ ID NO: 2001649 - RNA, 19 nt, Artificial Sequence
  Description of Artificial Sequence: Synthetic oligonucleotide
ugugucucugccaccauuc

SEQ ID NO: 2001650 - RNA, 19 nt, Artificial Sequence
  Description of Artificial Sequence: Synthetic oligonucleotide
ucgcucacccacuaggacc

SEQ ID NO: 2001651 - RNA, 19 nt, Artificial Sequence
  Description of Artificial Sequence: Synthetic oligonucleotide
accuuaauuauugguugac

SEQ ID NO: 2001652 - RNA, 19 nt, Artificial Sequence
  Description of Artificial Sequence: Synthetic oligonucleotide
gagauagaguggaagggcc

SEQ ID NO: 2001653 - RNA, 19 nt, Artificial Sequence
  Description of Artificial Sequence: Synthetic oligonucleotide
uggucaaccagcuggugcu

SEQ ID NO: 2001654 - RNA, 19 nt, Artificial Sequence
  Description of Artificial Sequence: Synthetic oligonucleotide
ucacccaccaacccauuga

SEQ ID NO: 2001655 - RNA, 19 nt, Artificial Sequence
  Description of Artificial Sequence: Synthetic oligonucleotide
ggugucaaagcucucuugc

SEQ ID NO: 2001656 - RNA, 19 nt, Artificial Sequence
  Description of Artificial Sequence: Synthetic oligonucleotide
acucagaggaacuccucag

SEQ ID NO: 2001657 - RNA, 19 nt, Artificial Sequence
  Description of Artificial Sequence: Synthetic oligonucleotide
uaccuuaauuauugguuga

SEQ ID NO: 2001658 - RNA, 19 nt, Artificial Sequence
  Description of Artificial Sequence: Synthetic oligonucleotide
uuccuuucgguugucuagg

SEQ ID NO: 2001659 - RNA, 19 nt, Artificial Sequence
  Description of Artificial Sequence: Synthetic oligonucleotide
accaugccaguucuuauug

SEQ ID NO: 2001660 - RNA, 19 nt, Artificial Sequence
  Description of Artificial Sequence: Synthetic oligonucleotide
ucuguuagagacagcggau

SEQ ID NO: 2001661 - RNA, 19 nt, Artificial Sequence
  Description of Artificial Sequence: Synthetic oligonucleotide
auugcuggcaccacucgac

SEQ ID NO: 2001662 - RNA, 19 nt, Artificial Sequence
  Description of Artificial Sequence: Synthetic oligonucleotide
acuaccuuaauuauugguu

SEQ ID NO: 2001663 - RNA, 19 nt, Artificial Sequence
  Description of Artificial Sequence: Synthetic oligonucleotide
uaggauggugucaaagcuc

SEQ ID NO: 2001664 - RNA, 19 nt, Artificial Sequence
  Description of Artificial Sequence: Synthetic oligonucleotide
uucaacaugcaagaacuau

SEQ ID NO: 2001665 - RNA, 19 nt, Artificial Sequence
  Description of Artificial Sequence: Synthetic oligonucleotide
agauagaguggaagggccc

SEQ ID NO: 2001666 - RNA, 19 nt, Artificial Sequence
  Description of Artificial Sequence: Synthetic oligonucleotide
accauuccccucuucaugu

SEQ ID NO: 2001667 - RNA, 19 nt, Artificial Sequence
  Description of Artificial Sequence: Synthetic oligonucleotide
ugucucugccaccauuccc

SEQ ID NO: 2001668 - RNA, 19 nt, Artificial Sequence
  Description of Artificial Sequence: Synthetic oligonucleotide
cccagaaacaaaacaaaag

SEQ ID NO: 2001669 - RNA, 19 nt, Artificial Sequence
  Description of Artificial Sequence: Synthetic oligonucleotide
gauagaguggaagggcccc

SEQ ID NO: 2001670 - RNA, 19 nt, Artificial Sequence
  Description of Artificial Sequence: Synthetic oligonucleotide
cucagaggaacuccucagg

SEQ ID NO: 2001671 - RNA, 19 nt, Artificial Sequence
  Description of Artificial Sequence: Synthetic oligonucleotide
ugacccaauaugcauucau

SEQ ID NO: 2001672 - RNA, 19 nt, Artificial Sequence
  Description of Artificial Sequence: Synthetic oligonucleotide
cuucaugucaucgcucacc

SEQ ID NO: 2001673 - RNA, 19 nt, Artificial Sequence
  Description of Artificial Sequence: Synthetic oligonucleotide
uauuggcauccuuagcacu

SEQ ID NO: 2001674 - RNA, 19 nt, Artificial Sequence
  Description of Artificial Sequence: Synthetic oligonucleotide
ucggacucccgccucgagg

SEQ ID NO: 2001675 - RNA, 19 nt, Artificial Sequence
  Description of Artificial Sequence: Synthetic oligonucleotide
cucuguuagagacagcgga

SEQ ID NO: 2001676 - RNA, 19 nt, Artificial Sequence
  Description of Artificial Sequence: Synthetic oligonucleotide
aaguguacauggugcuucu

SEQ ID NO: 2001677 - RNA, 19 nt, Artificial Sequence
  Description of Artificial Sequence: Synthetic oligonucleotide
ucaaagcucucuugcaguc

SEQ ID NO: 2001678 - RNA, 19 nt, Artificial Sequence
  Description of Artificial Sequence: Synthetic oligonucleotide
aucgcucacccacuaggac

SEQ ID NO: 2001679 - RNA, 19 nt, Artificial Sequence
  Description of Artificial Sequence: Synthetic oligonucleotide
ucaaagggguccuuccuuc

SEQ ID NO: 2001680 - RNA, 19 nt, Artificial Sequence
  Description of Artificial Sequence: Synthetic oligonucleotide
cuacuaccuuaauuauugg

SEQ ID NO: 2001681 - RNA, 19 nt, Artificial Sequence
  Description of Artificial Sequence: Synthetic oligonucleotide
gcacuguccacaaaguugg

SEQ ID NO: 2001682 - RNA, 19 nt, Artificial Sequence
  Description of Artificial Sequence: Synthetic oligonucleotide
ugcauucaucuccaaggcu

SEQ ID NO: 2001683 - RNA, 19 nt, Artificial Sequence
  Description of Artificial Sequence: Synthetic oligonucleotide
gaggaacuccucaggaggg

SEQ ID NO: 2001684 - RNA, 19 nt, Artificial Sequence
  Description of Artificial Sequence: Synthetic oligonucleotide
auucucuuggcacccagaa

SEQ ID NO: 2001685 - RNA, 19 nt, Artificial Sequence
  Description of Artificial Sequence: Synthetic oligonucleotide
cagaaggggaauccagagg

SEQ ID NO: 2001686 - RNA, 19 nt, Artificial Sequence
  Description of Artificial Sequence: Synthetic oligonucleotide
ggcuugaagccucugcugg

SEQ ID NO: 2001687 - RNA, 19 nt, Artificial Sequence
  Description of Artificial Sequence: Synthetic oligonucleotide
caaggaacugcuggcauag

SEQ ID NO: 2001688 - RNA, 19 nt, Artificial Sequence
  Description of Artificial Sequence: Synthetic oligonucleotide
acauugcuggcaccacucg

SEQ ID NO: 2001689 - RNA, 19 nt, Artificial Sequence
  Description of Artificial Sequence: Synthetic oligonucleotide
cucaggcucagcaccacag

SEQ ID NO: 2001690 - RNA, 19 nt, Artificial Sequence
  Description of Artificial Sequence: Synthetic oligonucleotide
caccacucgacuucucagg

SEQ ID NO: 2001691 - RNA, 19 nt, Artificial Sequence
  Description of Artificial Sequence: Synthetic oligonucleotide
cagguucacauucaacaug

SEQ ID NO: 2001692 - RNA, 19 nt, Artificial Sequence
  Description of Artificial Sequence: Synthetic oligonucleotide
caaggcuugaagccucugc

SEQ ID NO: 2001693 - RNA, 19 nt, Artificial Sequence
  Description of Artificial Sequence: Synthetic oligonucleotide
guugacccaauaugcauuc

SEQ ID NO: 2001694 - RNA, 19 nt, Artificial Sequence
  Description of Artificial Sequence: Synthetic oligonucleotide
cucucuuucucucucucuc

SEQ ID NO: 2001695 - RNA, 19 nt, Artificial Sequence
  Description of Artificial Sequence: Synthetic oligonucleotide
ugguugacccaauaugcau

SEQ ID NO: 2001696 - RNA, 19 nt, Artificial Sequence
  Description of Artificial Sequence: Synthetic oligonucleotide
cucugcaagcccuggcugg

SEQ ID NO: 2001697 - RNA, 19 nt, Artificial Sequence
  Description of Artificial Sequence: Synthetic oligonucleotide
cucuacacacacuugugca

SEQ ID NO: 2001698 - RNA, 19 nt, Artificial Sequence
  Description of Artificial Sequence: Synthetic oligonucleotide
gagggcucgggccucgagg

SEQ ID NO: 2001699 - RNA, 19 nt, Artificial Sequence
  Description of Artificial Sequence: Synthetic oligonucleotide
gacucagaggaacuccuca

SEQ ID NO: 2001700 - RNA, 19 nt, Artificial Sequence
  Description of Artificial Sequence: Synthetic oligonucleotide
ggacccugcauucucuugg

SEQ ID NO: 2001701 - RNA, 19 nt, Artificial Sequence
  Description of Artificial Sequence: Synthetic oligonucleotide
cuugugcacagccuuagca

SEQ ID NO: 2001702 - RNA, 19 nt, Artificial Sequence
  Description of Artificial Sequence: Synthetic oligonucleotide
uucacccaccaacccauug

SEQ ID NO: 2001703 - RNA, 19 nt, Artificial Sequence
  Description of Artificial Sequence: Synthetic oligonucleotide
uugccuggcacaccaugcc

SEQ ID NO: 2001704 - RNA, 19 nt, Artificial Sequence
  Description of Artificial Sequence: Synthetic oligonucleotide
ugccaguucuuauuggcau

SEQ ID NO: 2001705 - RNA, 19 nt, Artificial Sequence
  Description of Artificial Sequence: Synthetic oligonucleotide
cagaggaacuccucaggag

SEQ ID NO: 2001706 - RNA, 19 nt, Artificial Sequence
  Description of Artificial Sequence: Synthetic oligonucleotide
ucacccacuaggacccugc

SEQ ID NO: 2001707 - RNA, 19 nt, Artificial Sequence
  Description of Artificial Sequence: Synthetic oligonucleotide
agcucucuugcagucgggc

SEQ ID NO: 2001708 - RNA, 19 nt, Artificial Sequence
  Description of Artificial Sequence: Synthetic oligonucleotide
caaguguacauggugcuuc

SEQ ID NO: 2001709 - RNA, 19 nt, Artificial Sequence
  Description of Artificial Sequence: Synthetic oligonucleotide
ccauugaggaugaaaacuc

SEQ ID NO: 2001710 - RNA, 19 nt, Artificial Sequence
  Description of Artificial Sequence: Synthetic oligonucleotide
ucccuguucaaaggggucc

SEQ ID NO: 2001711 - RNA, 19 nt, Artificial Sequence
  Description of Artificial Sequence: Synthetic oligonucleotide
cucucuacacacacuugug

SEQ ID NO: 2001712 - RNA, 19 nt, Artificial Sequence
  Description of Artificial Sequence: Synthetic oligonucleotide
acagaucucugcacccucc

SEQ ID NO: 2001713 - RNA, 19 nt, Artificial Sequence
  Description of Artificial Sequence: Synthetic oligonucleotide
auuauugguugacccaaua

SEQ ID NO: 2001714 - RNA, 19 nt, Artificial Sequence
  Description of Artificial Sequence: Synthetic oligonucleotide
uucucucucucucucucuc

SEQ ID NO: 2001715 - RNA, 19 nt, Artificial Sequence
  Description of Artificial Sequence: Synthetic oligonucleotide
aauaugcauucaucuccaa

SEQ ID NO: 2001716 - RNA, 19 nt, Artificial Sequence
  Description of Artificial Sequence: Synthetic oligonucleotide
ucucuuucucucucucucu

SEQ ID NO: 2001717 - RNA, 19 nt, Artificial Sequence
  Description of Artificial Sequence: Synthetic oligonucleotide
auccuuagcacuguccaca

SEQ ID NO: 2001718 - RNA, 19 nt, Artificial Sequence
  Description of Artificial Sequence: Synthetic oligonucleotide
ucuuucucucucucucucu

SEQ ID NO: 2001719 - RNA, 19 nt, Artificial Sequence
  Description of Artificial Sequence: Synthetic oligonucleotide
uucucucucuuucucucuc

SEQ ID NO: 2001720 - RNA, 19 nt, Artificial Sequence
  Description of Artificial Sequence: Synthetic oligonucleotide
cuuucucucucucucucuc

SEQ ID NO: 2001721 - RNA, 19 nt, Artificial Sequence
  Description of Artificial Sequence: Synthetic oligonucleotide
cacucgacuucucaggcuc

SEQ ID NO: 2001722 - RNA, 19 nt, Artificial Sequence
  Description of Artificial Sequence: Synthetic oligonucleotide
cacagccuuagcaaugguc

SEQ ID NO: 2001723 - RNA, 19 nt, Artificial Sequence
  Description of Artificial Sequence: Synthetic oligonucleotide
ucucucucucucucuacac

SEQ ID NO: 2001724 - RNA, 19 nt, Artificial Sequence
  Description of Artificial Sequence: Synthetic oligonucleotide
uuucucucucuuucucucu

SEQ ID NO: 2001725 - RNA, 19 nt, Artificial Sequence
  Description of Artificial Sequence: Synthetic oligonucleotide
uagcaaugguccuggugcc

SEQ ID NO: 2001726 - RNA, 19 nt, Artificial Sequence
  Description of Artificial Sequence: Synthetic oligonucleotide
gcggauaaguuccuuucgg

SEQ ID NO: 2001727 - RNA, 19 nt, Artificial Sequence
  Description of Artificial Sequence: Synthetic oligonucleotide
ucaaggaacugcuggcaua

SEQ ID NO: 2001728 - RNA, 19 nt, Artificial Sequence
  Description of Artificial Sequence: Synthetic oligonucleotide
aauguuccuuccagaggag

SEQ ID NO: 2001729 - RNA, 19 nt, Artificial Sequence
  Description of Artificial Sequence: Synthetic oligonucleotide
cauuucacccaccaaccca

SEQ ID NO: 2001730 - RNA, 19 nt, Artificial Sequence
  Description of Artificial Sequence: Synthetic oligonucleotide
ucucucuuucucucucucu

SEQ ID NO: 2001731 - RNA, 19 nt, Artificial Sequence
  Description of Artificial Sequence: Synthetic oligonucleotide
ccuggugccugcaaggugc

SEQ ID NO: 2001732 - RNA, 19 nt, Artificial Sequence
  Description of Artificial Sequence: Synthetic oligonucleotide
cuuugccuggcacaccaug

SEQ ID NO: 2001733 - RNA, 19 nt, Artificial Sequence
  Description of Artificial Sequence: Synthetic oligonucleotide
cccucuguuagagacagcg

SEQ ID NO: 2001734 - RNA, 19 nt, Artificial Sequence
  Description of Artificial Sequence: Synthetic oligonucleotide
ggagauagaguggaagggc

SEQ ID NO: 2001735 - RNA, 19 nt, Artificial Sequence
  Description of Artificial Sequence: Synthetic oligonucleotide
cauauuccaggaggcaggc

SEQ ID NO: 2001736 - RNA, 19 nt, Artificial Sequence
  Description of Artificial Sequence: Synthetic oligonucleotide
agagcagacauugcuggca

SEQ ID NO: 2001737 - RNA, 19 nt, Artificial Sequence
  Description of Artificial Sequence: Synthetic oligonucleotide
aaggcugucgagugcucaa

SEQ ID NO: 2001738 - RNA, 19 nt, Artificial Sequence
  Description of Artificial Sequence: Synthetic oligonucleotide
uuucucucucucucucucu

SEQ ID NO: 2001739 - RNA, 19 nt, Artificial Sequence
  Description of Artificial Sequence: Synthetic oligonucleotide
guuggaauuauugucuggu

SEQ ID NO: 2001740 - RNA, 19 nt, Artificial Sequence
  Description of Artificial Sequence: Synthetic oligonucleotide
cagcggauaaguuccuuuc

SEQ ID NO: 2001741 - RNA, 19 nt, Artificial Sequence
  Description of Artificial Sequence: Synthetic oligonucleotide
agaggcaccaucugugcuu

SEQ ID NO: 2001742 - RNA, 19 nt, Artificial Sequence
  Description of Artificial Sequence: Synthetic oligonucleotide
uccugcucuuuguagcgcu

SEQ ID NO: 2001743 - RNA, 19 nt, Artificial Sequence
  Description of Artificial Sequence: Synthetic oligonucleotide
gaauuauugucugguugga

SEQ ID NO: 2001744 - RNA, 19 nt, Artificial Sequence
  Description of Artificial Sequence: Synthetic oligonucleotide
caaagcucucuugcagucg

SEQ ID NO: 2001745 - RNA, 19 nt, Artificial Sequence
  Description of Artificial Sequence: Synthetic oligonucleotide
gacauugcuggcaccacuc

SEQ ID NO: 2001746 - RNA, 19 nt, Artificial Sequence
  Description of Artificial Sequence: Synthetic oligonucleotide
auuucacccaccaacccau

SEQ ID NO: 2001747 - RNA, 19 nt, Artificial Sequence
  Description of Artificial Sequence: Synthetic oligonucleotide
ggcuuggaagaccugguug

SEQ ID NO: 2001748 - RNA, 19 nt, Artificial Sequence
  Description of Artificial Sequence: Synthetic oligonucleotide
agugccaagcgacgguaca

SEQ ID NO: 2001749 - RNA, 19 nt, Artificial Sequence
  Description of Artificial Sequence: Synthetic oligonucleotide
cacccaccaacccauugag

SEQ ID NO: 2001750 - RNA, 19 nt, Artificial Sequence
  Description of Artificial Sequence: Synthetic oligonucleotide
gacccaauaugcauucauc

SEQ ID NO: 2001751 - RNA, 19 nt, Artificial Sequence
  Description of Artificial Sequence: Synthetic oligonucleotide
ugcaagcccuggcuggaug

SEQ ID NO: 2001752 - RNA, 19 nt, Artificial Sequence
  Description of Artificial Sequence: Synthetic oligonucleotide
aguucuuauuggcauccuu

SEQ ID NO: 2001753 - RNA, 19 nt, Artificial Sequence
  Description of Artificial Sequence: Synthetic oligonucleotide
uagcacuguccacaaaguu

SEQ ID NO: 2001754 - RNA, 19 nt, Artificial Sequence
  Description of Artificial Sequence: Synthetic oligonucleotide
aaagggguccuuccuucuu

SEQ ID NO: 2001755 - RNA, 19 nt, Artificial Sequence
  Description of Artificial Sequence: Synthetic oligonucleotide
uucucuuggcacccagaaa

SEQ ID NO: 2001756 - RNA, 19 nt, Artificial Sequence
  Description of Artificial Sequence: Synthetic oligonucleotide
cacagcccgggccacagag

SEQ ID NO: 2001757 - RNA, 19 nt, Artificial Sequence
  Description of Artificial Sequence: Synthetic oligonucleotide
uggcacaccaugccaguuc

SEQ ID NO: 2001758 - RNA, 19 nt, Artificial Sequence
  Description of Artificial Sequence: Synthetic oligonucleotide
ugucugguuggagcucugg

SEQ ID NO: 2001759 - RNA, 19 nt, Artificial Sequence
  Description of Artificial Sequence: Synthetic oligonucleotide
caccauuccccucuucaug

SEQ ID NO: 2001760 - RNA, 19 nt, Artificial Sequence
  Description of Artificial Sequence: Synthetic oligonucleotide
aauuauugguugacccaau

SEQ ID NO: 2001761 - RNA, 19 nt, Artificial Sequence
  Description of Artificial Sequence: Synthetic oligonucleotide
ucucucucuuucucucucu

SEQ ID NO: 2001762 - RNA, 19 nt, Artificial Sequence
  Description of Artificial Sequence: Synthetic oligonucleotide
caccaacccauugaggaug

SEQ ID NO: 2001763 - RNA, 19 nt, Artificial Sequence
  Description of Artificial Sequence: Synthetic oligonucleotide
uccuggugccugcaaggug

SEQ ID NO: 2001764 - RNA, 19 nt, Artificial Sequence
  Description of Artificial Sequence: Synthetic oligonucleotide
gcuggcauagccaauguuc

SEQ ID NO: 2001765 - RNA, 19 nt, Artificial Sequence
  Description of Artificial Sequence: Synthetic oligonucleotide
cuugcagucgggccugcug

SEQ ID NO: 2001766 - RNA, 19 nt, Artificial Sequence
  Description of Artificial Sequence: Synthetic oligonucleotide
cugguugucagagggugac

SEQ ID NO: 2001767 - RNA, 19 nt, Artificial Sequence
  Description of Artificial Sequence: Synthetic oligonucleotide
uaaggcugucgagugcuca

SEQ ID NO: 2001768 - RNA, 19 nt, Artificial Sequence
  Description of Artificial Sequence: Synthetic oligonucleotide
gauggugucaaagcucucu

SEQ ID NO: 2001769 - RNA, 19 nt, Artificial Sequence
  Description of Artificial Sequence: Synthetic oligonucleotide
gcauccuuagcacugucca

SEQ ID NO: 2001770 - RNA, 19 nt, Artificial Sequence
  Description of Artificial Sequence: Synthetic oligonucleotide
cucuuucucucucucucuc

SEQ ID NO: 2001771 - RNA, 19 nt, Artificial Sequence
  Description of Artificial Sequence: Synthetic oligonucleotide
uugcuggcaccacucgacu

SEQ ID NO: 2001772 - RNA, 19 nt, Artificial Sequence
  Description of Artificial Sequence: Synthetic oligonucleotide
ucucucucucucucucucu

SEQ ID NO: 2001773 - RNA, 19 nt, Artificial Sequence
  Description of Artificial Sequence: Synthetic oligonucleotide
ucucucucucucucucuac

SEQ ID NO: 2001774 - RNA, 19 nt, Artificial Sequence
  Description of Artificial Sequence: Synthetic oligonucleotide
uccuuagcacuguccacaa

SEQ ID NO: 2001775 - RNA, 19 nt, Artificial Sequence
  Description of Artificial Sequence: Synthetic oligonucleotide
agccucuacuaccuuaauu

SEQ ID NO: 2001776 - RNA, 19 nt, Artificial Sequence
  Description of Artificial Sequence: Synthetic oligonucleotide
cacuuugccuggcacacca

SEQ ID NO: 2001777 - RNA, 19 nt, Artificial Sequence
  Description of Artificial Sequence: Synthetic oligonucleotide
agagcccggauccacugaa

SEQ ID NO: 2001778 - RNA, 19 nt, Artificial Sequence
  Description of Artificial Sequence: Synthetic oligonucleotide
aggcucagcaccacagauc

SEQ ID NO: 2001779 - RNA, 19 nt, Artificial Sequence
  Description of Artificial Sequence: Synthetic oligonucleotide
auugaggaugaaaacucuu

SEQ ID NO: 2001780 - RNA, 19 nt, Artificial Sequence
  Description of Artificial Sequence: Synthetic oligonucleotide
gacugagggccagaggcac

SEQ ID NO: 2001781 - RNA, 19 nt, Artificial Sequence
  Description of Artificial Sequence: Synthetic oligonucleotide
cucucucucucucucucuc

SEQ ID NO: 2001782 - RNA, 19 nt, Artificial Sequence
  Description of Artificial Sequence: Synthetic oligonucleotide
ggggaauccagagggcucg

SEQ ID NO: 2001783 - RNA, 19 nt, Artificial Sequence
  Description of Artificial Sequence: Synthetic oligonucleotide
uccuuucgguugucuagga

SEQ ID NO: 2001784 - RNA, 19 nt, Artificial Sequence
  Description of Artificial Sequence: Synthetic oligonucleotide
cuccaaggcuugaagccuc

SEQ ID NO: 2001785 - RNA, 19 nt, Artificial Sequence
  Description of Artificial Sequence: Synthetic oligonucleotide
aggacccugcauucucuug

SEQ ID NO: 2001786 - RNA, 19 nt, Artificial Sequence
  Description of Artificial Sequence: Synthetic oligonucleotide
uccaaggcuugaagccucu

SEQ ID NO: 2001787 - RNA, 19 nt, Artificial Sequence
  Description of Artificial Sequence: Synthetic oligonucleotide
ugucaucgcucacccacua

SEQ ID NO: 2001788 - RNA, 19 nt, Artificial Sequence
  Description of Artificial Sequence: Synthetic oligonucleotide
gucaucgcucacccacuag

SEQ ID NO: 2001789 - RNA, 19 nt, Artificial Sequence
  Description of Artificial Sequence: Synthetic oligonucleotide
cccaauaugcauucaucuc

SEQ ID NO: 2001790 - RNA, 19 nt, Artificial Sequence
  Description of Artificial Sequence: Synthetic oligonucleotide
gcgacgguacaucaccaag

SEQ ID NO: 2001791 - RNA, 19 nt, Artificial Sequence
  Description of Artificial Sequence: Synthetic oligonucleotide
guugucuaggaugguguca

SEQ ID NO: 2001792 - RNA, 19 nt, Artificial Sequence
  Description of Artificial Sequence: Synthetic oligonucleotide
ucgagugcucaaggaacug

SEQ ID NO: 2001793 - RNA, 19 nt, Artificial Sequence
  Description of Artificial Sequence: Synthetic oligonucleotide
gcuggugcuggagagcccg

SEQ ID NO: 2001794 - RNA, 19 nt, Artificial Sequence
  Description of Artificial Sequence: Synthetic oligonucleotide
cucucucuuucucucucuc

SEQ ID NO: 2001795 - RNA, 19 nt, Artificial Sequence
  Description of Artificial Sequence: Synthetic oligonucleotide
acuguccacaaaguuggaa

SEQ ID NO: 2001796 - RNA, 19 nt, Artificial Sequence
  Description of Artificial Sequence: Synthetic oligonucleotide
ucaugucaucgcucaccca

SEQ ID NO: 2001797 - RNA, 19 nt, Artificial Sequence
  Description of Artificial Sequence: Synthetic oligonucleotide
cugucgagugcucaaggaa

SEQ ID NO: 2001798 - RNA, 19 nt, Artificial Sequence
  Description of Artificial Sequence: Synthetic oligonucleotide
aucaccaaguguacauggu

SEQ ID NO: 2001799 - RNA, 19 nt, Artificial Sequence
  Description of Artificial Sequence: Synthetic oligonucleotide
cauugaggaugaaaacucu

SEQ ID NO: 2001800 - RNA, 19 nt, Artificial Sequence
  Description of Artificial Sequence: Synthetic oligonucleotide
ucucugccaccauuccccu

SEQ ID NO: 2001801 - RNA, 19 nt, Artificial Sequence
  Description of Artificial Sequence: Synthetic oligonucleotide
gcacccagaaacaaaacaa

SEQ ID NO: 2001802 - RNA, 19 nt, Artificial Sequence
  Description of Artificial Sequence: Synthetic oligonucleotide
cugcauucucuuggcaccc

SEQ ID NO: 2001803 - RNA, 19 nt, Artificial Sequence
  Description of Artificial Sequence: Synthetic oligonucleotide
uucggacucccgccucgag

SEQ ID NO: 2001804 - RNA, 19 nt, Artificial Sequence
  Description of Artificial Sequence: Synthetic oligonucleotide
ggcucagcaccacagaucu

SEQ ID NO: 2001805 - RNA, 19 nt, Artificial Sequence
  Description of Artificial Sequence: Synthetic oligonucleotide
cucucucucucucuacaca

SEQ ID NO: 2001806 - RNA, 19 nt, Artificial Sequence
  Description of Artificial Sequence: Synthetic oligonucleotide
cucucucucucucucuaca

SEQ ID NO: 2001807 - RNA, 19 nt, Artificial Sequence
  Description of Artificial Sequence: Synthetic oligonucleotide
aguguacauggugcuucuc

SEQ ID NO: 2001808 - RNA, 19 nt, Artificial Sequence
  Description of Artificial Sequence: Synthetic oligonucleotide
ugcuggcauagccaauguu

SEQ ID NO: 2001809 - RNA, 19 nt, Artificial Sequence
  Description of Artificial Sequence: Synthetic oligonucleotide
cacagaucucugcacccuc

SEQ ID NO: 2001810 - RNA, 19 nt, Artificial Sequence
  Description of Artificial Sequence: Synthetic oligonucleotide
aagcgacgguacaucacca

SEQ ID NO: 2001811 - RNA, 19 nt, Artificial Sequence
  Description of Artificial Sequence: Synthetic oligonucleotide
uuggcauccuuagcacugu

SEQ ID NO: 2001812 - RNA, 19 nt, Artificial Sequence
  Description of Artificial Sequence: Synthetic oligonucleotide
ggaacugcuggcauagcca

SEQ ID NO: 2001813 - RNA, 19 nt, Artificial Sequence
  Description of Artificial Sequence: Synthetic oligonucleotide
gccuuagcaaugguccugg

SEQ ID NO: 2001814 - RNA, 19 nt, Artificial Sequence
  Description of Artificial Sequence: Synthetic oligonucleotide
uggcuuggaagaccugguu

SEQ ID NO: 2001815 - RNA, 19 nt, Artificial Sequence
  Description of Artificial Sequence: Synthetic oligonucleotide
aagcucucuugcagucggg

SEQ ID NO: 2001816 - RNA, 19 nt, Artificial Sequence
  Description of Artificial Sequence: Synthetic oligonucleotide
gcucugguugacauauucc

SEQ ID NO: 2001817 - RNA, 19 nt, Artificial Sequence
  Description of Artificial Sequence: Synthetic oligonucleotide
ccucuguuagagacagcgg

SEQ ID NO: 2001818 - RNA, 19 nt, Artificial Sequence
  Description of Artificial Sequence: Synthetic oligonucleotide
agcgacgguacaucaccaa

SEQ ID NO: 2001819 - RNA, 19 nt, Artificial Sequence
  Description of Artificial Sequence: Synthetic oligonucleotide
ccucgaggagcccaguggc

SEQ ID NO: 2001820 - RNA, 19 nt, Artificial Sequence
  Description of Artificial Sequence: Synthetic oligonucleotide
uugacccaauaugcauuca

SEQ ID NO: 2001821 - RNA, 19 nt, Artificial Sequence
  Description of Artificial Sequence: Synthetic oligonucleotide
cauucucuuggcacccaga

SEQ ID NO: 2001822 - RNA, 19 nt, Artificial Sequence
  Description of Artificial Sequence: Synthetic oligonucleotide
ugccaagcgacgguacauc

SEQ ID NO: 2001823 - RNA, 19 nt, Artificial Sequence
  Description of Artificial Sequence: Synthetic oligonucleotide
cccggauccacugaagcag

SEQ ID NO: 2001824 - RNA, 19 nt, Artificial Sequence
  Description of Artificial Sequence: Synthetic oligonucleotide
ggauccacugaagcagugc

SEQ ID NO: 2001825 - RNA, 19 nt, Artificial Sequence
  Description of Artificial Sequence: Synthetic oligonucleotide
ccaugccaguucuuauugg

SEQ ID NO: 2001826 - RNA, 19 nt, Artificial Sequence
  Description of Artificial Sequence: Synthetic oligonucleotide
cucucucucucuacacaca

SEQ ID NO: 2001827 - RNA, 19 nt, Artificial Sequence
  Description of Artificial Sequence: Synthetic oligonucleotide
ggggcuucggacucccgcc

SEQ ID NO: 2001828 - RNA, 19 nt, Artificial Sequence
  Description of Artificial Sequence: Synthetic oligonucleotide
ggagagcccggauccacug

SEQ ID NO: 2001829 - RNA, 19 nt, Artificial Sequence
  Description of Artificial Sequence: Synthetic oligonucleotide
cucgacuucucaggcucag

SEQ ID NO: 2001830 - RNA, 19 nt, Artificial Sequence
  Description of Artificial Sequence: Synthetic oligonucleotide
gccagaggcaccaucugug

SEQ ID NO: 2001831 - RNA, 19 nt, Artificial Sequence
  Description of Artificial Sequence: Synthetic oligonucleotide
uggagcucugguugacaua

SEQ ID NO: 2001832 - RNA, 19 nt, Artificial Sequence
  Description of Artificial Sequence: Synthetic oligonucleotide
gcuucggacucccgccucg

SEQ ID NO: 2001833 - RNA, 19 nt, Artificial Sequence
  Description of Artificial Sequence: Synthetic oligonucleotide
cuaaggcugucgagugcuc

SEQ ID NO: 2001834 - RNA, 19 nt, Artificial Sequence
  Description of Artificial Sequence: Synthetic oligonucleotide
cagugccaagcgacgguac

SEQ ID NO: 2001835 - RNA, 19 nt, Artificial Sequence
  Description of Artificial Sequence: Synthetic oligonucleotide
cgguacaucaccaagugua

SEQ ID NO: 2001836 - RNA, 19 nt, Artificial Sequence
  Description of Artificial Sequence: Synthetic oligonucleotide
gagggccagaggcaccauc

SEQ ID NO: 2001837 - RNA, 19 nt, Artificial Sequence
  Description of Artificial Sequence: Synthetic oligonucleotide
uaggacccugcauucucuu

SEQ ID NO: 2001838 - RNA, 19 nt, Artificial Sequence
  Description of Artificial Sequence: Synthetic oligonucleotide
ggugcuucccucuguuaga

SEQ ID NO: 2001839 - RNA, 19 nt, Artificial Sequence
  Description of Artificial Sequence: Synthetic oligonucleotide
agagggcucgggccucgag

SEQ ID NO: 2001840 - RNA, 19 nt, Artificial Sequence
  Description of Artificial Sequence: Synthetic oligonucleotide
acccaccaacccauugagg

SEQ ID NO: 2001841 - RNA, 19 nt, Artificial Sequence
  Description of Artificial Sequence: Synthetic oligonucleotide
aggcugucgagugcucaag

SEQ ID NO: 2001842 - RNA, 19 nt, Artificial Sequence
  Description of Artificial Sequence: Synthetic oligonucleotide
gcagacauugcuggcacca

SEQ ID NO: 2001843 - RNA, 19 nt, Artificial Sequence
  Description of Artificial Sequence: Synthetic oligonucleotide
cgcucacccacuaggaccc

SEQ ID NO: 2001844 - RNA, 19 nt, Artificial Sequence
  Description of Artificial Sequence: Synthetic oligonucleotide
ugcuggcaccacucgacuu

SEQ ID NO: 2001845 - RNA, 19 nt, Artificial Sequence
  Description of Artificial Sequence: Synthetic oligonucleotide
ccugcaaggugcuucccuc

SEQ ID NO: 2001846 - RNA, 19 nt, Artificial Sequence
  Description of Artificial Sequence: Synthetic oligonucleotide
ugcauucucuuggcaccca

SEQ ID NO: 2001847 - RNA, 19 nt, Artificial Sequence
  Description of Artificial Sequence: Synthetic oligonucleotide
acccacuaggacccugcau

SEQ ID NO: 2001848 - RNA, 19 nt, Artificial Sequence
  Description of Artificial Sequence: Synthetic oligonucleotide
uggcuggauggcagcgaac

SEQ ID NO: 2001849 - RNA, 19 nt, Artificial Sequence
  Description of Artificial Sequence: Synthetic oligonucleotide
cuccugcucuuuguagcgc

SEQ ID NO: 2001850 - RNA, 19 nt, Artificial Sequence
  Description of Artificial Sequence: Synthetic oligonucleotide
aggccagguucacauucaa

SEQ ID NO: 2001851 - RNA, 19 nt, Artificial Sequence
  Description of Artificial Sequence: Synthetic oligonucleotide
ggauaaguuccuuucgguu

SEQ ID NO: 2001852 - RNA, 19 nt, Artificial Sequence
  Description of Artificial Sequence: Synthetic oligonucleotide
accaacccauugaggauga

SEQ ID NO: 2001853 - RNA, 19 nt, Artificial Sequence
  Description of Artificial Sequence: Synthetic oligonucleotide
cuguuagagacagcggaua

SEQ ID NO: 2001854 - RNA, 19 nt, Artificial Sequence
  Description of Artificial Sequence: Synthetic oligonucleotide
acagcccgggccacagagg

SEQ ID NO: 2001855 - RNA, 19 nt, Artificial Sequence
  Description of Artificial Sequence: Synthetic oligonucleotide
ugguugucagagggugacu

SEQ ID NO: 2001856 - RNA, 19 nt, Artificial Sequence
  Description of Artificial Sequence: Synthetic oligonucleotide
gggcccacauuucacccac

SEQ ID NO: 2001857 - RNA, 19 nt, Artificial Sequence
  Description of Artificial Sequence: Synthetic oligonucleotide
gagcccggauccacugaag

SEQ ID NO: 2001858 - RNA, 19 nt, Artificial Sequence
  Description of Artificial Sequence: Synthetic oligonucleotide
guuggagcucugguugaca

SEQ ID NO: 2001859 - RNA, 19 nt, Artificial Sequence
  Description of Artificial Sequence: Synthetic oligonucleotide
ucccucuguuagagacagc

SEQ ID NO: 2001860 - RNA, 19 nt, Artificial Sequence
  Description of Artificial Sequence: Synthetic oligonucleotide
gccaguucuuauuggcauc

SEQ ID NO: 2001861 - RNA, 19 nt, Artificial Sequence
  Description of Artificial Sequence: Synthetic oligonucleotide
ccaagcgacgguacaucac

SEQ ID NO: 2001862 - RNA, 19 nt, Artificial Sequence
  Description of Artificial Sequence: Synthetic oligonucleotide
ggagcucugguugacauau

SEQ ID NO: 2001863 - RNA, 19 nt, Artificial Sequence
  Description of Artificial Sequence: Synthetic oligonucleotide
uaaguuccuuucgguuguc

SEQ ID NO: 2001864 - RNA, 19 nt, Artificial Sequence
  Description of Artificial Sequence: Synthetic oligonucleotide
gugacucagaggaacuccu

SEQ ID NO: 2001865 - RNA, 19 nt, Artificial Sequence
  Description of Artificial Sequence: Synthetic oligonucleotide
ccccucuucaugucaucgc

SEQ ID NO: 2001866 - RNA, 19 nt, Artificial Sequence
  Description of Artificial Sequence: Synthetic oligonucleotide
ggaauccagagggcucggg

SEQ ID NO: 2001867 - RNA, 19 nt, Artificial Sequence
  Description of Artificial Sequence: Synthetic oligonucleotide
cucucucucucucucucua

SEQ ID NO: 2001868 - RNA, 19 nt, Artificial Sequence
  Description of Artificial Sequence: Synthetic oligonucleotide
gucugguuggagcucuggu

SEQ ID NO: 2001869 - RNA, 19 nt, Artificial Sequence
  Description of Artificial Sequence: Synthetic oligonucleotide
uucgguugucuaggauggu

SEQ ID NO: 2001870 - RNA, 19 nt, Artificial Sequence
  Description of Artificial Sequence: Synthetic oligonucleotide
gcauucaucuccaaggcuu

SEQ ID NO: 2001871 - RNA, 19 nt, Artificial Sequence
  Description of Artificial Sequence: Synthetic oligonucleotide
gccaagcgacgguacauca

SEQ ID NO: 2001872 - RNA, 19 nt, Artificial Sequence
  Description of Artificial Sequence: Synthetic oligonucleotide
gucgagugcucaaggaacu

SEQ ID NO: 2001873 - RNA, 19 nt, Artificial Sequence
  Description of Artificial Sequence: Synthetic oligonucleotide
gcagguggggagacugagg

SEQ ID NO: 2001874 - RNA, 19 nt, Artificial Sequence
  Description of Artificial Sequence: Synthetic oligonucleotide
gcccacauuucacccacca

SEQ ID NO: 2001875 - RNA, 19 nt, Artificial Sequence
  Description of Artificial Sequence: Synthetic oligonucleotide
ccucuucaugucaucgcuc

SEQ ID NO: 2001876 - RNA, 19 nt, Artificial Sequence
  Description of Artificial Sequence: Synthetic oligonucleotide
ccgggcccacauuucaccc

SEQ ID NO: 2001877 - RNA, 19 nt, Artificial Sequence
  Description of Artificial Sequence: Synthetic oligonucleotide
cccauugaggaugaaaacu

SEQ ID NO: 2001878 - RNA, 19 nt, Artificial Sequence
  Description of Artificial Sequence: Synthetic oligonucleotide
cucaaggaacugcuggcau

SEQ ID NO: 2001879 - RNA, 19 nt, Artificial Sequence
  Description of Artificial Sequence: Synthetic oligonucleotide
gcccggauccacugaagca

SEQ ID NO: 2001880 - RNA, 19 nt, Artificial Sequence
  Description of Artificial Sequence: Synthetic oligonucleotide
acacuugugcacagccuua

SEQ ID NO: 2001881 - RNA, 19 nt, Artificial Sequence
  Description of Artificial Sequence: Synthetic oligonucleotide
caaagggguccuuccuucu

SEQ ID NO: 2001882 - RNA, 19 nt, Artificial Sequence
  Description of Artificial Sequence: Synthetic oligonucleotide
cgagugcucaaggaacugc

SEQ ID NO: 2001883 - RNA, 19 nt, Artificial Sequence
  Description of Artificial Sequence: Synthetic oligonucleotide
agacagcggauaaguuccu

SEQ ID NO: 2001884 - RNA, 19 nt, Artificial Sequence
  Description of Artificial Sequence: Synthetic oligonucleotide
cucugccaccauuccccuc

SEQ ID NO: 2001885 - RNA, 19 nt, Artificial Sequence
  Description of Artificial Sequence: Synthetic oligonucleotide
guagcgcuccugagccugc

SEQ ID NO: 2001886 - RNA, 19 nt, Artificial Sequence
  Description of Artificial Sequence: Synthetic oligonucleotide
guacauggugcuucuccuu

SEQ ID NO: 2001887 - RNA, 19 nt, Artificial Sequence
  Description of Artificial Sequence: Synthetic oligonucleotide
caggcucagcaccacagau

SEQ ID NO: 2001888 - RNA, 19 nt, Artificial Sequence
  Description of Artificial Sequence: Synthetic oligonucleotide
ggguccuuccuucuuuccu

SEQ ID NO: 2001889 - RNA, 19 nt, Artificial Sequence
  Description of Artificial Sequence: Synthetic oligonucleotide
caccaugccaguucuuauu

SEQ ID NO: 2001890 - RNA, 19 nt, Artificial Sequence
  Description of Artificial Sequence: Synthetic oligonucleotide
cagccuuagcaaugguccu

SEQ ID NO: 2001891 - RNA, 19 nt, Artificial Sequence
  Description of Artificial Sequence: Synthetic oligonucleotide
cugcaaggugcuucccucu

SEQ ID NO: 2001892 - RNA, 19 nt, Artificial Sequence
  Description of Artificial Sequence: Synthetic oligonucleotide
ggccagguucacauucaac

SEQ ID NO: 2001893 - RNA, 19 nt, Artificial Sequence
  Description of Artificial Sequence: Synthetic oligonucleotide
ggucaaccagcuggugcug

SEQ ID NO: 2001894 - RNA, 19 nt, Artificial Sequence
  Description of Artificial Sequence: Synthetic oligonucleotide
uggcaccacucgacuucuc

SEQ ID NO: 2001895 - RNA, 19 nt, Artificial Sequence
  Description of Artificial Sequence: Synthetic oligonucleotide
cccacuaggacccugcauu

SEQ ID NO: 2001896 - RNA, 19 nt, Artificial Sequence
  Description of Artificial Sequence: Synthetic oligonucleotide
ccaguggcuuggaagaccu

SEQ ID NO: 2001897 - RNA, 19 nt, Artificial Sequence
  Description of Artificial Sequence: Synthetic oligonucleotide
cacccacuaggacccugca

SEQ ID NO: 2001898 - RNA, 19 nt, Artificial Sequence
  Description of Artificial Sequence: Synthetic oligonucleotide
cucgaggagcccaguggcu

SEQ ID NO: 2001899 - RNA, 19 nt, Artificial Sequence
  Description of Artificial Sequence: Synthetic oligonucleotide
cggacucccgccucgagga

SEQ ID NO: 2001900 - RNA, 19 nt, Artificial Sequence
  Description of Artificial Sequence: Synthetic oligonucleotide
ccauuccccucuucauguc

SEQ ID NO: 2001901 - RNA, 19 nt, Artificial Sequence
  Description of Artificial Sequence: Synthetic oligonucleotide
ggcaccaucugugcuuucu

SEQ ID NO: 2001902 - RNA, 19 nt, Artificial Sequence
  Description of Artificial Sequence: Synthetic oligonucleotide
acuuugccuggcacaccau

SEQ ID NO: 2001903 - RNA, 19 nt, Artificial Sequence
  Description of Artificial Sequence: Synthetic oligonucleotide
gcucgggccucgaggacug

SEQ ID NO: 2001904 - RNA, 19 nt, Artificial Sequence
  Description of Artificial Sequence: Synthetic oligonucleotide
ccucuacuaccuuaauuau

SEQ ID NO: 2001905 - RNA, 19 nt, Artificial Sequence
  Description of Artificial Sequence: Synthetic oligonucleotide
cuucggacucccgccucga

SEQ ID NO: 2001906 - RNA, 19 nt, Artificial Sequence
  Description of Artificial Sequence: Synthetic oligonucleotide
ggcuucggacucccgccuc

SEQ ID NO: 2001907 - RNA, 19 nt, Artificial Sequence
  Description of Artificial Sequence: Synthetic oligonucleotide
gugccaagcgacgguacau

SEQ ID NO: 2001908 - RNA, 19 nt, Artificial Sequence
  Description of Artificial Sequence: Synthetic oligonucleotide
cugugucucugccaccauu

SEQ ID NO: 2001909 - RNA, 19 nt, Artificial Sequence
  Description of Artificial Sequence: Synthetic oligonucleotide
cuggcaccacucgacuucu

SEQ ID NO: 2001910 - RNA, 19 nt, Artificial Sequence
  Description of Artificial Sequence: Synthetic oligonucleotide
cgacgguacaucaccaagu

SEQ ID NO: 2001911 - RNA, 19 nt, Artificial Sequence
  Description of Artificial Sequence: Synthetic oligonucleotide
cuggugccugcaaggugcu

SEQ ID NO: 2001912 - RNA, 19 nt, Artificial Sequence
  Description of Artificial Sequence: Synthetic oligonucleotide
cggauaaguuccuuucggu

SEQ ID NO: 2001913 - RNA, 19 nt, Artificial Sequence
  Description of Artificial Sequence: Synthetic oligonucleotide
cgguugucuaggauggugu

SEQ ID NO: 2001914 - RNA, 19 nt, Artificial Sequence
  Description of Artificial Sequence: Synthetic oligonucleotide
cccacauuucacccaccaa

SEQ ID NO: 2001915 - RNA, 19 nt, Artificial Sequence
  Description of Artificial Sequence: Synthetic oligonucleotide
cuggggccuguccaucccu

SEQ ID NO: 2001916 - RNA, 19 nt, Artificial Sequence
  Description of Artificial Sequence: Synthetic oligonucleotide
gccucgaggacugcugcua

SEQ ID NO: 2001917 - RNA, 19 nt, Artificial Sequence
  Description of Artificial Sequence: Synthetic oligonucleotide
ccagagggcucgggccucg

SEQ ID NO: 2001918 - RNA, 19 nt, Artificial Sequence
  Description of Artificial Sequence: Synthetic oligonucleotide
ccucgaggacugcugcuaa

SEQ ID NO: 2001919 - RNA, 19 nt, Artificial Sequence
  Description of Artificial Sequence: Synthetic oligonucleotide
gucgggccugcuggucaac

SEQ ID NO: 2001920 - RNA, 19 nt, Artificial Sequence
  Description of Artificial Sequence: Synthetic oligonucleotide
ggcccacauuucacccacc

SEQ ID NO: 2001921 - RNA, 19 nt, Artificial Sequence
  Description of Artificial Sequence: Synthetic oligonucleotide
gggcuucggacucccgccu

SEQ ID NO: 2001922 - RNA, 19 nt, Artificial Sequence
  Description of Artificial Sequence: Synthetic oligonucleotide
ccucaggagggguuccacu

SEQ ID NO: 2001923 - RNA, 19 nt, Artificial Sequence
  Description of Artificial Sequence: Synthetic oligonucleotide
cgccucgaggagcccagug

SEQ ID NO: 2001924 - RNA, 19 nt, Artificial Sequence
  Description of Artificial Sequence: Synthetic oligonucleotide
ccggauccacugaagcagu

SEQ ID NO: 2001925 - RNA, 19 nt, Artificial Sequence
  Description of Artificial Sequence: Synthetic oligonucleotide
cucccgccucgaggagccc

SEQ ID NO: 2001926 - RNA, 19 nt, Artificial Sequence
  Description of Artificial Sequence: Synthetic oligonucleotide
ccacucgacuucucaggcu

SEQ ID NO: 2001927 - RNA, 19 nt, Artificial Sequence
  Description of Artificial Sequence: Synthetic oligonucleotide
ggggccuguccaucccugu

SEQ ID NO: 2001928 - RNA, 19 nt, Artificial Sequence
  Description of Artificial Sequence: Synthetic oligonucleotide
ccuuagcacuguccacaaa

SEQ ID NO: 2001929 - RNA, 19 nt, Artificial Sequence
  Description of Artificial Sequence: Synthetic oligonucleotide
ccagaggagagcagacauu

SEQ ID NO: 2001930 - RNA, 19 nt, Artificial Sequence
  Description of Artificial Sequence: Synthetic oligonucleotide
ccuuucgguugucuaggau

SEQ ID NO: 2001931 - RNA, 19 nt, Artificial Sequence
  Description of Artificial Sequence: Synthetic oligonucleotide
cgggcccacauuucaccca

SEQ ID NO: 2001932 - RNA, 19 nt, Artificial Sequence
  Description of Artificial Sequence: Synthetic oligonucleotide
ggacugcugcuaaggcugu

SEQ ID NO: 2001933 - RNA, 19 nt, Artificial Sequence
  Description of Artificial Sequence: Synthetic oligonucleotide
ccacagaucucugcacccu

SEQ ID NO: 2001934 - RNA, 19 nt, Artificial Sequence
  Description of Artificial Sequence: Synthetic oligonucleotide
gagcucugguugacauauu

SEQ ID NO: 2001935 - RNA, 19 nt, Artificial Sequence
  Description of Artificial Sequence: Synthetic oligonucleotide
gccucugcuggggccuguc

SEQ ID NO: 2001936 - RNA, 19 nt, Artificial Sequence
  Description of Artificial Sequence: Synthetic oligonucleotide
ccaaguguacauggugcuu

SEQ ID NO: 2001937 - RNA, 19 nt, Artificial Sequence
  Description of Artificial Sequence: Synthetic oligonucleotide
cugcaagcccuggcuggau

SEQ ID NO: 2001938 - RNA, 19 nt, Artificial Sequence
  Description of Artificial Sequence: Synthetic oligonucleotide
ccaacccauugaggaugaa

SEQ ID NO: 2001939 - RNA, 19 nt, Artificial Sequence
  Description of Artificial Sequence: Synthetic oligonucleotide
ccgccucgaggagcccagu

SEQ ID NO: 2001940 - RNA, 19 nt, Artificial Sequence
  Description of Artificial Sequence: Synthetic oligonucleotide
uccaaaaugacuaagcgag

SEQ ID NO: 2001941 - RNA, 19 nt, Artificial Sequence
  Description of Artificial Sequence: Synthetic oligonucleotide
augaccacuauacauaccc

SEQ ID NO: 2001942 - RNA, 19 nt, Artificial Sequence
  Description of Artificial Sequence: Synthetic oligonucleotide
caauaaaugaagauguagg

SEQ ID NO: 2001943 - RNA, 19 nt, Artificial Sequence
  Description of Artificial Sequence: Synthetic oligonucleotide
aauaaaugaagauguagga

SEQ ID NO: 2001944 - RNA, 19 nt, Artificial Sequence
  Description of Artificial Sequence: Synthetic oligonucleotide
uguagugcaaacgagagag

SEQ ID NO: 2001945 - RNA, 19 nt, Artificial Sequence
  Description of Artificial Sequence: Synthetic oligonucleotide
uuugucucgauaaaagugc

SEQ ID NO: 2001946 - RNA, 19 nt, Artificial Sequence
  Description of Artificial Sequence: Synthetic oligonucleotide
uguaggagcuuacagagag

SEQ ID NO: 2001947 - RNA, 19 nt, Artificial Sequence
  Description of Artificial Sequence: Synthetic oligonucleotide
aaagccaacauaaugagca

SEQ ID NO: 2001948 - RNA, 19 nt, Artificial Sequence
  Description of Artificial Sequence: Synthetic oligonucleotide
aaugagcaacacuaaaauc

SEQ ID NO: 2001949 - RNA, 19 nt, Artificial Sequence
  Description of Artificial Sequence: Synthetic oligonucleotide
aguagcaucgaaucucucc

SEQ ID NO: 2001950 - RNA, 19 nt, Artificial Sequence
  Description of Artificial Sequence: Synthetic oligonucleotide
uuugucacaggucagacaa

SEQ ID NO: 2001951 - RNA, 19 nt, Artificial Sequence
  Description of Artificial Sequence: Synthetic oligonucleotide
aauuaauccauuugacugu

SEQ ID NO: 2001952 - RNA, 19 nt, Artificial Sequence
  Description of Artificial Sequence: Synthetic oligonucleotide
auuugacuguauuugaguc

SEQ ID NO: 2001953 - RNA, 19 nt, Artificial Sequence
  Description of Artificial Sequence: Synthetic oligonucleotide
agcaacacuaaaaucagcc

SEQ ID NO: 2001954 - RNA, 19 nt, Artificial Sequence
  Description of Artificial Sequence: Synthetic oligonucleotide
gacuaagcgaguuaguuug

SEQ ID NO: 2001955 - RNA, 19 nt, Artificial Sequence
  Description of Artificial Sequence: Synthetic oligonucleotide
acugcuaucacugacagca

SEQ ID NO: 2001956 - RNA, 19 nt, Artificial Sequence
  Description of Artificial Sequence: Synthetic oligonucleotide
caaauaauccuucagaaga

SEQ ID NO: 2001957 - RNA, 19 nt, Artificial Sequence
  Description of Artificial Sequence: Synthetic oligonucleotide
aacauaaugagcaacacua

SEQ ID NO: 2001958 - RNA, 19 nt, Artificial Sequence
  Description of Artificial Sequence: Synthetic oligonucleotide
ugucauacgaauuccagcu

SEQ ID NO: 2001959 - RNA, 19 nt, Artificial Sequence
  Description of Artificial Sequence: Synthetic oligonucleotide
acuaaaaucagcccaccag

SEQ ID NO: 2001960 - RNA, 19 nt, Artificial Sequence
  Description of Artificial Sequence: Synthetic oligonucleotide
aagauguaggagcuuacag

SEQ ID NO: 2001961 - RNA, 19 nt, Artificial Sequence
  Description of Artificial Sequence: Synthetic oligonucleotide
aaaugacuaagcgaguuag

SEQ ID NO: 2001962 - RNA, 19 nt, Artificial Sequence
  Description of Artificial Sequence: Synthetic oligonucleotide
aagcgaguuaguuugucuc

SEQ ID NO: 2001963 - RNA, 19 nt, Artificial Sequence
  Description of Artificial Sequence: Synthetic oligonucleotide
aguggcgauccauugacgc

SEQ ID NO: 2001964 - RNA, 19 nt, Artificial Sequence
  Description of Artificial Sequence: Synthetic oligonucleotide
uaguuugucucgauaaaag

SEQ ID NO: 2001965 - RNA, 19 nt, Artificial Sequence
  Description of Artificial Sequence: Synthetic oligonucleotide
cuaaaaucagcccaccagc

SEQ ID NO: 2001966 - RNA, 19 nt, Artificial Sequence
  Description of Artificial Sequence: Synthetic oligonucleotide
gaaucucuccuuuagugag

SEQ ID NO: 2001967 - RNA, 19 nt, Artificial Sequence
  Description of Artificial Sequence: Synthetic oligonucleotide
agauaugacucugucauac

SEQ ID NO: 2001968 - RNA, 19 nt, Artificial Sequence
  Description of Artificial Sequence: Synthetic oligonucleotide
cagacuuacacauguaacc

SEQ ID NO: 2001969 - RNA, 19 nt, Artificial Sequence
  Description of Artificial Sequence: Synthetic oligonucleotide
uccaacgugggcauggcgg

SEQ ID NO: 2001970 - RNA, 19 nt, Artificial Sequence
  Description of Artificial Sequence: Synthetic oligonucleotide
agacuuacacauguaaccc

SEQ ID NO: 2001971 - RNA, 19 nt, Artificial Sequence
  Description of Artificial Sequence: Synthetic oligonucleotide
auuacugagcucugcuugc

SEQ ID NO: 2001972 - RNA, 19 nt, Artificial Sequence
  Description of Artificial Sequence: Synthetic oligonucleotide
uuucgguacaaaauaauau

SEQ ID NO: 2001973 - RNA, 19 nt, Artificial Sequence
  Description of Artificial Sequence: Synthetic oligonucleotide
acacauguaacccguugcc

SEQ ID NO: 2001974 - RNA, 19 nt, Artificial Sequence
  Description of Artificial Sequence: Synthetic oligonucleotide
cuuguucucacuucggagc

SEQ ID NO: 2001975 - RNA, 19 nt, Artificial Sequence
  Description of Artificial Sequence: Synthetic oligonucleotide
cuucccaugaccacuauac

SEQ ID NO: 2001976 - RNA, 19 nt, Artificial Sequence
  Description of Artificial Sequence: Synthetic oligonucleotide
acauguaacccguugccac

SEQ ID NO: 2001977 - RNA, 19 nt, Artificial Sequence
  Description of Artificial Sequence: Synthetic oligonucleotide
aaaagugcuccuguccagc

SEQ ID NO: 2001978 - RNA, 19 nt, Artificial Sequence
  Description of Artificial Sequence: Synthetic oligonucleotide
cuuacagagagcacaacug

SEQ ID NO: 2001979 - RNA, 19 nt, Artificial Sequence
  Description of Artificial Sequence: Synthetic oligonucleotide
uuugagucugugcaaauaa

SEQ ID NO: 2001980 - RNA, 19 nt, Artificial Sequence
  Description of Artificial Sequence: Synthetic oligonucleotide
uucuccugcccacugacgg

SEQ ID NO: 2001981 - RNA, 19 nt, Artificial Sequence
  Description of Artificial Sequence: Synthetic oligonucleotide
uuuauuucggucagucgug

SEQ ID NO: 2001982 - RNA, 19 nt, Artificial Sequence
  Description of Artificial Sequence: Synthetic oligonucleotide
ucuagccuggcuauccugg

SEQ ID NO: 2001983 - RNA, 19 nt, Artificial Sequence
  Description of Artificial Sequence: Synthetic oligonucleotide
uguaguuuucgguacaaaa

SEQ ID NO: 2001984 - RNA, 19 nt, Artificial Sequence
  Description of Artificial Sequence: Synthetic oligonucleotide
agaagaaauacccaagauu

SEQ ID NO: 2001985 - RNA, 19 nt, Artificial Sequence
  Description of Artificial Sequence: Synthetic oligonucleotide
aacuguuuauuucggucag

SEQ ID NO: 2001986 - RNA, 19 nt, Artificial Sequence
  Description of Artificial Sequence: Synthetic oligonucleotide
ucgaaucucuccuuuagug

SEQ ID NO: 2001987 - RNA, 19 nt, Artificial Sequence
  Description of Artificial Sequence: Synthetic oligonucleotide
aagauguagcuggaguggc

SEQ ID NO: 2001988 - RNA, 19 nt, Artificial Sequence
  Description of Artificial Sequence: Synthetic oligonucleotide
ucagacuuacacauguaac

SEQ ID NO: 2001989 - RNA, 19 nt, Artificial Sequence
  Description of Artificial Sequence: Synthetic oligonucleotide
cuuugcagaggucauuugg

SEQ ID NO: 2001990 - RNA, 19 nt, Artificial Sequence
  Description of Artificial Sequence: Synthetic oligonucleotide
auacccaagauucucuuug

SEQ ID NO: 2001991 - RNA, 19 nt, Artificial Sequence
  Description of Artificial Sequence: Synthetic oligonucleotide
uacacauguaacccguugc

SEQ ID NO: 2001992 - RNA, 19 nt, Artificial Sequence
  Description of Artificial Sequence: Synthetic oligonucleotide
agaaauacccaagauucuc

SEQ ID NO: 2001993 - RNA, 19 nt, Artificial Sequence
  Description of Artificial Sequence: Synthetic oligonucleotide
aguuaguuugucucgauaa

SEQ ID NO: 2001994 - RNA, 19 nt, Artificial Sequence
  Description of Artificial Sequence: Synthetic oligonucleotide
ucgguacaaaauaauauau

SEQ ID NO: 2001995 - RNA, 19 nt, Artificial Sequence
  Description of Artificial Sequence: Synthetic oligonucleotide
aacucagaaggccuucaag

SEQ ID NO: 2001996 - RNA, 19 nt, Artificial Sequence
  Description of Artificial Sequence: Synthetic oligonucleotide
uguuuauuucggucagucg

SEQ ID NO: 2001997 - RNA, 19 nt, Artificial Sequence
  Description of Artificial Sequence: Synthetic oligonucleotide
gacuuacacauguaacccg

SEQ ID NO: 2001998 - RNA, 19 nt, Artificial Sequence
  Description of Artificial Sequence: Synthetic oligonucleotide
aauugguguucugaggguc

SEQ ID NO: 2001999 - RNA, 19 nt, Artificial Sequence
  Description of Artificial Sequence: Synthetic oligonucleotide
aacgagagagcaucuguug

SEQ ID NO: 2002000 - RNA, 19 nt, Artificial Sequence
  Description of Artificial Sequence: Synthetic oligonucleotide
aacccguugccacacagug

SEQ ID NO: 2002001 - RNA, 19 nt, Artificial Sequence
  Description of Artificial Sequence: Synthetic oligonucleotide
uuacagagagcacaacugu

SEQ ID NO: 2002002 - RNA, 19 nt, Artificial Sequence
  Description of Artificial Sequence: Synthetic oligonucleotide
agauguaggagcuuacaga

SEQ ID NO: 2002003 - RNA, 19 nt, Artificial Sequence
  Description of Artificial Sequence: Synthetic oligonucleotide
ucaaggguucaguuuacag

SEQ ID NO: 2002004 - RNA, 19 nt, Artificial Sequence
  Description of Artificial Sequence: Synthetic oligonucleotide
gagaauugguguucugagg

SEQ ID NO: 2002005 - RNA, 19 nt, Artificial Sequence
  Description of Artificial Sequence: Synthetic oligonucleotide
ugagucugugcaaauaauc

SEQ ID NO: 2002006 - RNA, 19 nt, Artificial Sequence
  Description of Artificial Sequence: Synthetic oligonucleotide
gaaaggaucuucucauuac

SEQ ID NO: 2002007 - RNA, 19 nt, Artificial Sequence
  Description of Artificial Sequence: Synthetic oligonucleotide
uuuacaguucagauaugac

SEQ ID NO: 2002008 - RNA, 19 nt, Artificial Sequence
  Description of Artificial Sequence: Synthetic oligonucleotide
cucagaaggccuucaaggg

SEQ ID NO: 2002009 - RNA, 19 nt, Artificial Sequence
  Description of Artificial Sequence: Synthetic oligonucleotide
gauaugacucugucauacg

SEQ ID NO: 2002010 - RNA, 19 nt, Artificial Sequence
  Description of Artificial Sequence: Synthetic oligonucleotide
gauccauugacgccccgcg

SEQ ID NO: 2002011 - RNA, 19 nt, Artificial Sequence
  Description of Artificial Sequence: Synthetic oligonucleotide
auacauaccccagugcacg

SEQ ID NO: 2002012 - RNA, 19 nt, Artificial Sequence
  Description of Artificial Sequence: Synthetic oligonucleotide
caacuucgcaaccugaccc

SEQ ID NO: 2002013 - RNA, 19 nt, Artificial Sequence
  Description of Artificial Sequence: Synthetic oligonucleotide
ucauacgaauuccagcuuc

SEQ ID NO: 2002014 - RNA, 19 nt, Artificial Sequence
  Description of Artificial Sequence: Synthetic oligonucleotide
acagcauuccaacgugggc

SEQ ID NO: 2002015 - RNA, 19 nt, Artificial Sequence
  Description of Artificial Sequence: Synthetic oligonucleotide
caucuguugccgcugaucc

SEQ ID NO: 2002016 - RNA, 19 nt, Artificial Sequence
  Description of Artificial Sequence: Synthetic oligonucleotide
uuacacauguaacccguug

SEQ ID NO: 2002017 - RNA, 19 nt, Artificial Sequence
  Description of Artificial Sequence: Synthetic oligonucleotide
gacucugucauacgaauuc

SEQ ID NO: 2002018 - RNA, 19 nt, Artificial Sequence
  Description of Artificial Sequence: Synthetic oligonucleotide
aguuugucucgauaaaagu

SEQ ID NO: 2002019 - RNA, 19 nt, Artificial Sequence
  Description of Artificial Sequence: Synthetic oligonucleotide
ucgauaaaagugcuccugu

SEQ ID NO: 2002020 - RNA, 19 nt, Artificial Sequence
  Description of Artificial Sequence: Synthetic oligonucleotide
ugauccugcagucucuugu

SEQ ID NO: 2002021 - RNA, 19 nt, Artificial Sequence
  Description of Artificial Sequence: Synthetic oligonucleotide
gucucgauaaaagugcucc

SEQ ID NO: 2002022 - RNA, 19 nt, Artificial Sequence
  Description of Artificial Sequence: Synthetic oligonucleotide
auacaaagagcccugggaa

SEQ ID NO: 2002023 - RNA, 19 nt, Artificial Sequence
  Description of Artificial Sequence: Synthetic oligonucleotide
uccaaguccaacuucgcaa

SEQ ID NO: 2002024 - RNA, 19 nt, Artificial Sequence
  Description of Artificial Sequence: Synthetic oligonucleotide
agcgaguuaguuugucucg

SEQ ID NO: 2002025 - RNA, 19 nt, Artificial Sequence
  Description of Artificial Sequence: Synthetic oligonucleotide
ucuccuuuagugagcagca

SEQ ID NO: 2002026 - RNA, 19 nt, Artificial Sequence
  Description of Artificial Sequence: Synthetic oligonucleotide
auaugacucugucauacga

SEQ ID NO: 2002027 - RNA, 19 nt, Artificial Sequence
  Description of Artificial Sequence: Synthetic oligonucleotide
ugagggucgagaagucugg

SEQ ID NO: 2002028 - RNA, 19 nt, Artificial Sequence
  Description of Artificial Sequence: Synthetic oligonucleotide
aguucuccugcccacugac

SEQ ID NO: 2002029 - RNA, 19 nt, Artificial Sequence
  Description of Artificial Sequence: Synthetic oligonucleotide
uguuuggcucggcagaugu

SEQ ID NO: 2002030 - RNA, 19 nt, Artificial Sequence
  Description of Artificial Sequence: Synthetic oligonucleotide
ucugcuugccucauuuugu

SEQ ID NO: 2002031 - RNA, 19 nt, Artificial Sequence
  Description of Artificial Sequence: Synthetic oligonucleotide
guuuauuucggucagucgu

SEQ ID NO: 2002032 - RNA, 19 nt, Artificial Sequence
  Description of Artificial Sequence: Synthetic oligonucleotide
uaggagcuuacagagagca

SEQ ID NO: 2002033 - RNA, 19 nt, Artificial Sequence
  Description of Artificial Sequence: Synthetic oligonucleotide
auuuugucacaggucagac

SEQ ID NO: 2002034 - RNA, 19 nt, Artificial Sequence
  Description of Artificial Sequence: Synthetic oligonucleotide
uguccagcagaacucagaa

SEQ ID NO: 2002035 - RNA, 19 nt, Artificial Sequence
  Description of Artificial Sequence: Synthetic oligonucleotide
uaugacucugucauacgaa

SEQ ID NO: 2002036 - RNA, 19 nt, Artificial Sequence
  Description of Artificial Sequence: Synthetic oligonucleotide
agcucagacuuacacaugu

SEQ ID NO: 2002037 - RNA, 19 nt, Artificial Sequence
  Description of Artificial Sequence: Synthetic oligonucleotide
uccauugacgccccgcgcc

SEQ ID NO: 2002038 - RNA, 19 nt, Artificial Sequence
  Description of Artificial Sequence: Synthetic oligonucleotide
cuuccuguguaguuuucgg

SEQ ID NO: 2002039 - RNA, 19 nt, Artificial Sequence
  Description of Artificial Sequence: Synthetic oligonucleotide
ugguuuugggccuguuugg

SEQ ID NO: 2002040 - RNA, 19 nt, Artificial Sequence
  Description of Artificial Sequence: Synthetic oligonucleotide
ucucuuguucucacuucgg

SEQ ID NO: 2002041 - RNA, 19 nt, Artificial Sequence
  Description of Artificial Sequence: Synthetic oligonucleotide
cauacgaauuccagcuucc

SEQ ID NO: 2002042 - RNA, 19 nt, Artificial Sequence
  Description of Artificial Sequence: Synthetic oligonucleotide
uuguucucacuucggagca

SEQ ID NO: 2002043 - RNA, 19 nt, Artificial Sequence
  Description of Artificial Sequence: Synthetic oligonucleotide
uagugcaaacgagagagca

SEQ ID NO: 2002044 - RNA, 19 nt, Artificial Sequence
  Description of Artificial Sequence: Synthetic oligonucleotide
acugacgggcaccaugcac

SEQ ID NO: 2002045 - RNA, 19 nt, Artificial Sequence
  Description of Artificial Sequence: Synthetic oligonucleotide
uuaguuugucucgauaaaa

SEQ ID NO: 2002046 - RNA, 19 nt, Artificial Sequence
  Description of Artificial Sequence: Synthetic oligonucleotide
acgaauuccagcuucccau

SEQ ID NO: 2002047 - RNA, 19 nt, Artificial Sequence
  Description of Artificial Sequence: Synthetic oligonucleotide
aaauacccaagauucucuu

SEQ ID NO: 2002048 - RNA, 19 nt, Artificial Sequence
  Description of Artificial Sequence: Synthetic oligonucleotide
auaaugagcaacacuaaaa

SEQ ID NO: 2002049 - RNA, 19 nt, Artificial Sequence
  Description of Artificial Sequence: Synthetic oligonucleotide
caaagccaacauaaugagc

SEQ ID NO: 2002050 - RNA, 19 nt, Artificial Sequence
  Description of Artificial Sequence: Synthetic oligonucleotide
cucacuucggagcauucgc

SEQ ID NO: 2002051 - RNA, 19 nt, Artificial Sequence
  Description of Artificial Sequence: Synthetic oligonucleotide
ucuguugccgcugauccug

SEQ ID NO: 2002052 - RNA, 19 nt, Artificial Sequence
  Description of Artificial Sequence: Synthetic oligonucleotide
uacgaauuccagcuuccca

SEQ ID NO: 2002053 - RNA, 19 nt, Artificial Sequence
  Description of Artificial Sequence: Synthetic oligonucleotide
uuauuucggucagucgugg

SEQ ID NO: 2002054 - RNA, 19 nt, Artificial Sequence
  Description of Artificial Sequence: Synthetic oligonucleotide
ugggauacaaagagcccug

SEQ ID NO: 2002055 - RNA, 19 nt, Artificial Sequence
  Description of Artificial Sequence: Synthetic oligonucleotide
cagcaucacaguagcaucg

SEQ ID NO: 2002056 - RNA, 19 nt, Artificial Sequence
  Description of Artificial Sequence: Synthetic oligonucleotide
aacuucgcaaccugacccu

SEQ ID NO: 2002057 - RNA, 19 nt, Artificial Sequence
  Description of Artificial Sequence: Synthetic oligonucleotide
auuucggucagucguggcu

SEQ ID NO: 2002058 - RNA, 19 nt, Artificial Sequence
  Description of Artificial Sequence: Synthetic oligonucleotide
auucgcaaagccaacauaa

SEQ ID NO: 2002059 - RNA, 19 nt, Artificial Sequence
  Description of Artificial Sequence: Synthetic oligonucleotide
ugcagaggucauuuggucu

SEQ ID NO: 2002060 - RNA, 19 nt, Artificial Sequence
  Description of Artificial Sequence: Synthetic oligonucleotide
ggagaauugguguucugag

SEQ ID NO: 2002061 - RNA, 19 nt, Artificial Sequence
  Description of Artificial Sequence: Synthetic oligonucleotide
cacuauacauaccccagug

SEQ ID NO: 2002062 - RNA, 19 nt, Artificial Sequence
  Description of Artificial Sequence: Synthetic oligonucleotide
uaagcgaguuaguuugucu

SEQ ID NO: 2002063 - RNA, 19 nt, Artificial Sequence
  Description of Artificial Sequence: Synthetic oligonucleotide
uccaacuucgcaaccugac

SEQ ID NO: 2002064 - RNA, 19 nt, Artificial Sequence
  Description of Artificial Sequence: Synthetic oligonucleotide
aauaauccuucagaagaaa

SEQ ID NO: 2002065 - RNA, 19 nt, Artificial Sequence
  Description of Artificial Sequence: Synthetic oligonucleotide
cuucggagcauucgcaaag

SEQ ID NO: 2002066 - RNA, 19 nt, Artificial Sequence
  Description of Artificial Sequence: Synthetic oligonucleotide
cuucagaagaaauacccaa

SEQ ID NO: 2002067 - RNA, 19 nt, Artificial Sequence
  Description of Artificial Sequence: Synthetic oligonucleotide
gaagucuggagaagcaggc

SEQ ID NO: 2002068 - RNA, 19 nt, Artificial Sequence
  Description of Artificial Sequence: Synthetic oligonucleotide
ucgagaagucuggagaagc

SEQ ID NO: 2002069 - RNA, 19 nt, Artificial Sequence
  Description of Artificial Sequence: Synthetic oligonucleotide
uuuugggccuguuuggcuc

SEQ ID NO: 2002070 - RNA, 19 nt, Artificial Sequence
  Description of Artificial Sequence: Synthetic oligonucleotide
uguccgugaaagcuguagu

SEQ ID NO: 2002071 - RNA, 19 nt, Artificial Sequence
  Description of Artificial Sequence: Synthetic oligonucleotide
uuuugucacaggucagaca

SEQ ID NO: 2002072 - RNA, 19 nt, Artificial Sequence
  Description of Artificial Sequence: Synthetic oligonucleotide
caucgaaucucuccuuuag

SEQ ID NO: 2002073 - RNA, 19 nt, Artificial Sequence
  Description of Artificial Sequence: Synthetic oligonucleotide
ucccaugaccacuauacau

SEQ ID NO: 2002074 - RNA, 19 nt, Artificial Sequence
  Description of Artificial Sequence: Synthetic oligonucleotide
gaccacuauacauacccca

SEQ ID NO: 2002075 - RNA, 19 nt, Artificial Sequence
  Description of Artificial Sequence: Synthetic oligonucleotide
ucacaguagcaucgaaucu

SEQ ID NO: 2002076 - RNA, 19 nt, Artificial Sequence
  Description of Artificial Sequence: Synthetic oligonucleotide
aacgugggcauggcggggc

SEQ ID NO: 2002077 - RNA, 19 nt, Artificial Sequence
  Description of Artificial Sequence: Synthetic oligonucleotide
uugucucgauaaaagugcu

SEQ ID NO: 2002078 - RNA, 19 nt, Artificial Sequence
  Description of Artificial Sequence: Synthetic oligonucleotide
guuuacaguucagauauga

SEQ ID NO: 2002079 - RNA, 19 nt, Artificial Sequence
  Description of Artificial Sequence: Synthetic oligonucleotide
uccuguguaguuuucggua

SEQ ID NO: 2002080 - RNA, 19 nt, Artificial Sequence
  Description of Artificial Sequence: Synthetic oligonucleotide
ugaccacuauacauacccc

SEQ ID NO: 2002081 - RNA, 19 nt, Artificial Sequence
  Description of Artificial Sequence: Synthetic oligonucleotide
ugaagauguaggagcuuac

SEQ ID NO: 2002082 - RNA, 19 nt, Artificial Sequence
  Description of Artificial Sequence: Synthetic oligonucleotide
agcaauggggacugcuauc

SEQ ID NO: 2002083 - RNA, 19 nt, Artificial Sequence
  Description of Artificial Sequence: Synthetic oligonucleotide
caagugaguccaagcagcc

SEQ ID NO: 2002084 - RNA, 19 nt, Artificial Sequence
  Description of Artificial Sequence: Synthetic oligonucleotide
uaucacugacagcauucca

SEQ ID NO: 2002085 - RNA, 19 nt, Artificial Sequence
  Description of Artificial Sequence: Synthetic oligonucleotide
auacgaauuccagcuuccc

SEQ ID NO: 2002086 - RNA, 19 nt, Artificial Sequence
  Description of Artificial Sequence: Synthetic oligonucleotide
caccaugcacuccaagucc

SEQ ID NO: 2002087 - RNA, 19 nt, Artificial Sequence
  Description of Artificial Sequence: Synthetic oligonucleotide
ucacuucggagcauucgca

SEQ ID NO: 2002088 - RNA, 19 nt, Artificial Sequence
  Description of Artificial Sequence: Synthetic oligonucleotide
cuccaaaaugacuaagcga

SEQ ID NO: 2002089 - RNA, 19 nt, Artificial Sequence
  Description of Artificial Sequence: Synthetic oligonucleotide
aaccugacccuucuuggaa

SEQ ID NO: 2002090 - RNA, 19 nt, Artificial Sequence
  Description of Artificial Sequence: Synthetic oligonucleotide
agccaacauaaugagcaac

SEQ ID NO: 2002091 - RNA, 19 nt, Artificial Sequence
  Description of Artificial Sequence: Synthetic oligonucleotide
ugacuaagcgaguuaguuu

SEQ ID NO: 2002092 - RNA, 19 nt, Artificial Sequence
  Description of Artificial Sequence: Synthetic oligonucleotide
cauaccccagugcacgagg

SEQ ID NO: 2002093 - RNA, 19 nt, Artificial Sequence
  Description of Artificial Sequence: Synthetic oligonucleotide
cacaguagcaucgaaucuc

SEQ ID NO: 2002094 - RNA, 19 nt, Artificial Sequence
  Description of Artificial Sequence: Synthetic oligonucleotide
agugugugcagaguuccuc

SEQ ID NO: 2002095 - RNA, 19 nt, Artificial Sequence
  Description of Artificial Sequence: Synthetic oligonucleotide
agugcuccuguccagcaga

SEQ ID NO: 2002096 - RNA, 19 nt, Artificial Sequence
  Description of Artificial Sequence: Synthetic oligonucleotide
uugagucugugcaaauaau

SEQ ID NO: 2002097 - RNA, 19 nt, Artificial Sequence
  Description of Artificial Sequence: Synthetic oligonucleotide
uggcgauccauugacgccc

SEQ ID NO: 2002098 - RNA, 19 nt, Artificial Sequence
  Description of Artificial Sequence: Synthetic oligonucleotide
uacccaagauucucuuugc

SEQ ID NO: 2002099 - RNA, 19 nt, Artificial Sequence
  Description of Artificial Sequence: Synthetic oligonucleotide
aaguccaacuucgcaaccu

SEQ ID NO: 2002100 - RNA, 19 nt, Artificial Sequence
  Description of Artificial Sequence: Synthetic oligonucleotide
cuuggaaugguguccguga

SEQ ID NO: 2002101 - RNA, 19 nt, Artificial Sequence
  Description of Artificial Sequence: Synthetic oligonucleotide
auugguguucugagggucg

SEQ ID NO: 2002102 - RNA, 19 nt, Artificial Sequence
  Description of Artificial Sequence: Synthetic oligonucleotide
guccgugaaagcuguagug

SEQ ID NO: 2002103 - RNA, 19 nt, Artificial Sequence
  Description of Artificial Sequence: Synthetic oligonucleotide
auccauugacgccccgcgc

SEQ ID NO: 2002104 - RNA, 19 nt, Artificial Sequence
  Description of Artificial Sequence: Synthetic oligonucleotide
ugaguggagaauugguguu

SEQ ID NO: 2002105 - RNA, 19 nt, Artificial Sequence
  Description of Artificial Sequence: Synthetic oligonucleotide
ugaaagcuguagugcaaac

SEQ ID NO: 2002106 - RNA, 19 nt, Artificial Sequence
  Description of Artificial Sequence: Synthetic oligonucleotide
uuccuguguaguuuucggu

SEQ ID NO: 2002107 - RNA, 19 nt, Artificial Sequence
  Description of Artificial Sequence: Synthetic oligonucleotide
uucgcaaccugacccuucu

SEQ ID NO: 2002108 - RNA, 19 nt, Artificial Sequence
  Description of Artificial Sequence: Synthetic oligonucleotide
guaacccguugccacacag

SEQ ID NO: 2002109 - RNA, 19 nt, Artificial Sequence
  Description of Artificial Sequence: Synthetic oligonucleotide
cugacagcauuccaacgug

SEQ ID NO: 2002110 - RNA, 19 nt, Artificial Sequence
  Description of Artificial Sequence: Synthetic oligonucleotide
uggaguggcgauccauuga

SEQ ID NO: 2002111 - RNA, 19 nt, Artificial Sequence
  Description of Artificial Sequence: Synthetic oligonucleotide
guucagauaugacucuguc

SEQ ID NO: 2002112 - RNA, 19 nt, Artificial Sequence
  Description of Artificial Sequence: Synthetic oligonucleotide
ucucgauaaaagugcuccu

SEQ ID NO: 2002113 - RNA, 19 nt, Artificial Sequence
  Description of Artificial Sequence: Synthetic oligonucleotide
ucuccugcccacugacggg

SEQ ID NO: 2002114 - RNA, 19 nt, Artificial Sequence
  Description of Artificial Sequence: Synthetic oligonucleotide
uucccaugaccacuauaca

SEQ ID NO: 2002115 - RNA, 19 nt, Artificial Sequence
  Description of Artificial Sequence: Synthetic oligonucleotide
uuccaacgugggcauggcg

SEQ ID NO: 2002116 - RNA, 19 nt, Artificial Sequence
  Description of Artificial Sequence: Synthetic oligonucleotide
gcaaccugacccuucuugg

SEQ ID NO: 2002117 - RNA, 19 nt, Artificial Sequence
  Description of Artificial Sequence: Synthetic oligonucleotide
ucggagcauucgcaaagcc

SEQ ID NO: 2002118 - RNA, 19 nt, Artificial Sequence
  Description of Artificial Sequence: Synthetic oligonucleotide
cucgauaaaagugcuccug

SEQ ID NO: 2002119 - RNA, 19 nt, Artificial Sequence
  Description of Artificial Sequence: Synthetic oligonucleotide
uucucauuacugagcucug

SEQ ID NO: 2002120 - RNA, 19 nt, Artificial Sequence
  Description of Artificial Sequence: Synthetic oligonucleotide
aagcuguagugcaaacgag

SEQ ID NO: 2002121 - RNA, 19 nt, Artificial Sequence
  Description of Artificial Sequence: Synthetic oligonucleotide
aucgaaucucuccuuuagu

SEQ ID NO: 2002122 - RNA, 19 nt, Artificial Sequence
  Description of Artificial Sequence: Synthetic oligonucleotide
acuuacacauguaacccgu

SEQ ID NO: 2002123 - RNA, 19 nt, Artificial Sequence
  Description of Artificial Sequence: Synthetic oligonucleotide
ugcaaacgagagagcaucu

SEQ ID NO: 2002124 - RNA, 19 nt, Artificial Sequence
  Description of Artificial Sequence: Synthetic oligonucleotide
aaugacuaagcgaguuagu

SEQ ID NO: 2002125 - RNA, 19 nt, Artificial Sequence
  Description of Artificial Sequence: Synthetic oligonucleotide
cccguugccacacaguggg

SEQ ID NO: 2002126 - RNA, 19 nt, Artificial Sequence
  Description of Artificial Sequence: Synthetic oligonucleotide
guagcaucgaaucucuccu

SEQ ID NO: 2002127 - RNA, 19 nt, Artificial Sequence
  Description of Artificial Sequence: Synthetic oligonucleotide
uucgcaaagccaacauaau

SEQ ID NO: 2002128 - RNA, 19 nt, Artificial Sequence
  Description of Artificial Sequence: Synthetic oligonucleotide
aaggccuucaaggguucag

SEQ ID NO: 2002129 - RNA, 19 nt, Artificial Sequence
  Description of Artificial Sequence: Synthetic oligonucleotide
augacuaagcgaguuaguu

SEQ ID NO: 2002130 - RNA, 19 nt, Artificial Sequence
  Description of Artificial Sequence: Synthetic oligonucleotide
agggucgagaagucuggag

SEQ ID NO: 2002131 - RNA, 19 nt, Artificial Sequence
  Description of Artificial Sequence: Synthetic oligonucleotide
uauuugagucugugcaaau

SEQ ID NO: 2002132 - RNA, 19 nt, Artificial Sequence
  Description of Artificial Sequence: Synthetic oligonucleotide
gauguagcuggaguggcga

SEQ ID NO: 2002133 - RNA, 19 nt, Artificial Sequence
  Description of Artificial Sequence: Synthetic oligonucleotide
uauuucggucagucguggc

SEQ ID NO: 2002134 - RNA, 19 nt, Artificial Sequence
  Description of Artificial Sequence: Synthetic oligonucleotide
guuaguuugucucgauaaa

SEQ ID NO: 2002135 - RNA, 19 nt, Artificial Sequence
  Description of Artificial Sequence: Synthetic oligonucleotide
aucacugacagcauuccaa

SEQ ID NO: 2002136 - RNA, 19 nt, Artificial Sequence
  Description of Artificial Sequence: Synthetic oligonucleotide
gaagauguaggagcuuaca

SEQ ID NO: 2002137 - RNA, 19 nt, Artificial Sequence
  Description of Artificial Sequence: Synthetic oligonucleotide
ugucucgauaaaagugcuc

SEQ ID NO: 2002138 - RNA, 19 nt, Artificial Sequence
  Description of Artificial Sequence: Synthetic oligonucleotide
ucucauuacugagcucugc

SEQ ID NO: 2002139 - RNA, 19 nt, Artificial Sequence
  Description of Artificial Sequence: Synthetic oligonucleotide
cucagacuuacacauguaa

SEQ ID NO: 2002140 - RNA, 19 nt, Artificial Sequence
  Description of Artificial Sequence: Synthetic oligonucleotide
caugaccacuauacauacc

SEQ ID NO: 2002141 - RNA, 19 nt, Artificial Sequence
  Description of Artificial Sequence: Synthetic oligonucleotide
ggagcuuacagagagcaca

SEQ ID NO: 2002142 - RNA, 19 nt, Artificial Sequence
  Description of Artificial Sequence: Synthetic oligonucleotide
gugcaaacgagagagcauc

SEQ ID NO: 2002143 - RNA, 19 nt, Artificial Sequence
  Description of Artificial Sequence: Synthetic oligonucleotide
ggaguggcgauccauugac

SEQ ID NO: 2002144 - RNA, 19 nt, Artificial Sequence
  Description of Artificial Sequence: Synthetic oligonucleotide
uaacccguugccacacagu

SEQ ID NO: 2002145 - RNA, 19 nt, Artificial Sequence
  Description of Artificial Sequence: Synthetic oligonucleotide
auuccaacgugggcauggc

SEQ ID NO: 2002146 - RNA, 19 nt, Artificial Sequence
  Description of Artificial Sequence: Synthetic oligonucleotide
gcuguagugcaaacgagag

SEQ ID NO: 2002147 - RNA, 19 nt, Artificial Sequence
  Description of Artificial Sequence: Synthetic oligonucleotide
uuucggucagucguggcuc

SEQ ID NO: 2002148 - RNA, 19 nt, Artificial Sequence
  Description of Artificial Sequence: Synthetic oligonucleotide
agcuguagugcaaacgaga

SEQ ID NO: 2002149 - RNA, 19 nt, Artificial Sequence
  Description of Artificial Sequence: Synthetic oligonucleotide
uguguaguuuucgguacaa

SEQ ID NO: 2002150 - RNA, 19 nt, Artificial Sequence
  Description of Artificial Sequence: Synthetic oligonucleotide
ugcuaucacugacagcauu

SEQ ID NO: 2002151 - RNA, 19 nt, Artificial Sequence
  Description of Artificial Sequence: Synthetic oligonucleotide
ugacucugucauacgaauu

SEQ ID NO: 2002152 - RNA, 19 nt, Artificial Sequence
  Description of Artificial Sequence: Synthetic oligonucleotide
guggcgauccauugacgcc

SEQ ID NO: 2002153 - RNA, 19 nt, Artificial Sequence
  Description of Artificial Sequence: Synthetic oligonucleotide
guugccgcugauccugcag

SEQ ID NO: 2002154 - RNA, 19 nt, Artificial Sequence
  Description of Artificial Sequence: Synthetic oligonucleotide
uucggagcauucgcaaagc

SEQ ID NO: 2002155 - RNA, 19 nt, Artificial Sequence
  Description of Artificial Sequence: Synthetic oligonucleotide
gaaauacccaagauucucu

SEQ ID NO: 2002156 - RNA, 19 nt, Artificial Sequence
  Description of Artificial Sequence: Synthetic oligonucleotide
aagcagccaugagugagug

SEQ ID NO: 2002157 - RNA, 19 nt, Artificial Sequence
  Description of Artificial Sequence: Synthetic oligonucleotide
cauuugacuguauuugagu

SEQ ID NO: 2002158 - RNA, 19 nt, Artificial Sequence
  Description of Artificial Sequence: Synthetic oligonucleotide
auuaauccauuugacugua

SEQ ID NO: 2002159 - RNA, 19 nt, Artificial Sequence
  Description of Artificial Sequence: Synthetic oligonucleotide
agagagcacaacuguuuau

SEQ ID NO: 2002160 - RNA, 19 nt, Artificial Sequence
  Description of Artificial Sequence: Synthetic oligonucleotide
ugcuugccucauuuuguca

SEQ ID NO: 2002161 - RNA, 19 nt, Artificial Sequence
  Description of Artificial Sequence: Synthetic oligonucleotide
acuccaaguccaacuucgc

SEQ ID NO: 2002162 - RNA, 19 nt, Artificial Sequence
  Description of Artificial Sequence: Synthetic oligonucleotide
uuacugagcucugcuugcc

SEQ ID NO: 2002163 - RNA, 19 nt, Artificial Sequence
  Description of Artificial Sequence: Synthetic oligonucleotide
agucguggcucccugggau

SEQ ID NO: 2002164 - RNA, 19 nt, Artificial Sequence
  Description of Artificial Sequence: Synthetic oligonucleotide
cuccuguccagcagaacuc

SEQ ID NO: 2002165 - RNA, 19 nt, Artificial Sequence
  Description of Artificial Sequence: Synthetic oligonucleotide
agcauuccaacgugggcau

SEQ ID NO: 2002166 - RNA, 19 nt, Artificial Sequence
  Description of Artificial Sequence: Synthetic oligonucleotide
agauguagcuggaguggcg

SEQ ID NO: 2002167 - RNA, 19 nt, Artificial Sequence
  Description of Artificial Sequence: Synthetic oligonucleotide
uacauaccccagugcacga

SEQ ID NO: 2002168 - RNA, 19 nt, Artificial Sequence
  Description of Artificial Sequence: Synthetic oligonucleotide
agcaucgaaucucuccuuu

SEQ ID NO: 2002169 - RNA, 19 nt, Artificial Sequence
  Description of Artificial Sequence: Synthetic oligonucleotide
guauuugagucugugcaaa

SEQ ID NO: 2002170 - RNA, 19 nt, Artificial Sequence
  Description of Artificial Sequence: Synthetic oligonucleotide
cuuuagugagcagcaccgc

SEQ ID NO: 2002171 - RNA, 19 nt, Artificial Sequence
  Description of Artificial Sequence: Synthetic oligonucleotide
acccaagauucucuuugca

SEQ ID NO: 2002172 - RNA, 19 nt, Artificial Sequence
  Description of Artificial Sequence: Synthetic oligonucleotide
uucaaggguucaguuuaca

SEQ ID NO: 2002173 - RNA, 19 nt, Artificial Sequence
  Description of Artificial Sequence: Synthetic oligonucleotide
uacugagcucugcuugccu

SEQ ID NO: 2002174 - RNA, 19 nt, Artificial Sequence
  Description of Artificial Sequence: Synthetic oligonucleotide
uuggcucggcagaugucug

SEQ ID NO: 2002175 - RNA, 19 nt, Artificial Sequence
  Description of Artificial Sequence: Synthetic oligonucleotide
cugcuugccucauuuuguc

SEQ ID NO: 2002176 - RNA, 19 nt, Artificial Sequence
  Description of Artificial Sequence: Synthetic oligonucleotide
gcagccaugagugagugga

SEQ ID NO: 2002177 - RNA, 19 nt, Artificial Sequence
  Description of Artificial Sequence: Synthetic oligonucleotide
guaguuuucgguacaaaau

SEQ ID NO: 2002178 - RNA, 19 nt, Artificial Sequence
  Description of Artificial Sequence: Synthetic oligonucleotide
agucucacucuagccuggc

SEQ ID NO: 2002179 - RNA, 19 nt, Artificial Sequence
  Description of Artificial Sequence: Synthetic oligonucleotide
auugacgccccgcgccccg

SEQ ID NO: 2002180 - RNA, 19 nt, Artificial Sequence
  Description of Artificial Sequence: Synthetic oligonucleotide
uagugagcagcaccgccau

SEQ ID NO: 2002181 - RNA, 19 nt, Artificial Sequence
  Description of Artificial Sequence: Synthetic oligonucleotide
ggagcauucgcaaagccaa

SEQ ID NO: 2002182 - RNA, 19 nt, Artificial Sequence
  Description of Artificial Sequence: Synthetic oligonucleotide
agcauucgcaaagccaaca

SEQ ID NO: 2002183 - RNA, 19 nt, Artificial Sequence
  Description of Artificial Sequence: Synthetic oligonucleotide
cauuuugucacaggucaga

SEQ ID NO: 2002184 - RNA, 19 nt, Artificial Sequence
  Description of Artificial Sequence: Synthetic oligonucleotide
gaguuaguuugucucgaua

SEQ ID NO: 2002185 - RNA, 19 nt, Artificial Sequence
  Description of Artificial Sequence: Synthetic oligonucleotide
acuucggagcauucgcaaa

SEQ ID NO: 2002186 - RNA, 19 nt, Artificial Sequence
  Description of Artificial Sequence: Synthetic oligonucleotide
gggucgagaagucuggaga

SEQ ID NO: 2002187 - RNA, 19 nt, Artificial Sequence
  Description of Artificial Sequence: Synthetic oligonucleotide
uccuguccagcagaacuca

SEQ ID NO: 2002188 - RNA, 19 nt, Artificial Sequence
  Description of Artificial Sequence: Synthetic oligonucleotide
acagagagcacaacuguuu

SEQ ID NO: 2002189 - RNA, 19 nt, Artificial Sequence
  Description of Artificial Sequence: Synthetic oligonucleotide
gacugcuaucacugacagc

SEQ ID NO: 2002190 - RNA, 19 nt, Artificial Sequence
  Description of Artificial Sequence: Synthetic oligonucleotide
cagccagaugaagauguag

SEQ ID NO: 2002191 - RNA, 19 nt, Artificial Sequence
  Description of Artificial Sequence: Synthetic oligonucleotide
ucggcagaugucugcugug

SEQ ID NO: 2002192 - RNA, 19 nt, Artificial Sequence
  Description of Artificial Sequence: Synthetic oligonucleotide
ggaaaggaucuucucauua

SEQ ID NO: 2002193 - RNA, 19 nt, Artificial Sequence
  Description of Artificial Sequence: Synthetic oligonucleotide
cucugucauacgaauucca

SEQ ID NO: 2002194 - RNA, 19 nt, Artificial Sequence
  Description of Artificial Sequence: Synthetic oligonucleotide
gucagucguggcucccugg

SEQ ID NO: 2002195 - RNA, 19 nt, Artificial Sequence
  Description of Artificial Sequence: Synthetic oligonucleotide
gaguggcgauccauugacg

SEQ ID NO: 2002196 - RNA, 19 nt, Artificial Sequence
  Description of Artificial Sequence: Synthetic oligonucleotide
augagugaguggagaauug

SEQ ID NO: 2002197 - RNA, 19 nt, Artificial Sequence
  Description of Artificial Sequence: Synthetic oligonucleotide
uggcgcagagcuccagcug

SEQ ID NO: 2002198 - RNA, 19 nt, Artificial Sequence
  Description of Artificial Sequence: Synthetic oligonucleotide
agcagccaugagugagugg

SEQ ID NO: 2002199 - RNA, 19 nt, Artificial Sequence
  Description of Artificial Sequence: Synthetic oligonucleotide
agaacucagaaggccuuca

SEQ ID NO: 2002200 - RNA, 19 nt, Artificial Sequence
  Description of Artificial Sequence: Synthetic oligonucleotide
uccaagcagccaugaguga

SEQ ID NO: 2002201 - RNA, 19 nt, Artificial Sequence
  Description of Artificial Sequence: Synthetic oligonucleotide
cuaagcgaguuaguuuguc

SEQ ID NO: 2002202 - RNA, 19 nt, Artificial Sequence
  Description of Artificial Sequence: Synthetic oligonucleotide
caaacgagagagcaucugu

SEQ ID NO: 2002203 - RNA, 19 nt, Artificial Sequence
  Description of Artificial Sequence: Synthetic oligonucleotide
cacuaaaaucagcccacca

SEQ ID NO: 2002204 - RNA, 19 nt, Artificial Sequence
  Description of Artificial Sequence: Synthetic oligonucleotide
uggcucggcagaugucugc

SEQ ID NO: 2002205 - RNA, 19 nt, Artificial Sequence
  Description of Artificial Sequence: Synthetic oligonucleotide
ccacugacgggcaccaugc

SEQ ID NO: 2002206 - RNA, 19 nt, Artificial Sequence
  Description of Artificial Sequence: Synthetic oligonucleotide
cugacccuucuuggaaugg

SEQ ID NO: 2002207 - RNA, 19 nt, Artificial Sequence
  Description of Artificial Sequence: Synthetic oligonucleotide
gcaggcauucagcucagac

SEQ ID NO: 2002208 - RNA, 19 nt, Artificial Sequence
  Description of Artificial Sequence: Synthetic oligonucleotide
gcaccaugcacuccaaguc

SEQ ID NO: 2002209 - RNA, 19 nt, Artificial Sequence
  Description of Artificial Sequence: Synthetic oligonucleotide
gcuaucacugacagcauuc

SEQ ID NO: 2002210 - RNA, 19 nt, Artificial Sequence
  Description of Artificial Sequence: Synthetic oligonucleotide
gaacucagaaggccuucaa

SEQ ID NO: 2002211 - RNA, 19 nt, Artificial Sequence
  Description of Artificial Sequence: Synthetic oligonucleotide
ggguucaguuuacaguuca

SEQ ID NO: 2002212 - RNA, 19 nt, Artificial Sequence
  Description of Artificial Sequence: Synthetic oligonucleotide
cugacgggcaccaugcacu

SEQ ID NO: 2002213 - RNA, 19 nt, Artificial Sequence
  Description of Artificial Sequence: Synthetic oligonucleotide
ccaacuucgcaaccugacc

SEQ ID NO: 2002214 - RNA, 19 nt, Artificial Sequence
  Description of Artificial Sequence: Synthetic oligonucleotide
acgagggaaaggaucuucu

SEQ ID NO: 2002215 - RNA, 19 nt, Artificial Sequence
  Description of Artificial Sequence: Synthetic oligonucleotide
aggagcuuacagagagcac

SEQ ID NO: 2002216 - RNA, 19 nt, Artificial Sequence
  Description of Artificial Sequence: Synthetic oligonucleotide
ccaacgugggcauggcggg

SEQ ID NO: 2002217 - RNA, 19 nt, Artificial Sequence
  Description of Artificial Sequence: Synthetic oligonucleotide
caggcauucagcucagacu

SEQ ID NO: 2002218 - RNA, 19 nt, Artificial Sequence
  Description of Artificial Sequence: Synthetic oligonucleotide
gucacaggucagacaacag

SEQ ID NO: 2002219 - RNA, 19 nt, Artificial Sequence
  Description of Artificial Sequence: Synthetic oligonucleotide
agcaucacaguagcaucga

SEQ ID NO: 2002220 - RNA, 19 nt, Artificial Sequence
  Description of Artificial Sequence: Synthetic oligonucleotide
agccaugagugaguggaga

SEQ ID NO: 2002221 - RNA, 19 nt, Artificial Sequence
  Description of Artificial Sequence: Synthetic oligonucleotide
accaugcacuccaagucca

SEQ ID NO: 2002222 - RNA, 19 nt, Artificial Sequence
  Description of Artificial Sequence: Synthetic oligonucleotide
caugcacuccaaguccaac

SEQ ID NO: 2002223 - RNA, 19 nt, Artificial Sequence
  Description of Artificial Sequence: Synthetic oligonucleotide
ggucgagaagucuggagaa

SEQ ID NO: 2002224 - RNA, 19 nt, Artificial Sequence
  Description of Artificial Sequence: Synthetic oligonucleotide
gugaaagcuguagugcaaa

SEQ ID NO: 2002225 - RNA, 19 nt, Artificial Sequence
  Description of Artificial Sequence: Synthetic oligonucleotide
ccaagcagccaugagugag

SEQ ID NO: 2002226 - RNA, 19 nt, Artificial Sequence
  Description of Artificial Sequence: Synthetic oligonucleotide
cacgagggaaaggaucuuc

SEQ ID NO: 2002227 - RNA, 19 nt, Artificial Sequence
  Description of Artificial Sequence: Synthetic oligonucleotide
ugacgggcaccaugcacuc

SEQ ID NO: 2002228 - RNA, 19 nt, Artificial Sequence
  Description of Artificial Sequence: Synthetic oligonucleotide
guaggagcuuacagagagc

SEQ ID NO: 2002229 - RNA, 19 nt, Artificial Sequence
  Description of Artificial Sequence: Synthetic oligonucleotide
cuucgcaaccugacccuuc

SEQ ID NO: 2002230 - RNA, 19 nt, Artificial Sequence
  Description of Artificial Sequence: Synthetic oligonucleotide
caaccugacccuucuugga

SEQ ID NO: 2002231 - RNA, 19 nt, Artificial Sequence
  Description of Artificial Sequence: Synthetic oligonucleotide
aagugugugcagaguuccu

SEQ ID NO: 2002232 - RNA, 19 nt, Artificial Sequence
  Description of Artificial Sequence: Synthetic oligonucleotide
gcacaacuguuuauuucgg

SEQ ID NO: 2002233 - RNA, 19 nt, Artificial Sequence
  Description of Artificial Sequence: Synthetic oligonucleotide
gagagcacaacuguuuauu

SEQ ID NO: 2002234 - RNA, 19 nt, Artificial Sequence
  Description of Artificial Sequence: Synthetic oligonucleotide
gcaauggggacugcuauca

SEQ ID NO: 2002235 - RNA, 19 nt, Artificial Sequence
  Description of Artificial Sequence: Synthetic oligonucleotide
ccuucaaggguucaguuua

SEQ ID NO: 2002236 - RNA, 19 nt, Artificial Sequence
  Description of Artificial Sequence: Synthetic oligonucleotide
cauucgcaaagccaacaua

SEQ ID NO: 2002237 - RNA, 19 nt, Artificial Sequence
  Description of Artificial Sequence: Synthetic oligonucleotide
gguucaguuuacaguucag

SEQ ID NO: 2002238 - RNA, 19 nt, Artificial Sequence
  Description of Artificial Sequence: Synthetic oligonucleotide
cagccaugagugaguggag

SEQ ID NO: 2002239 - RNA, 19 nt, Artificial Sequence
  Description of Artificial Sequence: Synthetic oligonucleotide
cuguguaguuuucgguaca

SEQ ID NO: 2002240 - RNA, 19 nt, Artificial Sequence
  Description of Artificial Sequence: Synthetic oligonucleotide
ggaaagugugugcagaguu

SEQ ID NO: 2002241 - RNA, 19 nt, Artificial Sequence
  Description of Artificial Sequence: Synthetic oligonucleotide
ccuucagaagaaauaccca

SEQ ID NO: 2002242 - RNA, 19 nt, Artificial Sequence
  Description of Artificial Sequence: Synthetic oligonucleotide
cacauguaacccguugcca

SEQ ID NO: 2002243 - RNA, 19 nt, Artificial Sequence
  Description of Artificial Sequence: Synthetic oligonucleotide
cagcucagacuuacacaug

SEQ ID NO: 2002244 - RNA, 19 nt, Artificial Sequence
  Description of Artificial Sequence: Synthetic oligonucleotide
gggauacaaagagcccugg

SEQ ID NO: 2002245 - RNA, 19 nt, Artificial Sequence
  Description of Artificial Sequence: Synthetic oligonucleotide
agaggucauuuggucucuc

SEQ ID NO: 2002246 - RNA, 19 nt, Artificial Sequence
  Description of Artificial Sequence: Synthetic oligonucleotide
gcauucagcucagacuuac

SEQ ID NO: 2002247 - RNA, 19 nt, Artificial Sequence
  Description of Artificial Sequence: Synthetic oligonucleotide
cacuucggagcauucgcaa

SEQ ID NO: 2002248 - RNA, 19 nt, Artificial Sequence
  Description of Artificial Sequence: Synthetic oligonucleotide
acccguugccacacagugg

SEQ ID NO: 2002249 - RNA, 19 nt, Artificial Sequence
  Description of Artificial Sequence: Synthetic oligonucleotide
aguuuacaguucagauaug

SEQ ID NO: 2002250 - RNA, 19 nt, Artificial Sequence
  Description of Artificial Sequence: Synthetic oligonucleotide
acuaagcgaguuaguuugu

SEQ ID NO: 2002251 - RNA, 19 nt, Artificial Sequence
  Description of Artificial Sequence: Synthetic oligonucleotide
ucguggcucccugggauac

SEQ ID NO: 2002252 - RNA, 19 nt, Artificial Sequence
  Description of Artificial Sequence: Synthetic oligonucleotide
uguugccgcugauccugca

SEQ ID NO: 2002253 - RNA, 19 nt, Artificial Sequence
  Description of Artificial Sequence: Synthetic oligonucleotide
accccagugcacgagggaa

SEQ ID NO: 2002254 - RNA, 19 nt, Artificial Sequence
  Description of Artificial Sequence: Synthetic oligonucleotide
cauucagcucagacuuaca

SEQ ID NO: 2002255 - RNA, 19 nt, Artificial Sequence
  Description of Artificial Sequence: Synthetic oligonucleotide
gagcauucgcaaagccaac

SEQ ID NO: 2002256 - RNA, 19 nt, Artificial Sequence
  Description of Artificial Sequence: Synthetic oligonucleotide
ggcaccaugcacuccaagu

SEQ ID NO: 2002257 - RNA, 19 nt, Artificial Sequence
  Description of Artificial Sequence: Synthetic oligonucleotide
ggggccagagugguuuugg

SEQ ID NO: 2002258 - RNA, 19 nt, Artificial Sequence
  Description of Artificial Sequence: Synthetic oligonucleotide
gauccugcagucucuuguu

SEQ ID NO: 2002259 - RNA, 19 nt, Artificial Sequence
  Description of Artificial Sequence: Synthetic oligonucleotide
gcaaacgagagagcaucug

SEQ ID NO: 2002260 - RNA, 19 nt, Artificial Sequence
  Description of Artificial Sequence: Synthetic oligonucleotide
caugagugaguggagaauu

SEQ ID NO: 2002261 - RNA, 19 nt, Artificial Sequence
  Description of Artificial Sequence: Synthetic oligonucleotide
caagcagccaugagugagu

SEQ ID NO: 2002262 - RNA, 19 nt, Artificial Sequence
  Description of Artificial Sequence: Synthetic oligonucleotide
agugcacgagggaaaggau

SEQ ID NO: 2002263 - RNA, 19 nt, Artificial Sequence
  Description of Artificial Sequence: Synthetic oligonucleotide
uccugcccacugacgggca

SEQ ID NO: 2002264 - RNA, 19 nt, Artificial Sequence
  Description of Artificial Sequence: Synthetic oligonucleotide
uugggccuguuuggcucgg

SEQ ID NO: 2002265 - RNA, 19 nt, Artificial Sequence
  Description of Artificial Sequence: Synthetic oligonucleotide
uguucucacuucggagcau

SEQ ID NO: 2002266 - RNA, 19 nt, Artificial Sequence
  Description of Artificial Sequence: Synthetic oligonucleotide
ccugcagucucuuguucuc

SEQ ID NO: 2002267 - RNA, 19 nt, Artificial Sequence
  Description of Artificial Sequence: Synthetic oligonucleotide
gccuguuuggcucggcaga

SEQ ID NO: 2002268 - RNA, 19 nt, Artificial Sequence
  Description of Artificial Sequence: Synthetic oligonucleotide
caacgugggcauggcgggg

SEQ ID NO: 2002269 - RNA, 19 nt, Artificial Sequence
  Description of Artificial Sequence: Synthetic oligonucleotide
ccgugaaagcuguagugca

SEQ ID NO: 2002270 - RNA, 19 nt, Artificial Sequence
  Description of Artificial Sequence: Synthetic oligonucleotide
caguagcaucgaaucucuc

SEQ ID NO: 2002271 - RNA, 19 nt, Artificial Sequence
  Description of Artificial Sequence: Synthetic oligonucleotide
cucggcagaugucugcugu

SEQ ID NO: 2002272 - RNA, 19 nt, Artificial Sequence
  Description of Artificial Sequence: Synthetic oligonucleotide
cauugacgccccgcgcccc

SEQ ID NO: 2002273 - RNA, 19 nt, Artificial Sequence
  Description of Artificial Sequence: Synthetic oligonucleotide
agcuggaguggcgauccau

SEQ ID NO: 2002274 - RNA, 19 nt, Artificial Sequence
  Description of Artificial Sequence: Synthetic oligonucleotide
cagauaugacucugucaua

SEQ ID NO: 2002275 - RNA, 19 nt, Artificial Sequence
  Description of Artificial Sequence: Synthetic oligonucleotide
guccaacuucgcaaccuga

SEQ ID NO: 2002276 - RNA, 19 nt, Artificial Sequence
  Description of Artificial Sequence: Synthetic oligonucleotide
gaaggccuucaaggguuca

SEQ ID NO: 2002277 - RNA, 19 nt, Artificial Sequence
  Description of Artificial Sequence: Synthetic oligonucleotide
gagggucgagaagucugga

SEQ ID NO: 2002278 - RNA, 19 nt, Artificial Sequence
  Description of Artificial Sequence: Synthetic oligonucleotide
cagagugguuuugggccug

SEQ ID NO: 2002279 - RNA, 19 nt, Artificial Sequence
  Description of Artificial Sequence: Synthetic oligonucleotide
ccauugacgccccgcgccc

SEQ ID NO: 2002280 - RNA, 19 nt, Artificial Sequence
  Description of Artificial Sequence: Synthetic oligonucleotide
cuguuuggcucggcagaug

SEQ ID NO: 2002281 - RNA, 19 nt, Artificial Sequence
  Description of Artificial Sequence: Synthetic oligonucleotide
ucggucagucguggcuccc

SEQ ID NO: 2002282 - RNA, 19 nt, Artificial Sequence
  Description of Artificial Sequence: Synthetic oligonucleotide
guguaguuuucgguacaaa

SEQ ID NO: 2002283 - RNA, 19 nt, Artificial Sequence
  Description of Artificial Sequence: Synthetic oligonucleotide
agagugguuuugggccugu

SEQ ID NO: 2002284 - RNA, 19 nt, Artificial Sequence
  Description of Artificial Sequence: Synthetic oligonucleotide
cucggccaccguaccggac

SEQ ID NO: 2002285 - RNA, 19 nt, Artificial Sequence
  Description of Artificial Sequence: Synthetic oligonucleotide
gcgaguuaguuugucucga

SEQ ID NO: 2002286 - RNA, 19 nt, Artificial Sequence
  Description of Artificial Sequence: Synthetic oligonucleotide
agcuucccaugaccacuau

SEQ ID NO: 2002287 - RNA, 19 nt, Artificial Sequence
  Description of Artificial Sequence: Synthetic oligonucleotide
ccgcugauccugcagucuc

SEQ ID NO: 2002288 - RNA, 19 nt, Artificial Sequence
  Description of Artificial Sequence: Synthetic oligonucleotide
ucgcaaccugacccuucuu

SEQ ID NO: 2002289 - RNA, 19 nt, Artificial Sequence
  Description of Artificial Sequence: Synthetic oligonucleotide
cggagcauucgcaaagcca

SEQ ID NO: 2002290 - RNA, 19 nt, Artificial Sequence
  Description of Artificial Sequence: Synthetic oligonucleotide
gucguggcucccugggaua

SEQ ID NO: 2002291 - RNA, 19 nt, Artificial Sequence
  Description of Artificial Sequence: Synthetic oligonucleotide
cgagggaaaggaucuucuc

SEQ ID NO: 2002292 - RNA, 19 nt, Artificial Sequence
  Description of Artificial Sequence: Synthetic oligonucleotide
cuuacacauguaacccguu

SEQ ID NO: 2002293 - RNA, 19 nt, Artificial Sequence
  Description of Artificial Sequence: Synthetic oligonucleotide
gcauucgcaaagccaacau

SEQ ID NO: 2002294 - RNA, 19 nt, Artificial Sequence
  Description of Artificial Sequence: Synthetic oligonucleotide
gcucggcagaugucugcug

SEQ ID NO: 2002295 - RNA, 19 nt, Artificial Sequence
  Description of Artificial Sequence: Synthetic oligonucleotide
gcaucacaguagcaucgaa

SEQ ID NO: 2002296 - RNA, 19 nt, Artificial Sequence
  Description of Artificial Sequence: Synthetic oligonucleotide
cccggcucggccaccguac

SEQ ID NO: 2002297 - RNA, 19 nt, Artificial Sequence
  Description of Artificial Sequence: Synthetic oligonucleotide
gggccuguuuggcucggca

SEQ ID NO: 2002298 - RNA, 19 nt, Artificial Sequence
  Description of Artificial Sequence: Synthetic oligonucleotide
guucucacuucggagcauu

SEQ ID NO: 2002299 - RNA, 19 nt, Artificial Sequence
  Description of Artificial Sequence: Synthetic oligonucleotide
ggcgauccauugacgcccc

SEQ ID NO: 2002300 - RNA, 19 nt, Artificial Sequence
  Description of Artificial Sequence: Synthetic oligonucleotide
cacugacgggcaccaugca

SEQ ID NO: 2002301 - RNA, 19 nt, Artificial Sequence
  Description of Artificial Sequence: Synthetic oligonucleotide
gcgauccauugacgccccg

SEQ ID NO: 2002302 - RNA, 19 nt, Artificial Sequence
  Description of Artificial Sequence: Synthetic oligonucleotide
agcaggcauucagcucaga

SEQ ID NO: 2002303 - RNA, 19 nt, Artificial Sequence
  Description of Artificial Sequence: Synthetic oligonucleotide
ccacuauacauaccccagu

SEQ ID NO: 2002304 - RNA, 19 nt, Artificial Sequence
  Description of Artificial Sequence: Synthetic oligonucleotide
gccccgucgcuccgggagc

SEQ ID NO: 2002305 - RNA, 19 nt, Artificial Sequence
  Description of Artificial Sequence: Synthetic oligonucleotide
cgccccgucgcuccgggag

SEQ ID NO: 2002306 - RNA, 19 nt, Artificial Sequence
  Description of Artificial Sequence: Synthetic oligonucleotide
cugcuaucacugacagcau

SEQ ID NO: 2002307 - RNA, 19 nt, Artificial Sequence
  Description of Artificial Sequence: Synthetic oligonucleotide
ccguugccacacagugggc

SEQ ID NO: 2002308 - RNA, 19 nt, Artificial Sequence
  Description of Artificial Sequence: Synthetic oligonucleotide
gugcagaguuccucuucuu

SEQ ID NO: 2002309 - RNA, 19 nt, Artificial Sequence
  Description of Artificial Sequence: Synthetic oligonucleotide
gcccaccagcaauggggac

SEQ ID NO: 2002310 - RNA, 19 nt, Artificial Sequence
  Description of Artificial Sequence: Synthetic oligonucleotide
ccggcucggccaccguacc

SEQ ID NO: 2002311 - RNA, 19 nt, Artificial Sequence
  Description of Artificial Sequence: Synthetic oligonucleotide
ggcucggcagaugucugcu

SEQ ID NO: 2002312 - RNA, 19 nt, Artificial Sequence
  Description of Artificial Sequence: Synthetic oligonucleotide
ccccagugcacgagggaaa

SEQ ID NO: 2002313 - RNA, 19 nt, Artificial Sequence
  Description of Artificial Sequence: Synthetic oligonucleotide
ggcauucagcucagacuua

SEQ ID NO: 2002314 - RNA, 19 nt, Artificial Sequence
  Description of Artificial Sequence: Synthetic oligonucleotide
ggcggggccagagugguuu

SEQ ID NO: 2002315 - RNA, 19 nt, Artificial Sequence
  Description of Artificial Sequence: Synthetic oligonucleotide
cggcucggccaccguaccg

SEQ ID NO: 2002316 - RNA, 19 nt, Artificial Sequence
  Description of Artificial Sequence: Synthetic oligonucleotide
ccccgucgcuccgggagcc

SEQ ID NO: 2002317 - RNA, 19 nt, Artificial Sequence
  Description of Artificial Sequence: Synthetic oligonucleotide
ggccaccguaccggacccc

SEQ ID NO: 2002318 - RNA, 19 nt, Artificial Sequence
  Description of Artificial Sequence: Synthetic oligonucleotide
gagugguuuugggccuguu

SEQ ID NO: 2002319 - RNA, 19 nt, Artificial Sequence
  Description of Artificial Sequence: Synthetic oligonucleotide
ccuguuuggcucggcagau

SEQ ID NO: 2002320 - RNA, 19 nt, Artificial Sequence
  Description of Artificial Sequence: Synthetic oligonucleotide
cgaguuaguuugucucgau

SEQ ID NO: 2002321 - RNA, 19 nt, Artificial Sequence
  Description of Artificial Sequence: Synthetic oligonucleotide
ccgucgcuccgggagccca

SEQ ID NO: 2002322 - RNA, 19 nt, Artificial Sequence
  Description of Artificial Sequence: Synthetic oligonucleotide
gcacgagggaaaggaucuu

SEQ ID NO: 2002323 - RNA, 19 nt, Artificial Sequence
  Description of Artificial Sequence: Synthetic oligonucleotide
ccccggcucggccaccgua

SEQ ID NO: 2002324 - RNA, 19 nt, Artificial Sequence
  Description of Artificial Sequence: Synthetic oligonucleotide
gcggggccagagugguuuu

SEQ ID NO: 2002325 - RNA, 19 nt, Artificial Sequence
  Description of Artificial Sequence: Synthetic oligonucleotide
gcgccccgucgcuccggga

SEQ ID NO: 2002326 - RNA, 19 nt, Artificial Sequence
  Description of Artificial Sequence: Synthetic oligonucleotide
cgugggcauggcggggcca

SEQ ID NO: 2002327 - RNA, 19 nt, Artificial Sequence
  Description of Artificial Sequence: Synthetic oligonucleotide
cggucagucguggcucccu

SEQ ID NO: 2002328 - RNA, 19 nt, Artificial Sequence
  Description of Artificial Sequence: Synthetic oligonucleotide
aauguuucauaguacaugg

SEQ ID NO: 2002329 - RNA, 19 nt, Artificial Sequence
  Description of Artificial Sequence: Synthetic oligonucleotide
aauauugucccggacaucc

SEQ ID NO: 2002330 - RNA, 19 nt, Artificial Sequence
  Description of Artificial Sequence: Synthetic oligonucleotide
aauaguaucaggcaugaca

SEQ ID NO: 2002331 - RNA, 19 nt, Artificial Sequence
  Description of Artificial Sequence: Synthetic oligonucleotide
auaucaagaauucugauga

SEQ ID NO: 2002332 - RNA, 19 nt, Artificial Sequence
  Description of Artificial Sequence: Synthetic oligonucleotide
aaugcagccaaacaccacg

SEQ ID NO: 2002333 - RNA, 19 nt, Artificial Sequence
  Description of Artificial Sequence: Synthetic oligonucleotide
uguauuaucuuuauugucu

SEQ ID NO: 2002334 - RNA, 19 nt, Artificial Sequence
  Description of Artificial Sequence: Synthetic oligonucleotide
uugaauaggguaaucauug

SEQ ID NO: 2002335 - RNA, 19 nt, Artificial Sequence
  Description of Artificial Sequence: Synthetic oligonucleotide
uuuauaucaagaauucuga

SEQ ID NO: 2002336 - RNA, 19 nt, Artificial Sequence
  Description of Artificial Sequence: Synthetic oligonucleotide
aauggugaaauuuggguug

SEQ ID NO: 2002337 - RNA, 19 nt, Artificial Sequence
  Description of Artificial Sequence: Synthetic oligonucleotide
uaaaauuggcaguagguag

SEQ ID NO: 2002338 - RNA, 19 nt, Artificial Sequence
  Description of Artificial Sequence: Synthetic oligonucleotide
agcgugaucauuuauauca

SEQ ID NO: 2002339 - RNA, 19 nt, Artificial Sequence
  Description of Artificial Sequence: Synthetic oligonucleotide
gacucuaaggagcugagcg

SEQ ID NO: 2002340 - RNA, 19 nt, Artificial Sequence
  Description of Artificial Sequence: Synthetic oligonucleotide
guaaaauuagcgaugagag

SEQ ID NO: 2002341 - RNA, 19 nt, Artificial Sequence
  Description of Artificial Sequence: Synthetic oligonucleotide
uuauugucuacaaugguga

SEQ ID NO: 2002342 - RNA, 19 nt, Artificial Sequence
  Description of Artificial Sequence: Synthetic oligonucleotide
uauaucaagaauucugaug

SEQ ID NO: 2002343 - RNA, 19 nt, Artificial Sequence
  Description of Artificial Sequence: Synthetic oligonucleotide
aaaugauuagaggucuucc

SEQ ID NO: 2002344 - RNA, 19 nt, Artificial Sequence
  Description of Artificial Sequence: Synthetic oligonucleotide
agucauacaggacucauuc

SEQ ID NO: 2002345 - RNA, 19 nt, Artificial Sequence
  Description of Artificial Sequence: Synthetic oligonucleotide
ucauacaggacucauuccc

SEQ ID NO: 2002346 - RNA, 19 nt, Artificial Sequence
  Description of Artificial Sequence: Synthetic oligonucleotide
uuuccacuaacguugauca

SEQ ID NO: 2002347 - RNA, 19 nt, Artificial Sequence
  Description of Artificial Sequence: Synthetic oligonucleotide
uucuuuuaaucuccggugg

SEQ ID NO: 2002348 - RNA, 19 nt, Artificial Sequence
  Description of Artificial Sequence: Synthetic oligonucleotide
aauaguacaggccacucaa

SEQ ID NO: 2002349 - RNA, 19 nt, Artificial Sequence
  Description of Artificial Sequence: Synthetic oligonucleotide
acaaaguaaaauuagcgau

SEQ ID NO: 2002350 - RNA, 19 nt, Artificial Sequence
  Description of Artificial Sequence: Synthetic oligonucleotide
aagaguauuuccacuaacg

SEQ ID NO: 2002351 - RNA, 19 nt, Artificial Sequence
  Description of Artificial Sequence: Synthetic oligonucleotide
aaauguuucauaguacaug

SEQ ID NO: 2002352 - RNA, 19 nt, Artificial Sequence
  Description of Artificial Sequence: Synthetic oligonucleotide
aucauuauaggucacaaua

SEQ ID NO: 2002353 - RNA, 19 nt, Artificial Sequence
  Description of Artificial Sequence: Synthetic oligonucleotide
aaaauuggcaguagguagg

SEQ ID NO: 2002354 - RNA, 19 nt, Artificial Sequence
  Description of Artificial Sequence: Synthetic oligonucleotide
guaaucauaaucuugguua

SEQ ID NO: 2002355 - RNA, 19 nt, Artificial Sequence
  Description of Artificial Sequence: Synthetic oligonucleotide
cuuauguauuguuugguag

SEQ ID NO: 2002356 - RNA, 19 nt, Artificial Sequence
  Description of Artificial Sequence: Synthetic oligonucleotide
agaauucugaugaagacag

SEQ ID NO: 2002357 - RNA, 19 nt, Artificial Sequence
  Description of Artificial Sequence: Synthetic oligonucleotide
uguauuguuugguaguuga

SEQ ID NO: 2002358 - RNA, 19 nt, Artificial Sequence
  Description of Artificial Sequence: Synthetic oligonucleotide
aaugauuagaggucuuccu

SEQ ID NO: 2002359 - RNA, 19 nt, Artificial Sequence
  Description of Artificial Sequence: Synthetic oligonucleotide
aguaaaauuagcgaugaga

SEQ ID NO: 2002360 - RNA, 19 nt, Artificial Sequence
  Description of Artificial Sequence: Synthetic oligonucleotide
ugagaggaaauucuggcac

SEQ ID NO: 2002361 - RNA, 19 nt, Artificial Sequence
  Description of Artificial Sequence: Synthetic oligonucleotide
cuucauaggcauaaguggc

SEQ ID NO: 2002362 - RNA, 19 nt, Artificial Sequence
  Description of Artificial Sequence: Synthetic oligonucleotide
gaaucauucccuucauagg

SEQ ID NO: 2002363 - RNA, 19 nt, Artificial Sequence
  Description of Artificial Sequence: Synthetic oligonucleotide
ucuccgguggauaaaaucu

SEQ ID NO: 2002364 - RNA, 19 nt, Artificial Sequence
  Description of Artificial Sequence: Synthetic oligonucleotide
auaggucacaauauugucc

SEQ ID NO: 2002365 - RNA, 19 nt, Artificial Sequence
  Description of Artificial Sequence: Synthetic oligonucleotide
aacaaauguuucauaguac

SEQ ID NO: 2002366 - RNA, 19 nt, Artificial Sequence
  Description of Artificial Sequence: Synthetic oligonucleotide
aauucugaugaagacagga

SEQ ID NO: 2002367 - RNA, 19 nt, Artificial Sequence
  Description of Artificial Sequence: Synthetic oligonucleotide
caaaguaaaauuagcgaug

SEQ ID NO: 2002368 - RNA, 19 nt, Artificial Sequence
  Description of Artificial Sequence: Synthetic oligonucleotide
ucuuuucgaguuaugauuc

SEQ ID NO: 2002369 - RNA, 19 nt, Artificial Sequence
  Description of Artificial Sequence: Synthetic oligonucleotide
acuaacguugaucaaguca

SEQ ID NO: 2002370 - RNA, 19 nt, Artificial Sequence
  Description of Artificial Sequence: Synthetic oligonucleotide
acaauggugaaauuugggu

SEQ ID NO: 2002371 - RNA, 19 nt, Artificial Sequence
  Description of Artificial Sequence: Synthetic oligonucleotide
guggauaaaaucuuguaca

SEQ ID NO: 2002372 - RNA, 19 nt, Artificial Sequence
  Description of Artificial Sequence: Synthetic oligonucleotide
aucucuucuaaguuuacug

SEQ ID NO: 2002373 - RNA, 19 nt, Artificial Sequence
  Description of Artificial Sequence: Synthetic oligonucleotide
uuauguauuguuugguagu

SEQ ID NO: 2002374 - RNA, 19 nt, Artificial Sequence
  Description of Artificial Sequence: Synthetic oligonucleotide
uccagaaaaggaauaguac

SEQ ID NO: 2002375 - RNA, 19 nt, Artificial Sequence
  Description of Artificial Sequence: Synthetic oligonucleotide
guugagaggaaauucuggc

SEQ ID NO: 2002376 - RNA, 19 nt, Artificial Sequence
  Description of Artificial Sequence: Synthetic oligonucleotide
agaacuuguguccucuggg

SEQ ID NO: 2002377 - RNA, 19 nt, Artificial Sequence
  Description of Artificial Sequence: Synthetic oligonucleotide
aauuagcgaugagagcucc

SEQ ID NO: 2002378 - RNA, 19 nt, Artificial Sequence
  Description of Artificial Sequence: Synthetic oligonucleotide
aaucuugguuacaaucagc

SEQ ID NO: 2002379 - RNA, 19 nt, Artificial Sequence
  Description of Artificial Sequence: Synthetic oligonucleotide
uaucacaugcacacacacg

SEQ ID NO: 2002380 - RNA, 19 nt, Artificial Sequence
  Description of Artificial Sequence: Synthetic oligonucleotide
uuugaauaggguaaucauu

SEQ ID NO: 2002381 - RNA, 19 nt, Artificial Sequence
  Description of Artificial Sequence: Synthetic oligonucleotide
aaaauaguaucaggcauga

SEQ ID NO: 2002382 - RNA, 19 nt, Artificial Sequence
  Description of Artificial Sequence: Synthetic oligonucleotide
uccacuaacguugaucaag

SEQ ID NO: 2002383 - RNA, 19 nt, Artificial Sequence
  Description of Artificial Sequence: Synthetic oligonucleotide
uuaucacaugcacacacac

SEQ ID NO: 2002384 - RNA, 19 nt, Artificial Sequence
  Description of Artificial Sequence: Synthetic oligonucleotide
uuucguugccucuucaaug

SEQ ID NO: 2002385 - RNA, 19 nt, Artificial Sequence
  Description of Artificial Sequence: Synthetic oligonucleotide
gagucauuuucuuuuaauc

SEQ ID NO: 2002386 - RNA, 19 nt, Artificial Sequence
  Description of Artificial Sequence: Synthetic oligonucleotide
ucugguaucaaagaguauu

SEQ ID NO: 2002387 - RNA, 19 nt, Artificial Sequence
  Description of Artificial Sequence: Synthetic oligonucleotide
uuuacugucuucucuugcu

SEQ ID NO: 2002388 - RNA, 19 nt, Artificial Sequence
  Description of Artificial Sequence: Synthetic oligonucleotide
agaguauuuccacuaacgu

SEQ ID NO: 2002389 - RNA, 19 nt, Artificial Sequence
  Description of Artificial Sequence: Synthetic oligonucleotide
uucguugccucuucaaugc

SEQ ID NO: 2002390 - RNA, 19 nt, Artificial Sequence
  Description of Artificial Sequence: Synthetic oligonucleotide
auuuccacuaacguugauc

SEQ ID NO: 2002391 - RNA, 19 nt, Artificial Sequence
  Description of Artificial Sequence: Synthetic oligonucleotide
gacacaaaguaaaauuagc

SEQ ID NO: 2002392 - RNA, 19 nt, Artificial Sequence
  Description of Artificial Sequence: Synthetic oligonucleotide
acuaauuguuugaauuagc

SEQ ID NO: 2002393 - RNA, 19 nt, Artificial Sequence
  Description of Artificial Sequence: Synthetic oligonucleotide
uucugaugaagacaggaau

SEQ ID NO: 2002394 - RNA, 19 nt, Artificial Sequence
  Description of Artificial Sequence: Synthetic oligonucleotide
cuacaauggugaaauuugg

SEQ ID NO: 2002395 - RNA, 19 nt, Artificial Sequence
  Description of Artificial Sequence: Synthetic oligonucleotide
auuauaggucacaauauug

SEQ ID NO: 2002396 - RNA, 19 nt, Artificial Sequence
  Description of Artificial Sequence: Synthetic oligonucleotide
guuugaauuagcugcccag

SEQ ID NO: 2002397 - RNA, 19 nt, Artificial Sequence
  Description of Artificial Sequence: Synthetic oligonucleotide
guugauuuuaaaacuuacc

SEQ ID NO: 2002398 - RNA, 19 nt, Artificial Sequence
  Description of Artificial Sequence: Synthetic oligonucleotide
uuucgaguuaugauuccug

SEQ ID NO: 2002399 - RNA, 19 nt, Artificial Sequence
  Description of Artificial Sequence: Synthetic oligonucleotide
auaaucuugguuacaauca

SEQ ID NO: 2002400 - RNA, 19 nt, Artificial Sequence
  Description of Artificial Sequence: Synthetic oligonucleotide
auuggcuacggaaucauuc

SEQ ID NO: 2002401 - RNA, 19 nt, Artificial Sequence
  Description of Artificial Sequence: Synthetic oligonucleotide
uucgaguuaugauuccugc

SEQ ID NO: 2002402 - RNA, 19 nt, Artificial Sequence
  Description of Artificial Sequence: Synthetic oligonucleotide
agcugagcgaauuggcuac

SEQ ID NO: 2002403 - RNA, 19 nt, Artificial Sequence
  Description of Artificial Sequence: Synthetic oligonucleotide
uugaaaugauuagaggucu

SEQ ID NO: 2002404 - RNA, 19 nt, Artificial Sequence
  Description of Artificial Sequence: Synthetic oligonucleotide
uaaaacuuaccuccagaaa

SEQ ID NO: 2002405 - RNA, 19 nt, Artificial Sequence
  Description of Artificial Sequence: Synthetic oligonucleotide
uuagcugcccagauuuugc

SEQ ID NO: 2002406 - RNA, 19 nt, Artificial Sequence
  Description of Artificial Sequence: Synthetic oligonucleotide
uuggcuacggaaucauucc

SEQ ID NO: 2002407 - RNA, 19 nt, Artificial Sequence
  Description of Artificial Sequence: Synthetic oligonucleotide
gaugacacaaaguaaaauu

SEQ ID NO: 2002408 - RNA, 19 nt, Artificial Sequence
  Description of Artificial Sequence: Synthetic oligonucleotide
aguaucaggcaugacaucu

SEQ ID NO: 2002409 - RNA, 19 nt, Artificial Sequence
  Description of Artificial Sequence: Synthetic oligonucleotide
aucuccgguggauaaaauc

SEQ ID NO: 2002410 - RNA, 19 nt, Artificial Sequence
  Description of Artificial Sequence: Synthetic oligonucleotide
uauaggucacaauauuguc

SEQ ID NO: 2002411 - RNA, 19 nt, Artificial Sequence
  Description of Artificial Sequence: Synthetic oligonucleotide
uucuuaaagugccaauguc

SEQ ID NO: 2002412 - RNA, 19 nt, Artificial Sequence
  Description of Artificial Sequence: Synthetic oligonucleotide
ugagagacucuaaggagcu

SEQ ID NO: 2002413 - RNA, 19 nt, Artificial Sequence
  Description of Artificial Sequence: Synthetic oligonucleotide
ugcacuuggaucugaguca

SEQ ID NO: 2002414 - RNA, 19 nt, Artificial Sequence
  Description of Artificial Sequence: Synthetic oligonucleotide
uguuugaauuagcugccca

SEQ ID NO: 2002415 - RNA, 19 nt, Artificial Sequence
  Description of Artificial Sequence: Synthetic oligonucleotide
ucuuuuaaucuccggugga

SEQ ID NO: 2002416 - RNA, 19 nt, Artificial Sequence
  Description of Artificial Sequence: Synthetic oligonucleotide
auaggguaaucauuguaca

SEQ ID NO: 2002417 - RNA, 19 nt, Artificial Sequence
  Description of Artificial Sequence: Synthetic oligonucleotide
aguauuaaaauuggcagua

SEQ ID NO: 2002418 - RNA, 19 nt, Artificial Sequence
  Description of Artificial Sequence: Synthetic oligonucleotide
uacauaucugcgaaguuuu

SEQ ID NO: 2002419 - RNA, 19 nt, Artificial Sequence
  Description of Artificial Sequence: Synthetic oligonucleotide
uugagaggaaauucuggca

SEQ ID NO: 2002420 - RNA, 19 nt, Artificial Sequence
  Description of Artificial Sequence: Synthetic oligonucleotide
ucccuugguuaucacaugc

SEQ ID NO: 2002421 - RNA, 19 nt, Artificial Sequence
  Description of Artificial Sequence: Synthetic oligonucleotide
aacuuaccuccagaaaagg

SEQ ID NO: 2002422 - RNA, 19 nt, Artificial Sequence
  Description of Artificial Sequence: Synthetic oligonucleotide
uccggguuucuuaaagugc

SEQ ID NO: 2002423 - RNA, 19 nt, Artificial Sequence
  Description of Artificial Sequence: Synthetic oligonucleotide
aaauuagcgaugagagcuc

SEQ ID NO: 2002424 - RNA, 19 nt, Artificial Sequence
  Description of Artificial Sequence: Synthetic oligonucleotide
aguacaggccacucaaucu

SEQ ID NO: 2002425 - RNA, 19 nt, Artificial Sequence
  Description of Artificial Sequence: Synthetic oligonucleotide
uagguagguguucauuuug

SEQ ID NO: 2002426 - RNA, 19 nt, Artificial Sequence
  Description of Artificial Sequence: Synthetic oligonucleotide
gguggauaaaaucuuguac

SEQ ID NO: 2002427 - RNA, 19 nt, Artificial Sequence
  Description of Artificial Sequence: Synthetic oligonucleotide
uuuuggugcggcuguaccc

SEQ ID NO: 2002428 - RNA, 19 nt, Artificial Sequence
  Description of Artificial Sequence: Synthetic oligonucleotide
agagugagcaggaugauga

SEQ ID NO: 2002429 - RNA, 19 nt, Artificial Sequence
  Description of Artificial Sequence: Synthetic oligonucleotide
guagguguucauuuuggug

SEQ ID NO: 2002430 - RNA, 19 nt, Artificial Sequence
  Description of Artificial Sequence: Synthetic oligonucleotide
aacaccacgauuagaguga

SEQ ID NO: 2002431 - RNA, 19 nt, Artificial Sequence
  Description of Artificial Sequence: Synthetic oligonucleotide
uuugaauuagcugcccaga

SEQ ID NO: 2002432 - RNA, 19 nt, Artificial Sequence
  Description of Artificial Sequence: Synthetic oligonucleotide
gacucauucccugucacug

SEQ ID NO: 2002433 - RNA, 19 nt, Artificial Sequence
  Description of Artificial Sequence: Synthetic oligonucleotide
uuaccuccagaaaaggaau

SEQ ID NO: 2002434 - RNA, 19 nt, Artificial Sequence
  Description of Artificial Sequence: Synthetic oligonucleotide
uuugguaguugauuuuaaa

SEQ ID NO: 2002435 - RNA, 19 nt, Artificial Sequence
  Description of Artificial Sequence: Synthetic oligonucleotide
acucaaucugguaucaaag

SEQ ID NO: 2002436 - RNA, 19 nt, Artificial Sequence
  Description of Artificial Sequence: Synthetic oligonucleotide
uguccaugacacuaauugu

SEQ ID NO: 2002437 - RNA, 19 nt, Artificial Sequence
  Description of Artificial Sequence: Synthetic oligonucleotide
cacacacggaucgugagcg

SEQ ID NO: 2002438 - RNA, 19 nt, Artificial Sequence
  Description of Artificial Sequence: Synthetic oligonucleotide
cuguauuaucuuuauuguc

SEQ ID NO: 2002439 - RNA, 19 nt, Artificial Sequence
  Description of Artificial Sequence: Synthetic oligonucleotide
guacaggccacucaaucug

SEQ ID NO: 2002440 - RNA, 19 nt, Artificial Sequence
  Description of Artificial Sequence: Synthetic oligonucleotide
cacuaauuguuugaauuag

SEQ ID NO: 2002441 - RNA, 19 nt, Artificial Sequence
  Description of Artificial Sequence: Synthetic oligonucleotide
uaguacaggccacucaauc

SEQ ID NO: 2002442 - RNA, 19 nt, Artificial Sequence
  Description of Artificial Sequence: Synthetic oligonucleotide
uuaugauuccugcuguauu

SEQ ID NO: 2002443 - RNA, 19 nt, Artificial Sequence
  Description of Artificial Sequence: Synthetic oligonucleotide
aucgugagcgugccagugc

SEQ ID NO: 2002444 - RNA, 19 nt, Artificial Sequence
  Description of Artificial Sequence: Synthetic oligonucleotide
ugauuagaggucuuccuuu

SEQ ID NO: 2002445 - RNA, 19 nt, Artificial Sequence
  Description of Artificial Sequence: Synthetic oligonucleotide
aggacucauucccugucac

SEQ ID NO: 2002446 - RNA, 19 nt, Artificial Sequence
  Description of Artificial Sequence: Synthetic oligonucleotide
ucuugguuacaaucagcug

SEQ ID NO: 2002447 - RNA, 19 nt, Artificial Sequence
  Description of Artificial Sequence: Synthetic oligonucleotide
cuaacguugaucaagucau

SEQ ID NO: 2002448 - RNA, 19 nt, Artificial Sequence
  Description of Artificial Sequence: Synthetic oligonucleotide
gguuaucacaugcacacac

SEQ ID NO: 2002449 - RNA, 19 nt, Artificial Sequence
  Description of Artificial Sequence: Synthetic oligonucleotide
cacaauauugucccggaca

SEQ ID NO: 2002450 - RNA, 19 nt, Artificial Sequence
  Description of Artificial Sequence: Synthetic oligonucleotide
uugaauuagcugcccagau

SEQ ID NO: 2002451 - RNA, 19 nt, Artificial Sequence
  Description of Artificial Sequence: Synthetic oligonucleotide
gcugugagagacucuaagg

SEQ ID NO: 2002452 - RNA, 19 nt, Artificial Sequence
  Description of Artificial Sequence: Synthetic oligonucleotide
cagauuuugcauuuucaca

SEQ ID NO: 2002453 - RNA, 19 nt, Artificial Sequence
  Description of Artificial Sequence: Synthetic oligonucleotide
uccauacauaucugcgaag

SEQ ID NO: 2002454 - RNA, 19 nt, Artificial Sequence
  Description of Artificial Sequence: Synthetic oligonucleotide
uuagcgaugagagcuccug

SEQ ID NO: 2002455 - RNA, 19 nt, Artificial Sequence
  Description of Artificial Sequence: Synthetic oligonucleotide
ugaauaggguaaucauugu

SEQ ID NO: 2002456 - RNA, 19 nt, Artificial Sequence
  Description of Artificial Sequence: Synthetic oligonucleotide
uccaugacacuaauuguuu

SEQ ID NO: 2002457 - RNA, 19 nt, Artificial Sequence
  Description of Artificial Sequence: Synthetic oligonucleotide
gugaucauuuauaucaaga

SEQ ID NO: 2002458 - RNA, 19 nt, Artificial Sequence
  Description of Artificial Sequence: Synthetic oligonucleotide
gaaaugauuagaggucuuc

SEQ ID NO: 2002459 - RNA, 19 nt, Artificial Sequence
  Description of Artificial Sequence: Synthetic oligonucleotide
uugucccggacauccaucc

SEQ ID NO: 2002460 - RNA, 19 nt, Artificial Sequence
  Description of Artificial Sequence: Synthetic oligonucleotide
aaauaguaucaggcaugac

SEQ ID NO: 2002461 - RNA, 19 nt, Artificial Sequence
  Description of Artificial Sequence: Synthetic oligonucleotide
aaagggguacaguccuucu

SEQ ID NO: 2002462 - RNA, 19 nt, Artificial Sequence
  Description of Artificial Sequence: Synthetic oligonucleotide
caugacacuaauuguuuga

SEQ ID NO: 2002463 - RNA, 19 nt, Artificial Sequence
  Description of Artificial Sequence: Synthetic oligonucleotide
uguuugguaguugauuuua

SEQ ID NO: 2002464 - RNA, 19 nt, Artificial Sequence
  Description of Artificial Sequence: Synthetic oligonucleotide
gaauaguacaggccacuca

SEQ ID NO: 2002465 - RNA, 19 nt, Artificial Sequence
  Description of Artificial Sequence: Synthetic oligonucleotide
aaauuggcaguagguaggu

SEQ ID NO: 2002466 - RNA, 19 nt, Artificial Sequence
  Description of Artificial Sequence: Synthetic oligonucleotide
augauuagaggucuuccuu

SEQ ID NO: 2002467 - RNA, 19 nt, Artificial Sequence
  Description of Artificial Sequence: Synthetic oligonucleotide
agcgaugagagcuccugug

SEQ ID NO: 2002468 - RNA, 19 nt, Artificial Sequence
  Description of Artificial Sequence: Synthetic oligonucleotide
ugacaucucuucuaaguuu

SEQ ID NO: 2002469 - RNA, 19 nt, Artificial Sequence
  Description of Artificial Sequence: Synthetic oligonucleotide
uaggguaaucauuguacaa

SEQ ID NO: 2002470 - RNA, 19 nt, Artificial Sequence
  Description of Artificial Sequence: Synthetic oligonucleotide
auacauaucugcgaaguuu

SEQ ID NO: 2002471 - RNA, 19 nt, Artificial Sequence
  Description of Artificial Sequence: Synthetic oligonucleotide
ucgaguuaugauuccugcu

SEQ ID NO: 2002472 - RNA, 19 nt, Artificial Sequence
  Description of Artificial Sequence: Synthetic oligonucleotide
ugaugacacaaaguaaaau

SEQ ID NO: 2002473 - RNA, 19 nt, Artificial Sequence
  Description of Artificial Sequence: Synthetic oligonucleotide
acguugaucaagucauaca

SEQ ID NO: 2002474 - RNA, 19 nt, Artificial Sequence
  Description of Artificial Sequence: Synthetic oligonucleotide
gucgcuaagguaaucauaa

SEQ ID NO: 2002475 - RNA, 19 nt, Artificial Sequence
  Description of Artificial Sequence: Synthetic oligonucleotide
uggcuacggaaucauuccc

SEQ ID NO: 2002476 - RNA, 19 nt, Artificial Sequence
  Description of Artificial Sequence: Synthetic oligonucleotide
acucuaaggagcugagcga

SEQ ID NO: 2002477 - RNA, 19 nt, Artificial Sequence
  Description of Artificial Sequence: Synthetic oligonucleotide
uuggguugagaggaaauuc

SEQ ID NO: 2002478 - RNA, 19 nt, Artificial Sequence
  Description of Artificial Sequence: Synthetic oligonucleotide
cucaaucugguaucaaaga

SEQ ID NO: 2002479 - RNA, 19 nt, Artificial Sequence
  Description of Artificial Sequence: Synthetic oligonucleotide
uaaguggccagggagucgu

SEQ ID NO: 2002480 - RNA, 19 nt, Artificial Sequence
  Description of Artificial Sequence: Synthetic oligonucleotide
uuuuguccaugacacuaau

SEQ ID NO: 2002481 - RNA, 19 nt, Artificial Sequence
  Description of Artificial Sequence: Synthetic oligonucleotide
uauugucccggacauccau

SEQ ID NO: 2002482 - RNA, 19 nt, Artificial Sequence
  Description of Artificial Sequence: Synthetic oligonucleotide
uauguauuguuugguaguu

SEQ ID NO: 2002483 - RNA, 19 nt, Artificial Sequence
  Description of Artificial Sequence: Synthetic oligonucleotide
gagcgaauuggcuacggaa

SEQ ID NO: 2002484 - RNA, 19 nt, Artificial Sequence
  Description of Artificial Sequence: Synthetic oligonucleotide
uguacccaucuuuucgagu

SEQ ID NO: 2002485 - RNA, 19 nt, Artificial Sequence
  Description of Artificial Sequence: Synthetic oligonucleotide
caugacaucucuucuaagu

SEQ ID NO: 2002486 - RNA, 19 nt, Artificial Sequence
  Description of Artificial Sequence: Synthetic oligonucleotide
ugagcgaauuggcuacgga

SEQ ID NO: 2002487 - RNA, 19 nt, Artificial Sequence
  Description of Artificial Sequence: Synthetic oligonucleotide
ucgugagcgugccagugcu

SEQ ID NO: 2002488 - RNA, 19 nt, Artificial Sequence
  Description of Artificial Sequence: Synthetic oligonucleotide
uaaucuccgguggauaaaa

SEQ ID NO: 2002489 - RNA, 19 nt, Artificial Sequence
  Description of Artificial Sequence: Synthetic oligonucleotide
gucauacaggacucauucc

SEQ ID NO: 2002490 - RNA, 19 nt, Artificial Sequence
  Description of Artificial Sequence: Synthetic oligonucleotide
aggccacucaaucugguau

SEQ ID NO: 2002491 - RNA, 19 nt, Artificial Sequence
  Description of Artificial Sequence: Synthetic oligonucleotide
ucacaauauugucccggac

SEQ ID NO: 2002492 - RNA, 19 nt, Artificial Sequence
  Description of Artificial Sequence: Synthetic oligonucleotide
aauucuggcacuggcucaa

SEQ ID NO: 2002493 - RNA, 19 nt, Artificial Sequence
  Description of Artificial Sequence: Synthetic oligonucleotide
aagcaucagggccucugca

SEQ ID NO: 2002494 - RNA, 19 nt, Artificial Sequence
  Description of Artificial Sequence: Synthetic oligonucleotide
uguucauuuuggugcggcu

SEQ ID NO: 2002495 - RNA, 19 nt, Artificial Sequence
  Description of Artificial Sequence: Synthetic oligonucleotide
ggucacaauauugucccgg

SEQ ID NO: 2002496 - RNA, 19 nt, Artificial Sequence
  Description of Artificial Sequence: Synthetic oligonucleotide
guuucauaguacauggcaa

SEQ ID NO: 2002497 - RNA, 19 nt, Artificial Sequence
  Description of Artificial Sequence: Synthetic oligonucleotide
gcuaagguaaucauaaucu

SEQ ID NO: 2002498 - RNA, 19 nt, Artificial Sequence
  Description of Artificial Sequence: Synthetic oligonucleotide
aggacugcauguucccuug

SEQ ID NO: 2002499 - RNA, 19 nt, Artificial Sequence
  Description of Artificial Sequence: Synthetic oligonucleotide
uaucaagaauucugaugaa

SEQ ID NO: 2002500 - RNA, 19 nt, Artificial Sequence
  Description of Artificial Sequence: Synthetic oligonucleotide
ucauucccuucauaggcau

SEQ ID NO: 2002501 - RNA, 19 nt, Artificial Sequence
  Description of Artificial Sequence: Synthetic oligonucleotide
gauuccugcuguauuaucu

SEQ ID NO: 2002502 - RNA, 19 nt, Artificial Sequence
  Description of Artificial Sequence: Synthetic oligonucleotide
ugaaaugauuagaggucuu

SEQ ID NO: 2002503 - RNA, 19 nt, Artificial Sequence
  Description of Artificial Sequence: Synthetic oligonucleotide
uagagugagcaggaugaug

SEQ ID NO: 2002504 - RNA, 19 nt, Artificial Sequence
  Description of Artificial Sequence: Synthetic oligonucleotide
uggcaaauuccggagcgug

SEQ ID NO: 2002505 - RNA, 19 nt, Artificial Sequence
  Description of Artificial Sequence: Synthetic oligonucleotide
uuuguccaugacacuaauu

SEQ ID NO: 2002506 - RNA, 19 nt, Artificial Sequence
  Description of Artificial Sequence: Synthetic oligonucleotide
ucauucccugucacuguca

SEQ ID NO: 2002507 - RNA, 19 nt, Artificial Sequence
  Description of Artificial Sequence: Synthetic oligonucleotide
agggguacaguccuucuua

SEQ ID NO: 2002508 - RNA, 19 nt, Artificial Sequence
  Description of Artificial Sequence: Synthetic oligonucleotide
acacggaucgugagcgugc

SEQ ID NO: 2002509 - RNA, 19 nt, Artificial Sequence
  Description of Artificial Sequence: Synthetic oligonucleotide
aagggguacaguccuucuu

SEQ ID NO: 2002510 - RNA, 19 nt, Artificial Sequence
  Description of Artificial Sequence: Synthetic oligonucleotide
caagcaucagggccucugc

SEQ ID NO: 2002511 - RNA, 19 nt, Artificial Sequence
  Description of Artificial Sequence: Synthetic oligonucleotide
cauaggcauaaguggccag

SEQ ID NO: 2002512 - RNA, 19 nt, Artificial Sequence
  Description of Artificial Sequence: Synthetic oligonucleotide
ugcggcuguacccaucuuu

SEQ ID NO: 2002513 - RNA, 19 nt, Artificial Sequence
  Description of Artificial Sequence: Synthetic oligonucleotide
guacaucaauauuuuccca

SEQ ID NO: 2002514 - RNA, 19 nt, Artificial Sequence
  Description of Artificial Sequence: Synthetic oligonucleotide
ucaagucauacaggacuca

SEQ ID NO: 2002515 - RNA, 19 nt, Artificial Sequence
  Description of Artificial Sequence: Synthetic oligonucleotide
augacacuaauuguuugaa

SEQ ID NO: 2002516 - RNA, 19 nt, Artificial Sequence
  Description of Artificial Sequence: Synthetic oligonucleotide
gucacaauauugucccgga

SEQ ID NO: 2002517 - RNA, 19 nt, Artificial Sequence
  Description of Artificial Sequence: Synthetic oligonucleotide
cuuugaauaggguaaucau

SEQ ID NO: 2002518 - RNA, 19 nt, Artificial Sequence
  Description of Artificial Sequence: Synthetic oligonucleotide
ugguaucaaagaguauuuc

SEQ ID NO: 2002519 - RNA, 19 nt, Artificial Sequence
  Description of Artificial Sequence: Synthetic oligonucleotide
auaaguggccagggagucg

SEQ ID NO: 2002520 - RNA, 19 nt, Artificial Sequence
  Description of Artificial Sequence: Synthetic oligonucleotide
acuuaccuccagaaaagga

SEQ ID NO: 2002521 - RNA, 19 nt, Artificial Sequence
  Description of Artificial Sequence: Synthetic oligonucleotide
gaguuaugauuccugcugu

SEQ ID NO: 2002522 - RNA, 19 nt, Artificial Sequence
  Description of Artificial Sequence: Synthetic oligonucleotide
acaggaauuuggcuacuuu

SEQ ID NO: 2002523 - RNA, 19 nt, Artificial Sequence
  Description of Artificial Sequence: Synthetic oligonucleotide
aggucacaauauugucccg

SEQ ID NO: 2002524 - RNA, 19 nt, Artificial Sequence
  Description of Artificial Sequence: Synthetic oligonucleotide
cauaaguggccagggaguc

SEQ ID NO: 2002525 - RNA, 19 nt, Artificial Sequence
  Description of Artificial Sequence: Synthetic oligonucleotide
agcgaauuggcuacggaau

SEQ ID NO: 2002526 - RNA, 19 nt, Artificial Sequence
  Description of Artificial Sequence: Synthetic oligonucleotide
uagcgaugagagcuccugu

SEQ ID NO: 2002527 - RNA, 19 nt, Artificial Sequence
  Description of Artificial Sequence: Synthetic oligonucleotide
gagcugagcgaauuggcua

SEQ ID NO: 2002528 - RNA, 19 nt, Artificial Sequence
  Description of Artificial Sequence: Synthetic oligonucleotide
auguauuguuugguaguug

SEQ ID NO: 2002529 - RNA, 19 nt, Artificial Sequence
  Description of Artificial Sequence: Synthetic oligonucleotide
aguuaugauuccugcugua

SEQ ID NO: 2002530 - RNA, 19 nt, Artificial Sequence
  Description of Artificial Sequence: Synthetic oligonucleotide
aauuggcaguagguaggug

SEQ ID NO: 2002531 - RNA, 19 nt, Artificial Sequence
  Description of Artificial Sequence: Synthetic oligonucleotide
uacaaucagcugugagaga

SEQ ID NO: 2002532 - RNA, 19 nt, Artificial Sequence
  Description of Artificial Sequence: Synthetic oligonucleotide
ucuaaggagcugagcgaau

SEQ ID NO: 2002533 - RNA, 19 nt, Artificial Sequence
  Description of Artificial Sequence: Synthetic oligonucleotide
gagcgugaucauuuauauc

SEQ ID NO: 2002534 - RNA, 19 nt, Artificial Sequence
  Description of Artificial Sequence: Synthetic oligonucleotide
gcuacuuuguuuuggguua

SEQ ID NO: 2002535 - RNA, 19 nt, Artificial Sequence
  Description of Artificial Sequence: Synthetic oligonucleotide
aucauucccuucauaggca

SEQ ID NO: 2002536 - RNA, 19 nt, Artificial Sequence
  Description of Artificial Sequence: Synthetic oligonucleotide
agucguagggaggugcacu

SEQ ID NO: 2002537 - RNA, 19 nt, Artificial Sequence
  Description of Artificial Sequence: Synthetic oligonucleotide
ucguugccucuucaaugca

SEQ ID NO: 2002538 - RNA, 19 nt, Artificial Sequence
  Description of Artificial Sequence: Synthetic oligonucleotide
cuacggaaucauucccuuc

SEQ ID NO: 2002539 - RNA, 19 nt, Artificial Sequence
  Description of Artificial Sequence: Synthetic oligonucleotide
guacccaucuuuucgaguu

SEQ ID NO: 2002540 - RNA, 19 nt, Artificial Sequence
  Description of Artificial Sequence: Synthetic oligonucleotide
aggcaugacaucucuucua

SEQ ID NO: 2002541 - RNA, 19 nt, Artificial Sequence
  Description of Artificial Sequence: Synthetic oligonucleotide
auauuuucccaaaggggua

SEQ ID NO: 2002542 - RNA, 19 nt, Artificial Sequence
  Description of Artificial Sequence: Synthetic oligonucleotide
ccauccuuugaaaugauua

SEQ ID NO: 2002543 - RNA, 19 nt, Artificial Sequence
  Description of Artificial Sequence: Synthetic oligonucleotide
aagucauacaggacucauu

SEQ ID NO: 2002544 - RNA, 19 nt, Artificial Sequence
  Description of Artificial Sequence: Synthetic oligonucleotide
gcgaugagagcuccugugc

SEQ ID NO: 2002545 - RNA, 19 nt, Artificial Sequence
  Description of Artificial Sequence: Synthetic oligonucleotide
cauuauaggucacaauauu

SEQ ID NO: 2002546 - RNA, 19 nt, Artificial Sequence
  Description of Artificial Sequence: Synthetic oligonucleotide
ucccggacauccauccuuu

SEQ ID NO: 2002547 - RNA, 19 nt, Artificial Sequence
  Description of Artificial Sequence: Synthetic oligonucleotide
cugagcgaauuggcuacgg

SEQ ID NO: 2002548 - RNA, 19 nt, Artificial Sequence
  Description of Artificial Sequence: Synthetic oligonucleotide
acaccacgauuagagugag

SEQ ID NO: 2002549 - RNA, 19 nt, Artificial Sequence
  Description of Artificial Sequence: Synthetic oligonucleotide
caucuuuucgaguuaugau

SEQ ID NO: 2002550 - RNA, 19 nt, Artificial Sequence
  Description of Artificial Sequence: Synthetic oligonucleotide
augauuccugcuguauuau

SEQ ID NO: 2002551 - RNA, 19 nt, Artificial Sequence
  Description of Artificial Sequence: Synthetic oligonucleotide
cgcuaagguaaucauaauc

SEQ ID NO: 2002552 - RNA, 19 nt, Artificial Sequence
  Description of Artificial Sequence: Synthetic oligonucleotide
uuagagugagcaggaugau

SEQ ID NO: 2002553 - RNA, 19 nt, Artificial Sequence
  Description of Artificial Sequence: Synthetic oligonucleotide
guucccuugguuaucacau

SEQ ID NO: 2002554 - RNA, 19 nt, Artificial Sequence
  Description of Artificial Sequence: Synthetic oligonucleotide
cauuuuggugcggcuguac

SEQ ID NO: 2002555 - RNA, 19 nt, Artificial Sequence
  Description of Artificial Sequence: Synthetic oligonucleotide
cauacaggacucauucccu

SEQ ID NO: 2002556 - RNA, 19 nt, Artificial Sequence
  Description of Artificial Sequence: Synthetic oligonucleotide
ccaugacacuaauuguuug

SEQ ID NO: 2002557 - RNA, 19 nt, Artificial Sequence
  Description of Artificial Sequence: Synthetic oligonucleotide
cucuaaggagcugagcgaa

SEQ ID NO: 2002558 - RNA, 19 nt, Artificial Sequence
  Description of Artificial Sequence: Synthetic oligonucleotide
uuccacuaacguugaucaa

SEQ ID NO: 2002559 - RNA, 19 nt, Artificial Sequence
  Description of Artificial Sequence: Synthetic oligonucleotide
cacacggaucgugagcgug

SEQ ID NO: 2002560 - RNA, 19 nt, Artificial Sequence
  Description of Artificial Sequence: Synthetic oligonucleotide
caaauuccggagcgugauc

SEQ ID NO: 2002561 - RNA, 19 nt, Artificial Sequence
  Description of Artificial Sequence: Synthetic oligonucleotide
ucgcuaagguaaucauaau

SEQ ID NO: 2002562 - RNA, 19 nt, Artificial Sequence
  Description of Artificial Sequence: Synthetic oligonucleotide
ugucccggacauccauccu

SEQ ID NO: 2002563 - RNA, 19 nt, Artificial Sequence
  Description of Artificial Sequence: Synthetic oligonucleotide
cacuaacguugaucaaguc

SEQ ID NO: 2002564 - RNA, 19 nt, Artificial Sequence
  Description of Artificial Sequence: Synthetic oligonucleotide
ggugaaauuuggguugaga

SEQ ID NO: 2002565 - RNA, 19 nt, Artificial Sequence
  Description of Artificial Sequence: Synthetic oligonucleotide
aauuggcuacggaaucauu

SEQ ID NO: 2002566 - RNA, 19 nt, Artificial Sequence
  Description of Artificial Sequence: Synthetic oligonucleotide
gguaaucauaaucuugguu

SEQ ID NO: 2002567 - RNA, 19 nt, Artificial Sequence
  Description of Artificial Sequence: Synthetic oligonucleotide
aaucuccgguggauaaaau

SEQ ID NO: 2002568 - RNA, 19 nt, Artificial Sequence
  Description of Artificial Sequence: Synthetic oligonucleotide
agucgcuaagguaaucaua

SEQ ID NO: 2002569 - RNA, 19 nt, Artificial Sequence
  Description of Artificial Sequence: Synthetic oligonucleotide
ggagcgugaucauuuauau

SEQ ID NO: 2002570 - RNA, 19 nt, Artificial Sequence
  Description of Artificial Sequence: Synthetic oligonucleotide
guuaugauuccugcuguau

SEQ ID NO: 2002571 - RNA, 19 nt, Artificial Sequence
  Description of Artificial Sequence: Synthetic oligonucleotide
gagagacucuaaggagcug

SEQ ID NO: 2002572 - RNA, 19 nt, Artificial Sequence
  Description of Artificial Sequence: Synthetic oligonucleotide
ucguagggaggugcacuug

SEQ ID NO: 2002573 - RNA, 19 nt, Artificial Sequence
  Description of Artificial Sequence: Synthetic oligonucleotide
gacugcauguucccuuggu

SEQ ID NO: 2002574 - RNA, 19 nt, Artificial Sequence
  Description of Artificial Sequence: Synthetic oligonucleotide
guccaugacacuaauuguu

SEQ ID NO: 2002575 - RNA, 19 nt, Artificial Sequence
  Description of Artificial Sequence: Synthetic oligonucleotide
auggcaaauuccggagcgu

SEQ ID NO: 2002576 - RNA, 19 nt, Artificial Sequence
  Description of Artificial Sequence: Synthetic oligonucleotide
cacggaucgugagcgugcc

SEQ ID NO: 2002577 - RNA, 19 nt, Artificial Sequence
  Description of Artificial Sequence: Synthetic oligonucleotide
ggaauaguacaggccacuc

SEQ ID NO: 2002578 - RNA, 19 nt, Artificial Sequence
  Description of Artificial Sequence: Synthetic oligonucleotide
ggccacucaaucugguauc

SEQ ID NO: 2002579 - RNA, 19 nt, Artificial Sequence
  Description of Artificial Sequence: Synthetic oligonucleotide
gaauuggcuacggaaucau

SEQ ID NO: 2002580 - RNA, 19 nt, Artificial Sequence
  Description of Artificial Sequence: Synthetic oligonucleotide
auuagcgaugagagcuccu

SEQ ID NO: 2002581 - RNA, 19 nt, Artificial Sequence
  Description of Artificial Sequence: Synthetic oligonucleotide
aggugcacuuggaucugag

SEQ ID NO: 2002582 - RNA, 19 nt, Artificial Sequence
  Description of Artificial Sequence: Synthetic oligonucleotide
augcagccaaacaccacga

SEQ ID NO: 2002583 - RNA, 19 nt, Artificial Sequence
  Description of Artificial Sequence: Synthetic oligonucleotide
gggagucguagggaggugc

SEQ ID NO: 2002584 - RNA, 19 nt, Artificial Sequence
  Description of Artificial Sequence: Synthetic oligonucleotide
auaguacaggccacucaau

SEQ ID NO: 2002585 - RNA, 19 nt, Artificial Sequence
  Description of Artificial Sequence: Synthetic oligonucleotide
ucauuuuggugcggcugua

SEQ ID NO: 2002586 - RNA, 19 nt, Artificial Sequence
  Description of Artificial Sequence: Synthetic oligonucleotide
guagguagguguucauuuu

SEQ ID NO: 2002587 - RNA, 19 nt, Artificial Sequence
  Description of Artificial Sequence: Synthetic oligonucleotide
auauugucccggacaucca

SEQ ID NO: 2002588 - RNA, 19 nt, Artificial Sequence
  Description of Artificial Sequence: Synthetic oligonucleotide
acacacggaucgugagcgu

SEQ ID NO: 2002589 - RNA, 19 nt, Artificial Sequence
  Description of Artificial Sequence: Synthetic oligonucleotide
cguugccucuucaaugcag

SEQ ID NO: 2002590 - RNA, 19 nt, Artificial Sequence
  Description of Artificial Sequence: Synthetic oligonucleotide
cuuuuaaucuccgguggau

SEQ ID NO: 2002591 - RNA, 19 nt, Artificial Sequence
  Description of Artificial Sequence: Synthetic oligonucleotide
cacuuauguauuguuuggu

SEQ ID NO: 2002592 - RNA, 19 nt, Artificial Sequence
  Description of Artificial Sequence: Synthetic oligonucleotide
agcgugccagugcugcuuu

SEQ ID NO: 2002593 - RNA, 19 nt, Artificial Sequence
  Description of Artificial Sequence: Synthetic oligonucleotide
auuccggagcgugaucauu

SEQ ID NO: 2002594 - RNA, 19 nt, Artificial Sequence
  Description of Artificial Sequence: Synthetic oligonucleotide
uggugcggcuguacccauc

SEQ ID NO: 2002595 - RNA, 19 nt, Artificial Sequence
  Description of Artificial Sequence: Synthetic oligonucleotide
uuggugcggcuguacccau

SEQ ID NO: 2002596 - RNA, 19 nt, Artificial Sequence
  Description of Artificial Sequence: Synthetic oligonucleotide
gcugagcgaauuggcuacg

SEQ ID NO: 2002597 - RNA, 19 nt, Artificial Sequence
  Description of Artificial Sequence: Synthetic oligonucleotide
ggguuucuuaaagugccaa

SEQ ID NO: 2002598 - RNA, 19 nt, Artificial Sequence
  Description of Artificial Sequence: Synthetic oligonucleotide
cggaucgugagcgugccag

SEQ ID NO: 2002599 - RNA, 19 nt, Artificial Sequence
  Description of Artificial Sequence: Synthetic oligonucleotide
gaggugcacuuggaucuga

SEQ ID NO: 2002600 - RNA, 19 nt, Artificial Sequence
  Description of Artificial Sequence: Synthetic oligonucleotide
caaucagcugugagagacu

SEQ ID NO: 2002601 - RNA, 19 nt, Artificial Sequence
  Description of Artificial Sequence: Synthetic oligonucleotide
ggcaaauuccggagcguga

SEQ ID NO: 2002602 - RNA, 19 nt, Artificial Sequence
  Description of Artificial Sequence: Synthetic oligonucleotide
aucugguaucaaagaguau

SEQ ID NO: 2002603 - RNA, 19 nt, Artificial Sequence
  Description of Artificial Sequence: Synthetic oligonucleotide
guauuguuugguaguugau

SEQ ID NO: 2002604 - RNA, 19 nt, Artificial Sequence
  Description of Artificial Sequence: Synthetic oligonucleotide
ccauacauaucugcgaagu

SEQ ID NO: 2002605 - RNA, 19 nt, Artificial Sequence
  Description of Artificial Sequence: Synthetic oligonucleotide
ggugcggcuguacccaucu

SEQ ID NO: 2002606 - RNA, 19 nt, Artificial Sequence
  Description of Artificial Sequence: Synthetic oligonucleotide
cauucccugucacugucau

SEQ ID NO: 2002607 - RNA, 19 nt, Artificial Sequence
  Description of Artificial Sequence: Synthetic oligonucleotide
cuuggaucugagucauuuu

SEQ ID NO: 2002608 - RNA, 19 nt, Artificial Sequence
  Description of Artificial Sequence: Synthetic oligonucleotide
acggaucgugagcgugcca

SEQ ID NO: 2002609 - RNA, 19 nt, Artificial Sequence
  Description of Artificial Sequence: Synthetic oligonucleotide
ccacuaacguugaucaagu

SEQ ID NO: 2002610 - RNA, 19 nt, Artificial Sequence
  Description of Artificial Sequence: Synthetic oligonucleotide
cuaaggagcugagcgaauu

SEQ ID NO: 2002611 - RNA, 19 nt, Artificial Sequence
  Description of Artificial Sequence: Synthetic oligonucleotide
cagucgcuaagguaaucau

SEQ ID NO: 2002612 - RNA, 19 nt, Artificial Sequence
  Description of Artificial Sequence: Synthetic oligonucleotide
gucccggacauccauccuu

SEQ ID NO: 2002613 - RNA, 19 nt, Artificial Sequence
  Description of Artificial Sequence: Synthetic oligonucleotide
ggagucguagggaggugca

SEQ ID NO: 2002614 - RNA, 19 nt, Artificial Sequence
  Description of Artificial Sequence: Synthetic oligonucleotide
agggagucguagggaggug

SEQ ID NO: 2002615 - RNA, 19 nt, Artificial Sequence
  Description of Artificial Sequence: Synthetic oligonucleotide
gccucugcauugcaggacu

SEQ ID NO: 2002616 - RNA, 19 nt, Artificial Sequence
  Description of Artificial Sequence: Synthetic oligonucleotide
gucguagggaggugcacuu

SEQ ID NO: 2002617 - RNA, 19 nt, Artificial Sequence
  Description of Artificial Sequence: Synthetic oligonucleotide
cagggagucguagggaggu

SEQ ID NO: 2002618 - RNA, 19 nt, Artificial Sequence
  Description of Artificial Sequence: Synthetic oligonucleotide
cuccgguggauaaaaucuu

SEQ ID NO: 2002619 - RNA, 19 nt, Artificial Sequence
  Description of Artificial Sequence: Synthetic oligonucleotide
caggacugcauguucccuu

SEQ ID NO: 2002620 - RNA, 19 nt, Artificial Sequence
  Description of Artificial Sequence: Synthetic oligonucleotide
ggugcacuuggaucugagu

SEQ ID NO: 2002621 - RNA, 19 nt, Artificial Sequence
  Description of Artificial Sequence: Synthetic oligonucleotide
ggcuacggaaucauucccu

SEQ ID NO: 2002622 - RNA, 19 nt, Artificial Sequence
  Description of Artificial Sequence: Synthetic oligonucleotide
cccaaagggguacaguccu

SEQ ID NO: 2002623 - RNA, 19 nt, Artificial Sequence
  Description of Artificial Sequence: Synthetic oligonucleotide
gcuacggaaucauucccuu

SEQ ID NO: 2002624 - RNA, 19 nt, Artificial Sequence
  Description of Artificial Sequence: Synthetic oligonucleotide
gcgugaucauuuauaucaa

SEQ ID NO: 2002625 - RNA, 19 nt, Artificial Sequence
  Description of Artificial Sequence: Synthetic oligonucleotide
cagcugugagagacucuaa

SEQ ID NO: 2002626 - RNA, 19 nt, Artificial Sequence
  Description of Artificial Sequence: Synthetic oligonucleotide
cggagcgugaucauuuaua

SEQ ID NO: 2002627 - RNA, 19 nt, Artificial Sequence
  Description of Artificial Sequence: Synthetic oligonucleotide
ccgguggauaaaaucuugu

SEQ ID NO: 2002628 - RNA, 19 nt, Artificial Sequence
  Description of Artificial Sequence: Synthetic oligonucleotide
cuacuuuguuuuggguuau

SEQ ID NO: 2002629 - RNA, 19 nt, Artificial Sequence
  Description of Artificial Sequence: Synthetic oligonucleotide
gggguacaguccuucuuau

SEQ ID NO: 2002630 - RNA, 19 nt, Artificial Sequence
  Description of Artificial Sequence: Synthetic oligonucleotide
agcaagcaucagggccucu

SEQ ID NO: 2002631 - RNA, 19 nt, Artificial Sequence
  Description of Artificial Sequence: Synthetic oligonucleotide
gagcgugccagugcugcuu

SEQ ID NO: 2002632 - RNA, 19 nt, Artificial Sequence
  Description of Artificial Sequence: Synthetic oligonucleotide
cccggacauccauccuuug

SEQ ID NO: 2002633 - RNA, 19 nt, Artificial Sequence
  Description of Artificial Sequence: Synthetic oligonucleotide
gcgugccagugcugcuuug

SEQ ID NO: 2002634 - RNA, 19 nt, Artificial Sequence
  Description of Artificial Sequence: Synthetic oligonucleotide
cggguuucuuaaagugcca

SEQ ID NO: 2002635 - RNA, 19 nt, Artificial Sequence
  Description of Artificial Sequence: Synthetic oligonucleotide
gcggcuguacccaucuuuu

SEQ ID NO: 2002636 - RNA, 19 nt, Artificial Sequence
  Description of Artificial Sequence: Synthetic oligonucleotide
cccagucgcuaagguaauc

SEQ ID NO: 2002637 - RNA, 19 nt, Artificial Sequence
  Description of Artificial Sequence: Synthetic oligonucleotide
cgugccagugcugcuuuga

SEQ ID NO: 2002638 - RNA, 19 nt, Artificial Sequence
  Description of Artificial Sequence: Synthetic oligonucleotide
cacuuggaucugagucauu

SEQ ID NO: 2002639 - RNA, 19 nt, Artificial Sequence
  Description of Artificial Sequence: Synthetic oligonucleotide
ccaaagggguacaguccuu

SEQ ID NO: 2002640 - RNA, 19 nt, Artificial Sequence
  Description of Artificial Sequence: Synthetic oligonucleotide
ccggagcgugaucauuuau

SEQ ID NO: 2002641 - RNA, 19 nt, Artificial Sequence
  Description of Artificial Sequence: Synthetic oligonucleotide
cgauuagagugagcaggau

SEQ ID NO: 2002642 - RNA, 19 nt, Artificial Sequence
  Description of Artificial Sequence: Synthetic oligonucleotide
ugggugaagagcuucaugg

SEQ ID NO: 2002643 - RNA, 19 nt, Artificial Sequence
  Description of Artificial Sequence: Synthetic oligonucleotide
ugagaggauaacauugugg

SEQ ID NO: 2002644 - RNA, 19 nt, Artificial Sequence
  Description of Artificial Sequence: Synthetic oligonucleotide
aacuggggugcucaggucc

SEQ ID NO: 2002645 - RNA, 19 nt, Artificial Sequence
  Description of Artificial Sequence: Synthetic oligonucleotide
ugucuagaaauauuccugg

SEQ ID NO: 2002646 - RNA, 19 nt, Artificial Sequence
  Description of Artificial Sequence: Synthetic oligonucleotide
aacuccucaucuuuugugg

SEQ ID NO: 2002647 - RNA, 19 nt, Artificial Sequence
  Description of Artificial Sequence: Synthetic oligonucleotide
acaagaucuacccucacag

SEQ ID NO: 2002648 - RNA, 19 nt, Artificial Sequence
  Description of Artificial Sequence: Synthetic oligonucleotide
aaaugucuuccucagaagu

SEQ ID NO: 2002649 - RNA, 19 nt, Artificial Sequence
  Description of Artificial Sequence: Synthetic oligonucleotide
uccuggauuacucuagagg

SEQ ID NO: 2002650 - RNA, 19 nt, Artificial Sequence
  Description of Artificial Sequence: Synthetic oligonucleotide
aaagcugggagccagucca

SEQ ID NO: 2002651 - RNA, 19 nt, Artificial Sequence
  Description of Artificial Sequence: Synthetic oligonucleotide
agcugaaaauuccauuugc

SEQ ID NO: 2002652 - RNA, 19 nt, Artificial Sequence
  Description of Artificial Sequence: Synthetic oligonucleotide
cauacguuaggucaugggg

SEQ ID NO: 2002653 - RNA, 19 nt, Artificial Sequence
  Description of Artificial Sequence: Synthetic oligonucleotide
uauuccuggucaaacauga

SEQ ID NO: 2002654 - RNA, 19 nt, Artificial Sequence
  Description of Artificial Sequence: Synthetic oligonucleotide
guuagcagucuucacaccg

SEQ ID NO: 2002655 - RNA, 19 nt, Artificial Sequence
  Description of Artificial Sequence: Synthetic oligonucleotide
ugagugauaaggcucgccc

SEQ ID NO: 2002656 - RNA, 19 nt, Artificial Sequence
  Description of Artificial Sequence: Synthetic oligonucleotide
ugccucaucacuuugggca

SEQ ID NO: 2002657 - RNA, 19 nt, Artificial Sequence
  Description of Artificial Sequence: Synthetic oligonucleotide
uggggcaagcacaagaugc

SEQ ID NO: 2002658 - RNA, 19 nt, Artificial Sequence
  Description of Artificial Sequence: Synthetic oligonucleotide
ucugucuagaaauauuccu

SEQ ID NO: 2002659 - RNA, 19 nt, Artificial Sequence
  Description of Artificial Sequence: Synthetic oligonucleotide
auaguucugccguaggagg

SEQ ID NO: 2002660 - RNA, 19 nt, Artificial Sequence
  Description of Artificial Sequence: Synthetic oligonucleotide
uuucugagcagcgaacucg

SEQ ID NO: 2002661 - RNA, 19 nt, Artificial Sequence
  Description of Artificial Sequence: Synthetic oligonucleotide
uacucuagaggaauguucu

SEQ ID NO: 2002662 - RNA, 19 nt, Artificial Sequence
  Description of Artificial Sequence: Synthetic oligonucleotide
ucuagaaauauuccugguc

SEQ ID NO: 2002663 - RNA, 19 nt, Artificial Sequence
  Description of Artificial Sequence: Synthetic oligonucleotide
ucaaaagcguccaugguau

SEQ ID NO: 2002664 - RNA, 19 nt, Artificial Sequence
  Description of Artificial Sequence: Synthetic oligonucleotide
auaaggcucgcccaacugg

SEQ ID NO: 2002665 - RNA, 19 nt, Artificial Sequence
  Description of Artificial Sequence: Synthetic oligonucleotide
ugagcagcgaacucguucc

SEQ ID NO: 2002666 - RNA, 19 nt, Artificial Sequence
  Description of Artificial Sequence: Synthetic oligonucleotide
cauuucucugcucuggagg

SEQ ID NO: 2002667 - RNA, 19 nt, Artificial Sequence
  Description of Artificial Sequence: Synthetic oligonucleotide
cucugagaggauaacauug

SEQ ID NO: 2002668 - RNA, 19 nt, Artificial Sequence
  Description of Artificial Sequence: Synthetic oligonucleotide
uauaguucugccguaggag

SEQ ID NO: 2002669 - RNA, 19 nt, Artificial Sequence
  Description of Artificial Sequence: Synthetic oligonucleotide
uaaggcucgcccaacuggg

SEQ ID NO: 2002670 - RNA, 19 nt, Artificial Sequence
  Description of Artificial Sequence: Synthetic oligonucleotide
ggugauacaggacaagucc

SEQ ID NO: 2002671 - RNA, 19 nt, Artificial Sequence
  Description of Artificial Sequence: Synthetic oligonucleotide
ucaggcauuucucugcucu

SEQ ID NO: 2002672 - RNA, 19 nt, Artificial Sequence
  Description of Artificial Sequence: Synthetic oligonucleotide
uccaaaguggggcagcccc

SEQ ID NO: 2002673 - RNA, 19 nt, Artificial Sequence
  Description of Artificial Sequence: Synthetic oligonucleotide
cacaagaugcagaaacucc

SEQ ID NO: 2002674 - RNA, 19 nt, Artificial Sequence
  Description of Artificial Sequence: Synthetic oligonucleotide
cugucuagaaauauuccug

SEQ ID NO: 2002675 - RNA, 19 nt, Artificial Sequence
  Description of Artificial Sequence: Synthetic oligonucleotide
acaugcuccaugcuccagc

SEQ ID NO: 2002676 - RNA, 19 nt, Artificial Sequence
  Description of Artificial Sequence: Synthetic oligonucleotide
uggguagagucuaaguggc

SEQ ID NO: 2002677 - RNA, 19 nt, Artificial Sequence
  Description of Artificial Sequence: Synthetic oligonucleotide
aaaagcguccaugguauag

SEQ ID NO: 2002678 - RNA, 19 nt, Artificial Sequence
  Description of Artificial Sequence: Synthetic oligonucleotide
uuacucuagaggaauguuc

SEQ ID NO: 2002679 - RNA, 19 nt, Artificial Sequence
  Description of Artificial Sequence: Synthetic oligonucleotide
gaaauauuccuggucaaac

SEQ ID NO: 2002680 - RNA, 19 nt, Artificial Sequence
  Description of Artificial Sequence: Synthetic oligonucleotide
cucaaggucacaucuugcc

SEQ ID NO: 2002681 - RNA, 19 nt, Artificial Sequence
  Description of Artificial Sequence: Synthetic oligonucleotide
ucuagaggaauguucucca

SEQ ID NO: 2002682 - RNA, 19 nt, Artificial Sequence
  Description of Artificial Sequence: Synthetic oligonucleotide
aagaugcagaaacuccucu

SEQ ID NO: 2002683 - RNA, 19 nt, Artificial Sequence
  Description of Artificial Sequence: Synthetic oligonucleotide
aacauuguggugugugagu

SEQ ID NO: 2002684 - RNA, 19 nt, Artificial Sequence
  Description of Artificial Sequence: Synthetic oligonucleotide
acucguuccaccuccucac

SEQ ID NO: 2002685 - RNA, 19 nt, Artificial Sequence
  Description of Artificial Sequence: Synthetic oligonucleotide
caaagauuugggugaagag

SEQ ID NO: 2002686 - RNA, 19 nt, Artificial Sequence
  Description of Artificial Sequence: Synthetic oligonucleotide
agaugcagaaacuccucuc

SEQ ID NO: 2002687 - RNA, 19 nt, Artificial Sequence
  Description of Artificial Sequence: Synthetic oligonucleotide
ucaaggucacaucuugcca

SEQ ID NO: 2002688 - RNA, 19 nt, Artificial Sequence
  Description of Artificial Sequence: Synthetic oligonucleotide
auuccauuugcauacguua

SEQ ID NO: 2002689 - RNA, 19 nt, Artificial Sequence
  Description of Artificial Sequence: Synthetic oligonucleotide
aaaauuccauuugcauacg

SEQ ID NO: 2002690 - RNA, 19 nt, Artificial Sequence
  Description of Artificial Sequence: Synthetic oligonucleotide
cucaggaucaaacagccca

SEQ ID NO: 2002691 - RNA, 19 nt, Artificial Sequence
  Description of Artificial Sequence: Synthetic oligonucleotide
aacucguuccaccuccuca

SEQ ID NO: 2002692 - RNA, 19 nt, Artificial Sequence
  Description of Artificial Sequence: Synthetic oligonucleotide
gacucaaggucacaucuug

SEQ ID NO: 2002693 - RNA, 19 nt, Artificial Sequence
  Description of Artificial Sequence: Synthetic oligonucleotide
gaugcagaaacuccucuca

SEQ ID NO: 2002694 - RNA, 19 nt, Artificial Sequence
  Description of Artificial Sequence: Synthetic oligonucleotide
aaauuccauuugcauacgu

SEQ ID NO: 2002695 - RNA, 19 nt, Artificial Sequence
  Description of Artificial Sequence: Synthetic oligonucleotide
uucacaccgaccccaaaga

SEQ ID NO: 2002696 - RNA, 19 nt, Artificial Sequence
  Description of Artificial Sequence: Synthetic oligonucleotide
uuugcauacguuaggucau

SEQ ID NO: 2002697 - RNA, 19 nt, Artificial Sequence
  Description of Artificial Sequence: Synthetic oligonucleotide
auacaggacaagucccugg

SEQ ID NO: 2002698 - RNA, 19 nt, Artificial Sequence
  Description of Artificial Sequence: Synthetic oligonucleotide
ugauacaggacaagucccu

SEQ ID NO: 2002699 - RNA, 19 nt, Artificial Sequence
  Description of Artificial Sequence: Synthetic oligonucleotide
uaacauuguggugugugag

SEQ ID NO: 2002700 - RNA, 19 nt, Artificial Sequence
  Description of Artificial Sequence: Synthetic oligonucleotide
ugucuucugcucaggauca

SEQ ID NO: 2002701 - RNA, 19 nt, Artificial Sequence
  Description of Artificial Sequence: Synthetic oligonucleotide
agcaaaggggaacuggcug

SEQ ID NO: 2002702 - RNA, 19 nt, Artificial Sequence
  Description of Artificial Sequence: Synthetic oligonucleotide
agcccauggcuguucagcc

SEQ ID NO: 2002703 - RNA, 19 nt, Artificial Sequence
  Description of Artificial Sequence: Synthetic oligonucleotide
uccagagccucugagagga

SEQ ID NO: 2002704 - RNA, 19 nt, Artificial Sequence
  Description of Artificial Sequence: Synthetic oligonucleotide
ucugagcucauccagcguu

SEQ ID NO: 2002705 - RNA, 19 nt, Artificial Sequence
  Description of Artificial Sequence: Synthetic oligonucleotide
uucucugagcucauccagc

SEQ ID NO: 2002706 - RNA, 19 nt, Artificial Sequence
  Description of Artificial Sequence: Synthetic oligonucleotide
uggacagggaugcaggguc

SEQ ID NO: 2002707 - RNA, 19 nt, Artificial Sequence
  Description of Artificial Sequence: Synthetic oligonucleotide
uacguuaggucauggggug

SEQ ID NO: 2002708 - RNA, 19 nt, Artificial Sequence
  Description of Artificial Sequence: Synthetic oligonucleotide
auaacauugugguguguga

SEQ ID NO: 2002709 - RNA, 19 nt, Artificial Sequence
  Description of Artificial Sequence: Synthetic oligonucleotide
aaaguggggcagccccugc

SEQ ID NO: 2002710 - RNA, 19 nt, Artificial Sequence
  Description of Artificial Sequence: Synthetic oligonucleotide
cucuagaggaauguucucc

SEQ ID NO: 2002711 - RNA, 19 nt, Artificial Sequence
  Description of Artificial Sequence: Synthetic oligonucleotide
agugcugugggacgcugac

SEQ ID NO: 2002712 - RNA, 19 nt, Artificial Sequence
  Description of Artificial Sequence: Synthetic oligonucleotide
uggucaaacaugaggcaac

SEQ ID NO: 2002713 - RNA, 19 nt, Artificial Sequence
  Description of Artificial Sequence: Synthetic oligonucleotide
accccaaagauuuggguga

SEQ ID NO: 2002714 - RNA, 19 nt, Artificial Sequence
  Description of Artificial Sequence: Synthetic oligonucleotide
gagaaggcggcccucguug

SEQ ID NO: 2002715 - RNA, 19 nt, Artificial Sequence
  Description of Artificial Sequence: Synthetic oligonucleotide
gcagucuucacaccgaccc

SEQ ID NO: 2002716 - RNA, 19 nt, Artificial Sequence
  Description of Artificial Sequence: Synthetic oligonucleotide
uggucugaugccuuucuga

SEQ ID NO: 2002717 - RNA, 19 nt, Artificial Sequence
  Description of Artificial Sequence: Synthetic oligonucleotide
guagagucuaaguggcugc

SEQ ID NO: 2002718 - RNA, 19 nt, Artificial Sequence
  Description of Artificial Sequence: Synthetic oligonucleotide
uguucuccaaaguggggca

SEQ ID NO: 2002719 - RNA, 19 nt, Artificial Sequence
  Description of Artificial Sequence: Synthetic oligonucleotide
gauaaggcucgcccaacug

SEQ ID NO: 2002720 - RNA, 19 nt, Artificial Sequence
  Description of Artificial Sequence: Synthetic oligonucleotide
cuguucucugagcucaucc

SEQ ID NO: 2002721 - RNA, 19 nt, Artificial Sequence
  Description of Artificial Sequence: Synthetic oligonucleotide
uagaggaauguucuccaaa

SEQ ID NO: 2002722 - RNA, 19 nt, Artificial Sequence
  Description of Artificial Sequence: Synthetic oligonucleotide
aaagcguccaugguauagu

SEQ ID NO: 2002723 - RNA, 19 nt, Artificial Sequence
  Description of Artificial Sequence: Synthetic oligonucleotide
ucauccagcguucgcaauc

SEQ ID NO: 2002724 - RNA, 19 nt, Artificial Sequence
  Description of Artificial Sequence: Synthetic oligonucleotide
uguaggugccucaucacuu

SEQ ID NO: 2002725 - RNA, 19 nt, Artificial Sequence
  Description of Artificial Sequence: Synthetic oligonucleotide
ugugugagugcugugggac

SEQ ID NO: 2002726 - RNA, 19 nt, Artificial Sequence
  Description of Artificial Sequence: Synthetic oligonucleotide
gaugccuuucugagcagcg

SEQ ID NO: 2002727 - RNA, 19 nt, Artificial Sequence
  Description of Artificial Sequence: Synthetic oligonucleotide
acaagaugcagaaacuccu

SEQ ID NO: 2002728 - RNA, 19 nt, Artificial Sequence
  Description of Artificial Sequence: Synthetic oligonucleotide
uggugauacaggacaaguc

SEQ ID NO: 2002729 - RNA, 19 nt, Artificial Sequence
  Description of Artificial Sequence: Synthetic oligonucleotide
cacaucuugccaguguucc

SEQ ID NO: 2002730 - RNA, 19 nt, Artificial Sequence
  Description of Artificial Sequence: Synthetic oligonucleotide
ugagcaccgaggcugcucu

SEQ ID NO: 2002731 - RNA, 19 nt, Artificial Sequence
  Description of Artificial Sequence: Synthetic oligonucleotide
agaggauaacauuguggug

SEQ ID NO: 2002732 - RNA, 19 nt, Artificial Sequence
  Description of Artificial Sequence: Synthetic oligonucleotide
ugaaacgccguagcucacg

SEQ ID NO: 2002733 - RNA, 19 nt, Artificial Sequence
  Description of Artificial Sequence: Synthetic oligonucleotide
ucagccauagccccuucuc

SEQ ID NO: 2002734 - RNA, 19 nt, Artificial Sequence
  Description of Artificial Sequence: Synthetic oligonucleotide
uggggcuguucucugagcu

SEQ ID NO: 2002735 - RNA, 19 nt, Artificial Sequence
  Description of Artificial Sequence: Synthetic oligonucleotide
ugccguaggagguggguag

SEQ ID NO: 2002736 - RNA, 19 nt, Artificial Sequence
  Description of Artificial Sequence: Synthetic oligonucleotide
aaggagagaaggcggcccu

SEQ ID NO: 2002737 - RNA, 19 nt, Artificial Sequence
  Description of Artificial Sequence: Synthetic oligonucleotide
aggauaacauuguggugug

SEQ ID NO: 2002738 - RNA, 19 nt, Artificial Sequence
  Description of Artificial Sequence: Synthetic oligonucleotide
uggauuacucuagaggaau

SEQ ID NO: 2002739 - RNA, 19 nt, Artificial Sequence
  Description of Artificial Sequence: Synthetic oligonucleotide
agggugagugauaaggcuc

SEQ ID NO: 2002740 - RNA, 19 nt, Artificial Sequence
  Description of Artificial Sequence: Synthetic oligonucleotide
aggcccaggagucugaaaa

SEQ ID NO: 2002741 - RNA, 19 nt, Artificial Sequence
  Description of Artificial Sequence: Synthetic oligonucleotide
uucugagcagcgaacucgu

SEQ ID NO: 2002742 - RNA, 19 nt, Artificial Sequence
  Description of Artificial Sequence: Synthetic oligonucleotide
agaaggcggcccucguugc

SEQ ID NO: 2002743 - RNA, 19 nt, Artificial Sequence
  Description of Artificial Sequence: Synthetic oligonucleotide
gaaacgccguagcucacgc

SEQ ID NO: 2002744 - RNA, 19 nt, Artificial Sequence
  Description of Artificial Sequence: Synthetic oligonucleotide
ucuacccucacagcuuucc

SEQ ID NO: 2002745 - RNA, 19 nt, Artificial Sequence
  Description of Artificial Sequence: Synthetic oligonucleotide
auacguuaggucauggggu

SEQ ID NO: 2002746 - RNA, 19 nt, Artificial Sequence
  Description of Artificial Sequence: Synthetic oligonucleotide
acauuguggugugugagug

SEQ ID NO: 2002747 - RNA, 19 nt, Artificial Sequence
  Description of Artificial Sequence: Synthetic oligonucleotide
auuguggugugugagugcu

SEQ ID NO: 2002748 - RNA, 19 nt, Artificial Sequence
  Description of Artificial Sequence: Synthetic oligonucleotide
acucuagaggaauguucuc

SEQ ID NO: 2002749 - RNA, 19 nt, Artificial Sequence
  Description of Artificial Sequence: Synthetic oligonucleotide
uccaccuccucacaugcuc

SEQ ID NO: 2002750 - RNA, 19 nt, Artificial Sequence
  Description of Artificial Sequence: Synthetic oligonucleotide
cugcucuggaggaagguac

SEQ ID NO: 2002751 - RNA, 19 nt, Artificial Sequence
  Description of Artificial Sequence: Synthetic oligonucleotide
gugauacaggacaaguccc

SEQ ID NO: 2002752 - RNA, 19 nt, Artificial Sequence
  Description of Artificial Sequence: Synthetic oligonucleotide
caagaucuacccucacagc

SEQ ID NO: 2002753 - RNA, 19 nt, Artificial Sequence
  Description of Artificial Sequence: Synthetic oligonucleotide
ucaggaucaaacagcccau

SEQ ID NO: 2002754 - RNA, 19 nt, Artificial Sequence
  Description of Artificial Sequence: Synthetic oligonucleotide
aagcccacuuucugucuag

SEQ ID NO: 2002755 - RNA, 19 nt, Artificial Sequence
  Description of Artificial Sequence: Synthetic oligonucleotide
uggaagcccacuuucuguc

SEQ ID NO: 2002756 - RNA, 19 nt, Artificial Sequence
  Description of Artificial Sequence: Synthetic oligonucleotide
uaggagguggguagagucu

SEQ ID NO: 2002757 - RNA, 19 nt, Artificial Sequence
  Description of Artificial Sequence: Synthetic oligonucleotide
uaguucugccguaggaggu

SEQ ID NO: 2002758 - RNA, 19 nt, Artificial Sequence
  Description of Artificial Sequence: Synthetic oligonucleotide
caugguauaguucugccgu

SEQ ID NO: 2002759 - RNA, 19 nt, Artificial Sequence
  Description of Artificial Sequence: Synthetic oligonucleotide
ugcagaaacuccucucaaa

SEQ ID NO: 2002760 - RNA, 19 nt, Artificial Sequence
  Description of Artificial Sequence: Synthetic oligonucleotide
aggucaugggguggaagcc

SEQ ID NO: 2002761 - RNA, 19 nt, Artificial Sequence
  Description of Artificial Sequence: Synthetic oligonucleotide
caucuugccaguguuccag

SEQ ID NO: 2002762 - RNA, 19 nt, Artificial Sequence
  Description of Artificial Sequence: Synthetic oligonucleotide
cagccuagaagagcaaagg

SEQ ID NO: 2002763 - RNA, 19 nt, Artificial Sequence
  Description of Artificial Sequence: Synthetic oligonucleotide
ccuggauuacucuagagga

SEQ ID NO: 2002764 - RNA, 19 nt, Artificial Sequence
  Description of Artificial Sequence: Synthetic oligonucleotide
guauaguucugccguagga

SEQ ID NO: 2002765 - RNA, 19 nt, Artificial Sequence
  Description of Artificial Sequence: Synthetic oligonucleotide
gggacuugagcaccgaggc

SEQ ID NO: 2002766 - RNA, 19 nt, Artificial Sequence
  Description of Artificial Sequence: Synthetic oligonucleotide
agagcuucauggucugaug

SEQ ID NO: 2002767 - RNA, 19 nt, Artificial Sequence
  Description of Artificial Sequence: Synthetic oligonucleotide
ugguauaguucugccguag

SEQ ID NO: 2002768 - RNA, 19 nt, Artificial Sequence
  Description of Artificial Sequence: Synthetic oligonucleotide
ugugagugcugugggacgc

SEQ ID NO: 2002769 - RNA, 19 nt, Artificial Sequence
  Description of Artificial Sequence: Synthetic oligonucleotide
gauacaggacaagucccug

SEQ ID NO: 2002770 - RNA, 19 nt, Artificial Sequence
  Description of Artificial Sequence: Synthetic oligonucleotide
ugcauacguuaggucaugg

SEQ ID NO: 2002771 - RNA, 19 nt, Artificial Sequence
  Description of Artificial Sequence: Synthetic oligonucleotide
aguccagccuagaagagca

SEQ ID NO: 2002772 - RNA, 19 nt, Artificial Sequence
  Description of Artificial Sequence: Synthetic oligonucleotide
cauuugcauacguuagguc

SEQ ID NO: 2002773 - RNA, 19 nt, Artificial Sequence
  Description of Artificial Sequence: Synthetic oligonucleotide
gguauaguucugccguagg

SEQ ID NO: 2002774 - RNA, 19 nt, Artificial Sequence
  Description of Artificial Sequence: Synthetic oligonucleotide
agggacuugagcaccgagg

SEQ ID NO: 2002775 - RNA, 19 nt, Artificial Sequence
  Description of Artificial Sequence: Synthetic oligonucleotide
augaggcaacuccucaucu

SEQ ID NO: 2002776 - RNA, 19 nt, Artificial Sequence
  Description of Artificial Sequence: Synthetic oligonucleotide
cucaaaagcguccauggua

SEQ ID NO: 2002777 - RNA, 19 nt, Artificial Sequence
  Description of Artificial Sequence: Synthetic oligonucleotide
agucuaaguggcugcgaug

SEQ ID NO: 2002778 - RNA, 19 nt, Artificial Sequence
  Description of Artificial Sequence: Synthetic oligonucleotide
ccuagaagagcaaagggga

SEQ ID NO: 2002779 - RNA, 19 nt, Artificial Sequence
  Description of Artificial Sequence: Synthetic oligonucleotide
uccugguaccaccgguuag

SEQ ID NO: 2002780 - RNA, 19 nt, Artificial Sequence
  Description of Artificial Sequence: Synthetic oligonucleotide
ggugccucaucacuuuggg

SEQ ID NO: 2002781 - RNA, 19 nt, Artificial Sequence
  Description of Artificial Sequence: Synthetic oligonucleotide
uuaggucaugggguggaag

SEQ ID NO: 2002782 - RNA, 19 nt, Artificial Sequence
  Description of Artificial Sequence: Synthetic oligonucleotide
gagugauaaggcucgccca

SEQ ID NO: 2002783 - RNA, 19 nt, Artificial Sequence
  Description of Artificial Sequence: Synthetic oligonucleotide
ugucacagggcagggcagg

SEQ ID NO: 2002784 - RNA, 19 nt, Artificial Sequence
  Description of Artificial Sequence: Synthetic oligonucleotide
caggacaagucccuggcuc

SEQ ID NO: 2002785 - RNA, 19 nt, Artificial Sequence
  Description of Artificial Sequence: Synthetic oligonucleotide
cugagaggauaacauugug

SEQ ID NO: 2002786 - RNA, 19 nt, Artificial Sequence
  Description of Artificial Sequence: Synthetic oligonucleotide
cagcugaaaauuccauuug

SEQ ID NO: 2002787 - RNA, 19 nt, Artificial Sequence
  Description of Artificial Sequence: Synthetic oligonucleotide
cauuguggugugugagugc

SEQ ID NO: 2002788 - RNA, 19 nt, Artificial Sequence
  Description of Artificial Sequence: Synthetic oligonucleotide
aggacaagucccuggcucu

SEQ ID NO: 2002789 - RNA, 19 nt, Artificial Sequence
  Description of Artificial Sequence: Synthetic oligonucleotide
accgaccccaaagauuugg

SEQ ID NO: 2002790 - RNA, 19 nt, Artificial Sequence
  Description of Artificial Sequence: Synthetic oligonucleotide
gugugagugcugugggacg

SEQ ID NO: 2002791 - RNA, 19 nt, Artificial Sequence
  Description of Artificial Sequence: Synthetic oligonucleotide
ugcagcugacucagggaug

SEQ ID NO: 2002792 - RNA, 19 nt, Artificial Sequence
  Description of Artificial Sequence: Synthetic oligonucleotide
ugaugccuuucugagcagc

SEQ ID NO: 2002793 - RNA, 19 nt, Artificial Sequence
  Description of Artificial Sequence: Synthetic oligonucleotide
agcgaacucguuccaccuc

SEQ ID NO: 2002794 - RNA, 19 nt, Artificial Sequence
  Description of Artificial Sequence: Synthetic oligonucleotide
ugagcucauccagcguucg

SEQ ID NO: 2002795 - RNA, 19 nt, Artificial Sequence
  Description of Artificial Sequence: Synthetic oligonucleotide
gguagagucuaaguggcug

SEQ ID NO: 2002796 - RNA, 19 nt, Artificial Sequence
  Description of Artificial Sequence: Synthetic oligonucleotide
acaccgaccccaaagauuu

SEQ ID NO: 2002797 - RNA, 19 nt, Artificial Sequence
  Description of Artificial Sequence: Synthetic oligonucleotide
agaaauauuccuggucaaa

SEQ ID NO: 2002798 - RNA, 19 nt, Artificial Sequence
  Description of Artificial Sequence: Synthetic oligonucleotide
uagcagucuucacaccgac

SEQ ID NO: 2002799 - RNA, 19 nt, Artificial Sequence
  Description of Artificial Sequence: Synthetic oligonucleotide
accgguuagcagucuucac

SEQ ID NO: 2002800 - RNA, 19 nt, Artificial Sequence
  Description of Artificial Sequence: Synthetic oligonucleotide
cccuaaagcugcauguggg

SEQ ID NO: 2002801 - RNA, 19 nt, Artificial Sequence
  Description of Artificial Sequence: Synthetic oligonucleotide
uccuuccugguaccaccgg

SEQ ID NO: 2002802 - RNA, 19 nt, Artificial Sequence
  Description of Artificial Sequence: Synthetic oligonucleotide
ggugaagagcuucaugguc

SEQ ID NO: 2002803 - RNA, 19 nt, Artificial Sequence
  Description of Artificial Sequence: Synthetic oligonucleotide
gguaccaccgguuagcagu

SEQ ID NO: 2002804 - RNA, 19 nt, Artificial Sequence
  Description of Artificial Sequence: Synthetic oligonucleotide
accgaggcugcucuguaga

SEQ ID NO: 2002805 - RNA, 19 nt, Artificial Sequence
  Description of Artificial Sequence: Synthetic oligonucleotide
cuggaggaagguacuugag

SEQ ID NO: 2002806 - RNA, 19 nt, Artificial Sequence
  Description of Artificial Sequence: Synthetic oligonucleotide
ccuaaagcugcaugugggg

SEQ ID NO: 2002807 - RNA, 19 nt, Artificial Sequence
  Description of Artificial Sequence: Synthetic oligonucleotide
caaacaugaggcaacuccu

SEQ ID NO: 2002808 - RNA, 19 nt, Artificial Sequence
  Description of Artificial Sequence: Synthetic oligonucleotide
ucacaccgaccccaaagau

SEQ ID NO: 2002809 - RNA, 19 nt, Artificial Sequence
  Description of Artificial Sequence: Synthetic oligonucleotide
acaugaggcaacuccucau

SEQ ID NO: 2002810 - RNA, 19 nt, Artificial Sequence
  Description of Artificial Sequence: Synthetic oligonucleotide
cagccauagccccuucucc

SEQ ID NO: 2002811 - RNA, 19 nt, Artificial Sequence
  Description of Artificial Sequence: Synthetic oligonucleotide
ccucguugccuucaaaacc

SEQ ID NO: 2002812 - RNA, 19 nt, Artificial Sequence
  Description of Artificial Sequence: Synthetic oligonucleotide
gggugagugauaaggcucg

SEQ ID NO: 2002813 - RNA, 19 nt, Artificial Sequence
  Description of Artificial Sequence: Synthetic oligonucleotide
gcauacguuaggucauggg

SEQ ID NO: 2002814 - RNA, 19 nt, Artificial Sequence
  Description of Artificial Sequence: Synthetic oligonucleotide
aagcguccaugguauaguu

SEQ ID NO: 2002815 - RNA, 19 nt, Artificial Sequence
  Description of Artificial Sequence: Synthetic oligonucleotide
cuccugccgacugaaacgc

SEQ ID NO: 2002816 - RNA, 19 nt, Artificial Sequence
  Description of Artificial Sequence: Synthetic oligonucleotide
agucuucacaccgacccca

SEQ ID NO: 2002817 - RNA, 19 nt, Artificial Sequence
  Description of Artificial Sequence: Synthetic oligonucleotide
cuccuggauuacucuagag

SEQ ID NO: 2002818 - RNA, 19 nt, Artificial Sequence
  Description of Artificial Sequence: Synthetic oligonucleotide
cucguugccuucaaaaccu

SEQ ID NO: 2002819 - RNA, 19 nt, Artificial Sequence
  Description of Artificial Sequence: Synthetic oligonucleotide
cauccagcguucgcaaucc

SEQ ID NO: 2002820 - RNA, 19 nt, Artificial Sequence
  Description of Artificial Sequence: Synthetic oligonucleotide
gauuacucuagaggaaugu

SEQ ID NO: 2002821 - RNA, 19 nt, Artificial Sequence
  Description of Artificial Sequence: Synthetic oligonucleotide
auuacucuagaggaauguu

SEQ ID NO: 2002822 - RNA, 19 nt, Artificial Sequence
  Description of Artificial Sequence: Synthetic oligonucleotide
ucacuuugggcagcagccc

SEQ ID NO: 2002823 - RNA, 19 nt, Artificial Sequence
  Description of Artificial Sequence: Synthetic oligonucleotide
ccaugguauaguucugccg

SEQ ID NO: 2002824 - RNA, 19 nt, Artificial Sequence
  Description of Artificial Sequence: Synthetic oligonucleotide
ugacucaaggucacaucuu

SEQ ID NO: 2002825 - RNA, 19 nt, Artificial Sequence
  Description of Artificial Sequence: Synthetic oligonucleotide
agcaggcaggaucaggcau

SEQ ID NO: 2002826 - RNA, 19 nt, Artificial Sequence
  Description of Artificial Sequence: Synthetic oligonucleotide
agcacaagaugcagaaacu

SEQ ID NO: 2002827 - RNA, 19 nt, Artificial Sequence
  Description of Artificial Sequence: Synthetic oligonucleotide
uacccucacagcuuuccau

SEQ ID NO: 2002828 - RNA, 19 nt, Artificial Sequence
  Description of Artificial Sequence: Synthetic oligonucleotide
agcagucuucacaccgacc

SEQ ID NO: 2002829 - RNA, 19 nt, Artificial Sequence
  Description of Artificial Sequence: Synthetic oligonucleotide
gguuggggcaagcacaaga

SEQ ID NO: 2002830 - RNA, 19 nt, Artificial Sequence
  Description of Artificial Sequence: Synthetic oligonucleotide
ucguugccuucaaaaccug

SEQ ID NO: 2002831 - RNA, 19 nt, Artificial Sequence
  Description of Artificial Sequence: Synthetic oligonucleotide
uucugccguaggagguggg

SEQ ID NO: 2002832 - RNA, 19 nt, Artificial Sequence
  Description of Artificial Sequence: Synthetic oligonucleotide
uaguacuggagcccugcuu

SEQ ID NO: 2002833 - RNA, 19 nt, Artificial Sequence
  Description of Artificial Sequence: Synthetic oligonucleotide
cauagccccuucuccugcc

SEQ ID NO: 2002834 - RNA, 19 nt, Artificial Sequence
  Description of Artificial Sequence: Synthetic oligonucleotide
aucaggcauuucucugcuc

SEQ ID NO: 2002835 - RNA, 19 nt, Artificial Sequence
  Description of Artificial Sequence: Synthetic oligonucleotide
auuugggugaagagcuuca

SEQ ID NO: 2002836 - RNA, 19 nt, Artificial Sequence
  Description of Artificial Sequence: Synthetic oligonucleotide
ugaggcaacuccucaucuu

SEQ ID NO: 2002837 - RNA, 19 nt, Artificial Sequence
  Description of Artificial Sequence: Synthetic oligonucleotide
agcagcgaacucguuccac

SEQ ID NO: 2002838 - RNA, 19 nt, Artificial Sequence
  Description of Artificial Sequence: Synthetic oligonucleotide
aaacgccguagcucacgcu

SEQ ID NO: 2002839 - RNA, 19 nt, Artificial Sequence
  Description of Artificial Sequence: Synthetic oligonucleotide
uuccugguaccaccgguua

SEQ ID NO: 2002840 - RNA, 19 nt, Artificial Sequence
  Description of Artificial Sequence: Synthetic oligonucleotide
agucccuggcucuguaggu

SEQ ID NO: 2002841 - RNA, 19 nt, Artificial Sequence
  Description of Artificial Sequence: Synthetic oligonucleotide
caguccagccuagaagagc

SEQ ID NO: 2002842 - RNA, 19 nt, Artificial Sequence
  Description of Artificial Sequence: Synthetic oligonucleotide
cuagaagagcaaaggggaa

SEQ ID NO: 2002843 - RNA, 19 nt, Artificial Sequence
  Description of Artificial Sequence: Synthetic oligonucleotide
gcgaacucguuccaccucc

SEQ ID NO: 2002844 - RNA, 19 nt, Artificial Sequence
  Description of Artificial Sequence: Synthetic oligonucleotide
ugguaccaccgguuagcag

SEQ ID NO: 2002845 - RNA, 19 nt, Artificial Sequence
  Description of Artificial Sequence: Synthetic oligonucleotide
cagcguucgcaauccuucc

SEQ ID NO: 2002846 - RNA, 19 nt, Artificial Sequence
  Description of Artificial Sequence: Synthetic oligonucleotide
aggagucugaaaaugucuu

SEQ ID NO: 2002847 - RNA, 19 nt, Artificial Sequence
  Description of Artificial Sequence: Synthetic oligonucleotide
agcugacucagggauguca

SEQ ID NO: 2002848 - RNA, 19 nt, Artificial Sequence
  Description of Artificial Sequence: Synthetic oligonucleotide
ccugccgacugaaacgccg

SEQ ID NO: 2002849 - RNA, 19 nt, Artificial Sequence
  Description of Artificial Sequence: Synthetic oligonucleotide
acagggaugcagggucccc

SEQ ID NO: 2002850 - RNA, 19 nt, Artificial Sequence
  Description of Artificial Sequence: Synthetic oligonucleotide
cugccagugucuccagagc

SEQ ID NO: 2002851 - RNA, 19 nt, Artificial Sequence
  Description of Artificial Sequence: Synthetic oligonucleotide
guucugccguaggaggugg

SEQ ID NO: 2002852 - RNA, 19 nt, Artificial Sequence
  Description of Artificial Sequence: Synthetic oligonucleotide
uccagcguucgcaauccuu

SEQ ID NO: 2002853 - RNA, 19 nt, Artificial Sequence
  Description of Artificial Sequence: Synthetic oligonucleotide
ucguuccaccuccucacau

SEQ ID NO: 2002854 - RNA, 19 nt, Artificial Sequence
  Description of Artificial Sequence: Synthetic oligonucleotide
cauggcuguucagccauag

SEQ ID NO: 2002855 - RNA, 19 nt, Artificial Sequence
  Description of Artificial Sequence: Synthetic oligonucleotide
agcguucgcaauccuuccu

SEQ ID NO: 2002856 - RNA, 19 nt, Artificial Sequence
  Description of Artificial Sequence: Synthetic oligonucleotide
gcagcgaacucguuccacc

SEQ ID NO: 2002857 - RNA, 19 nt, Artificial Sequence
  Description of Artificial Sequence: Synthetic oligonucleotide
cugagcucauccagcguuc

SEQ ID NO: 2002858 - RNA, 19 nt, Artificial Sequence
  Description of Artificial Sequence: Synthetic oligonucleotide
aaggcucgcccaacugggg

SEQ ID NO: 2002859 - RNA, 19 nt, Artificial Sequence
  Description of Artificial Sequence: Synthetic oligonucleotide
uugcauacguuaggucaug

SEQ ID NO: 2002860 - RNA, 19 nt, Artificial Sequence
  Description of Artificial Sequence: Synthetic oligonucleotide
uccucagaaguugcaugga

SEQ ID NO: 2002861 - RNA, 19 nt, Artificial Sequence
  Description of Artificial Sequence: Synthetic oligonucleotide
gaaggcggcccucguugcc

SEQ ID NO: 2002862 - RNA, 19 nt, Artificial Sequence
  Description of Artificial Sequence: Synthetic oligonucleotide
cuggauuacucuagaggaa

SEQ ID NO: 2002863 - RNA, 19 nt, Artificial Sequence
  Description of Artificial Sequence: Synthetic oligonucleotide
gacgcugacaggcguaagu

SEQ ID NO: 2002864 - RNA, 19 nt, Artificial Sequence
  Description of Artificial Sequence: Synthetic oligonucleotide
agcguccaugguauaguuc

SEQ ID NO: 2002865 - RNA, 19 nt, Artificial Sequence
  Description of Artificial Sequence: Synthetic oligonucleotide
caggcauuucucugcucug

SEQ ID NO: 2002866 - RNA, 19 nt, Artificial Sequence
  Description of Artificial Sequence: Synthetic oligonucleotide
ccagcguucgcaauccuuc

SEQ ID NO: 2002867 - RNA, 19 nt, Artificial Sequence
  Description of Artificial Sequence: Synthetic oligonucleotide
cagggaugucacagggcag

SEQ ID NO: 2002868 - RNA, 19 nt, Artificial Sequence
  Description of Artificial Sequence: Synthetic oligonucleotide
gcguccaugguauaguucu

SEQ ID NO: 2002869 - RNA, 19 nt, Artificial Sequence
  Description of Artificial Sequence: Synthetic oligonucleotide
gaagcccacuuucugucua

SEQ ID NO: 2002870 - RNA, 19 nt, Artificial Sequence
  Description of Artificial Sequence: Synthetic oligonucleotide
gugagugauaaggcucgcc

SEQ ID NO: 2002871 - RNA, 19 nt, Artificial Sequence
  Description of Artificial Sequence: Synthetic oligonucleotide
acguuaggucauggggugg

SEQ ID NO: 2002872 - RNA, 19 nt, Artificial Sequence
  Description of Artificial Sequence: Synthetic oligonucleotide
ugguaguacuggagcccug

SEQ ID NO: 2002873 - RNA, 19 nt, Artificial Sequence
  Description of Artificial Sequence: Synthetic oligonucleotide
uguucagccauagccccuu

SEQ ID NO: 2002874 - RNA, 19 nt, Artificial Sequence
  Description of Artificial Sequence: Synthetic oligonucleotide
cuggucaaacaugaggcaa

SEQ ID NO: 2002875 - RNA, 19 nt, Artificial Sequence
  Description of Artificial Sequence: Synthetic oligonucleotide
gagucuaaguggcugcgau

SEQ ID NO: 2002876 - RNA, 19 nt, Artificial Sequence
  Description of Artificial Sequence: Synthetic oligonucleotide
ccccuaaagcugcaugugg

SEQ ID NO: 2002877 - RNA, 19 nt, Artificial Sequence
  Description of Artificial Sequence: Synthetic oligonucleotide
ugagugcugugggacgcug

SEQ ID NO: 2002878 - RNA, 19 nt, Artificial Sequence
  Description of Artificial Sequence: Synthetic oligonucleotide
aggcucgcccaacuggggu

SEQ ID NO: 2002879 - RNA, 19 nt, Artificial Sequence
  Description of Artificial Sequence: Synthetic oligonucleotide
augguauaguucugccgua

SEQ ID NO: 2002880 - RNA, 19 nt, Artificial Sequence
  Description of Artificial Sequence: Synthetic oligonucleotide
ccgacugaaacgccguagc

SEQ ID NO: 2002881 - RNA, 19 nt, Artificial Sequence
  Description of Artificial Sequence: Synthetic oligonucleotide
ggauuacucuagaggaaug

SEQ ID NO: 2002882 - RNA, 19 nt, Artificial Sequence
  Description of Artificial Sequence: Synthetic oligonucleotide
uccugccgacugaaacgcc

SEQ ID NO: 2002883 - RNA, 19 nt, Artificial Sequence
  Description of Artificial Sequence: Synthetic oligonucleotide
ucuucacaccgaccccaaa

SEQ ID NO: 2002884 - RNA, 19 nt, Artificial Sequence
  Description of Artificial Sequence: Synthetic oligonucleotide
uagccccuucuccugccga

SEQ ID NO: 2002885 - RNA, 19 nt, Artificial Sequence
  Description of Artificial Sequence: Synthetic oligonucleotide
gucuagaaauauuccuggu

SEQ ID NO: 2002886 - RNA, 19 nt, Artificial Sequence
  Description of Artificial Sequence: Synthetic oligonucleotide
agaucuacccucacagcuu

SEQ ID NO: 2002887 - RNA, 19 nt, Artificial Sequence
  Description of Artificial Sequence: Synthetic oligonucleotide
gguuagcagucuucacacc

SEQ ID NO: 2002888 - RNA, 19 nt, Artificial Sequence
  Description of Artificial Sequence: Synthetic oligonucleotide
ccucacaugcuccaugcuc

SEQ ID NO: 2002889 - RNA, 19 nt, Artificial Sequence
  Description of Artificial Sequence: Synthetic oligonucleotide
cgguuagcagucuucacac

SEQ ID NO: 2002890 - RNA, 19 nt, Artificial Sequence
  Description of Artificial Sequence: Synthetic oligonucleotide
agagaaggcggcccucguu

SEQ ID NO: 2002891 - RNA, 19 nt, Artificial Sequence
  Description of Artificial Sequence: Synthetic oligonucleotide
cuggggcuguucucugagc

SEQ ID NO: 2002892 - RNA, 19 nt, Artificial Sequence
  Description of Artificial Sequence: Synthetic oligonucleotide
uccucucaaaagcguccau

SEQ ID NO: 2002893 - RNA, 19 nt, Artificial Sequence
  Description of Artificial Sequence: Synthetic oligonucleotide
gcguucgcaauccuuccug

SEQ ID NO: 2002894 - RNA, 19 nt, Artificial Sequence
  Description of Artificial Sequence: Synthetic oligonucleotide
gucacagggcagggcaggg

SEQ ID NO: 2002895 - RNA, 19 nt, Artificial Sequence
  Description of Artificial Sequence: Synthetic oligonucleotide
cuagaggaauguucuccaa

SEQ ID NO: 2002896 - RNA, 19 nt, Artificial Sequence
  Description of Artificial Sequence: Synthetic oligonucleotide
caaaguggggcagccccug

SEQ ID NO: 2002897 - RNA, 19 nt, Artificial Sequence
  Description of Artificial Sequence: Synthetic oligonucleotide
cugaugccuuucugagcag

SEQ ID NO: 2002898 - RNA, 19 nt, Artificial Sequence
  Description of Artificial Sequence: Synthetic oligonucleotide
agagucuaaguggcugcga

SEQ ID NO: 2002899 - RNA, 19 nt, Artificial Sequence
  Description of Artificial Sequence: Synthetic oligonucleotide
cccucguugccuucaaaac

SEQ ID NO: 2002900 - RNA, 19 nt, Artificial Sequence
  Description of Artificial Sequence: Synthetic oligonucleotide
ugggacgcugacaggcgua

SEQ ID NO: 2002901 - RNA, 19 nt, Artificial Sequence
  Description of Artificial Sequence: Synthetic oligonucleotide
gggguggaagcccacuuuc

SEQ ID NO: 2002902 - RNA, 19 nt, Artificial Sequence
  Description of Artificial Sequence: Synthetic oligonucleotide
caggaucaaacagcccaug

SEQ ID NO: 2002903 - RNA, 19 nt, Artificial Sequence
  Description of Artificial Sequence: Synthetic oligonucleotide
gucacaucuugccaguguu

SEQ ID NO: 2002904 - RNA, 19 nt, Artificial Sequence
  Description of Artificial Sequence: Synthetic oligonucleotide
ccgaccccaaagauuuggg

SEQ ID NO: 2002905 - RNA, 19 nt, Artificial Sequence
  Description of Artificial Sequence: Synthetic oligonucleotide
acgcugacaggcguaaguu

SEQ ID NO: 2002906 - RNA, 19 nt, Artificial Sequence
  Description of Artificial Sequence: Synthetic oligonucleotide
cugaaacgccguagcucac

SEQ ID NO: 2002907 - RNA, 19 nt, Artificial Sequence
  Description of Artificial Sequence: Synthetic oligonucleotide
guacuggagcccugcuuuc

SEQ ID NO: 2002908 - RNA, 19 nt, Artificial Sequence
  Description of Artificial Sequence: Synthetic oligonucleotide
gugauaaggcucgcccaac

SEQ ID NO: 2002909 - RNA, 19 nt, Artificial Sequence
  Description of Artificial Sequence: Synthetic oligonucleotide
gcgauggugcuggugauac

SEQ ID NO: 2002910 - RNA, 19 nt, Artificial Sequence
  Description of Artificial Sequence: Synthetic oligonucleotide
guguuccagcagcugaaaa

SEQ ID NO: 2002911 - RNA, 19 nt, Artificial Sequence
  Description of Artificial Sequence: Synthetic oligonucleotide
cuguaggugccucaucacu

SEQ ID NO: 2002912 - RNA, 19 nt, Artificial Sequence
  Description of Artificial Sequence: Synthetic oligonucleotide
accaccgguuagcagucuu

SEQ ID NO: 2002913 - RNA, 19 nt, Artificial Sequence
  Description of Artificial Sequence: Synthetic oligonucleotide
ccgguuagcagucuucaca

SEQ ID NO: 2002914 - RNA, 19 nt, Artificial Sequence
  Description of Artificial Sequence: Synthetic oligonucleotide
ccucucaaaagcguccaug

SEQ ID NO: 2002915 - RNA, 19 nt, Artificial Sequence
  Description of Artificial Sequence: Synthetic oligonucleotide
cuggugauacaggacaagu

SEQ ID NO: 2002916 - RNA, 19 nt, Artificial Sequence
  Description of Artificial Sequence: Synthetic oligonucleotide
augccuuucugagcagcga

SEQ ID NO: 2002917 - RNA, 19 nt, Artificial Sequence
  Description of Artificial Sequence: Synthetic oligonucleotide
cuuugggcagcagccccac

SEQ ID NO: 2002918 - RNA, 19 nt, Artificial Sequence
  Description of Artificial Sequence: Synthetic oligonucleotide
gucaugggguggaagccca

SEQ ID NO: 2002919 - RNA, 19 nt, Artificial Sequence
  Description of Artificial Sequence: Synthetic oligonucleotide
gcuggugauacaggacaag

SEQ ID NO: 2002920 - RNA, 19 nt, Artificial Sequence
  Description of Artificial Sequence: Synthetic oligonucleotide
acuugaggcccaggagucu

SEQ ID NO: 2002921 - RNA, 19 nt, Artificial Sequence
  Description of Artificial Sequence: Synthetic oligonucleotide
cuacccucacagcuuucca

SEQ ID NO: 2002922 - RNA, 19 nt, Artificial Sequence
  Description of Artificial Sequence: Synthetic oligonucleotide
cguucgcaauccuuccugg

SEQ ID NO: 2002923 - RNA, 19 nt, Artificial Sequence
  Description of Artificial Sequence: Synthetic oligonucleotide
caacuggggugcucagguc

SEQ ID NO: 2002924 - RNA, 19 nt, Artificial Sequence
  Description of Artificial Sequence: Synthetic oligonucleotide
cccugcuuucugcugcugg

SEQ ID NO: 2002925 - RNA, 19 nt, Artificial Sequence
  Description of Artificial Sequence: Synthetic oligonucleotide
gucaaacaugaggcaacuc

SEQ ID NO: 2002926 - RNA, 19 nt, Artificial Sequence
  Description of Artificial Sequence: Synthetic oligonucleotide
guggugugugagugcugug

SEQ ID NO: 2002927 - RNA, 19 nt, Artificial Sequence
  Description of Artificial Sequence: Synthetic oligonucleotide
ugccgacugaaacgccgua

SEQ ID NO: 2002928 - RNA, 19 nt, Artificial Sequence
  Description of Artificial Sequence: Synthetic oligonucleotide
gggcuguucucugagcuca

SEQ ID NO: 2002929 - RNA, 19 nt, Artificial Sequence
  Description of Artificial Sequence: Synthetic oligonucleotide
caccgguuagcagucuuca

SEQ ID NO: 2002930 - RNA, 19 nt, Artificial Sequence
  Description of Artificial Sequence: Synthetic oligonucleotide
gccgacugaaacgccguag

SEQ ID NO: 2002931 - RNA, 19 nt, Artificial Sequence
  Description of Artificial Sequence: Synthetic oligonucleotide
cucaucacuuugggcagca

SEQ ID NO: 2002932 - RNA, 19 nt, Artificial Sequence
  Description of Artificial Sequence: Synthetic oligonucleotide
gcccucguugccuucaaaa

SEQ ID NO: 2002933 - RNA, 19 nt, Artificial Sequence
  Description of Artificial Sequence: Synthetic oligonucleotide
ugcgauggugcuggugaua

SEQ ID NO: 2002934 - RNA, 19 nt, Artificial Sequence
  Description of Artificial Sequence: Synthetic oligonucleotide
guucgcaauccuuccuggu

SEQ ID NO: 2002935 - RNA, 19 nt, Artificial Sequence
  Description of Artificial Sequence: Synthetic oligonucleotide
gagcaaaggggaacuggcu

SEQ ID NO: 2002936 - RNA, 19 nt, Artificial Sequence
  Description of Artificial Sequence: Synthetic oligonucleotide
cguugccuucaaaaccugc

SEQ ID NO: 2002937 - RNA, 19 nt, Artificial Sequence
  Description of Artificial Sequence: Synthetic oligonucleotide
ggggcaagcacaagaugca

SEQ ID NO: 2002938 - RNA, 19 nt, Artificial Sequence
  Description of Artificial Sequence: Synthetic oligonucleotide
aucuacccucacagcuuuc

SEQ ID NO: 2002939 - RNA, 19 nt, Artificial Sequence
  Description of Artificial Sequence: Synthetic oligonucleotide
auccagcguucgcaauccu

SEQ ID NO: 2002940 - RNA, 19 nt, Artificial Sequence
  Description of Artificial Sequence: Synthetic oligonucleotide
guaggugccucaucacuuu

SEQ ID NO: 2002941 - RNA, 19 nt, Artificial Sequence
  Description of Artificial Sequence: Synthetic oligonucleotide
cacaccgaccccaaagauu

SEQ ID NO: 2002942 - RNA, 19 nt, Artificial Sequence
  Description of Artificial Sequence: Synthetic oligonucleotide
gagcaccgaggcugcucug

SEQ ID NO: 2002943 - RNA, 19 nt, Artificial Sequence
  Description of Artificial Sequence: Synthetic oligonucleotide
cguuccaccuccucacaug

SEQ ID NO: 2002944 - RNA, 19 nt, Artificial Sequence
  Description of Artificial Sequence: Synthetic oligonucleotide
agauuugggugaagagcuu

SEQ ID NO: 2002945 - RNA, 19 nt, Artificial Sequence
  Description of Artificial Sequence: Synthetic oligonucleotide
guaguacuggagcccugcu

SEQ ID NO: 2002946 - RNA, 19 nt, Artificial Sequence
  Description of Artificial Sequence: Synthetic oligonucleotide
agcccacuuucugucuaga

SEQ ID NO: 2002947 - RNA, 19 nt, Artificial Sequence
  Description of Artificial Sequence: Synthetic oligonucleotide
cucguuccaccuccucaca

SEQ ID NO: 2002948 - RNA, 19 nt, Artificial Sequence
  Description of Artificial Sequence: Synthetic oligonucleotide
cuuccugguaccaccgguu

SEQ ID NO: 2002949 - RNA, 19 nt, Artificial Sequence
  Description of Artificial Sequence: Synthetic oligonucleotide
ggugagugauaaggcucgc

SEQ ID NO: 2002950 - RNA, 19 nt, Artificial Sequence
  Description of Artificial Sequence: Synthetic oligonucleotide
ggggcuguucucugagcuc

SEQ ID NO: 2002951 - RNA, 19 nt, Artificial Sequence
  Description of Artificial Sequence: Synthetic oligonucleotide
gaggcccaggagucugaaa

SEQ ID NO: 2002952 - RNA, 19 nt, Artificial Sequence
  Description of Artificial Sequence: Synthetic oligonucleotide
gggcagggacuugagcacc

SEQ ID NO: 2002953 - RNA, 19 nt, Artificial Sequence
  Description of Artificial Sequence: Synthetic oligonucleotide
cagcgaacucguuccaccu

SEQ ID NO: 2002954 - RNA, 19 nt, Artificial Sequence
  Description of Artificial Sequence: Synthetic oligonucleotide
caccgaccccaaagauuug

SEQ ID NO: 2002955 - RNA, 19 nt, Artificial Sequence
  Description of Artificial Sequence: Synthetic oligonucleotide
caaaagcguccaugguaua

SEQ ID NO: 2002956 - RNA, 19 nt, Artificial Sequence
  Description of Artificial Sequence: Synthetic oligonucleotide
ccaccgguuagcagucuuc

SEQ ID NO: 2002957 - RNA, 19 nt, Artificial Sequence
  Description of Artificial Sequence: Synthetic oligonucleotide
gcuucauggucugaugccu

SEQ ID NO: 2002958 - RNA, 19 nt, Artificial Sequence
  Description of Artificial Sequence: Synthetic oligonucleotide
gagagaaggcggcccucgu

SEQ ID NO: 2002959 - RNA, 19 nt, Artificial Sequence
  Description of Artificial Sequence: Synthetic oligonucleotide
aggcaacuccucaucuuuu

SEQ ID NO: 2002960 - RNA, 19 nt, Artificial Sequence
  Description of Artificial Sequence: Synthetic oligonucleotide
ggucaaacaugaggcaacu

SEQ ID NO: 2002961 - RNA, 19 nt, Artificial Sequence
  Description of Artificial Sequence: Synthetic oligonucleotide
cgcugacaggcguaaguug

SEQ ID NO: 2002962 - RNA, 19 nt, Artificial Sequence
  Description of Artificial Sequence: Synthetic oligonucleotide
guuaggucaugggguggaa

SEQ ID NO: 2002963 - RNA, 19 nt, Artificial Sequence
  Description of Artificial Sequence: Synthetic oligonucleotide
gcagcugacucagggaugu

SEQ ID NO: 2002964 - RNA, 19 nt, Artificial Sequence
  Description of Artificial Sequence: Synthetic oligonucleotide
uaccaccgguuagcagucu

SEQ ID NO: 2002965 - RNA, 19 nt, Artificial Sequence
  Description of Artificial Sequence: Synthetic oligonucleotide
ccguagcucacgcucaaaa

SEQ ID NO: 2002966 - RNA, 19 nt, Artificial Sequence
  Description of Artificial Sequence: Synthetic oligonucleotide
cuguucagccauagccccu

SEQ ID NO: 2002967 - RNA, 19 nt, Artificial Sequence
  Description of Artificial Sequence: Synthetic oligonucleotide
cugccgacugaaacgccgu

SEQ ID NO: 2002968 - RNA, 19 nt, Artificial Sequence
  Description of Artificial Sequence: Synthetic oligonucleotide
ccauuugcauacguuaggu

SEQ ID NO: 2002969 - RNA, 19 nt, Artificial Sequence
  Description of Artificial Sequence: Synthetic oligonucleotide
ggaagcccacuuucugucu

SEQ ID NO: 2002970 - RNA, 19 nt, Artificial Sequence
  Description of Artificial Sequence: Synthetic oligonucleotide
gggugaccacaagaucuac

SEQ ID NO: 2002971 - RNA, 19 nt, Artificial Sequence
  Description of Artificial Sequence: Synthetic oligonucleotide
ccacaagaucuacccucac

SEQ ID NO: 2002972 - RNA, 19 nt, Artificial Sequence
  Description of Artificial Sequence: Synthetic oligonucleotide
gugcugugggacgcugaca

SEQ ID NO: 2002973 - RNA, 19 nt, Artificial Sequence
  Description of Artificial Sequence: Synthetic oligonucleotide
cccuggcucuguaggugcc

SEQ ID NO: 2002974 - RNA, 19 nt, Artificial Sequence
  Description of Artificial Sequence: Synthetic oligonucleotide
gcccacuuucugucuagaa

SEQ ID NO: 2002975 - RNA, 19 nt, Artificial Sequence
  Description of Artificial Sequence: Synthetic oligonucleotide
gggguuggggcaagcacaa

SEQ ID NO: 2002976 - RNA, 19 nt, Artificial Sequence
  Description of Artificial Sequence: Synthetic oligonucleotide
gcccauggcuguucagcca

SEQ ID NO: 2002977 - RNA, 19 nt, Artificial Sequence
  Description of Artificial Sequence: Synthetic oligonucleotide
ggggugaccacaagaucua

SEQ ID NO: 2002978 - RNA, 19 nt, Artificial Sequence
  Description of Artificial Sequence: Synthetic oligonucleotide
ccguaggagguggguagag

SEQ ID NO: 2002979 - RNA, 19 nt, Artificial Sequence
  Description of Artificial Sequence: Synthetic oligonucleotide
ggacgcugacaggcguaag

SEQ ID NO: 2002980 - RNA, 19 nt, Artificial Sequence
  Description of Artificial Sequence: Synthetic oligonucleotide
cccaaagauuugggugaag

SEQ ID NO: 2002981 - RNA, 19 nt, Artificial Sequence
  Description of Artificial Sequence: Synthetic oligonucleotide
gcccaacuggggugcucag

SEQ ID NO: 2002982 - RNA, 19 nt, Artificial Sequence
  Description of Artificial Sequence: Synthetic oligonucleotide
ucgcccaacuggggugcuc

SEQ ID NO: 2002983 - RNA, 19 nt, Artificial Sequence
  Description of Artificial Sequence: Synthetic oligonucleotide
caugggguggaagcccacu

SEQ ID NO: 2002984 - RNA, 19 nt, Artificial Sequence
  Description of Artificial Sequence: Synthetic oligonucleotide
cugcuuucugcugcugggu

SEQ ID NO: 2002985 - RNA, 19 nt, Artificial Sequence
  Description of Artificial Sequence: Synthetic oligonucleotide
gcuguucucugagcucauc

SEQ ID NO: 2002986 - RNA, 19 nt, Artificial Sequence
  Description of Artificial Sequence: Synthetic oligonucleotide
gggacgcugacaggcguaa

SEQ ID NO: 2002987 - RNA, 19 nt, Artificial Sequence
  Description of Artificial Sequence: Synthetic oligonucleotide
ggagccaguccagccuaga

SEQ ID NO: 2002988 - RNA, 19 nt, Artificial Sequence
  Description of Artificial Sequence: Synthetic oligonucleotide
ggguuggggcaagcacaag

SEQ ID NO: 2002989 - RNA, 19 nt, Artificial Sequence
  Description of Artificial Sequence: Synthetic oligonucleotide
ccucugagaggauaacauu

SEQ ID NO: 2002990 - RNA, 19 nt, Artificial Sequence
  Description of Artificial Sequence: Synthetic oligonucleotide
guccagccuagaagagcaa

SEQ ID NO: 2002991 - RNA, 19 nt, Artificial Sequence
  Description of Artificial Sequence: Synthetic oligonucleotide
ggguggaagcccacuuucu

SEQ ID NO: 2002992 - RNA, 19 nt, Artificial Sequence
  Description of Artificial Sequence: Synthetic oligonucleotide
ccccacuucuuggcccucc

SEQ ID NO: 2002993 - RNA, 19 nt, Artificial Sequence
  Description of Artificial Sequence: Synthetic oligonucleotide
ggauaacauuguggugugu

SEQ ID NO: 2002994 - RNA, 19 nt, Artificial Sequence
  Description of Artificial Sequence: Synthetic oligonucleotide
ccgaggcugcucuguagaa

SEQ ID NO: 2002995 - RNA, 19 nt, Artificial Sequence
  Description of Artificial Sequence: Synthetic oligonucleotide
gcagggacuugagcaccga

SEQ ID NO: 2002996 - RNA, 19 nt, Artificial Sequence
  Description of Artificial Sequence: Synthetic oligonucleotide
ggguagagucuaaguggcu

SEQ ID NO: 2002997 - RNA, 19 nt, Artificial Sequence
  Description of Artificial Sequence: Synthetic oligonucleotide
caggcaggaucaggcauuu

SEQ ID NO: 2002998 - RNA, 19 nt, Artificial Sequence
  Description of Artificial Sequence: Synthetic oligonucleotide
ggcccucguugccuucaaa

SEQ ID NO: 2002999 - RNA, 19 nt, Artificial Sequence
  Description of Artificial Sequence: Synthetic oligonucleotide
gcggcccucguugccuuca

SEQ ID NO: 2003000 - RNA, 19 nt, Artificial Sequence
  Description of Artificial Sequence: Synthetic oligonucleotide
ggcggcccucguugccuuc

SEQ ID NO: 2003001 - RNA, 19 nt, Artificial Sequence
  Description of Artificial Sequence: Synthetic oligonucleotide
cgcccaacuggggugcuca

SEQ ID NO: 2003002 - RNA, 19 nt, Artificial Sequence
  Description of Artificial Sequence: Synthetic oligonucleotide
gcucuggaggaagguacuu

SEQ ID NO: 2003003 - RNA, 19 nt, Artificial Sequence
  Description of Artificial Sequence: Synthetic oligonucleotide
ccauggcuguucagccaua

SEQ ID NO: 2003004 - RNA, 19 nt, Artificial Sequence
  Description of Artificial Sequence: Synthetic oligonucleotide
ccucacagcuuuccauguu

SEQ ID NO: 2003005 - RNA, 19 nt, Artificial Sequence
  Description of Artificial Sequence: Synthetic oligonucleotide
cgaacucguuccaccuccu

SEQ ID NO: 2003006 - RNA, 19 nt, Artificial Sequence
  Description of Artificial Sequence: Synthetic oligonucleotide
cucgcccaacuggggugcu

SEQ ID NO: 2003007 - RNA, 19 nt, Artificial Sequence
  Description of Artificial Sequence: Synthetic oligonucleotide
ggcuguucucugagcucau

SEQ ID NO: 2003008 - RNA, 19 nt, Artificial Sequence
  Description of Artificial Sequence: Synthetic oligonucleotide
cgccguagcucacgcucaa

SEQ ID NO: 2003009 - RNA, 19 nt, Artificial Sequence
  Description of Artificial Sequence: Synthetic oligonucleotide
ccagagccucugagaggau

SEQ ID NO: 2003010 - RNA, 19 nt, Artificial Sequence
  Description of Artificial Sequence: Synthetic oligonucleotide
cggcccucguugccuucaa

SEQ ID NO: 2003011 - RNA, 19 nt, Artificial Sequence
  Description of Artificial Sequence: Synthetic oligonucleotide
ggcccuccucagggugagu

SEQ ID NO: 2003012 - RNA, 19 nt, Artificial Sequence
  Description of Artificial Sequence: Synthetic oligonucleotide
ucuuauaaagcucacuugg

SEQ ID NO: 2003013 - RNA, 19 nt, Artificial Sequence
  Description of Artificial Sequence: Synthetic oligonucleotide
auaaagcucacuugggacc

SEQ ID NO: 2003014 - RNA, 19 nt, Artificial Sequence
  Description of Artificial Sequence: Synthetic oligonucleotide
ucgacuuuaacaaugacau

SEQ ID NO: 2003015 - RNA, 19 nt, Artificial Sequence
  Description of Artificial Sequence: Synthetic oligonucleotide
uauuuuggccuacagaccc

SEQ ID NO: 2003016 - RNA, 19 nt, Artificial Sequence
  Description of Artificial Sequence: Synthetic oligonucleotide
ucaaacugagugaagaaug

SEQ ID NO: 2003017 - RNA, 19 nt, Artificial Sequence
  Description of Artificial Sequence: Synthetic oligonucleotide
uacuacuugacuaacuuug

SEQ ID NO: 2003018 - RNA, 19 nt, Artificial Sequence
  Description of Artificial Sequence: Synthetic oligonucleotide
aaagguguacccaugguac

SEQ ID NO: 2003019 - RNA, 19 nt, Artificial Sequence
  Description of Artificial Sequence: Synthetic oligonucleotide
ucuuuuacagggcagaaaa

SEQ ID NO: 2003020 - RNA, 19 nt, Artificial Sequence
  Description of Artificial Sequence: Synthetic oligonucleotide
aagaagaaauuguugugag

SEQ ID NO: 2003021 - RNA, 19 nt, Artificial Sequence
  Description of Artificial Sequence: Synthetic oligonucleotide
ucaugauccagcaugguca

SEQ ID NO: 2003022 - RNA, 19 nt, Artificial Sequence
  Description of Artificial Sequence: Synthetic oligonucleotide
uuuaacaaugacaucccug

SEQ ID NO: 2003023 - RNA, 19 nt, Artificial Sequence
  Description of Artificial Sequence: Synthetic oligonucleotide
cuaacuuuggcaacuuugg

SEQ ID NO: 2003024 - RNA, 19 nt, Artificial Sequence
  Description of Artificial Sequence: Synthetic oligonucleotide
acuccaaucuacuuccagc

SEQ ID NO: 2003025 - RNA, 19 nt, Artificial Sequence
  Description of Artificial Sequence: Synthetic oligonucleotide
cuuuacauccaccaugggg

SEQ ID NO: 2003026 - RNA, 19 nt, Artificial Sequence
  Description of Artificial Sequence: Synthetic oligonucleotide
uuuuacagggcagaaaagc

SEQ ID NO: 2003027 - RNA, 19 nt, Artificial Sequence
  Description of Artificial Sequence: Synthetic oligonucleotide
gaaauuguugugaggaggg

SEQ ID NO: 2003028 - RNA, 19 nt, Artificial Sequence
  Description of Artificial Sequence: Synthetic oligonucleotide
uuauaaagcucacuuggga

SEQ ID NO: 2003029 - RNA, 19 nt, Artificial Sequence
  Description of Artificial Sequence: Synthetic oligonucleotide
aacuggucgacuuuaacaa

SEQ ID NO: 2003030 - RNA, 19 nt, Artificial Sequence
  Description of Artificial Sequence: Synthetic oligonucleotide
gaugaauccagcuuugcuc

SEQ ID NO: 2003031 - RNA, 19 nt, Artificial Sequence
  Description of Artificial Sequence: Synthetic oligonucleotide
agauuugcaaagguguacc

SEQ ID NO: 2003032 - RNA, 19 nt, Artificial Sequence
  Description of Artificial Sequence: Synthetic oligonucleotide
aaacugagugaagaaugcc

SEQ ID NO: 2003033 - RNA, 19 nt, Artificial Sequence
  Description of Artificial Sequence: Synthetic oligonucleotide
aagauuugcaaagguguac

SEQ ID NO: 2003034 - RNA, 19 nt, Artificial Sequence
  Description of Artificial Sequence: Synthetic oligonucleotide
auuguugugaggagggucc

SEQ ID NO: 2003035 - RNA, 19 nt, Artificial Sequence
  Description of Artificial Sequence: Synthetic oligonucleotide
uccaagauuugcaaaggug

SEQ ID NO: 2003036 - RNA, 19 nt, Artificial Sequence
  Description of Artificial Sequence: Synthetic oligonucleotide
aagaaauuguugugaggag

SEQ ID NO: 2003037 - RNA, 19 nt, Artificial Sequence
  Description of Artificial Sequence: Synthetic oligonucleotide
agcaguaccuggcaaaguc

SEQ ID NO: 2003038 - RNA, 19 nt, Artificial Sequence
  Description of Artificial Sequence: Synthetic oligonucleotide
agaaauuguugugaggagg

SEQ ID NO: 2003039 - RNA, 19 nt, Artificial Sequence
  Description of Artificial Sequence: Synthetic oligonucleotide
uccgaauuaagaacugagc

SEQ ID NO: 2003040 - RNA, 19 nt, Artificial Sequence
  Description of Artificial Sequence: Synthetic oligonucleotide
agcacaucguuucugaugu

SEQ ID NO: 2003041 - RNA, 19 nt, Artificial Sequence
  Description of Artificial Sequence: Synthetic oligonucleotide
ucacuugggaccuaggcac

SEQ ID NO: 2003042 - RNA, 19 nt, Artificial Sequence
  Description of Artificial Sequence: Synthetic oligonucleotide
cuccaaucuacuuccagcg

SEQ ID NO: 2003043 - RNA, 19 nt, Artificial Sequence
  Description of Artificial Sequence: Synthetic oligonucleotide
uuaagaacugagcuccaca

SEQ ID NO: 2003044 - RNA, 19 nt, Artificial Sequence
  Description of Artificial Sequence: Synthetic oligonucleotide
agaagaaauuguugugagg

SEQ ID NO: 2003045 - RNA, 19 nt, Artificial Sequence
  Description of Artificial Sequence: Synthetic oligonucleotide
uucuuauaaagcucacuug

SEQ ID NO: 2003046 - RNA, 19 nt, Artificial Sequence
  Description of Artificial Sequence: Synthetic oligonucleotide
aagucaggcacaccgcauc

SEQ ID NO: 2003047 - RNA, 19 nt, Artificial Sequence
  Description of Artificial Sequence: Synthetic oligonucleotide
ucuacuacuugacuaacuu

SEQ ID NO: 2003048 - RNA, 19 nt, Artificial Sequence
  Description of Artificial Sequence: Synthetic oligonucleotide
aacuuuggcaacuuugguu

SEQ ID NO: 2003049 - RNA, 19 nt, Artificial Sequence
  Description of Artificial Sequence: Synthetic oligonucleotide
gaacuggucgacuuuaaca

SEQ ID NO: 2003050 - RNA, 19 nt, Artificial Sequence
  Description of Artificial Sequence: Synthetic oligonucleotide
aguagucuggggcugugcg

SEQ ID NO: 2003051 - RNA, 19 nt, Artificial Sequence
  Description of Artificial Sequence: Synthetic oligonucleotide
caccgcaucaaacugagug

SEQ ID NO: 2003052 - RNA, 19 nt, Artificial Sequence
  Description of Artificial Sequence: Synthetic oligonucleotide
acuugacuaacuuuggcaa

SEQ ID NO: 2003053 - RNA, 19 nt, Artificial Sequence
  Description of Artificial Sequence: Synthetic oligonucleotide
aauuucagccccaagcccu

SEQ ID NO: 2003054 - RNA, 19 nt, Artificial Sequence
  Description of Artificial Sequence: Synthetic oligonucleotide
guaccuggcaaagucaugg

SEQ ID NO: 2003055 - RNA, 19 nt, Artificial Sequence
  Description of Artificial Sequence: Synthetic oligonucleotide
agugaagaaugccucaggu

SEQ ID NO: 2003056 - RNA, 19 nt, Artificial Sequence
  Description of Artificial Sequence: Synthetic oligonucleotide
uccaacaaucagcacccgg

SEQ ID NO: 2003057 - RNA, 19 nt, Artificial Sequence
  Description of Artificial Sequence: Synthetic oligonucleotide
uccagcgccucuuuuacag

SEQ ID NO: 2003058 - RNA, 19 nt, Artificial Sequence
  Description of Artificial Sequence: Synthetic oligonucleotide
uugucucagaugaauccag

SEQ ID NO: 2003059 - RNA, 19 nt, Artificial Sequence
  Description of Artificial Sequence: Synthetic oligonucleotide
aaugacaucccuggagcag

SEQ ID NO: 2003060 - RNA, 19 nt, Artificial Sequence
  Description of Artificial Sequence: Synthetic oligonucleotide
uucaugauccagcaugguc

SEQ ID NO: 2003061 - RNA, 19 nt, Artificial Sequence
  Description of Artificial Sequence: Synthetic oligonucleotide
cauacuggggccaucucag

SEQ ID NO: 2003062 - RNA, 19 nt, Artificial Sequence
  Description of Artificial Sequence: Synthetic oligonucleotide
uucacaauuuccugugcca

SEQ ID NO: 2003063 - RNA, 19 nt, Artificial Sequence
  Description of Artificial Sequence: Synthetic oligonucleotide
auggucagucccuucacuc

SEQ ID NO: 2003064 - RNA, 19 nt, Artificial Sequence
  Description of Artificial Sequence: Synthetic oligonucleotide
gagucaagcacaucguuuc

SEQ ID NO: 2003065 - RNA, 19 nt, Artificial Sequence
  Description of Artificial Sequence: Synthetic oligonucleotide
aacugagugaagaaugccu

SEQ ID NO: 2003066 - RNA, 19 nt, Artificial Sequence
  Description of Artificial Sequence: Synthetic oligonucleotide
uuauccgugcggaauuuca

SEQ ID NO: 2003067 - RNA, 19 nt, Artificial Sequence
  Description of Artificial Sequence: Synthetic oligonucleotide
agaacuggucgacuuuaac

SEQ ID NO: 2003068 - RNA, 19 nt, Artificial Sequence
  Description of Artificial Sequence: Synthetic oligonucleotide
cuauuuuggccuacagacc

SEQ ID NO: 2003069 - RNA, 19 nt, Artificial Sequence
  Description of Artificial Sequence: Synthetic oligonucleotide
uccacaauuccacuccccu

SEQ ID NO: 2003070 - RNA, 19 nt, Artificial Sequence
  Description of Artificial Sequence: Synthetic oligonucleotide
ucauggggaagcaggucgg

SEQ ID NO: 2003071 - RNA, 19 nt, Artificial Sequence
  Description of Artificial Sequence: Synthetic oligonucleotide
gucccguugagacagggcc

SEQ ID NO: 2003072 - RNA, 19 nt, Artificial Sequence
  Description of Artificial Sequence: Synthetic oligonucleotide
acuccacaauuccacuccc

SEQ ID NO: 2003073 - RNA, 19 nt, Artificial Sequence
  Description of Artificial Sequence: Synthetic oligonucleotide
uauccgugcggaauuucag

SEQ ID NO: 2003074 - RNA, 19 nt, Artificial Sequence
  Description of Artificial Sequence: Synthetic oligonucleotide
cuaggcacuccacaauucc

SEQ ID NO: 2003075 - RNA, 19 nt, Artificial Sequence
  Description of Artificial Sequence: Synthetic oligonucleotide
cuggucgacuuuaacaaug

SEQ ID NO: 2003076 - RNA, 19 nt, Artificial Sequence
  Description of Artificial Sequence: Synthetic oligonucleotide
cucgcuguagcugucagag

SEQ ID NO: 2003077 - RNA, 19 nt, Artificial Sequence
  Description of Artificial Sequence: Synthetic oligonucleotide
aacucaugcucuccaagau

SEQ ID NO: 2003078 - RNA, 19 nt, Artificial Sequence
  Description of Artificial Sequence: Synthetic oligonucleotide
caccaugggguucagauuc

SEQ ID NO: 2003079 - RNA, 19 nt, Artificial Sequence
  Description of Artificial Sequence: Synthetic oligonucleotide
acgaagccgcuucugggcc

SEQ ID NO: 2003080 - RNA, 19 nt, Artificial Sequence
  Description of Artificial Sequence: Synthetic oligonucleotide
ggcugugcgcuucagagcg

SEQ ID NO: 2003081 - RNA, 19 nt, Artificial Sequence
  Description of Artificial Sequence: Synthetic oligonucleotide
gaauuucagcagcacuugc

SEQ ID NO: 2003082 - RNA, 19 nt, Artificial Sequence
  Description of Artificial Sequence: Synthetic oligonucleotide
uugacuaacuuuggcaacu

SEQ ID NO: 2003083 - RNA, 19 nt, Artificial Sequence
  Description of Artificial Sequence: Synthetic oligonucleotide
auccagcauggucaguccc

SEQ ID NO: 2003084 - RNA, 19 nt, Artificial Sequence
  Description of Artificial Sequence: Synthetic oligonucleotide
uucacuccugccaggauaa

SEQ ID NO: 2003085 - RNA, 19 nt, Artificial Sequence
  Description of Artificial Sequence: Synthetic oligonucleotide
cugggcucguuccagagag

SEQ ID NO: 2003086 - RNA, 19 nt, Artificial Sequence
  Description of Artificial Sequence: Synthetic oligonucleotide
gguugucucagaugaaucc

SEQ ID NO: 2003087 - RNA, 19 nt, Artificial Sequence
  Description of Artificial Sequence: Synthetic oligonucleotide
uucuacuacuugacuaacu

SEQ ID NO: 2003088 - RNA, 19 nt, Artificial Sequence
  Description of Artificial Sequence: Synthetic oligonucleotide
cacuccacaauuccacucc

SEQ ID NO: 2003089 - RNA, 19 nt, Artificial Sequence
  Description of Artificial Sequence: Synthetic oligonucleotide
acauacuggggccaucuca

SEQ ID NO: 2003090 - RNA, 19 nt, Artificial Sequence
  Description of Artificial Sequence: Synthetic oligonucleotide
accuggcaaagucaugggg

SEQ ID NO: 2003091 - RNA, 19 nt, Artificial Sequence
  Description of Artificial Sequence: Synthetic oligonucleotide
cagauucugggcucguucc

SEQ ID NO: 2003092 - RNA, 19 nt, Artificial Sequence
  Description of Artificial Sequence: Synthetic oligonucleotide
caauuucagccccaagccc

SEQ ID NO: 2003093 - RNA, 19 nt, Artificial Sequence
  Description of Artificial Sequence: Synthetic oligonucleotide
uggucgacuuuaacaauga

SEQ ID NO: 2003094 - RNA, 19 nt, Artificial Sequence
  Description of Artificial Sequence: Synthetic oligonucleotide
cuugacuaacuuuggcaac

SEQ ID NO: 2003095 - RNA, 19 nt, Artificial Sequence
  Description of Artificial Sequence: Synthetic oligonucleotide
agcccuuucauuccaacaa

SEQ ID NO: 2003096 - RNA, 19 nt, Artificial Sequence
  Description of Artificial Sequence: Synthetic oligonucleotide
agguguacccaugguaccc

SEQ ID NO: 2003097 - RNA, 19 nt, Artificial Sequence
  Description of Artificial Sequence: Synthetic oligonucleotide
ugggguucagauucugggc

SEQ ID NO: 2003098 - RNA, 19 nt, Artificial Sequence
  Description of Artificial Sequence: Synthetic oligonucleotide
uucagagcggccuuggcuu

SEQ ID NO: 2003099 - RNA, 19 nt, Artificial Sequence
  Description of Artificial Sequence: Synthetic oligonucleotide
acuacuugacuaacuuugg

SEQ ID NO: 2003100 - RNA, 19 nt, Artificial Sequence
  Description of Artificial Sequence: Synthetic oligonucleotide
uccaaucuacuuccagcgc

SEQ ID NO: 2003101 - RNA, 19 nt, Artificial Sequence
  Description of Artificial Sequence: Synthetic oligonucleotide
gucgacuuuaacaaugaca

SEQ ID NO: 2003102 - RNA, 19 nt, Artificial Sequence
  Description of Artificial Sequence: Synthetic oligonucleotide
ucuucuuauaaagcucacu

SEQ ID NO: 2003103 - RNA, 19 nt, Artificial Sequence
  Description of Artificial Sequence: Synthetic oligonucleotide
guccgaauuaagaacugag

SEQ ID NO: 2003104 - RNA, 19 nt, Artificial Sequence
  Description of Artificial Sequence: Synthetic oligonucleotide
uggucagucccuucacucc

SEQ ID NO: 2003105 - RNA, 19 nt, Artificial Sequence
  Description of Artificial Sequence: Synthetic oligonucleotide
caggauaagguucuuggca

SEQ ID NO: 2003106 - RNA, 19 nt, Artificial Sequence
  Description of Artificial Sequence: Synthetic oligonucleotide
accgcaucaaacugaguga

SEQ ID NO: 2003107 - RNA, 19 nt, Artificial Sequence
  Description of Artificial Sequence: Synthetic oligonucleotide
cuuucucuccacuccaauc

SEQ ID NO: 2003108 - RNA, 19 nt, Artificial Sequence
  Description of Artificial Sequence: Synthetic oligonucleotide
uggggaagcaggucggggc

SEQ ID NO: 2003109 - RNA, 19 nt, Artificial Sequence
  Description of Artificial Sequence: Synthetic oligonucleotide
uaaagcucacuugggaccu

SEQ ID NO: 2003110 - RNA, 19 nt, Artificial Sequence
  Description of Artificial Sequence: Synthetic oligonucleotide
caugauccagcauggucag

SEQ ID NO: 2003111 - RNA, 19 nt, Artificial Sequence
  Description of Artificial Sequence: Synthetic oligonucleotide
caugggguucagauucugg

SEQ ID NO: 2003112 - RNA, 19 nt, Artificial Sequence
  Description of Artificial Sequence: Synthetic oligonucleotide
cacaccgcaucaaacugag

SEQ ID NO: 2003113 - RNA, 19 nt, Artificial Sequence
  Description of Artificial Sequence: Synthetic oligonucleotide
uacagacccaguccgaauu

SEQ ID NO: 2003114 - RNA, 19 nt, Artificial Sequence
  Description of Artificial Sequence: Synthetic oligonucleotide
gguacccaaagacaucucc

SEQ ID NO: 2003115 - RNA, 19 nt, Artificial Sequence
  Description of Artificial Sequence: Synthetic oligonucleotide
cacaucguuucugaugugc

SEQ ID NO: 2003116 - RNA, 19 nt, Artificial Sequence
  Description of Artificial Sequence: Synthetic oligonucleotide
ugguugucucagaugaauc

SEQ ID NO: 2003117 - RNA, 19 nt, Artificial Sequence
  Description of Artificial Sequence: Synthetic oligonucleotide
uaacaaugacaucccugga

SEQ ID NO: 2003118 - RNA, 19 nt, Artificial Sequence
  Description of Artificial Sequence: Synthetic oligonucleotide
aucaaacugagugaagaau

SEQ ID NO: 2003119 - RNA, 19 nt, Artificial Sequence
  Description of Artificial Sequence: Synthetic oligonucleotide
cacgaagccgcuucugggc

SEQ ID NO: 2003120 - RNA, 19 nt, Artificial Sequence
  Description of Artificial Sequence: Synthetic oligonucleotide
uaccuggcaaagucauggg

SEQ ID NO: 2003121 - RNA, 19 nt, Artificial Sequence
  Description of Artificial Sequence: Synthetic oligonucleotide
cacaauuuccugugccaag

SEQ ID NO: 2003122 - RNA, 19 nt, Artificial Sequence
  Description of Artificial Sequence: Synthetic oligonucleotide
cagcgccucuuuuacaggg

SEQ ID NO: 2003123 - RNA, 19 nt, Artificial Sequence
  Description of Artificial Sequence: Synthetic oligonucleotide
aggcacaccgcaucaaacu

SEQ ID NO: 2003124 - RNA, 19 nt, Artificial Sequence
  Description of Artificial Sequence: Synthetic oligonucleotide
uccugccaggauaagguuc

SEQ ID NO: 2003125 - RNA, 19 nt, Artificial Sequence
  Description of Artificial Sequence: Synthetic oligonucleotide
uuuuggccuacagacccag

SEQ ID NO: 2003126 - RNA, 19 nt, Artificial Sequence
  Description of Artificial Sequence: Synthetic oligonucleotide
caucguuucugaugugcag

SEQ ID NO: 2003127 - RNA, 19 nt, Artificial Sequence
  Description of Artificial Sequence: Synthetic oligonucleotide
uugagacagggccuucaca

SEQ ID NO: 2003128 - RNA, 19 nt, Artificial Sequence
  Description of Artificial Sequence: Synthetic oligonucleotide
accaugguugucucagaug

SEQ ID NO: 2003129 - RNA, 19 nt, Artificial Sequence
  Description of Artificial Sequence: Synthetic oligonucleotide
acccgggaagcacgaagcc

SEQ ID NO: 2003130 - RNA, 19 nt, Artificial Sequence
  Description of Artificial Sequence: Synthetic oligonucleotide
ucucuccacuccaaucuac

SEQ ID NO: 2003131 - RNA, 19 nt, Artificial Sequence
  Description of Artificial Sequence: Synthetic oligonucleotide
ccaaucuacuuccagcgcc

SEQ ID NO: 2003132 - RNA, 19 nt, Artificial Sequence
  Description of Artificial Sequence: Synthetic oligonucleotide
ucucuuggugucaggucca

SEQ ID NO: 2003133 - RNA, 19 nt, Artificial Sequence
  Description of Artificial Sequence: Synthetic oligonucleotide
aagaaugccucagguuucu

SEQ ID NO: 2003134 - RNA, 19 nt, Artificial Sequence
  Description of Artificial Sequence: Synthetic oligonucleotide
gguucuuggcaauuucagc

SEQ ID NO: 2003135 - RNA, 19 nt, Artificial Sequence
  Description of Artificial Sequence: Synthetic oligonucleotide
uggcuuucucuccacucca

SEQ ID NO: 2003136 - RNA, 19 nt, Artificial Sequence
  Description of Artificial Sequence: Synthetic oligonucleotide
uucugggcucguuccagag

SEQ ID NO: 2003137 - RNA, 19 nt, Artificial Sequence
  Description of Artificial Sequence: Synthetic oligonucleotide
ucuggagauaccuguucau

SEQ ID NO: 2003138 - RNA, 19 nt, Artificial Sequence
  Description of Artificial Sequence: Synthetic oligonucleotide
ucucuucuacaaacucaug

SEQ ID NO: 2003139 - RNA, 19 nt, Artificial Sequence
  Description of Artificial Sequence: Synthetic oligonucleotide
cacccgggaagcacgaagc

SEQ ID NO: 2003140 - RNA, 19 nt, Artificial Sequence
  Description of Artificial Sequence: Synthetic oligonucleotide
cuuccagcgccucuuuuac

SEQ ID NO: 2003141 - RNA, 19 nt, Artificial Sequence
  Description of Artificial Sequence: Synthetic oligonucleotide
uccgcguccucgcuguagc

SEQ ID NO: 2003142 - RNA, 19 nt, Artificial Sequence
  Description of Artificial Sequence: Synthetic oligonucleotide
uccaaccacagcacauacu

SEQ ID NO: 2003143 - RNA, 19 nt, Artificial Sequence
  Description of Artificial Sequence: Synthetic oligonucleotide
ugacagaacuggucgacuu

SEQ ID NO: 2003144 - RNA, 19 nt, Artificial Sequence
  Description of Artificial Sequence: Synthetic oligonucleotide
aaucuacuuccagcgccuc

SEQ ID NO: 2003145 - RNA, 19 nt, Artificial Sequence
  Description of Artificial Sequence: Synthetic oligonucleotide
uuuugaccaugguugucuc

SEQ ID NO: 2003146 - RNA, 19 nt, Artificial Sequence
  Description of Artificial Sequence: Synthetic oligonucleotide
ggccuacagacccaguccg

SEQ ID NO: 2003147 - RNA, 19 nt, Artificial Sequence
  Description of Artificial Sequence: Synthetic oligonucleotide
acccaaagacaucuccugu

SEQ ID NO: 2003148 - RNA, 19 nt, Artificial Sequence
  Description of Artificial Sequence: Synthetic oligonucleotide
ggcaaagucauggggaagc

SEQ ID NO: 2003149 - RNA, 19 nt, Artificial Sequence
  Description of Artificial Sequence: Synthetic oligonucleotide
aauuaagaacugagcucca

SEQ ID NO: 2003150 - RNA, 19 nt, Artificial Sequence
  Description of Artificial Sequence: Synthetic oligonucleotide
gaagaaugccucagguuuc

SEQ ID NO: 2003151 - RNA, 19 nt, Artificial Sequence
  Description of Artificial Sequence: Synthetic oligonucleotide
caugguacccaaagacauc

SEQ ID NO: 2003152 - RNA, 19 nt, Artificial Sequence
  Description of Artificial Sequence: Synthetic oligonucleotide
agggccuucacaauuuccu

SEQ ID NO: 2003153 - RNA, 19 nt, Artificial Sequence
  Description of Artificial Sequence: Synthetic oligonucleotide
uagucuggggcugugcgcu

SEQ ID NO: 2003154 - RNA, 19 nt, Artificial Sequence
  Description of Artificial Sequence: Synthetic oligonucleotide
cuacaaacucaugcucucc

SEQ ID NO: 2003155 - RNA, 19 nt, Artificial Sequence
  Description of Artificial Sequence: Synthetic oligonucleotide
uguugugaggagggucccg

SEQ ID NO: 2003156 - RNA, 19 nt, Artificial Sequence
  Description of Artificial Sequence: Synthetic oligonucleotide
cuggagauaccuguucaug

SEQ ID NO: 2003157 - RNA, 19 nt, Artificial Sequence
  Description of Artificial Sequence: Synthetic oligonucleotide
acagucuucuggagauacc

SEQ ID NO: 2003158 - RNA, 19 nt, Artificial Sequence
  Description of Artificial Sequence: Synthetic oligonucleotide
agucaggcacaccgcauca

SEQ ID NO: 2003159 - RNA, 19 nt, Artificial Sequence
  Description of Artificial Sequence: Synthetic oligonucleotide
caagaucccuccaaccaca

SEQ ID NO: 2003160 - RNA, 19 nt, Artificial Sequence
  Description of Artificial Sequence: Synthetic oligonucleotide
aagcucacuugggaccuag

SEQ ID NO: 2003161 - RNA, 19 nt, Artificial Sequence
  Description of Artificial Sequence: Synthetic oligonucleotide
agucaagcacaucguuucu

SEQ ID NO: 2003162 - RNA, 19 nt, Artificial Sequence
  Description of Artificial Sequence: Synthetic oligonucleotide
aaaguagucuggggcugug

SEQ ID NO: 2003163 - RNA, 19 nt, Artificial Sequence
  Description of Artificial Sequence: Synthetic oligonucleotide
agacagggccuucacaauu

SEQ ID NO: 2003164 - RNA, 19 nt, Artificial Sequence
  Description of Artificial Sequence: Synthetic oligonucleotide
augguugucucagaugaau

SEQ ID NO: 2003165 - RNA, 19 nt, Artificial Sequence
  Description of Artificial Sequence: Synthetic oligonucleotide
cgaauuaagaacugagcuc

SEQ ID NO: 2003166 - RNA, 19 nt, Artificial Sequence
  Description of Artificial Sequence: Synthetic oligonucleotide
accuaggcacuccacaauu

SEQ ID NO: 2003167 - RNA, 19 nt, Artificial Sequence
  Description of Artificial Sequence: Synthetic oligonucleotide
agagcuggggucccgcccu

SEQ ID NO: 2003168 - RNA, 19 nt, Artificial Sequence
  Description of Artificial Sequence: Synthetic oligonucleotide
cacuccugccaggauaagg

SEQ ID NO: 2003169 - RNA, 19 nt, Artificial Sequence
  Description of Artificial Sequence: Synthetic oligonucleotide
guagucuggggcugugcgc

SEQ ID NO: 2003170 - RNA, 19 nt, Artificial Sequence
  Description of Artificial Sequence: Synthetic oligonucleotide
ugaugcuguuucugugaca

SEQ ID NO: 2003171 - RNA, 19 nt, Artificial Sequence
  Description of Artificial Sequence: Synthetic oligonucleotide
acucaugcucuccaagauu

SEQ ID NO: 2003172 - RNA, 19 nt, Artificial Sequence
  Description of Artificial Sequence: Synthetic oligonucleotide
agaggccucagcccuauuu

SEQ ID NO: 2003173 - RNA, 19 nt, Artificial Sequence
  Description of Artificial Sequence: Synthetic oligonucleotide
ucccguugagacagggccu

SEQ ID NO: 2003174 - RNA, 19 nt, Artificial Sequence
  Description of Artificial Sequence: Synthetic oligonucleotide
caggcacaccgcaucaaac

SEQ ID NO: 2003175 - RNA, 19 nt, Artificial Sequence
  Description of Artificial Sequence: Synthetic oligonucleotide
ggaucugccggucguacug

SEQ ID NO: 2003176 - RNA, 19 nt, Artificial Sequence
  Description of Artificial Sequence: Synthetic oligonucleotide
uuuggcaacuuugguuuuc

SEQ ID NO: 2003177 - RNA, 19 nt, Artificial Sequence
  Description of Artificial Sequence: Synthetic oligonucleotide
aggccucagcccuauuuug

SEQ ID NO: 2003178 - RNA, 19 nt, Artificial Sequence
  Description of Artificial Sequence: Synthetic oligonucleotide
aguccgaauuaagaacuga

SEQ ID NO: 2003179 - RNA, 19 nt, Artificial Sequence
  Description of Artificial Sequence: Synthetic oligonucleotide
guugagacagggccuucac

SEQ ID NO: 2003180 - RNA, 19 nt, Artificial Sequence
  Description of Artificial Sequence: Synthetic oligonucleotide
caagcccuuucauuccaac

SEQ ID NO: 2003181 - RNA, 19 nt, Artificial Sequence
  Description of Artificial Sequence: Synthetic oligonucleotide
caagauuugcaaaggugua

SEQ ID NO: 2003182 - RNA, 19 nt, Artificial Sequence
  Description of Artificial Sequence: Synthetic oligonucleotide
acuggucgacuuuaacaau

SEQ ID NO: 2003183 - RNA, 19 nt, Artificial Sequence
  Description of Artificial Sequence: Synthetic oligonucleotide
gcaucaaacugagugaaga

SEQ ID NO: 2003184 - RNA, 19 nt, Artificial Sequence
  Description of Artificial Sequence: Synthetic oligonucleotide
agucauggggaagcagguc

SEQ ID NO: 2003185 - RNA, 19 nt, Artificial Sequence
  Description of Artificial Sequence: Synthetic oligonucleotide
caguccgaauuaagaacug

SEQ ID NO: 2003186 - RNA, 19 nt, Artificial Sequence
  Description of Artificial Sequence: Synthetic oligonucleotide
cccaguccgaauuaagaac

SEQ ID NO: 2003187 - RNA, 19 nt, Artificial Sequence
  Description of Artificial Sequence: Synthetic oligonucleotide
caaagucauggggaagcag

SEQ ID NO: 2003188 - RNA, 19 nt, Artificial Sequence
  Description of Artificial Sequence: Synthetic oligonucleotide
aucugccggucguacugcg

SEQ ID NO: 2003189 - RNA, 19 nt, Artificial Sequence
  Description of Artificial Sequence: Synthetic oligonucleotide
ggcacaccgcaucaaacug

SEQ ID NO: 2003190 - RNA, 19 nt, Artificial Sequence
  Description of Artificial Sequence: Synthetic oligonucleotide
gucaagcacaucguuucug

SEQ ID NO: 2003191 - RNA, 19 nt, Artificial Sequence
  Description of Artificial Sequence: Synthetic oligonucleotide
gucuucuggagauaccugu

SEQ ID NO: 2003192 - RNA, 19 nt, Artificial Sequence
  Description of Artificial Sequence: Synthetic oligonucleotide
ggaagcacgaagccgcuuc

SEQ ID NO: 2003193 - RNA, 19 nt, Artificial Sequence
  Description of Artificial Sequence: Synthetic oligonucleotide
ucccuccaaccacagcaca

SEQ ID NO: 2003194 - RNA, 19 nt, Artificial Sequence
  Description of Artificial Sequence: Synthetic oligonucleotide
gcucacuugggaccuaggc

SEQ ID NO: 2003195 - RNA, 19 nt, Artificial Sequence
  Description of Artificial Sequence: Synthetic oligonucleotide
acaucguuucugaugugca

SEQ ID NO: 2003196 - RNA, 19 nt, Artificial Sequence
  Description of Artificial Sequence: Synthetic oligonucleotide
ccaagauuugcaaaggugu

SEQ ID NO: 2003197 - RNA, 19 nt, Artificial Sequence
  Description of Artificial Sequence: Synthetic oligonucleotide
agcgccucuuuuacagggc

SEQ ID NO: 2003198 - RNA, 19 nt, Artificial Sequence
  Description of Artificial Sequence: Synthetic oligonucleotide
uuuauccgugcggaauuuc

SEQ ID NO: 2003199 - RNA, 19 nt, Artificial Sequence
  Description of Artificial Sequence: Synthetic oligonucleotide
ucagagcuggggucccgcc

SEQ ID NO: 2003200 - RNA, 19 nt, Artificial Sequence
  Description of Artificial Sequence: Synthetic oligonucleotide
aucuacuuccagcgccucu

SEQ ID NO: 2003201 - RNA, 19 nt, Artificial Sequence
  Description of Artificial Sequence: Synthetic oligonucleotide
ugggcucguuccagagagg

SEQ ID NO: 2003202 - RNA, 19 nt, Artificial Sequence
  Description of Artificial Sequence: Synthetic oligonucleotide
cucaugcucuccaagauuu

SEQ ID NO: 2003203 - RNA, 19 nt, Artificial Sequence
  Description of Artificial Sequence: Synthetic oligonucleotide
cagaugaauccagcuuugc

SEQ ID NO: 2003204 - RNA, 19 nt, Artificial Sequence
  Description of Artificial Sequence: Synthetic oligonucleotide
caaugacaucccuggagca

SEQ ID NO: 2003205 - RNA, 19 nt, Artificial Sequence
  Description of Artificial Sequence: Synthetic oligonucleotide
gguucagauucugggcucg

SEQ ID NO: 2003206 - RNA, 19 nt, Artificial Sequence
  Description of Artificial Sequence: Synthetic oligonucleotide
gcacgaagccgcuucuggg

SEQ ID NO: 2003207 - RNA, 19 nt, Artificial Sequence
  Description of Artificial Sequence: Synthetic oligonucleotide
caucucagagaagcaguac

SEQ ID NO: 2003208 - RNA, 19 nt, Artificial Sequence
  Description of Artificial Sequence: Synthetic oligonucleotide
uuguugugaggaggguccc

SEQ ID NO: 2003209 - RNA, 19 nt, Artificial Sequence
  Description of Artificial Sequence: Synthetic oligonucleotide
ugcggaauuucagcagcac

SEQ ID NO: 2003210 - RNA, 19 nt, Artificial Sequence
  Description of Artificial Sequence: Synthetic oligonucleotide
acuugggaccuaggcacuc

SEQ ID NO: 2003211 - RNA, 19 nt, Artificial Sequence
  Description of Artificial Sequence: Synthetic oligonucleotide
ccaggauaagguucuuggc

SEQ ID NO: 2003212 - RNA, 19 nt, Artificial Sequence
  Description of Artificial Sequence: Synthetic oligonucleotide
uggggucccgcccuuuauc

SEQ ID NO: 2003213 - RNA, 19 nt, Artificial Sequence
  Description of Artificial Sequence: Synthetic oligonucleotide
gaucugccggucguacugc

SEQ ID NO: 2003214 - RNA, 19 nt, Artificial Sequence
  Description of Artificial Sequence: Synthetic oligonucleotide
aagcaguaccuggcaaagu

SEQ ID NO: 2003215 - RNA, 19 nt, Artificial Sequence
  Description of Artificial Sequence: Synthetic oligonucleotide
acgcccagcgagucaagca

SEQ ID NO: 2003216 - RNA, 19 nt, Artificial Sequence
  Description of Artificial Sequence: Synthetic oligonucleotide
ccgaauuaagaacugagcu

SEQ ID NO: 2003217 - RNA, 19 nt, Artificial Sequence
  Description of Artificial Sequence: Synthetic oligonucleotide
agcggccuuggcuuucucu

SEQ ID NO: 2003218 - RNA, 19 nt, Artificial Sequence
  Description of Artificial Sequence: Synthetic oligonucleotide
cuugggaccuaggcacucc

SEQ ID NO: 2003219 - RNA, 19 nt, Artificial Sequence
  Description of Artificial Sequence: Synthetic oligonucleotide
agacccaguccgaauuaag

SEQ ID NO: 2003220 - RNA, 19 nt, Artificial Sequence
  Description of Artificial Sequence: Synthetic oligonucleotide
ggcaacuuugguuuucucu

SEQ ID NO: 2003221 - RNA, 19 nt, Artificial Sequence
  Description of Artificial Sequence: Synthetic oligonucleotide
acagacccaguccgaauua

SEQ ID NO: 2003222 - RNA, 19 nt, Artificial Sequence
  Description of Artificial Sequence: Synthetic oligonucleotide
cucgcugaugccgccgccg

SEQ ID NO: 2003223 - RNA, 19 nt, Artificial Sequence
  Description of Artificial Sequence: Synthetic oligonucleotide
gccccaagcccuuucauuc

SEQ ID NO: 2003224 - RNA, 19 nt, Artificial Sequence
  Description of Artificial Sequence: Synthetic oligonucleotide
ugugcgcuucagagcggcc

SEQ ID NO: 2003225 - RNA, 19 nt, Artificial Sequence
  Description of Artificial Sequence: Synthetic oligonucleotide
uuccagcgccucuuuuaca

SEQ ID NO: 2003226 - RNA, 19 nt, Artificial Sequence
  Description of Artificial Sequence: Synthetic oligonucleotide
caggucggggcugacgccc

SEQ ID NO: 2003227 - RNA, 19 nt, Artificial Sequence
  Description of Artificial Sequence: Synthetic oligonucleotide
ugcucgcucgaccgcuccc

SEQ ID NO: 2003228 - RNA, 19 nt, Artificial Sequence
  Description of Artificial Sequence: Synthetic oligonucleotide
ucagcccuauuuuggccua

SEQ ID NO: 2003229 - RNA, 19 nt, Artificial Sequence
  Description of Artificial Sequence: Synthetic oligonucleotide
ugggaccuaggcacuccac

SEQ ID NO: 2003230 - RNA, 19 nt, Artificial Sequence
  Description of Artificial Sequence: Synthetic oligonucleotide
cauggggaagcaggucggg

SEQ ID NO: 2003231 - RNA, 19 nt, Artificial Sequence
  Description of Artificial Sequence: Synthetic oligonucleotide
cugugcgcuucagagcggc

SEQ ID NO: 2003232 - RNA, 19 nt, Artificial Sequence
  Description of Artificial Sequence: Synthetic oligonucleotide
ggccucagcccuauuuugg

SEQ ID NO: 2003233 - RNA, 19 nt, Artificial Sequence
  Description of Artificial Sequence: Synthetic oligonucleotide
gcugucagagcuggggucc

SEQ ID NO: 2003234 - RNA, 19 nt, Artificial Sequence
  Description of Artificial Sequence: Synthetic oligonucleotide
ucgcuguagcugucagagc

SEQ ID NO: 2003235 - RNA, 19 nt, Artificial Sequence
  Description of Artificial Sequence: Synthetic oligonucleotide
ugguacccaaagacaucuc

SEQ ID NO: 2003236 - RNA, 19 nt, Artificial Sequence
  Description of Artificial Sequence: Synthetic oligonucleotide
ccacaggcggaucugccgg

SEQ ID NO: 2003237 - RNA, 19 nt, Artificial Sequence
  Description of Artificial Sequence: Synthetic oligonucleotide
agcgagucaagcacaucgu

SEQ ID NO: 2003238 - RNA, 19 nt, Artificial Sequence
  Description of Artificial Sequence: Synthetic oligonucleotide
gacgcccagcgagucaagc

SEQ ID NO: 2003239 - RNA, 19 nt, Artificial Sequence
  Description of Artificial Sequence: Synthetic oligonucleotide
gcaagucaggcacaccgca

SEQ ID NO: 2003240 - RNA, 19 nt, Artificial Sequence
  Description of Artificial Sequence: Synthetic oligonucleotide
cgugcggaauuucagcagc

SEQ ID NO: 2003241 - RNA, 19 nt, Artificial Sequence
  Description of Artificial Sequence: Synthetic oligonucleotide
gccucagcccuauuuuggc

SEQ ID NO: 2003242 - RNA, 19 nt, Artificial Sequence
  Description of Artificial Sequence: Synthetic oligonucleotide
gcacccgggaagcacgaag

SEQ ID NO: 2003243 - RNA, 19 nt, Artificial Sequence
  Description of Artificial Sequence: Synthetic oligonucleotide
cuucagagcggccuuggcu

SEQ ID NO: 2003244 - RNA, 19 nt, Artificial Sequence
  Description of Artificial Sequence: Synthetic oligonucleotide
aggccccacaggcggaucu

SEQ ID NO: 2003245 - RNA, 19 nt, Artificial Sequence
  Description of Artificial Sequence: Synthetic oligonucleotide
gggaccuaggcacuccaca

SEQ ID NO: 2003246 - RNA, 19 nt, Artificial Sequence
  Description of Artificial Sequence: Synthetic oligonucleotide
gggcucguuccagagaggc

SEQ ID NO: 2003247 - RNA, 19 nt, Artificial Sequence
  Description of Artificial Sequence: Synthetic oligonucleotide
agcacauacuggggccauc

SEQ ID NO: 2003248 - RNA, 19 nt, Artificial Sequence
  Description of Artificial Sequence: Synthetic oligonucleotide
ggucgacuuuaacaaugac

SEQ ID NO: 2003249 - RNA, 19 nt, Artificial Sequence
  Description of Artificial Sequence: Synthetic oligonucleotide
ggaccuaggcacuccacaa

SEQ ID NO: 2003250 - RNA, 19 nt, Artificial Sequence
  Description of Artificial Sequence: Synthetic oligonucleotide
ccaguccgaauuaagaacu

SEQ ID NO: 2003251 - RNA, 19 nt, Artificial Sequence
  Description of Artificial Sequence: Synthetic oligonucleotide
gaagcacgaagccgcuucu

SEQ ID NO: 2003252 - RNA, 19 nt, Artificial Sequence
  Description of Artificial Sequence: Synthetic oligonucleotide
gugaagaaugccucagguu

SEQ ID NO: 2003253 - RNA, 19 nt, Artificial Sequence
  Description of Artificial Sequence: Synthetic oligonucleotide
cccaugguacccaaagaca

SEQ ID NO: 2003254 - RNA, 19 nt, Artificial Sequence
  Description of Artificial Sequence: Synthetic oligonucleotide
cagucuucuggagauaccu

SEQ ID NO: 2003255 - RNA, 19 nt, Artificial Sequence
  Description of Artificial Sequence: Synthetic oligonucleotide
aggcggaucugccggucgu

SEQ ID NO: 2003256 - RNA, 19 nt, Artificial Sequence
  Description of Artificial Sequence: Synthetic oligonucleotide
acaggcggaucugccgguc

SEQ ID NO: 2003257 - RNA, 19 nt, Artificial Sequence
  Description of Artificial Sequence: Synthetic oligonucleotide
gauaagguucuuggcaauu

SEQ ID NO: 2003258 - RNA, 19 nt, Artificial Sequence
  Description of Artificial Sequence: Synthetic oligonucleotide
cuccccuucaugccgucga

SEQ ID NO: 2003259 - RNA, 19 nt, Artificial Sequence
  Description of Artificial Sequence: Synthetic oligonucleotide
ccucagcccuauuuuggcc

SEQ ID NO: 2003260 - RNA, 19 nt, Artificial Sequence
  Description of Artificial Sequence: Synthetic oligonucleotide
gcacuccacaauuccacuc

SEQ ID NO: 2003261 - RNA, 19 nt, Artificial Sequence
  Description of Artificial Sequence: Synthetic oligonucleotide
gcggccuuggcuuucucuc

SEQ ID NO: 2003262 - RNA, 19 nt, Artificial Sequence
  Description of Artificial Sequence: Synthetic oligonucleotide
cucguuccagagaggccuc

SEQ ID NO: 2003263 - RNA, 19 nt, Artificial Sequence
  Description of Artificial Sequence: Synthetic oligonucleotide
uggggccaucucagagaag

SEQ ID NO: 2003264 - RNA, 19 nt, Artificial Sequence
  Description of Artificial Sequence: Synthetic oligonucleotide
ucagagcggccuuggcuuu

SEQ ID NO: 2003265 - RNA, 19 nt, Artificial Sequence
  Description of Artificial Sequence: Synthetic oligonucleotide
gacagaacuggucgacuuu

SEQ ID NO: 2003266 - RNA, 19 nt, Artificial Sequence
  Description of Artificial Sequence: Synthetic oligonucleotide
cuacuacuugacuaacuuu

SEQ ID NO: 2003267 - RNA, 19 nt, Artificial Sequence
  Description of Artificial Sequence: Synthetic oligonucleotide
caucuucuacuacuugacu

SEQ ID NO: 2003268 - RNA, 19 nt, Artificial Sequence
  Description of Artificial Sequence: Synthetic oligonucleotide
cucuuuuacagggcagaaa

SEQ ID NO: 2003269 - RNA, 19 nt, Artificial Sequence
  Description of Artificial Sequence: Synthetic oligonucleotide
augcuguuucugugacaga

SEQ ID NO: 2003270 - RNA, 19 nt, Artificial Sequence
  Description of Artificial Sequence: Synthetic oligonucleotide
gggucccgcccuuuauccg

SEQ ID NO: 2003271 - RNA, 19 nt, Artificial Sequence
  Description of Artificial Sequence: Synthetic oligonucleotide
ccuaggcacuccacaauuc

SEQ ID NO: 2003272 - RNA, 19 nt, Artificial Sequence
  Description of Artificial Sequence: Synthetic oligonucleotide
cacauacuggggccaucuc

SEQ ID NO: 2003273 - RNA, 19 nt, Artificial Sequence
  Description of Artificial Sequence: Synthetic oligonucleotide
ggagauaccuguucaugau

SEQ ID NO: 2003274 - RNA, 19 nt, Artificial Sequence
  Description of Artificial Sequence: Synthetic oligonucleotide
caugguugucucagaugaa

SEQ ID NO: 2003275 - RNA, 19 nt, Artificial Sequence
  Description of Artificial Sequence: Synthetic oligonucleotide
ggguucagauucugggcuc

SEQ ID NO: 2003276 - RNA, 19 nt, Artificial Sequence
  Description of Artificial Sequence: Synthetic oligonucleotide
agcucacuugggaccuagg

SEQ ID NO: 2003277 - RNA, 19 nt, Artificial Sequence
  Description of Artificial Sequence: Synthetic oligonucleotide
gcacuugcagcagaaagua

SEQ ID NO: 2003278 - RNA, 19 nt, Artificial Sequence
  Description of Artificial Sequence: Synthetic oligonucleotide
cucgcucgaccgcucccgc

SEQ ID NO: 2003279 - RNA, 19 nt, Artificial Sequence
  Description of Artificial Sequence: Synthetic oligonucleotide
cugucagagcugggguccc

SEQ ID NO: 2003280 - RNA, 19 nt, Artificial Sequence
  Description of Artificial Sequence: Synthetic oligonucleotide
uugugaggagggucccguu

SEQ ID NO: 2003281 - RNA, 19 nt, Artificial Sequence
  Description of Artificial Sequence: Synthetic oligonucleotide
ccgugcggaauuucagcag

SEQ ID NO: 2003282 - RNA, 19 nt, Artificial Sequence
  Description of Artificial Sequence: Synthetic oligonucleotide
guugugaggagggucccgu

SEQ ID NO: 2003283 - RNA, 19 nt, Artificial Sequence
  Description of Artificial Sequence: Synthetic oligonucleotide
gaggagggucccguugaga

SEQ ID NO: 2003284 - RNA, 19 nt, Artificial Sequence
  Description of Artificial Sequence: Synthetic oligonucleotide
cugacgcccagcgagucaa

SEQ ID NO: 2003285 - RNA, 19 nt, Artificial Sequence
  Description of Artificial Sequence: Synthetic oligonucleotide
gcucguuccagagaggccu

SEQ ID NO: 2003286 - RNA, 19 nt, Artificial Sequence
  Description of Artificial Sequence: Synthetic oligonucleotide
agagaggccucagcccuau

SEQ ID NO: 2003287 - RNA, 19 nt, Artificial Sequence
  Description of Artificial Sequence: Synthetic oligonucleotide
cccgggaagcacgaagccg

SEQ ID NO: 2003288 - RNA, 19 nt, Artificial Sequence
  Description of Artificial Sequence: Synthetic oligonucleotide
ucgcucgaccgcucccgcu

SEQ ID NO: 2003289 - RNA, 19 nt, Artificial Sequence
  Description of Artificial Sequence: Synthetic oligonucleotide
gugcggaauuucagcagca

SEQ ID NO: 2003290 - RNA, 19 nt, Artificial Sequence
  Description of Artificial Sequence: Synthetic oligonucleotide
gacuaacuuuggcaacuuu

SEQ ID NO: 2003291 - RNA, 19 nt, Artificial Sequence
  Description of Artificial Sequence: Synthetic oligonucleotide
gccucuuuuacagggcaga

SEQ ID NO: 2003292 - RNA, 19 nt, Artificial Sequence
  Description of Artificial Sequence: Synthetic oligonucleotide
augccgccgccgccgccgc

SEQ ID NO: 2003293 - RNA, 19 nt, Artificial Sequence
  Description of Artificial Sequence: Synthetic oligonucleotide
ucccgcccuuuauccgugc

SEQ ID NO: 2003294 - RNA, 19 nt, Artificial Sequence
  Description of Artificial Sequence: Synthetic oligonucleotide
cauggucagucccuucacu

SEQ ID NO: 2003295 - RNA, 19 nt, Artificial Sequence
  Description of Artificial Sequence: Synthetic oligonucleotide
ggucagucccuucacuccu

SEQ ID NO: 2003296 - RNA, 19 nt, Artificial Sequence
  Description of Artificial Sequence: Synthetic oligonucleotide
accaugggguucagauucu

SEQ ID NO: 2003297 - RNA, 19 nt, Artificial Sequence
  Description of Artificial Sequence: Synthetic oligonucleotide
aaagcucacuugggaccua

SEQ ID NO: 2003298 - RNA, 19 nt, Artificial Sequence
  Description of Artificial Sequence: Synthetic oligonucleotide
ucguacugcgcggccuccu

SEQ ID NO: 2003299 - RNA, 19 nt, Artificial Sequence
  Description of Artificial Sequence: Synthetic oligonucleotide
ccgcccuuuauccgugcgg

SEQ ID NO: 2003300 - RNA, 19 nt, Artificial Sequence
  Description of Artificial Sequence: Synthetic oligonucleotide
ggucguacugcgcggccuc

SEQ ID NO: 2003301 - RNA, 19 nt, Artificial Sequence
  Description of Artificial Sequence: Synthetic oligonucleotide
agagcggccuuggcuuucu

SEQ ID NO: 2003302 - RNA, 19 nt, Artificial Sequence
  Description of Artificial Sequence: Synthetic oligonucleotide
gguguacccaugguaccca

SEQ ID NO: 2003303 - RNA, 19 nt, Artificial Sequence
  Description of Artificial Sequence: Synthetic oligonucleotide
gcggaauuucagcagcacu

SEQ ID NO: 2003304 - RNA, 19 nt, Artificial Sequence
  Description of Artificial Sequence: Synthetic oligonucleotide
gcgccucuuuuacagggca

SEQ ID NO: 2003305 - RNA, 19 nt, Artificial Sequence
  Description of Artificial Sequence: Synthetic oligonucleotide
gggucccguugagacaggg

SEQ ID NO: 2003306 - RNA, 19 nt, Artificial Sequence
  Description of Artificial Sequence: Synthetic oligonucleotide
guguacccaugguacccaa

SEQ ID NO: 2003307 - RNA, 19 nt, Artificial Sequence
  Description of Artificial Sequence: Synthetic oligonucleotide
cagcuccgcguccucgcug

SEQ ID NO: 2003308 - RNA, 19 nt, Artificial Sequence
  Description of Artificial Sequence: Synthetic oligonucleotide
gcacaccgcaucaaacuga

SEQ ID NO: 2003309 - RNA, 19 nt, Artificial Sequence
  Description of Artificial Sequence: Synthetic oligonucleotide
cgcccagcgagucaagcac

SEQ ID NO: 2003310 - RNA, 19 nt, Artificial Sequence
  Description of Artificial Sequence: Synthetic oligonucleotide
gugacagaacuggucgacu

SEQ ID NO: 2003311 - RNA, 19 nt, Artificial Sequence
  Description of Artificial Sequence: Synthetic oligonucleotide
caagucaggcacaccgcau

SEQ ID NO: 2003312 - RNA, 19 nt, Artificial Sequence
  Description of Artificial Sequence: Synthetic oligonucleotide
gucguacugcgcggccucc

SEQ ID NO: 2003313 - RNA, 19 nt, Artificial Sequence
  Description of Artificial Sequence: Synthetic oligonucleotide
gcaaagguguacccauggu

SEQ ID NO: 2003314 - RNA, 19 nt, Artificial Sequence
  Description of Artificial Sequence: Synthetic oligonucleotide
ggcucguuccagagaggcc

SEQ ID NO: 2003315 - RNA, 19 nt, Artificial Sequence
  Description of Artificial Sequence: Synthetic oligonucleotide
caauuuccugugccaagau

SEQ ID NO: 2003316 - RNA, 19 nt, Artificial Sequence
  Description of Artificial Sequence: Synthetic oligonucleotide
gucccgcccuuuauccgug

SEQ ID NO: 2003317 - RNA, 19 nt, Artificial Sequence
  Description of Artificial Sequence: Synthetic oligonucleotide
ggauaagguucuuggcaau

SEQ ID NO: 2003318 - RNA, 19 nt, Artificial Sequence
  Description of Artificial Sequence: Synthetic oligonucleotide
gaagcaggucggggcugac

SEQ ID NO: 2003319 - RNA, 19 nt, Artificial Sequence
  Description of Artificial Sequence: Synthetic oligonucleotide
cagacccaguccgaauuaa

SEQ ID NO: 2003320 - RNA, 19 nt, Artificial Sequence
  Description of Artificial Sequence: Synthetic oligonucleotide
ggucccgcccuuuauccgu

SEQ ID NO: 2003321 - RNA, 19 nt, Artificial Sequence
  Description of Artificial Sequence: Synthetic oligonucleotide
ggcacuccacaauuccacu

SEQ ID NO: 2003322 - RNA, 19 nt, Artificial Sequence
  Description of Artificial Sequence: Synthetic oligonucleotide
cuacagacccaguccgaau

SEQ ID NO: 2003323 - RNA, 19 nt, Artificial Sequence
  Description of Artificial Sequence: Synthetic oligonucleotide
gugucagguccaucuucua

SEQ ID NO: 2003324 - RNA, 19 nt, Artificial Sequence
  Description of Artificial Sequence: Synthetic oligonucleotide
gcaggucggggcugacgcc

SEQ ID NO: 2003325 - RNA, 19 nt, Artificial Sequence
  Description of Artificial Sequence: Synthetic oligonucleotide
gcacaucguuucugaugug

SEQ ID NO: 2003326 - RNA, 19 nt, Artificial Sequence
  Description of Artificial Sequence: Synthetic oligonucleotide
cccgcccuuuauccgugcg

SEQ ID NO: 2003327 - RNA, 19 nt, Artificial Sequence
  Description of Artificial Sequence: Synthetic oligonucleotide
agaaugccucagguuucuu

SEQ ID NO: 2003328 - RNA, 19 nt, Artificial Sequence
  Description of Artificial Sequence: Synthetic oligonucleotide
guccucgcuguagcuguca

SEQ ID NO: 2003329 - RNA, 19 nt, Artificial Sequence
  Description of Artificial Sequence: Synthetic oligonucleotide
cacuugggaccuaggcacu

SEQ ID NO: 2003330 - RNA, 19 nt, Artificial Sequence
  Description of Artificial Sequence: Synthetic oligonucleotide
cgccucuuuuacagggcag

SEQ ID NO: 2003331 - RNA, 19 nt, Artificial Sequence
  Description of Artificial Sequence: Synthetic oligonucleotide
gcugacgcccagcgaguca

SEQ ID NO: 2003332 - RNA, 19 nt, Artificial Sequence
  Description of Artificial Sequence: Synthetic oligonucleotide
gcugugcgcuucagagcgg

SEQ ID NO: 2003333 - RNA, 19 nt, Artificial Sequence
  Description of Artificial Sequence: Synthetic oligonucleotide
cagagcggccuuggcuuuc

SEQ ID NO: 2003334 - RNA, 19 nt, Artificial Sequence
  Description of Artificial Sequence: Synthetic oligonucleotide
gcacauacuggggccaucu

SEQ ID NO: 2003335 - RNA, 19 nt, Artificial Sequence
  Description of Artificial Sequence: Synthetic oligonucleotide
agggucccguugagacagg

SEQ ID NO: 2003336 - RNA, 19 nt, Artificial Sequence
  Description of Artificial Sequence: Synthetic oligonucleotide
ccgcaucaaacugagugaa

SEQ ID NO: 2003337 - RNA, 19 nt, Artificial Sequence
  Description of Artificial Sequence: Synthetic oligonucleotide
cuuuauccgugcggaauuu

SEQ ID NO: 2003338 - RNA, 19 nt, Artificial Sequence
  Description of Artificial Sequence: Synthetic oligonucleotide
gcccuuucauuccaacaau

SEQ ID NO: 2003339 - RNA, 19 nt, Artificial Sequence
  Description of Artificial Sequence: Synthetic oligonucleotide
cagagaggccucagcccua

SEQ ID NO: 2003340 - RNA, 19 nt, Artificial Sequence
  Description of Artificial Sequence: Synthetic oligonucleotide
ccuacagacccaguccgaa

SEQ ID NO: 2003341 - RNA, 19 nt, Artificial Sequence
  Description of Artificial Sequence: Synthetic oligonucleotide
gcggaucugccggucguac

SEQ ID NO: 2003342 - RNA, 19 nt, Artificial Sequence
  Description of Artificial Sequence: Synthetic oligonucleotide
cguuucugaugugcagcag

SEQ ID NO: 2003343 - RNA, 19 nt, Artificial Sequence
  Description of Artificial Sequence: Synthetic oligonucleotide
gagcggccuuggcuuucuc

SEQ ID NO: 2003344 - RNA, 19 nt, Artificial Sequence
  Description of Artificial Sequence: Synthetic oligonucleotide
ccuuuauccgugcggaauu

SEQ ID NO: 2003345 - RNA, 19 nt, Artificial Sequence
  Description of Artificial Sequence: Synthetic oligonucleotide
cuccugccaggauaagguu

SEQ ID NO: 2003346 - RNA, 19 nt, Artificial Sequence
  Description of Artificial Sequence: Synthetic oligonucleotide
guucagauucugggcucgu

SEQ ID NO: 2003347 - RNA, 19 nt, Artificial Sequence
  Description of Artificial Sequence: Synthetic oligonucleotide
aggucggggcugacgccca

SEQ ID NO: 2003348 - RNA, 19 nt, Artificial Sequence
  Description of Artificial Sequence: Synthetic oligonucleotide
gccgccggccuccuccuuc

SEQ ID NO: 2003349 - RNA, 19 nt, Artificial Sequence
  Description of Artificial Sequence: Synthetic oligonucleotide
gcgagucaagcacaucguu

SEQ ID NO: 2003350 - RNA, 19 nt, Artificial Sequence
  Description of Artificial Sequence: Synthetic oligonucleotide
gccgccgccgccgccgccg

SEQ ID NO: 2003351 - RNA, 19 nt, Artificial Sequence
  Description of Artificial Sequence: Synthetic oligonucleotide
cgcucgaccgcucccgcuc

SEQ ID NO: 2003352 - RNA, 19 nt, Artificial Sequence
  Description of Artificial Sequence: Synthetic oligonucleotide
ccucgcuguagcugucaga

SEQ ID NO: 2003353 - RNA, 19 nt, Artificial Sequence
  Description of Artificial Sequence: Synthetic oligonucleotide
cguuccagagaggccucag

SEQ ID NO: 2003354 - RNA, 19 nt, Artificial Sequence
  Description of Artificial Sequence: Synthetic oligonucleotide
ggccccacaggcggaucug

SEQ ID NO: 2003355 - RNA, 19 nt, Artificial Sequence
  Description of Artificial Sequence: Synthetic oligonucleotide
ggcugacgcccagcgaguc

SEQ ID NO: 2003356 - RNA, 19 nt, Artificial Sequence
  Description of Artificial Sequence: Synthetic oligonucleotide
ugccgccgccgccgccgcc

SEQ ID NO: 2003357 - RNA, 19 nt, Artificial Sequence
  Description of Artificial Sequence: Synthetic oligonucleotide
gccuacagacccaguccga

SEQ ID NO: 2003358 - RNA, 19 nt, Artificial Sequence
  Description of Artificial Sequence: Synthetic oligonucleotide
cgagucaagcacaucguuu

SEQ ID NO: 2003359 - RNA, 19 nt, Artificial Sequence
  Description of Artificial Sequence: Synthetic oligonucleotide
gcccuuuauccgugcggaa

SEQ ID NO: 2003360 - RNA, 19 nt, Artificial Sequence
  Description of Artificial Sequence: Synthetic oligonucleotide
cgcccuuuauccgugcgga

SEQ ID NO: 2003361 - RNA, 19 nt, Artificial Sequence
  Description of Artificial Sequence: Synthetic oligonucleotide
gcuggggucccgcccuuua

SEQ ID NO: 2003362 - RNA, 19 nt, Artificial Sequence
  Description of Artificial Sequence: Synthetic oligonucleotide
cgcguccucgcuguagcug

SEQ ID NO: 2003363 - RNA, 19 nt, Artificial Sequence
  Description of Artificial Sequence: Synthetic oligonucleotide
caggccccacaggcggauc

SEQ ID NO: 2003364 - RNA, 19 nt, Artificial Sequence
  Description of Artificial Sequence: Synthetic oligonucleotide
ccagcgagucaagcacauc

SEQ ID NO: 2003365 - RNA, 19 nt, Artificial Sequence
  Description of Artificial Sequence: Synthetic oligonucleotide
cuggggucccgcccuuuau

SEQ ID NO: 2003366 - RNA, 19 nt, Artificial Sequence
  Description of Artificial Sequence: Synthetic oligonucleotide
ccucagguuucuucucuau

SEQ ID NO: 2003367 - RNA, 19 nt, Artificial Sequence
  Description of Artificial Sequence: Synthetic oligonucleotide
cccuccaaccacagcacau

SEQ ID NO: 2003368 - RNA, 19 nt, Artificial Sequence
  Description of Artificial Sequence: Synthetic oligonucleotide
cccuuuauccgugcggaau

SEQ ID NO: 2003369 - RNA, 19 nt, Artificial Sequence
  Description of Artificial Sequence: Synthetic oligonucleotide
cagccccaagcccuuucau

SEQ ID NO: 2003370 - RNA, 19 nt, Artificial Sequence
  Description of Artificial Sequence: Synthetic oligonucleotide
ccacaauuccacuccccuu

SEQ ID NO: 2003371 - RNA, 19 nt, Artificial Sequence
  Description of Artificial Sequence: Synthetic oligonucleotide
cgcugaugccgccgccgcc

SEQ ID NO: 2003372 - RNA, 19 nt, Artificial Sequence
  Description of Artificial Sequence: Synthetic oligonucleotide
caccauggcgccggcugcu

SEQ ID NO: 2003373 - RNA, 19 nt, Artificial Sequence
  Description of Artificial Sequence: Synthetic oligonucleotide
ccacuccccuucaugccgu

SEQ ID NO: 2003374 - RNA, 19 nt, Artificial Sequence
  Description of Artificial Sequence: Synthetic oligonucleotide
cccagcgagucaagcacau

SEQ ID NO: 2003375 - RNA, 19 nt, Artificial Sequence
  Description of Artificial Sequence: Synthetic oligonucleotide
ggcggaucugccggucgua

SEQ ID NO: 2003376 - RNA, 19 nt, Artificial Sequence
  Description of Artificial Sequence: Synthetic oligonucleotide
cguccucgcuguagcuguc

SEQ ID NO: 2003377 - RNA, 19 nt, Artificial Sequence
  Description of Artificial Sequence: Synthetic oligonucleotide
gagcuggggucccgcccuu

SEQ ID NO: 2003378 - RNA, 19 nt, Artificial Sequence
  Description of Artificial Sequence: Synthetic oligonucleotide
cggcugcucgcucgaccgc

SEQ ID NO: 2003379 - RNA, 19 nt, Artificial Sequence
  Description of Artificial Sequence: Synthetic oligonucleotide
gcgccggcugcucgcucga

SEQ ID NO: 2003380 - RNA, 19 nt, Artificial Sequence
  Description of Artificial Sequence: Synthetic oligonucleotide
ccguugagacagggccuuc

SEQ ID NO: 2003381 - RNA, 19 nt, Artificial Sequence
  Description of Artificial Sequence: Synthetic oligonucleotide
gggcugacgcccagcgagu

SEQ ID NO: 2003382 - RNA, 19 nt, Artificial Sequence
  Description of Artificial Sequence: Synthetic oligonucleotide
cuccaccauggcgccggcu

SEQ ID NO: 2003383 - RNA, 19 nt, Artificial Sequence
  Description of Artificial Sequence: Synthetic oligonucleotide
cccguugagacagggccuu

SEQ ID NO: 2003384 - RNA, 19 nt, Artificial Sequence
  Description of Artificial Sequence: Synthetic oligonucleotide
cgaagccgcuucugggccu

SEQ ID NO: 2003385 - RNA, 19 nt, Artificial Sequence
  Description of Artificial Sequence: Synthetic oligonucleotide
ccgccgccgccgccgccgg

SEQ ID NO: 2003386 - RNA, 19 nt, Artificial Sequence
  Description of Artificial Sequence: Synthetic oligonucleotide
cgggaagcacgaagccgcu

SEQ ID NO: 2003387 - RNA, 19 nt, Artificial Sequence
  Description of Artificial Sequence: Synthetic oligonucleotide
ccgccgccgccgccgccgc

SEQ ID NO: 2003388 - RNA, 19 nt, Artificial Sequence
  Description of Artificial Sequence: Synthetic oligonucleotide
ccgcguccucgcuguagcu

SEQ ID NO: 2003389 - RNA, 19 nt, Artificial Sequence
  Description of Artificial Sequence: Synthetic oligonucleotide
cggucguacugcgcggccu

SEQ ID NO: 2003390 - RNA, 19 nt, Artificial Sequence
  Description of Artificial Sequence: Synthetic oligonucleotide
cgccggcugcucgcucgac

SEQ ID NO: 2003391 - RNA, 19 nt, Artificial Sequence
  Description of Artificial Sequence: Synthetic oligonucleotide
cgccgccgccgccgccgcc

SEQ ID NO: 2003392 - RNA, 19 nt, Artificial Sequence
  Description of Artificial Sequence: Synthetic oligonucleotide
cgccgccgccgccgccggc

SEQ ID NO: 2003393 - RNA, 19 nt, Artificial Sequence
  Description of Artificial Sequence: Synthetic oligonucleotide
aaauggauauauuuggccc

SEQ ID NO: 2003394 - RNA, 19 nt, Artificial Sequence
  Description of Artificial Sequence: Synthetic oligonucleotide
agcaaaauggaucugacgg

SEQ ID NO: 2003395 - RNA, 19 nt, Artificial Sequence
  Description of Artificial Sequence: Synthetic oligonucleotide
aaauccgauacauauacag

SEQ ID NO: 2003396 - RNA, 19 nt, Artificial Sequence
  Description of Artificial Sequence: Synthetic oligonucleotide
agaaauccgauacauauac

SEQ ID NO: 2003397 - RNA, 19 nt, Artificial Sequence
  Description of Artificial Sequence: Synthetic oligonucleotide
guaaauaguggcuauauag

SEQ ID NO: 2003398 - RNA, 19 nt, Artificial Sequence
  Description of Artificial Sequence: Synthetic oligonucleotide
uaauauugcaaccacagcu

SEQ ID NO: 2003399 - RNA, 19 nt, Artificial Sequence
  Description of Artificial Sequence: Synthetic oligonucleotide
agaaauucgagaaaggccc

SEQ ID NO: 2003400 - RNA, 19 nt, Artificial Sequence
  Description of Artificial Sequence: Synthetic oligonucleotide
agugguuucauguagagug

SEQ ID NO: 2003401 - RNA, 19 nt, Artificial Sequence
  Description of Artificial Sequence: Synthetic oligonucleotide
uauggauaaagcaacaaga

SEQ ID NO: 2003402 - RNA, 19 nt, Artificial Sequence
  Description of Artificial Sequence: Synthetic oligonucleotide
aauacgugugugcaguggc

SEQ ID NO: 2003403 - RNA, 19 nt, Artificial Sequence
  Description of Artificial Sequence: Synthetic oligonucleotide
acuaugacgagcaaaaugg

SEQ ID NO: 2003404 - RNA, 19 nt, Artificial Sequence
  Description of Artificial Sequence: Synthetic oligonucleotide
auagaaaacgaagaguggc

SEQ ID NO: 2003405 - RNA, 19 nt, Artificial Sequence
  Description of Artificial Sequence: Synthetic oligonucleotide
acugucaugguauggauac

SEQ ID NO: 2003406 - RNA, 19 nt, Artificial Sequence
  Description of Artificial Sequence: Synthetic oligonucleotide
uaccuuauucccaagagcc

SEQ ID NO: 2003407 - RNA, 19 nt, Artificial Sequence
  Description of Artificial Sequence: Synthetic oligonucleotide
aaggaauuugacugcaagg

SEQ ID NO: 2003408 - RNA, 19 nt, Artificial Sequence
  Description of Artificial Sequence: Synthetic oligonucleotide
auauauuuggcccaaauuu

SEQ ID NO: 2003409 - RNA, 19 nt, Artificial Sequence
  Description of Artificial Sequence: Synthetic oligonucleotide
uggccuauacaccagaaag

SEQ ID NO: 2003410 - RNA, 19 nt, Artificial Sequence
  Description of Artificial Sequence: Synthetic oligonucleotide
aauauugcaaccacagcuc

SEQ ID NO: 2003411 - RNA, 19 nt, Artificial Sequence
  Description of Artificial Sequence: Synthetic oligonucleotide
uaaauaguggcuauauagu

SEQ ID NO: 2003412 - RNA, 19 nt, Artificial Sequence
  Description of Artificial Sequence: Synthetic oligonucleotide
cagaaaguaauaugcaucc

SEQ ID NO: 2003413 - RNA, 19 nt, Artificial Sequence
  Description of Artificial Sequence: Synthetic oligonucleotide
uucccuaaccccuucaagg

SEQ ID NO: 2003414 - RNA, 19 nt, Artificial Sequence
  Description of Artificial Sequence: Synthetic oligonucleotide
auaccuuauucccaagagc

SEQ ID NO: 2003415 - RNA, 19 nt, Artificial Sequence
  Description of Artificial Sequence: Synthetic oligonucleotide
aauccgauacauauacagc

SEQ ID NO: 2003416 - RNA, 19 nt, Artificial Sequence
  Description of Artificial Sequence: Synthetic oligonucleotide
agcaacuaauauugcaacc

SEQ ID NO: 2003417 - RNA, 19 nt, Artificial Sequence
  Description of Artificial Sequence: Synthetic oligonucleotide
aauggauauauuuggccca

SEQ ID NO: 2003418 - RNA, 19 nt, Artificial Sequence
  Description of Artificial Sequence: Synthetic oligonucleotide
aauggcuuuguaaauagug

SEQ ID NO: 2003419 - RNA, 19 nt, Artificial Sequence
  Description of Artificial Sequence: Synthetic oligonucleotide
gauaccuuauucccaagag

SEQ ID NO: 2003420 - RNA, 19 nt, Artificial Sequence
  Description of Artificial Sequence: Synthetic oligonucleotide
aauuugacugcaaggugcc

SEQ ID NO: 2003421 - RNA, 19 nt, Artificial Sequence
  Description of Artificial Sequence: Synthetic oligonucleotide
caaucauagaggaaauggg

SEQ ID NO: 2003422 - RNA, 19 nt, Artificial Sequence
  Description of Artificial Sequence: Synthetic oligonucleotide
auagugauugccaacaaag

SEQ ID NO: 2003423 - RNA, 19 nt, Artificial Sequence
  Description of Artificial Sequence: Synthetic oligonucleotide
auauugcaaccacagcucc

SEQ ID NO: 2003424 - RNA, 19 nt, Artificial Sequence
  Description of Artificial Sequence: Synthetic oligonucleotide
ugcaguacauagaaaacga

SEQ ID NO: 2003425 - RNA, 19 nt, Artificial Sequence
  Description of Artificial Sequence: Synthetic oligonucleotide
guaauaugcauccuccugc

SEQ ID NO: 2003426 - RNA, 19 nt, Artificial Sequence
  Description of Artificial Sequence: Synthetic oligonucleotide
aagaccaaauugcagugug

SEQ ID NO: 2003427 - RNA, 19 nt, Artificial Sequence
  Description of Artificial Sequence: Synthetic oligonucleotide
acuaauauugcaaccacag

SEQ ID NO: 2003428 - RNA, 19 nt, Artificial Sequence
  Description of Artificial Sequence: Synthetic oligonucleotide
ucagaaauucgagaaaggc

SEQ ID NO: 2003429 - RNA, 19 nt, Artificial Sequence
  Description of Artificial Sequence: Synthetic oligonucleotide
gaauuugacugcaaggugc

SEQ ID NO: 2003430 - RNA, 19 nt, Artificial Sequence
  Description of Artificial Sequence: Synthetic oligonucleotide
uacauauacagcaacuaau

SEQ ID NO: 2003431 - RNA, 19 nt, Artificial Sequence
  Description of Artificial Sequence: Synthetic oligonucleotide
gaaaguaauaugcauccuc

SEQ ID NO: 2003432 - RNA, 19 nt, Artificial Sequence
  Description of Artificial Sequence: Synthetic oligonucleotide
cuggcuugaagauaaagug

SEQ ID NO: 2003433 - RNA, 19 nt, Artificial Sequence
  Description of Artificial Sequence: Synthetic oligonucleotide
uagugauugccaacaaagg

SEQ ID NO: 2003434 - RNA, 19 nt, Artificial Sequence
  Description of Artificial Sequence: Synthetic oligonucleotide
cagacaagaagugaggacg

SEQ ID NO: 2003435 - RNA, 19 nt, Artificial Sequence
  Description of Artificial Sequence: Synthetic oligonucleotide
auccgauacauauacagca

SEQ ID NO: 2003436 - RNA, 19 nt, Artificial Sequence
  Description of Artificial Sequence: Synthetic oligonucleotide
uagaaaacgaagaguggcc

SEQ ID NO: 2003437 - RNA, 19 nt, Artificial Sequence
  Description of Artificial Sequence: Synthetic oligonucleotide
aucugggucacaaacagac

SEQ ID NO: 2003438 - RNA, 19 nt, Artificial Sequence
  Description of Artificial Sequence: Synthetic oligonucleotide
guaaucagaaauucgagaa

SEQ ID NO: 2003439 - RNA, 19 nt, Artificial Sequence
  Description of Artificial Sequence: Synthetic oligonucleotide
uauauuuggcccaaauuua

SEQ ID NO: 2003440 - RNA, 19 nt, Artificial Sequence
  Description of Artificial Sequence: Synthetic oligonucleotide
ucgaacauggucuucggca

SEQ ID NO: 2003441 - RNA, 19 nt, Artificial Sequence
  Description of Artificial Sequence: Synthetic oligonucleotide
uuuuguagauagcagcagu

SEQ ID NO: 2003442 - RNA, 19 nt, Artificial Sequence
  Description of Artificial Sequence: Synthetic oligonucleotide
agugauugccaacaaagga

SEQ ID NO: 2003443 - RNA, 19 nt, Artificial Sequence
  Description of Artificial Sequence: Synthetic oligonucleotide
ucaguuagggacuggcuag

SEQ ID NO: 2003444 - RNA, 19 nt, Artificial Sequence
  Description of Artificial Sequence: Synthetic oligonucleotide
ucucaauauagccaucacu

SEQ ID NO: 2003445 - RNA, 19 nt, Artificial Sequence
  Description of Artificial Sequence: Synthetic oligonucleotide
uguaagaagaaugucuggu

SEQ ID NO: 2003446 - RNA, 19 nt, Artificial Sequence
  Description of Artificial Sequence: Synthetic oligonucleotide
uuggaacgaacuucggugg

SEQ ID NO: 2003447 - RNA, 19 nt, Artificial Sequence
  Description of Artificial Sequence: Synthetic oligonucleotide
aguaauaugcauccuccug

SEQ ID NO: 2003448 - RNA, 19 nt, Artificial Sequence
  Description of Artificial Sequence: Synthetic oligonucleotide
acagacaagaagugaggac

SEQ ID NO: 2003449 - RNA, 19 nt, Artificial Sequence
  Description of Artificial Sequence: Synthetic oligonucleotide
aaucauagaggaaaugggu

SEQ ID NO: 2003450 - RNA, 19 nt, Artificial Sequence
  Description of Artificial Sequence: Synthetic oligonucleotide
augcaguacauagaaaacg

SEQ ID NO: 2003451 - RNA, 19 nt, Artificial Sequence
  Description of Artificial Sequence: Synthetic oligonucleotide
auauacagcaacuaauauu

SEQ ID NO: 2003452 - RNA, 19 nt, Artificial Sequence
  Description of Artificial Sequence: Synthetic oligonucleotide
cauagaaaacgaagagugg

SEQ ID NO: 2003453 - RNA, 19 nt, Artificial Sequence
  Description of Artificial Sequence: Synthetic oligonucleotide
acauauguaguucucaaua

SEQ ID NO: 2003454 - RNA, 19 nt, Artificial Sequence
  Description of Artificial Sequence: Synthetic oligonucleotide
aggacgacuaccuggggcg

SEQ ID NO: 2003455 - RNA, 19 nt, Artificial Sequence
  Description of Artificial Sequence: Synthetic oligonucleotide
uguagauagcagcaguccu

SEQ ID NO: 2003456 - RNA, 19 nt, Artificial Sequence
  Description of Artificial Sequence: Synthetic oligonucleotide
uuuguagauagcagcaguc

SEQ ID NO: 2003457 - RNA, 19 nt, Artificial Sequence
  Description of Artificial Sequence: Synthetic oligonucleotide
ugacgagcaaaauggaucu

SEQ ID NO: 2003458 - RNA, 19 nt, Artificial Sequence
  Description of Artificial Sequence: Synthetic oligonucleotide
uuguaagaagaaugucugg

SEQ ID NO: 2003459 - RNA, 19 nt, Artificial Sequence
  Description of Artificial Sequence: Synthetic oligonucleotide
uaagccaagccccacuaug

SEQ ID NO: 2003460 - RNA, 19 nt, Artificial Sequence
  Description of Artificial Sequence: Synthetic oligonucleotide
uauggauacuugaugcugu

SEQ ID NO: 2003461 - RNA, 19 nt, Artificial Sequence
  Description of Artificial Sequence: Synthetic oligonucleotide
augacgagcaaaauggauc

SEQ ID NO: 2003462 - RNA, 19 nt, Artificial Sequence
  Description of Artificial Sequence: Synthetic oligonucleotide
aauaguggcuauauaguga

SEQ ID NO: 2003463 - RNA, 19 nt, Artificial Sequence
  Description of Artificial Sequence: Synthetic oligonucleotide
ugaacagacagacucucuc

SEQ ID NO: 2003464 - RNA, 19 nt, Artificial Sequence
  Description of Artificial Sequence: Synthetic oligonucleotide
ccuguaauggccuauacac

SEQ ID NO: 2003465 - RNA, 19 nt, Artificial Sequence
  Description of Artificial Sequence: Synthetic oligonucleotide
ucauagaggaaauggguaa

SEQ ID NO: 2003466 - RNA, 19 nt, Artificial Sequence
  Description of Artificial Sequence: Synthetic oligonucleotide
aacgaacuucggugggucc

SEQ ID NO: 2003467 - RNA, 19 nt, Artificial Sequence
  Description of Artificial Sequence: Synthetic oligonucleotide
aaggacaaccugccuuccc

SEQ ID NO: 2003468 - RNA, 19 nt, Artificial Sequence
  Description of Artificial Sequence: Synthetic oligonucleotide
uuuugaccaaucuggguca

SEQ ID NO: 2003469 - RNA, 19 nt, Artificial Sequence
  Description of Artificial Sequence: Synthetic oligonucleotide
acauauauggauaaagcaa

SEQ ID NO: 2003470 - RNA, 19 nt, Artificial Sequence
  Description of Artificial Sequence: Synthetic oligonucleotide
aaauggaucugacgguacu

SEQ ID NO: 2003471 - RNA, 19 nt, Artificial Sequence
  Description of Artificial Sequence: Synthetic oligonucleotide
uccuugaaugaauccagcc

SEQ ID NO: 2003472 - RNA, 19 nt, Artificial Sequence
  Description of Artificial Sequence: Synthetic oligonucleotide
gaacagacagacucucucc

SEQ ID NO: 2003473 - RNA, 19 nt, Artificial Sequence
  Description of Artificial Sequence: Synthetic oligonucleotide
uaaucagaaauucgagaaa

SEQ ID NO: 2003474 - RNA, 19 nt, Artificial Sequence
  Description of Artificial Sequence: Synthetic oligonucleotide
uuucauguagaguggugug

SEQ ID NO: 2003475 - RNA, 19 nt, Artificial Sequence
  Description of Artificial Sequence: Synthetic oligonucleotide
acaagaccaaauugcagug

SEQ ID NO: 2003476 - RNA, 19 nt, Artificial Sequence
  Description of Artificial Sequence: Synthetic oligonucleotide
aaaauggaucugacgguac

SEQ ID NO: 2003477 - RNA, 19 nt, Artificial Sequence
  Description of Artificial Sequence: Synthetic oligonucleotide
augguauggauacuugaug

SEQ ID NO: 2003478 - RNA, 19 nt, Artificial Sequence
  Description of Artificial Sequence: Synthetic oligonucleotide
uauagugauugccaacaaa

SEQ ID NO: 2003479 - RNA, 19 nt, Artificial Sequence
  Description of Artificial Sequence: Synthetic oligonucleotide
aaguaauaugcauccuccu

SEQ ID NO: 2003480 - RNA, 19 nt, Artificial Sequence
  Description of Artificial Sequence: Synthetic oligonucleotide
gaaaacgaagaguggccag

SEQ ID NO: 2003481 - RNA, 19 nt, Artificial Sequence
  Description of Artificial Sequence: Synthetic oligonucleotide
auacauauacagcaacuaa

SEQ ID NO: 2003482 - RNA, 19 nt, Artificial Sequence
  Description of Artificial Sequence: Synthetic oligonucleotide
ucuacauauguaguucuca

SEQ ID NO: 2003483 - RNA, 19 nt, Artificial Sequence
  Description of Artificial Sequence: Synthetic oligonucleotide
aaauucgagaaaggcccac

SEQ ID NO: 2003484 - RNA, 19 nt, Artificial Sequence
  Description of Artificial Sequence: Synthetic oligonucleotide
cuucgguggguccagauac

SEQ ID NO: 2003485 - RNA, 19 nt, Artificial Sequence
  Description of Artificial Sequence: Synthetic oligonucleotide
ugcaaggugccaaagugaa

SEQ ID NO: 2003486 - RNA, 19 nt, Artificial Sequence
  Description of Artificial Sequence: Synthetic oligonucleotide
auagccaucacugcaguug

SEQ ID NO: 2003487 - RNA, 19 nt, Artificial Sequence
  Description of Artificial Sequence: Synthetic oligonucleotide
uaugacgagcaaaauggau

SEQ ID NO: 2003488 - RNA, 19 nt, Artificial Sequence
  Description of Artificial Sequence: Synthetic oligonucleotide
caugcaguacauagaaaac

SEQ ID NO: 2003489 - RNA, 19 nt, Artificial Sequence
  Description of Artificial Sequence: Synthetic oligonucleotide
uugaauacgugugugcagu

SEQ ID NO: 2003490 - RNA, 19 nt, Artificial Sequence
  Description of Artificial Sequence: Synthetic oligonucleotide
uauuuggcccaaauuuaga

SEQ ID NO: 2003491 - RNA, 19 nt, Artificial Sequence
  Description of Artificial Sequence: Synthetic oligonucleotide
uccuguaauggccuauaca

SEQ ID NO: 2003492 - RNA, 19 nt, Artificial Sequence
  Description of Artificial Sequence: Synthetic oligonucleotide
augucaguuagggacuggc

SEQ ID NO: 2003493 - RNA, 19 nt, Artificial Sequence
  Description of Artificial Sequence: Synthetic oligonucleotide
aaaacgaagaguggccaga

SEQ ID NO: 2003494 - RNA, 19 nt, Artificial Sequence
  Description of Artificial Sequence: Synthetic oligonucleotide
cuauauagugauugccaac

SEQ ID NO: 2003495 - RNA, 19 nt, Artificial Sequence
  Description of Artificial Sequence: Synthetic oligonucleotide
uuguagauagcagcagucc

SEQ ID NO: 2003496 - RNA, 19 nt, Artificial Sequence
  Description of Artificial Sequence: Synthetic oligonucleotide
cuugaauacgugugugcag

SEQ ID NO: 2003497 - RNA, 19 nt, Artificial Sequence
  Description of Artificial Sequence: Synthetic oligonucleotide
aaggcccacauauauggau

SEQ ID NO: 2003498 - RNA, 19 nt, Artificial Sequence
  Description of Artificial Sequence: Synthetic oligonucleotide
aauggaucugacgguacug

SEQ ID NO: 2003499 - RNA, 19 nt, Artificial Sequence
  Description of Artificial Sequence: Synthetic oligonucleotide
uggaacgaacuucgguggg

SEQ ID NO: 2003500 - RNA, 19 nt, Artificial Sequence
  Description of Artificial Sequence: Synthetic oligonucleotide
ucugccuacagaguacuug

SEQ ID NO: 2003501 - RNA, 19 nt, Artificial Sequence
  Description of Artificial Sequence: Synthetic oligonucleotide
ugcuugaauacgugugugc

SEQ ID NO: 2003502 - RNA, 19 nt, Artificial Sequence
  Description of Artificial Sequence: Synthetic oligonucleotide
guaagaagaaugucugguc

SEQ ID NO: 2003503 - RNA, 19 nt, Artificial Sequence
  Description of Artificial Sequence: Synthetic oligonucleotide
aguguggggcguaagaguc

SEQ ID NO: 2003504 - RNA, 19 nt, Artificial Sequence
  Description of Artificial Sequence: Synthetic oligonucleotide
cuguaauggccuauacacc

SEQ ID NO: 2003505 - RNA, 19 nt, Artificial Sequence
  Description of Artificial Sequence: Synthetic oligonucleotide
agauaccuuauucccaaga

SEQ ID NO: 2003506 - RNA, 19 nt, Artificial Sequence
  Description of Artificial Sequence: Synthetic oligonucleotide
ucauguagaguggugugug

SEQ ID NO: 2003507 - RNA, 19 nt, Artificial Sequence
  Description of Artificial Sequence: Synthetic oligonucleotide
aacuaauauugcaaccaca

SEQ ID NO: 2003508 - RNA, 19 nt, Artificial Sequence
  Description of Artificial Sequence: Synthetic oligonucleotide
aaacgaagaguggccagag

SEQ ID NO: 2003509 - RNA, 19 nt, Artificial Sequence
  Description of Artificial Sequence: Synthetic oligonucleotide
caacuaauauugcaaccac

SEQ ID NO: 2003510 - RNA, 19 nt, Artificial Sequence
  Description of Artificial Sequence: Synthetic oligonucleotide
gaauacgugugugcagugg

SEQ ID NO: 2003511 - RNA, 19 nt, Artificial Sequence
  Description of Artificial Sequence: Synthetic oligonucleotide
acgaagaguggccagagua

SEQ ID NO: 2003512 - RNA, 19 nt, Artificial Sequence
  Description of Artificial Sequence: Synthetic oligonucleotide
gaagucugccuacagagua

SEQ ID NO: 2003513 - RNA, 19 nt, Artificial Sequence
  Description of Artificial Sequence: Synthetic oligonucleotide
aagucugccuacagaguac

SEQ ID NO: 2003514 - RNA, 19 nt, Artificial Sequence
  Description of Artificial Sequence: Synthetic oligonucleotide
uucggcaggacgacuaccu

SEQ ID NO: 2003515 - RNA, 19 nt, Artificial Sequence
  Description of Artificial Sequence: Synthetic oligonucleotide
aagaaugucuggucuugaa

SEQ ID NO: 2003516 - RNA, 19 nt, Artificial Sequence
  Description of Artificial Sequence: Synthetic oligonucleotide
caaggugccaaagugaaca

SEQ ID NO: 2003517 - RNA, 19 nt, Artificial Sequence
  Description of Artificial Sequence: Synthetic oligonucleotide
ugaaagcuggccaguuccc

SEQ ID NO: 2003518 - RNA, 19 nt, Artificial Sequence
  Description of Artificial Sequence: Synthetic oligonucleotide
uccgauacauauacagcaa

SEQ ID NO: 2003519 - RNA, 19 nt, Artificial Sequence
  Description of Artificial Sequence: Synthetic oligonucleotide
guauggauacuugaugcug

SEQ ID NO: 2003520 - RNA, 19 nt, Artificial Sequence
  Description of Artificial Sequence: Synthetic oligonucleotide
uguagaguggugugugagu

SEQ ID NO: 2003521 - RNA, 19 nt, Artificial Sequence
  Description of Artificial Sequence: Synthetic oligonucleotide
uggcuauauagugauugcc

SEQ ID NO: 2003522 - RNA, 19 nt, Artificial Sequence
  Description of Artificial Sequence: Synthetic oligonucleotide
uggugguugcuugaauacg

SEQ ID NO: 2003523 - RNA, 19 nt, Artificial Sequence
  Description of Artificial Sequence: Synthetic oligonucleotide
uacauauguaguucucaau

SEQ ID NO: 2003524 - RNA, 19 nt, Artificial Sequence
  Description of Artificial Sequence: Synthetic oligonucleotide
ugucgaacauggucuucgg

SEQ ID NO: 2003525 - RNA, 19 nt, Artificial Sequence
  Description of Artificial Sequence: Synthetic oligonucleotide
caucaugcaguacauagaa

SEQ ID NO: 2003526 - RNA, 19 nt, Artificial Sequence
  Description of Artificial Sequence: Synthetic oligonucleotide
cuggugguugcuugaauac

SEQ ID NO: 2003527 - RNA, 19 nt, Artificial Sequence
  Description of Artificial Sequence: Synthetic oligonucleotide
ugcaguguggggcguaaga

SEQ ID NO: 2003528 - RNA, 19 nt, Artificial Sequence
  Description of Artificial Sequence: Synthetic oligonucleotide
gaacauggucuucggcagg

SEQ ID NO: 2003529 - RNA, 19 nt, Artificial Sequence
  Description of Artificial Sequence: Synthetic oligonucleotide
agaaaacgaagaguggcca

SEQ ID NO: 2003530 - RNA, 19 nt, Artificial Sequence
  Description of Artificial Sequence: Synthetic oligonucleotide
agaagaaugucuggucuug

SEQ ID NO: 2003531 - RNA, 19 nt, Artificial Sequence
  Description of Artificial Sequence: Synthetic oligonucleotide
aauucgagaaaggcccaca

SEQ ID NO: 2003532 - RNA, 19 nt, Artificial Sequence
  Description of Artificial Sequence: Synthetic oligonucleotide
uaugcauccuccugcuuuc

SEQ ID NO: 2003533 - RNA, 19 nt, Artificial Sequence
  Description of Artificial Sequence: Synthetic oligonucleotide
guagauagcagcaguccug

SEQ ID NO: 2003534 - RNA, 19 nt, Artificial Sequence
  Description of Artificial Sequence: Synthetic oligonucleotide
gugauugccaacaaaggaa

SEQ ID NO: 2003535 - RNA, 19 nt, Artificial Sequence
  Description of Artificial Sequence: Synthetic oligonucleotide
guggcuauauagugauugc

SEQ ID NO: 2003536 - RNA, 19 nt, Artificial Sequence
  Description of Artificial Sequence: Synthetic oligonucleotide
uggccagaguagaaggaca

SEQ ID NO: 2003537 - RNA, 19 nt, Artificial Sequence
  Description of Artificial Sequence: Synthetic oligonucleotide
agacagacucucuccagca

SEQ ID NO: 2003538 - RNA, 19 nt, Artificial Sequence
  Description of Artificial Sequence: Synthetic oligonucleotide
accuuauucccaagagccc

SEQ ID NO: 2003539 - RNA, 19 nt, Artificial Sequence
  Description of Artificial Sequence: Synthetic oligonucleotide
uuuugcugcauucccucua

SEQ ID NO: 2003540 - RNA, 19 nt, Artificial Sequence
  Description of Artificial Sequence: Synthetic oligonucleotide
acagcuccuugaaugaauc

SEQ ID NO: 2003541 - RNA, 19 nt, Artificial Sequence
  Description of Artificial Sequence: Synthetic oligonucleotide
uucauguagaguggugugu

SEQ ID NO: 2003542 - RNA, 19 nt, Artificial Sequence
  Description of Artificial Sequence: Synthetic oligonucleotide
ugaauacgugugugcagug

SEQ ID NO: 2003543 - RNA, 19 nt, Artificial Sequence
  Description of Artificial Sequence: Synthetic oligonucleotide
ugaugcuuguaaucagaaa

SEQ ID NO: 2003544 - RNA, 19 nt, Artificial Sequence
  Description of Artificial Sequence: Synthetic oligonucleotide
aagugaacagacagacucu

SEQ ID NO: 2003545 - RNA, 19 nt, Artificial Sequence
  Description of Artificial Sequence: Synthetic oligonucleotide
aacauggucuucggcagga

SEQ ID NO: 2003546 - RNA, 19 nt, Artificial Sequence
  Description of Artificial Sequence: Synthetic oligonucleotide
uacgugugugcaguggcag

SEQ ID NO: 2003547 - RNA, 19 nt, Artificial Sequence
  Description of Artificial Sequence: Synthetic oligonucleotide
gagaaaggcccacauauau

SEQ ID NO: 2003548 - RNA, 19 nt, Artificial Sequence
  Description of Artificial Sequence: Synthetic oligonucleotide
caggacgacuaccuggggc

SEQ ID NO: 2003549 - RNA, 19 nt, Artificial Sequence
  Description of Artificial Sequence: Synthetic oligonucleotide
caagaagugaggacgaagu

SEQ ID NO: 2003550 - RNA, 19 nt, Artificial Sequence
  Description of Artificial Sequence: Synthetic oligonucleotide
cauccuggcuugaagauaa

SEQ ID NO: 2003551 - RNA, 19 nt, Artificial Sequence
  Description of Artificial Sequence: Synthetic oligonucleotide
ugcauucccucuacauaug

SEQ ID NO: 2003552 - RNA, 19 nt, Artificial Sequence
  Description of Artificial Sequence: Synthetic oligonucleotide
ugaccaaucugggucacaa

SEQ ID NO: 2003553 - RNA, 19 nt, Artificial Sequence
  Description of Artificial Sequence: Synthetic oligonucleotide
ggugccaaagugaacagac

SEQ ID NO: 2003554 - RNA, 19 nt, Artificial Sequence
  Description of Artificial Sequence: Synthetic oligonucleotide
ugaggacgaagucugccua

SEQ ID NO: 2003555 - RNA, 19 nt, Artificial Sequence
  Description of Artificial Sequence: Synthetic oligonucleotide
ugucaugguauggauacuu

SEQ ID NO: 2003556 - RNA, 19 nt, Artificial Sequence
  Description of Artificial Sequence: Synthetic oligonucleotide
cucuugucgaacauggucu

SEQ ID NO: 2003557 - RNA, 19 nt, Artificial Sequence
  Description of Artificial Sequence: Synthetic oligonucleotide
cuacauauguaguucucaa

SEQ ID NO: 2003558 - RNA, 19 nt, Artificial Sequence
  Description of Artificial Sequence: Synthetic oligonucleotide
acgagcaaaauggaucuga

SEQ ID NO: 2003559 - RNA, 19 nt, Artificial Sequence
  Description of Artificial Sequence: Synthetic oligonucleotide
uacugucaugguauggaua

SEQ ID NO: 2003560 - RNA, 19 nt, Artificial Sequence
  Description of Artificial Sequence: Synthetic oligonucleotide
cugggucacaaacagacaa

SEQ ID NO: 2003561 - RNA, 19 nt, Artificial Sequence
  Description of Artificial Sequence: Synthetic oligonucleotide
cuaaccccuucaaggcugg

SEQ ID NO: 2003562 - RNA, 19 nt, Artificial Sequence
  Description of Artificial Sequence: Synthetic oligonucleotide
agaguacuuggcaauguca

SEQ ID NO: 2003563 - RNA, 19 nt, Artificial Sequence
  Description of Artificial Sequence: Synthetic oligonucleotide
gaaggcuccaauggcuuug

SEQ ID NO: 2003564 - RNA, 19 nt, Artificial Sequence
  Description of Artificial Sequence: Synthetic oligonucleotide
auucgagaaaggcccacau

SEQ ID NO: 2003565 - RNA, 19 nt, Artificial Sequence
  Description of Artificial Sequence: Synthetic oligonucleotide
uggggcguaagagucuugc

SEQ ID NO: 2003566 - RNA, 19 nt, Artificial Sequence
  Description of Artificial Sequence: Synthetic oligonucleotide
gggcguaagagucuugccc

SEQ ID NO: 2003567 - RNA, 19 nt, Artificial Sequence
  Description of Artificial Sequence: Synthetic oligonucleotide
aaagccucucugaaaugga

SEQ ID NO: 2003568 - RNA, 19 nt, Artificial Sequence
  Description of Artificial Sequence: Synthetic oligonucleotide
aacgaagaguggccagagu

SEQ ID NO: 2003569 - RNA, 19 nt, Artificial Sequence
  Description of Artificial Sequence: Synthetic oligonucleotide
aagcuggccaguucccuaa

SEQ ID NO: 2003570 - RNA, 19 nt, Artificial Sequence
  Description of Artificial Sequence: Synthetic oligonucleotide
agaaaggcccacauauaug

SEQ ID NO: 2003571 - RNA, 19 nt, Artificial Sequence
  Description of Artificial Sequence: Synthetic oligonucleotide
ugacgguacugucauggua

SEQ ID NO: 2003572 - RNA, 19 nt, Artificial Sequence
  Description of Artificial Sequence: Synthetic oligonucleotide
uugacugcaaggugccaaa

SEQ ID NO: 2003573 - RNA, 19 nt, Artificial Sequence
  Description of Artificial Sequence: Synthetic oligonucleotide
auauagugauugccaacaa

SEQ ID NO: 2003574 - RNA, 19 nt, Artificial Sequence
  Description of Artificial Sequence: Synthetic oligonucleotide
guuagggacuggcuagcug

SEQ ID NO: 2003575 - RNA, 19 nt, Artificial Sequence
  Description of Artificial Sequence: Synthetic oligonucleotide
agaccaaauugcagugugg

SEQ ID NO: 2003576 - RNA, 19 nt, Artificial Sequence
  Description of Artificial Sequence: Synthetic oligonucleotide
ucccucuacauauguaguu

SEQ ID NO: 2003577 - RNA, 19 nt, Artificial Sequence
  Description of Artificial Sequence: Synthetic oligonucleotide
gucaguuagggacuggcua

SEQ ID NO: 2003578 - RNA, 19 nt, Artificial Sequence
  Description of Artificial Sequence: Synthetic oligonucleotide
aaccccuucaaggcuggug

SEQ ID NO: 2003579 - RNA, 19 nt, Artificial Sequence
  Description of Artificial Sequence: Synthetic oligonucleotide
agcaaucauagaggaaaug

SEQ ID NO: 2003580 - RNA, 19 nt, Artificial Sequence
  Description of Artificial Sequence: Synthetic oligonucleotide
cuccagcaaucauagagga

SEQ ID NO: 2003581 - RNA, 19 nt, Artificial Sequence
  Description of Artificial Sequence: Synthetic oligonucleotide
agaaaguaauaugcauccu

SEQ ID NO: 2003582 - RNA, 19 nt, Artificial Sequence
  Description of Artificial Sequence: Synthetic oligonucleotide
guaauggccuauacaccag

SEQ ID NO: 2003583 - RNA, 19 nt, Artificial Sequence
  Description of Artificial Sequence: Synthetic oligonucleotide
aacuucgguggguccagau

SEQ ID NO: 2003584 - RNA, 19 nt, Artificial Sequence
  Description of Artificial Sequence: Synthetic oligonucleotide
cccacauauauggauaaag

SEQ ID NO: 2003585 - RNA, 19 nt, Artificial Sequence
  Description of Artificial Sequence: Synthetic oligonucleotide
ggcguaagagucuugccca

SEQ ID NO: 2003586 - RNA, 19 nt, Artificial Sequence
  Description of Artificial Sequence: Synthetic oligonucleotide
ggauacuugaugcuguugu

SEQ ID NO: 2003587 - RNA, 19 nt, Artificial Sequence
  Description of Artificial Sequence: Synthetic oligonucleotide
cuaugacgagcaaaaugga

SEQ ID NO: 2003588 - RNA, 19 nt, Artificial Sequence
  Description of Artificial Sequence: Synthetic oligonucleotide
guugcuugaauacgugugu

SEQ ID NO: 2003589 - RNA, 19 nt, Artificial Sequence
  Description of Artificial Sequence: Synthetic oligonucleotide
gcuauauagugauugccaa

SEQ ID NO: 2003590 - RNA, 19 nt, Artificial Sequence
  Description of Artificial Sequence: Synthetic oligonucleotide
ugguuucauguagaguggu

SEQ ID NO: 2003591 - RNA, 19 nt, Artificial Sequence
  Description of Artificial Sequence: Synthetic oligonucleotide
caucgagggccacguaggg

SEQ ID NO: 2003592 - RNA, 19 nt, Artificial Sequence
  Description of Artificial Sequence: Synthetic oligonucleotide
gaaauucgagaaaggccca

SEQ ID NO: 2003593 - RNA, 19 nt, Artificial Sequence
  Description of Artificial Sequence: Synthetic oligonucleotide
gguacugucaugguaugga

SEQ ID NO: 2003594 - RNA, 19 nt, Artificial Sequence
  Description of Artificial Sequence: Synthetic oligonucleotide
aguucccuaaccccuucaa

SEQ ID NO: 2003595 - RNA, 19 nt, Artificial Sequence
  Description of Artificial Sequence: Synthetic oligonucleotide
auggccuauacaccagaaa

SEQ ID NO: 2003596 - RNA, 19 nt, Artificial Sequence
  Description of Artificial Sequence: Synthetic oligonucleotide
gcgguuggaacgaacuucg

SEQ ID NO: 2003597 - RNA, 19 nt, Artificial Sequence
  Description of Artificial Sequence: Synthetic oligonucleotide
gaucugacgguacugucau

SEQ ID NO: 2003598 - RNA, 19 nt, Artificial Sequence
  Description of Artificial Sequence: Synthetic oligonucleotide
ccuuauucccaagagcccc

SEQ ID NO: 2003599 - RNA, 19 nt, Artificial Sequence
  Description of Artificial Sequence: Synthetic oligonucleotide
uggaucugacgguacuguc

SEQ ID NO: 2003600 - RNA, 19 nt, Artificial Sequence
  Description of Artificial Sequence: Synthetic oligonucleotide
gucaugguauggauacuug

SEQ ID NO: 2003601 - RNA, 19 nt, Artificial Sequence
  Description of Artificial Sequence: Synthetic oligonucleotide
cugcaaggugccaaaguga

SEQ ID NO: 2003602 - RNA, 19 nt, Artificial Sequence
  Description of Artificial Sequence: Synthetic oligonucleotide
acgacuaccuggggcgggc

SEQ ID NO: 2003603 - RNA, 19 nt, Artificial Sequence
  Description of Artificial Sequence: Synthetic oligonucleotide
cuuauucccaagagcccca

SEQ ID NO: 2003604 - RNA, 19 nt, Artificial Sequence
  Description of Artificial Sequence: Synthetic oligonucleotide
gaacgaacuucgguggguc

SEQ ID NO: 2003605 - RNA, 19 nt, Artificial Sequence
  Description of Artificial Sequence: Synthetic oligonucleotide
aaaggcccacauauaugga

SEQ ID NO: 2003606 - RNA, 19 nt, Artificial Sequence
  Description of Artificial Sequence: Synthetic oligonucleotide
gaaauccgauacauauaca

SEQ ID NO: 2003607 - RNA, 19 nt, Artificial Sequence
  Description of Artificial Sequence: Synthetic oligonucleotide
gacgguacugucaugguau

SEQ ID NO: 2003608 - RNA, 19 nt, Artificial Sequence
  Description of Artificial Sequence: Synthetic oligonucleotide
ugacugcaaggugccaaag

SEQ ID NO: 2003609 - RNA, 19 nt, Artificial Sequence
  Description of Artificial Sequence: Synthetic oligonucleotide
agucugccuacagaguacu

SEQ ID NO: 2003610 - RNA, 19 nt, Artificial Sequence
  Description of Artificial Sequence: Synthetic oligonucleotide
cugcauucccucuacauau

SEQ ID NO: 2003611 - RNA, 19 nt, Artificial Sequence
  Description of Artificial Sequence: Synthetic oligonucleotide
acgguacugucaugguaug

SEQ ID NO: 2003612 - RNA, 19 nt, Artificial Sequence
  Description of Artificial Sequence: Synthetic oligonucleotide
caaaauggaucugacggua

SEQ ID NO: 2003613 - RNA, 19 nt, Artificial Sequence
  Description of Artificial Sequence: Synthetic oligonucleotide
gcaacaagaccaaauugca

SEQ ID NO: 2003614 - RNA, 19 nt, Artificial Sequence
  Description of Artificial Sequence: Synthetic oligonucleotide
uauucccaagagccccaac

SEQ ID NO: 2003615 - RNA, 19 nt, Artificial Sequence
  Description of Artificial Sequence: Synthetic oligonucleotide
ccaagccccacuaugacga

SEQ ID NO: 2003616 - RNA, 19 nt, Artificial Sequence
  Description of Artificial Sequence: Synthetic oligonucleotide
ccucuugucgaacaugguc

SEQ ID NO: 2003617 - RNA, 19 nt, Artificial Sequence
  Description of Artificial Sequence: Synthetic oligonucleotide
ccuaaccccuucaaggcug

SEQ ID NO: 2003618 - RNA, 19 nt, Artificial Sequence
  Description of Artificial Sequence: Synthetic oligonucleotide
cagauaccuuauucccaag

SEQ ID NO: 2003619 - RNA, 19 nt, Artificial Sequence
  Description of Artificial Sequence: Synthetic oligonucleotide
aagccucucugaaauggau

SEQ ID NO: 2003620 - RNA, 19 nt, Artificial Sequence
  Description of Artificial Sequence: Synthetic oligonucleotide
aaauugcaguguggggcgu

SEQ ID NO: 2003621 - RNA, 19 nt, Artificial Sequence
  Description of Artificial Sequence: Synthetic oligonucleotide
acgaacuucggugggucca

SEQ ID NO: 2003622 - RNA, 19 nt, Artificial Sequence
  Description of Artificial Sequence: Synthetic oligonucleotide
uuugaccaaucugggucac

SEQ ID NO: 2003623 - RNA, 19 nt, Artificial Sequence
  Description of Artificial Sequence: Synthetic oligonucleotide
auggauauauuuggcccaa

SEQ ID NO: 2003624 - RNA, 19 nt, Artificial Sequence
  Description of Artificial Sequence: Synthetic oligonucleotide
caaugucaguuagggacug

SEQ ID NO: 2003625 - RNA, 19 nt, Artificial Sequence
  Description of Artificial Sequence: Synthetic oligonucleotide
gacgacuaccuggggcggg

SEQ ID NO: 2003626 - RNA, 19 nt, Artificial Sequence
  Description of Artificial Sequence: Synthetic oligonucleotide
caguuagggacuggcuagc

SEQ ID NO: 2003627 - RNA, 19 nt, Artificial Sequence
  Description of Artificial Sequence: Synthetic oligonucleotide
cauguagagugguguguga

SEQ ID NO: 2003628 - RNA, 19 nt, Artificial Sequence
  Description of Artificial Sequence: Synthetic oligonucleotide
cgccucuugucgaacaugg

SEQ ID NO: 2003629 - RNA, 19 nt, Artificial Sequence
  Description of Artificial Sequence: Synthetic oligonucleotide
gugaugcuuguaaucagaa

SEQ ID NO: 2003630 - RNA, 19 nt, Artificial Sequence
  Description of Artificial Sequence: Synthetic oligonucleotide
gugguugcuugaauacgug

SEQ ID NO: 2003631 - RNA, 19 nt, Artificial Sequence
  Description of Artificial Sequence: Synthetic oligonucleotide
guccuguaauggccuauac

SEQ ID NO: 2003632 - RNA, 19 nt, Artificial Sequence
  Description of Artificial Sequence: Synthetic oligonucleotide
acgugugugcaguggcagu

SEQ ID NO: 2003633 - RNA, 19 nt, Artificial Sequence
  Description of Artificial Sequence: Synthetic oligonucleotide
uguggggcguaagagucuu

SEQ ID NO: 2003634 - RNA, 19 nt, Artificial Sequence
  Description of Artificial Sequence: Synthetic oligonucleotide
ccuacagaguacuuggcaa

SEQ ID NO: 2003635 - RNA, 19 nt, Artificial Sequence
  Description of Artificial Sequence: Synthetic oligonucleotide
gacgagcaaaauggaucug

SEQ ID NO: 2003636 - RNA, 19 nt, Artificial Sequence
  Description of Artificial Sequence: Synthetic oligonucleotide
cuucggcaggacgacuacc

SEQ ID NO: 2003637 - RNA, 19 nt, Artificial Sequence
  Description of Artificial Sequence: Synthetic oligonucleotide
accgcggaguggcggcggc

SEQ ID NO: 2003638 - RNA, 19 nt, Artificial Sequence
  Description of Artificial Sequence: Synthetic oligonucleotide
acauggucuucggcaggac

SEQ ID NO: 2003639 - RNA, 19 nt, Artificial Sequence
  Description of Artificial Sequence: Synthetic oligonucleotide
aaccgcggaguggcggcgg

SEQ ID NO: 2003640 - RNA, 19 nt, Artificial Sequence
  Description of Artificial Sequence: Synthetic oligonucleotide
aggacgaagucugccuaca

SEQ ID NO: 2003641 - RNA, 19 nt, Artificial Sequence
  Description of Artificial Sequence: Synthetic oligonucleotide
aguuagggacuggcuagcu

SEQ ID NO: 2003642 - RNA, 19 nt, Artificial Sequence
  Description of Artificial Sequence: Synthetic oligonucleotide
uggucuucggcaggacgac

SEQ ID NO: 2003643 - RNA, 19 nt, Artificial Sequence
  Description of Artificial Sequence: Synthetic oligonucleotide
auacgugugugcaguggca

SEQ ID NO: 2003644 - RNA, 19 nt, Artificial Sequence
  Description of Artificial Sequence: Synthetic oligonucleotide
uuauucccaagagccccaa

SEQ ID NO: 2003645 - RNA, 19 nt, Artificial Sequence
  Description of Artificial Sequence: Synthetic oligonucleotide
agagccccaaccgcggagu

SEQ ID NO: 2003646 - RNA, 19 nt, Artificial Sequence
  Description of Artificial Sequence: Synthetic oligonucleotide
ggacgaagucugccuacag

SEQ ID NO: 2003647 - RNA, 19 nt, Artificial Sequence
  Description of Artificial Sequence: Synthetic oligonucleotide
gcgggcggcgguuggaacg

SEQ ID NO: 2003648 - RNA, 19 nt, Artificial Sequence
  Description of Artificial Sequence: Synthetic oligonucleotide
cuacagaguacuuggcaau

SEQ ID NO: 2003649 - RNA, 19 nt, Artificial Sequence
  Description of Artificial Sequence: Synthetic oligonucleotide
ggacaaccugccuucccug

SEQ ID NO: 2003650 - RNA, 19 nt, Artificial Sequence
  Description of Artificial Sequence: Synthetic oligonucleotide
gcuggugguugcuugaaua

SEQ ID NO: 2003651 - RNA, 19 nt, Artificial Sequence
  Description of Artificial Sequence: Synthetic oligonucleotide
ggcgguuggaacgaacuuc

SEQ ID NO: 2003652 - RNA, 19 nt, Artificial Sequence
  Description of Artificial Sequence: Synthetic oligonucleotide
cauucccucuacauaugua

SEQ ID NO: 2003653 - RNA, 19 nt, Artificial Sequence
  Description of Artificial Sequence: Synthetic oligonucleotide
ccagauaccuuauucccaa

SEQ ID NO: 2003654 - RNA, 19 nt, Artificial Sequence
  Description of Artificial Sequence: Synthetic oligonucleotide
uugaccaaucugggucaca

SEQ ID NO: 2003655 - RNA, 19 nt, Artificial Sequence
  Description of Artificial Sequence: Synthetic oligonucleotide
gguuggaacgaacuucggu

SEQ ID NO: 2003656 - RNA, 19 nt, Artificial Sequence
  Description of Artificial Sequence: Synthetic oligonucleotide
aucugacgguacugucaug

SEQ ID NO: 2003657 - RNA, 19 nt, Artificial Sequence
  Description of Artificial Sequence: Synthetic oligonucleotide
aggcccacauauauggaua

SEQ ID NO: 2003658 - RNA, 19 nt, Artificial Sequence
  Description of Artificial Sequence: Synthetic oligonucleotide
aguccuguaauggccuaua

SEQ ID NO: 2003659 - RNA, 19 nt, Artificial Sequence
  Description of Artificial Sequence: Synthetic oligonucleotide
uggguccagauaccuuauu

SEQ ID NO: 2003660 - RNA, 19 nt, Artificial Sequence
  Description of Artificial Sequence: Synthetic oligonucleotide
gguaagccaagccccacua

SEQ ID NO: 2003661 - RNA, 19 nt, Artificial Sequence
  Description of Artificial Sequence: Synthetic oligonucleotide
uaguggcuauauagugauu

SEQ ID NO: 2003662 - RNA, 19 nt, Artificial Sequence
  Description of Artificial Sequence: Synthetic oligonucleotide
gaccaaucugggucacaaa

SEQ ID NO: 2003663 - RNA, 19 nt, Artificial Sequence
  Description of Artificial Sequence: Synthetic oligonucleotide
gcguaagagucuugcccag

SEQ ID NO: 2003664 - RNA, 19 nt, Artificial Sequence
  Description of Artificial Sequence: Synthetic oligonucleotide
gacaagaagugaggacgaa

SEQ ID NO: 2003665 - RNA, 19 nt, Artificial Sequence
  Description of Artificial Sequence: Synthetic oligonucleotide
guagaaggacaaccugccu

SEQ ID NO: 2003666 - RNA, 19 nt, Artificial Sequence
  Description of Artificial Sequence: Synthetic oligonucleotide
ggggcguaagagucuugcc

SEQ ID NO: 2003667 - RNA, 19 nt, Artificial Sequence
  Description of Artificial Sequence: Synthetic oligonucleotide
auugcaguguggggcguaa

SEQ ID NO: 2003668 - RNA, 19 nt, Artificial Sequence
  Description of Artificial Sequence: Synthetic oligonucleotide
cuaccuggggcgggcggcg

SEQ ID NO: 2003669 - RNA, 19 nt, Artificial Sequence
  Description of Artificial Sequence: Synthetic oligonucleotide
ggugguugcuugaauacgu

SEQ ID NO: 2003670 - RNA, 19 nt, Artificial Sequence
  Description of Artificial Sequence: Synthetic oligonucleotide
gagccccaaccgcggagug

SEQ ID NO: 2003671 - RNA, 19 nt, Artificial Sequence
  Description of Artificial Sequence: Synthetic oligonucleotide
gggcagccgccucuugucg

SEQ ID NO: 2003672 - RNA, 19 nt, Artificial Sequence
  Description of Artificial Sequence: Synthetic oligonucleotide
ggcccacauauauggauaa

SEQ ID NO: 2003673 - RNA, 19 nt, Artificial Sequence
  Description of Artificial Sequence: Synthetic oligonucleotide
ggcuuuguaaauaguggcu

SEQ ID NO: 2003674 - RNA, 19 nt, Artificial Sequence
  Description of Artificial Sequence: Synthetic oligonucleotide
ccaaccgcggaguggcggc

SEQ ID NO: 2003675 - RNA, 19 nt, Artificial Sequence
  Description of Artificial Sequence: Synthetic oligonucleotide
gaacagccauaggcagagc

SEQ ID NO: 2003676 - RNA, 19 nt, Artificial Sequence
  Description of Artificial Sequence: Synthetic oligonucleotide
gcaguacauagaaaacgaa

SEQ ID NO: 2003677 - RNA, 19 nt, Artificial Sequence
  Description of Artificial Sequence: Synthetic oligonucleotide
caaccgcggaguggcggcg

SEQ ID NO: 2003678 - RNA, 19 nt, Artificial Sequence
  Description of Artificial Sequence: Synthetic oligonucleotide
caguucccuaaccccuuca

SEQ ID NO: 2003679 - RNA, 19 nt, Artificial Sequence
  Description of Artificial Sequence: Synthetic oligonucleotide
ggugugugagucauccucu

SEQ ID NO: 2003680 - RNA, 19 nt, Artificial Sequence
  Description of Artificial Sequence: Synthetic oligonucleotide
acacgucacuccagugaug

SEQ ID NO: 2003681 - RNA, 19 nt, Artificial Sequence
  Description of Artificial Sequence: Synthetic oligonucleotide
gcaggacgacuaccugggg

SEQ ID NO: 2003682 - RNA, 19 nt, Artificial Sequence
  Description of Artificial Sequence: Synthetic oligonucleotide
ggacgacuaccuggggcgg

SEQ ID NO: 2003683 - RNA, 19 nt, Artificial Sequence
  Description of Artificial Sequence: Synthetic oligonucleotide
gcaaugucaguuagggacu

SEQ ID NO: 2003684 - RNA, 19 nt, Artificial Sequence
  Description of Artificial Sequence: Synthetic oligonucleotide
ggccuauacaccagaaagu

SEQ ID NO: 2003685 - RNA, 19 nt, Artificial Sequence
  Description of Artificial Sequence: Synthetic oligonucleotide
ucccugacuuuugcugcau

SEQ ID NO: 2003686 - RNA, 19 nt, Artificial Sequence
  Description of Artificial Sequence: Synthetic oligonucleotide
cagcaaucauagaggaaau

SEQ ID NO: 2003687 - RNA, 19 nt, Artificial Sequence
  Description of Artificial Sequence: Synthetic oligonucleotide
caagagccccaaccgcgga

SEQ ID NO: 2003688 - RNA, 19 nt, Artificial Sequence
  Description of Artificial Sequence: Synthetic oligonucleotide
gcauucccucuacauaugu

SEQ ID NO: 2003689 - RNA, 19 nt, Artificial Sequence
  Description of Artificial Sequence: Synthetic oligonucleotide
guaagccaagccccacuau

SEQ ID NO: 2003690 - RNA, 19 nt, Artificial Sequence
  Description of Artificial Sequence: Synthetic oligonucleotide
gaacuucgguggguccaga

SEQ ID NO: 2003691 - RNA, 19 nt, Artificial Sequence
  Description of Artificial Sequence: Synthetic oligonucleotide
cgugugugcaguggcagug

SEQ ID NO: 2003692 - RNA, 19 nt, Artificial Sequence
  Description of Artificial Sequence: Synthetic oligonucleotide
gcaaggugccaaagugaac

SEQ ID NO: 2003693 - RNA, 19 nt, Artificial Sequence
  Description of Artificial Sequence: Synthetic oligonucleotide
ggcagccgccucuugucga

SEQ ID NO: 2003694 - RNA, 19 nt, Artificial Sequence
  Description of Artificial Sequence: Synthetic oligonucleotide
cccaaccgcggaguggcgg

SEQ ID NO: 2003695 - RNA, 19 nt, Artificial Sequence
  Description of Artificial Sequence: Synthetic oligonucleotide
gccacguagggcagccgcc

SEQ ID NO: 2003696 - RNA, 19 nt, Artificial Sequence
  Description of Artificial Sequence: Synthetic oligonucleotide
cagugguuucauguagagu

SEQ ID NO: 2003697 - RNA, 19 nt, Artificial Sequence
  Description of Artificial Sequence: Synthetic oligonucleotide
ggguaagccaagccccacu

SEQ ID NO: 2003698 - RNA, 19 nt, Artificial Sequence
  Description of Artificial Sequence: Synthetic oligonucleotide
ggaacgaacuucggugggu

SEQ ID NO: 2003699 - RNA, 19 nt, Artificial Sequence
  Description of Artificial Sequence: Synthetic oligonucleotide
ccaguucccuaaccccuuc

SEQ ID NO: 2003700 - RNA, 19 nt, Artificial Sequence
  Description of Artificial Sequence: Synthetic oligonucleotide
gaguggcggcggccccaag

SEQ ID NO: 2003701 - RNA, 19 nt, Artificial Sequence
  Description of Artificial Sequence: Synthetic oligonucleotide
guggggcguaagagucuug

SEQ ID NO: 2003702 - RNA, 19 nt, Artificial Sequence
  Description of Artificial Sequence: Synthetic oligonucleotide
caaccacagcuccuugaau

SEQ ID NO: 2003703 - RNA, 19 nt, Artificial Sequence
  Description of Artificial Sequence: Synthetic oligonucleotide
cgaacuucgguggguccag

SEQ ID NO: 2003704 - RNA, 19 nt, Artificial Sequence
  Description of Artificial Sequence: Synthetic oligonucleotide
gcagccgccucuugucgaa

SEQ ID NO: 2003705 - RNA, 19 nt, Artificial Sequence
  Description of Artificial Sequence: Synthetic oligonucleotide
cuggggcgggcggcgguug

SEQ ID NO: 2003706 - RNA, 19 nt, Artificial Sequence
  Description of Artificial Sequence: Synthetic oligonucleotide
ccgccucuugucgaacaug

SEQ ID NO: 2003707 - RNA, 19 nt, Artificial Sequence
  Description of Artificial Sequence: Synthetic oligonucleotide
cugucaugguauggauacu

SEQ ID NO: 2003708 - RNA, 19 nt, Artificial Sequence
  Description of Artificial Sequence: Synthetic oligonucleotide
gcggcgguuggaacgaacu

SEQ ID NO: 2003709 - RNA, 19 nt, Artificial Sequence
  Description of Artificial Sequence: Synthetic oligonucleotide
cgagaaaggcccacauaua

SEQ ID NO: 2003710 - RNA, 19 nt, Artificial Sequence
  Description of Artificial Sequence: Synthetic oligonucleotide
ggcggcgguuggaacgaac

SEQ ID NO: 2003711 - RNA, 19 nt, Artificial Sequence
  Description of Artificial Sequence: Synthetic oligonucleotide
gcccacauauauggauaaa

SEQ ID NO: 2003712 - RNA, 19 nt, Artificial Sequence
  Description of Artificial Sequence: Synthetic oligonucleotide
gcggaguggcggcggcccc

SEQ ID NO: 2003713 - RNA, 19 nt, Artificial Sequence
  Description of Artificial Sequence: Synthetic oligonucleotide
cccuaaccccuucaaggcu

SEQ ID NO: 2003714 - RNA, 19 nt, Artificial Sequence
  Description of Artificial Sequence: Synthetic oligonucleotide
caguccuguaauggccuau

SEQ ID NO: 2003715 - RNA, 19 nt, Artificial Sequence
  Description of Artificial Sequence: Synthetic oligonucleotide
ccccaaccgcggaguggcg

SEQ ID NO: 2003716 - RNA, 19 nt, Artificial Sequence
  Description of Artificial Sequence: Synthetic oligonucleotide
cgaagucugccuacagagu

SEQ ID NO: 2003717 - RNA, 19 nt, Artificial Sequence
  Description of Artificial Sequence: Synthetic oligonucleotide
ggucuucggcaggacgacu

SEQ ID NO: 2003718 - RNA, 19 nt, Artificial Sequence
  Description of Artificial Sequence: Synthetic oligonucleotide
cgacuaccuggggcgggcg

SEQ ID NO: 2003719 - RNA, 19 nt, Artificial Sequence
  Description of Artificial Sequence: Synthetic oligonucleotide
gucugccuacagaguacuu

SEQ ID NO: 2003720 - RNA, 19 nt, Artificial Sequence
  Description of Artificial Sequence: Synthetic oligonucleotide
gccucuugucgaacauggu

SEQ ID NO: 2003721 - RNA, 19 nt, Artificial Sequence
  Description of Artificial Sequence: Synthetic oligonucleotide
gccaguucccuaaccccuu

SEQ ID NO: 2003722 - RNA, 19 nt, Artificial Sequence
  Description of Artificial Sequence: Synthetic oligonucleotide
ccgcggaguggcggcggcc

SEQ ID NO: 2003723 - RNA, 19 nt, Artificial Sequence
  Description of Artificial Sequence: Synthetic oligonucleotide
ccacuaugacgagcaaaau

SEQ ID NO: 2003724 - RNA, 19 nt, Artificial Sequence
  Description of Artificial Sequence: Synthetic oligonucleotide
cguaagagucuugcccagu

SEQ ID NO: 2003725 - RNA, 19 nt, Artificial Sequence
  Description of Artificial Sequence: Synthetic oligonucleotide
cggcggccccaagcgacug

SEQ ID NO: 2003726 - RNA, 19 nt, Artificial Sequence
  Description of Artificial Sequence: Synthetic oligonucleotide
cggcgguuggaacgaacuu

SEQ ID NO: 2003727 - RNA, 19 nt, Artificial Sequence
  Description of Artificial Sequence: Synthetic oligonucleotide
ccuggggcgggcggcgguu

SEQ ID NO: 2003728 - RNA, 19 nt, Artificial Sequence
  Description of Artificial Sequence: Synthetic oligonucleotide
ugaaauuugagccauaugc

SEQ ID NO: 2003729 - RNA, 19 nt, Artificial Sequence
  Description of Artificial Sequence: Synthetic oligonucleotide
aauccuguuacacacauac

SEQ ID NO: 2003730 - RNA, 19 nt, Artificial Sequence
  Description of Artificial Sequence: Synthetic oligonucleotide
acacaauuaaaauauugcc

SEQ ID NO: 2003731 - RNA, 19 nt, Artificial Sequence
  Description of Artificial Sequence: Synthetic oligonucleotide
uugacauuaauacaaacug

SEQ ID NO: 2003732 - RNA, 19 nt, Artificial Sequence
  Description of Artificial Sequence: Synthetic oligonucleotide
aagagaaccacucagacuu

SEQ ID NO: 2003733 - RNA, 19 nt, Artificial Sequence
  Description of Artificial Sequence: Synthetic oligonucleotide
aauagcauuacaaucuaac

SEQ ID NO: 2003734 - RNA, 19 nt, Artificial Sequence
  Description of Artificial Sequence: Synthetic oligonucleotide
guaguauugacauuaauac

SEQ ID NO: 2003735 - RNA, 19 nt, Artificial Sequence
  Description of Artificial Sequence: Synthetic oligonucleotide
uuaguuuuggcaaagugcu

SEQ ID NO: 2003736 - RNA, 19 nt, Artificial Sequence
  Description of Artificial Sequence: Synthetic oligonucleotide
acucaaaugcuacagaauc

SEQ ID NO: 2003737 - RNA, 19 nt, Artificial Sequence
  Description of Artificial Sequence: Synthetic oligonucleotide
aauacaaacugguacaaau

SEQ ID NO: 2003738 - RNA, 19 nt, Artificial Sequence
  Description of Artificial Sequence: Synthetic oligonucleotide
acuggcaaagguuagaaag

SEQ ID NO: 2003739 - RNA, 19 nt, Artificial Sequence
  Description of Artificial Sequence: Synthetic oligonucleotide
aacaugaucggucaaagau

SEQ ID NO: 2003740 - RNA, 19 nt, Artificial Sequence
  Description of Artificial Sequence: Synthetic oligonucleotide
uuugucugcauucaguccc

SEQ ID NO: 2003741 - RNA, 19 nt, Artificial Sequence
  Description of Artificial Sequence: Synthetic oligonucleotide
uacagaaucuauaggaaag

SEQ ID NO: 2003742 - RNA, 19 nt, Artificial Sequence
  Description of Artificial Sequence: Synthetic oligonucleotide
uaaaauauugccacacuca

SEQ ID NO: 2003743 - RNA, 19 nt, Artificial Sequence
  Description of Artificial Sequence: Synthetic oligonucleotide
ugacauuaauacaaacugg

SEQ ID NO: 2003744 - RNA, 19 nt, Artificial Sequence
  Description of Artificial Sequence: Synthetic oligonucleotide
cauuaauacaaacugguac

SEQ ID NO: 2003745 - RNA, 19 nt, Artificial Sequence
  Description of Artificial Sequence: Synthetic oligonucleotide
ugcaccuaagacauuauag

SEQ ID NO: 2003746 - RNA, 19 nt, Artificial Sequence
  Description of Artificial Sequence: Synthetic oligonucleotide
ucacucuagaaacaggucc

SEQ ID NO: 2003747 - RNA, 19 nt, Artificial Sequence
  Description of Artificial Sequence: Synthetic oligonucleotide
ugcuacagaaucuauagga

SEQ ID NO: 2003748 - RNA, 19 nt, Artificial Sequence
  Description of Artificial Sequence: Synthetic oligonucleotide
uuaaaauauugccacacuc

SEQ ID NO: 2003749 - RNA, 19 nt, Artificial Sequence
  Description of Artificial Sequence: Synthetic oligonucleotide
aguccccucacacaaagcc

SEQ ID NO: 2003750 - RNA, 19 nt, Artificial Sequence
  Description of Artificial Sequence: Synthetic oligonucleotide
aggugaaaggcacauacac

SEQ ID NO: 2003751 - RNA, 19 nt, Artificial Sequence
  Description of Artificial Sequence: Synthetic oligonucleotide
uagaaauaaaagucagggg

SEQ ID NO: 2003752 - RNA, 19 nt, Artificial Sequence
  Description of Artificial Sequence: Synthetic oligonucleotide
ucuauaggaaaguacaaaa

SEQ ID NO: 2003753 - RNA, 19 nt, Artificial Sequence
  Description of Artificial Sequence: Synthetic oligonucleotide
aaguugaucagaggguucc

SEQ ID NO: 2003754 - RNA, 19 nt, Artificial Sequence
  Description of Artificial Sequence: Synthetic oligonucleotide
aaaauauugccacacucaa

SEQ ID NO: 2003755 - RNA, 19 nt, Artificial Sequence
  Description of Artificial Sequence: Synthetic oligonucleotide
uguguauucaaguucugug

SEQ ID NO: 2003756 - RNA, 19 nt, Artificial Sequence
  Description of Artificial Sequence: Synthetic oligonucleotide
auguaauugggacucacuc

SEQ ID NO: 2003757 - RNA, 19 nt, Artificial Sequence
  Description of Artificial Sequence: Synthetic oligonucleotide
ugcccuuugauguaauugg

SEQ ID NO: 2003758 - RNA, 19 nt, Artificial Sequence
  Description of Artificial Sequence: Synthetic oligonucleotide
ucagaauccuguuacacac

SEQ ID NO: 2003759 - RNA, 19 nt, Artificial Sequence
  Description of Artificial Sequence: Synthetic oligonucleotide
agucucaacacaaaacacc

SEQ ID NO: 2003760 - RNA, 19 nt, Artificial Sequence
  Description of Artificial Sequence: Synthetic oligonucleotide
gaaucuauaggaaaguaca

SEQ ID NO: 2003761 - RNA, 19 nt, Artificial Sequence
  Description of Artificial Sequence: Synthetic oligonucleotide
aaauaagccuugcaaccag

SEQ ID NO: 2003762 - RNA, 19 nt, Artificial Sequence
  Description of Artificial Sequence: Synthetic oligonucleotide
cauacuccaaaacagcacc

SEQ ID NO: 2003763 - RNA, 19 nt, Artificial Sequence
  Description of Artificial Sequence: Synthetic oligonucleotide
acacaucacaacaugaucg

SEQ ID NO: 2003764 - RNA, 19 nt, Artificial Sequence
  Description of Artificial Sequence: Synthetic oligonucleotide
uuuggaacuaggugguagg

SEQ ID NO: 2003765 - RNA, 19 nt, Artificial Sequence
  Description of Artificial Sequence: Synthetic oligonucleotide
uuacaaucuaacauucaga

SEQ ID NO: 2003766 - RNA, 19 nt, Artificial Sequence
  Description of Artificial Sequence: Synthetic oligonucleotide
ucuaacauucagaauccug

SEQ ID NO: 2003767 - RNA, 19 nt, Artificial Sequence
  Description of Artificial Sequence: Synthetic oligonucleotide
cauuauaggucacagcaag

SEQ ID NO: 2003768 - RNA, 19 nt, Artificial Sequence
  Description of Artificial Sequence: Synthetic oligonucleotide
uacaggaauagcauuacaa

SEQ ID NO: 2003769 - RNA, 19 nt, Artificial Sequence
  Description of Artificial Sequence: Synthetic oligonucleotide
uagcauuacaaucuaacau

SEQ ID NO: 2003770 - RNA, 19 nt, Artificial Sequence
  Description of Artificial Sequence: Synthetic oligonucleotide
uuugauguaauugggacuc

SEQ ID NO: 2003771 - RNA, 19 nt, Artificial Sequence
  Description of Artificial Sequence: Synthetic oligonucleotide
ucagacuuauuggagaaag

SEQ ID NO: 2003772 - RNA, 19 nt, Artificial Sequence
  Description of Artificial Sequence: Synthetic oligonucleotide
ucugguaggguccuuguug

SEQ ID NO: 2003773 - RNA, 19 nt, Artificial Sequence
  Description of Artificial Sequence: Synthetic oligonucleotide
cagcaaguugaucagaggg

SEQ ID NO: 2003774 - RNA, 19 nt, Artificial Sequence
  Description of Artificial Sequence: Synthetic oligonucleotide
uaggaaaguacaaaagaaa

SEQ ID NO: 2003775 - RNA, 19 nt, Artificial Sequence
  Description of Artificial Sequence: Synthetic oligonucleotide
aaacaggucccucugacau

SEQ ID NO: 2003776 - RNA, 19 nt, Artificial Sequence
  Description of Artificial Sequence: Synthetic oligonucleotide
gaaauaaaagucaggggug

SEQ ID NO: 2003777 - RNA, 19 nt, Artificial Sequence
  Description of Artificial Sequence: Synthetic oligonucleotide
aguuuuggcaaagugcugg

SEQ ID NO: 2003778 - RNA, 19 nt, Artificial Sequence
  Description of Artificial Sequence: Synthetic oligonucleotide
aagacauuauaggucacag

SEQ ID NO: 2003779 - RNA, 19 nt, Artificial Sequence
  Description of Artificial Sequence: Synthetic oligonucleotide
ugguacaaauuucucuagg

SEQ ID NO: 2003780 - RNA, 19 nt, Artificial Sequence
  Description of Artificial Sequence: Synthetic oligonucleotide
agaaucuauaggaaaguac

SEQ ID NO: 2003781 - RNA, 19 nt, Artificial Sequence
  Description of Artificial Sequence: Synthetic oligonucleotide
gaaccacucagacuuauug

SEQ ID NO: 2003782 - RNA, 19 nt, Artificial Sequence
  Description of Artificial Sequence: Synthetic oligonucleotide
ucaagagaaccacucagac

SEQ ID NO: 2003783 - RNA, 19 nt, Artificial Sequence
  Description of Artificial Sequence: Synthetic oligonucleotide
aaaucaaucaagacagacu

SEQ ID NO: 2003784 - RNA, 19 nt, Artificial Sequence
  Description of Artificial Sequence: Synthetic oligonucleotide
cagguaagagauuggaggg

SEQ ID NO: 2003785 - RNA, 19 nt, Artificial Sequence
  Description of Artificial Sequence: Synthetic oligonucleotide
uuccauuuggaacuaggug

SEQ ID NO: 2003786 - RNA, 19 nt, Artificial Sequence
  Description of Artificial Sequence: Synthetic oligonucleotide
ucugcauucaguccccuca

SEQ ID NO: 2003787 - RNA, 19 nt, Artificial Sequence
  Description of Artificial Sequence: Synthetic oligonucleotide
agcauuacaaucuaacauu

SEQ ID NO: 2003788 - RNA, 19 nt, Artificial Sequence
  Description of Artificial Sequence: Synthetic oligonucleotide
auugacauuaauacaaacu

SEQ ID NO: 2003789 - RNA, 19 nt, Artificial Sequence
  Description of Artificial Sequence: Synthetic oligonucleotide
auagcauuacaaucuaaca

SEQ ID NO: 2003790 - RNA, 19 nt, Artificial Sequence
  Description of Artificial Sequence: Synthetic oligonucleotide
gguacaaauuucucuaggg

SEQ ID NO: 2003791 - RNA, 19 nt, Artificial Sequence
  Description of Artificial Sequence: Synthetic oligonucleotide
gccuuuugaaauuugagcc

SEQ ID NO: 2003792 - RNA, 19 nt, Artificial Sequence
  Description of Artificial Sequence: Synthetic oligonucleotide
uguugguuccauuuggaac

SEQ ID NO: 2003793 - RNA, 19 nt, Artificial Sequence
  Description of Artificial Sequence: Synthetic oligonucleotide
ugcccuaucaaacuuccca

SEQ ID NO: 2003794 - RNA, 19 nt, Artificial Sequence
  Description of Artificial Sequence: Synthetic oligonucleotide
guaagaagguuuuagagua

SEQ ID NO: 2003795 - RNA, 19 nt, Artificial Sequence
  Description of Artificial Sequence: Synthetic oligonucleotide
ugagccauaugcccuauca

SEQ ID NO: 2003796 - RNA, 19 nt, Artificial Sequence
  Description of Artificial Sequence: Synthetic oligonucleotide
agacauuauaggucacagc

SEQ ID NO: 2003797 - RNA, 19 nt, Artificial Sequence
  Description of Artificial Sequence: Synthetic oligonucleotide
aaaauaagccuugcaacca

SEQ ID NO: 2003798 - RNA, 19 nt, Artificial Sequence
  Description of Artificial Sequence: Synthetic oligonucleotide
acacagucaauacaguaug

SEQ ID NO: 2003799 - RNA, 19 nt, Artificial Sequence
  Description of Artificial Sequence: Synthetic oligonucleotide
guaugacaaggucugaugc

SEQ ID NO: 2003800 - RNA, 19 nt, Artificial Sequence
  Description of Artificial Sequence: Synthetic oligonucleotide
uguaauugggacucacucu

SEQ ID NO: 2003801 - RNA, 19 nt, Artificial Sequence
  Description of Artificial Sequence: Synthetic oligonucleotide
ucuagaaacaggucccucu

SEQ ID NO: 2003802 - RNA, 19 nt, Artificial Sequence
  Description of Artificial Sequence: Synthetic oligonucleotide
uaguauugacauuaauaca

SEQ ID NO: 2003803 - RNA, 19 nt, Artificial Sequence
  Description of Artificial Sequence: Synthetic oligonucleotide
caggcauacuccaaaacag

SEQ ID NO: 2003804 - RNA, 19 nt, Artificial Sequence
  Description of Artificial Sequence: Synthetic oligonucleotide
uaugcccuaucaaacuucc

SEQ ID NO: 2003805 - RNA, 19 nt, Artificial Sequence
  Description of Artificial Sequence: Synthetic oligonucleotide
aguaugacaaggucugaug

SEQ ID NO: 2003806 - RNA, 19 nt, Artificial Sequence
  Description of Artificial Sequence: Synthetic oligonucleotide
agaaagugacaccagcuca

SEQ ID NO: 2003807 - RNA, 19 nt, Artificial Sequence
  Description of Artificial Sequence: Synthetic oligonucleotide
auuaaaauauugccacacu

SEQ ID NO: 2003808 - RNA, 19 nt, Artificial Sequence
  Description of Artificial Sequence: Synthetic oligonucleotide
aguaguguugguucuuaag

SEQ ID NO: 2003809 - RNA, 19 nt, Artificial Sequence
  Description of Artificial Sequence: Synthetic oligonucleotide
ugguucuuaagaaaucuau

SEQ ID NO: 2003810 - RNA, 19 nt, Artificial Sequence
  Description of Artificial Sequence: Synthetic oligonucleotide
aggaauagcauuacaaucu

SEQ ID NO: 2003811 - RNA, 19 nt, Artificial Sequence
  Description of Artificial Sequence: Synthetic oligonucleotide
uucagaauccuguuacaca

SEQ ID NO: 2003812 - RNA, 19 nt, Artificial Sequence
  Description of Artificial Sequence: Synthetic oligonucleotide
ucaagacagacucucuaac

SEQ ID NO: 2003813 - RNA, 19 nt, Artificial Sequence
  Description of Artificial Sequence: Synthetic oligonucleotide
cacaucacaacaugaucgg

SEQ ID NO: 2003814 - RNA, 19 nt, Artificial Sequence
  Description of Artificial Sequence: Synthetic oligonucleotide
guaguguugguucuuaaga

SEQ ID NO: 2003815 - RNA, 19 nt, Artificial Sequence
  Description of Artificial Sequence: Synthetic oligonucleotide
aaucaagacagacucucua

SEQ ID NO: 2003816 - RNA, 19 nt, Artificial Sequence
  Description of Artificial Sequence: Synthetic oligonucleotide
caggaauagcauuacaauc

SEQ ID NO: 2003817 - RNA, 19 nt, Artificial Sequence
  Description of Artificial Sequence: Synthetic oligonucleotide
aauuugagccauaugcccu

SEQ ID NO: 2003818 - RNA, 19 nt, Artificial Sequence
  Description of Artificial Sequence: Synthetic oligonucleotide
cacucuagaaacagguccc

SEQ ID NO: 2003819 - RNA, 19 nt, Artificial Sequence
  Description of Artificial Sequence: Synthetic oligonucleotide
guugcauaggacuuuguga

SEQ ID NO: 2003820 - RNA, 19 nt, Artificial Sequence
  Description of Artificial Sequence: Synthetic oligonucleotide
auaaaagucaggggugagg

SEQ ID NO: 2003821 - RNA, 19 nt, Artificial Sequence
  Description of Artificial Sequence: Synthetic oligonucleotide
uccuuguugcaccuaagac

SEQ ID NO: 2003822 - RNA, 19 nt, Artificial Sequence
  Description of Artificial Sequence: Synthetic oligonucleotide
uaggguaagaagguuuuag

SEQ ID NO: 2003823 - RNA, 19 nt, Artificial Sequence
  Description of Artificial Sequence: Synthetic oligonucleotide
gauuggaggguucuagaac

SEQ ID NO: 2003824 - RNA, 19 nt, Artificial Sequence
  Description of Artificial Sequence: Synthetic oligonucleotide
aggugguaggguaagaagg

SEQ ID NO: 2003825 - RNA, 19 nt, Artificial Sequence
  Description of Artificial Sequence: Synthetic oligonucleotide
uaagaagguuuuagaguag

SEQ ID NO: 2003826 - RNA, 19 nt, Artificial Sequence
  Description of Artificial Sequence: Synthetic oligonucleotide
ugcucaaggugaaaggcac

SEQ ID NO: 2003827 - RNA, 19 nt, Artificial Sequence
  Description of Artificial Sequence: Synthetic oligonucleotide
gugguuguguccuugaguc

SEQ ID NO: 2003828 - RNA, 19 nt, Artificial Sequence
  Description of Artificial Sequence: Synthetic oligonucleotide
accuaagacauuauagguc

SEQ ID NO: 2003829 - RNA, 19 nt, Artificial Sequence
  Description of Artificial Sequence: Synthetic oligonucleotide
gucucaacacaaaacaccc

SEQ ID NO: 2003830 - RNA, 19 nt, Artificial Sequence
  Description of Artificial Sequence: Synthetic oligonucleotide
aauugggacucacucuaga

SEQ ID NO: 2003831 - RNA, 19 nt, Artificial Sequence
  Description of Artificial Sequence: Synthetic oligonucleotide
accacucagacuuauugga

SEQ ID NO: 2003832 - RNA, 19 nt, Artificial Sequence
  Description of Artificial Sequence: Synthetic oligonucleotide
gucucugaaaucaaucaag

SEQ ID NO: 2003833 - RNA, 19 nt, Artificial Sequence
  Description of Artificial Sequence: Synthetic oligonucleotide
uugaaauuugagccauaug

SEQ ID NO: 2003834 - RNA, 19 nt, Artificial Sequence
  Description of Artificial Sequence: Synthetic oligonucleotide
uaugacaaggucugaugcu

SEQ ID NO: 2003835 - RNA, 19 nt, Artificial Sequence
  Description of Artificial Sequence: Synthetic oligonucleotide
aauaaaagucaggggugag

SEQ ID NO: 2003836 - RNA, 19 nt, Artificial Sequence
  Description of Artificial Sequence: Synthetic oligonucleotide
agacagacucucuaaccuc

SEQ ID NO: 2003837 - RNA, 19 nt, Artificial Sequence
  Description of Artificial Sequence: Synthetic oligonucleotide
caaagugcugguaguauug

SEQ ID NO: 2003838 - RNA, 19 nt, Artificial Sequence
  Description of Artificial Sequence: Synthetic oligonucleotide
ucgacacaucacaacauga

SEQ ID NO: 2003839 - RNA, 19 nt, Artificial Sequence
  Description of Artificial Sequence: Synthetic oligonucleotide
auaggaaaguacaaaagaa

SEQ ID NO: 2003840 - RNA, 19 nt, Artificial Sequence
  Description of Artificial Sequence: Synthetic oligonucleotide
ucucuagggucucugaaau

SEQ ID NO: 2003841 - RNA, 19 nt, Artificial Sequence
  Description of Artificial Sequence: Synthetic oligonucleotide
ggguaagaagguuuuagag

SEQ ID NO: 2003842 - RNA, 19 nt, Artificial Sequence
  Description of Artificial Sequence: Synthetic oligonucleotide
aaggcacauacacagucaa

SEQ ID NO: 2003843 - RNA, 19 nt, Artificial Sequence
  Description of Artificial Sequence: Synthetic oligonucleotide
acuacaggagcuucuagaa

SEQ ID NO: 2003844 - RNA, 19 nt, Artificial Sequence
  Description of Artificial Sequence: Synthetic oligonucleotide
caucacaacaugaucgguc

SEQ ID NO: 2003845 - RNA, 19 nt, Artificial Sequence
  Description of Artificial Sequence: Synthetic oligonucleotide
agucugucgacacaucaca

SEQ ID NO: 2003846 - RNA, 19 nt, Artificial Sequence
  Description of Artificial Sequence: Synthetic oligonucleotide
cacacauacacaggcaugc

SEQ ID NO: 2003847 - RNA, 19 nt, Artificial Sequence
  Description of Artificial Sequence: Synthetic oligonucleotide
gacacaucacaacaugauc

SEQ ID NO: 2003848 - RNA, 19 nt, Artificial Sequence
  Description of Artificial Sequence: Synthetic oligonucleotide
ggucacagcaaguugauca

SEQ ID NO: 2003849 - RNA, 19 nt, Artificial Sequence
  Description of Artificial Sequence: Synthetic oligonucleotide
aaacugguacaaauuucuc

SEQ ID NO: 2003850 - RNA, 19 nt, Artificial Sequence
  Description of Artificial Sequence: Synthetic oligonucleotide
uucccuuguguauucaagu

SEQ ID NO: 2003851 - RNA, 19 nt, Artificial Sequence
  Description of Artificial Sequence: Synthetic oligonucleotide
cuaacauucagaauccugu

SEQ ID NO: 2003852 - RNA, 19 nt, Artificial Sequence
  Description of Artificial Sequence: Synthetic oligonucleotide
augcuacagaaucuauagg

SEQ ID NO: 2003853 - RNA, 19 nt, Artificial Sequence
  Description of Artificial Sequence: Synthetic oligonucleotide
ucaacacaaaacacccaac

SEQ ID NO: 2003854 - RNA, 19 nt, Artificial Sequence
  Description of Artificial Sequence: Synthetic oligonucleotide
gacauuaauacaaacuggu

SEQ ID NO: 2003855 - RNA, 19 nt, Artificial Sequence
  Description of Artificial Sequence: Synthetic oligonucleotide
agguuagaaagugacacca

SEQ ID NO: 2003856 - RNA, 19 nt, Artificial Sequence
  Description of Artificial Sequence: Synthetic oligonucleotide
agcaggcauacuccaaaac

SEQ ID NO: 2003857 - RNA, 19 nt, Artificial Sequence
  Description of Artificial Sequence: Synthetic oligonucleotide
auucaguccccucacacaa

SEQ ID NO: 2003858 - RNA, 19 nt, Artificial Sequence
  Description of Artificial Sequence: Synthetic oligonucleotide
uccugucuagguugcauag

SEQ ID NO: 2003859 - RNA, 19 nt, Artificial Sequence
  Description of Artificial Sequence: Synthetic oligonucleotide
uguugguucuuaagaaauc

SEQ ID NO: 2003860 - RNA, 19 nt, Artificial Sequence
  Description of Artificial Sequence: Synthetic oligonucleotide
aggguucuagaacuacagg

SEQ ID NO: 2003861 - RNA, 19 nt, Artificial Sequence
  Description of Artificial Sequence: Synthetic oligonucleotide
aacaggucccucugacauc

SEQ ID NO: 2003862 - RNA, 19 nt, Artificial Sequence
  Description of Artificial Sequence: Synthetic oligonucleotide
ggccuuuugaaauuugagc

SEQ ID NO: 2003863 - RNA, 19 nt, Artificial Sequence
  Description of Artificial Sequence: Synthetic oligonucleotide
cauagugcccugcuggggc

SEQ ID NO: 2003864 - RNA, 19 nt, Artificial Sequence
  Description of Artificial Sequence: Synthetic oligonucleotide
ugaugcuucaggaggcaga

SEQ ID NO: 2003865 - RNA, 19 nt, Artificial Sequence
  Description of Artificial Sequence: Synthetic oligonucleotide
ucugucgacacaucacaac

SEQ ID NO: 2003866 - RNA, 19 nt, Artificial Sequence
  Description of Artificial Sequence: Synthetic oligonucleotide
cugguaggguccuuguugc

SEQ ID NO: 2003867 - RNA, 19 nt, Artificial Sequence
  Description of Artificial Sequence: Synthetic oligonucleotide
acaacaugaucggucaaag

SEQ ID NO: 2003868 - RNA, 19 nt, Artificial Sequence
  Description of Artificial Sequence: Synthetic oligonucleotide
agaauccuguuacacacau

SEQ ID NO: 2003869 - RNA, 19 nt, Artificial Sequence
  Description of Artificial Sequence: Synthetic oligonucleotide
guaauugggacucacucua

SEQ ID NO: 2003870 - RNA, 19 nt, Artificial Sequence
  Description of Artificial Sequence: Synthetic oligonucleotide
agagauuggaggguucuag

SEQ ID NO: 2003871 - RNA, 19 nt, Artificial Sequence
  Description of Artificial Sequence: Synthetic oligonucleotide
uagaacuacaggagcuucu

SEQ ID NO: 2003872 - RNA, 19 nt, Artificial Sequence
  Description of Artificial Sequence: Synthetic oligonucleotide
uuauaggucacagcaaguu

SEQ ID NO: 2003873 - RNA, 19 nt, Artificial Sequence
  Description of Artificial Sequence: Synthetic oligonucleotide
aggguaagaagguuuuaga

SEQ ID NO: 2003874 - RNA, 19 nt, Artificial Sequence
  Description of Artificial Sequence: Synthetic oligonucleotide
uguugcaccuaagacauua

SEQ ID NO: 2003875 - RNA, 19 nt, Artificial Sequence
  Description of Artificial Sequence: Synthetic oligonucleotide
uaauugggacucacucuag

SEQ ID NO: 2003876 - RNA, 19 nt, Artificial Sequence
  Description of Artificial Sequence: Synthetic oligonucleotide
auacacagucaauacagua

SEQ ID NO: 2003877 - RNA, 19 nt, Artificial Sequence
  Description of Artificial Sequence: Synthetic oligonucleotide
gucacagcaaguugaucag

SEQ ID NO: 2003878 - RNA, 19 nt, Artificial Sequence
  Description of Artificial Sequence: Synthetic oligonucleotide
agccauaugcccuaucaaa

SEQ ID NO: 2003879 - RNA, 19 nt, Artificial Sequence
  Description of Artificial Sequence: Synthetic oligonucleotide
aaagcuggaaguugcccuu

SEQ ID NO: 2003880 - RNA, 19 nt, Artificial Sequence
  Description of Artificial Sequence: Synthetic oligonucleotide
ucccauacaggaauagcau

SEQ ID NO: 2003881 - RNA, 19 nt, Artificial Sequence
  Description of Artificial Sequence: Synthetic oligonucleotide
gguucuagaacuacaggag

SEQ ID NO: 2003882 - RNA, 19 nt, Artificial Sequence
  Description of Artificial Sequence: Synthetic oligonucleotide
uauucaaguucugugguuu

SEQ ID NO: 2003883 - RNA, 19 nt, Artificial Sequence
  Description of Artificial Sequence: Synthetic oligonucleotide
aauccugaagcaugcucaa

SEQ ID NO: 2003884 - RNA, 19 nt, Artificial Sequence
  Description of Artificial Sequence: Synthetic oligonucleotide
cacucaacuuguugguucc

SEQ ID NO: 2003885 - RNA, 19 nt, Artificial Sequence
  Description of Artificial Sequence: Synthetic oligonucleotide
aaagugacaccagcucaag

SEQ ID NO: 2003886 - RNA, 19 nt, Artificial Sequence
  Description of Artificial Sequence: Synthetic oligonucleotide
ugaaaucaaucaagacaga

SEQ ID NO: 2003887 - RNA, 19 nt, Artificial Sequence
  Description of Artificial Sequence: Synthetic oligonucleotide
guuugucugcauucagucc

SEQ ID NO: 2003888 - RNA, 19 nt, Artificial Sequence
  Description of Artificial Sequence: Synthetic oligonucleotide
acacaggcaugccacauga

SEQ ID NO: 2003889 - RNA, 19 nt, Artificial Sequence
  Description of Artificial Sequence: Synthetic oligonucleotide
ggguucuagaacuacagga

SEQ ID NO: 2003890 - RNA, 19 nt, Artificial Sequence
  Description of Artificial Sequence: Synthetic oligonucleotide
uuggaacuaggugguaggg

SEQ ID NO: 2003891 - RNA, 19 nt, Artificial Sequence
  Description of Artificial Sequence: Synthetic oligonucleotide
aaaggcacauacacaguca

SEQ ID NO: 2003892 - RNA, 19 nt, Artificial Sequence
  Description of Artificial Sequence: Synthetic oligonucleotide
gucgacacaucacaacaug

SEQ ID NO: 2003893 - RNA, 19 nt, Artificial Sequence
  Description of Artificial Sequence: Synthetic oligonucleotide
aggucugaugcuucaggag

SEQ ID NO: 2003894 - RNA, 19 nt, Artificial Sequence
  Description of Artificial Sequence: Synthetic oligonucleotide
cugguacaaauuucucuag

SEQ ID NO: 2003895 - RNA, 19 nt, Artificial Sequence
  Description of Artificial Sequence: Synthetic oligonucleotide
cucaacacaaaacacccaa

SEQ ID NO: 2003896 - RNA, 19 nt, Artificial Sequence
  Description of Artificial Sequence: Synthetic oligonucleotide
aacuaggugguaggguaag

SEQ ID NO: 2003897 - RNA, 19 nt, Artificial Sequence
  Description of Artificial Sequence: Synthetic oligonucleotide
aaacuucccacagcagcag

SEQ ID NO: 2003898 - RNA, 19 nt, Artificial Sequence
  Description of Artificial Sequence: Synthetic oligonucleotide
ugccacacucaaaugcuac

SEQ ID NO: 2003899 - RNA, 19 nt, Artificial Sequence
  Description of Artificial Sequence: Synthetic oligonucleotide
ccuaagacauuauagguca

SEQ ID NO: 2003900 - RNA, 19 nt, Artificial Sequence
  Description of Artificial Sequence: Synthetic oligonucleotide
cuuguugcaccuaagacau

SEQ ID NO: 2003901 - RNA, 19 nt, Artificial Sequence
  Description of Artificial Sequence: Synthetic oligonucleotide
ucuaaccuccuccugucua

SEQ ID NO: 2003902 - RNA, 19 nt, Artificial Sequence
  Description of Artificial Sequence: Synthetic oligonucleotide
acucagacuuauuggagaa

SEQ ID NO: 2003903 - RNA, 19 nt, Artificial Sequence
  Description of Artificial Sequence: Synthetic oligonucleotide
cacauagugcccugcuggg

SEQ ID NO: 2003904 - RNA, 19 nt, Artificial Sequence
  Description of Artificial Sequence: Synthetic oligonucleotide
aucugcacucaacuuguug

SEQ ID NO: 2003905 - RNA, 19 nt, Artificial Sequence
  Description of Artificial Sequence: Synthetic oligonucleotide
aggcagacuagcaggagac

SEQ ID NO: 2003906 - RNA, 19 nt, Artificial Sequence
  Description of Artificial Sequence: Synthetic oligonucleotide
cagucaauacaguaugaca

SEQ ID NO: 2003907 - RNA, 19 nt, Artificial Sequence
  Description of Artificial Sequence: Synthetic oligonucleotide
cauaggacuuugugaauuc

SEQ ID NO: 2003908 - RNA, 19 nt, Artificial Sequence
  Description of Artificial Sequence: Synthetic oligonucleotide
guaggcugugguuugucug

SEQ ID NO: 2003909 - RNA, 19 nt, Artificial Sequence
  Description of Artificial Sequence: Synthetic oligonucleotide
auaugcccuaucaaacuuc

SEQ ID NO: 2003910 - RNA, 19 nt, Artificial Sequence
  Description of Artificial Sequence: Synthetic oligonucleotide
cuagacuggcaaagguuag

SEQ ID NO: 2003911 - RNA, 19 nt, Artificial Sequence
  Description of Artificial Sequence: Synthetic oligonucleotide
auugggacucacucuagaa

SEQ ID NO: 2003912 - RNA, 19 nt, Artificial Sequence
  Description of Artificial Sequence: Synthetic oligonucleotide
acaaucuaacauucagaau

SEQ ID NO: 2003913 - RNA, 19 nt, Artificial Sequence
  Description of Artificial Sequence: Synthetic oligonucleotide
acccaacagaucugcacuc

SEQ ID NO: 2003914 - RNA, 19 nt, Artificial Sequence
  Description of Artificial Sequence: Synthetic oligonucleotide
aagugacaccagcucaaga

SEQ ID NO: 2003915 - RNA, 19 nt, Artificial Sequence
  Description of Artificial Sequence: Synthetic oligonucleotide
gaugcuucaggaggcagac

SEQ ID NO: 2003916 - RNA, 19 nt, Artificial Sequence
  Description of Artificial Sequence: Synthetic oligonucleotide
gguaguauugacauuaaua

SEQ ID NO: 2003917 - RNA, 19 nt, Artificial Sequence
  Description of Artificial Sequence: Synthetic oligonucleotide
ggaaguugcccuuugaugu

SEQ ID NO: 2003918 - RNA, 19 nt, Artificial Sequence
  Description of Artificial Sequence: Synthetic oligonucleotide
gguugcauaggacuuugug

SEQ ID NO: 2003919 - RNA, 19 nt, Artificial Sequence
  Description of Artificial Sequence: Synthetic oligonucleotide
cuacagaaucuauaggaaa

SEQ ID NO: 2003920 - RNA, 19 nt, Artificial Sequence
  Description of Artificial Sequence: Synthetic oligonucleotide
cugucgacacaucacaaca

SEQ ID NO: 2003921 - RNA, 19 nt, Artificial Sequence
  Description of Artificial Sequence: Synthetic oligonucleotide
ugucgacacaucacaacau

SEQ ID NO: 2003922 - RNA, 19 nt, Artificial Sequence
  Description of Artificial Sequence: Synthetic oligonucleotide
agucagguaagagauugga

SEQ ID NO: 2003923 - RNA, 19 nt, Artificial Sequence
  Description of Artificial Sequence: Synthetic oligonucleotide
aggucgaggugguuguguc

SEQ ID NO: 2003924 - RNA, 19 nt, Artificial Sequence
  Description of Artificial Sequence: Synthetic oligonucleotide
uaguuuuggcaaagugcug

SEQ ID NO: 2003925 - RNA, 19 nt, Artificial Sequence
  Description of Artificial Sequence: Synthetic oligonucleotide
ugucuagguugcauaggac

SEQ ID NO: 2003926 - RNA, 19 nt, Artificial Sequence
  Description of Artificial Sequence: Synthetic oligonucleotide
auaagccuugcaaccaguc

SEQ ID NO: 2003927 - RNA, 19 nt, Artificial Sequence
  Description of Artificial Sequence: Synthetic oligonucleotide
cauacaggaauagcauuac

SEQ ID NO: 2003928 - RNA, 19 nt, Artificial Sequence
  Description of Artificial Sequence: Synthetic oligonucleotide
uuugugaauucugguuccc

SEQ ID NO: 2003929 - RNA, 19 nt, Artificial Sequence
  Description of Artificial Sequence: Synthetic oligonucleotide
uugucugcauucagucccc

SEQ ID NO: 2003930 - RNA, 19 nt, Artificial Sequence
  Description of Artificial Sequence: Synthetic oligonucleotide
cucaagagaaccacucaga

SEQ ID NO: 2003931 - RNA, 19 nt, Artificial Sequence
  Description of Artificial Sequence: Synthetic oligonucleotide
caaagguuagaaagugaca

SEQ ID NO: 2003932 - RNA, 19 nt, Artificial Sequence
  Description of Artificial Sequence: Synthetic oligonucleotide
aauaagccuugcaaccagu

SEQ ID NO: 2003933 - RNA, 19 nt, Artificial Sequence
  Description of Artificial Sequence: Synthetic oligonucleotide
gguaagaagguuuuagagu

SEQ ID NO: 2003934 - RNA, 19 nt, Artificial Sequence
  Description of Artificial Sequence: Synthetic oligonucleotide
ucucuaaccuccuccuguc

SEQ ID NO: 2003935 - RNA, 19 nt, Artificial Sequence
  Description of Artificial Sequence: Synthetic oligonucleotide
ggagacugaguaguguugg

SEQ ID NO: 2003936 - RNA, 19 nt, Artificial Sequence
  Description of Artificial Sequence: Synthetic oligonucleotide
ggaucaugggcacuugccc

SEQ ID NO: 2003937 - RNA, 19 nt, Artificial Sequence
  Description of Artificial Sequence: Synthetic oligonucleotide
aguaggcugugguuugucu

SEQ ID NO: 2003938 - RNA, 19 nt, Artificial Sequence
  Description of Artificial Sequence: Synthetic oligonucleotide
agcucaagagaaccacuca

SEQ ID NO: 2003939 - RNA, 19 nt, Artificial Sequence
  Description of Artificial Sequence: Synthetic oligonucleotide
caggcaugccacaugacca

SEQ ID NO: 2003940 - RNA, 19 nt, Artificial Sequence
  Description of Artificial Sequence: Synthetic oligonucleotide
caacagaucugcacucaac

SEQ ID NO: 2003941 - RNA, 19 nt, Artificial Sequence
  Description of Artificial Sequence: Synthetic oligonucleotide
cagcucaagagaaccacuc

SEQ ID NO: 2003942 - RNA, 19 nt, Artificial Sequence
  Description of Artificial Sequence: Synthetic oligonucleotide
ugauguaauugggacucac

SEQ ID NO: 2003943 - RNA, 19 nt, Artificial Sequence
  Description of Artificial Sequence: Synthetic oligonucleotide
gucuagguugcauaggacu

SEQ ID NO: 2003944 - RNA, 19 nt, Artificial Sequence
  Description of Artificial Sequence: Synthetic oligonucleotide
uucucccauacaggaauag

SEQ ID NO: 2003945 - RNA, 19 nt, Artificial Sequence
  Description of Artificial Sequence: Synthetic oligonucleotide
agguuuuagaguaggcugu

SEQ ID NO: 2003946 - RNA, 19 nt, Artificial Sequence
  Description of Artificial Sequence: Synthetic oligonucleotide
gaaagugacaccagcucaa

SEQ ID NO: 2003947 - RNA, 19 nt, Artificial Sequence
  Description of Artificial Sequence: Synthetic oligonucleotide
cacucagacuuauuggaga

SEQ ID NO: 2003948 - RNA, 19 nt, Artificial Sequence
  Description of Artificial Sequence: Synthetic oligonucleotide
uugcaccuaagacauuaua

SEQ ID NO: 2003949 - RNA, 19 nt, Artificial Sequence
  Description of Artificial Sequence: Synthetic oligonucleotide
ugguaguauugacauuaau

SEQ ID NO: 2003950 - RNA, 19 nt, Artificial Sequence
  Description of Artificial Sequence: Synthetic oligonucleotide
gacaaggucugaugcuuca

SEQ ID NO: 2003951 - RNA, 19 nt, Artificial Sequence
  Description of Artificial Sequence: Synthetic oligonucleotide
ugacaaggucugaugcuuc

SEQ ID NO: 2003952 - RNA, 19 nt, Artificial Sequence
  Description of Artificial Sequence: Synthetic oligonucleotide
cagucagguaagagauugg

SEQ ID NO: 2003953 - RNA, 19 nt, Artificial Sequence
  Description of Artificial Sequence: Synthetic oligonucleotide
ucccuuguguauucaaguu

SEQ ID NO: 2003954 - RNA, 19 nt, Artificial Sequence
  Description of Artificial Sequence: Synthetic oligonucleotide
ccagucucaacacaaaaca

SEQ ID NO: 2003955 - RNA, 19 nt, Artificial Sequence
  Description of Artificial Sequence: Synthetic oligonucleotide
gguuguguccuugagucug

SEQ ID NO: 2003956 - RNA, 19 nt, Artificial Sequence
  Description of Artificial Sequence: Synthetic oligonucleotide
aggggugaggccuuuugaa

SEQ ID NO: 2003957 - RNA, 19 nt, Artificial Sequence
  Description of Artificial Sequence: Synthetic oligonucleotide
caaguugaucagaggguuc

SEQ ID NO: 2003958 - RNA, 19 nt, Artificial Sequence
  Description of Artificial Sequence: Synthetic oligonucleotide
auuauaggucacagcaagu

SEQ ID NO: 2003959 - RNA, 19 nt, Artificial Sequence
  Description of Artificial Sequence: Synthetic oligonucleotide
cuuugauguaauugggacu

SEQ ID NO: 2003960 - RNA, 19 nt, Artificial Sequence
  Description of Artificial Sequence: Synthetic oligonucleotide
gugguuugucugcauucag

SEQ ID NO: 2003961 - RNA, 19 nt, Artificial Sequence
  Description of Artificial Sequence: Synthetic oligonucleotide
ucugguucccuuguguauu

SEQ ID NO: 2003962 - RNA, 19 nt, Artificial Sequence
  Description of Artificial Sequence: Synthetic oligonucleotide
gggucucugaaaucaauca

SEQ ID NO: 2003963 - RNA, 19 nt, Artificial Sequence
  Description of Artificial Sequence: Synthetic oligonucleotide
uggaacuaggugguagggu

SEQ ID NO: 2003964 - RNA, 19 nt, Artificial Sequence
  Description of Artificial Sequence: Synthetic oligonucleotide
uaaccuccuccugucuagg

SEQ ID NO: 2003965 - RNA, 19 nt, Artificial Sequence
  Description of Artificial Sequence: Synthetic oligonucleotide
auacaaacugguacaaauu

SEQ ID NO: 2003966 - RNA, 19 nt, Artificial Sequence
  Description of Artificial Sequence: Synthetic oligonucleotide
agccagucucaacacaaaa

SEQ ID NO: 2003967 - RNA, 19 nt, Artificial Sequence
  Description of Artificial Sequence: Synthetic oligonucleotide
ggaacuaggugguagggua

SEQ ID NO: 2003968 - RNA, 19 nt, Artificial Sequence
  Description of Artificial Sequence: Synthetic oligonucleotide
uugcccaggacugagccua

SEQ ID NO: 2003969 - RNA, 19 nt, Artificial Sequence
  Description of Artificial Sequence: Synthetic oligonucleotide
caccuaagacauuauaggu

SEQ ID NO: 2003970 - RNA, 19 nt, Artificial Sequence
  Description of Artificial Sequence: Synthetic oligonucleotide
acaugaucggucaaagauu

SEQ ID NO: 2003971 - RNA, 19 nt, Artificial Sequence
  Description of Artificial Sequence: Synthetic oligonucleotide
augacaaggucugaugcuu

SEQ ID NO: 2003972 - RNA, 19 nt, Artificial Sequence
  Description of Artificial Sequence: Synthetic oligonucleotide
aggugguuguguccuugag

SEQ ID NO: 2003973 - RNA, 19 nt, Artificial Sequence
  Description of Artificial Sequence: Synthetic oligonucleotide
caggaucaugggcacuugc

SEQ ID NO: 2003974 - RNA, 19 nt, Artificial Sequence
  Description of Artificial Sequence: Synthetic oligonucleotide
ggacucacucuagaaacag

SEQ ID NO: 2003975 - RNA, 19 nt, Artificial Sequence
  Description of Artificial Sequence: Synthetic oligonucleotide
gcugguaguauugacauua

SEQ ID NO: 2003976 - RNA, 19 nt, Artificial Sequence
  Description of Artificial Sequence: Synthetic oligonucleotide
cagacuagcaggagacuga

SEQ ID NO: 2003977 - RNA, 19 nt, Artificial Sequence
  Description of Artificial Sequence: Synthetic oligonucleotide
ucacagcaaguugaucaga

SEQ ID NO: 2003978 - RNA, 19 nt, Artificial Sequence
  Description of Artificial Sequence: Synthetic oligonucleotide
caugaucggucaaagauuu

SEQ ID NO: 2003979 - RNA, 19 nt, Artificial Sequence
  Description of Artificial Sequence: Synthetic oligonucleotide
ugaguaguguugguucuua

SEQ ID NO: 2003980 - RNA, 19 nt, Artificial Sequence
  Description of Artificial Sequence: Synthetic oligonucleotide
gcauuacaaucuaacauuc

SEQ ID NO: 2003981 - RNA, 19 nt, Artificial Sequence
  Description of Artificial Sequence: Synthetic oligonucleotide
ucacaacaugaucggucaa

SEQ ID NO: 2003982 - RNA, 19 nt, Artificial Sequence
  Description of Artificial Sequence: Synthetic oligonucleotide
gaaguugcccuuugaugua

SEQ ID NO: 2003983 - RNA, 19 nt, Artificial Sequence
  Description of Artificial Sequence: Synthetic oligonucleotide
caugccacaugaccagguc

SEQ ID NO: 2003984 - RNA, 19 nt, Artificial Sequence
  Description of Artificial Sequence: Synthetic oligonucleotide
aaguugcccuuugauguaa

SEQ ID NO: 2003985 - RNA, 19 nt, Artificial Sequence
  Description of Artificial Sequence: Synthetic oligonucleotide
gacucucuaaccuccuccu

SEQ ID NO: 2003986 - RNA, 19 nt, Artificial Sequence
  Description of Artificial Sequence: Synthetic oligonucleotide
uugccacacucaaaugcua

SEQ ID NO: 2003987 - RNA, 19 nt, Artificial Sequence
  Description of Artificial Sequence: Synthetic oligonucleotide
acauuauaggucacagcaa

SEQ ID NO: 2003988 - RNA, 19 nt, Artificial Sequence
  Description of Artificial Sequence: Synthetic oligonucleotide
agguaagagauuggagggu

SEQ ID NO: 2003989 - RNA, 19 nt, Artificial Sequence
  Description of Artificial Sequence: Synthetic oligonucleotide
ugguuguguccuugagucu

SEQ ID NO: 2003990 - RNA, 19 nt, Artificial Sequence
  Description of Artificial Sequence: Synthetic oligonucleotide
cacagucaauacaguauga

SEQ ID NO: 2003991 - RNA, 19 nt, Artificial Sequence
  Description of Artificial Sequence: Synthetic oligonucleotide
agaacuacaggagcuucua

SEQ ID NO: 2003992 - RNA, 19 nt, Artificial Sequence
  Description of Artificial Sequence: Synthetic oligonucleotide
gcagacuagcaggagacug

SEQ ID NO: 2003993 - RNA, 19 nt, Artificial Sequence
  Description of Artificial Sequence: Synthetic oligonucleotide
gccauaugcccuaucaaac

SEQ ID NO: 2003994 - RNA, 19 nt, Artificial Sequence
  Description of Artificial Sequence: Synthetic oligonucleotide
gcacucaacuuguugguuc

SEQ ID NO: 2003995 - RNA, 19 nt, Artificial Sequence
  Description of Artificial Sequence: Synthetic oligonucleotide
gcccuaucaaacuucccac

SEQ ID NO: 2003996 - RNA, 19 nt, Artificial Sequence
  Description of Artificial Sequence: Synthetic oligonucleotide
uucaguccccucacacaaa

SEQ ID NO: 2003997 - RNA, 19 nt, Artificial Sequence
  Description of Artificial Sequence: Synthetic oligonucleotide
acaucacaacaugaucggu

SEQ ID NO: 2003998 - RNA, 19 nt, Artificial Sequence
  Description of Artificial Sequence: Synthetic oligonucleotide
agaggguuccaggcugggg

SEQ ID NO: 2003999 - RNA, 19 nt, Artificial Sequence
  Description of Artificial Sequence: Synthetic oligonucleotide
ccaggacugagccuaggcc

SEQ ID NO: 2004000 - RNA, 19 nt, Artificial Sequence
  Description of Artificial Sequence: Synthetic oligonucleotide
uugauguaauugggacuca

SEQ ID NO: 2004001 - RNA, 19 nt, Artificial Sequence
  Description of Artificial Sequence: Synthetic oligonucleotide
ggaauagcauuacaaucua

SEQ ID NO: 2004002 - RNA, 19 nt, Artificial Sequence
  Description of Artificial Sequence: Synthetic oligonucleotide
caacaugaucggucaaaga

SEQ ID NO: 2004003 - RNA, 19 nt, Artificial Sequence
  Description of Artificial Sequence: Synthetic oligonucleotide
ccacucagacuuauuggag

SEQ ID NO: 2004004 - RNA, 19 nt, Artificial Sequence
  Description of Artificial Sequence: Synthetic oligonucleotide
gaggugguuguguccuuga

SEQ ID NO: 2004005 - RNA, 19 nt, Artificial Sequence
  Description of Artificial Sequence: Synthetic oligonucleotide
agacugaguaguguugguu

SEQ ID NO: 2004006 - RNA, 19 nt, Artificial Sequence
  Description of Artificial Sequence: Synthetic oligonucleotide
gagcaggcauacuccaaaa

SEQ ID NO: 2004007 - RNA, 19 nt, Artificial Sequence
  Description of Artificial Sequence: Synthetic oligonucleotide
aagagauuggaggguucua

SEQ ID NO: 2004008 - RNA, 19 nt, Artificial Sequence
  Description of Artificial Sequence: Synthetic oligonucleotide
caagagaaccacucagacu

SEQ ID NO: 2004009 - RNA, 19 nt, Artificial Sequence
  Description of Artificial Sequence: Synthetic oligonucleotide
acuucccacagcagcagga

SEQ ID NO: 2004010 - RNA, 19 nt, Artificial Sequence
  Description of Artificial Sequence: Synthetic oligonucleotide
cacuugcccaggacugagc

SEQ ID NO: 2004011 - RNA, 19 nt, Artificial Sequence
  Description of Artificial Sequence: Synthetic oligonucleotide
gaguaguguugguucuuaa

SEQ ID NO: 2004012 - RNA, 19 nt, Artificial Sequence
  Description of Artificial Sequence: Synthetic oligonucleotide
agcucugguaggguccuug

SEQ ID NO: 2004013 - RNA, 19 nt, Artificial Sequence
  Description of Artificial Sequence: Synthetic oligonucleotide
cuaggugguaggguaagaa

SEQ ID NO: 2004014 - RNA, 19 nt, Artificial Sequence
  Description of Artificial Sequence: Synthetic oligonucleotide
guguugguucuuaagaaau

SEQ ID NO: 2004015 - RNA, 19 nt, Artificial Sequence
  Description of Artificial Sequence: Synthetic oligonucleotide
gcauacuccaaaacagcac

SEQ ID NO: 2004016 - RNA, 19 nt, Artificial Sequence
  Description of Artificial Sequence: Synthetic oligonucleotide
cccuuguguauucaaguuc

SEQ ID NO: 2004017 - RNA, 19 nt, Artificial Sequence
  Description of Artificial Sequence: Synthetic oligonucleotide
gguucuuaagaaaucuaua

SEQ ID NO: 2004018 - RNA, 19 nt, Artificial Sequence
  Description of Artificial Sequence: Synthetic oligonucleotide
ugcaaccagucagguaaga

SEQ ID NO: 2004019 - RNA, 19 nt, Artificial Sequence
  Description of Artificial Sequence: Synthetic oligonucleotide
guaagagauuggaggguuc

SEQ ID NO: 2004020 - RNA, 19 nt, Artificial Sequence
  Description of Artificial Sequence: Synthetic oligonucleotide
aggagcuucuagaaauaaa

SEQ ID NO: 2004021 - RNA, 19 nt, Artificial Sequence
  Description of Artificial Sequence: Synthetic oligonucleotide
ugguaggguccuuguugca

SEQ ID NO: 2004022 - RNA, 19 nt, Artificial Sequence
  Description of Artificial Sequence: Synthetic oligonucleotide
cacaacaugaucggucaaa

SEQ ID NO: 2004023 - RNA, 19 nt, Artificial Sequence
  Description of Artificial Sequence: Synthetic oligonucleotide
gaacuaggugguaggguaa

SEQ ID NO: 2004024 - RNA, 19 nt, Artificial Sequence
  Description of Artificial Sequence: Synthetic oligonucleotide
ucaaggugaaaggcacaua

SEQ ID NO: 2004025 - RNA, 19 nt, Artificial Sequence
  Description of Artificial Sequence: Synthetic oligonucleotide
ccauacaggaauagcauua

SEQ ID NO: 2004026 - RNA, 19 nt, Artificial Sequence
  Description of Artificial Sequence: Synthetic oligonucleotide
gguaggguccuuguugcac

SEQ ID NO: 2004027 - RNA, 19 nt, Artificial Sequence
  Description of Artificial Sequence: Synthetic oligonucleotide
uugagccauaugcccuauc

SEQ ID NO: 2004028 - RNA, 19 nt, Artificial Sequence
  Description of Artificial Sequence: Synthetic oligonucleotide
gcuagacuggcaaagguua

SEQ ID NO: 2004029 - RNA, 19 nt, Artificial Sequence
  Description of Artificial Sequence: Synthetic oligonucleotide
ugguuccauuuggaacuag

SEQ ID NO: 2004030 - RNA, 19 nt, Artificial Sequence
  Description of Artificial Sequence: Synthetic oligonucleotide
ugcacucaacuuguugguu

SEQ ID NO: 2004031 - RNA, 19 nt, Artificial Sequence
  Description of Artificial Sequence: Synthetic oligonucleotide
aguugaucagaggguucca

SEQ ID NO: 2004032 - RNA, 19 nt, Artificial Sequence
  Description of Artificial Sequence: Synthetic oligonucleotide
cagaaucuauaggaaagua

SEQ ID NO: 2004033 - RNA, 19 nt, Artificial Sequence
  Description of Artificial Sequence: Synthetic oligonucleotide
cuugagucugucgacacau

SEQ ID NO: 2004034 - RNA, 19 nt, Artificial Sequence
  Description of Artificial Sequence: Synthetic oligonucleotide
acaguaugacaaggucuga

SEQ ID NO: 2004035 - RNA, 19 nt, Artificial Sequence
  Description of Artificial Sequence: Synthetic oligonucleotide
acuaggugguaggguaaga

SEQ ID NO: 2004036 - RNA, 19 nt, Artificial Sequence
  Description of Artificial Sequence: Synthetic oligonucleotide
ggucgaggugguugugucc

SEQ ID NO: 2004037 - RNA, 19 nt, Artificial Sequence
  Description of Artificial Sequence: Synthetic oligonucleotide
cugguaguauugacauuaa

SEQ ID NO: 2004038 - RNA, 19 nt, Artificial Sequence
  Description of Artificial Sequence: Synthetic oligonucleotide
ugcugguaguauugacauu

SEQ ID NO: 2004039 - RNA, 19 nt, Artificial Sequence
  Description of Artificial Sequence: Synthetic oligonucleotide
agaguaggcugugguuugu

SEQ ID NO: 2004040 - RNA, 19 nt, Artificial Sequence
  Description of Artificial Sequence: Synthetic oligonucleotide
uugguuccauuuggaacua

SEQ ID NO: 2004041 - RNA, 19 nt, Artificial Sequence
  Description of Artificial Sequence: Synthetic oligonucleotide
cuccugucuagguugcaua

SEQ ID NO: 2004042 - RNA, 19 nt, Artificial Sequence
  Description of Artificial Sequence: Synthetic oligonucleotide
ggcaaagguuagaaaguga

SEQ ID NO: 2004043 - RNA, 19 nt, Artificial Sequence
  Description of Artificial Sequence: Synthetic oligonucleotide
gaguaggcugugguuuguc

SEQ ID NO: 2004044 - RNA, 19 nt, Artificial Sequence
  Description of Artificial Sequence: Synthetic oligonucleotide
gucgaggugguuguguccu

SEQ ID NO: 2004045 - RNA, 19 nt, Artificial Sequence
  Description of Artificial Sequence: Synthetic oligonucleotide
gucugcauucaguccccuc

SEQ ID NO: 2004046 - RNA, 19 nt, Artificial Sequence
  Description of Artificial Sequence: Synthetic oligonucleotide
acaggagcuucuagaaaua

SEQ ID NO: 2004047 - RNA, 19 nt, Artificial Sequence
  Description of Artificial Sequence: Synthetic oligonucleotide
ccugucuagguugcauagg

SEQ ID NO: 2004048 - RNA, 19 nt, Artificial Sequence
  Description of Artificial Sequence: Synthetic oligonucleotide
aagcaugcucaaggugaaa

SEQ ID NO: 2004049 - RNA, 19 nt, Artificial Sequence
  Description of Artificial Sequence: Synthetic oligonucleotide
acucaacuuguugguucca

SEQ ID NO: 2004050 - RNA, 19 nt, Artificial Sequence
  Description of Artificial Sequence: Synthetic oligonucleotide
caggagacugaguaguguu

SEQ ID NO: 2004051 - RNA, 19 nt, Artificial Sequence
  Description of Artificial Sequence: Synthetic oligonucleotide
cugcacucaacuuguuggu

SEQ ID NO: 2004052 - RNA, 19 nt, Artificial Sequence
  Description of Artificial Sequence: Synthetic oligonucleotide
cagaggguuccaggcuggg

SEQ ID NO: 2004053 - RNA, 19 nt, Artificial Sequence
  Description of Artificial Sequence: Synthetic oligonucleotide
gucugucgacacaucacaa

SEQ ID NO: 2004054 - RNA, 19 nt, Artificial Sequence
  Description of Artificial Sequence: Synthetic oligonucleotide
gggugaggccuuuugaaau

SEQ ID NO: 2004055 - RNA, 19 nt, Artificial Sequence
  Description of Artificial Sequence: Synthetic oligonucleotide
gaauccuguuacacacaua

SEQ ID NO: 2004056 - RNA, 19 nt, Artificial Sequence
  Description of Artificial Sequence: Synthetic oligonucleotide
uuguugcaccuaagacauu

SEQ ID NO: 2004057 - RNA, 19 nt, Artificial Sequence
  Description of Artificial Sequence: Synthetic oligonucleotide
gggacucacucuagaaaca

SEQ ID NO: 2004058 - RNA, 19 nt, Artificial Sequence
  Description of Artificial Sequence: Synthetic oligonucleotide
aggcugugguuugucugca

SEQ ID NO: 2004059 - RNA, 19 nt, Artificial Sequence
  Description of Artificial Sequence: Synthetic oligonucleotide
gguccuuguugcaccuaag

SEQ ID NO: 2004060 - RNA, 19 nt, Artificial Sequence
  Description of Artificial Sequence: Synthetic oligonucleotide
cccuaucaaacuucccaca

SEQ ID NO: 2004061 - RNA, 19 nt, Artificial Sequence
  Description of Artificial Sequence: Synthetic oligonucleotide
gagaaccacucagacuuau

SEQ ID NO: 2004062 - RNA, 19 nt, Artificial Sequence
  Description of Artificial Sequence: Synthetic oligonucleotide
cccucacacaaagccaccc

SEQ ID NO: 2004063 - RNA, 19 nt, Artificial Sequence
  Description of Artificial Sequence: Synthetic oligonucleotide
ccauaugcccuaucaaacu

SEQ ID NO: 2004064 - RNA, 19 nt, Artificial Sequence
  Description of Artificial Sequence: Synthetic oligonucleotide
guaggguaagaagguuuua

SEQ ID NO: 2004065 - RNA, 19 nt, Artificial Sequence
  Description of Artificial Sequence: Synthetic oligonucleotide
aggcacauacacagucaau

SEQ ID NO: 2004066 - RNA, 19 nt, Artificial Sequence
  Description of Artificial Sequence: Synthetic oligonucleotide
aguugcccuuugauguaau

SEQ ID NO: 2004067 - RNA, 19 nt, Artificial Sequence
  Description of Artificial Sequence: Synthetic oligonucleotide
caguaugacaaggucugau

SEQ ID NO: 2004068 - RNA, 19 nt, Artificial Sequence
  Description of Artificial Sequence: Synthetic oligonucleotide
ggugaggccuuuugaaauu

SEQ ID NO: 2004069 - RNA, 19 nt, Artificial Sequence
  Description of Artificial Sequence: Synthetic oligonucleotide
agagaaccacucagacuua

SEQ ID NO: 2004070 - RNA, 19 nt, Artificial Sequence
  Description of Artificial Sequence: Synthetic oligonucleotide
gcauaggacuuugugaauu

SEQ ID NO: 2004071 - RNA, 19 nt, Artificial Sequence
  Description of Artificial Sequence: Synthetic oligonucleotide
gggcuagacuggcaaaggu

SEQ ID NO: 2004072 - RNA, 19 nt, Artificial Sequence
  Description of Artificial Sequence: Synthetic oligonucleotide
cccucugacauccuuaguu

SEQ ID NO: 2004073 - RNA, 19 nt, Artificial Sequence
  Description of Artificial Sequence: Synthetic oligonucleotide
cuagguugcauaggacuuu

SEQ ID NO: 2004074 - RNA, 19 nt, Artificial Sequence
  Description of Artificial Sequence: Synthetic oligonucleotide
ggucccucugacauccuua

SEQ ID NO: 2004075 - RNA, 19 nt, Artificial Sequence
  Description of Artificial Sequence: Synthetic oligonucleotide
guugcaccuaagacauuau

SEQ ID NO: 2004076 - RNA, 19 nt, Artificial Sequence
  Description of Artificial Sequence: Synthetic oligonucleotide
augaucggucaaagauuuu

SEQ ID NO: 2004077 - RNA, 19 nt, Artificial Sequence
  Description of Artificial Sequence: Synthetic oligonucleotide
cucuaaccuccuccugucu

SEQ ID NO: 2004078 - RNA, 19 nt, Artificial Sequence
  Description of Artificial Sequence: Synthetic oligonucleotide
ccuugagucugucgacaca

SEQ ID NO: 2004079 - RNA, 19 nt, Artificial Sequence
  Description of Artificial Sequence: Synthetic oligonucleotide
cagcacucacacacacaua

SEQ ID NO: 2004080 - RNA, 19 nt, Artificial Sequence
  Description of Artificial Sequence: Synthetic oligonucleotide
gcugugguuugucugcauu

SEQ ID NO: 2004081 - RNA, 19 nt, Artificial Sequence
  Description of Artificial Sequence: Synthetic oligonucleotide
ggcuagacuggcaaagguu

SEQ ID NO: 2004082 - RNA, 19 nt, Artificial Sequence
  Description of Artificial Sequence: Synthetic oligonucleotide
ccucugacauccuuaguuu

SEQ ID NO: 2004083 - RNA, 19 nt, Artificial Sequence
  Description of Artificial Sequence: Synthetic oligonucleotide
gugguaggguaagaagguu

SEQ ID NO: 2004084 - RNA, 19 nt, Artificial Sequence
  Description of Artificial Sequence: Synthetic oligonucleotide
ccagcucaagagaaccacu

SEQ ID NO: 2004085 - RNA, 19 nt, Artificial Sequence
  Description of Artificial Sequence: Synthetic oligonucleotide
caggucgaggugguugugu

SEQ ID NO: 2004086 - RNA, 19 nt, Artificial Sequence
  Description of Artificial Sequence: Synthetic oligonucleotide
ccuugcaaccagucaggua

SEQ ID NO: 2004087 - RNA, 19 nt, Artificial Sequence
  Description of Artificial Sequence: Synthetic oligonucleotide
cgaggugguuguguccuug

SEQ ID NO: 2004088 - RNA, 19 nt, Artificial Sequence
  Description of Artificial Sequence: Synthetic oligonucleotide
cucugguaggguccuuguu

SEQ ID NO: 2004089 - RNA, 19 nt, Artificial Sequence
  Description of Artificial Sequence: Synthetic oligonucleotide
ggagcucugguaggguccu

SEQ ID NO: 2004090 - RNA, 19 nt, Artificial Sequence
  Description of Artificial Sequence: Synthetic oligonucleotide
gcaugccacaugaccaggu

SEQ ID NO: 2004091 - RNA, 19 nt, Artificial Sequence
  Description of Artificial Sequence: Synthetic oligonucleotide
ggacugagccuaggcccca

SEQ ID NO: 2004092 - RNA, 19 nt, Artificial Sequence
  Description of Artificial Sequence: Synthetic oligonucleotide
ggcagacuagcaggagacu

SEQ ID NO: 2004093 - RNA, 19 nt, Artificial Sequence
  Description of Artificial Sequence: Synthetic oligonucleotide
gccuugcaaccagucaggu

SEQ ID NO: 2004094 - RNA, 19 nt, Artificial Sequence
  Description of Artificial Sequence: Synthetic oligonucleotide
gcccugcuggggcuagacu

SEQ ID NO: 2004095 - RNA, 19 nt, Artificial Sequence
  Description of Artificial Sequence: Synthetic oligonucleotide
gugcccugcuggggcuaga

SEQ ID NO: 2004096 - RNA, 19 nt, Artificial Sequence
  Description of Artificial Sequence: Synthetic oligonucleotide
ccuccugucuagguugcau

SEQ ID NO: 2004097 - RNA, 19 nt, Artificial Sequence
  Description of Artificial Sequence: Synthetic oligonucleotide
gaaguaauugccuugaggg

SEQ ID NO: 2004098 - RNA, 19 nt, Artificial Sequence
  Description of Artificial Sequence: Synthetic oligonucleotide
aauuccuuaaaauccaggg

SEQ ID NO: 2004099 - RNA, 19 nt, Artificial Sequence
  Description of Artificial Sequence: Synthetic oligonucleotide
aaggaauggaccuuggugg

SEQ ID NO: 2004100 - RNA, 19 nt, Artificial Sequence
  Description of Artificial Sequence: Synthetic oligonucleotide
uagauuauauaucauaaug

SEQ ID NO: 2004101 - RNA, 19 nt, Artificial Sequence
  Description of Artificial Sequence: Synthetic oligonucleotide
aauaguuugagaugccuuc

SEQ ID NO: 2004102 - RNA, 19 nt, Artificial Sequence
  Description of Artificial Sequence: Synthetic oligonucleotide
uaaucagacauuucaaugg

SEQ ID NO: 2004103 - RNA, 19 nt, Artificial Sequence
  Description of Artificial Sequence: Synthetic oligonucleotide
aaucagacauuucaauggc

SEQ ID NO: 2004104 - RNA, 19 nt, Artificial Sequence
  Description of Artificial Sequence: Synthetic oligonucleotide
uguaauguauuccaucagg

SEQ ID NO: 2004105 - RNA, 19 nt, Artificial Sequence
  Description of Artificial Sequence: Synthetic oligonucleotide
aucauaaugauuuucagau

SEQ ID NO: 2004106 - RNA, 19 nt, Artificial Sequence
  Description of Artificial Sequence: Synthetic oligonucleotide
aagcauggaaucuggauac

SEQ ID NO: 2004107 - RNA, 19 nt, Artificial Sequence
  Description of Artificial Sequence: Synthetic oligonucleotide
aaguugucaaaacuguagg

SEQ ID NO: 2004108 - RNA, 19 nt, Artificial Sequence
  Description of Artificial Sequence: Synthetic oligonucleotide
uuuguaauguauuccauca

SEQ ID NO: 2004109 - RNA, 19 nt, Artificial Sequence
  Description of Artificial Sequence: Synthetic oligonucleotide
aauauuuagaaagcuuccg

SEQ ID NO: 2004110 - RNA, 19 nt, Artificial Sequence
  Description of Artificial Sequence: Synthetic oligonucleotide
  modified_base (9)..(9): a, c, u, g, unknown or other
aaucagcunuuuccgaagc

SEQ ID NO: 2004111 - RNA, 19 nt, Artificial Sequence
  Description of Artificial Sequence: Synthetic oligonucleotide
aacacuacuugccuacugg

SEQ ID NO: 2004112 - RNA, 19 nt, Artificial Sequence
  Description of Artificial Sequence: Synthetic oligonucleotide
ugaaguaauugccuugagg

SEQ ID NO: 2004113 - RNA, 19 nt, Artificial Sequence
  Description of Artificial Sequence: Synthetic oligonucleotide
ugcauagaaagaaacaagu

SEQ ID NO: 2004114 - RNA, 19 nt, Artificial Sequence
  Description of Artificial Sequence: Synthetic oligonucleotide
uauuccaucagguggaccc

SEQ ID NO: 2004115 - RNA, 19 nt, Artificial Sequence
  Description of Artificial Sequence: Synthetic oligonucleotide
  modified_base (10)..(10): a, c, u, g, unknown or other
aaaucagcunuuuccgaag

SEQ ID NO: 2004116 - RNA, 19 nt, Artificial Sequence
  Description of Artificial Sequence: Synthetic oligonucleotide
uauccauaggauacaaagg

SEQ ID NO: 2004117 - RNA, 19 nt, Artificial Sequence
  Description of Artificial Sequence: Synthetic oligonucleotide
uccuuuaaaacacuacuug

SEQ ID NO: 2004118 - RNA, 19 nt, Artificial Sequence
  Description of Artificial Sequence: Synthetic oligonucleotide
ucuggaaucgagcucaccc

SEQ ID NO: 2004119 - RNA, 19 nt, Artificial Sequence
  Description of Artificial Sequence: Synthetic oligonucleotide
uaaggaauggaccuuggug

SEQ ID NO: 2004120 - RNA, 19 nt, Artificial Sequence
  Description of Artificial Sequence: Synthetic oligonucleotide
aauuggguuaugaugacag

SEQ ID NO: 2004121 - RNA, 19 nt, Artificial Sequence
  Description of Artificial Sequence: Synthetic oligonucleotide
gucauugagacauugaauc

SEQ ID NO: 2004122 - RNA, 19 nt, Artificial Sequence
  Description of Artificial Sequence: Synthetic oligonucleotide
aaaacuguaggaagcaguc

SEQ ID NO: 2004123 - RNA, 19 nt, Artificial Sequence
  Description of Artificial Sequence: Synthetic oligonucleotide
acaggauuggaauauuuag

SEQ ID NO: 2004124 - RNA, 19 nt, Artificial Sequence
  Description of Artificial Sequence: Synthetic oligonucleotide
caaguguccaccuacauuc

SEQ ID NO: 2004125 - RNA, 19 nt, Artificial Sequence
  Description of Artificial Sequence: Synthetic oligonucleotide
ugaguuagggaccacauua

SEQ ID NO: 2004126 - RNA, 19 nt, Artificial Sequence
  Description of Artificial Sequence: Synthetic oligonucleotide
aaguugaggacauaucgga

SEQ ID NO: 2004127 - RNA, 19 nt, Artificial Sequence
  Description of Artificial Sequence: Synthetic oligonucleotide
ucuacagaaaguccaguug

SEQ ID NO: 2004128 - RNA, 19 nt, Artificial Sequence
  Description of Artificial Sequence: Synthetic oligonucleotide
ugauuuauaugcauagaaa

SEQ ID NO: 2004129 - RNA, 19 nt, Artificial Sequence
  Description of Artificial Sequence: Synthetic oligonucleotide
uucuaguaaggaauggacc

SEQ ID NO: 2004130 - RNA, 19 nt, Artificial Sequence
  Description of Artificial Sequence: Synthetic oligonucleotide
uguccaccuacauucaacg

SEQ ID NO: 2004131 - RNA, 19 nt, Artificial Sequence
  Description of Artificial Sequence: Synthetic oligonucleotide
uuccaguugaguuagggac

SEQ ID NO: 2004132 - RNA, 19 nt, Artificial Sequence
  Description of Artificial Sequence: Synthetic oligonucleotide
uuuagaaagcuuccgagua

SEQ ID NO: 2004133 - RNA, 19 nt, Artificial Sequence
  Description of Artificial Sequence: Synthetic oligonucleotide
caaguugucaaaacuguag

SEQ ID NO: 2004134 - RNA, 19 nt, Artificial Sequence
  Description of Artificial Sequence: Synthetic oligonucleotide
guucguaagaaguugagga

SEQ ID NO: 2004135 - RNA, 19 nt, Artificial Sequence
  Description of Artificial Sequence: Synthetic oligonucleotide
uaaaacacuacuugccuac

SEQ ID NO: 2004136 - RNA, 19 nt, Artificial Sequence
  Description of Artificial Sequence: Synthetic oligonucleotide
aaucaagggguucaaucug

SEQ ID NO: 2004137 - RNA, 19 nt, Artificial Sequence
  Description of Artificial Sequence: Synthetic oligonucleotide
aguaauugccuugaggguc

SEQ ID NO: 2004138 - RNA, 19 nt, Artificial Sequence
  Description of Artificial Sequence: Synthetic oligonucleotide
gaucaaugaaguaauugcc

SEQ ID NO: 2004139 - RNA, 19 nt, Artificial Sequence
  Description of Artificial Sequence: Synthetic oligonucleotide
cauaucggaaaagaggucc

SEQ ID NO: 2004140 - RNA, 19 nt, Artificial Sequence
  Description of Artificial Sequence: Synthetic oligonucleotide
ugcuuauuccacuugguga

SEQ ID NO: 2004141 - RNA, 19 nt, Artificial Sequence
  Description of Artificial Sequence: Synthetic oligonucleotide
acgaauagucugcuuaaac

SEQ ID NO: 2004142 - RNA, 19 nt, Artificial Sequence
  Description of Artificial Sequence: Synthetic oligonucleotide
agauuauauaucauaauga

SEQ ID NO: 2004143 - RNA, 19 nt, Artificial Sequence
  Description of Artificial Sequence: Synthetic oligonucleotide
aguacuggcagaugacugg

SEQ ID NO: 2004144 - RNA, 19 nt, Artificial Sequence
  Description of Artificial Sequence: Synthetic oligonucleotide
cacuuggugaaauaguuug

SEQ ID NO: 2004145 - RNA, 19 nt, Artificial Sequence
  Description of Artificial Sequence: Synthetic oligonucleotide
uccgaagcagaucaaauuc

SEQ ID NO: 2004146 - RNA, 19 nt, Artificial Sequence
  Description of Artificial Sequence: Synthetic oligonucleotide
gagucaauucugaaguucg

SEQ ID NO: 2004147 - RNA, 19 nt, Artificial Sequence
  Description of Artificial Sequence: Synthetic oligonucleotide
  modified_base (7)..(7): a, c, u, g, unknown or other
ucagcunuuuccgaagcag

SEQ ID NO: 2004148 - RNA, 19 nt, Artificial Sequence
  Description of Artificial Sequence: Synthetic oligonucleotide
aaugaaguaauugccuuga

SEQ ID NO: 2004149 - RNA, 19 nt, Artificial Sequence
  Description of Artificial Sequence: Synthetic oligonucleotide
acagggaucagucaucugu

SEQ ID NO: 2004150 - RNA, 19 nt, Artificial Sequence
  Description of Artificial Sequence: Synthetic oligonucleotide
gaaguugaggacauaucgg

SEQ ID NO: 2004151 - RNA, 19 nt, Artificial Sequence
  Description of Artificial Sequence: Synthetic oligonucleotide
auggaaucuggauaccgcg

SEQ ID NO: 2004152 - RNA, 19 nt, Artificial Sequence
  Description of Artificial Sequence: Synthetic oligonucleotide
gaauauuuagaaagcuucc

SEQ ID NO: 2004153 - RNA, 19 nt, Artificial Sequence
  Description of Artificial Sequence: Synthetic oligonucleotide
ucaauucugaaguucguaa

SEQ ID NO: 2004154 - RNA, 19 nt, Artificial Sequence
  Description of Artificial Sequence: Synthetic oligonucleotide
aggauuggaauauuuagaa

SEQ ID NO: 2004155 - RNA, 19 nt, Artificial Sequence
  Description of Artificial Sequence: Synthetic oligonucleotide
gguuaauuggguuaugaug

SEQ ID NO: 2004156 - RNA, 19 nt, Artificial Sequence
  Description of Artificial Sequence: Synthetic oligonucleotide
caugugaugcacucgagug

SEQ ID NO: 2004157 - RNA, 19 nt, Artificial Sequence
  Description of Artificial Sequence: Synthetic oligonucleotide
cuucuaguaaggaauggac

SEQ ID NO: 2004158 - RNA, 19 nt, Artificial Sequence
  Description of Artificial Sequence: Synthetic oligonucleotide
ugcuuaaacuuucauuacu

SEQ ID NO: 2004159 - RNA, 19 nt, Artificial Sequence
  Description of Artificial Sequence: Synthetic oligonucleotide
aaacuguaggaagcagucc

SEQ ID NO: 2004160 - RNA, 19 nt, Artificial Sequence
  Description of Artificial Sequence: Synthetic oligonucleotide
gauuauauaucauaaugau

SEQ ID NO: 2004161 - RNA, 19 nt, Artificial Sequence
  Description of Artificial Sequence: Synthetic oligonucleotide
acuacuugccuacuggucu

SEQ ID NO: 2004162 - RNA, 19 nt, Artificial Sequence
  Description of Artificial Sequence: Synthetic oligonucleotide
ucuaaucagacauuucaau

SEQ ID NO: 2004163 - RNA, 19 nt, Artificial Sequence
  Description of Artificial Sequence: Synthetic oligonucleotide
uuggguuaugaugacagcc

SEQ ID NO: 2004164 - RNA, 19 nt, Artificial Sequence
  Description of Artificial Sequence: Synthetic oligonucleotide
ucggaaaagagguccaucu

SEQ ID NO: 2004165 - RNA, 19 nt, Artificial Sequence
  Description of Artificial Sequence: Synthetic oligonucleotide
uuuucauuggcccgcucgc

SEQ ID NO: 2004166 - RNA, 19 nt, Artificial Sequence
  Description of Artificial Sequence: Synthetic oligonucleotide
  modified_base (3)..(3): a, c, u, g, unknown or other
cunuuuccgaagcagauca

SEQ ID NO: 2004167 - RNA, 19 nt, Artificial Sequence
  Description of Artificial Sequence: Synthetic oligonucleotide
guccuuaacaaguacuggc

SEQ ID NO: 2004168 - RNA, 19 nt, Artificial Sequence
  Description of Artificial Sequence: Synthetic oligonucleotide
ucagacauuucaauggcua

SEQ ID NO: 2004169 - RNA, 19 nt, Artificial Sequence
  Description of Artificial Sequence: Synthetic oligonucleotide
ugaaguucguaagaaguug

SEQ ID NO: 2004170 - RNA, 19 nt, Artificial Sequence
  Description of Artificial Sequence: Synthetic oligonucleotide
uuguaauguauuccaucag

SEQ ID NO: 2004171 - RNA, 19 nt, Artificial Sequence
  Description of Artificial Sequence: Synthetic oligonucleotide
ucgagcucacccuacauga

SEQ ID NO: 2004172 - RNA, 19 nt, Artificial Sequence
  Description of Artificial Sequence: Synthetic oligonucleotide
uggguuaugaugacagcca

SEQ ID NO: 2004173 - RNA, 19 nt, Artificial Sequence
  Description of Artificial Sequence: Synthetic oligonucleotide
ucgaucaaugaaguaauug

SEQ ID NO: 2004174 - RNA, 19 nt, Artificial Sequence
  Description of Artificial Sequence: Synthetic oligonucleotide
gauguuguguacaaguguc

SEQ ID NO: 2004175 - RNA, 19 nt, Artificial Sequence
  Description of Artificial Sequence: Synthetic oligonucleotide
acagcacaugcauacuugg

SEQ ID NO: 2004176 - RNA, 19 nt, Artificial Sequence
  Description of Artificial Sequence: Synthetic oligonucleotide
gaaacaaguugucaaaacu

SEQ ID NO: 2004177 - RNA, 19 nt, Artificial Sequence
  Description of Artificial Sequence: Synthetic oligonucleotide
caauucugaaguucguaag

SEQ ID NO: 2004178 - RNA, 19 nt, Artificial Sequence
  Description of Artificial Sequence: Synthetic oligonucleotide
ugauaaucacacugguccc

SEQ ID NO: 2004179 - RNA, 19 nt, Artificial Sequence
  Description of Artificial Sequence: Synthetic oligonucleotide
aucagguggacccggagag

SEQ ID NO: 2004180 - RNA, 19 nt, Artificial Sequence
  Description of Artificial Sequence: Synthetic oligonucleotide
cauaaugauuuucagaucu

SEQ ID NO: 2004181 - RNA, 19 nt, Artificial Sequence
  Description of Artificial Sequence: Synthetic oligonucleotide
auauuugguugcuugauuu

SEQ ID NO: 2004182 - RNA, 19 nt, Artificial Sequence
  Description of Artificial Sequence: Synthetic oligonucleotide
agggauguuguguacaagu

SEQ ID NO: 2004183 - RNA, 19 nt, Artificial Sequence
  Description of Artificial Sequence: Synthetic oligonucleotide
uguuaaggguagauuauau

SEQ ID NO: 2004184 - RNA, 19 nt, Artificial Sequence
  Description of Artificial Sequence: Synthetic oligonucleotide
guggugaugguuaauuggg

SEQ ID NO: 2004185 - RNA, 19 nt, Artificial Sequence
  Description of Artificial Sequence: Synthetic oligonucleotide
uuagaaagcuuccgaguac

SEQ ID NO: 2004186 - RNA, 19 nt, Artificial Sequence
  Description of Artificial Sequence: Synthetic oligonucleotide
agucaucugucuuccgggc

SEQ ID NO: 2004187 - RNA, 19 nt, Artificial Sequence
  Description of Artificial Sequence: Synthetic oligonucleotide
aaaucauuuuagcacuguu

SEQ ID NO: 2004188 - RNA, 19 nt, Artificial Sequence
  Description of Artificial Sequence: Synthetic oligonucleotide
agagucaauucugaaguuc

SEQ ID NO: 2004189 - RNA, 19 nt, Artificial Sequence
  Description of Artificial Sequence: Synthetic oligonucleotide
agacauugaaucaaggggu

SEQ ID NO: 2004190 - RNA, 19 nt, Artificial Sequence
  Description of Artificial Sequence: Synthetic oligonucleotide
uuaacaaguacuggcagau

SEQ ID NO: 2004191 - RNA, 19 nt, Artificial Sequence
  Description of Artificial Sequence: Synthetic oligonucleotide
aagaaguugaggacauauc

SEQ ID NO: 2004192 - RNA, 19 nt, Artificial Sequence
  Description of Artificial Sequence: Synthetic oligonucleotide
uaagaaguugaggacauau

SEQ ID NO: 2004193 - RNA, 19 nt, Artificial Sequence
  Description of Artificial Sequence: Synthetic oligonucleotide
gcuugauuuauaugcauag

SEQ ID NO: 2004194 - RNA, 19 nt, Artificial Sequence
  Description of Artificial Sequence: Synthetic oligonucleotide
gguggugaugguuaauugg

SEQ ID NO: 2004195 - RNA, 19 nt, Artificial Sequence
  Description of Artificial Sequence: Synthetic oligonucleotide
aaacacuacuugccuacug

SEQ ID NO: 2004196 - RNA, 19 nt, Artificial Sequence
  Description of Artificial Sequence: Synthetic oligonucleotide
ugcggauugugaaaccuug

SEQ ID NO: 2004197 - RNA, 19 nt, Artificial Sequence
  Description of Artificial Sequence: Synthetic oligonucleotide
agcacaugcauacuuggga

SEQ ID NO: 2004198 - RNA, 19 nt, Artificial Sequence
  Description of Artificial Sequence: Synthetic oligonucleotide
aucacgaauagucugcuua

SEQ ID NO: 2004199 - RNA, 19 nt, Artificial Sequence
  Description of Artificial Sequence: Synthetic oligonucleotide
uacuagacagcucuacaaa

SEQ ID NO: 2004200 - RNA, 19 nt, Artificial Sequence
  Description of Artificial Sequence: Synthetic oligonucleotide
uaggauacaaaggcuuagg

SEQ ID NO: 2004201 - RNA, 19 nt, Artificial Sequence
  Description of Artificial Sequence: Synthetic oligonucleotide
uuccuuuaaaacacuacuu

SEQ ID NO: 2004202 - RNA, 19 nt, Artificial Sequence
  Description of Artificial Sequence: Synthetic oligonucleotide
aguuagggaccacauuauc

SEQ ID NO: 2004203 - RNA, 19 nt, Artificial Sequence
  Description of Artificial Sequence: Synthetic oligonucleotide
aaaggcuuagggucauuga

SEQ ID NO: 2004204 - RNA, 19 nt, Artificial Sequence
  Description of Artificial Sequence: Synthetic oligonucleotide
uuaaaacacuacuugccua

SEQ ID NO: 2004205 - RNA, 19 nt, Artificial Sequence
  Description of Artificial Sequence: Synthetic oligonucleotide
ucguaagaaguugaggaca

SEQ ID NO: 2004206 - RNA, 19 nt, Artificial Sequence
  Description of Artificial Sequence: Synthetic oligonucleotide
ucacccuacaugauauucu

SEQ ID NO: 2004207 - RNA, 19 nt, Artificial Sequence
  Description of Artificial Sequence: Synthetic oligonucleotide
aguucguaagaaguugagg

SEQ ID NO: 2004208 - RNA, 19 nt, Artificial Sequence
  Description of Artificial Sequence: Synthetic oligonucleotide
uuuuagcacuguuaagggu

SEQ ID NO: 2004209 - RNA, 19 nt, Artificial Sequence
  Description of Artificial Sequence: Synthetic oligonucleotide
gacauaucggaaaagaggu

SEQ ID NO: 2004210 - RNA, 19 nt, Artificial Sequence
  Description of Artificial Sequence: Synthetic oligonucleotide
ucaugugaugcacucgagu

SEQ ID NO: 2004211 - RNA, 19 nt, Artificial Sequence
  Description of Artificial Sequence: Synthetic oligonucleotide
ggugaaauaguuugagaug

SEQ ID NO: 2004212 - RNA, 19 nt, Artificial Sequence
  Description of Artificial Sequence: Synthetic oligonucleotide
gacaucacgaauagucugc

SEQ ID NO: 2004213 - RNA, 19 nt, Artificial Sequence
  Description of Artificial Sequence: Synthetic oligonucleotide
ccuacauucaacgugacug

SEQ ID NO: 2004214 - RNA, 19 nt, Artificial Sequence
  Description of Artificial Sequence: Synthetic oligonucleotide
aucucgaucaaugaaguaa

SEQ ID NO: 2004215 - RNA, 19 nt, Artificial Sequence
  Description of Artificial Sequence: Synthetic oligonucleotide
aguacuagacagcucuaca

SEQ ID NO: 2004216 - RNA, 19 nt, Artificial Sequence
  Description of Artificial Sequence: Synthetic oligonucleotide
gauugugaaaccuugcuuu

SEQ ID NO: 2004217 - RNA, 19 nt, Artificial Sequence
  Description of Artificial Sequence: Synthetic oligonucleotide
gaaucaagggguucaaucu

SEQ ID NO: 2004218 - RNA, 19 nt, Artificial Sequence
  Description of Artificial Sequence: Synthetic oligonucleotide
aagacaucacgaauagucu

SEQ ID NO: 2004219 - RNA, 19 nt, Artificial Sequence
  Description of Artificial Sequence: Synthetic oligonucleotide
aagcuuccgaguacuagac

SEQ ID NO: 2004220 - RNA, 19 nt, Artificial Sequence
  Description of Artificial Sequence: Synthetic oligonucleotide
uccaguuguguucuacugu

SEQ ID NO: 2004221 - RNA, 19 nt, Artificial Sequence
  Description of Artificial Sequence: Synthetic oligonucleotide
uuuccgaagcagaucaaau

SEQ ID NO: 2004222 - RNA, 19 nt, Artificial Sequence
  Description of Artificial Sequence: Synthetic oligonucleotide
uugagaugccuucuaguaa

SEQ ID NO: 2004223 - RNA, 19 nt, Artificial Sequence
  Description of Artificial Sequence: Synthetic oligonucleotide
gaaagcuuccgaguacuag

SEQ ID NO: 2004224 - RNA, 19 nt, Artificial Sequence
  Description of Artificial Sequence: Synthetic oligonucleotide
cgaucaaugaaguaauugc

SEQ ID NO: 2004225 - RNA, 19 nt, Artificial Sequence
  Description of Artificial Sequence: Synthetic oligonucleotide
ugcuugauuuauaugcaua

SEQ ID NO: 2004226 - RNA, 19 nt, Artificial Sequence
  Description of Artificial Sequence: Synthetic oligonucleotide
uguuguguacaagugucca

SEQ ID NO: 2004227 - RNA, 19 nt, Artificial Sequence
  Description of Artificial Sequence: Synthetic oligonucleotide
ucaaaacuguaggaagcag

SEQ ID NO: 2004228 - RNA, 19 nt, Artificial Sequence
  Description of Artificial Sequence: Synthetic oligonucleotide
gaugcacucgaguguugcg

SEQ ID NO: 2004229 - RNA, 19 nt, Artificial Sequence
  Description of Artificial Sequence: Synthetic oligonucleotide
aaacagggaucagucaucu

SEQ ID NO: 2004230 - RNA, 19 nt, Artificial Sequence
  Description of Artificial Sequence: Synthetic oligonucleotide
ucuggauaccgcgucaaug

SEQ ID NO: 2004231 - RNA, 19 nt, Artificial Sequence
  Description of Artificial Sequence: Synthetic oligonucleotide
ugugaaaccuugcuuugua

SEQ ID NO: 2004232 - RNA, 19 nt, Artificial Sequence
  Description of Artificial Sequence: Synthetic oligonucleotide
uuaauuggguuaugaugac

SEQ ID NO: 2004233 - RNA, 19 nt, Artificial Sequence
  Description of Artificial Sequence: Synthetic oligonucleotide
ugccuucuaguaaggaaug

SEQ ID NO: 2004234 - RNA, 19 nt, Artificial Sequence
  Description of Artificial Sequence: Synthetic oligonucleotide
uugccuacuggucuggaau

SEQ ID NO: 2004235 - RNA, 19 nt, Artificial Sequence
  Description of Artificial Sequence: Synthetic oligonucleotide
uacauucaacgugacuggg

SEQ ID NO: 2004236 - RNA, 19 nt, Artificial Sequence
  Description of Artificial Sequence: Synthetic oligonucleotide
agcagaucaaauuccuuaa

SEQ ID NO: 2004237 - RNA, 19 nt, Artificial Sequence
  Description of Artificial Sequence: Synthetic oligonucleotide
gaauagucugcuuaaacuu

SEQ ID NO: 2004238 - RNA, 19 nt, Artificial Sequence
  Description of Artificial Sequence: Synthetic oligonucleotide
gcuacagauauuugguugc

SEQ ID NO: 2004239 - RNA, 19 nt, Artificial Sequence
  Description of Artificial Sequence: Synthetic oligonucleotide
aauagucugcuuaaacuuu

SEQ ID NO: 2004240 - RNA, 19 nt, Artificial Sequence
  Description of Artificial Sequence: Synthetic oligonucleotide
aguccuuaacaaguacugg

SEQ ID NO: 2004241 - RNA, 19 nt, Artificial Sequence
  Description of Artificial Sequence: Synthetic oligonucleotide
ugugcuuauuccacuuggu

SEQ ID NO: 2004242 - RNA, 19 nt, Artificial Sequence
  Description of Artificial Sequence: Synthetic oligonucleotide
uagacagcucuacaaacuu

SEQ ID NO: 2004243 - RNA, 19 nt, Artificial Sequence
  Description of Artificial Sequence: Synthetic oligonucleotide
auaggauacaaaggcuuag

SEQ ID NO: 2004244 - RNA, 19 nt, Artificial Sequence
  Description of Artificial Sequence: Synthetic oligonucleotide
uacuggucuggaaucgagc

SEQ ID NO: 2004245 - RNA, 19 nt, Artificial Sequence
  Description of Artificial Sequence: Synthetic oligonucleotide
gggagagucaauucugaag

SEQ ID NO: 2004246 - RNA, 19 nt, Artificial Sequence
  Description of Artificial Sequence: Synthetic oligonucleotide
ucacgaauagucugcuuaa

SEQ ID NO: 2004247 - RNA, 19 nt, Artificial Sequence
  Description of Artificial Sequence: Synthetic oligonucleotide
aucgagcucacccuacaug

SEQ ID NO: 2004248 - RNA, 19 nt, Artificial Sequence
  Description of Artificial Sequence: Synthetic oligonucleotide
caggauuggaauauuuaga

SEQ ID NO: 2004249 - RNA, 19 nt, Artificial Sequence
  Description of Artificial Sequence: Synthetic oligonucleotide
guugucaaaacuguaggaa

SEQ ID NO: 2004250 - RNA, 19 nt, Artificial Sequence
  Description of Artificial Sequence: Synthetic oligonucleotide
guuagggaccacauuauca

SEQ ID NO: 2004251 - RNA, 19 nt, Artificial Sequence
  Description of Artificial Sequence: Synthetic oligonucleotide
ugguuaauuggguuaugau

SEQ ID NO: 2004252 - RNA, 19 nt, Artificial Sequence
  Description of Artificial Sequence: Synthetic oligonucleotide
gaaaagagguccaucucga

SEQ ID NO: 2004253 - RNA, 19 nt, Artificial Sequence
  Description of Artificial Sequence: Synthetic oligonucleotide
cuuccgaguacuagacagc

SEQ ID NO: 2004254 - RNA, 19 nt, Artificial Sequence
  Description of Artificial Sequence: Synthetic oligonucleotide
uggaaucuggauaccgcgu

SEQ ID NO: 2004255 - RNA, 19 nt, Artificial Sequence
  Description of Artificial Sequence: Synthetic oligonucleotide
gguagauuauauaucauaa

SEQ ID NO: 2004256 - RNA, 19 nt, Artificial Sequence
  Description of Artificial Sequence: Synthetic oligonucleotide
gaaguucguaagaaguuga

SEQ ID NO: 2004257 - RNA, 19 nt, Artificial Sequence
  Description of Artificial Sequence: Synthetic oligonucleotide
aggacauaucggaaaagag

SEQ ID NO: 2004258 - RNA, 19 nt, Artificial Sequence
  Description of Artificial Sequence: Synthetic oligonucleotide
aucaugugcuuauuccacu

SEQ ID NO: 2004259 - RNA, 19 nt, Artificial Sequence
  Description of Artificial Sequence: Synthetic oligonucleotide
ugguggugaugguuaauug

SEQ ID NO: 2004260 - RNA, 19 nt, Artificial Sequence
  Description of Artificial Sequence: Synthetic oligonucleotide
uguguacaaguguccaccu

SEQ ID NO: 2004261 - RNA, 19 nt, Artificial Sequence
  Description of Artificial Sequence: Synthetic oligonucleotide
uuugguugcuugauuuaua

SEQ ID NO: 2004262 - RNA, 19 nt, Artificial Sequence
  Description of Artificial Sequence: Synthetic oligonucleotide
cuccaagcauggaaucugg

SEQ ID NO: 2004263 - RNA, 19 nt, Artificial Sequence
  Description of Artificial Sequence: Synthetic oligonucleotide
ucaaugugguaagggaugu

SEQ ID NO: 2004264 - RNA, 19 nt, Artificial Sequence
  Description of Artificial Sequence: Synthetic oligonucleotide
uuucuggacucugaacagc

SEQ ID NO: 2004265 - RNA, 19 nt, Artificial Sequence
  Description of Artificial Sequence: Synthetic oligonucleotide
ggagagucaauucugaagu

SEQ ID NO: 2004266 - RNA, 19 nt, Artificial Sequence
  Description of Artificial Sequence: Synthetic oligonucleotide
cacccuacaugauauucug

SEQ ID NO: 2004267 - RNA, 19 nt, Artificial Sequence
  Description of Artificial Sequence: Synthetic oligonucleotide
agagacuuccuggugauaa

SEQ ID NO: 2004268 - RNA, 19 nt, Artificial Sequence
  Description of Artificial Sequence: Synthetic oligonucleotide
ugaugguuaauuggguuau

SEQ ID NO: 2004269 - RNA, 19 nt, Artificial Sequence
  Description of Artificial Sequence: Synthetic oligonucleotide
ugaugcacucgaguguugc

SEQ ID NO: 2004270 - RNA, 19 nt, Artificial Sequence
  Description of Artificial Sequence: Synthetic oligonucleotide
auggcuacagauauuuggu

SEQ ID NO: 2004271 - RNA, 19 nt, Artificial Sequence
  Description of Artificial Sequence: Synthetic oligonucleotide
cacauuaucagaaaucauu

SEQ ID NO: 2004272 - RNA, 19 nt, Artificial Sequence
  Description of Artificial Sequence: Synthetic oligonucleotide
augcacucgaguguugcgg

SEQ ID NO: 2004273 - RNA, 19 nt, Artificial Sequence
  Description of Artificial Sequence: Synthetic oligonucleotide
uggugaugguuaauugggu

SEQ ID NO: 2004274 - RNA, 19 nt, Artificial Sequence
  Description of Artificial Sequence: Synthetic oligonucleotide
guacuagacagcucuacaa

SEQ ID NO: 2004275 - RNA, 19 nt, Artificial Sequence
  Description of Artificial Sequence: Synthetic oligonucleotide
uggauaccgcgucaaugug

SEQ ID NO: 2004276 - RNA, 19 nt, Artificial Sequence
  Description of Artificial Sequence: Synthetic oligonucleotide
uaauuggguuaugaugaca

SEQ ID NO: 2004277 - RNA, 19 nt, Artificial Sequence
  Description of Artificial Sequence: Synthetic oligonucleotide
acaugcauacuugggaaca

SEQ ID NO: 2004278 - RNA, 19 nt, Artificial Sequence
  Description of Artificial Sequence: Synthetic oligonucleotide
auuucaauggcuacagaua

SEQ ID NO: 2004279 - RNA, 19 nt, Artificial Sequence
  Description of Artificial Sequence: Synthetic oligonucleotide
uuccgaguacuagacagcu

SEQ ID NO: 2004280 - RNA, 19 nt, Artificial Sequence
  Description of Artificial Sequence: Synthetic oligonucleotide
aguguugcggauugugaaa

SEQ ID NO: 2004281 - RNA, 19 nt, Artificial Sequence
  Description of Artificial Sequence: Synthetic oligonucleotide
aaucgagcucacccuacau

SEQ ID NO: 2004282 - RNA, 19 nt, Artificial Sequence
  Description of Artificial Sequence: Synthetic oligonucleotide
acacuacuugccuacuggu

SEQ ID NO: 2004283 - RNA, 19 nt, Artificial Sequence
  Description of Artificial Sequence: Synthetic oligonucleotide
cuacuggucuggaaucgag

SEQ ID NO: 2004284 - RNA, 19 nt, Artificial Sequence
  Description of Artificial Sequence: Synthetic oligonucleotide
ugguugcuugauuuauaug

SEQ ID NO: 2004285 - RNA, 19 nt, Artificial Sequence
  Description of Artificial Sequence: Synthetic oligonucleotide
cagcacaugcauacuuggg

SEQ ID NO: 2004286 - RNA, 19 nt, Artificial Sequence
  Description of Artificial Sequence: Synthetic oligonucleotide
acaaguguccaccuacauu

SEQ ID NO: 2004287 - RNA, 19 nt, Artificial Sequence
  Description of Artificial Sequence: Synthetic oligonucleotide
uguugcggauugugaaacc

SEQ ID NO: 2004288 - RNA, 19 nt, Artificial Sequence
  Description of Artificial Sequence: Synthetic oligonucleotide
aaaacacuacuugccuacu

SEQ ID NO: 2004289 - RNA, 19 nt, Artificial Sequence
  Description of Artificial Sequence: Synthetic oligonucleotide
  modified_base (8)..(8): a, c, u, g, unknown or other
aucagcunuuuccgaagca

SEQ ID NO: 2004290 - RNA, 19 nt, Artificial Sequence
  Description of Artificial Sequence: Synthetic oligonucleotide
uaccgcgucaaugugguaa

SEQ ID NO: 2004291 - RNA, 19 nt, Artificial Sequence
  Description of Artificial Sequence: Synthetic oligonucleotide
cauagcuccaagcauggaa

SEQ ID NO: 2004292 - RNA, 19 nt, Artificial Sequence
  Description of Artificial Sequence: Synthetic oligonucleotide
gauaaucacacugguccca

SEQ ID NO: 2004293 - RNA, 19 nt, Artificial Sequence
  Description of Artificial Sequence: Synthetic oligonucleotide
uguaggaagcaguccuuaa

SEQ ID NO: 2004294 - RNA, 19 nt, Artificial Sequence
  Description of Artificial Sequence: Synthetic oligonucleotide
acauugaaucaagggguuc

SEQ ID NO: 2004295 - RNA, 19 nt, Artificial Sequence
  Description of Artificial Sequence: Synthetic oligonucleotide
guuguguacaaguguccac

SEQ ID NO: 2004296 - RNA, 19 nt, Artificial Sequence
  Description of Artificial Sequence: Synthetic oligonucleotide
aucggaaaagagguccauc

SEQ ID NO: 2004297 - RNA, 19 nt, Artificial Sequence
  Description of Artificial Sequence: Synthetic oligonucleotide
cacacuggucccaagguga

SEQ ID NO: 2004298 - RNA, 19 nt, Artificial Sequence
  Description of Artificial Sequence: Synthetic oligonucleotide
agggguucaaucugguaaa

SEQ ID NO: 2004299 - RNA, 19 nt, Artificial Sequence
  Description of Artificial Sequence: Synthetic oligonucleotide
ucauuggcccgcucgcuca

SEQ ID NO: 2004300 - RNA, 19 nt, Artificial Sequence
  Description of Artificial Sequence: Synthetic oligonucleotide
ugugaugcacucgaguguu

SEQ ID NO: 2004301 - RNA, 19 nt, Artificial Sequence
  Description of Artificial Sequence: Synthetic oligonucleotide
ucgaguguugcggauugug

SEQ ID NO: 2004302 - RNA, 19 nt, Artificial Sequence
  Description of Artificial Sequence: Synthetic oligonucleotide
accgcgucaaugugguaag

SEQ ID NO: 2004303 - RNA, 19 nt, Artificial Sequence
  Description of Artificial Sequence: Synthetic oligonucleotide
agguccaucucgaucaaug

SEQ ID NO: 2004304 - RNA, 19 nt, Artificial Sequence
  Description of Artificial Sequence: Synthetic oligonucleotide
aggaauggaccuugguggu

SEQ ID NO: 2004305 - RNA, 19 nt, Artificial Sequence
  Description of Artificial Sequence: Synthetic oligonucleotide
auagcuccaagcauggaau

SEQ ID NO: 2004306 - RNA, 19 nt, Artificial Sequence
  Description of Artificial Sequence: Synthetic oligonucleotide
uuccgggccagucuacaga

SEQ ID NO: 2004307 - RNA, 19 nt, Artificial Sequence
  Description of Artificial Sequence: Synthetic oligonucleotide
ggcuuagggucauugagac

SEQ ID NO: 2004308 - RNA, 19 nt, Artificial Sequence
  Description of Artificial Sequence: Synthetic oligonucleotide
uacaaguguccaccuacau

SEQ ID NO: 2004309 - RNA, 19 nt, Artificial Sequence
  Description of Artificial Sequence: Synthetic oligonucleotide
augccuucuaguaaggaau

SEQ ID NO: 2004310 - RNA, 19 nt, Artificial Sequence
  Description of Artificial Sequence: Synthetic oligonucleotide
uggaaucgagcucacccua

SEQ ID NO: 2004311 - RNA, 19 nt, Artificial Sequence
  Description of Artificial Sequence: Synthetic oligonucleotide
caaaggcuuagggucauug

SEQ ID NO: 2004312 - RNA, 19 nt, Artificial Sequence
  Description of Artificial Sequence: Synthetic oligonucleotide
gugaugguuaauuggguua

SEQ ID NO: 2004313 - RNA, 19 nt, Artificial Sequence
  Description of Artificial Sequence: Synthetic oligonucleotide
agauauuugguugcuugau

SEQ ID NO: 2004314 - RNA, 19 nt, Artificial Sequence
  Description of Artificial Sequence: Synthetic oligonucleotide
gaauggaccuuggugguga

SEQ ID NO: 2004315 - RNA, 19 nt, Artificial Sequence
  Description of Artificial Sequence: Synthetic oligonucleotide
cuacuugccuacuggucug

SEQ ID NO: 2004316 - RNA, 19 nt, Artificial Sequence
  Description of Artificial Sequence: Synthetic oligonucleotide
aaccuugcuuuguaaugua

SEQ ID NO: 2004317 - RNA, 19 nt, Artificial Sequence
  Description of Artificial Sequence: Synthetic oligonucleotide
uagggaccacauuaucaga

SEQ ID NO: 2004318 - RNA, 19 nt, Artificial Sequence
  Description of Artificial Sequence: Synthetic oligonucleotide
auacaaaggcuuaggguca

SEQ ID NO: 2004319 - RNA, 19 nt, Artificial Sequence
  Description of Artificial Sequence: Synthetic oligonucleotide
agcauggaaucuggauacc

SEQ ID NO: 2004320 - RNA, 19 nt, Artificial Sequence
  Description of Artificial Sequence: Synthetic oligonucleotide
gaguacuagacagcucuac

SEQ ID NO: 2004321 - RNA, 19 nt, Artificial Sequence
  Description of Artificial Sequence: Synthetic oligonucleotide
cucacccuacaugauauuc

SEQ ID NO: 2004322 - RNA, 19 nt, Artificial Sequence
  Description of Artificial Sequence: Synthetic oligonucleotide
aacagggaucagucaucug

SEQ ID NO: 2004323 - RNA, 19 nt, Artificial Sequence
  Description of Artificial Sequence: Synthetic oligonucleotide
acauaucggaaaagagguc

SEQ ID NO: 2004324 - RNA, 19 nt, Artificial Sequence
  Description of Artificial Sequence: Synthetic oligonucleotide
gagaugccuucuaguaagg

SEQ ID NO: 2004325 - RNA, 19 nt, Artificial Sequence
  Description of Artificial Sequence: Synthetic oligonucleotide
aaucuggauaccgcgucaa

SEQ ID NO: 2004326 - RNA, 19 nt, Artificial Sequence
  Description of Artificial Sequence: Synthetic oligonucleotide
uugaguuagggaccacauu

SEQ ID NO: 2004327 - RNA, 19 nt, Artificial Sequence
  Description of Artificial Sequence: Synthetic oligonucleotide
uccgggccagucuacagaa

SEQ ID NO: 2004328 - RNA, 19 nt, Artificial Sequence
  Description of Artificial Sequence: Synthetic oligonucleotide
gacuuccuggugauaauca

SEQ ID NO: 2004329 - RNA, 19 nt, Artificial Sequence
  Description of Artificial Sequence: Synthetic oligonucleotide
  modified_base (2)..(2): a, c, u, g, unknown or other
unuuuccgaagcagaucaa

SEQ ID NO: 2004330 - RNA, 19 nt, Artificial Sequence
  Description of Artificial Sequence: Synthetic oligonucleotide
uaaucacacuggucccaag

SEQ ID NO: 2004331 - RNA, 19 nt, Artificial Sequence
  Description of Artificial Sequence: Synthetic oligonucleotide
gucaucugucuuccgggcc

SEQ ID NO: 2004332 - RNA, 19 nt, Artificial Sequence
  Description of Artificial Sequence: Synthetic oligonucleotide
guagauuauauaucauaau

SEQ ID NO: 2004333 - RNA, 19 nt, Artificial Sequence
  Description of Artificial Sequence: Synthetic oligonucleotide
ugccuacuggucuggaauc

SEQ ID NO: 2004334 - RNA, 19 nt, Artificial Sequence
  Description of Artificial Sequence: Synthetic oligonucleotide
gaaucgagcucacccuaca

SEQ ID NO: 2004335 - RNA, 19 nt, Artificial Sequence
  Description of Artificial Sequence: Synthetic oligonucleotide
ggguagauuauauaucaua

SEQ ID NO: 2004336 - RNA, 19 nt, Artificial Sequence
  Description of Artificial Sequence: Synthetic oligonucleotide
cucaugugaugcacucgag

SEQ ID NO: 2004337 - RNA, 19 nt, Artificial Sequence
  Description of Artificial Sequence: Synthetic oligonucleotide
acuguuaaggguagauuau

SEQ ID NO: 2004338 - RNA, 19 nt, Artificial Sequence
  Description of Artificial Sequence: Synthetic oligonucleotide
uucaauggcuacagauauu

SEQ ID NO: 2004339 - RNA, 19 nt, Artificial Sequence
  Description of Artificial Sequence: Synthetic oligonucleotide
aucagucaucugucuuccg

SEQ ID NO: 2004340 - RNA, 19 nt, Artificial Sequence
  Description of Artificial Sequence: Synthetic oligonucleotide
ggauaccgcgucaaugugg

SEQ ID NO: 2004341 - RNA, 19 nt, Artificial Sequence
  Description of Artificial Sequence: Synthetic oligonucleotide
uugugaaaccuugcuuugu

SEQ ID NO: 2004342 - RNA, 19 nt, Artificial Sequence
  Description of Artificial Sequence: Synthetic oligonucleotide
cuagacagcucuacaaacu

SEQ ID NO: 2004343 - RNA, 19 nt, Artificial Sequence
  Description of Artificial Sequence: Synthetic oligonucleotide
ccuuaacaaguacuggcag

SEQ ID NO: 2004344 - RNA, 19 nt, Artificial Sequence
  Description of Artificial Sequence: Synthetic oligonucleotide
guacuggcagaugacuggc

SEQ ID NO: 2004345 - RNA, 19 nt, Artificial Sequence
  Description of Artificial Sequence: Synthetic oligonucleotide
gaaccuggcagucucuggu

SEQ ID NO: 2004346 - RNA, 19 nt, Artificial Sequence
  Description of Artificial Sequence: Synthetic oligonucleotide
gcauggaaucuggauaccg

SEQ ID NO: 2004347 - RNA, 19 nt, Artificial Sequence
  Description of Artificial Sequence: Synthetic oligonucleotide
cuggauaccgcgucaaugu

SEQ ID NO: 2004348 - RNA, 19 nt, Artificial Sequence
  Description of Artificial Sequence: Synthetic oligonucleotide
uugcggauugugaaaccuu

SEQ ID NO: 2004349 - RNA, 19 nt, Artificial Sequence
  Description of Artificial Sequence: Synthetic oligonucleotide
ucgcucaugugaugcacuc

SEQ ID NO: 2004350 - RNA, 19 nt, Artificial Sequence
  Description of Artificial Sequence: Synthetic oligonucleotide
auaucggaaaagaggucca

SEQ ID NO: 2004351 - RNA, 19 nt, Artificial Sequence
  Description of Artificial Sequence: Synthetic oligonucleotide
acucugaacagcacaugca

SEQ ID NO: 2004352 - RNA, 19 nt, Artificial Sequence
  Description of Artificial Sequence: Synthetic oligonucleotide
gggucauugagacauugaa

SEQ ID NO: 2004353 - RNA, 19 nt, Artificial Sequence
  Description of Artificial Sequence: Synthetic oligonucleotide
uacuugccuacuggucugg

SEQ ID NO: 2004354 - RNA, 19 nt, Artificial Sequence
  Description of Artificial Sequence: Synthetic oligonucleotide
uggccaguuuuccuuuaaa

SEQ ID NO: 2004355 - RNA, 19 nt, Artificial Sequence
  Description of Artificial Sequence: Synthetic oligonucleotide
uggcuacagauauuugguu

SEQ ID NO: 2004356 - RNA, 19 nt, Artificial Sequence
  Description of Artificial Sequence: Synthetic oligonucleotide
gaugguuaauuggguuaug

SEQ ID NO: 2004357 - RNA, 19 nt, Artificial Sequence
  Description of Artificial Sequence: Synthetic oligonucleotide
gauaccgcgucaauguggu

SEQ ID NO: 2004358 - RNA, 19 nt, Artificial Sequence
  Description of Artificial Sequence: Synthetic oligonucleotide
aguuuuccuuuaaaacacu

SEQ ID NO: 2004359 - RNA, 19 nt, Artificial Sequence
  Description of Artificial Sequence: Synthetic oligonucleotide
  modified_base (6)..(6): a, c, u, g, unknown or other
cagcunuuuccgaagcaga

SEQ ID NO: 2004360 - RNA, 19 nt, Artificial Sequence
  Description of Artificial Sequence: Synthetic oligonucleotide
gcucaugugaugcacucga

SEQ ID NO: 2004361 - RNA, 19 nt, Artificial Sequence
  Description of Artificial Sequence: Synthetic oligonucleotide
agggaccacauuaucagaa

SEQ ID NO: 2004362 - RNA, 19 nt, Artificial Sequence
  Description of Artificial Sequence: Synthetic oligonucleotide
uguauuccaucagguggac

SEQ ID NO: 2004363 - RNA, 19 nt, Artificial Sequence
  Description of Artificial Sequence: Synthetic oligonucleotide
  modified_base (5)..(5): a, c, u, g, unknown or other
agcunuuuccgaagcagau

SEQ ID NO: 2004364 - RNA, 19 nt, Artificial Sequence
  Description of Artificial Sequence: Synthetic oligonucleotide
uagcuccaagcauggaauc

SEQ ID NO: 2004365 - RNA, 19 nt, Artificial Sequence
  Description of Artificial Sequence: Synthetic oligonucleotide
aggcuuagggucauugaga

SEQ ID NO: 2004366 - RNA, 19 nt, Artificial Sequence
  Description of Artificial Sequence: Synthetic oligonucleotide
acaucacgaauagucugcu

SEQ ID NO: 2004367 - RNA, 19 nt, Artificial Sequence
  Description of Artificial Sequence: Synthetic oligonucleotide
auaaucacacuggucccaa

SEQ ID NO: 2004368 - RNA, 19 nt, Artificial Sequence
  Description of Artificial Sequence: Synthetic oligonucleotide
agcuccaagcauggaaucu

SEQ ID NO: 2004369 - RNA, 19 nt, Artificial Sequence
  Description of Artificial Sequence: Synthetic oligonucleotide
uuucauuggcccgcucgcu

SEQ ID NO: 2004370 - RNA, 19 nt, Artificial Sequence
  Description of Artificial Sequence: Synthetic oligonucleotide
aucagacauuucaauggcu

SEQ ID NO: 2004371 - RNA, 19 nt, Artificial Sequence
  Description of Artificial Sequence: Synthetic oligonucleotide
acauucaacgugacugggu

SEQ ID NO: 2004372 - RNA, 19 nt, Artificial Sequence
  Description of Artificial Sequence: Synthetic oligonucleotide
aguguccaccuacauucaa

SEQ ID NO: 2004373 - RNA, 19 nt, Artificial Sequence
  Description of Artificial Sequence: Synthetic oligonucleotide
uggacccggagagagacuu

SEQ ID NO: 2004374 - RNA, 19 nt, Artificial Sequence
  Description of Artificial Sequence: Synthetic oligonucleotide
gguaagggauguuguguac

SEQ ID NO: 2004375 - RNA, 19 nt, Artificial Sequence
  Description of Artificial Sequence: Synthetic oligonucleotide
uggcagaugacuggccagu

SEQ ID NO: 2004376 - RNA, 19 nt, Artificial Sequence
  Description of Artificial Sequence: Synthetic oligonucleotide
ggauuggaauauuuagaaa

SEQ ID NO: 2004377 - RNA, 19 nt, Artificial Sequence
  Description of Artificial Sequence: Synthetic oligonucleotide
caaacauagcuccaagcau

SEQ ID NO: 2004378 - RNA, 19 nt, Artificial Sequence
  Description of Artificial Sequence: Synthetic oligonucleotide
ggguuaugaugacagccac

SEQ ID NO: 2004379 - RNA, 19 nt, Artificial Sequence
  Description of Artificial Sequence: Synthetic oligonucleotide
caucagguggacccggaga

SEQ ID NO: 2004380 - RNA, 19 nt, Artificial Sequence
  Description of Artificial Sequence: Synthetic oligonucleotide
uccgaguacuagacagcuc

SEQ ID NO: 2004381 - RNA, 19 nt, Artificial Sequence
  Description of Artificial Sequence: Synthetic oligonucleotide
agcuuccgaguacuagaca

SEQ ID NO: 2004382 - RNA, 19 nt, Artificial Sequence
  Description of Artificial Sequence: Synthetic oligonucleotide
gugaaaccuugcuuuguaa

SEQ ID NO: 2004383 - RNA, 19 nt, Artificial Sequence
  Description of Artificial Sequence: Synthetic oligonucleotide
acaaguugucaaaacugua

SEQ ID NO: 2004384 - RNA, 19 nt, Artificial Sequence
  Description of Artificial Sequence: Synthetic oligonucleotide
gagcucacccuacaugaua

SEQ ID NO: 2004385 - RNA, 19 nt, Artificial Sequence
  Description of Artificial Sequence: Synthetic oligonucleotide
aguugaggacauaucggaa

SEQ ID NO: 2004386 - RNA, 19 nt, Artificial Sequence
  Description of Artificial Sequence: Synthetic oligonucleotide
gucugcuuaaacuuucauu

SEQ ID NO: 2004387 - RNA, 19 nt, Artificial Sequence
  Description of Artificial Sequence: Synthetic oligonucleotide
uaucggaaaagagguccau

SEQ ID NO: 2004388 - RNA, 19 nt, Artificial Sequence
  Description of Artificial Sequence: Synthetic oligonucleotide
aaguguccaccuacauuca

SEQ ID NO: 2004389 - RNA, 19 nt, Artificial Sequence
  Description of Artificial Sequence: Synthetic oligonucleotide
ccaccuacauucaacguga

SEQ ID NO: 2004390 - RNA, 19 nt, Artificial Sequence
  Description of Artificial Sequence: Synthetic oligonucleotide
uugaaucaagggguucaau

SEQ ID NO: 2004391 - RNA, 19 nt, Artificial Sequence
  Description of Artificial Sequence: Synthetic oligonucleotide
agucaauucugaaguucgu

SEQ ID NO: 2004392 - RNA, 19 nt, Artificial Sequence
  Description of Artificial Sequence: Synthetic oligonucleotide
gguggacccggagagagac

SEQ ID NO: 2004393 - RNA, 19 nt, Artificial Sequence
  Description of Artificial Sequence: Synthetic oligonucleotide
ggugauaaucacacugguc

SEQ ID NO: 2004394 - RNA, 19 nt, Artificial Sequence
  Description of Artificial Sequence: Synthetic oligonucleotide
gucaauucugaaguucgua

SEQ ID NO: 2004395 - RNA, 19 nt, Artificial Sequence
  Description of Artificial Sequence: Synthetic oligonucleotide
aauugccuugagggucucu

SEQ ID NO: 2004396 - RNA, 19 nt, Artificial Sequence
  Description of Artificial Sequence: Synthetic oligonucleotide
gucuacagaaaguccaguu

SEQ ID NO: 2004397 - RNA, 19 nt, Artificial Sequence
  Description of Artificial Sequence: Synthetic oligonucleotide
gcuccaagcauggaaucug

SEQ ID NO: 2004398 - RNA, 19 nt, Artificial Sequence
  Description of Artificial Sequence: Synthetic oligonucleotide
uacaaaggcuuagggucau

SEQ ID NO: 2004399 - RNA, 19 nt, Artificial Sequence
  Description of Artificial Sequence: Synthetic oligonucleotide
cugaaguucguaagaaguu

SEQ ID NO: 2004400 - RNA, 19 nt, Artificial Sequence
  Description of Artificial Sequence: Synthetic oligonucleotide
uuagggucauugagacauu

SEQ ID NO: 2004401 - RNA, 19 nt, Artificial Sequence
  Description of Artificial Sequence: Synthetic oligonucleotide
aaaguccaguuguguucua

SEQ ID NO: 2004402 - RNA, 19 nt, Artificial Sequence
  Description of Artificial Sequence: Synthetic oligonucleotide
guaaggaauggaccuuggu

SEQ ID NO: 2004403 - RNA, 19 nt, Artificial Sequence
  Description of Artificial Sequence: Synthetic oligonucleotide
ggaacaaaacagggaucag

SEQ ID NO: 2004404 - RNA, 19 nt, Artificial Sequence
  Description of Artificial Sequence: Synthetic oligonucleotide
  modified_base (4)..(4): a, c, u, g, unknown or other
gcunuuuccgaagcagauc

SEQ ID NO: 2004405 - RNA, 19 nt, Artificial Sequence
  Description of Artificial Sequence: Synthetic oligonucleotide
guaauugccuugagggucu

SEQ ID NO: 2004406 - RNA, 19 nt, Artificial Sequence
  Description of Artificial Sequence: Synthetic oligonucleotide
guugcggauugugaaaccu

SEQ ID NO: 2004407 - RNA, 19 nt, Artificial Sequence
  Description of Artificial Sequence: Synthetic oligonucleotide
gugguaagggauguugugu

SEQ ID NO: 2004408 - RNA, 19 nt, Artificial Sequence
  Description of Artificial Sequence: Synthetic oligonucleotide
ucccaaggugaggaaccug

SEQ ID NO: 2004409 - RNA, 19 nt, Artificial Sequence
  Description of Artificial Sequence: Synthetic oligonucleotide
aucuggauaccgcgucaau

SEQ ID NO: 2004410 - RNA, 19 nt, Artificial Sequence
  Description of Artificial Sequence: Synthetic oligonucleotide
cuggaaucgagcucacccu

SEQ ID NO: 2004411 - RNA, 19 nt, Artificial Sequence
  Description of Artificial Sequence: Synthetic oligonucleotide
gccuucuaguaaggaaugg

SEQ ID NO: 2004412 - RNA, 19 nt, Artificial Sequence
  Description of Artificial Sequence: Synthetic oligonucleotide
cuguuaaggguagauuaua

SEQ ID NO: 2004413 - RNA, 19 nt, Artificial Sequence
  Description of Artificial Sequence: Synthetic oligonucleotide
gccuacuggucuggaaucg

SEQ ID NO: 2004414 - RNA, 19 nt, Artificial Sequence
  Description of Artificial Sequence: Synthetic oligonucleotide
aggguagauuauauaucau

SEQ ID NO: 2004415 - RNA, 19 nt, Artificial Sequence
  Description of Artificial Sequence: Synthetic oligonucleotide
caccuacauucaacgugac

SEQ ID NO: 2004416 - RNA, 19 nt, Artificial Sequence
  Description of Artificial Sequence: Synthetic oligonucleotide
cagaaaguccaguuguguu

SEQ ID NO: 2004417 - RNA, 19 nt, Artificial Sequence
  Description of Artificial Sequence: Synthetic oligonucleotide
cuugccuacuggucuggaa

SEQ ID NO: 2004418 - RNA, 19 nt, Artificial Sequence
  Description of Artificial Sequence: Synthetic oligonucleotide
cgaauagucugcuuaaacu

SEQ ID NO: 2004419 - RNA, 19 nt, Artificial Sequence
  Description of Artificial Sequence: Synthetic oligonucleotide
ccaaggugaggaaccuggc

SEQ ID NO: 2004420 - RNA, 19 nt, Artificial Sequence
  Description of Artificial Sequence: Synthetic oligonucleotide
gacauugaaucaagggguu

SEQ ID NO: 2004421 - RNA, 19 nt, Artificial Sequence
  Description of Artificial Sequence: Synthetic oligonucleotide
gguuaugaugacagccaca

SEQ ID NO: 2004422 - RNA, 19 nt, Artificial Sequence
  Description of Artificial Sequence: Synthetic oligonucleotide
gagagucaauucugaaguu

SEQ ID NO: 2004423 - RNA, 19 nt, Artificial Sequence
  Description of Artificial Sequence: Synthetic oligonucleotide
accuugcuuuguaauguau

SEQ ID NO: 2004424 - RNA, 19 nt, Artificial Sequence
  Description of Artificial Sequence: Synthetic oligonucleotide
gaguuagggaccacauuau

SEQ ID NO: 2004425 - RNA, 19 nt, Artificial Sequence
  Description of Artificial Sequence: Synthetic oligonucleotide
ccuucuaguaaggaaugga

SEQ ID NO: 2004426 - RNA, 19 nt, Artificial Sequence
  Description of Artificial Sequence: Synthetic oligonucleotide
ggugaugguuaauuggguu

SEQ ID NO: 2004427 - RNA, 19 nt, Artificial Sequence
  Description of Artificial Sequence: Synthetic oligonucleotide
ggugccaucaugugcuuau

SEQ ID NO: 2004428 - RNA, 19 nt, Artificial Sequence
  Description of Artificial Sequence: Synthetic oligonucleotide
acccuacaugauauucuga

SEQ ID NO: 2004429 - RNA, 19 nt, Artificial Sequence
  Description of Artificial Sequence: Synthetic oligonucleotide
ggauugugaaaccuugcuu

SEQ ID NO: 2004430 - RNA, 19 nt, Artificial Sequence
  Description of Artificial Sequence: Synthetic oligonucleotide
caugcauacuugggaacaa

SEQ ID NO: 2004431 - RNA, 19 nt, Artificial Sequence
  Description of Artificial Sequence: Synthetic oligonucleotide
ggaaucgagcucacccuac

SEQ ID NO: 2004432 - RNA, 19 nt, Artificial Sequence
  Description of Artificial Sequence: Synthetic oligonucleotide
guguacaaguguccaccua

SEQ ID NO: 2004433 - RNA, 19 nt, Artificial Sequence
  Description of Artificial Sequence: Synthetic oligonucleotide
ggaauggaccuugguggug

SEQ ID NO: 2004434 - RNA, 19 nt, Artificial Sequence
  Description of Artificial Sequence: Synthetic oligonucleotide
acauagcuccaagcaugga

SEQ ID NO: 2004435 - RNA, 19 nt, Artificial Sequence
  Description of Artificial Sequence: Synthetic oligonucleotide
gucuggaaucgagcucacc

SEQ ID NO: 2004436 - RNA, 19 nt, Artificial Sequence
  Description of Artificial Sequence: Synthetic oligonucleotide
cgcgucaaugugguaaggg

SEQ ID NO: 2004437 - RNA, 19 nt, Artificial Sequence
  Description of Artificial Sequence: Synthetic oligonucleotide
gcggauugugaaaccuugc

SEQ ID NO: 2004438 - RNA, 19 nt, Artificial Sequence
  Description of Artificial Sequence: Synthetic oligonucleotide
cccuacaugauauucugau

SEQ ID NO: 2004439 - RNA, 19 nt, Artificial Sequence
  Description of Artificial Sequence: Synthetic oligonucleotide
ggcccgcucgcucauguga

SEQ ID NO: 2004440 - RNA, 19 nt, Artificial Sequence
  Description of Artificial Sequence: Synthetic oligonucleotide
acuugccuacuggucugga

SEQ ID NO: 2004441 - RNA, 19 nt, Artificial Sequence
  Description of Artificial Sequence: Synthetic oligonucleotide
ggucauugagacauugaau

SEQ ID NO: 2004442 - RNA, 19 nt, Artificial Sequence
  Description of Artificial Sequence: Synthetic oligonucleotide
cuguaggaagcaguccuua

SEQ ID NO: 2004443 - RNA, 19 nt, Artificial Sequence
  Description of Artificial Sequence: Synthetic oligonucleotide
gugaugcacucgaguguug

SEQ ID NO: 2004444 - RNA, 19 nt, Artificial Sequence
  Description of Artificial Sequence: Synthetic oligonucleotide
ggggagagucaauucugaa

SEQ ID NO: 2004445 - RNA, 19 nt, Artificial Sequence
  Description of Artificial Sequence: Synthetic oligonucleotide
guccaccuacauucaacgu

SEQ ID NO: 2004446 - RNA, 19 nt, Artificial Sequence
  Description of Artificial Sequence: Synthetic oligonucleotide
cacgaauagucugcuuaaa

SEQ ID NO: 2004447 - RNA, 19 nt, Artificial Sequence
  Description of Artificial Sequence: Synthetic oligonucleotide
gcuuagggucauugagaca

SEQ ID NO: 2004448 - RNA, 19 nt, Artificial Sequence
  Description of Artificial Sequence: Synthetic oligonucleotide
cuggccaguuuuccuuuaa

SEQ ID NO: 2004449 - RNA, 19 nt, Artificial Sequence
  Description of Artificial Sequence: Synthetic oligonucleotide
gcauagaaagaaacaaguu

SEQ ID NO: 2004450 - RNA, 19 nt, Artificial Sequence
  Description of Artificial Sequence: Synthetic oligonucleotide
uggugccaucaugugcuua

SEQ ID NO: 2004451 - RNA, 19 nt, Artificial Sequence
  Description of Artificial Sequence: Synthetic oligonucleotide
ccgcucgcucaugugaugc

SEQ ID NO: 2004452 - RNA, 19 nt, Artificial Sequence
  Description of Artificial Sequence: Synthetic oligonucleotide
gcucgcucaugugaugcac

SEQ ID NO: 2004453 - RNA, 19 nt, Artificial Sequence
  Description of Artificial Sequence: Synthetic oligonucleotide
auuggcccgcucgcucaug

SEQ ID NO: 2004454 - RNA, 19 nt, Artificial Sequence
  Description of Artificial Sequence: Synthetic oligonucleotide
cgaguguugcggauuguga

SEQ ID NO: 2004455 - RNA, 19 nt, Artificial Sequence
  Description of Artificial Sequence: Synthetic oligonucleotide
gucuuccgggccagucuac

SEQ ID NO: 2004456 - RNA, 19 nt, Artificial Sequence
  Description of Artificial Sequence: Synthetic oligonucleotide
gagagacuuccuggugaua

SEQ ID NO: 2004457 - RNA, 19 nt, Artificial Sequence
  Description of Artificial Sequence: Synthetic oligonucleotide
auaccgcgucaauguggua

SEQ ID NO: 2004458 - RNA, 19 nt, Artificial Sequence
  Description of Artificial Sequence: Synthetic oligonucleotide
caguugaguuagggaccac

SEQ ID NO: 2004459 - RNA, 19 nt, Artificial Sequence
  Description of Artificial Sequence: Synthetic oligonucleotide
agguggacccggagagaga

SEQ ID NO: 2004460 - RNA, 19 nt, Artificial Sequence
  Description of Artificial Sequence: Synthetic oligonucleotide
acaaaggcuuagggucauu

SEQ ID NO: 2004461 - RNA, 19 nt, Artificial Sequence
  Description of Artificial Sequence: Synthetic oligonucleotide
gugaggaaccuggcagucu

SEQ ID NO: 2004462 - RNA, 19 nt, Artificial Sequence
  Description of Artificial Sequence: Synthetic oligonucleotide
acccggagagagacuuccu

SEQ ID NO: 2004463 - RNA, 19 nt, Artificial Sequence
  Description of Artificial Sequence: Synthetic oligonucleotide
cgcucaugugaugcacucg

SEQ ID NO: 2004464 - RNA, 19 nt, Artificial Sequence
  Description of Artificial Sequence: Synthetic oligonucleotide
ggucucuggcuguggggaa

SEQ ID NO: 2004465 - RNA, 19 nt, Artificial Sequence
  Description of Artificial Sequence: Synthetic oligonucleotide
cgucaaugugguaagggau

SEQ ID NO: 2004466 - RNA, 19 nt, Artificial Sequence
  Description of Artificial Sequence: Synthetic oligonucleotide
ccuacaugauauucugauu

SEQ ID NO: 2004467 - RNA, 19 nt, Artificial Sequence
  Description of Artificial Sequence: Synthetic oligonucleotide
caucacgaauagucugcuu

SEQ ID NO: 2004468 - RNA, 19 nt, Artificial Sequence
  Description of Artificial Sequence: Synthetic oligonucleotide
gggguucaaucugguaaaa

SEQ ID NO: 2004469 - RNA, 19 nt, Artificial Sequence
  Description of Artificial Sequence: Synthetic oligonucleotide
cggauugugaaaccuugcu

SEQ ID NO: 2004470 - RNA, 19 nt, Artificial Sequence
  Description of Artificial Sequence: Synthetic oligonucleotide
ccuacuggucuggaaucga

SEQ ID NO: 2004471 - RNA, 19 nt, Artificial Sequence
  Description of Artificial Sequence: Synthetic oligonucleotide
ggucuggaaucgagcucac

SEQ ID NO: 2004472 - RNA, 19 nt, Artificial Sequence
  Description of Artificial Sequence: Synthetic oligonucleotide
ccacauuaucagaaaucau

SEQ ID NO: 2004473 - RNA, 19 nt, Artificial Sequence
  Description of Artificial Sequence: Synthetic oligonucleotide
gggccagucuacagaaagu

SEQ ID NO: 2004474 - RNA, 19 nt, Artificial Sequence
  Description of Artificial Sequence: Synthetic oligonucleotide
cccgcucgcucaugugaug

SEQ ID NO: 2004475 - RNA, 19 nt, Artificial Sequence
  Description of Artificial Sequence: Synthetic oligonucleotide
gagguccaucucgaucaau

SEQ ID NO: 2004476 - RNA, 19 nt, Artificial Sequence
  Description of Artificial Sequence: Synthetic oligonucleotide
ccgcgucaaugugguaagg

SEQ ID NO: 2004477 - RNA, 19 nt, Artificial Sequence
  Description of Artificial Sequence: Synthetic oligonucleotide
ccacuuggugaaauaguuu

SEQ ID NO: 2004478 - RNA, 19 nt, Artificial Sequence
  Description of Artificial Sequence: Synthetic oligonucleotide
gcacuguuaaggguagauu

SEQ ID NO: 2004479 - RNA, 19 nt, Artificial Sequence
  Description of Artificial Sequence: Synthetic oligonucleotide
cucgaguguugcggauugu

SEQ ID NO: 2004480 - RNA, 19 nt, Artificial Sequence
  Description of Artificial Sequence: Synthetic oligonucleotide
guggacccggagagagacu

SEQ ID NO: 2004481 - RNA, 19 nt, Artificial Sequence
  Description of Artificial Sequence: Synthetic oligonucleotide
cgcucgcucaugugaugca

SEQ ID NO: 2004482 - RNA, 19 nt, Artificial Sequence
  Description of Artificial Sequence: Synthetic oligonucleotide
gcucacccuacaugauauu

SEQ ID NO: 2004483 - RNA, 19 nt, Artificial Sequence
  Description of Artificial Sequence: Synthetic oligonucleotide
gccacaggauuggaauauu

SEQ ID NO: 2004484 - RNA, 19 nt, Artificial Sequence
  Description of Artificial Sequence: Synthetic oligonucleotide
cgagcucacccuacaugau

SEQ ID NO: 2004485 - RNA, 19 nt, Artificial Sequence
  Description of Artificial Sequence: Synthetic oligonucleotide
aauagagauaaauaaaccu

SEQ ID NO: 2004486 - RNA, 19 nt, Artificial Sequence
  Description of Artificial Sequence: Synthetic oligonucleotide
uguuuaaauauuaaacagg

SEQ ID NO: 2004487 - RNA, 19 nt, Artificial Sequence
  Description of Artificial Sequence: Synthetic oligonucleotide
aaauaguagguuuaaauaa

SEQ ID NO: 2004488 - RNA, 19 nt, Artificial Sequence
  Description of Artificial Sequence: Synthetic oligonucleotide
agaaauaccaguaaauuac

SEQ ID NO: 2004489 - RNA, 19 nt, Artificial Sequence
  Description of Artificial Sequence: Synthetic oligonucleotide
aauaccaguaaauuaccag

SEQ ID NO: 2004490 - RNA, 19 nt, Artificial Sequence
  Description of Artificial Sequence: Synthetic oligonucleotide
guuuaaauauuaaacaggg

SEQ ID NO: 2004491 - RNA, 19 nt, Artificial Sequence
  Description of Artificial Sequence: Synthetic oligonucleotide
aagggagaccuccugaugc

SEQ ID NO: 2004492 - RNA, 19 nt, Artificial Sequence
  Description of Artificial Sequence: Synthetic oligonucleotide
ugucuugucucccaaaagg

SEQ ID NO: 2004493 - RNA, 19 nt, Artificial Sequence
  Description of Artificial Sequence: Synthetic oligonucleotide
auaccaguaaauuaccagg

SEQ ID NO: 2004494 - RNA, 19 nt, Artificial Sequence
  Description of Artificial Sequence: Synthetic oligonucleotide
uugguauuuaccuaucucc

SEQ ID NO: 2004495 - RNA, 19 nt, Artificial Sequence
  Description of Artificial Sequence: Synthetic oligonucleotide
uagagauaaauaaaccugc

SEQ ID NO: 2004496 - RNA, 19 nt, Artificial Sequence
  Description of Artificial Sequence: Synthetic oligonucleotide
aaauuaccaggaccaaacc

SEQ ID NO: 2004497 - RNA, 19 nt, Artificial Sequence
  Description of Artificial Sequence: Synthetic oligonucleotide
aguagcacacaacugcucc

SEQ ID NO: 2004498 - RNA, 19 nt, Artificial Sequence
  Description of Artificial Sequence: Synthetic oligonucleotide
uccgucuuuaaauaguagg

SEQ ID NO: 2004499 - RNA, 19 nt, Artificial Sequence
  Description of Artificial Sequence: Synthetic oligonucleotide
uuuguaaccaccacagagc

SEQ ID NO: 2004500 - RNA, 19 nt, Artificial Sequence
  Description of Artificial Sequence: Synthetic oligonucleotide
aaggacuucagcaggaagc

SEQ ID NO: 2004501 - RNA, 19 nt, Artificial Sequence
  Description of Artificial Sequence: Synthetic oligonucleotide
ucaggccuagaccagaugg

SEQ ID NO: 2004502 - RNA, 19 nt, Artificial Sequence
  Description of Artificial Sequence: Synthetic oligonucleotide
guaaguagcacacaacugc

SEQ ID NO: 2004503 - RNA, 19 nt, Artificial Sequence
  Description of Artificial Sequence: Synthetic oligonucleotide
aaaacucaagaguggagag

SEQ ID NO: 2004504 - RNA, 19 nt, Artificial Sequence
  Description of Artificial Sequence: Synthetic oligonucleotide
uuguaaguagcacacaacu

SEQ ID NO: 2004505 - RNA, 19 nt, Artificial Sequence
  Description of Artificial Sequence: Synthetic oligonucleotide
aauaguagguuuaaauaag

SEQ ID NO: 2004506 - RNA, 19 nt, Artificial Sequence
  Description of Artificial Sequence: Synthetic oligonucleotide
ucuauggggacagacaggg

SEQ ID NO: 2004507 - RNA, 19 nt, Artificial Sequence
  Description of Artificial Sequence: Synthetic oligonucleotide
aagaaauaccaguaaauua

SEQ ID NO: 2004508 - RNA, 19 nt, Artificial Sequence
  Description of Artificial Sequence: Synthetic oligonucleotide
aauuaccaggaccaaaccu

SEQ ID NO: 2004509 - RNA, 19 nt, Artificial Sequence
  Description of Artificial Sequence: Synthetic oligonucleotide
auaaaccugcugcaaaugg

SEQ ID NO: 2004510 - RNA, 19 nt, Artificial Sequence
  Description of Artificial Sequence: Synthetic oligonucleotide
gaaacuugcgaccuggcug

SEQ ID NO: 2004511 - RNA, 19 nt, Artificial Sequence
  Description of Artificial Sequence: Synthetic oligonucleotide
auagagauaaauaaaccug

SEQ ID NO: 2004512 - RNA, 19 nt, Artificial Sequence
  Description of Artificial Sequence: Synthetic oligonucleotide
aggagaacaaaacucaaga

SEQ ID NO: 2004513 - RNA, 19 nt, Artificial Sequence
  Description of Artificial Sequence: Synthetic oligonucleotide
aaauaaaccugcugcaaau

SEQ ID NO: 2004514 - RNA, 19 nt, Artificial Sequence
  Description of Artificial Sequence: Synthetic oligonucleotide
aagcaggagaacaaaacuc

SEQ ID NO: 2004515 - RNA, 19 nt, Artificial Sequence
  Description of Artificial Sequence: Synthetic oligonucleotide
auaguagguuuaaauaagc

SEQ ID NO: 2004516 - RNA, 19 nt, Artificial Sequence
  Description of Artificial Sequence: Synthetic oligonucleotide
aaagaaauaccaguaaauu

SEQ ID NO: 2004517 - RNA, 19 nt, Artificial Sequence
  Description of Artificial Sequence: Synthetic oligonucleotide
aguagguuuaaauaagcau

SEQ ID NO: 2004518 - RNA, 19 nt, Artificial Sequence
  Description of Artificial Sequence: Synthetic oligonucleotide
ugguauuuaccuaucuccc

SEQ ID NO: 2004519 - RNA, 19 nt, Artificial Sequence
  Description of Artificial Sequence: Synthetic oligonucleotide
agacagggaaacuugcgac

SEQ ID NO: 2004520 - RNA, 19 nt, Artificial Sequence
  Description of Artificial Sequence: Synthetic oligonucleotide
uguaaguagcacacaacug

SEQ ID NO: 2004521 - RNA, 19 nt, Artificial Sequence
  Description of Artificial Sequence: Synthetic oligonucleotide
uguagcauguccacgggug

SEQ ID NO: 2004522 - RNA, 19 nt, Artificial Sequence
  Description of Artificial Sequence: Synthetic oligonucleotide
aaacuugcgaccuggcuga

SEQ ID NO: 2004523 - RNA, 19 nt, Artificial Sequence
  Description of Artificial Sequence: Synthetic oligonucleotide
uaaauaaaccugcugcaaa

SEQ ID NO: 2004524 - RNA, 19 nt, Artificial Sequence
  Description of Artificial Sequence: Synthetic oligonucleotide
cuuggguagaggaagaguc

SEQ ID NO: 2004525 - RNA, 19 nt, Artificial Sequence
  Description of Artificial Sequence: Synthetic oligonucleotide
aauacuugguauuuaccua

SEQ ID NO: 2004526 - RNA, 19 nt, Artificial Sequence
  Description of Artificial Sequence: Synthetic oligonucleotide
gagauaaauaaaccugcug

SEQ ID NO: 2004527 - RNA, 19 nt, Artificial Sequence
  Description of Artificial Sequence: Synthetic oligonucleotide
uauggggacagacagggaa

SEQ ID NO: 2004528 - RNA, 19 nt, Artificial Sequence
  Description of Artificial Sequence: Synthetic oligonucleotide
agaguggccgagcagcacc

SEQ ID NO: 2004529 - RNA, 19 nt, Artificial Sequence
  Description of Artificial Sequence: Synthetic oligonucleotide
agcuguagcauguccacgg

SEQ ID NO: 2004530 - RNA, 19 nt, Artificial Sequence
  Description of Artificial Sequence: Synthetic oligonucleotide
caagggaugaagaacccag

SEQ ID NO: 2004531 - RNA, 19 nt, Artificial Sequence
  Description of Artificial Sequence: Synthetic oligonucleotide
caucuauggggacagacag

SEQ ID NO: 2004532 - RNA, 19 nt, Artificial Sequence
  Description of Artificial Sequence: Synthetic oligonucleotide
uaguagguuuaaauaagca

SEQ ID NO: 2004533 - RNA, 19 nt, Artificial Sequence
  Description of Artificial Sequence: Synthetic oligonucleotide
cucaagaguggagagaagg

SEQ ID NO: 2004534 - RNA, 19 nt, Artificial Sequence
  Description of Artificial Sequence: Synthetic oligonucleotide
aauauuaaacaggguuguc

SEQ ID NO: 2004535 - RNA, 19 nt, Artificial Sequence
  Description of Artificial Sequence: Synthetic oligonucleotide
uguuagggccugcaggagg

SEQ ID NO: 2004536 - RNA, 19 nt, Artificial Sequence
  Description of Artificial Sequence: Synthetic oligonucleotide
ggaugaagaacccaguuug

SEQ ID NO: 2004537 - RNA, 19 nt, Artificial Sequence
  Description of Artificial Sequence: Synthetic oligonucleotide
aacacuggcuguuuaaaua

SEQ ID NO: 2004538 - RNA, 19 nt, Artificial Sequence
  Description of Artificial Sequence: Synthetic oligonucleotide
uaccaguaaauuaccagga

SEQ ID NO: 2004539 - RNA, 19 nt, Artificial Sequence
  Description of Artificial Sequence: Synthetic oligonucleotide
acacaacugcuccagcagc

SEQ ID NO: 2004540 - RNA, 19 nt, Artificial Sequence
  Description of Artificial Sequence: Synthetic oligonucleotide
uaaguagcacacaacugcu

SEQ ID NO: 2004541 - RNA, 19 nt, Artificial Sequence
  Description of Artificial Sequence: Synthetic oligonucleotide
caguaaauuaccaggacca

SEQ ID NO: 2004542 - RNA, 19 nt, Artificial Sequence
  Description of Artificial Sequence: Synthetic oligonucleotide
auauuaaacaggguugucu

SEQ ID NO: 2004543 - RNA, 19 nt, Artificial Sequence
  Description of Artificial Sequence: Synthetic oligonucleotide
accaguaaauuaccaggac

SEQ ID NO: 2004544 - RNA, 19 nt, Artificial Sequence
  Description of Artificial Sequence: Synthetic oligonucleotide
gaacaaaacucaagagugg

SEQ ID NO: 2004545 - RNA, 19 nt, Artificial Sequence
  Description of Artificial Sequence: Synthetic oligonucleotide
aaaagggagaccuccugau

SEQ ID NO: 2004546 - RNA, 19 nt, Artificial Sequence
  Description of Artificial Sequence: Synthetic oligonucleotide
acaagcaggagaacaaaac

SEQ ID NO: 2004547 - RNA, 19 nt, Artificial Sequence
  Description of Artificial Sequence: Synthetic oligonucleotide
aagcggcuaggacaccucc

SEQ ID NO: 2004548 - RNA, 19 nt, Artificial Sequence
  Description of Artificial Sequence: Synthetic oligonucleotide
uuaaacaggguugucuugu

SEQ ID NO: 2004549 - RNA, 19 nt, Artificial Sequence
  Description of Artificial Sequence: Synthetic oligonucleotide
gacuucagcaggaagcucc

SEQ ID NO: 2004550 - RNA, 19 nt, Artificial Sequence
  Description of Artificial Sequence: Synthetic oligonucleotide
ucuugucucccaaaaggga

SEQ ID NO: 2004551 - RNA, 19 nt, Artificial Sequence
  Description of Artificial Sequence: Synthetic oligonucleotide
gaagaacccaguuugggaa

SEQ ID NO: 2004552 - RNA, 19 nt, Artificial Sequence
  Description of Artificial Sequence: Synthetic oligonucleotide
gaugguucagggugcaaug

SEQ ID NO: 2004553 - RNA, 19 nt, Artificial Sequence
  Description of Artificial Sequence: Synthetic oligonucleotide
cugcaaauggcuuugcuca

SEQ ID NO: 2004554 - RNA, 19 nt, Artificial Sequence
  Description of Artificial Sequence: Synthetic oligonucleotide
agaggugacagagaccagg

SEQ ID NO: 2004555 - RNA, 19 nt, Artificial Sequence
  Description of Artificial Sequence: Synthetic oligonucleotide
gacagggaaacuugcgacc

SEQ ID NO: 2004556 - RNA, 19 nt, Artificial Sequence
  Description of Artificial Sequence: Synthetic oligonucleotide
guagguuuaaauaagcaua

SEQ ID NO: 2004557 - RNA, 19 nt, Artificial Sequence
  Description of Artificial Sequence: Synthetic oligonucleotide
uucuccgucuuuaaauagu

SEQ ID NO: 2004558 - RNA, 19 nt, Artificial Sequence
  Description of Artificial Sequence: Synthetic oligonucleotide
ugaaucuuccucacuugcu

SEQ ID NO: 2004559 - RNA, 19 nt, Artificial Sequence
  Description of Artificial Sequence: Synthetic oligonucleotide
aacauccagcuguagcaug

SEQ ID NO: 2004560 - RNA, 19 nt, Artificial Sequence
  Description of Artificial Sequence: Synthetic oligonucleotide
uggcgggaugcccagagag

SEQ ID NO: 2004561 - RNA, 19 nt, Artificial Sequence
  Description of Artificial Sequence: Synthetic oligonucleotide
uuggguagaggaagagucc

SEQ ID NO: 2004562 - RNA, 19 nt, Artificial Sequence
  Description of Artificial Sequence: Synthetic oligonucleotide
cuugguauuuaccuaucuc

SEQ ID NO: 2004563 - RNA, 19 nt, Artificial Sequence
  Description of Artificial Sequence: Synthetic oligonucleotide
cugaaucuuccucacuugc

SEQ ID NO: 2004564 - RNA, 19 nt, Artificial Sequence
  Description of Artificial Sequence: Synthetic oligonucleotide
ggagaacaaaacucaagag

SEQ ID NO: 2004565 - RNA, 19 nt, Artificial Sequence
  Description of Artificial Sequence: Synthetic oligonucleotide
uuccucacuugcuccaagg

SEQ ID NO: 2004566 - RNA, 19 nt, Artificial Sequence
  Description of Artificial Sequence: Synthetic oligonucleotide
ugggaagcggcuaggacac

SEQ ID NO: 2004567 - RNA, 19 nt, Artificial Sequence
  Description of Artificial Sequence: Synthetic oligonucleotide
uacaagcaggagaacaaaa

SEQ ID NO: 2004568 - RNA, 19 nt, Artificial Sequence
  Description of Artificial Sequence: Synthetic oligonucleotide
gaugcccagagaguggccg

SEQ ID NO: 2004569 - RNA, 19 nt, Artificial Sequence
  Description of Artificial Sequence: Synthetic oligonucleotide
ugguucagggugcaaugag

SEQ ID NO: 2004570 - RNA, 19 nt, Artificial Sequence
  Description of Artificial Sequence: Synthetic oligonucleotide
gcugagaggagccuggcgg

SEQ ID NO: 2004571 - RNA, 19 nt, Artificial Sequence
  Description of Artificial Sequence: Synthetic oligonucleotide
ucuucuccgucuuuaaaua

SEQ ID NO: 2004572 - RNA, 19 nt, Artificial Sequence
  Description of Artificial Sequence: Synthetic oligonucleotide
gaguccacuguggaguugg

SEQ ID NO: 2004573 - RNA, 19 nt, Artificial Sequence
  Description of Artificial Sequence: Synthetic oligonucleotide
aggaaucaauacuugguau

SEQ ID NO: 2004574 - RNA, 19 nt, Artificial Sequence
  Description of Artificial Sequence: Synthetic oligonucleotide
caauacuugguauuuaccu

SEQ ID NO: 2004575 - RNA, 19 nt, Artificial Sequence
  Description of Artificial Sequence: Synthetic oligonucleotide
cagcuuguaaguagcacac

SEQ ID NO: 2004576 - RNA, 19 nt, Artificial Sequence
  Description of Artificial Sequence: Synthetic oligonucleotide
ggggaaaugccuguuaggg

SEQ ID NO: 2004577 - RNA, 19 nt, Artificial Sequence
  Description of Artificial Sequence: Synthetic oligonucleotide
ucuccgucuuuaaauagua

SEQ ID NO: 2004578 - RNA, 19 nt, Artificial Sequence
  Description of Artificial Sequence: Synthetic oligonucleotide
uugucucccaaaagggaga

SEQ ID NO: 2004579 - RNA, 19 nt, Artificial Sequence
  Description of Artificial Sequence: Synthetic oligonucleotide
cuucuccgucuuuaaauag

SEQ ID NO: 2004580 - RNA, 19 nt, Artificial Sequence
  Description of Artificial Sequence: Synthetic oligonucleotide
agccucaggaaucaauacu

SEQ ID NO: 2004581 - RNA, 19 nt, Artificial Sequence
  Description of Artificial Sequence: Synthetic oligonucleotide
aaaccuggcugccucugcu

SEQ ID NO: 2004582 - RNA, 19 nt, Artificial Sequence
  Description of Artificial Sequence: Synthetic oligonucleotide
aggggaaaugccuguuagg

SEQ ID NO: 2004583 - RNA, 19 nt, Artificial Sequence
  Description of Artificial Sequence: Synthetic oligonucleotide
cuccguuuucucuucuccg

SEQ ID NO: 2004584 - RNA, 19 nt, Artificial Sequence
  Description of Artificial Sequence: Synthetic oligonucleotide
uguggaguuggcucaggca

SEQ ID NO: 2004585 - RNA, 19 nt, Artificial Sequence
  Description of Artificial Sequence: Synthetic oligonucleotide
agggccuagaagcuuggag

SEQ ID NO: 2004586 - RNA, 19 nt, Artificial Sequence
  Description of Artificial Sequence: Synthetic oligonucleotide
uucaucuauggggacagac

SEQ ID NO: 2004587 - RNA, 19 nt, Artificial Sequence
  Description of Artificial Sequence: Synthetic oligonucleotide
uuugucaguugcagggccu

SEQ ID NO: 2004588 - RNA, 19 nt, Artificial Sequence
  Description of Artificial Sequence: Synthetic oligonucleotide
agagcuuguccucacugcu

SEQ ID NO: 2004589 - RNA, 19 nt, Artificial Sequence
  Description of Artificial Sequence: Synthetic oligonucleotide
agcaggagaacaaaacuca

SEQ ID NO: 2004590 - RNA, 19 nt, Artificial Sequence
  Description of Artificial Sequence: Synthetic oligonucleotide
ccaguaaauuaccaggacc

SEQ ID NO: 2004591 - RNA, 19 nt, Artificial Sequence
  Description of Artificial Sequence: Synthetic oligonucleotide
aaacucaagaguggagaga

SEQ ID NO: 2004592 - RNA, 19 nt, Artificial Sequence
  Description of Artificial Sequence: Synthetic oligonucleotide
caaaacucaagaguggaga

SEQ ID NO: 2004593 - RNA, 19 nt, Artificial Sequence
  Description of Artificial Sequence: Synthetic oligonucleotide
ucccaaaagggagaccucc

SEQ ID NO: 2004594 - RNA, 19 nt, Artificial Sequence
  Description of Artificial Sequence: Synthetic oligonucleotide
guagcauguccacgggugg

SEQ ID NO: 2004595 - RNA, 19 nt, Artificial Sequence
  Description of Artificial Sequence: Synthetic oligonucleotide
guagaggaagaguccacug

SEQ ID NO: 2004596 - RNA, 19 nt, Artificial Sequence
  Description of Artificial Sequence: Synthetic oligonucleotide
ggcucaggcacuuugucag

SEQ ID NO: 2004597 - RNA, 19 nt, Artificial Sequence
  Description of Artificial Sequence: Synthetic oligonucleotide
gugggaagcggcuaggaca

SEQ ID NO: 2004598 - RNA, 19 nt, Artificial Sequence
  Description of Artificial Sequence: Synthetic oligonucleotide
ugcaaauggcuuugcucag

SEQ ID NO: 2004599 - RNA, 19 nt, Artificial Sequence
  Description of Artificial Sequence: Synthetic oligonucleotide
cacacaacugcuccagcag

SEQ ID NO: 2004600 - RNA, 19 nt, Artificial Sequence
  Description of Artificial Sequence: Synthetic oligonucleotide
gacacaagagcuuguccuc

SEQ ID NO: 2004601 - RNA, 19 nt, Artificial Sequence
  Description of Artificial Sequence: Synthetic oligonucleotide
uguccagagugcacugugc

SEQ ID NO: 2004602 - RNA, 19 nt, Artificial Sequence
  Description of Artificial Sequence: Synthetic oligonucleotide
uccguuuucucuucuccgu

SEQ ID NO: 2004603 - RNA, 19 nt, Artificial Sequence
  Description of Artificial Sequence: Synthetic oligonucleotide
gggccuagaagcuuggagc

SEQ ID NO: 2004604 - RNA, 19 nt, Artificial Sequence
  Description of Artificial Sequence: Synthetic oligonucleotide
ugccaugccuucaucuaug

SEQ ID NO: 2004605 - RNA, 19 nt, Artificial Sequence
  Description of Artificial Sequence: Synthetic oligonucleotide
aaguagcacacaacugcuc

SEQ ID NO: 2004606 - RNA, 19 nt, Artificial Sequence
  Description of Artificial Sequence: Synthetic oligonucleotide
uaggacaccucccgcccgg

SEQ ID NO: 2004607 - RNA, 19 nt, Artificial Sequence
  Description of Artificial Sequence: Synthetic oligonucleotide
gaagaguccacuguggagu

SEQ ID NO: 2004608 - RNA, 19 nt, Artificial Sequence
  Description of Artificial Sequence: Synthetic oligonucleotide
aggaagaguccacugugga

SEQ ID NO: 2004609 - RNA, 19 nt, Artificial Sequence
  Description of Artificial Sequence: Synthetic oligonucleotide
acaaaacucaagaguggag

SEQ ID NO: 2004610 - RNA, 19 nt, Artificial Sequence
  Description of Artificial Sequence: Synthetic oligonucleotide
uggagcagccucaggaauc

SEQ ID NO: 2004611 - RNA, 19 nt, Artificial Sequence
  Description of Artificial Sequence: Synthetic oligonucleotide
cuugcgaccuggcugacca

SEQ ID NO: 2004612 - RNA, 19 nt, Artificial Sequence
  Description of Artificial Sequence: Synthetic oligonucleotide
agcagcggcugagaggagc

SEQ ID NO: 2004613 - RNA, 19 nt, Artificial Sequence
  Description of Artificial Sequence: Synthetic oligonucleotide
uguaaccaccacagagcug

SEQ ID NO: 2004614 - RNA, 19 nt, Artificial Sequence
  Description of Artificial Sequence: Synthetic oligonucleotide
accagagcaagggaugaag

SEQ ID NO: 2004615 - RNA, 19 nt, Artificial Sequence
  Description of Artificial Sequence: Synthetic oligonucleotide
uggcccuuuguaaccacca

SEQ ID NO: 2004616 - RNA, 19 nt, Artificial Sequence
  Description of Artificial Sequence: Synthetic oligonucleotide
caggcacuuugucaguugc

SEQ ID NO: 2004617 - RNA, 19 nt, Artificial Sequence
  Description of Artificial Sequence: Synthetic oligonucleotide
agcaagggaugaagaaccc

SEQ ID NO: 2004618 - RNA, 19 nt, Artificial Sequence
  Description of Artificial Sequence: Synthetic oligonucleotide
ugaagguuggcagggugcu

SEQ ID NO: 2004619 - RNA, 19 nt, Artificial Sequence
  Description of Artificial Sequence: Synthetic oligonucleotide
caggaccaaaccuggcugc

SEQ ID NO: 2004620 - RNA, 19 nt, Artificial Sequence
  Description of Artificial Sequence: Synthetic oligonucleotide
agaccaggggaauggccuc

SEQ ID NO: 2004621 - RNA, 19 nt, Artificial Sequence
  Description of Artificial Sequence: Synthetic oligonucleotide
uccagagugcacugugcca

SEQ ID NO: 2004622 - RNA, 19 nt, Artificial Sequence
  Description of Artificial Sequence: Synthetic oligonucleotide
aggaccaaaccuggcugcc

SEQ ID NO: 2004623 - RNA, 19 nt, Artificial Sequence
  Description of Artificial Sequence: Synthetic oligonucleotide
cucacuugcuccaaggacu

SEQ ID NO: 2004624 - RNA, 19 nt, Artificial Sequence
  Description of Artificial Sequence: Synthetic oligonucleotide
agaagggccuagaagcuug

SEQ ID NO: 2004625 - RNA, 19 nt, Artificial Sequence
  Description of Artificial Sequence: Synthetic oligonucleotide
ggaagaguccacuguggag

SEQ ID NO: 2004626 - RNA, 19 nt, Artificial Sequence
  Description of Artificial Sequence: Synthetic oligonucleotide
auuuaccuaucucccucca

SEQ ID NO: 2004627 - RNA, 19 nt, Artificial Sequence
  Description of Artificial Sequence: Synthetic oligonucleotide
cacugcuacaagcaggaga

SEQ ID NO: 2004628 - RNA, 19 nt, Artificial Sequence
  Description of Artificial Sequence: Synthetic oligonucleotide
acagggaaacuugcgaccu

SEQ ID NO: 2004629 - RNA, 19 nt, Artificial Sequence
  Description of Artificial Sequence: Synthetic oligonucleotide
uagcauguccacggguggg

SEQ ID NO: 2004630 - RNA, 19 nt, Artificial Sequence
  Description of Artificial Sequence: Synthetic oligonucleotide
aggccuuggguagaggaag

SEQ ID NO: 2004631 - RNA, 19 nt, Artificial Sequence
  Description of Artificial Sequence: Synthetic oligonucleotide
cuccgucuuuaaauaguag

SEQ ID NO: 2004632 - RNA, 19 nt, Artificial Sequence
  Description of Artificial Sequence: Synthetic oligonucleotide
ugcugaggccccugaaaug

SEQ ID NO: 2004633 - RNA, 19 nt, Artificial Sequence
  Description of Artificial Sequence: Synthetic oligonucleotide
uccgggccaaggcagggug

SEQ ID NO: 2004634 - RNA, 19 nt, Artificial Sequence
  Description of Artificial Sequence: Synthetic oligonucleotide
uggaguuggcucaggcacu

SEQ ID NO: 2004635 - RNA, 19 nt, Artificial Sequence
  Description of Artificial Sequence: Synthetic oligonucleotide
caaaagggagaccuccuga

SEQ ID NO: 2004636 - RNA, 19 nt, Artificial Sequence
  Description of Artificial Sequence: Synthetic oligonucleotide
aggacuucagcaggaagcu

SEQ ID NO: 2004637 - RNA, 19 nt, Artificial Sequence
  Description of Artificial Sequence: Synthetic oligonucleotide
cuagaccagaugguucagg

SEQ ID NO: 2004638 - RNA, 19 nt, Artificial Sequence
  Description of Artificial Sequence: Synthetic oligonucleotide
uguggccgagaggugacag

SEQ ID NO: 2004639 - RNA, 19 nt, Artificial Sequence
  Description of Artificial Sequence: Synthetic oligonucleotide
uaaacaggguugucuuguc

SEQ ID NO: 2004640 - RNA, 19 nt, Artificial Sequence
  Description of Artificial Sequence: Synthetic oligonucleotide
gccuguuagggccugcagg

SEQ ID NO: 2004641 - RNA, 19 nt, Artificial Sequence
  Description of Artificial Sequence: Synthetic oligonucleotide
cuagaagcuuggagcuccg

SEQ ID NO: 2004642 - RNA, 19 nt, Artificial Sequence
  Description of Artificial Sequence: Synthetic oligonucleotide
ugcuucaugccaugccuuc

SEQ ID NO: 2004643 - RNA, 19 nt, Artificial Sequence
  Description of Artificial Sequence: Synthetic oligonucleotide
uggagcuccguuuucucuu

SEQ ID NO: 2004644 - RNA, 19 nt, Artificial Sequence
  Description of Artificial Sequence: Synthetic oligonucleotide
gugaagguuggcagggugc

SEQ ID NO: 2004645 - RNA, 19 nt, Artificial Sequence
  Description of Artificial Sequence: Synthetic oligonucleotide
cagacagggaaacuugcga

SEQ ID NO: 2004646 - RNA, 19 nt, Artificial Sequence
  Description of Artificial Sequence: Synthetic oligonucleotide
gaccaaaccuggcugccuc

SEQ ID NO: 2004647 - RNA, 19 nt, Artificial Sequence
  Description of Artificial Sequence: Synthetic oligonucleotide
uguccuguccagagugcac

SEQ ID NO: 2004648 - RNA, 19 nt, Artificial Sequence
  Description of Artificial Sequence: Synthetic oligonucleotide
agaugguucagggugcaau

SEQ ID NO: 2004649 - RNA, 19 nt, Artificial Sequence
  Description of Artificial Sequence: Synthetic oligonucleotide
agcauguccacgggugggg

SEQ ID NO: 2004650 - RNA, 19 nt, Artificial Sequence
  Description of Artificial Sequence: Synthetic oligonucleotide
uuugggaacacuggcuguu

SEQ ID NO: 2004651 - RNA, 19 nt, Artificial Sequence
  Description of Artificial Sequence: Synthetic oligonucleotide
caggaaucaauacuuggua

SEQ ID NO: 2004652 - RNA, 19 nt, Artificial Sequence
  Description of Artificial Sequence: Synthetic oligonucleotide
cuguggaguuggcucaggc

SEQ ID NO: 2004653 - RNA, 19 nt, Artificial Sequence
  Description of Artificial Sequence: Synthetic oligonucleotide
uuggcaacauccagcugua

SEQ ID NO: 2004654 - RNA, 19 nt, Artificial Sequence
  Description of Artificial Sequence: Synthetic oligonucleotide
ucaguugcagggccuggau

SEQ ID NO: 2004655 - RNA, 19 nt, Artificial Sequence
  Description of Artificial Sequence: Synthetic oligonucleotide
ccaguuugggaacacuggc

SEQ ID NO: 2004656 - RNA, 19 nt, Artificial Sequence
  Description of Artificial Sequence: Synthetic oligonucleotide
aucuauggggacagacagg

SEQ ID NO: 2004657 - RNA, 19 nt, Artificial Sequence
  Description of Artificial Sequence: Synthetic oligonucleotide
uugcucaggccuagaccag

SEQ ID NO: 2004658 - RNA, 19 nt, Artificial Sequence
  Description of Artificial Sequence: Synthetic oligonucleotide
gcuuguaaguagcacacaa

SEQ ID NO: 2004659 - RNA, 19 nt, Artificial Sequence
  Description of Artificial Sequence: Synthetic oligonucleotide
aguaaauuaccaggaccaa

SEQ ID NO: 2004660 - RNA, 19 nt, Artificial Sequence
  Description of Artificial Sequence: Synthetic oligonucleotide
acaagagcuuguccucacu

SEQ ID NO: 2004661 - RNA, 19 nt, Artificial Sequence
  Description of Artificial Sequence: Synthetic oligonucleotide
cccaguuugggaacacugg

SEQ ID NO: 2004662 - RNA, 19 nt, Artificial Sequence
  Description of Artificial Sequence: Synthetic oligonucleotide
gaagcuuggagcuccguuu

SEQ ID NO: 2004663 - RNA, 19 nt, Artificial Sequence
  Description of Artificial Sequence: Synthetic oligonucleotide
augccaugccuucaucuau

SEQ ID NO: 2004664 - RNA, 19 nt, Artificial Sequence
  Description of Artificial Sequence: Synthetic oligonucleotide
cuaggacaccucccgcccg

SEQ ID NO: 2004665 - RNA, 19 nt, Artificial Sequence
  Description of Artificial Sequence: Synthetic oligonucleotide
gaagggccuagaagcuugg

SEQ ID NO: 2004666 - RNA, 19 nt, Artificial Sequence
  Description of Artificial Sequence: Synthetic oligonucleotide
cacagcuuguaaguagcac

SEQ ID NO: 2004667 - RNA, 19 nt, Artificial Sequence
  Description of Artificial Sequence: Synthetic oligonucleotide
ggacacaagagcuuguccu

SEQ ID NO: 2004668 - RNA, 19 nt, Artificial Sequence
  Description of Artificial Sequence: Synthetic oligonucleotide
ggugaagguuggcagggug

SEQ ID NO: 2004669 - RNA, 19 nt, Artificial Sequence
  Description of Artificial Sequence: Synthetic oligonucleotide
aguggagagaagggccuag

SEQ ID NO: 2004670 - RNA, 19 nt, Artificial Sequence
  Description of Artificial Sequence: Synthetic oligonucleotide
uaccaggaccaaaccuggc

SEQ ID NO: 2004671 - RNA, 19 nt, Artificial Sequence
  Description of Artificial Sequence: Synthetic oligonucleotide
acccaguuugggaacacug

SEQ ID NO: 2004672 - RNA, 19 nt, Artificial Sequence
  Description of Artificial Sequence: Synthetic oligonucleotide
ccuagaagcuuggagcucc

SEQ ID NO: 2004673 - RNA, 19 nt, Artificial Sequence
  Description of Artificial Sequence: Synthetic oligonucleotide
agcggcuaggacaccuccc

SEQ ID NO: 2004674 - RNA, 19 nt, Artificial Sequence
  Description of Artificial Sequence: Synthetic oligonucleotide
cacaagagcuuguccucac

SEQ ID NO: 2004675 - RNA, 19 nt, Artificial Sequence
  Description of Artificial Sequence: Synthetic oligonucleotide
acuggcuguuuaaauauua

SEQ ID NO: 2004676 - RNA, 19 nt, Artificial Sequence
  Description of Artificial Sequence: Synthetic oligonucleotide
gaggacacaagagcuuguc

SEQ ID NO: 2004677 - RNA, 19 nt, Artificial Sequence
  Description of Artificial Sequence: Synthetic oligonucleotide
gcggcuaggacaccucccg

SEQ ID NO: 2004678 - RNA, 19 nt, Artificial Sequence
  Description of Artificial Sequence: Synthetic oligonucleotide
ggcacagcuuguaaguagc

SEQ ID NO: 2004679 - RNA, 19 nt, Artificial Sequence
  Description of Artificial Sequence: Synthetic oligonucleotide
aggguugucuugucuccca

SEQ ID NO: 2004680 - RNA, 19 nt, Artificial Sequence
  Description of Artificial Sequence: Synthetic oligonucleotide
cagagcaagggaugaagaa

SEQ ID NO: 2004681 - RNA, 19 nt, Artificial Sequence
  Description of Artificial Sequence: Synthetic oligonucleotide
cagcccagcaaggaccucc

SEQ ID NO: 2004682 - RNA, 19 nt, Artificial Sequence
  Description of Artificial Sequence: Synthetic oligonucleotide
gguucagggugcaaugagc

SEQ ID NO: 2004683 - RNA, 19 nt, Artificial Sequence
  Description of Artificial Sequence: Synthetic oligonucleotide
ggaagcuccgggccaaggc

SEQ ID NO: 2004684 - RNA, 19 nt, Artificial Sequence
  Description of Artificial Sequence: Synthetic oligonucleotide
cucacaguggcccuuugua

SEQ ID NO: 2004685 - RNA, 19 nt, Artificial Sequence
  Description of Artificial Sequence: Synthetic oligonucleotide
acuugcgaccuggcugacc

SEQ ID NO: 2004686 - RNA, 19 nt, Artificial Sequence
  Description of Artificial Sequence: Synthetic oligonucleotide
ggguggcacagcuuguaag

SEQ ID NO: 2004687 - RNA, 19 nt, Artificial Sequence
  Description of Artificial Sequence: Synthetic oligonucleotide
ggcuaggacaccucccgcc

SEQ ID NO: 2004688 - RNA, 19 nt, Artificial Sequence
  Description of Artificial Sequence: Synthetic oligonucleotide
gagugcacugugccacagc

SEQ ID NO: 2004689 - RNA, 19 nt, Artificial Sequence
  Description of Artificial Sequence: Synthetic oligonucleotide
gugacagagaccaggggaa

SEQ ID NO: 2004690 - RNA, 19 nt, Artificial Sequence
  Description of Artificial Sequence: Synthetic oligonucleotide
gagcugggugccuggagca

SEQ ID NO: 2004691 - RNA, 19 nt, Artificial Sequence
  Description of Artificial Sequence: Synthetic oligonucleotide
gaguuccuggucugaaucu

SEQ ID NO: 2004692 - RNA, 19 nt, Artificial Sequence
  Description of Artificial Sequence: Synthetic oligonucleotide
augguucagggugcaauga

SEQ ID NO: 2004693 - RNA, 19 nt, Artificial Sequence
  Description of Artificial Sequence: Synthetic oligonucleotide
gcuaggacaccucccgccc

SEQ ID NO: 2004694 - RNA, 19 nt, Artificial Sequence
  Description of Artificial Sequence: Synthetic oligonucleotide
cucugcaggugggaagcgg

SEQ ID NO: 2004695 - RNA, 19 nt, Artificial Sequence
  Description of Artificial Sequence: Synthetic oligonucleotide
cuaucucccuccagcccug

SEQ ID NO: 2004696 - RNA, 19 nt, Artificial Sequence
  Description of Artificial Sequence: Synthetic oligonucleotide
caugccaugccuucaucua

SEQ ID NO: 2004697 - RNA, 19 nt, Artificial Sequence
  Description of Artificial Sequence: Synthetic oligonucleotide
cuuguccucacugcuacaa

SEQ ID NO: 2004698 - RNA, 19 nt, Artificial Sequence
  Description of Artificial Sequence: Synthetic oligonucleotide
ccucuuguccuguccagag

SEQ ID NO: 2004699 - RNA, 19 nt, Artificial Sequence
  Description of Artificial Sequence: Synthetic oligonucleotide
accaaaccuggcugccucu

SEQ ID NO: 2004700 - RNA, 19 nt, Artificial Sequence
  Description of Artificial Sequence: Synthetic oligonucleotide
ccagcaaggaccuccaaaa

SEQ ID NO: 2004701 - RNA, 19 nt, Artificial Sequence
  Description of Artificial Sequence: Synthetic oligonucleotide
aggaagcucugcagguggg

SEQ ID NO: 2004702 - RNA, 19 nt, Artificial Sequence
  Description of Artificial Sequence: Synthetic oligonucleotide
ccucacuugcuccaaggac

SEQ ID NO: 2004703 - RNA, 19 nt, Artificial Sequence
  Description of Artificial Sequence: Synthetic oligonucleotide
caccacagagcugggugcc

SEQ ID NO: 2004704 - RNA, 19 nt, Artificial Sequence
  Description of Artificial Sequence: Synthetic oligonucleotide
ugcccagagaguggccgag

SEQ ID NO: 2004705 - RNA, 19 nt, Artificial Sequence
  Description of Artificial Sequence: Synthetic oligonucleotide
cagggugcaaugagcuguc

SEQ ID NO: 2004706 - RNA, 19 nt, Artificial Sequence
  Description of Artificial Sequence: Synthetic oligonucleotide
ucccgcccggcgcuggaag

SEQ ID NO: 2004707 - RNA, 19 nt, Artificial Sequence
  Description of Artificial Sequence: Synthetic oligonucleotide
gcaggugggaagcggcuag

SEQ ID NO: 2004708 - RNA, 19 nt, Artificial Sequence
  Description of Artificial Sequence: Synthetic oligonucleotide
cgagaggugacagagacca

SEQ ID NO: 2004709 - RNA, 19 nt, Artificial Sequence
  Description of Artificial Sequence: Synthetic oligonucleotide
gguauuuaccuaucucccu

SEQ ID NO: 2004710 - RNA, 19 nt, Artificial Sequence
  Description of Artificial Sequence: Synthetic oligonucleotide
gguggcacagcuuguaagu

SEQ ID NO: 2004711 - RNA, 19 nt, Artificial Sequence
  Description of Artificial Sequence: Synthetic oligonucleotide
ccagagugcacugugccac

SEQ ID NO: 2004712 - RNA, 19 nt, Artificial Sequence
  Description of Artificial Sequence: Synthetic oligonucleotide
gcuuugcucaggccuagac

SEQ ID NO: 2004713 - RNA, 19 nt, Artificial Sequence
  Description of Artificial Sequence: Synthetic oligonucleotide
gauggagcagcggcugaga

SEQ ID NO: 2004714 - RNA, 19 nt, Artificial Sequence
  Description of Artificial Sequence: Synthetic oligonucleotide
ucacugcuacaagcaggag

SEQ ID NO: 2004715 - RNA, 19 nt, Artificial Sequence
  Description of Artificial Sequence: Synthetic oligonucleotide
gguggcaaaguuggcaaca

SEQ ID NO: 2004716 - RNA, 19 nt, Artificial Sequence
  Description of Artificial Sequence: Synthetic oligonucleotide
uccgaguuccuggucugaa

SEQ ID NO: 2004717 - RNA, 19 nt, Artificial Sequence
  Description of Artificial Sequence: Synthetic oligonucleotide
ccaaaagggagaccuccug

SEQ ID NO: 2004718 - RNA, 19 nt, Artificial Sequence
  Description of Artificial Sequence: Synthetic oligonucleotide
cucccaaaagggagaccuc

SEQ ID NO: 2004719 - RNA, 19 nt, Artificial Sequence
  Description of Artificial Sequence: Synthetic oligonucleotide
ugacagagaccaggggaau

SEQ ID NO: 2004720 - RNA, 19 nt, Artificial Sequence
  Description of Artificial Sequence: Synthetic oligonucleotide
ggugggaagcggcuaggac

SEQ ID NO: 2004721 - RNA, 19 nt, Artificial Sequence
  Description of Artificial Sequence: Synthetic oligonucleotide
uggcuuugcucaggccuag

SEQ ID NO: 2004722 - RNA, 19 nt, Artificial Sequence
  Description of Artificial Sequence: Synthetic oligonucleotide
agcuuguaaguagcacaca

SEQ ID NO: 2004723 - RNA, 19 nt, Artificial Sequence
  Description of Artificial Sequence: Synthetic oligonucleotide
cuacaagcaggagaacaaa

SEQ ID NO: 2004724 - RNA, 19 nt, Artificial Sequence
  Description of Artificial Sequence: Synthetic oligonucleotide
cucaggccuagaccagaug

SEQ ID NO: 2004725 - RNA, 19 nt, Artificial Sequence
  Description of Artificial Sequence: Synthetic oligonucleotide
caguuugggaacacuggcu

SEQ ID NO: 2004726 - RNA, 19 nt, Artificial Sequence
  Description of Artificial Sequence: Synthetic oligonucleotide
ccaccacagagcugggugc

SEQ ID NO: 2004727 - RNA, 19 nt, Artificial Sequence
  Description of Artificial Sequence: Synthetic oligonucleotide
guggcccuuuguaaccacc

SEQ ID NO: 2004728 - RNA, 19 nt, Artificial Sequence
  Description of Artificial Sequence: Synthetic oligonucleotide
gcgggaugcccagagagug

SEQ ID NO: 2004729 - RNA, 19 nt, Artificial Sequence
  Description of Artificial Sequence: Synthetic oligonucleotide
guuugggaacacuggcugu

SEQ ID NO: 2004730 - RNA, 19 nt, Artificial Sequence
  Description of Artificial Sequence: Synthetic oligonucleotide
aaccugcugcaaauggcuu

SEQ ID NO: 2004731 - RNA, 19 nt, Artificial Sequence
  Description of Artificial Sequence: Synthetic oligonucleotide
aagggccuagaagcuugga

SEQ ID NO: 2004732 - RNA, 19 nt, Artificial Sequence
  Description of Artificial Sequence: Synthetic oligonucleotide
uccggguggcacagcuugu

SEQ ID NO: 2004733 - RNA, 19 nt, Artificial Sequence
  Description of Artificial Sequence: Synthetic oligonucleotide
caaggcaggguguggccga

SEQ ID NO: 2004734 - RNA, 19 nt, Artificial Sequence
  Description of Artificial Sequence: Synthetic oligonucleotide
gaagcggcuaggacaccuc

SEQ ID NO: 2004735 - RNA, 19 nt, Artificial Sequence
  Description of Artificial Sequence: Synthetic oligonucleotide
ccgucuuuaaauaguaggu

SEQ ID NO: 2004736 - RNA, 19 nt, Artificial Sequence
  Description of Artificial Sequence: Synthetic oligonucleotide
gagaggugacagagaccag

SEQ ID NO: 2004737 - RNA, 19 nt, Artificial Sequence
  Description of Artificial Sequence: Synthetic oligonucleotide
gaaaugccuguuagggccu

SEQ ID NO: 2004738 - RNA, 19 nt, Artificial Sequence
  Description of Artificial Sequence: Synthetic oligonucleotide
uugcgaccuggcugaccag

SEQ ID NO: 2004739 - RNA, 19 nt, Artificial Sequence
  Description of Artificial Sequence: Synthetic oligonucleotide
aggccuagaccagaugguu

SEQ ID NO: 2004740 - RNA, 19 nt, Artificial Sequence
  Description of Artificial Sequence: Synthetic oligonucleotide
gggugcaaugagcugucuc

SEQ ID NO: 2004741 - RNA, 19 nt, Artificial Sequence
  Description of Artificial Sequence: Synthetic oligonucleotide
agccuggcgggaugcccag

SEQ ID NO: 2004742 - RNA, 19 nt, Artificial Sequence
  Description of Artificial Sequence: Synthetic oligonucleotide
ggccuagaagcuuggagcu

SEQ ID NO: 2004743 - RNA, 19 nt, Artificial Sequence
  Description of Artificial Sequence: Synthetic oligonucleotide
ggaacacuggcuguuuaaa

SEQ ID NO: 2004744 - RNA, 19 nt, Artificial Sequence
  Description of Artificial Sequence: Synthetic oligonucleotide
ugcaggugggaagcggcua

SEQ ID NO: 2004745 - RNA, 19 nt, Artificial Sequence
  Description of Artificial Sequence: Synthetic oligonucleotide
uagaagcuuggagcuccgu

SEQ ID NO: 2004746 - RNA, 19 nt, Artificial Sequence
  Description of Artificial Sequence: Synthetic oligonucleotide
uggcaacauccagcuguag

SEQ ID NO: 2004747 - RNA, 19 nt, Artificial Sequence
  Description of Artificial Sequence: Synthetic oligonucleotide
uugggaacacuggcuguuu

SEQ ID NO: 2004748 - RNA, 19 nt, Artificial Sequence
  Description of Artificial Sequence: Synthetic oligonucleotide
gaguggccgagcagcacca

SEQ ID NO: 2004749 - RNA, 19 nt, Artificial Sequence
  Description of Artificial Sequence: Synthetic oligonucleotide
gggaacacuggcuguuuaa

SEQ ID NO: 2004750 - RNA, 19 nt, Artificial Sequence
  Description of Artificial Sequence: Synthetic oligonucleotide
ggaaacuugcgaccuggcu

SEQ ID NO: 2004751 - RNA, 19 nt, Artificial Sequence
  Description of Artificial Sequence: Synthetic oligonucleotide
agaguccacuguggaguug

SEQ ID NO: 2004752 - RNA, 19 nt, Artificial Sequence
  Description of Artificial Sequence: Synthetic oligonucleotide
gaagguuggcagggugcuc

SEQ ID NO: 2004753 - RNA, 19 nt, Artificial Sequence
  Description of Artificial Sequence: Synthetic oligonucleotide
aggcacuuugucaguugca

SEQ ID NO: 2004754 - RNA, 19 nt, Artificial Sequence
  Description of Artificial Sequence: Synthetic oligonucleotide
ccuggcgggaugcccagag

SEQ ID NO: 2004755 - RNA, 19 nt, Artificial Sequence
  Description of Artificial Sequence: Synthetic oligonucleotide
cuauggggacagacaggga

SEQ ID NO: 2004756 - RNA, 19 nt, Artificial Sequence
  Description of Artificial Sequence: Synthetic oligonucleotide
ccagauggugguggcaaag

SEQ ID NO: 2004757 - RNA, 19 nt, Artificial Sequence
  Description of Artificial Sequence: Synthetic oligonucleotide
gcagccucaggaaucaaua

SEQ ID NO: 2004758 - RNA, 19 nt, Artificial Sequence
  Description of Artificial Sequence: Synthetic oligonucleotide
gcuccgaguuccuggucug

SEQ ID NO: 2004759 - RNA, 19 nt, Artificial Sequence
  Description of Artificial Sequence: Synthetic oligonucleotide
ggcccuuuguaaccaccac

SEQ ID NO: 2004760 - RNA, 19 nt, Artificial Sequence
  Description of Artificial Sequence: Synthetic oligonucleotide
gucucccaaaagggagacc

SEQ ID NO: 2004761 - RNA, 19 nt, Artificial Sequence
  Description of Artificial Sequence: Synthetic oligonucleotide
cagagugcacugugccaca

SEQ ID NO: 2004762 - RNA, 19 nt, Artificial Sequence
  Description of Artificial Sequence: Synthetic oligonucleotide
gagcuuguccucacugcua

SEQ ID NO: 2004763 - RNA, 19 nt, Artificial Sequence
  Description of Artificial Sequence: Synthetic oligonucleotide
gcaagggaugaagaaccca

SEQ ID NO: 2004764 - RNA, 19 nt, Artificial Sequence
  Description of Artificial Sequence: Synthetic oligonucleotide
ccgagaggugacagagacc

SEQ ID NO: 2004765 - RNA, 19 nt, Artificial Sequence
  Description of Artificial Sequence: Synthetic oligonucleotide
caggccuagaccagauggu

SEQ ID NO: 2004766 - RNA, 19 nt, Artificial Sequence
  Description of Artificial Sequence: Synthetic oligonucleotide
agggugcucugggugggcu

SEQ ID NO: 2004767 - RNA, 19 nt, Artificial Sequence
  Description of Artificial Sequence: Synthetic oligonucleotide
aguggccgagcagcaccag

SEQ ID NO: 2004768 - RNA, 19 nt, Artificial Sequence
  Description of Artificial Sequence: Synthetic oligonucleotide
ggacaccucccgcccggcg

SEQ ID NO: 2004769 - RNA, 19 nt, Artificial Sequence
  Description of Artificial Sequence: Synthetic oligonucleotide
ccguuuucucuucuccguc

SEQ ID NO: 2004770 - RNA, 19 nt, Artificial Sequence
  Description of Artificial Sequence: Synthetic oligonucleotide
gaccagagcaagggaugaa

SEQ ID NO: 2004771 - RNA, 19 nt, Artificial Sequence
  Description of Artificial Sequence: Synthetic oligonucleotide
ggccuagaccagaugguuc

SEQ ID NO: 2004772 - RNA, 19 nt, Artificial Sequence
  Description of Artificial Sequence: Synthetic oligonucleotide
guggcacagcuuguaagua

SEQ ID NO: 2004773 - RNA, 19 nt, Artificial Sequence
  Description of Artificial Sequence: Synthetic oligonucleotide
gggaaacuugcgaccuggc

SEQ ID NO: 2004774 - RNA, 19 nt, Artificial Sequence
  Description of Artificial Sequence: Synthetic oligonucleotide
gcaggagaacaaaacucaa

SEQ ID NO: 2004775 - RNA, 19 nt, Artificial Sequence
  Description of Artificial Sequence: Synthetic oligonucleotide
ccuaucucccuccagcccu

SEQ ID NO: 2004776 - RNA, 19 nt, Artificial Sequence
  Description of Artificial Sequence: Synthetic oligonucleotide
ggguguggccgagagguga

SEQ ID NO: 2004777 - RNA, 19 nt, Artificial Sequence
  Description of Artificial Sequence: Synthetic oligonucleotide
gguguggccgagaggugac

SEQ ID NO: 2004778 - RNA, 19 nt, Artificial Sequence
  Description of Artificial Sequence: Synthetic oligonucleotide
gagaagggccuagaagcuu

SEQ ID NO: 2004779 - RNA, 19 nt, Artificial Sequence
  Description of Artificial Sequence: Synthetic oligonucleotide
ggaagcucugcagguggga

SEQ ID NO: 2004780 - RNA, 19 nt, Artificial Sequence
  Description of Artificial Sequence: Synthetic oligonucleotide
cgggaugcccagagagugg

SEQ ID NO: 2004781 - RNA, 19 nt, Artificial Sequence
  Description of Artificial Sequence: Synthetic oligonucleotide
agggugcaaugagcugucu

SEQ ID NO: 2004782 - RNA, 19 nt, Artificial Sequence
  Description of Artificial Sequence: Synthetic oligonucleotide
cccagcaaggaccuccaaa

SEQ ID NO: 2004783 - RNA, 19 nt, Artificial Sequence
  Description of Artificial Sequence: Synthetic oligonucleotide
ggguugucuugucucccaa

SEQ ID NO: 2004784 - RNA, 19 nt, Artificial Sequence
  Description of Artificial Sequence: Synthetic oligonucleotide
ggaagcggcuaggacaccu

SEQ ID NO: 2004785 - RNA, 19 nt, Artificial Sequence
  Description of Artificial Sequence: Synthetic oligonucleotide
ccuuuguaaccaccacaga

SEQ ID NO: 2004786 - RNA, 19 nt, Artificial Sequence
  Description of Artificial Sequence: Synthetic oligonucleotide
cagcuccgaguuccugguc

SEQ ID NO: 2004787 - RNA, 19 nt, Artificial Sequence
  Description of Artificial Sequence: Synthetic oligonucleotide
gagcuccguuuucucuucu

SEQ ID NO: 2004788 - RNA, 19 nt, Artificial Sequence
  Description of Artificial Sequence: Synthetic oligonucleotide
cagggugcucugggugggc

SEQ ID NO: 2004789 - RNA, 19 nt, Artificial Sequence
  Description of Artificial Sequence: Synthetic oligonucleotide
cuggcgggaugcccagaga

SEQ ID NO: 2004790 - RNA, 19 nt, Artificial Sequence
  Description of Artificial Sequence: Synthetic oligonucleotide
gcucugggugggcugcaca

SEQ ID NO: 2004791 - RNA, 19 nt, Artificial Sequence
  Description of Artificial Sequence: Synthetic oligonucleotide
cacuggcuguuuaaauauu

SEQ ID NO: 2004792 - RNA, 19 nt, Artificial Sequence
  Description of Artificial Sequence: Synthetic oligonucleotide
cugcuucaugccaugccuu

SEQ ID NO: 2004793 - RNA, 19 nt, Artificial Sequence
  Description of Artificial Sequence: Synthetic oligonucleotide
cuucaucuauggggacaga

SEQ ID NO: 2004794 - RNA, 19 nt, Artificial Sequence
  Description of Artificial Sequence: Synthetic oligonucleotide
accucccgcccggcgcugg

SEQ ID NO: 2004795 - RNA, 19 nt, Artificial Sequence
  Description of Artificial Sequence: Synthetic oligonucleotide
ggccuuggguagaggaaga

SEQ ID NO: 2004796 - RNA, 19 nt, Artificial Sequence
  Description of Artificial Sequence: Synthetic oligonucleotide
ggccuggauggagcagcgg

SEQ ID NO: 2004797 - RNA, 19 nt, Artificial Sequence
  Description of Artificial Sequence: Synthetic oligonucleotide
gagcagcggcugagaggag

SEQ ID NO: 2004798 - RNA, 19 nt, Artificial Sequence
  Description of Artificial Sequence: Synthetic oligonucleotide
cuccgaguuccuggucuga

SEQ ID NO: 2004799 - RNA, 19 nt, Artificial Sequence
  Description of Artificial Sequence: Synthetic oligonucleotide
gccuagaagcuuggagcuc

SEQ ID NO: 2004800 - RNA, 19 nt, Artificial Sequence
  Description of Artificial Sequence: Synthetic oligonucleotide
guguggccgagaggugaca

SEQ ID NO: 2004801 - RNA, 19 nt, Artificial Sequence
  Description of Artificial Sequence: Synthetic oligonucleotide
gccagauggugguggcaaa

SEQ ID NO: 2004802 - RNA, 19 nt, Artificial Sequence
  Description of Artificial Sequence: Synthetic oligonucleotide
cucaggcacuuugucaguu

SEQ ID NO: 2004803 - RNA, 19 nt, Artificial Sequence
  Description of Artificial Sequence: Synthetic oligonucleotide
gcccagagaguggccgagc

SEQ ID NO: 2004804 - RNA, 19 nt, Artificial Sequence
  Description of Artificial Sequence: Synthetic oligonucleotide
cggcuaggacaccucccgc

SEQ ID NO: 2004805 - RNA, 19 nt, Artificial Sequence
  Description of Artificial Sequence: Synthetic oligonucleotide
gcgcuggaaggcagaggug

SEQ ID NO: 2004806 - RNA, 19 nt, Artificial Sequence
  Description of Artificial Sequence: Synthetic oligonucleotide
ggcgggaugcccagagagu

SEQ ID NO: 2004807 - RNA, 19 nt, Artificial Sequence
  Description of Artificial Sequence: Synthetic oligonucleotide
ggaguuggcucaggcacuu

SEQ ID NO: 2004808 - RNA, 19 nt, Artificial Sequence
  Description of Artificial Sequence: Synthetic oligonucleotide
gggaagcggcuaggacacc

SEQ ID NO: 2004809 - RNA, 19 nt, Artificial Sequence
  Description of Artificial Sequence: Synthetic oligonucleotide
cgggccaaggcagggugug

SEQ ID NO: 2004810 - RNA, 19 nt, Artificial Sequence
  Description of Artificial Sequence: Synthetic oligonucleotide
ggggacagacagggaaacu

SEQ ID NO: 2004811 - RNA, 19 nt, Artificial Sequence
  Description of Artificial Sequence: Synthetic oligonucleotide
caccucccgcccggcgcug

SEQ ID NO: 2004812 - RNA, 19 nt, Artificial Sequence
  Description of Artificial Sequence: Synthetic oligonucleotide
gcucaggccuagaccagau

SEQ ID NO: 2004813 - RNA, 19 nt, Artificial Sequence
  Description of Artificial Sequence: Synthetic oligonucleotide
gaguuggcucaggcacuuu

SEQ ID NO: 2004814 - RNA, 19 nt, Artificial Sequence
  Description of Artificial Sequence: Synthetic oligonucleotide
ccgaguuccuggucugaau

SEQ ID NO: 2004815 - RNA, 19 nt, Artificial Sequence
  Description of Artificial Sequence: Synthetic oligonucleotide
cggguggcacagcuuguaa

SEQ ID NO: 2004816 - RNA, 19 nt, Artificial Sequence
  Description of Artificial Sequence: Synthetic oligonucleotide
gcccagcaaggaccuccaa

SEQ ID NO: 2004817 - RNA, 19 nt, Artificial Sequence
  Description of Artificial Sequence: Synthetic oligonucleotide
cucccgcccggcgcuggaa

SEQ ID NO: 2004818 - RNA, 19 nt, Artificial Sequence
  Description of Artificial Sequence: Synthetic oligonucleotide
ccggguggcacagcuugua

SEQ ID NO: 2004819 - RNA, 19 nt, Artificial Sequence
  Description of Artificial Sequence: Synthetic oligonucleotide
ccgggccaaggcagggugu

SEQ ID NO: 2004820 - RNA, 19 nt, Artificial Sequence
  Description of Artificial Sequence: Synthetic oligonucleotide
gccuggcgggaugcccaga

SEQ ID NO: 2004821 - RNA, 19 nt, Artificial Sequence
  Description of Artificial Sequence: Synthetic oligonucleotide
ugaagaaagacaaagacuc

SEQ ID NO: 2004822 - RNA, 19 nt, Artificial Sequence
  Description of Artificial Sequence: Synthetic oligonucleotide
aaaacuguccaauaaagca

SEQ ID NO: 2004823 - RNA, 19 nt, Artificial Sequence
  Description of Artificial Sequence: Synthetic oligonucleotide
aauacauugcccaacagcg

SEQ ID NO: 2004824 - RNA, 19 nt, Artificial Sequence
  Description of Artificial Sequence: Synthetic oligonucleotide
aguauaaacagccaggcag

SEQ ID NO: 2004825 - RNA, 19 nt, Artificial Sequence
  Description of Artificial Sequence: Synthetic oligonucleotide
uuaaacauugcuuaguaug

SEQ ID NO: 2004826 - RNA, 19 nt, Artificial Sequence
  Description of Artificial Sequence: Synthetic oligonucleotide
aaagcauuuucuauuaagc

SEQ ID NO: 2004827 - RNA, 19 nt, Artificial Sequence
  Description of Artificial Sequence: Synthetic oligonucleotide
agaaaauccauuucugucg

SEQ ID NO: 2004828 - RNA, 19 nt, Artificial Sequence
  Description of Artificial Sequence: Synthetic oligonucleotide
auaacuucaaaauacagaa

SEQ ID NO: 2004829 - RNA, 19 nt, Artificial Sequence
  Description of Artificial Sequence: Synthetic oligonucleotide
acaauuaagauacaauuug

SEQ ID NO: 2004830 - RNA, 19 nt, Artificial Sequence
  Description of Artificial Sequence: Synthetic oligonucleotide
  modified_base (4)..(4): a, c, u, g, unknown or other
ugancucuaauacugaaac

SEQ ID NO: 2004831 - RNA, 19 nt, Artificial Sequence
  Description of Artificial Sequence: Synthetic oligonucleotide
guuugaucuagucacaugg

SEQ ID NO: 2004832 - RNA, 19 nt, Artificial Sequence
  Description of Artificial Sequence: Synthetic oligonucleotide
uguuguaacuucuaccucg

SEQ ID NO: 2004833 - RNA, 19 nt, Artificial Sequence
  Description of Artificial Sequence: Synthetic oligonucleotide
uuaauugauauauacaaau

SEQ ID NO: 2004834 - RNA, 19 nt, Artificial Sequence
  Description of Artificial Sequence: Synthetic oligonucleotide
uuugacaauaucaacuaug

SEQ ID NO: 2004835 - RNA, 19 nt, Artificial Sequence
  Description of Artificial Sequence: Synthetic oligonucleotide
agaaauuugggauaauuug

SEQ ID NO: 2004836 - RNA, 19 nt, Artificial Sequence
  Description of Artificial Sequence: Synthetic oligonucleotide
ucuaauacugaaacaaaca

SEQ ID NO: 2004837 - RNA, 19 nt, Artificial Sequence
  Description of Artificial Sequence: Synthetic oligonucleotide
  modified_base (10)..(10): a, c, u, g, unknown or other
uggacuugancucuaauac

SEQ ID NO: 2004838 - RNA, 19 nt, Artificial Sequence
  Description of Artificial Sequence: Synthetic oligonucleotide
cuaauacugaaacaaacag

SEQ ID NO: 2004839 - RNA, 19 nt, Artificial Sequence
  Description of Artificial Sequence: Synthetic oligonucleotide
aacaaacagacugccaucc

SEQ ID NO: 2004840 - RNA, 19 nt, Artificial Sequence
  Description of Artificial Sequence: Synthetic oligonucleotide
gaucuagucacauggaccc

SEQ ID NO: 2004841 - RNA, 19 nt, Artificial Sequence
  Description of Artificial Sequence: Synthetic oligonucleotide
uuaagcacguuacacaaca

SEQ ID NO: 2004842 - RNA, 19 nt, Artificial Sequence
  Description of Artificial Sequence: Synthetic oligonucleotide
uuaagauacaauuugugua

SEQ ID NO: 2004843 - RNA, 19 nt, Artificial Sequence
  Description of Artificial Sequence: Synthetic oligonucleotide
uacagaaugauccugguua

SEQ ID NO: 2004844 - RNA, 19 nt, Artificial Sequence
  Description of Artificial Sequence: Synthetic oligonucleotide
aauaacuucaaaauacaga

SEQ ID NO: 2004845 - RNA, 19 nt, Artificial Sequence
  Description of Artificial Sequence: Synthetic oligonucleotide
uacuaauugcauuuggcag

SEQ ID NO: 2004846 - RNA, 19 nt, Artificial Sequence
  Description of Artificial Sequence: Synthetic oligonucleotide
aaauacagaaugauccugg

SEQ ID NO: 2004847 - RNA, 19 nt, Artificial Sequence
  Description of Artificial Sequence: Synthetic oligonucleotide
uuuguuaacacagcuaaca

SEQ ID NO: 2004848 - RNA, 19 nt, Artificial Sequence
  Description of Artificial Sequence: Synthetic oligonucleotide
ucucguuugaucuagucac

SEQ ID NO: 2004849 - RNA, 19 nt, Artificial Sequence
  Description of Artificial Sequence: Synthetic oligonucleotide
  modified_base (2)..(2): a, c, u, g, unknown or other
ancucuaauacugaaacaa

SEQ ID NO: 2004850 - RNA, 19 nt, Artificial Sequence
  Description of Artificial Sequence: Synthetic oligonucleotide
aauuuaauugauauauaca

SEQ ID NO: 2004851 - RNA, 19 nt, Artificial Sequence
  Description of Artificial Sequence: Synthetic oligonucleotide
uuacuaauugcauuuggca

SEQ ID NO: 2004852 - RNA, 19 nt, Artificial Sequence
  Description of Artificial Sequence: Synthetic oligonucleotide
uaaacauugcuuaguaugu

SEQ ID NO: 2004853 - RNA, 19 nt, Artificial Sequence
  Description of Artificial Sequence: Synthetic oligonucleotide
auaauuuguuaacacagcu

SEQ ID NO: 2004854 - RNA, 19 nt, Artificial Sequence
  Description of Artificial Sequence: Synthetic oligonucleotide
uagauuucaaaccucuugu

SEQ ID NO: 2004855 - RNA, 19 nt, Artificial Sequence
  Description of Artificial Sequence: Synthetic oligonucleotide
uguaacuucuaccucgaug

SEQ ID NO: 2004856 - RNA, 19 nt, Artificial Sequence
  Description of Artificial Sequence: Synthetic oligonucleotide
agccaguagauuucaaacc

SEQ ID NO: 2004857 - RNA, 19 nt, Artificial Sequence
  Description of Artificial Sequence: Synthetic oligonucleotide
uuuucuaaguugcagggaa

SEQ ID NO: 2004858 - RNA, 19 nt, Artificial Sequence
  Description of Artificial Sequence: Synthetic oligonucleotide
cuuacuaauugcauuuggc

SEQ ID NO: 2004859 - RNA, 19 nt, Artificial Sequence
  Description of Artificial Sequence: Synthetic oligonucleotide
aaaccucuuguuugcaggg

SEQ ID NO: 2004860 - RNA, 19 nt, Artificial Sequence
  Description of Artificial Sequence: Synthetic oligonucleotide
gaacuuuuaagugacaaga

SEQ ID NO: 2004861 - RNA, 19 nt, Artificial Sequence
  Description of Artificial Sequence: Synthetic oligonucleotide
cagcuaacaaaacaaauac

SEQ ID NO: 2004862 - RNA, 19 nt, Artificial Sequence
  Description of Artificial Sequence: Synthetic oligonucleotide
ucuauuaagcacguuacac

SEQ ID NO: 2004863 - RNA, 19 nt, Artificial Sequence
  Description of Artificial Sequence: Synthetic oligonucleotide
cucaaaggaacccuguuag

SEQ ID NO: 2004864 - RNA, 19 nt, Artificial Sequence
  Description of Artificial Sequence: Synthetic oligonucleotide
cuuaguauguacaaaagua

SEQ ID NO: 2004865 - RNA, 19 nt, Artificial Sequence
  Description of Artificial Sequence: Synthetic oligonucleotide
acuaauugcauuuggcagu

SEQ ID NO: 2004866 - RNA, 19 nt, Artificial Sequence
  Description of Artificial Sequence: Synthetic oligonucleotide
guaacugucgcuccucugg

SEQ ID NO: 2004867 - RNA, 19 nt, Artificial Sequence
  Description of Artificial Sequence: Synthetic oligonucleotide
aaaggaacccuguuaggcu

SEQ ID NO: 2004868 - RNA, 19 nt, Artificial Sequence
  Description of Artificial Sequence: Synthetic oligonucleotide
ugccauuugcaguaaacag

SEQ ID NO: 2004869 - RNA, 19 nt, Artificial Sequence
  Description of Artificial Sequence: Synthetic oligonucleotide
agacguuuugaagaaagac

SEQ ID NO: 2004870 - RNA, 19 nt, Artificial Sequence
  Description of Artificial Sequence: Synthetic oligonucleotide
uuacacaacauaauuuaau

SEQ ID NO: 2004871 - RNA, 19 nt, Artificial Sequence
  Description of Artificial Sequence: Synthetic oligonucleotide
  modified_base (8)..(8): a, c, u, g, unknown or other
gacuugancucuaauacug

SEQ ID NO: 2004872 - RNA, 19 nt, Artificial Sequence
  Description of Artificial Sequence: Synthetic oligonucleotide
aacuaugccauuugcagua

SEQ ID NO: 2004873 - RNA, 19 nt, Artificial Sequence
  Description of Artificial Sequence: Synthetic oligonucleotide
caauuuguguacaaagcug

SEQ ID NO: 2004874 - RNA, 19 nt, Artificial Sequence
  Description of Artificial Sequence: Synthetic oligonucleotide
aaccguaggaucuuccgcu

SEQ ID NO: 2004875 - RNA, 19 nt, Artificial Sequence
  Description of Artificial Sequence: Synthetic oligonucleotide
ggauaauuuguuaacacag

SEQ ID NO: 2004876 - RNA, 19 nt, Artificial Sequence
  Description of Artificial Sequence: Synthetic oligonucleotide
guaacuguaggaucuggag

SEQ ID NO: 2004877 - RNA, 19 nt, Artificial Sequence
  Description of Artificial Sequence: Synthetic oligonucleotide
gauaauuuguuaacacagc

SEQ ID NO: 2004878 - RNA, 19 nt, Artificial Sequence
  Description of Artificial Sequence: Synthetic oligonucleotide
acuuucacuguccgaaccg

SEQ ID NO: 2004879 - RNA, 19 nt, Artificial Sequence
  Description of Artificial Sequence: Synthetic oligonucleotide
uaauugauauauacaaauu

SEQ ID NO: 2004880 - RNA, 19 nt, Artificial Sequence
  Description of Artificial Sequence: Synthetic oligonucleotide
ucacauggacccuugaaac

SEQ ID NO: 2004881 - RNA, 19 nt, Artificial Sequence
  Description of Artificial Sequence: Synthetic oligonucleotide
ucacuugaguauaaacagc

SEQ ID NO: 2004882 - RNA, 19 nt, Artificial Sequence
  Description of Artificial Sequence: Synthetic oligonucleotide
cuuuuaagugacaagaaua

SEQ ID NO: 2004883 - RNA, 19 nt, Artificial Sequence
  Description of Artificial Sequence: Synthetic oligonucleotide
uagcuaucguaacuguagg

SEQ ID NO: 2004884 - RNA, 19 nt, Artificial Sequence
  Description of Artificial Sequence: Synthetic oligonucleotide
uaucaacuaugccauuugc

SEQ ID NO: 2004885 - RNA, 19 nt, Artificial Sequence
  Description of Artificial Sequence: Synthetic oligonucleotide
gcauuuucuauuaagcacg

SEQ ID NO: 2004886 - RNA, 19 nt, Artificial Sequence
  Description of Artificial Sequence: Synthetic oligonucleotide
gaaugcauucuucucacca

SEQ ID NO: 2004887 - RNA, 19 nt, Artificial Sequence
  Description of Artificial Sequence: Synthetic oligonucleotide
uaauuuguuaacacagcua

SEQ ID NO: 2004888 - RNA, 19 nt, Artificial Sequence
  Description of Artificial Sequence: Synthetic oligonucleotide
uugaucuagucacauggac

SEQ ID NO: 2004889 - RNA, 19 nt, Artificial Sequence
  Description of Artificial Sequence: Synthetic oligonucleotide
uucacuguccgaaccguag

SEQ ID NO: 2004890 - RNA, 19 nt, Artificial Sequence
  Description of Artificial Sequence: Synthetic oligonucleotide
ugggauaauuuguuaacac

SEQ ID NO: 2004891 - RNA, 19 nt, Artificial Sequence
  Description of Artificial Sequence: Synthetic oligonucleotide
gacaaagacucaaaggaac

SEQ ID NO: 2004892 - RNA, 19 nt, Artificial Sequence
  Description of Artificial Sequence: Synthetic oligonucleotide
gaaggcagacguuuugaag

SEQ ID NO: 2004893 - RNA, 19 nt, Artificial Sequence
  Description of Artificial Sequence: Synthetic oligonucleotide
guagcuaucguaacuguag

SEQ ID NO: 2004894 - RNA, 19 nt, Artificial Sequence
  Description of Artificial Sequence: Synthetic oligonucleotide
uaugccauuugcaguaaac

SEQ ID NO: 2004895 - RNA, 19 nt, Artificial Sequence
  Description of Artificial Sequence: Synthetic oligonucleotide
uugcagggaacuuuuaagu

SEQ ID NO: 2004896 - RNA, 19 nt, Artificial Sequence
  Description of Artificial Sequence: Synthetic oligonucleotide
ugguuaggaagaaaaucca

SEQ ID NO: 2004897 - RNA, 19 nt, Artificial Sequence
  Description of Artificial Sequence: Synthetic oligonucleotide
aauaucaacuaugccauuu

SEQ ID NO: 2004898 - RNA, 19 nt, Artificial Sequence
  Description of Artificial Sequence: Synthetic oligonucleotide
gucuuaagcuuuaaguuag

SEQ ID NO: 2004899 - RNA, 19 nt, Artificial Sequence
  Description of Artificial Sequence: Synthetic oligonucleotide
accuuuccuuacuaauugc

SEQ ID NO: 2004900 - RNA, 19 nt, Artificial Sequence
  Description of Artificial Sequence: Synthetic oligonucleotide
uuugaucuagucacaugga

SEQ ID NO: 2004901 - RNA, 19 nt, Artificial Sequence
  Description of Artificial Sequence: Synthetic oligonucleotide
aagaauagccacugcugga

SEQ ID NO: 2004902 - RNA, 19 nt, Artificial Sequence
  Description of Artificial Sequence: Synthetic oligonucleotide
ucaaaggaacccuguuagg

SEQ ID NO: 2004903 - RNA, 19 nt, Artificial Sequence
  Description of Artificial Sequence: Synthetic oligonucleotide
gacguuuugaagaaagaca

SEQ ID NO: 2004904 - RNA, 19 nt, Artificial Sequence
  Description of Artificial Sequence: Synthetic oligonucleotide
  modified_base (5)..(5): a, c, u, g, unknown or other
uugancucuaauacugaaa

SEQ ID NO: 2004905 - RNA, 19 nt, Artificial Sequence
  Description of Artificial Sequence: Synthetic oligonucleotide
ucugucguucacuugagua

SEQ ID NO: 2004906 - RNA, 19 nt, Artificial Sequence
  Description of Artificial Sequence: Synthetic oligonucleotide
aacccuguuaggcuguaga

SEQ ID NO: 2004907 - RNA, 19 nt, Artificial Sequence
  Description of Artificial Sequence: Synthetic oligonucleotide
aaacuguccaauaaagcau

SEQ ID NO: 2004908 - RNA, 19 nt, Artificial Sequence
  Description of Artificial Sequence: Synthetic oligonucleotide
acagaaugauccugguuag

SEQ ID NO: 2004909 - RNA, 19 nt, Artificial Sequence
  Description of Artificial Sequence: Synthetic oligonucleotide
uguuacaaaacuguccaau

SEQ ID NO: 2004910 - RNA, 19 nt, Artificial Sequence
  Description of Artificial Sequence: Synthetic oligonucleotide
uguccgaaccguaggaucu

SEQ ID NO: 2004911 - RNA, 19 nt, Artificial Sequence
  Description of Artificial Sequence: Synthetic oligonucleotide
uuaacacagcuaacaaaac

SEQ ID NO: 2004912 - RNA, 19 nt, Artificial Sequence
  Description of Artificial Sequence: Synthetic oligonucleotide
uuccuuacuaauugcauuu

SEQ ID NO: 2004913 - RNA, 19 nt, Artificial Sequence
  Description of Artificial Sequence: Synthetic oligonucleotide
aucucguuugaucuaguca

SEQ ID NO: 2004914 - RNA, 19 nt, Artificial Sequence
  Description of Artificial Sequence: Synthetic oligonucleotide
auaggagcugcuccuggac

SEQ ID NO: 2004915 - RNA, 19 nt, Artificial Sequence
  Description of Artificial Sequence: Synthetic oligonucleotide
aguaccugcaacuccucug

SEQ ID NO: 2004916 - RNA, 19 nt, Artificial Sequence
  Description of Artificial Sequence: Synthetic oligonucleotide
uuuccuuacuaauugcauu

SEQ ID NO: 2004917 - RNA, 19 nt, Artificial Sequence
  Description of Artificial Sequence: Synthetic oligonucleotide
acauggacccuugaaacag

SEQ ID NO: 2004918 - RNA, 19 nt, Artificial Sequence
  Description of Artificial Sequence: Synthetic oligonucleotide
uugggauaauuuguuaaca

SEQ ID NO: 2004919 - RNA, 19 nt, Artificial Sequence
  Description of Artificial Sequence: Synthetic oligonucleotide
ggaaauuuaauugauauau

SEQ ID NO: 2004920 - RNA, 19 nt, Artificial Sequence
  Description of Artificial Sequence: Synthetic oligonucleotide
cagggaacuuuuaagugac

SEQ ID NO: 2004921 - RNA, 19 nt, Artificial Sequence
  Description of Artificial Sequence: Synthetic oligonucleotide
cugaaugcauucuucucac

SEQ ID NO: 2004922 - RNA, 19 nt, Artificial Sequence
  Description of Artificial Sequence: Synthetic oligonucleotide
auuaaacauugcuuaguau

SEQ ID NO: 2004923 - RNA, 19 nt, Artificial Sequence
  Description of Artificial Sequence: Synthetic oligonucleotide
acguuuugaagaaagacaa

SEQ ID NO: 2004924 - RNA, 19 nt, Artificial Sequence
  Description of Artificial Sequence: Synthetic oligonucleotide
guaaacaggauguuacaaa

SEQ ID NO: 2004925 - RNA, 19 nt, Artificial Sequence
  Description of Artificial Sequence: Synthetic oligonucleotide
cugaaacaaacagacugcc

SEQ ID NO: 2004926 - RNA, 19 nt, Artificial Sequence
  Description of Artificial Sequence: Synthetic oligonucleotide
acgagaguagcuucuguca

SEQ ID NO: 2004927 - RNA, 19 nt, Artificial Sequence
  Description of Artificial Sequence: Synthetic oligonucleotide
gacaagaauagccacugcu

SEQ ID NO: 2004928 - RNA, 19 nt, Artificial Sequence
  Description of Artificial Sequence: Synthetic oligonucleotide
cuucucaccagccaguaga

SEQ ID NO: 2004929 - RNA, 19 nt, Artificial Sequence
  Description of Artificial Sequence: Synthetic oligonucleotide
ggaacuuuuaagugacaag

SEQ ID NO: 2004930 - RNA, 19 nt, Artificial Sequence
  Description of Artificial Sequence: Synthetic oligonucleotide
aguuagcagguauuuacaa

SEQ ID NO: 2004931 - RNA, 19 nt, Artificial Sequence
  Description of Artificial Sequence: Synthetic oligonucleotide
ucuuaagcuuuaaguuagc

SEQ ID NO: 2004932 - RNA, 19 nt, Artificial Sequence
  Description of Artificial Sequence: Synthetic oligonucleotide
cuauggaaacuuccauagg

SEQ ID NO: 2004933 - RNA, 19 nt, Artificial Sequence
  Description of Artificial Sequence: Synthetic oligonucleotide
ucucugaucucguuugauc

SEQ ID NO: 2004934 - RNA, 19 nt, Artificial Sequence
  Description of Artificial Sequence: Synthetic oligonucleotide
gacgagaguagcuucuguc

SEQ ID NO: 2004935 - RNA, 19 nt, Artificial Sequence
  Description of Artificial Sequence: Synthetic oligonucleotide
aagacucaaaggaacccug

SEQ ID NO: 2004936 - RNA, 19 nt, Artificial Sequence
  Description of Artificial Sequence: Synthetic oligonucleotide
gaucuuccgcuccuggacc

SEQ ID NO: 2004937 - RNA, 19 nt, Artificial Sequence
  Description of Artificial Sequence: Synthetic oligonucleotide
  modified_base (3)..(3): a, c, u, g, unknown or other
gancucuaauacugaaaca

SEQ ID NO: 2004938 - RNA, 19 nt, Artificial Sequence
  Description of Artificial Sequence: Synthetic oligonucleotide
aggauguuacaaaacuguc

SEQ ID NO: 2004939 - RNA, 19 nt, Artificial Sequence
  Description of Artificial Sequence: Synthetic oligonucleotide
uguguacaaagcugccuca

SEQ ID NO: 2004940 - RNA, 19 nt, Artificial Sequence
  Description of Artificial Sequence: Synthetic oligonucleotide
acuucaaaauacagaauga

SEQ ID NO: 2004941 - RNA, 19 nt, Artificial Sequence
  Description of Artificial Sequence: Synthetic oligonucleotide
aaguuagcagguauuuaca

SEQ ID NO: 2004942 - RNA, 19 nt, Artificial Sequence
  Description of Artificial Sequence: Synthetic oligonucleotide
gcauuuggcagucuguuug

SEQ ID NO: 2004943 - RNA, 19 nt, Artificial Sequence
  Description of Artificial Sequence: Synthetic oligonucleotide
acagcuaacaaaacaaaua

SEQ ID NO: 2004944 - RNA, 19 nt, Artificial Sequence
  Description of Artificial Sequence: Synthetic oligonucleotide
aagcuuuaaguuagcaggu

SEQ ID NO: 2004945 - RNA, 19 nt, Artificial Sequence
  Description of Artificial Sequence: Synthetic oligonucleotide
gugacaagaauagccacug

SEQ ID NO: 2004946 - RNA, 19 nt, Artificial Sequence
  Description of Artificial Sequence: Synthetic oligonucleotide
uaacugucgcuccucuggc

SEQ ID NO: 2004947 - RNA, 19 nt, Artificial Sequence
  Description of Artificial Sequence: Synthetic oligonucleotide
gccauuugcaguaaacagg

SEQ ID NO: 2004948 - RNA, 19 nt, Artificial Sequence
  Description of Artificial Sequence: Synthetic oligonucleotide
uguaggaucuggagcgacu

SEQ ID NO: 2004949 - RNA, 19 nt, Artificial Sequence
  Description of Artificial Sequence: Synthetic oligonucleotide
aauagccacugcuggacuu

SEQ ID NO: 2004950 - RNA, 19 nt, Artificial Sequence
  Description of Artificial Sequence: Synthetic oligonucleotide
acuuccauaggaacugcuc

SEQ ID NO: 2004951 - RNA, 19 nt, Artificial Sequence
  Description of Artificial Sequence: Synthetic oligonucleotide
aguaaacaggauguuacaa

SEQ ID NO: 2004952 - RNA, 19 nt, Artificial Sequence
  Description of Artificial Sequence: Synthetic oligonucleotide
uguuaggcuguagaaauuu

SEQ ID NO: 2004953 - RNA, 19 nt, Artificial Sequence
  Description of Artificial Sequence: Synthetic oligonucleotide
acaaugcugaggacgagag

SEQ ID NO: 2004954 - RNA, 19 nt, Artificial Sequence
  Description of Artificial Sequence: Synthetic oligonucleotide
uuucuaaguugcagggaaa

SEQ ID NO: 2004955 - RNA, 19 nt, Artificial Sequence
  Description of Artificial Sequence: Synthetic oligonucleotide
agcacguuacacaacauaa

SEQ ID NO: 2004956 - RNA, 19 nt, Artificial Sequence
  Description of Artificial Sequence: Synthetic oligonucleotide
acaggauguuacaaaacug

SEQ ID NO: 2004957 - RNA, 19 nt, Artificial Sequence
  Description of Artificial Sequence: Synthetic oligonucleotide
cacgggacugcagacaggg

SEQ ID NO: 2004958 - RNA, 19 nt, Artificial Sequence
  Description of Artificial Sequence: Synthetic oligonucleotide
ucgaugguaacugucgcuc

SEQ ID NO: 2004959 - RNA, 19 nt, Artificial Sequence
  Description of Artificial Sequence: Synthetic oligonucleotide
acucaaaggaacccuguua

SEQ ID NO: 2004960 - RNA, 19 nt, Artificial Sequence
  Description of Artificial Sequence: Synthetic oligonucleotide
ggcagguuaagcucugucc

SEQ ID NO: 2004961 - RNA, 19 nt, Artificial Sequence
  Description of Artificial Sequence: Synthetic oligonucleotide
gucacauggacccuugaaa

SEQ ID NO: 2004962 - RNA, 19 nt, Artificial Sequence
  Description of Artificial Sequence: Synthetic oligonucleotide
cacuuucacuguccgaacc

SEQ ID NO: 2004963 - RNA, 19 nt, Artificial Sequence
  Description of Artificial Sequence: Synthetic oligonucleotide
aucuuccgcuccuggaccg

SEQ ID NO: 2004964 - RNA, 19 nt, Artificial Sequence
  Description of Artificial Sequence: Synthetic oligonucleotide
ucuucucaccagccaguag

SEQ ID NO: 2004965 - RNA, 19 nt, Artificial Sequence
  Description of Artificial Sequence: Synthetic oligonucleotide
uguaucugcugcucucacu

SEQ ID NO: 2004966 - RNA, 19 nt, Artificial Sequence
  Description of Artificial Sequence: Synthetic oligonucleotide
ugacaagaauagccacugc

SEQ ID NO: 2004967 - RNA, 19 nt, Artificial Sequence
  Description of Artificial Sequence: Synthetic oligonucleotide
uucuaaguugcagggaaau

SEQ ID NO: 2004968 - RNA, 19 nt, Artificial Sequence
  Description of Artificial Sequence: Synthetic oligonucleotide
gaucucguuugaucuaguc

SEQ ID NO: 2004969 - RNA, 19 nt, Artificial Sequence
  Description of Artificial Sequence: Synthetic oligonucleotide
uccauuucugucguucacu

SEQ ID NO: 2004970 - RNA, 19 nt, Artificial Sequence
  Description of Artificial Sequence: Synthetic oligonucleotide
cugaucucguuugaucuag

SEQ ID NO: 2004971 - RNA, 19 nt, Artificial Sequence
  Description of Artificial Sequence: Synthetic oligonucleotide
agcuaucguaacuguagga

SEQ ID NO: 2004972 - RNA, 19 nt, Artificial Sequence
  Description of Artificial Sequence: Synthetic oligonucleotide
  modified_base (11)..(11): a, c, u, g, unknown or other
cuggacuugancucuaaua

SEQ ID NO: 2004973 - RNA, 19 nt, Artificial Sequence
  Description of Artificial Sequence: Synthetic oligonucleotide
augccauuugcaguaaaca

SEQ ID NO: 2004974 - RNA, 19 nt, Artificial Sequence
  Description of Artificial Sequence: Synthetic oligonucleotide
gaaugauccugguuaggaa

SEQ ID NO: 2004975 - RNA, 19 nt, Artificial Sequence
  Description of Artificial Sequence: Synthetic oligonucleotide
  modified_base (6)..(6): a, c, u, g, unknown or other
cuugancucuaauacugaa

SEQ ID NO: 2004976 - RNA, 19 nt, Artificial Sequence
  Description of Artificial Sequence: Synthetic oligonucleotide
aucaacuaugccauuugca

SEQ ID NO: 2004977 - RNA, 19 nt, Artificial Sequence
  Description of Artificial Sequence: Synthetic oligonucleotide
uaguagcuaucguaacugu

SEQ ID NO: 2004978 - RNA, 19 nt, Artificial Sequence
  Description of Artificial Sequence: Synthetic oligonucleotide
cuaauugcauuuggcaguc

SEQ ID NO: 2004979 - RNA, 19 nt, Artificial Sequence
  Description of Artificial Sequence: Synthetic oligonucleotide
caggauguuacaaaacugu

SEQ ID NO: 2004980 - RNA, 19 nt, Artificial Sequence
  Description of Artificial Sequence: Synthetic oligonucleotide
agauuucaaaccucuuguu

SEQ ID NO: 2004981 - RNA, 19 nt, Artificial Sequence
  Description of Artificial Sequence: Synthetic oligonucleotide
uauaaacagccaggcagac

SEQ ID NO: 2004982 - RNA, 19 nt, Artificial Sequence
  Description of Artificial Sequence: Synthetic oligonucleotide
uccggugacgagaguagcu

SEQ ID NO: 2004983 - RNA, 19 nt, Artificial Sequence
  Description of Artificial Sequence: Synthetic oligonucleotide
ugcggguucggccucugcu

SEQ ID NO: 2004984 - RNA, 19 nt, Artificial Sequence
  Description of Artificial Sequence: Synthetic oligonucleotide
guugcagggaaauuuaauu

SEQ ID NO: 2004985 - RNA, 19 nt, Artificial Sequence
  Description of Artificial Sequence: Synthetic oligonucleotide
uccuuacuaauugcauuug

SEQ ID NO: 2004986 - RNA, 19 nt, Artificial Sequence
  Description of Artificial Sequence: Synthetic oligonucleotide
cauugcuuaguauguacaa

SEQ ID NO: 2004987 - RNA, 19 nt, Artificial Sequence
  Description of Artificial Sequence: Synthetic oligonucleotide
uggcuauggaaacuuccau

SEQ ID NO: 2004988 - RNA, 19 nt, Artificial Sequence
  Description of Artificial Sequence: Synthetic oligonucleotide
agucacauggacccuugaa

SEQ ID NO: 2004989 - RNA, 19 nt, Artificial Sequence
  Description of Artificial Sequence: Synthetic oligonucleotide
gcagacguuuugaagaaag

SEQ ID NO: 2004990 - RNA, 19 nt, Artificial Sequence
  Description of Artificial Sequence: Synthetic oligonucleotide
gaagaaagacaaagacuca

SEQ ID NO: 2004991 - RNA, 19 nt, Artificial Sequence
  Description of Artificial Sequence: Synthetic oligonucleotide
auugcuuaguauguacaaa

SEQ ID NO: 2004992 - RNA, 19 nt, Artificial Sequence
  Description of Artificial Sequence: Synthetic oligonucleotide
  modified_base (7)..(7): a, c, u, g, unknown or other
acuugancucuaauacuga

SEQ ID NO: 2004993 - RNA, 19 nt, Artificial Sequence
  Description of Artificial Sequence: Synthetic oligonucleotide
ucugaucucguuugaucua

SEQ ID NO: 2004994 - RNA, 19 nt, Artificial Sequence
  Description of Artificial Sequence: Synthetic oligonucleotide
cuguaguagcuaucguaac

SEQ ID NO: 2004995 - RNA, 19 nt, Artificial Sequence
  Description of Artificial Sequence: Synthetic oligonucleotide
accguaggaucuuccgcuc

SEQ ID NO: 2004996 - RNA, 19 nt, Artificial Sequence
  Description of Artificial Sequence: Synthetic oligonucleotide
aaacauugcuuaguaugua

SEQ ID NO: 2004997 - RNA, 19 nt, Artificial Sequence
  Description of Artificial Sequence: Synthetic oligonucleotide
ccuuacuaauugcauuugg

SEQ ID NO: 2004998 - RNA, 19 nt, Artificial Sequence
  Description of Artificial Sequence: Synthetic oligonucleotide
uggaccgccuguuguaacu

SEQ ID NO: 2004999 - RNA, 19 nt, Artificial Sequence
  Description of Artificial Sequence: Synthetic oligonucleotide
acagggacugcucucugau

SEQ ID NO: 2005000 - RNA, 19 nt, Artificial Sequence
  Description of Artificial Sequence: Synthetic oligonucleotide
ccauuugcaguaaacagga

SEQ ID NO: 2005001 - RNA, 19 nt, Artificial Sequence
  Description of Artificial Sequence: Synthetic oligonucleotide
ugacgagaguagcuucugu

SEQ ID NO: 2005002 - RNA, 19 nt, Artificial Sequence
  Description of Artificial Sequence: Synthetic oligonucleotide
guaggaucuggagcgacug

SEQ ID NO: 2005003 - RNA, 19 nt, Artificial Sequence
  Description of Artificial Sequence: Synthetic oligonucleotide
ugucguucacuugaguaua

SEQ ID NO: 2005004 - RNA, 19 nt, Artificial Sequence
  Description of Artificial Sequence: Synthetic oligonucleotide
uucucaccagccaguagau

SEQ ID NO: 2005005 - RNA, 19 nt, Artificial Sequence
  Description of Artificial Sequence: Synthetic oligonucleotide
uaccucgaugguaacuguc

SEQ ID NO: 2005006 - RNA, 19 nt, Artificial Sequence
  Description of Artificial Sequence: Synthetic oligonucleotide
acagcgaccuuuccuuacu

SEQ ID NO: 2005007 - RNA, 19 nt, Artificial Sequence
  Description of Artificial Sequence: Synthetic oligonucleotide
gacgagagccugugcuggg

SEQ ID NO: 2005008 - RNA, 19 nt, Artificial Sequence
  Description of Artificial Sequence: Synthetic oligonucleotide
aacugucgcuccucuggcu

SEQ ID NO: 2005009 - RNA, 19 nt, Artificial Sequence
  Description of Artificial Sequence: Synthetic oligonucleotide
aacuucuaccucgauggua

SEQ ID NO: 2005010 - RNA, 19 nt, Artificial Sequence
  Description of Artificial Sequence: Synthetic oligonucleotide
gacaaugcugaggacgaga

SEQ ID NO: 2005011 - RNA, 19 nt, Artificial Sequence
  Description of Artificial Sequence: Synthetic oligonucleotide
gcagggaacuuuuaaguga

SEQ ID NO: 2005012 - RNA, 19 nt, Artificial Sequence
  Description of Artificial Sequence: Synthetic oligonucleotide
cuguccgaaccguaggauc

SEQ ID NO: 2005013 - RNA, 19 nt, Artificial Sequence
  Description of Artificial Sequence: Synthetic oligonucleotide
cuagucacauggacccuug

SEQ ID NO: 2005014 - RNA, 19 nt, Artificial Sequence
  Description of Artificial Sequence: Synthetic oligonucleotide
auuuggcagucuguuuggg

SEQ ID NO: 2005015 - RNA, 19 nt, Artificial Sequence
  Description of Artificial Sequence: Synthetic oligonucleotide
cucugaucucguuugaucu

SEQ ID NO: 2005016 - RNA, 19 nt, Artificial Sequence
  Description of Artificial Sequence: Synthetic oligonucleotide
gcagguuaagcucugucca

SEQ ID NO: 2005017 - RNA, 19 nt, Artificial Sequence
  Description of Artificial Sequence: Synthetic oligonucleotide
cuuaagcuuuaaguuagca

SEQ ID NO: 2005018 - RNA, 19 nt, Artificial Sequence
  Description of Artificial Sequence: Synthetic oligonucleotide
gggucauaggagcugcucc

SEQ ID NO: 2005019 - RNA, 19 nt, Artificial Sequence
  Description of Artificial Sequence: Synthetic oligonucleotide
auugcauuuggcagucugu

SEQ ID NO: 2005020 - RNA, 19 nt, Artificial Sequence
  Description of Artificial Sequence: Synthetic oligonucleotide
cauuucugucguucacuug

SEQ ID NO: 2005021 - RNA, 19 nt, Artificial Sequence
  Description of Artificial Sequence: Synthetic oligonucleotide
gaggacgagagccugugcu

SEQ ID NO: 2005022 - RNA, 19 nt, Artificial Sequence
  Description of Artificial Sequence: Synthetic oligonucleotide
gucucuuccugugccaacc

SEQ ID NO: 2005023 - RNA, 19 nt, Artificial Sequence
  Description of Artificial Sequence: Synthetic oligonucleotide
uuucacuguccgaaccgua

SEQ ID NO: 2005024 - RNA, 19 nt, Artificial Sequence
  Description of Artificial Sequence: Synthetic oligonucleotide
aaaauccauuucugucguu

SEQ ID NO: 2005025 - RNA, 19 nt, Artificial Sequence
  Description of Artificial Sequence: Synthetic oligonucleotide
agguuaagcucuguccaug

SEQ ID NO: 2005026 - RNA, 19 nt, Artificial Sequence
  Description of Artificial Sequence: Synthetic oligonucleotide
acguuacacaacauaauuu

SEQ ID NO: 2005027 - RNA, 19 nt, Artificial Sequence
  Description of Artificial Sequence: Synthetic oligonucleotide
ugcgacuccggcuguagua

SEQ ID NO: 2005028 - RNA, 19 nt, Artificial Sequence
  Description of Artificial Sequence: Synthetic oligonucleotide
ggaucuuccgcuccuggac

SEQ ID NO: 2005029 - RNA, 19 nt, Artificial Sequence
  Description of Artificial Sequence: Synthetic oligonucleotide
ugaggacgagagccugugc

SEQ ID NO: 2005030 - RNA, 19 nt, Artificial Sequence
  Description of Artificial Sequence: Synthetic oligonucleotide
guguacaaagcugccucag

SEQ ID NO: 2005031 - RNA, 19 nt, Artificial Sequence
  Description of Artificial Sequence: Synthetic oligonucleotide
cacauggacccuugaaaca

SEQ ID NO: 2005032 - RNA, 19 nt, Artificial Sequence
  Description of Artificial Sequence: Synthetic oligonucleotide
cucuuccugugccaacccc

SEQ ID NO: 2005033 - RNA, 19 nt, Artificial Sequence
  Description of Artificial Sequence: Synthetic oligonucleotide
ugaucucguuugaucuagu

SEQ ID NO: 2005034 - RNA, 19 nt, Artificial Sequence
  Description of Artificial Sequence: Synthetic oligonucleotide
ucuaaguugcagggaaauu

SEQ ID NO: 2005035 - RNA, 19 nt, Artificial Sequence
  Description of Artificial Sequence: Synthetic oligonucleotide
caaugcugaggacgagagc

SEQ ID NO: 2005036 - RNA, 19 nt, Artificial Sequence
  Description of Artificial Sequence: Synthetic oligonucleotide
aggcagacguuuugaagaa

SEQ ID NO: 2005037 - RNA, 19 nt, Artificial Sequence
  Description of Artificial Sequence: Synthetic oligonucleotide
uugcccaacagcgaccuuu

SEQ ID NO: 2005038 - RNA, 19 nt, Artificial Sequence
  Description of Artificial Sequence: Synthetic oligonucleotide
ucguuugaucuagucacau

SEQ ID NO: 2005039 - RNA, 19 nt, Artificial Sequence
  Description of Artificial Sequence: Synthetic oligonucleotide
acccuguuaggcuguagaa

SEQ ID NO: 2005040 - RNA, 19 nt, Artificial Sequence
  Description of Artificial Sequence: Synthetic oligonucleotide
acgagagccugugcugggc

SEQ ID NO: 2005041 - RNA, 19 nt, Artificial Sequence
  Description of Artificial Sequence: Synthetic oligonucleotide
auguuacaaaacuguccaa

SEQ ID NO: 2005042 - RNA, 19 nt, Artificial Sequence
  Description of Artificial Sequence: Synthetic oligonucleotide
cagaaugauccugguuagg

SEQ ID NO: 2005043 - RNA, 19 nt, Artificial Sequence
  Description of Artificial Sequence: Synthetic oligonucleotide
ugggcucugaaugcauucu

SEQ ID NO: 2005044 - RNA, 19 nt, Artificial Sequence
  Description of Artificial Sequence: Synthetic oligonucleotide
aguugcagggaaauuuaau

SEQ ID NO: 2005045 - RNA, 19 nt, Artificial Sequence
  Description of Artificial Sequence: Synthetic oligonucleotide
guuguaacuucuaccucga

SEQ ID NO: 2005046 - RNA, 19 nt, Artificial Sequence
  Description of Artificial Sequence: Synthetic oligonucleotide
guggcuauggaaacuucca

SEQ ID NO: 2005047 - RNA, 19 nt, Artificial Sequence
  Description of Artificial Sequence: Synthetic oligonucleotide
ugcauuuggcagucuguuu

SEQ ID NO: 2005048 - RNA, 19 nt, Artificial Sequence
  Description of Artificial Sequence: Synthetic oligonucleotide
gaugguaacugucgcuccu

SEQ ID NO: 2005049 - RNA, 19 nt, Artificial Sequence
  Description of Artificial Sequence: Synthetic oligonucleotide
gcuuaguauguacaaaagu

SEQ ID NO: 2005050 - RNA, 19 nt, Artificial Sequence
  Description of Artificial Sequence: Synthetic oligonucleotide
cuaaguugcagggaaauuu

SEQ ID NO: 2005051 - RNA, 19 nt, Artificial Sequence
  Description of Artificial Sequence: Synthetic oligonucleotide
acacagcuaacaaaacaaa

SEQ ID NO: 2005052 - RNA, 19 nt, Artificial Sequence
  Description of Artificial Sequence: Synthetic oligonucleotide
guuaggaagaaaauccauu

SEQ ID NO: 2005053 - RNA, 19 nt, Artificial Sequence
  Description of Artificial Sequence: Synthetic oligonucleotide
uaccugcaacuccucuggc

SEQ ID NO: 2005054 - RNA, 19 nt, Artificial Sequence
  Description of Artificial Sequence: Synthetic oligonucleotide
uggggcuccggugacgaga

SEQ ID NO: 2005055 - RNA, 19 nt, Artificial Sequence
  Description of Artificial Sequence: Synthetic oligonucleotide
ggaucuggagcgacugugg

SEQ ID NO: 2005056 - RNA, 19 nt, Artificial Sequence
  Description of Artificial Sequence: Synthetic oligonucleotide
gcuguagaaauuugggaua

SEQ ID NO: 2005057 - RNA, 19 nt, Artificial Sequence
  Description of Artificial Sequence: Synthetic oligonucleotide
cuguagaaauuugggauaa

SEQ ID NO: 2005058 - RNA, 19 nt, Artificial Sequence
  Description of Artificial Sequence: Synthetic oligonucleotide
gccaguagauuucaaaccu

SEQ ID NO: 2005059 - RNA, 19 nt, Artificial Sequence
  Description of Artificial Sequence: Synthetic oligonucleotide
uggaccugcuccugcugga

SEQ ID NO: 2005060 - RNA, 19 nt, Artificial Sequence
  Description of Artificial Sequence: Synthetic oligonucleotide
cuuuccuuacuaauugcau

SEQ ID NO: 2005061 - RNA, 19 nt, Artificial Sequence
  Description of Artificial Sequence: Synthetic oligonucleotide
ucuuguuugcagggaacuu

SEQ ID NO: 2005062 - RNA, 19 nt, Artificial Sequence
  Description of Artificial Sequence: Synthetic oligonucleotide
ugucgcuccucuggcugcg

SEQ ID NO: 2005063 - RNA, 19 nt, Artificial Sequence
  Description of Artificial Sequence: Synthetic oligonucleotide
gcuguaguagcuaucguaa

SEQ ID NO: 2005064 - RNA, 19 nt, Artificial Sequence
  Description of Artificial Sequence: Synthetic oligonucleotide
cauaggagcugcuccugga

SEQ ID NO: 2005065 - RNA, 19 nt, Artificial Sequence
  Description of Artificial Sequence: Synthetic oligonucleotide
cguucacuugaguauaaac

SEQ ID NO: 2005066 - RNA, 19 nt, Artificial Sequence
  Description of Artificial Sequence: Synthetic oligonucleotide
ggacgagagccugugcugg

SEQ ID NO: 2005067 - RNA, 19 nt, Artificial Sequence
  Description of Artificial Sequence: Synthetic oligonucleotide
guagaaauuugggauaauu

SEQ ID NO: 2005068 - RNA, 19 nt, Artificial Sequence
  Description of Artificial Sequence: Synthetic oligonucleotide
agcgaccuuuccuuacuaa

SEQ ID NO: 2005069 - RNA, 19 nt, Artificial Sequence
  Description of Artificial Sequence: Synthetic oligonucleotide
cacguuacacaacauaauu

SEQ ID NO: 2005070 - RNA, 19 nt, Artificial Sequence
  Description of Artificial Sequence: Synthetic oligonucleotide
aguagcuaucguaacugua

SEQ ID NO: 2005071 - RNA, 19 nt, Artificial Sequence
  Description of Artificial Sequence: Synthetic oligonucleotide
ggaaacuuccauaggaacu

SEQ ID NO: 2005072 - RNA, 19 nt, Artificial Sequence
  Description of Artificial Sequence: Synthetic oligonucleotide
ugauccugguuaggaagaa

SEQ ID NO: 2005073 - RNA, 19 nt, Artificial Sequence
  Description of Artificial Sequence: Synthetic oligonucleotide
auacauugcccaacagcga

SEQ ID NO: 2005074 - RNA, 19 nt, Artificial Sequence
  Description of Artificial Sequence: Synthetic oligonucleotide
uccuguggcuauggaaacu

SEQ ID NO: 2005075 - RNA, 19 nt, Artificial Sequence
  Description of Artificial Sequence: Synthetic oligonucleotide
ggcuguaguagcuaucgua

SEQ ID NO: 2005076 - RNA, 19 nt, Artificial Sequence
  Description of Artificial Sequence: Synthetic oligonucleotide
cucguuugaucuagucaca

SEQ ID NO: 2005077 - RNA, 19 nt, Artificial Sequence
  Description of Artificial Sequence: Synthetic oligonucleotide
caacuaugccauuugcagu

SEQ ID NO: 2005078 - RNA, 19 nt, Artificial Sequence
  Description of Artificial Sequence: Synthetic oligonucleotide
uuguaacuucuaccucgau

SEQ ID NO: 2005079 - RNA, 19 nt, Artificial Sequence
  Description of Artificial Sequence: Synthetic oligonucleotide
cauuuucuauuaagcacgu

SEQ ID NO: 2005080 - RNA, 19 nt, Artificial Sequence
  Description of Artificial Sequence: Synthetic oligonucleotide
ggcuauggaaacuuccaua

SEQ ID NO: 2005081 - RNA, 19 nt, Artificial Sequence
  Description of Artificial Sequence: Synthetic oligonucleotide
cagggaaauuuaauugaua

SEQ ID NO: 2005082 - RNA, 19 nt, Artificial Sequence
  Description of Artificial Sequence: Synthetic oligonucleotide
gggaacuuuuaagugacaa

SEQ ID NO: 2005083 - RNA, 19 nt, Artificial Sequence
  Description of Artificial Sequence: Synthetic oligonucleotide
uccggcuguaguagcuauc

SEQ ID NO: 2005084 - RNA, 19 nt, Artificial Sequence
  Description of Artificial Sequence: Synthetic oligonucleotide
guagcagcccugucucuuc

SEQ ID NO: 2005085 - RNA, 19 nt, Artificial Sequence
  Description of Artificial Sequence: Synthetic oligonucleotide
cgaaccguaggaucuuccg

SEQ ID NO: 2005086 - RNA, 19 nt, Artificial Sequence
  Description of Artificial Sequence: Synthetic oligonucleotide
gaauagccacugcuggacu

SEQ ID NO: 2005087 - RNA, 19 nt, Artificial Sequence
  Description of Artificial Sequence: Synthetic oligonucleotide
  modified_base (18)..(18): a, c, u, g, unknown or other
gccacugcuggacuuganc

SEQ ID NO: 2005088 - RNA, 19 nt, Artificial Sequence
  Description of Artificial Sequence: Synthetic oligonucleotide
cugucguucacuugaguau

SEQ ID NO: 2005089 - RNA, 19 nt, Artificial Sequence
  Description of Artificial Sequence: Synthetic oligonucleotide
ccaguagauuucaaaccuc

SEQ ID NO: 2005090 - RNA, 19 nt, Artificial Sequence
  Description of Artificial Sequence: Synthetic oligonucleotide
ucguucacuugaguauaaa

SEQ ID NO: 2005091 - RNA, 19 nt, Artificial Sequence
  Description of Artificial Sequence: Synthetic oligonucleotide
cuguggcuauggaaacuuc

SEQ ID NO: 2005092 - RNA, 19 nt, Artificial Sequence
  Description of Artificial Sequence: Synthetic oligonucleotide
  modified_base (9)..(9): a, c, u, g, unknown or other
ggacuugancucuaauacu

SEQ ID NO: 2005093 - RNA, 19 nt, Artificial Sequence
  Description of Artificial Sequence: Synthetic oligonucleotide
acuguccgaaccguaggau

SEQ ID NO: 2005094 - RNA, 19 nt, Artificial Sequence
  Description of Artificial Sequence: Synthetic oligonucleotide
cacuguccgaaccguagga

SEQ ID NO: 2005095 - RNA, 19 nt, Artificial Sequence
  Description of Artificial Sequence: Synthetic oligonucleotide
cuguaggaucuggagcgac

SEQ ID NO: 2005096 - RNA, 19 nt, Artificial Sequence
  Description of Artificial Sequence: Synthetic oligonucleotide
gaccgccuguuguaacuuc

SEQ ID NO: 2005097 - RNA, 19 nt, Artificial Sequence
  Description of Artificial Sequence: Synthetic oligonucleotide
cuggaccgccuguuguaac

SEQ ID NO: 2005098 - RNA, 19 nt, Artificial Sequence
  Description of Artificial Sequence: Synthetic oligonucleotide
agacaaugcugaggacgag

SEQ ID NO: 2005099 - RNA, 19 nt, Artificial Sequence
  Description of Artificial Sequence: Synthetic oligonucleotide
agcuuuaaguuagcaggua

SEQ ID NO: 2005100 - RNA, 19 nt, Artificial Sequence
  Description of Artificial Sequence: Synthetic oligonucleotide
gaacccuguuaggcuguag

SEQ ID NO: 2005101 - RNA, 19 nt, Artificial Sequence
  Description of Artificial Sequence: Synthetic oligonucleotide
ccucgaugguaacugucgc

SEQ ID NO: 2005102 - RNA, 19 nt, Artificial Sequence
  Description of Artificial Sequence: Synthetic oligonucleotide
cuccggugacgagaguagc

SEQ ID NO: 2005103 - RNA, 19 nt, Artificial Sequence
  Description of Artificial Sequence: Synthetic oligonucleotide
uggccacgggacugcagac

SEQ ID NO: 2005104 - RNA, 19 nt, Artificial Sequence
  Description of Artificial Sequence: Synthetic oligonucleotide
gauccugguuaggaagaaa

SEQ ID NO: 2005105 - RNA, 19 nt, Artificial Sequence
  Description of Artificial Sequence: Synthetic oligonucleotide
accgccuguuguaacuucu

SEQ ID NO: 2005106 - RNA, 19 nt, Artificial Sequence
  Description of Artificial Sequence: Synthetic oligonucleotide
ccuguuaggcuguagaaau

SEQ ID NO: 2005107 - RNA, 19 nt, Artificial Sequence
  Description of Artificial Sequence: Synthetic oligonucleotide
ccucuuguuugcagggaac

SEQ ID NO: 2005108 - RNA, 19 nt, Artificial Sequence
  Description of Artificial Sequence: Synthetic oligonucleotide
uaauugcauuuggcagucu

SEQ ID NO: 2005109 - RNA, 19 nt, Artificial Sequence
  Description of Artificial Sequence: Synthetic oligonucleotide
cccugucucuuccugugcc

SEQ ID NO: 2005110 - RNA, 19 nt, Artificial Sequence
  Description of Artificial Sequence: Synthetic oligonucleotide
gcuaucguaacuguaggau

SEQ ID NO: 2005111 - RNA, 19 nt, Artificial Sequence
  Description of Artificial Sequence: Synthetic oligonucleotide
cgagaguagcuucugucac

SEQ ID NO: 2005112 - RNA, 19 nt, Artificial Sequence
  Description of Artificial Sequence: Synthetic oligonucleotide
ccagagcccugccaguacc

SEQ ID NO: 2005113 - RNA, 19 nt, Artificial Sequence
  Description of Artificial Sequence: Synthetic oligonucleotide
guuaagcucuguccauggu

SEQ ID NO: 2005114 - RNA, 19 nt, Artificial Sequence
  Description of Artificial Sequence: Synthetic oligonucleotide
gcgacuccggcuguaguag

SEQ ID NO: 2005115 - RNA, 19 nt, Artificial Sequence
  Description of Artificial Sequence: Synthetic oligonucleotide
aucuagucacauggacccu

SEQ ID NO: 2005116 - RNA, 19 nt, Artificial Sequence
  Description of Artificial Sequence: Synthetic oligonucleotide
cagggacugcucucugauc

SEQ ID NO: 2005117 - RNA, 19 nt, Artificial Sequence
  Description of Artificial Sequence: Synthetic oligonucleotide
acuaugccauuugcaguaa

SEQ ID NO: 2005118 - RNA, 19 nt, Artificial Sequence
  Description of Artificial Sequence: Synthetic oligonucleotide
cucgaugguaacugucgcu

SEQ ID NO: 2005119 - RNA, 19 nt, Artificial Sequence
  Description of Artificial Sequence: Synthetic oligonucleotide
cuuccgcuccuggaccgcc

SEQ ID NO: 2005120 - RNA, 19 nt, Artificial Sequence
  Description of Artificial Sequence: Synthetic oligonucleotide
gcagguagcagcccugucu

SEQ ID NO: 2005121 - RNA, 19 nt, Artificial Sequence
  Description of Artificial Sequence: Synthetic oligonucleotide
ggaacugcuccggcugcgg

SEQ ID NO: 2005122 - RNA, 19 nt, Artificial Sequence
  Description of Artificial Sequence: Synthetic oligonucleotide
caacuccucuggccacggg

SEQ ID NO: 2005123 - RNA, 19 nt, Artificial Sequence
  Description of Artificial Sequence: Synthetic oligonucleotide
gcuccggugacgagaguag

SEQ ID NO: 2005124 - RNA, 19 nt, Artificial Sequence
  Description of Artificial Sequence: Synthetic oligonucleotide
gacugcagacagggacugc

SEQ ID NO: 2005125 - RNA, 19 nt, Artificial Sequence
  Description of Artificial Sequence: Synthetic oligonucleotide
cguuugaucuagucacaug

SEQ ID NO: 2005126 - RNA, 19 nt, Artificial Sequence
  Description of Artificial Sequence: Synthetic oligonucleotide
cuaugccauuugcaguaaa

SEQ ID NO: 2005127 - RNA, 19 nt, Artificial Sequence
  Description of Artificial Sequence: Synthetic oligonucleotide
ccagccaguagauuucaaa

SEQ ID NO: 2005128 - RNA, 19 nt, Artificial Sequence
  Description of Artificial Sequence: Synthetic oligonucleotide
uccucuggcugcggcuaug

SEQ ID NO: 2005129 - RNA, 19 nt, Artificial Sequence
  Description of Artificial Sequence: Synthetic oligonucleotide
cgaugguaacugucgcucc

SEQ ID NO: 2005130 - RNA, 19 nt, Artificial Sequence
  Description of Artificial Sequence: Synthetic oligonucleotide
agggaacuuuuaagugaca

SEQ ID NO: 2005131 - RNA, 19 nt, Artificial Sequence
  Description of Artificial Sequence: Synthetic oligonucleotide
cguaacuguaggaucugga

SEQ ID NO: 2005132 - RNA, 19 nt, Artificial Sequence
  Description of Artificial Sequence: Synthetic oligonucleotide
gguuaggaagaaaauccau

SEQ ID NO: 2005133 - RNA, 19 nt, Artificial Sequence
  Description of Artificial Sequence: Synthetic oligonucleotide
ucucaccagccaguagauu

SEQ ID NO: 2005134 - RNA, 19 nt, Artificial Sequence
  Description of Artificial Sequence: Synthetic oligonucleotide
cuuucacuguccgaaccgu

SEQ ID NO: 2005135 - RNA, 19 nt, Artificial Sequence
  Description of Artificial Sequence: Synthetic oligonucleotide
ccguaggaucuuccgcucc

SEQ ID NO: 2005136 - RNA, 19 nt, Artificial Sequence
  Description of Artificial Sequence: Synthetic oligonucleotide
gucguucacuugaguauaa

SEQ ID NO: 2005137 - RNA, 19 nt, Artificial Sequence
  Description of Artificial Sequence: Synthetic oligonucleotide
cugcggcuauggcugcgac

SEQ ID NO: 2005138 - RNA, 19 nt, Artificial Sequence
  Description of Artificial Sequence: Synthetic oligonucleotide
caacagcgaccuuuccuua

SEQ ID NO: 2005139 - RNA, 19 nt, Artificial Sequence
  Description of Artificial Sequence: Synthetic oligonucleotide
cugucucuuccugugccaa

SEQ ID NO: 2005140 - RNA, 19 nt, Artificial Sequence
  Description of Artificial Sequence: Synthetic oligonucleotide
cuaccucgaugguaacugu

SEQ ID NO: 2005141 - RNA, 19 nt, Artificial Sequence
  Description of Artificial Sequence: Synthetic oligonucleotide
gggacugcucucugaucuc

SEQ ID NO: 2005142 - RNA, 19 nt, Artificial Sequence
  Description of Artificial Sequence: Synthetic oligonucleotide
gcgaccuuuccuuacuaau

SEQ ID NO: 2005143 - RNA, 19 nt, Artificial Sequence
  Description of Artificial Sequence: Synthetic oligonucleotide
cagguuaagcucuguccau

SEQ ID NO: 2005144 - RNA, 19 nt, Artificial Sequence
  Description of Artificial Sequence: Synthetic oligonucleotide
ggggucauaggagcugcuc

SEQ ID NO: 2005145 - RNA, 19 nt, Artificial Sequence
  Description of Artificial Sequence: Synthetic oligonucleotide
ccucuggcugcggcuaugg

SEQ ID NO: 2005146 - RNA, 19 nt, Artificial Sequence
  Description of Artificial Sequence: Synthetic oligonucleotide
ggcuccggugacgagagua

SEQ ID NO: 2005147 - RNA, 19 nt, Artificial Sequence
  Description of Artificial Sequence: Synthetic oligonucleotide
cugcggguucggccucugc

SEQ ID NO: 2005148 - RNA, 19 nt, Artificial Sequence
  Description of Artificial Sequence: Synthetic oligonucleotide
cuguuaggcuguagaaauu

SEQ ID NO: 2005149 - RNA, 19 nt, Artificial Sequence
  Description of Artificial Sequence: Synthetic oligonucleotide
cuggggcuccggugacgag

SEQ ID NO: 2005150 - RNA, 19 nt, Artificial Sequence
  Description of Artificial Sequence: Synthetic oligonucleotide
auugcccaacagcgaccuu

SEQ ID NO: 2005151 - RNA, 19 nt, Artificial Sequence
  Description of Artificial Sequence: Synthetic oligonucleotide
gggacugcagacagggacu

SEQ ID NO: 2005152 - RNA, 19 nt, Artificial Sequence
  Description of Artificial Sequence: Synthetic oligonucleotide
guuugggcucugaaugcau

SEQ ID NO: 2005153 - RNA, 19 nt, Artificial Sequence
  Description of Artificial Sequence: Synthetic oligonucleotide
cagcgaccuuuccuuacua

SEQ ID NO: 2005154 - RNA, 19 nt, Artificial Sequence
  Description of Artificial Sequence: Synthetic oligonucleotide
accagccaguagauuucaa

SEQ ID NO: 2005155 - RNA, 19 nt, Artificial Sequence
  Description of Artificial Sequence: Synthetic oligonucleotide
cccuguuaggcuguagaaa

SEQ ID NO: 2005156 - RNA, 19 nt, Artificial Sequence
  Description of Artificial Sequence: Synthetic oligonucleotide
cucucacuggggcuccggu

SEQ ID NO: 2005157 - RNA, 19 nt, Artificial Sequence
  Description of Artificial Sequence: Synthetic oligonucleotide
  modified_base (12)..(12): a, c, u, g, unknown or other
gcuggacuugancucuaau

SEQ ID NO: 2005158 - RNA, 19 nt, Artificial Sequence
  Description of Artificial Sequence: Synthetic oligonucleotide
cggugacgagaguagcuuc

SEQ ID NO: 2005159 - RNA, 19 nt, Artificial Sequence
  Description of Artificial Sequence: Synthetic oligonucleotide
gcacguuacacaacauaau

SEQ ID NO: 2005160 - RNA, 19 nt, Artificial Sequence
  Description of Artificial Sequence: Synthetic oligonucleotide
cgacuccggcuguaguagc

SEQ ID NO: 2005161 - RNA, 19 nt, Artificial Sequence
  Description of Artificial Sequence: Synthetic oligonucleotide
cuccggcuguaguagcuau

SEQ ID NO: 2005162 - RNA, 19 nt, Artificial Sequence
  Description of Artificial Sequence: Synthetic oligonucleotide
cccugccaguaccugcaac

SEQ ID NO: 2005163 - RNA, 19 nt, Artificial Sequence
  Description of Artificial Sequence: Synthetic oligonucleotide
ggccacgggacugcagaca

SEQ ID NO: 2005164 - RNA, 19 nt, Artificial Sequence
  Description of Artificial Sequence: Synthetic oligonucleotide
gguagcagcccugucucuu

SEQ ID NO: 2005165 - RNA, 19 nt, Artificial Sequence
  Description of Artificial Sequence: Synthetic oligonucleotide
cugcgacuccggcuguagu

SEQ ID NO: 2005166 - RNA, 19 nt, Artificial Sequence
  Description of Artificial Sequence: Synthetic oligonucleotide
cagcagguagcagcccugu

SEQ ID NO: 2005167 - RNA, 19 nt, Artificial Sequence
  Description of Artificial Sequence: Synthetic oligonucleotide
cguaggaucuuccgcuccu

SEQ ID NO: 2005168 - RNA, 19 nt, Artificial Sequence
  Description of Artificial Sequence: Synthetic oligonucleotide
gcugaggacgagagccugu

SEQ ID NO: 2005169 - RNA, 19 nt, Artificial Sequence
  Description of Artificial Sequence: Synthetic oligonucleotide
ccuggaccgccuguuguaa

SEQ ID NO: 2005170 - RNA, 19 nt, Artificial Sequence
  Description of Artificial Sequence: Synthetic oligonucleotide
ggguucggccucugcugua

SEQ ID NO: 2005171 - RNA, 19 nt, Artificial Sequence
  Description of Artificial Sequence: Synthetic oligonucleotide
ggaacccuguuaggcugua

SEQ ID NO: 2005172 - RNA, 19 nt, Artificial Sequence
  Description of Artificial Sequence: Synthetic oligonucleotide
guccgaaccguaggaucuu

SEQ ID NO: 2005173 - RNA, 19 nt, Artificial Sequence
  Description of Artificial Sequence: Synthetic oligonucleotide
ccgccuguuguaacuucua

SEQ ID NO: 2005174 - RNA, 19 nt, Artificial Sequence
  Description of Artificial Sequence: Synthetic oligonucleotide
gcugcggguucggccucug

SEQ ID NO: 2005175 - RNA, 19 nt, Artificial Sequence
  Description of Artificial Sequence: Synthetic oligonucleotide
ccggugacgagaguagcuu

SEQ ID NO: 2005176 - RNA, 19 nt, Artificial Sequence
  Description of Artificial Sequence: Synthetic oligonucleotide
ggcugcgacuccggcugua

SEQ ID NO: 2005177 - RNA, 19 nt, Artificial Sequence
  Description of Artificial Sequence: Synthetic oligonucleotide
cggguucggccucugcugu

SEQ ID NO: 2005178 - RNA, 19 nt, Artificial Sequence
  Description of Artificial Sequence: Synthetic oligonucleotide
ggcugcggguucggccucu

SEQ ID NO: 2005179 - RNA, 19 nt, Artificial Sequence
  Description of Artificial Sequence: Synthetic oligonucleotide
cggcuguaguagcuaucgu

SEQ ID NO: 2005180 - RNA, 19 nt, Artificial Sequence
  Description of Artificial Sequence: Synthetic oligonucleotide
gggcuccggugacgagagu

SEQ ID NO: 2005181 - RNA, 19 nt, Artificial Sequence
  Description of Artificial Sequence: Synthetic oligonucleotide
ccgcuccuggaccgccugu

SEQ ID NO: 2005182 - RNA, 19 nt, Artificial Sequence
  Description of Artificial Sequence: Synthetic oligonucleotide
  modified_base (1)..(1): a, c, u, g, unknown or other
ncucuaauacugaaacaaa

SEQ ID NO: 2005183 - RNA, 19 nt, Artificial Sequence
  Description of Artificial Sequence: Synthetic oligonucleotide
caucaaaucagcaagacgg

SEQ ID NO: 2005184 - RNA, 19 nt, Artificial Sequence
  Description of Artificial Sequence: Synthetic oligonucleotide
uuugauuugaccuacacau

SEQ ID NO: 2005185 - RNA, 19 nt, Artificial Sequence
  Description of Artificial Sequence: Synthetic oligonucleotide
uguacaaacuaucugaaca

SEQ ID NO: 2005186 - RNA, 19 nt, Artificial Sequence
  Description of Artificial Sequence: Synthetic oligonucleotide
ucggucaucaaaauaaggg

SEQ ID NO: 2005187 - RNA, 19 nt, Artificial Sequence
  Description of Artificial Sequence: Synthetic oligonucleotide
ugugcauagaaaauggcag

SEQ ID NO: 2005188 - RNA, 19 nt, Artificial Sequence
  Description of Artificial Sequence: Synthetic oligonucleotide
aagucuacguaauuugugg

SEQ ID NO: 2005189 - RNA, 19 nt, Artificial Sequence
  Description of Artificial Sequence: Synthetic oligonucleotide
uuauuauucuuccaugugc

SEQ ID NO: 2005190 - RNA, 19 nt, Artificial Sequence
  Description of Artificial Sequence: Synthetic oligonucleotide
uuuaguggaauaaaagucu

SEQ ID NO: 2005191 - RNA, 19 nt, Artificial Sequence
  Description of Artificial Sequence: Synthetic oligonucleotide
uugauuucaguccauacug

SEQ ID NO: 2005192 - RNA, 19 nt, Artificial Sequence
  Description of Artificial Sequence: Synthetic oligonucleotide
aucuugauaguacagcucg

SEQ ID NO: 2005193 - RNA, 19 nt, Artificial Sequence
  Description of Artificial Sequence: Synthetic oligonucleotide
uaguaagucauccaguuca

SEQ ID NO: 2005194 - RNA, 19 nt, Artificial Sequence
  Description of Artificial Sequence: Synthetic oligonucleotide
uuauccauccucaaaagcu

SEQ ID NO: 2005195 - RNA, 19 nt, Artificial Sequence
  Description of Artificial Sequence: Synthetic oligonucleotide
aaacacuucacucauuccu

SEQ ID NO: 2005196 - RNA, 19 nt, Artificial Sequence
  Description of Artificial Sequence: Synthetic oligonucleotide
ugaguaaucaguagaagcu

SEQ ID NO: 2005197 - RNA, 19 nt, Artificial Sequence
  Description of Artificial Sequence: Synthetic oligonucleotide
uugaguaaucaguagaagc

SEQ ID NO: 2005198 - RNA, 19 nt, Artificial Sequence
  Description of Artificial Sequence: Synthetic oligonucleotide
uauuuuauuauucuuccau

SEQ ID NO: 2005199 - RNA, 19 nt, Artificial Sequence
  Description of Artificial Sequence: Synthetic oligonucleotide
auuauccauccucaaaagc

SEQ ID NO: 2005200 - RNA, 19 nt, Artificial Sequence
  Description of Artificial Sequence: Synthetic oligonucleotide
aucaguagaagcuggaaag

SEQ ID NO: 2005201 - RNA, 19 nt, Artificial Sequence
  Description of Artificial Sequence: Synthetic oligonucleotide
aauaagggucuucauagcu

SEQ ID NO: 2005202 - RNA, 19 nt, Artificial Sequence
  Description of Artificial Sequence: Synthetic oligonucleotide
gguggagucaucuugauag

SEQ ID NO: 2005203 - RNA, 19 nt, Artificial Sequence
  Description of Artificial Sequence: Synthetic oligonucleotide
ucauuauccauccucaaaa

SEQ ID NO: 2005204 - RNA, 19 nt, Artificial Sequence
  Description of Artificial Sequence: Synthetic oligonucleotide
uauuauucuuccaugugca

SEQ ID NO: 2005205 - RNA, 19 nt, Artificial Sequence
  Description of Artificial Sequence: Synthetic oligonucleotide
acgguuuuaccacugacgg

SEQ ID NO: 2005206 - RNA, 19 nt, Artificial Sequence
  Description of Artificial Sequence: Synthetic oligonucleotide
aguucauuuaguccgagca

SEQ ID NO: 2005207 - RNA, 19 nt, Artificial Sequence
  Description of Artificial Sequence: Synthetic oligonucleotide
uacgguuuuaccacugacg

SEQ ID NO: 2005208 - RNA, 19 nt, Artificial Sequence
  Description of Artificial Sequence: Synthetic oligonucleotide
ugcaaguacaaccuguaug

SEQ ID NO: 2005209 - RNA, 19 nt, Artificial Sequence
  Description of Artificial Sequence: Synthetic oligonucleotide
aagguaugaaauuuccacu

SEQ ID NO: 2005210 - RNA, 19 nt, Artificial Sequence
  Description of Artificial Sequence: Synthetic oligonucleotide
uggaaagugaacucgguca

SEQ ID NO: 2005211 - RNA, 19 nt, Artificial Sequence
  Description of Artificial Sequence: Synthetic oligonucleotide
auuuugauuugaccuacac

SEQ ID NO: 2005212 - RNA, 19 nt, Artificial Sequence
  Description of Artificial Sequence: Synthetic oligonucleotide
ucguuuaguggaauaaaag

SEQ ID NO: 2005213 - RNA, 19 nt, Artificial Sequence
  Description of Artificial Sequence: Synthetic oligonucleotide
uuuugauuugaccuacaca

SEQ ID NO: 2005214 - RNA, 19 nt, Artificial Sequence
  Description of Artificial Sequence: Synthetic oligonucleotide
agcaagacggacuuuucac

SEQ ID NO: 2005215 - RNA, 19 nt, Artificial Sequence
  Description of Artificial Sequence: Synthetic oligonucleotide
uaagaaggucguuuagugg

SEQ ID NO: 2005216 - RNA, 19 nt, Artificial Sequence
  Description of Artificial Sequence: Synthetic oligonucleotide
ucugucauuauccauccuc

SEQ ID NO: 2005217 - RNA, 19 nt, Artificial Sequence
  Description of Artificial Sequence: Synthetic oligonucleotide
ucugaacauaacuuuauuc

SEQ ID NO: 2005218 - RNA, 19 nt, Artificial Sequence
  Description of Artificial Sequence: Synthetic oligonucleotide
auuucaucaucaaaucagc

SEQ ID NO: 2005219 - RNA, 19 nt, Artificial Sequence
  Description of Artificial Sequence: Synthetic oligonucleotide
uacuguucggcucuguaag

SEQ ID NO: 2005220 - RNA, 19 nt, Artificial Sequence
  Description of Artificial Sequence: Synthetic oligonucleotide
uaugaaauuuccacuauuu

SEQ ID NO: 2005221 - RNA, 19 nt, Artificial Sequence
  Description of Artificial Sequence: Synthetic oligonucleotide
uuugugguugauuucaguc

SEQ ID NO: 2005222 - RNA, 19 nt, Artificial Sequence
  Description of Artificial Sequence: Synthetic oligonucleotide
caauccaagcaaaaguuag

SEQ ID NO: 2005223 - RNA, 19 nt, Artificial Sequence
  Description of Artificial Sequence: Synthetic oligonucleotide
ugauaguacagcucguacc

SEQ ID NO: 2005224 - RNA, 19 nt, Artificial Sequence
  Description of Artificial Sequence: Synthetic oligonucleotide
uccaguugccagcagagag

SEQ ID NO: 2005225 - RNA, 19 nt, Artificial Sequence
  Description of Artificial Sequence: Synthetic oligonucleotide
uggaauaaaagucuacgua

SEQ ID NO: 2005226 - RNA, 19 nt, Artificial Sequence
  Description of Artificial Sequence: Synthetic oligonucleotide
gauaguacagcucguacca

SEQ ID NO: 2005227 - RNA, 19 nt, Artificial Sequence
  Description of Artificial Sequence: Synthetic oligonucleotide
aaucaguagaagcuggaaa

SEQ ID NO: 2005228 - RNA, 19 nt, Artificial Sequence
  Description of Artificial Sequence: Synthetic oligonucleotide
gauaugacagguuccucag

SEQ ID NO: 2005229 - RNA, 19 nt, Artificial Sequence
  Description of Artificial Sequence: Synthetic oligonucleotide
ucacccauuucucaaaccu

SEQ ID NO: 2005230 - RNA, 19 nt, Artificial Sequence
  Description of Artificial Sequence: Synthetic oligonucleotide
aaccuguaugcauccaagg

SEQ ID NO: 2005231 - RNA, 19 nt, Artificial Sequence
  Description of Artificial Sequence: Synthetic oligonucleotide
aagggcauccauuuuauua

SEQ ID NO: 2005232 - RNA, 19 nt, Artificial Sequence
  Description of Artificial Sequence: Synthetic oligonucleotide
ugaugcuacacccacgagu

SEQ ID NO: 2005233 - RNA, 19 nt, Artificial Sequence
  Description of Artificial Sequence: Synthetic oligonucleotide
auuuccacuauuuuauuau

SEQ ID NO: 2005234 - RNA, 19 nt, Artificial Sequence
  Description of Artificial Sequence: Synthetic oligonucleotide
ucaucuugauaguacagcu

SEQ ID NO: 2005235 - RNA, 19 nt, Artificial Sequence
  Description of Artificial Sequence: Synthetic oligonucleotide
aacucggucaucaaaauaa

SEQ ID NO: 2005236 - RNA, 19 nt, Artificial Sequence
  Description of Artificial Sequence: Synthetic oligonucleotide
gauaggcccaacuccaucc

SEQ ID NO: 2005237 - RNA, 19 nt, Artificial Sequence
  Description of Artificial Sequence: Synthetic oligonucleotide
uaugcugcgaacuuccagu

SEQ ID NO: 2005238 - RNA, 19 nt, Artificial Sequence
  Description of Artificial Sequence: Synthetic oligonucleotide
ugcuaacagagucagguac

SEQ ID NO: 2005239 - RNA, 19 nt, Artificial Sequence
  Description of Artificial Sequence: Synthetic oligonucleotide
uuuuccuaguaagucaucc

SEQ ID NO: 2005240 - RNA, 19 nt, Artificial Sequence
  Description of Artificial Sequence: Synthetic oligonucleotide
uucaucaucaaaucagcaa

SEQ ID NO: 2005241 - RNA, 19 nt, Artificial Sequence
  Description of Artificial Sequence: Synthetic oligonucleotide
uucaccucaauccaagcaa

SEQ ID NO: 2005242 - RNA, 19 nt, Artificial Sequence
  Description of Artificial Sequence: Synthetic oligonucleotide
uugugguugauuucagucc

SEQ ID NO: 2005243 - RNA, 19 nt, Artificial Sequence
  Description of Artificial Sequence: Synthetic oligonucleotide
aacagagucagguacgguu

SEQ ID NO: 2005244 - RNA, 19 nt, Artificial Sequence
  Description of Artificial Sequence: Synthetic oligonucleotide
aagaaagagucccucgcca

SEQ ID NO: 2005245 - RNA, 19 nt, Artificial Sequence
  Description of Artificial Sequence: Synthetic oligonucleotide
uucauagcuacgaggagac

SEQ ID NO: 2005246 - RNA, 19 nt, Artificial Sequence
  Description of Artificial Sequence: Synthetic oligonucleotide
aguacaaccuguaugcauc

SEQ ID NO: 2005247 - RNA, 19 nt, Artificial Sequence
  Description of Artificial Sequence: Synthetic oligonucleotide
agacucuuuuccuaguaag

SEQ ID NO: 2005248 - RNA, 19 nt, Artificial Sequence
  Description of Artificial Sequence: Synthetic oligonucleotide
ucaggguacacacacaguu

SEQ ID NO: 2005249 - RNA, 19 nt, Artificial Sequence
  Description of Artificial Sequence: Synthetic oligonucleotide
guuuaguggaauaaaaguc

SEQ ID NO: 2005250 - RNA, 19 nt, Artificial Sequence
  Description of Artificial Sequence: Synthetic oligonucleotide
uuucaccucaauccaagca

SEQ ID NO: 2005251 - RNA, 19 nt, Artificial Sequence
  Description of Artificial Sequence: Synthetic oligonucleotide
uggaacuuucugcuaacag

SEQ ID NO: 2005252 - RNA, 19 nt, Artificial Sequence
  Description of Artificial Sequence: Synthetic oligonucleotide
ucaacaaggauggggagcc

SEQ ID NO: 2005253 - RNA, 19 nt, Artificial Sequence
  Description of Artificial Sequence: Synthetic oligonucleotide
agaaaauggcagcaugaag

SEQ ID NO: 2005254 - RNA, 19 nt, Artificial Sequence
  Description of Artificial Sequence: Synthetic oligonucleotide
uuuaguccgagcagucggg

SEQ ID NO: 2005255 - RNA, 19 nt, Artificial Sequence
  Description of Artificial Sequence: Synthetic oligonucleotide
ucuguaauuuugauuugac

SEQ ID NO: 2005256 - RNA, 19 nt, Artificial Sequence
  Description of Artificial Sequence: Synthetic oligonucleotide
ucuuaagguaugaaauuuc

SEQ ID NO: 2005257 - RNA, 19 nt, Artificial Sequence
  Description of Artificial Sequence: Synthetic oligonucleotide
ucuacguaauuugugguug

SEQ ID NO: 2005258 - RNA, 19 nt, Artificial Sequence
  Description of Artificial Sequence: Synthetic oligonucleotide
ucagguacgguuuuaccac

SEQ ID NO: 2005259 - RNA, 19 nt, Artificial Sequence
  Description of Artificial Sequence: Synthetic oligonucleotide
uccaugugcauagaaaaug

SEQ ID NO: 2005260 - RNA, 19 nt, Artificial Sequence
  Description of Artificial Sequence: Synthetic oligonucleotide
acuaucugaacauaacuuu

SEQ ID NO: 2005261 - RNA, 19 nt, Artificial Sequence
  Description of Artificial Sequence: Synthetic oligonucleotide
uacagcucguaccagugcc

SEQ ID NO: 2005262 - RNA, 19 nt, Artificial Sequence
  Description of Artificial Sequence: Synthetic oligonucleotide
agcaagaaagagucccucg

SEQ ID NO: 2005263 - RNA, 19 nt, Artificial Sequence
  Description of Artificial Sequence: Synthetic oligonucleotide
aaagucuacguaauuugug

SEQ ID NO: 2005264 - RNA, 19 nt, Artificial Sequence
  Description of Artificial Sequence: Synthetic oligonucleotide
ccaagcaaaaguuagcaag

SEQ ID NO: 2005265 - RNA, 19 nt, Artificial Sequence
  Description of Artificial Sequence: Synthetic oligonucleotide
cauccaguucauuuagucc

SEQ ID NO: 2005266 - RNA, 19 nt, Artificial Sequence
  Description of Artificial Sequence: Synthetic oligonucleotide
uaagggucuucauagcuac

SEQ ID NO: 2005267 - RNA, 19 nt, Artificial Sequence
  Description of Artificial Sequence: Synthetic oligonucleotide
agucagguacgguuuuacc

SEQ ID NO: 2005268 - RNA, 19 nt, Artificial Sequence
  Description of Artificial Sequence: Synthetic oligonucleotide
aaaagucuacguaauuugu

SEQ ID NO: 2005269 - RNA, 19 nt, Artificial Sequence
  Description of Artificial Sequence: Synthetic oligonucleotide
uuucaguccauacuguguu

SEQ ID NO: 2005270 - RNA, 19 nt, Artificial Sequence
  Description of Artificial Sequence: Synthetic oligonucleotide
aguaaucaguagaagcugg

SEQ ID NO: 2005271 - RNA, 19 nt, Artificial Sequence
  Description of Artificial Sequence: Synthetic oligonucleotide
auagcuacgaggagacugc

SEQ ID NO: 2005272 - RNA, 19 nt, Artificial Sequence
  Description of Artificial Sequence: Synthetic oligonucleotide
uugauaguacagcucguac

SEQ ID NO: 2005273 - RNA, 19 nt, Artificial Sequence
  Description of Artificial Sequence: Synthetic oligonucleotide
ggaauaaaagucuacguaa

SEQ ID NO: 2005274 - RNA, 19 nt, Artificial Sequence
  Description of Artificial Sequence: Synthetic oligonucleotide
uuugaccuacacauacccc

SEQ ID NO: 2005275 - RNA, 19 nt, Artificial Sequence
  Description of Artificial Sequence: Synthetic oligonucleotide
ucuugaugcuacacccacg

SEQ ID NO: 2005276 - RNA, 19 nt, Artificial Sequence
  Description of Artificial Sequence: Synthetic oligonucleotide
ucaaaagcucaacaaggau

SEQ ID NO: 2005277 - RNA, 19 nt, Artificial Sequence
  Description of Artificial Sequence: Synthetic oligonucleotide
ucgccaggcgucuugaugc

SEQ ID NO: 2005278 - RNA, 19 nt, Artificial Sequence
  Description of Artificial Sequence: Synthetic oligonucleotide
aacuaucugaacauaacuu

SEQ ID NO: 2005279 - RNA, 19 nt, Artificial Sequence
  Description of Artificial Sequence: Synthetic oligonucleotide
uaauuuugauuugaccuac

SEQ ID NO: 2005280 - RNA, 19 nt, Artificial Sequence
  Description of Artificial Sequence: Synthetic oligonucleotide
uuagcaagaaagagucccu

SEQ ID NO: 2005281 - RNA, 19 nt, Artificial Sequence
  Description of Artificial Sequence: Synthetic oligonucleotide
cauuauccauccucaaaag

SEQ ID NO: 2005282 - RNA, 19 nt, Artificial Sequence
  Description of Artificial Sequence: Synthetic oligonucleotide
ggagagauccggcagagcc

SEQ ID NO: 2005283 - RNA, 19 nt, Artificial Sequence
  Description of Artificial Sequence: Synthetic oligonucleotide
ccucaaaagcucaacaagg

SEQ ID NO: 2005284 - RNA, 19 nt, Artificial Sequence
  Description of Artificial Sequence: Synthetic oligonucleotide
cauagcuacgaggagacug

SEQ ID NO: 2005285 - RNA, 19 nt, Artificial Sequence
  Description of Artificial Sequence: Synthetic oligonucleotide
guucauuuaguccgagcag

SEQ ID NO: 2005286 - RNA, 19 nt, Artificial Sequence
  Description of Artificial Sequence: Synthetic oligonucleotide
ucuucauagcuacgaggag

SEQ ID NO: 2005287 - RNA, 19 nt, Artificial Sequence
  Description of Artificial Sequence: Synthetic oligonucleotide
ugcauagaaaauggcagca

SEQ ID NO: 2005288 - RNA, 19 nt, Artificial Sequence
  Description of Artificial Sequence: Synthetic oligonucleotide
auaggcccaacuccauccc

SEQ ID NO: 2005289 - RNA, 19 nt, Artificial Sequence
  Description of Artificial Sequence: Synthetic oligonucleotide
aggguacacacacaguucu

SEQ ID NO: 2005290 - RNA, 19 nt, Artificial Sequence
  Description of Artificial Sequence: Synthetic oligonucleotide
acacccacgagucugggga

SEQ ID NO: 2005291 - RNA, 19 nt, Artificial Sequence
  Description of Artificial Sequence: Synthetic oligonucleotide
ugggagacucuuuuccuag

SEQ ID NO: 2005292 - RNA, 19 nt, Artificial Sequence
  Description of Artificial Sequence: Synthetic oligonucleotide
cucggucaucaaaauaagg

SEQ ID NO: 2005293 - RNA, 19 nt, Artificial Sequence
  Description of Artificial Sequence: Synthetic oligonucleotide
agggcauccauuuuauuau

SEQ ID NO: 2005294 - RNA, 19 nt, Artificial Sequence
  Description of Artificial Sequence: Synthetic oligonucleotide
ucuggagagauccggcaga

SEQ ID NO: 2005295 - RNA, 19 nt, Artificial Sequence
  Description of Artificial Sequence: Synthetic oligonucleotide
gaacauaacuuuauucaca

SEQ ID NO: 2005296 - RNA, 19 nt, Artificial Sequence
  Description of Artificial Sequence: Synthetic oligonucleotide
acgaggagacugcaaguac

SEQ ID NO: 2005297 - RNA, 19 nt, Artificial Sequence
  Description of Artificial Sequence: Synthetic oligonucleotide
ugauuucaguccauacugu

SEQ ID NO: 2005298 - RNA, 19 nt, Artificial Sequence
  Description of Artificial Sequence: Synthetic oligonucleotide
agguaugaaauuuccacua

SEQ ID NO: 2005299 - RNA, 19 nt, Artificial Sequence
  Description of Artificial Sequence: Synthetic oligonucleotide
gacuuuucaccucaaucca

SEQ ID NO: 2005300 - RNA, 19 nt, Artificial Sequence
  Description of Artificial Sequence: Synthetic oligonucleotide
gaguaaucaguagaagcug

SEQ ID NO: 2005301 - RNA, 19 nt, Artificial Sequence
  Description of Artificial Sequence: Synthetic oligonucleotide
acauaccccaucucauuuc

SEQ ID NO: 2005302 - RNA, 19 nt, Artificial Sequence
  Description of Artificial Sequence: Synthetic oligonucleotide
uucuuaagguaugaaauuu

SEQ ID NO: 2005303 - RNA, 19 nt, Artificial Sequence
  Description of Artificial Sequence: Synthetic oligonucleotide
gugcauagaaaauggcagc

SEQ ID NO: 2005304 - RNA, 19 nt, Artificial Sequence
  Description of Artificial Sequence: Synthetic oligonucleotide
caagaaagagucccucgcc

SEQ ID NO: 2005305 - RNA, 19 nt, Artificial Sequence
  Description of Artificial Sequence: Synthetic oligonucleotide
gucagguacgguuuuacca

SEQ ID NO: 2005306 - RNA, 19 nt, Artificial Sequence
  Description of Artificial Sequence: Synthetic oligonucleotide
acaacucugucauuaucca

SEQ ID NO: 2005307 - RNA, 19 nt, Artificial Sequence
  Description of Artificial Sequence: Synthetic oligonucleotide
cauacuguguugaguaauc

SEQ ID NO: 2005308 - RNA, 19 nt, Artificial Sequence
  Description of Artificial Sequence: Synthetic oligonucleotide
agucuuugcugggagacuc

SEQ ID NO: 2005309 - RNA, 19 nt, Artificial Sequence
  Description of Artificial Sequence: Synthetic oligonucleotide
uccuaguaagucauccagu

SEQ ID NO: 2005310 - RNA, 19 nt, Artificial Sequence
  Description of Artificial Sequence: Synthetic oligonucleotide
uguucggcucuguaagaag

SEQ ID NO: 2005311 - RNA, 19 nt, Artificial Sequence
  Description of Artificial Sequence: Synthetic oligonucleotide
uuuucaccucaauccaagc

SEQ ID NO: 2005312 - RNA, 19 nt, Artificial Sequence
  Description of Artificial Sequence: Synthetic oligonucleotide
guguugaguaaucaguaga

SEQ ID NO: 2005313 - RNA, 19 nt, Artificial Sequence
  Description of Artificial Sequence: Synthetic oligonucleotide
guucggcucuguaagaagg

SEQ ID NO: 2005314 - RNA, 19 nt, Artificial Sequence
  Description of Artificial Sequence: Synthetic oligonucleotide
cagggauaggcccaacucc

SEQ ID NO: 2005315 - RNA, 19 nt, Artificial Sequence
  Description of Artificial Sequence: Synthetic oligonucleotide
accuguaugcauccaaggu

SEQ ID NO: 2005316 - RNA, 19 nt, Artificial Sequence
  Description of Artificial Sequence: Synthetic oligonucleotide
uacacauaccccaucucau

SEQ ID NO: 2005317 - RNA, 19 nt, Artificial Sequence
  Description of Artificial Sequence: Synthetic oligonucleotide
gagucaucuugauaguaca

SEQ ID NO: 2005318 - RNA, 19 nt, Artificial Sequence
  Description of Artificial Sequence: Synthetic oligonucleotide
uuuccggacagcugcccgg

SEQ ID NO: 2005319 - RNA, 19 nt, Artificial Sequence
  Description of Artificial Sequence: Synthetic oligonucleotide
gcauccaaggucuuccugg

SEQ ID NO: 2005320 - RNA, 19 nt, Artificial Sequence
  Description of Artificial Sequence: Synthetic oligonucleotide
uaguggaauaaaagucuac

SEQ ID NO: 2005321 - RNA, 19 nt, Artificial Sequence
  Description of Artificial Sequence: Synthetic oligonucleotide
cuugguucugagucuuugc

SEQ ID NO: 2005322 - RNA, 19 nt, Artificial Sequence
  Description of Artificial Sequence: Synthetic oligonucleotide
ggucuucauagcuacgagg

SEQ ID NO: 2005323 - RNA, 19 nt, Artificial Sequence
  Description of Artificial Sequence: Synthetic oligonucleotide
gcuacgaggagacugcaag

SEQ ID NO: 2005324 - RNA, 19 nt, Artificial Sequence
  Description of Artificial Sequence: Synthetic oligonucleotide
gauuugaccuacacauacc

SEQ ID NO: 2005325 - RNA, 19 nt, Artificial Sequence
  Description of Artificial Sequence: Synthetic oligonucleotide
acacuucacucauuccuuc

SEQ ID NO: 2005326 - RNA, 19 nt, Artificial Sequence
  Description of Artificial Sequence: Synthetic oligonucleotide
agucuacguaauuuguggu

SEQ ID NO: 2005327 - RNA, 19 nt, Artificial Sequence
  Description of Artificial Sequence: Synthetic oligonucleotide
cuaacagagucagguacgg

SEQ ID NO: 2005328 - RNA, 19 nt, Artificial Sequence
  Description of Artificial Sequence: Synthetic oligonucleotide
ugaagggcauccauuuuau

SEQ ID NO: 2005329 - RNA, 19 nt, Artificial Sequence
  Description of Artificial Sequence: Synthetic oligonucleotide
ccaugugcauagaaaaugg

SEQ ID NO: 2005330 - RNA, 19 nt, Artificial Sequence
  Description of Artificial Sequence: Synthetic oligonucleotide
gucuucauagcuacgagga

SEQ ID NO: 2005331 - RNA, 19 nt, Artificial Sequence
  Description of Artificial Sequence: Synthetic oligonucleotide
cuugaugcuacacccacga

SEQ ID NO: 2005332 - RNA, 19 nt, Artificial Sequence
  Description of Artificial Sequence: Synthetic oligonucleotide
augaagggcauccauuuua

SEQ ID NO: 2005333 - RNA, 19 nt, Artificial Sequence
  Description of Artificial Sequence: Synthetic oligonucleotide
acugacgggugccacagca

SEQ ID NO: 2005334 - RNA, 19 nt, Artificial Sequence
  Description of Artificial Sequence: Synthetic oligonucleotide
augugcauagaaaauggca

SEQ ID NO: 2005335 - RNA, 19 nt, Artificial Sequence
  Description of Artificial Sequence: Synthetic oligonucleotide
auaugacagguuccucagg

SEQ ID NO: 2005336 - RNA, 19 nt, Artificial Sequence
  Description of Artificial Sequence: Synthetic oligonucleotide
accuacacauaccccaucu

SEQ ID NO: 2005337 - RNA, 19 nt, Artificial Sequence
  Description of Artificial Sequence: Synthetic oligonucleotide
ucauuuaguccgagcaguc

SEQ ID NO: 2005338 - RNA, 19 nt, Artificial Sequence
  Description of Artificial Sequence: Synthetic oligonucleotide
cuacacauaccccaucuca

SEQ ID NO: 2005339 - RNA, 19 nt, Artificial Sequence
  Description of Artificial Sequence: Synthetic oligonucleotide
aagagucccucgccaggcg

SEQ ID NO: 2005340 - RNA, 19 nt, Artificial Sequence
  Description of Artificial Sequence: Synthetic oligonucleotide
uuccaugugcauagaaaau

SEQ ID NO: 2005341 - RNA, 19 nt, Artificial Sequence
  Description of Artificial Sequence: Synthetic oligonucleotide
ucaccucaauccaagcaaa

SEQ ID NO: 2005342 - RNA, 19 nt, Artificial Sequence
  Description of Artificial Sequence: Synthetic oligonucleotide
ucaguccauacuguguuga

SEQ ID NO: 2005343 - RNA, 19 nt, Artificial Sequence
  Description of Artificial Sequence: Synthetic oligonucleotide
cucaacaaggauggggagc

SEQ ID NO: 2005344 - RNA, 19 nt, Artificial Sequence
  Description of Artificial Sequence: Synthetic oligonucleotide
ucaguagaagcuggaaagu

SEQ ID NO: 2005345 - RNA, 19 nt, Artificial Sequence
  Description of Artificial Sequence: Synthetic oligonucleotide
gcugcgaacuuccaguugc

SEQ ID NO: 2005346 - RNA, 19 nt, Artificial Sequence
  Description of Artificial Sequence: Synthetic oligonucleotide
ugcuacacccacgagucug

SEQ ID NO: 2005347 - RNA, 19 nt, Artificial Sequence
  Description of Artificial Sequence: Synthetic oligonucleotide
uucacccauuucucaaacc

SEQ ID NO: 2005348 - RNA, 19 nt, Artificial Sequence
  Description of Artificial Sequence: Synthetic oligonucleotide
auuugugguugauuucagu

SEQ ID NO: 2005349 - RNA, 19 nt, Artificial Sequence
  Description of Artificial Sequence: Synthetic oligonucleotide
cauuuaguccgagcagucg

SEQ ID NO: 2005350 - RNA, 19 nt, Artificial Sequence
  Description of Artificial Sequence: Synthetic oligonucleotide
agcaaaaguuagcaagaaa

SEQ ID NO: 2005351 - RNA, 19 nt, Artificial Sequence
  Description of Artificial Sequence: Synthetic oligonucleotide
accucaauccaagcaaaag

SEQ ID NO: 2005352 - RNA, 19 nt, Artificial Sequence
  Description of Artificial Sequence: Synthetic oligonucleotide
cugucauuauccauccuca

SEQ ID NO: 2005353 - RNA, 19 nt, Artificial Sequence
  Description of Artificial Sequence: Synthetic oligonucleotide
aacaaggauggggagcccu

SEQ ID NO: 2005354 - RNA, 19 nt, Artificial Sequence
  Description of Artificial Sequence: Synthetic oligonucleotide
uccaguucauuuaguccga

SEQ ID NO: 2005355 - RNA, 19 nt, Artificial Sequence
  Description of Artificial Sequence: Synthetic oligonucleotide
ucuugauaguacagcucgu

SEQ ID NO: 2005356 - RNA, 19 nt, Artificial Sequence
  Description of Artificial Sequence: Synthetic oligonucleotide
acaaacuaucugaacauaa

SEQ ID NO: 2005357 - RNA, 19 nt, Artificial Sequence
  Description of Artificial Sequence: Synthetic oligonucleotide
auuucacccauuucucaaa

SEQ ID NO: 2005358 - RNA, 19 nt, Artificial Sequence
  Description of Artificial Sequence: Synthetic oligonucleotide
gucuugaugcuacacccac

SEQ ID NO: 2005359 - RNA, 19 nt, Artificial Sequence
  Description of Artificial Sequence: Synthetic oligonucleotide
agauccggcagagccuucc

SEQ ID NO: 2005360 - RNA, 19 nt, Artificial Sequence
  Description of Artificial Sequence: Synthetic oligonucleotide
agacggacuuuucaccuca

SEQ ID NO: 2005361 - RNA, 19 nt, Artificial Sequence
  Description of Artificial Sequence: Synthetic oligonucleotide
guacaaccuguaugcaucc

SEQ ID NO: 2005362 - RNA, 19 nt, Artificial Sequence
  Description of Artificial Sequence: Synthetic oligonucleotide
cuaucugaacauaacuuua

SEQ ID NO: 2005363 - RNA, 19 nt, Artificial Sequence
  Description of Artificial Sequence: Synthetic oligonucleotide
guccauacuguguugagua

SEQ ID NO: 2005364 - RNA, 19 nt, Artificial Sequence
  Description of Artificial Sequence: Synthetic oligonucleotide
gauguaugcugcgaacuuc

SEQ ID NO: 2005365 - RNA, 19 nt, Artificial Sequence
  Description of Artificial Sequence: Synthetic oligonucleotide
uugauuugaccuacacaua

SEQ ID NO: 2005366 - RNA, 19 nt, Artificial Sequence
  Description of Artificial Sequence: Synthetic oligonucleotide
ugaacucggucaucaaaau

SEQ ID NO: 2005367 - RNA, 19 nt, Artificial Sequence
  Description of Artificial Sequence: Synthetic oligonucleotide
uaaucaguagaagcuggaa

SEQ ID NO: 2005368 - RNA, 19 nt, Artificial Sequence
  Description of Artificial Sequence: Synthetic oligonucleotide
cagccgauaugacagguuc

SEQ ID NO: 2005369 - RNA, 19 nt, Artificial Sequence
  Description of Artificial Sequence: Synthetic oligonucleotide
gcaagaaagagucccucgc

SEQ ID NO: 2005370 - RNA, 19 nt, Artificial Sequence
  Description of Artificial Sequence: Synthetic oligonucleotide
uucggcucuguaagaaggu

SEQ ID NO: 2005371 - RNA, 19 nt, Artificial Sequence
  Description of Artificial Sequence: Synthetic oligonucleotide
cuuuccggacagcugcccg

SEQ ID NO: 2005372 - RNA, 19 nt, Artificial Sequence
  Description of Artificial Sequence: Synthetic oligonucleotide
agguucuggagagauccgg

SEQ ID NO: 2005373 - RNA, 19 nt, Artificial Sequence
  Description of Artificial Sequence: Synthetic oligonucleotide
cuaguaagucauccaguuc

SEQ ID NO: 2005374 - RNA, 19 nt, Artificial Sequence
  Description of Artificial Sequence: Synthetic oligonucleotide
aagcaaaaguuagcaagaa

SEQ ID NO: 2005375 - RNA, 19 nt, Artificial Sequence
  Description of Artificial Sequence: Synthetic oligonucleotide
aaggucguuuaguggaaua

SEQ ID NO: 2005376 - RNA, 19 nt, Artificial Sequence
  Description of Artificial Sequence: Synthetic oligonucleotide
agcuggaaagugaacucgg

SEQ ID NO: 2005377 - RNA, 19 nt, Artificial Sequence
  Description of Artificial Sequence: Synthetic oligonucleotide
aguccgagcagucgggccu

SEQ ID NO: 2005378 - RNA, 19 nt, Artificial Sequence
  Description of Artificial Sequence: Synthetic oligonucleotide
caucaucaaaucagcaaga

SEQ ID NO: 2005379 - RNA, 19 nt, Artificial Sequence
  Description of Artificial Sequence: Synthetic oligonucleotide
uacacccacgagucugggg

SEQ ID NO: 2005380 - RNA, 19 nt, Artificial Sequence
  Description of Artificial Sequence: Synthetic oligonucleotide
ugacgggugccacagcauc

SEQ ID NO: 2005381 - RNA, 19 nt, Artificial Sequence
  Description of Artificial Sequence: Synthetic oligonucleotide
auuauucuuccaugugcau

SEQ ID NO: 2005382 - RNA, 19 nt, Artificial Sequence
  Description of Artificial Sequence: Synthetic oligonucleotide
uugaugcuacacccacgag

SEQ ID NO: 2005383 - RNA, 19 nt, Artificial Sequence
  Description of Artificial Sequence: Synthetic oligonucleotide
ggacccuggguacuguucg

SEQ ID NO: 2005384 - RNA, 19 nt, Artificial Sequence
  Description of Artificial Sequence: Synthetic oligonucleotide
aauuuugauuugaccuaca

SEQ ID NO: 2005385 - RNA, 19 nt, Artificial Sequence
  Description of Artificial Sequence: Synthetic oligonucleotide
gcuaacagagucagguacg

SEQ ID NO: 2005386 - RNA, 19 nt, Artificial Sequence
  Description of Artificial Sequence: Synthetic oligonucleotide
gcgucuugaugcuacaccc

SEQ ID NO: 2005387 - RNA, 19 nt, Artificial Sequence
  Description of Artificial Sequence: Synthetic oligonucleotide
caucuguaauuuugauuug

SEQ ID NO: 2005388 - RNA, 19 nt, Artificial Sequence
  Description of Artificial Sequence: Synthetic oligonucleotide
agacacaacucugucauua

SEQ ID NO: 2005389 - RNA, 19 nt, Artificial Sequence
  Description of Artificial Sequence: Synthetic oligonucleotide
uguaugcugcgaacuucca

SEQ ID NO: 2005390 - RNA, 19 nt, Artificial Sequence
  Description of Artificial Sequence: Synthetic oligonucleotide
cauccucaaaagcucaaca

SEQ ID NO: 2005391 - RNA, 19 nt, Artificial Sequence
  Description of Artificial Sequence: Synthetic oligonucleotide
caguucauuuaguccgagc

SEQ ID NO: 2005392 - RNA, 19 nt, Artificial Sequence
  Description of Artificial Sequence: Synthetic oligonucleotide
gguacacacacaguucucc

SEQ ID NO: 2005393 - RNA, 19 nt, Artificial Sequence
  Description of Artificial Sequence: Synthetic oligonucleotide
ugucauuauccauccucaa

SEQ ID NO: 2005394 - RNA, 19 nt, Artificial Sequence
  Description of Artificial Sequence: Synthetic oligonucleotide
gucauuauccauccucaaa

SEQ ID NO: 2005395 - RNA, 19 nt, Artificial Sequence
  Description of Artificial Sequence: Synthetic oligonucleotide
agccgauaugacagguucc

SEQ ID NO: 2005396 - RNA, 19 nt, Artificial Sequence
  Description of Artificial Sequence: Synthetic oligonucleotide
acccauuucucaaaccucu

SEQ ID NO: 2005397 - RNA, 19 nt, Artificial Sequence
  Description of Artificial Sequence: Synthetic oligonucleotide
gcaagacggacuuuucacc

SEQ ID NO: 2005398 - RNA, 19 nt, Artificial Sequence
  Description of Artificial Sequence: Synthetic oligonucleotide
gguugauuucaguccauac

SEQ ID NO: 2005399 - RNA, 19 nt, Artificial Sequence
  Description of Artificial Sequence: Synthetic oligonucleotide
agggucuucauagcuacga

SEQ ID NO: 2005400 - RNA, 19 nt, Artificial Sequence
  Description of Artificial Sequence: Synthetic oligonucleotide
guggaauaaaagucuacgu

SEQ ID NO: 2005401 - RNA, 19 nt, Artificial Sequence
  Description of Artificial Sequence: Synthetic oligonucleotide
guacaaacuaucugaacau

SEQ ID NO: 2005402 - RNA, 19 nt, Artificial Sequence
  Description of Artificial Sequence: Synthetic oligonucleotide
gacuuggacaguccaggga

SEQ ID NO: 2005403 - RNA, 19 nt, Artificial Sequence
  Description of Artificial Sequence: Synthetic oligonucleotide
ucagcaagacggacuuuuc

SEQ ID NO: 2005404 - RNA, 19 nt, Artificial Sequence
  Description of Artificial Sequence: Synthetic oligonucleotide
ccuguaugcauccaagguc

SEQ ID NO: 2005405 - RNA, 19 nt, Artificial Sequence
  Description of Artificial Sequence: Synthetic oligonucleotide
uacgaggagacugcaagua

SEQ ID NO: 2005406 - RNA, 19 nt, Artificial Sequence
  Description of Artificial Sequence: Synthetic oligonucleotide
cuguguugaguaaucagua

SEQ ID NO: 2005407 - RNA, 19 nt, Artificial Sequence
  Description of Artificial Sequence: Synthetic oligonucleotide
ugcugcgaacuuccaguug

SEQ ID NO: 2005408 - RNA, 19 nt, Artificial Sequence
  Description of Artificial Sequence: Synthetic oligonucleotide
acuuuccacauuucaucau

SEQ ID NO: 2005409 - RNA, 19 nt, Artificial Sequence
  Description of Artificial Sequence: Synthetic oligonucleotide
cugcgggacuuccagcucc

SEQ ID NO: 2005410 - RNA, 19 nt, Artificial Sequence
  Description of Artificial Sequence: Synthetic oligonucleotide
ggcgucuugaugcuacacc

SEQ ID NO: 2005411 - RNA, 19 nt, Artificial Sequence
  Description of Artificial Sequence: Synthetic oligonucleotide
cauaccccaucucauuuca

SEQ ID NO: 2005412 - RNA, 19 nt, Artificial Sequence
  Description of Artificial Sequence: Synthetic oligonucleotide
acucggucaucaaaauaag

SEQ ID NO: 2005413 - RNA, 19 nt, Artificial Sequence
  Description of Artificial Sequence: Synthetic oligonucleotide
auacuguguugaguaauca

SEQ ID NO: 2005414 - RNA, 19 nt, Artificial Sequence
  Description of Artificial Sequence: Synthetic oligonucleotide
gcgaacuuccaguugccag

SEQ ID NO: 2005415 - RNA, 19 nt, Artificial Sequence
  Description of Artificial Sequence: Synthetic oligonucleotide
acuguucggcucuguaaga

SEQ ID NO: 2005416 - RNA, 19 nt, Artificial Sequence
  Description of Artificial Sequence: Synthetic oligonucleotide
gaacucggucaucaaaaua

SEQ ID NO: 2005417 - RNA, 19 nt, Artificial Sequence
  Description of Artificial Sequence: Synthetic oligonucleotide
ccaguugccagcagagagg

SEQ ID NO: 2005418 - RNA, 19 nt, Artificial Sequence
  Description of Artificial Sequence: Synthetic oligonucleotide
aucaaaucagcaagacgga

SEQ ID NO: 2005419 - RNA, 19 nt, Artificial Sequence
  Description of Artificial Sequence: Synthetic oligonucleotide
caaggcaguggccacagaa

SEQ ID NO: 2005420 - RNA, 19 nt, Artificial Sequence
  Description of Artificial Sequence: Synthetic oligonucleotide
gacccuggguacuguucgg

SEQ ID NO: 2005421 - RNA, 19 nt, Artificial Sequence
  Description of Artificial Sequence: Synthetic oligonucleotide
cugcccggauguaugcugc

SEQ ID NO: 2005422 - RNA, 19 nt, Artificial Sequence
  Description of Artificial Sequence: Synthetic oligonucleotide
aacuuccaguugccagcag

SEQ ID NO: 2005423 - RNA, 19 nt, Artificial Sequence
  Description of Artificial Sequence: Synthetic oligonucleotide
aguccauacuguguugagu

SEQ ID NO: 2005424 - RNA, 19 nt, Artificial Sequence
  Description of Artificial Sequence: Synthetic oligonucleotide
aagggucuucauagcuacg

SEQ ID NO: 2005425 - RNA, 19 nt, Artificial Sequence
  Description of Artificial Sequence: Synthetic oligonucleotide
gguuggaacuuucugcuaa

SEQ ID NO: 2005426 - RNA, 19 nt, Artificial Sequence
  Description of Artificial Sequence: Synthetic oligonucleotide
guacagcucguaccagugc

SEQ ID NO: 2005427 - RNA, 19 nt, Artificial Sequence
  Description of Artificial Sequence: Synthetic oligonucleotide
uucugagucuuugcuggga

SEQ ID NO: 2005428 - RNA, 19 nt, Artificial Sequence
  Description of Artificial Sequence: Synthetic oligonucleotide
ucguaccagugccauguuc

SEQ ID NO: 2005429 - RNA, 19 nt, Artificial Sequence
  Description of Artificial Sequence: Synthetic oligonucleotide
gucguuuaguggaauaaaa

SEQ ID NO: 2005430 - RNA, 19 nt, Artificial Sequence
  Description of Artificial Sequence: Synthetic oligonucleotide
acuccaucccauugauccu

SEQ ID NO: 2005431 - RNA, 19 nt, Artificial Sequence
  Description of Artificial Sequence: Synthetic oligonucleotide
caguccauacuguguugag

SEQ ID NO: 2005432 - RNA, 19 nt, Artificial Sequence
  Description of Artificial Sequence: Synthetic oligonucleotide
acacauaccccaucucauu

SEQ ID NO: 2005433 - RNA, 19 nt, Artificial Sequence
  Description of Artificial Sequence: Synthetic oligonucleotide
guacuguucggcucuguaa

SEQ ID NO: 2005434 - RNA, 19 nt, Artificial Sequence
  Description of Artificial Sequence: Synthetic oligonucleotide
gagucagguacgguuuuac

SEQ ID NO: 2005435 - RNA, 19 nt, Artificial Sequence
  Description of Artificial Sequence: Synthetic oligonucleotide
auaguacagcucguaccag

SEQ ID NO: 2005436 - RNA, 19 nt, Artificial Sequence
  Description of Artificial Sequence: Synthetic oligonucleotide
uagcaagaaagagucccuc

SEQ ID NO: 2005437 - RNA, 19 nt, Artificial Sequence
  Description of Artificial Sequence: Synthetic oligonucleotide
aacuuucugcuaacagagu

SEQ ID NO: 2005438 - RNA, 19 nt, Artificial Sequence
  Description of Artificial Sequence: Synthetic oligonucleotide
guaaucaguagaagcugga

SEQ ID NO: 2005439 - RNA, 19 nt, Artificial Sequence
  Description of Artificial Sequence: Synthetic oligonucleotide
uccaucccauugauccucu

SEQ ID NO: 2005440 - RNA, 19 nt, Artificial Sequence
  Description of Artificial Sequence: Synthetic oligonucleotide
auaagggucuucauagcua

SEQ ID NO: 2005441 - RNA, 19 nt, Artificial Sequence
  Description of Artificial Sequence: Synthetic oligonucleotide
uugauccucuuguggaguu

SEQ ID NO: 2005442 - RNA, 19 nt, Artificial Sequence
  Description of Artificial Sequence: Synthetic oligonucleotide
cauuucacuuuccacauuu

SEQ ID NO: 2005443 - RNA, 19 nt, Artificial Sequence
  Description of Artificial Sequence: Synthetic oligonucleotide
uggacaguccagggauagg

SEQ ID NO: 2005444 - RNA, 19 nt, Artificial Sequence
  Description of Artificial Sequence: Synthetic oligonucleotide
cucgccaggcgucuugaug

SEQ ID NO: 2005445 - RNA, 19 nt, Artificial Sequence
  Description of Artificial Sequence: Synthetic oligonucleotide
ugcccggauguaugcugcg

SEQ ID NO: 2005446 - RNA, 19 nt, Artificial Sequence
  Description of Artificial Sequence: Synthetic oligonucleotide
cuacguaauuugugguuga

SEQ ID NO: 2005447 - RNA, 19 nt, Artificial Sequence
  Description of Artificial Sequence: Synthetic oligonucleotide
gagguucuggagagauccg

SEQ ID NO: 2005448 - RNA, 19 nt, Artificial Sequence
  Description of Artificial Sequence: Synthetic oligonucleotide
cgaacuuccaguugccagc

SEQ ID NO: 2005449 - RNA, 19 nt, Artificial Sequence
  Description of Artificial Sequence: Synthetic oligonucleotide
ugguggagucaucuugaua

SEQ ID NO: 2005450 - RNA, 19 nt, Artificial Sequence
  Description of Artificial Sequence: Synthetic oligonucleotide
aggucguuuaguggaauaa

SEQ ID NO: 2005451 - RNA, 19 nt, Artificial Sequence
  Description of Artificial Sequence: Synthetic oligonucleotide
cugcgaacuuccaguugcc

SEQ ID NO: 2005452 - RNA, 19 nt, Artificial Sequence
  Description of Artificial Sequence: Synthetic oligonucleotide
caagacggacuuuucaccu

SEQ ID NO: 2005453 - RNA, 19 nt, Artificial Sequence
  Description of Artificial Sequence: Synthetic oligonucleotide
agagucccucgccaggcgu

SEQ ID NO: 2005454 - RNA, 19 nt, Artificial Sequence
  Description of Artificial Sequence: Synthetic oligonucleotide
uccagccgauaugacaggu

SEQ ID NO: 2005455 - RNA, 19 nt, Artificial Sequence
  Description of Artificial Sequence: Synthetic oligonucleotide
cuggagagauccggcagag

SEQ ID NO: 2005456 - RNA, 19 nt, Artificial Sequence
  Description of Artificial Sequence: Synthetic oligonucleotide
uuccagcuccagccgauau

SEQ ID NO: 2005457 - RNA, 19 nt, Artificial Sequence
  Description of Artificial Sequence: Synthetic oligonucleotide
cuccagccgauaugacagg

SEQ ID NO: 2005458 - RNA, 19 nt, Artificial Sequence
  Description of Artificial Sequence: Synthetic oligonucleotide
acauaacuuuauucacauu

SEQ ID NO: 2005459 - RNA, 19 nt, Artificial Sequence
  Description of Artificial Sequence: Synthetic oligonucleotide
ugcgaacuuccaguugcca

SEQ ID NO: 2005460 - RNA, 19 nt, Artificial Sequence
  Description of Artificial Sequence: Synthetic oligonucleotide
acagagucagguacgguuu

SEQ ID NO: 2005461 - RNA, 19 nt, Artificial Sequence
  Description of Artificial Sequence: Synthetic oligonucleotide
uuaccacugacgggugcca

SEQ ID NO: 2005462 - RNA, 19 nt, Artificial Sequence
  Description of Artificial Sequence: Synthetic oligonucleotide
ugguugauuucaguccaua

SEQ ID NO: 2005463 - RNA, 19 nt, Artificial Sequence
  Description of Artificial Sequence: Synthetic oligonucleotide
uacguaauuugugguugau

SEQ ID NO: 2005464 - RNA, 19 nt, Artificial Sequence
  Description of Artificial Sequence: Synthetic oligonucleotide
agagauccggcagagccuu

SEQ ID NO: 2005465 - RNA, 19 nt, Artificial Sequence
  Description of Artificial Sequence: Synthetic oligonucleotide
acuuuucaccucaauccaa

SEQ ID NO: 2005466 - RNA, 19 nt, Artificial Sequence
  Description of Artificial Sequence: Synthetic oligonucleotide
uguaugcauccaaggucuu

SEQ ID NO: 2005467 - RNA, 19 nt, Artificial Sequence
  Description of Artificial Sequence: Synthetic oligonucleotide
ucggcucuguaagaagguc

SEQ ID NO: 2005468 - RNA, 19 nt, Artificial Sequence
  Description of Artificial Sequence: Synthetic oligonucleotide
cuugauaguacagcucgua

SEQ ID NO: 2005469 - RNA, 19 nt, Artificial Sequence
  Description of Artificial Sequence: Synthetic oligonucleotide
guuuuaccacugacgggug

SEQ ID NO: 2005470 - RNA, 19 nt, Artificial Sequence
  Description of Artificial Sequence: Synthetic oligonucleotide
uaacagagucagguacggu

SEQ ID NO: 2005471 - RNA, 19 nt, Artificial Sequence
  Description of Artificial Sequence: Synthetic oligonucleotide
cggcucuguaagaaggucg

SEQ ID NO: 2005472 - RNA, 19 nt, Artificial Sequence
  Description of Artificial Sequence: Synthetic oligonucleotide
augcugcgaacuuccaguu

SEQ ID NO: 2005473 - RNA, 19 nt, Artificial Sequence
  Description of Artificial Sequence: Synthetic oligonucleotide
cguuuaguggaauaaaagu

SEQ ID NO: 2005474 - RNA, 19 nt, Artificial Sequence
  Description of Artificial Sequence: Synthetic oligonucleotide
acguaauuugugguugauu

SEQ ID NO: 2005475 - RNA, 19 nt, Artificial Sequence
  Description of Artificial Sequence: Synthetic oligonucleotide
guaugcauccaaggucuuc

SEQ ID NO: 2005476 - RNA, 19 nt, Artificial Sequence
  Description of Artificial Sequence: Synthetic oligonucleotide
gcuacacccacgagucugg

SEQ ID NO: 2005477 - RNA, 19 nt, Artificial Sequence
  Description of Artificial Sequence: Synthetic oligonucleotide
gucuacguaauuugugguu

SEQ ID NO: 2005478 - RNA, 19 nt, Artificial Sequence
  Description of Artificial Sequence: Synthetic oligonucleotide
cgauaugacagguuccuca

SEQ ID NO: 2005479 - RNA, 19 nt, Artificial Sequence
  Description of Artificial Sequence: Synthetic oligonucleotide
acggacuuuucaccucaau

SEQ ID NO: 2005480 - RNA, 19 nt, Artificial Sequence
  Description of Artificial Sequence: Synthetic oligonucleotide
gcugcccggauguaugcug

SEQ ID NO: 2005481 - RNA, 19 nt, Artificial Sequence
  Description of Artificial Sequence: Synthetic oligonucleotide
ugauccucuuguggaguuc

SEQ ID NO: 2005482 - RNA, 19 nt, Artificial Sequence
  Description of Artificial Sequence: Synthetic oligonucleotide
ccaggcgucuugaugcuac

SEQ ID NO: 2005483 - RNA, 19 nt, Artificial Sequence
  Description of Artificial Sequence: Synthetic oligonucleotide
cugagucuuugcugggaga

SEQ ID NO: 2005484 - RNA, 19 nt, Artificial Sequence
  Description of Artificial Sequence: Synthetic oligonucleotide
agcucguaccagugccaug

SEQ ID NO: 2005485 - RNA, 19 nt, Artificial Sequence
  Description of Artificial Sequence: Synthetic oligonucleotide
agaaggucguuuaguggaa

SEQ ID NO: 2005486 - RNA, 19 nt, Artificial Sequence
  Description of Artificial Sequence: Synthetic oligonucleotide
gauccggcagagccuucca

SEQ ID NO: 2005487 - RNA, 19 nt, Artificial Sequence
  Description of Artificial Sequence: Synthetic oligonucleotide
cauguuccucaaggcagug

SEQ ID NO: 2005488 - RNA, 19 nt, Artificial Sequence
  Description of Artificial Sequence: Synthetic oligonucleotide
agguacgguuuuaccacug

SEQ ID NO: 2005489 - RNA, 19 nt, Artificial Sequence
  Description of Artificial Sequence: Synthetic oligonucleotide
uuccggacagcugcccgga

SEQ ID NO: 2005490 - RNA, 19 nt, Artificial Sequence
  Description of Artificial Sequence: Synthetic oligonucleotide
acgagucuggggacccugg

SEQ ID NO: 2005491 - RNA, 19 nt, Artificial Sequence
  Description of Artificial Sequence: Synthetic oligonucleotide
ccucaauccaagcaaaagu

SEQ ID NO: 2005492 - RNA, 19 nt, Artificial Sequence
  Description of Artificial Sequence: Synthetic oligonucleotide
cugggagacucuuuuccua

SEQ ID NO: 2005493 - RNA, 19 nt, Artificial Sequence
  Description of Artificial Sequence: Synthetic oligonucleotide
gcuugguucugagucuuug

SEQ ID NO: 2005494 - RNA, 19 nt, Artificial Sequence
  Description of Artificial Sequence: Synthetic oligonucleotide
cuacacccacgagucuggg

SEQ ID NO: 2005495 - RNA, 19 nt, Artificial Sequence
  Description of Artificial Sequence: Synthetic oligonucleotide
ggauaggcccaacuccauc

SEQ ID NO: 2005496 - RNA, 19 nt, Artificial Sequence
  Description of Artificial Sequence: Synthetic oligonucleotide
ggaaagugaacucggucau

SEQ ID NO: 2005497 - RNA, 19 nt, Artificial Sequence
  Description of Artificial Sequence: Synthetic oligonucleotide
uggagagauccggcagagc

SEQ ID NO: 2005498 - RNA, 19 nt, Artificial Sequence
  Description of Artificial Sequence: Synthetic oligonucleotide
gguaugaaauuuccacuau

SEQ ID NO: 2005499 - RNA, 19 nt, Artificial Sequence
  Description of Artificial Sequence: Synthetic oligonucleotide
acagcucguaccagugcca

SEQ ID NO: 2005500 - RNA, 19 nt, Artificial Sequence
  Description of Artificial Sequence: Synthetic oligonucleotide
aaucagcaagacggacuuu

SEQ ID NO: 2005501 - RNA, 19 nt, Artificial Sequence
  Description of Artificial Sequence: Synthetic oligonucleotide
gccacagaagacacaacuc

SEQ ID NO: 2005502 - RNA, 19 nt, Artificial Sequence
  Description of Artificial Sequence: Synthetic oligonucleotide
cacccacgagucuggggac

SEQ ID NO: 2005503 - RNA, 19 nt, Artificial Sequence
  Description of Artificial Sequence: Synthetic oligonucleotide
ggagacucuuuuccuagua

SEQ ID NO: 2005504 - RNA, 19 nt, Artificial Sequence
  Description of Artificial Sequence: Synthetic oligonucleotide
ccugguggagucaucuuga

SEQ ID NO: 2005505 - RNA, 19 nt, Artificial Sequence
  Description of Artificial Sequence: Synthetic oligonucleotide
cuacgaggagacugcaagu

SEQ ID NO: 2005506 - RNA, 19 nt, Artificial Sequence
  Description of Artificial Sequence: Synthetic oligonucleotide
cuggguacuguucggcucu

SEQ ID NO: 2005507 - RNA, 19 nt, Artificial Sequence
  Description of Artificial Sequence: Synthetic oligonucleotide
cugcuaacagagucaggua

SEQ ID NO: 2005508 - RNA, 19 nt, Artificial Sequence
  Description of Artificial Sequence: Synthetic oligonucleotide
auccggcagagccuuccaa

SEQ ID NO: 2005509 - RNA, 19 nt, Artificial Sequence
  Description of Artificial Sequence: Synthetic oligonucleotide
ggucguuuaguggaauaaa

SEQ ID NO: 2005510 - RNA, 19 nt, Artificial Sequence
  Description of Artificial Sequence: Synthetic oligonucleotide
caucucauuucacccauuu

SEQ ID NO: 2005511 - RNA, 19 nt, Artificial Sequence
  Description of Artificial Sequence: Synthetic oligonucleotide
gggccugcgggacuuccag

SEQ ID NO: 2005512 - RNA, 19 nt, Artificial Sequence
  Description of Artificial Sequence: Synthetic oligonucleotide
cuguucggcucuguaagaa

SEQ ID NO: 2005513 - RNA, 19 nt, Artificial Sequence
  Description of Artificial Sequence: Synthetic oligonucleotide
cauccaaggucuuccuggu

SEQ ID NO: 2005514 - RNA, 19 nt, Artificial Sequence
  Description of Artificial Sequence: Synthetic oligonucleotide
gguacuguucggcucugua

SEQ ID NO: 2005515 - RNA, 19 nt, Artificial Sequence
  Description of Artificial Sequence: Synthetic oligonucleotide
cacgagucuggggacccug

SEQ ID NO: 2005516 - RNA, 19 nt, Artificial Sequence
  Description of Artificial Sequence: Synthetic oligonucleotide
gcaugaagggcauccauuu

SEQ ID NO: 2005517 - RNA, 19 nt, Artificial Sequence
  Description of Artificial Sequence: Synthetic oligonucleotide
gagucccucgccaggcguc

SEQ ID NO: 2005518 - RNA, 19 nt, Artificial Sequence
  Description of Artificial Sequence: Synthetic oligonucleotide
ccggauguaugcugcgaac

SEQ ID NO: 2005519 - RNA, 19 nt, Artificial Sequence
  Description of Artificial Sequence: Synthetic oligonucleotide
cacauaccccaucucauuu

SEQ ID NO: 2005520 - RNA, 19 nt, Artificial Sequence
  Description of Artificial Sequence: Synthetic oligonucleotide
caacaaggauggggagccc

SEQ ID NO: 2005521 - RNA, 19 nt, Artificial Sequence
  Description of Artificial Sequence: Synthetic oligonucleotide
agagucagguacgguuuua

SEQ ID NO: 2005522 - RNA, 19 nt, Artificial Sequence
  Description of Artificial Sequence: Synthetic oligonucleotide
gcucguaccagugccaugu

SEQ ID NO: 2005523 - RNA, 19 nt, Artificial Sequence
  Description of Artificial Sequence: Synthetic oligonucleotide
acaaggauggggagcccuu

SEQ ID NO: 2005524 - RNA, 19 nt, Artificial Sequence
  Description of Artificial Sequence: Synthetic oligonucleotide
ccuaguaagucauccaguu

SEQ ID NO: 2005525 - RNA, 19 nt, Artificial Sequence
  Description of Artificial Sequence: Synthetic oligonucleotide
agucccucgccaggcgucu

SEQ ID NO: 2005526 - RNA, 19 nt, Artificial Sequence
  Description of Artificial Sequence: Synthetic oligonucleotide
ccauccucaaaagcucaac

SEQ ID NO: 2005527 - RNA, 19 nt, Artificial Sequence
  Description of Artificial Sequence: Synthetic oligonucleotide
agcugcccggauguaugcu

SEQ ID NO: 2005528 - RNA, 19 nt, Artificial Sequence
  Description of Artificial Sequence: Synthetic oligonucleotide
caacucugucauuauccau

SEQ ID NO: 2005529 - RNA, 19 nt, Artificial Sequence
  Description of Artificial Sequence: Synthetic oligonucleotide
cucuuguggaguucucuuu

SEQ ID NO: 2005530 - RNA, 19 nt, Artificial Sequence
  Description of Artificial Sequence: Synthetic oligonucleotide
gacgggugccacagcaucu

SEQ ID NO: 2005531 - RNA, 19 nt, Artificial Sequence
  Description of Artificial Sequence: Synthetic oligonucleotide
cucaggguacacacacagu

SEQ ID NO: 2005532 - RNA, 19 nt, Artificial Sequence
  Description of Artificial Sequence: Synthetic oligonucleotide
cacugacgggugccacagc

SEQ ID NO: 2005533 - RNA, 19 nt, Artificial Sequence
  Description of Artificial Sequence: Synthetic oligonucleotide
gaagggcauccauuuuauu

SEQ ID NO: 2005534 - RNA, 19 nt, Artificial Sequence
  Description of Artificial Sequence: Synthetic oligonucleotide
cagguacgguuuuaccacu

SEQ ID NO: 2005535 - RNA, 19 nt, Artificial Sequence
  Description of Artificial Sequence: Synthetic oligonucleotide
gaaggucguuuaguggaau

SEQ ID NO: 2005536 - RNA, 19 nt, Artificial Sequence
  Description of Artificial Sequence: Synthetic oligonucleotide
ggauguaugcugcgaacuu

SEQ ID NO: 2005537 - RNA, 19 nt, Artificial Sequence
  Description of Artificial Sequence: Synthetic oligonucleotide
agcuacgaggagacugcaa

SEQ ID NO: 2005538 - RNA, 19 nt, Artificial Sequence
  Description of Artificial Sequence: Synthetic oligonucleotide
gagucuuugcugggagacu

SEQ ID NO: 2005539 - RNA, 19 nt, Artificial Sequence
  Description of Artificial Sequence: Synthetic oligonucleotide
caggcgucuugaugcuaca

SEQ ID NO: 2005540 - RNA, 19 nt, Artificial Sequence
  Description of Artificial Sequence: Synthetic oligonucleotide
gccgauaugacagguuccu

SEQ ID NO: 2005541 - RNA, 19 nt, Artificial Sequence
  Description of Artificial Sequence: Synthetic oligonucleotide
ccaguucauuuaguccgag

SEQ ID NO: 2005542 - RNA, 19 nt, Artificial Sequence
  Description of Artificial Sequence: Synthetic oligonucleotide
uccggacagcugcccggau

SEQ ID NO: 2005543 - RNA, 19 nt, Artificial Sequence
  Description of Artificial Sequence: Synthetic oligonucleotide
caagguggcuggguuggaa

SEQ ID NO: 2005544 - RNA, 19 nt, Artificial Sequence
  Description of Artificial Sequence: Synthetic oligonucleotide
ggccugcgggacuuccagc

SEQ ID NO: 2005545 - RNA, 19 nt, Artificial Sequence
  Description of Artificial Sequence: Synthetic oligonucleotide
gccugcgggacuuccagcu

SEQ ID NO: 2005546 - RNA, 19 nt, Artificial Sequence
  Description of Artificial Sequence: Synthetic oligonucleotide
cugcaaguacaaccuguau

SEQ ID NO: 2005547 - RNA, 19 nt, Artificial Sequence
  Description of Artificial Sequence: Synthetic oligonucleotide
gacggacuuuucaccucaa

SEQ ID NO: 2005548 - RNA, 19 nt, Artificial Sequence
  Description of Artificial Sequence: Synthetic oligonucleotide
caugaagggcauccauuuu

SEQ ID NO: 2005549 - RNA, 19 nt, Artificial Sequence
  Description of Artificial Sequence: Synthetic oligonucleotide
agucgggccugcgggacuu

SEQ ID NO: 2005550 - RNA, 19 nt, Artificial Sequence
  Description of Artificial Sequence: Synthetic oligonucleotide
cgagucuggggacccuggg

SEQ ID NO: 2005551 - RNA, 19 nt, Artificial Sequence
  Description of Artificial Sequence: Synthetic oligonucleotide
cagguuccucaggguacac

SEQ ID NO: 2005552 - RNA, 19 nt, Artificial Sequence
  Description of Artificial Sequence: Synthetic oligonucleotide
cgggacuuccagcuccagc

SEQ ID NO: 2005553 - RNA, 19 nt, Artificial Sequence
  Description of Artificial Sequence: Synthetic oligonucleotide
gggacccuggguacuguuc

SEQ ID NO: 2005554 - RNA, 19 nt, Artificial Sequence
  Description of Artificial Sequence: Synthetic oligonucleotide
ggguuggaacuuucugcua

SEQ ID NO: 2005555 - RNA, 19 nt, Artificial Sequence
  Description of Artificial Sequence: Synthetic oligonucleotide
cccacgagucuggggaccc

SEQ ID NO: 2005556 - RNA, 19 nt, Artificial Sequence
  Description of Artificial Sequence: Synthetic oligonucleotide
gggugccacagcaucucca

SEQ ID NO: 2005557 - RNA, 19 nt, Artificial Sequence
  Description of Artificial Sequence: Synthetic oligonucleotide
cgucuugaugcuacaccca

SEQ ID NO: 2005558 - RNA, 19 nt, Artificial Sequence
  Description of Artificial Sequence: Synthetic oligonucleotide
cugacgggugccacagcau

SEQ ID NO: 2005559 - RNA, 19 nt, Artificial Sequence
  Description of Artificial Sequence: Synthetic oligonucleotide
cccggauguaugcugcgaa

SEQ ID NO: 2005560 - RNA, 19 nt, Artificial Sequence
  Description of Artificial Sequence: Synthetic oligonucleotide
ccugcgggacuuccagcuc

SEQ ID NO: 2005561 - RNA, 19 nt, Artificial Sequence
  Description of Artificial Sequence: Synthetic oligonucleotide
aguugccagcagagagguu

SEQ ID NO: 2005562 - RNA, 19 nt, Artificial Sequence
  Description of Artificial Sequence: Synthetic oligonucleotide
cagcuugguucugagucuu

SEQ ID NO: 2005563 - RNA, 19 nt, Artificial Sequence
  Description of Artificial Sequence: Synthetic oligonucleotide
cagcucguaccagugccau

SEQ ID NO: 2005564 - RNA, 19 nt, Artificial Sequence
  Description of Artificial Sequence: Synthetic oligonucleotide
gcccggauguaugcugcga

SEQ ID NO: 2005565 - RNA, 19 nt, Artificial Sequence
  Description of Artificial Sequence: Synthetic oligonucleotide
caaggauggggagcccuuu

SEQ ID NO: 2005566 - RNA, 19 nt, Artificial Sequence
  Description of Artificial Sequence: Synthetic oligonucleotide
cggauguaugcugcgaacu

SEQ ID NO: 2005567 - RNA, 19 nt, Artificial Sequence
  Description of Artificial Sequence: Synthetic oligonucleotide
cccuggguacuguucggcu

SEQ ID NO: 2005568 - RNA, 19 nt, Artificial Sequence
  Description of Artificial Sequence: Synthetic oligonucleotide
gcgggacuuccagcuccag

SEQ ID NO: 2005569 - RNA, 19 nt, Artificial Sequence
  Description of Artificial Sequence: Synthetic oligonucleotide
ccgagcagucgggccugcg

SEQ ID NO: 2005570 - RNA, 19 nt, Artificial Sequence
  Description of Artificial Sequence: Synthetic oligonucleotide
cagucgggccugcgggacu

SEQ ID NO: 2005571 - RNA, 19 nt, Artificial Sequence
  Description of Artificial Sequence: Synthetic oligonucleotide
cucguaccagugccauguu

SEQ ID NO: 2005572 - RNA, 19 nt, Artificial Sequence
  Description of Artificial Sequence: Synthetic oligonucleotide
gggauaggcccaacuccau

SEQ ID NO: 2005573 - RNA, 19 nt, Artificial Sequence
  Description of Artificial Sequence: Synthetic oligonucleotide
ccagccgauaugacagguu

SEQ ID NO: 2005574 - RNA, 19 nt, Artificial Sequence
  Description of Artificial Sequence: Synthetic oligonucleotide
ccauuucacuuuccacauu

SEQ ID NO: 2005575 - RNA, 19 nt, Artificial Sequence
  Description of Artificial Sequence: Synthetic oligonucleotide
gccaggcgucuugaugcua

SEQ ID NO: 2005576 - RNA, 19 nt, Artificial Sequence
  Description of Artificial Sequence: Synthetic oligonucleotide
ggguacuguucggcucugu

SEQ ID NO: 2005577 - RNA, 19 nt, Artificial Sequence
  Description of Artificial Sequence: Synthetic oligonucleotide
ccaagguggcuggguugga

SEQ ID NO: 2005578 - RNA, 19 nt, Artificial Sequence
  Description of Artificial Sequence: Synthetic oligonucleotide
ccaucucauuucacccauu

SEQ ID NO: 2005579 - RNA, 19 nt, Artificial Sequence
  Description of Artificial Sequence: Synthetic oligonucleotide
cgccaggcgucuugaugcu

SEQ ID NO: 2005580 - RNA, 19 nt, Artificial Sequence
  Description of Artificial Sequence: Synthetic oligonucleotide
gucccucgccaggcgucuu

SEQ ID NO: 2005581 - RNA, 19 nt, Artificial Sequence
  Description of Artificial Sequence: Synthetic oligonucleotide
ccucgccaggcgucuugau

SEQ ID NO: 2005582 - RNA, 19 nt, Artificial Sequence
  Description of Artificial Sequence: Synthetic oligonucleotide
ccacgagucuggggacccu

SEQ ID NO: 2005583 - RNA, 19 nt, Artificial Sequence
  Description of Artificial Sequence: Synthetic oligonucleotide
agagaucuagucuaggacc

SEQ ID NO: 2005584 - RNA, 19 nt, Artificial Sequence
  Description of Artificial Sequence: Synthetic oligonucleotide
cauucuauagacaagcaag

SEQ ID NO: 2005585 - RNA, 19 nt, Artificial Sequence
  Description of Artificial Sequence: Synthetic oligonucleotide
aacaacauucuauagacaa

SEQ ID NO: 2005586 - RNA, 19 nt, Artificial Sequence
  Description of Artificial Sequence: Synthetic oligonucleotide
uagucuaggaccaacaaca

SEQ ID NO: 2005587 - RNA, 19 nt, Artificial Sequence
  Description of Artificial Sequence: Synthetic oligonucleotide
uauaugggcaccuuugagg

SEQ ID NO: 2005588 - RNA, 19 nt, Artificial Sequence
  Description of Artificial Sequence: Synthetic oligonucleotide
accaaaguaguccaagacc

SEQ ID NO: 2005589 - RNA, 19 nt, Artificial Sequence
  Description of Artificial Sequence: Synthetic oligonucleotide
auuaaaauauucuucgggu

SEQ ID NO: 2005590 - RNA, 19 nt, Artificial Sequence
  Description of Artificial Sequence: Synthetic oligonucleotide
ucuauagacaagcaagcag

SEQ ID NO: 2005591 - RNA, 19 nt, Artificial Sequence
  Description of Artificial Sequence: Synthetic oligonucleotide
aaugaaaugacguccgcga

SEQ ID NO: 2005592 - RNA, 19 nt, Artificial Sequence
  Description of Artificial Sequence: Synthetic oligonucleotide
uuucgguccaccaaaguag

SEQ ID NO: 2005593 - RNA, 19 nt, Artificial Sequence
  Description of Artificial Sequence: Synthetic oligonucleotide
auauugguuauauuuaacu

SEQ ID NO: 2005594 - RNA, 19 nt, Artificial Sequence
  Description of Artificial Sequence: Synthetic oligonucleotide
cauuuuccuaugaaaaugg

SEQ ID NO: 2005595 - RNA, 19 nt, Artificial Sequence
  Description of Artificial Sequence: Synthetic oligonucleotide
uugcuuauaaugaauggca

SEQ ID NO: 2005596 - RNA, 19 nt, Artificial Sequence
  Description of Artificial Sequence: Synthetic oligonucleotide
ugggcaaucuaacaccugg

SEQ ID NO: 2005597 - RNA, 19 nt, Artificial Sequence
  Description of Artificial Sequence: Synthetic oligonucleotide
accaauuauggcuggaagg

SEQ ID NO: 2005598 - RNA, 19 nt, Artificial Sequence
  Description of Artificial Sequence: Synthetic oligonucleotide
uuaacuuagcaaagaacca

SEQ ID NO: 2005599 - RNA, 19 nt, Artificial Sequence
  Description of Artificial Sequence: Synthetic oligonucleotide
guacauguagggcacaccg

SEQ ID NO: 2005600 - RNA, 19 nt, Artificial Sequence
  Description of Artificial Sequence: Synthetic oligonucleotide
ugucgaaggaauaaggaau

SEQ ID NO: 2005601 - RNA, 19 nt, Artificial Sequence
  Description of Artificial Sequence: Synthetic oligonucleotide
uguuuccuacagaagacag

SEQ ID NO: 2005602 - RNA, 19 nt, Artificial Sequence
  Description of Artificial Sequence: Synthetic oligonucleotide
aauauaugggcaccuuuga

SEQ ID NO: 2005603 - RNA, 19 nt, Artificial Sequence
  Description of Artificial Sequence: Synthetic oligonucleotide
ucgggugucacuacuuucg

SEQ ID NO: 2005604 - RNA, 19 nt, Artificial Sequence
  Description of Artificial Sequence: Synthetic oligonucleotide
ucacugaaugaaaugacgu

SEQ ID NO: 2005605 - RNA, 19 nt, Artificial Sequence
  Description of Artificial Sequence: Synthetic oligonucleotide
  modified_base (8)..(8): a, c, u, g, unknown or other
  modified_base (16)..(16): a, c, u, g, unknown or other
acugggunaggggagnacc

SEQ ID NO: 2005606 - RNA, 19 nt, Artificial Sequence
  Description of Artificial Sequence: Synthetic oligonucleotide
aaugacguccgcgaaggac

SEQ ID NO: 2005607 - RNA, 19 nt, Artificial Sequence
  Description of Artificial Sequence: Synthetic oligonucleotide
gaaaugacguccgcgaagg

SEQ ID NO: 2005608 - RNA, 19 nt, Artificial Sequence
  Description of Artificial Sequence: Synthetic oligonucleotide
uguaccuccagugucaaug

SEQ ID NO: 2005609 - RNA, 19 nt, Artificial Sequence
  Description of Artificial Sequence: Synthetic oligonucleotide
cagucugugccaaagacag

SEQ ID NO: 2005610 - RNA, 19 nt, Artificial Sequence
  Description of Artificial Sequence: Synthetic oligonucleotide
auugguuauauuuaacuua

SEQ ID NO: 2005611 - RNA, 19 nt, Artificial Sequence
  Description of Artificial Sequence: Synthetic oligonucleotide
cagacaaaaucaaccaagg

SEQ ID NO: 2005612 - RNA, 19 nt, Artificial Sequence
  Description of Artificial Sequence: Synthetic oligonucleotide
uauaaugaauggcauuuuc

SEQ ID NO: 2005613 - RNA, 19 nt, Artificial Sequence
  Description of Artificial Sequence: Synthetic oligonucleotide
gacagcauuauaugaacac

SEQ ID NO: 2005614 - RNA, 19 nt, Artificial Sequence
  Description of Artificial Sequence: Synthetic oligonucleotide
ugaaaugacguccgcgaag

SEQ ID NO: 2005615 - RNA, 19 nt, Artificial Sequence
  Description of Artificial Sequence: Synthetic oligonucleotide
cuauagacaagcaagcaga

SEQ ID NO: 2005616 - RNA, 19 nt, Artificial Sequence
  Description of Artificial Sequence: Synthetic oligonucleotide
uccaagacccagauauugg

SEQ ID NO: 2005617 - RNA, 19 nt, Artificial Sequence
  Description of Artificial Sequence: Synthetic oligonucleotide
cuugcuuauaaugaauggc

SEQ ID NO: 2005618 - RNA, 19 nt, Artificial Sequence
  Description of Artificial Sequence: Synthetic oligonucleotide
agcaaagaaccaauuaugg

SEQ ID NO: 2005619 - RNA, 19 nt, Artificial Sequence
  Description of Artificial Sequence: Synthetic oligonucleotide
ucuuccaagagaucuaguc

SEQ ID NO: 2005620 - RNA, 19 nt, Artificial Sequence
  Description of Artificial Sequence: Synthetic oligonucleotide
caauauaugggcaccuuug

SEQ ID NO: 2005621 - RNA, 19 nt, Artificial Sequence
  Description of Artificial Sequence: Synthetic oligonucleotide
  modified_base (2)..(2): a, c, u, g, unknown or other
  modified_base (10)..(10): a, c, u, g, unknown or other
unaggggagnacccucagg

SEQ ID NO: 2005622 - RNA, 19 nt, Artificial Sequence
  Description of Artificial Sequence: Synthetic oligonucleotide
  modified_base (3)..(3): a, c, u, g, unknown or other
agnacccucaggcacagug

SEQ ID NO: 2005623 - RNA, 19 nt, Artificial Sequence
  Description of Artificial Sequence: Synthetic oligonucleotide
uauugguuauauuuaacuu

SEQ ID NO: 2005624 - RNA, 19 nt, Artificial Sequence
  Description of Artificial Sequence: Synthetic oligonucleotide
aacgggcucagguacaugu

SEQ ID NO: 2005625 - RNA, 19 nt, Artificial Sequence
  Description of Artificial Sequence: Synthetic oligonucleotide
gaaugaaaugacguccgcg

SEQ ID NO: 2005626 - RNA, 19 nt, Artificial Sequence
  Description of Artificial Sequence: Synthetic oligonucleotide
auaugggcaccuuugagga

SEQ ID NO: 2005627 - RNA, 19 nt, Artificial Sequence
  Description of Artificial Sequence: Synthetic oligonucleotide
acuaguugcugcaacgggc

SEQ ID NO: 2005628 - RNA, 19 nt, Artificial Sequence
  Description of Artificial Sequence: Synthetic oligonucleotide
aauauucuucgggugucac

SEQ ID NO: 2005629 - RNA, 19 nt, Artificial Sequence
  Description of Artificial Sequence: Synthetic oligonucleotide
ggaauaaggaauucuuugc

SEQ ID NO: 2005630 - RNA, 19 nt, Artificial Sequence
  Description of Artificial Sequence: Synthetic oligonucleotide
aauggcauuuuccuaugaa

SEQ ID NO: 2005631 - RNA, 19 nt, Artificial Sequence
  Description of Artificial Sequence: Synthetic oligonucleotide
cagcauuauaugaacacac

SEQ ID NO: 2005632 - RNA, 19 nt, Artificial Sequence
  Description of Artificial Sequence: Synthetic oligonucleotide
augacguccgcgaaggacc

SEQ ID NO: 2005633 - RNA, 19 nt, Artificial Sequence
  Description of Artificial Sequence: Synthetic oligonucleotide
gguuauauuuaacuuagca

SEQ ID NO: 2005634 - RNA, 19 nt, Artificial Sequence
  Description of Artificial Sequence: Synthetic oligonucleotide
aagacccagauauugguua

SEQ ID NO: 2005635 - RNA, 19 nt, Artificial Sequence
  Description of Artificial Sequence: Synthetic oligonucleotide
agauauugguuauauuuaa

SEQ ID NO: 2005636 - RNA, 19 nt, Artificial Sequence
  Description of Artificial Sequence: Synthetic oligonucleotide
cucacuaguugcugcaacg

SEQ ID NO: 2005637 - RNA, 19 nt, Artificial Sequence
  Description of Artificial Sequence: Synthetic oligonucleotide
uauagacaagcaagcagac

SEQ ID NO: 2005638 - RNA, 19 nt, Artificial Sequence
  Description of Artificial Sequence: Synthetic oligonucleotide
uccuuuaagcaugugugag

SEQ ID NO: 2005639 - RNA, 19 nt, Artificial Sequence
  Description of Artificial Sequence: Synthetic oligonucleotide
uuccaagagaucuagucua

SEQ ID NO: 2005640 - RNA, 19 nt, Artificial Sequence
  Description of Artificial Sequence: Synthetic oligonucleotide
ugucaaugggcaaucuaac

SEQ ID NO: 2005641 - RNA, 19 nt, Artificial Sequence
  Description of Artificial Sequence: Synthetic oligonucleotide
  modified_base (15)..(15): a, c, u, g, unknown or other
acagacaacugggunaggg

SEQ ID NO: 2005642 - RNA, 19 nt, Artificial Sequence
  Description of Artificial Sequence: Synthetic oligonucleotide
acauguagggcacaccgcu

SEQ ID NO: 2005643 - RNA, 19 nt, Artificial Sequence
  Description of Artificial Sequence: Synthetic oligonucleotide
guugccaauauaugggcac

SEQ ID NO: 2005644 - RNA, 19 nt, Artificial Sequence
  Description of Artificial Sequence: Synthetic oligonucleotide
uguggauuuuccugcaagu

SEQ ID NO: 2005645 - RNA, 19 nt, Artificial Sequence
  Description of Artificial Sequence: Synthetic oligonucleotide
uccaagagaucuagucuag

SEQ ID NO: 2005646 - RNA, 19 nt, Artificial Sequence
  Description of Artificial Sequence: Synthetic oligonucleotide
cugacagcauuauaugaac

SEQ ID NO: 2005647 - RNA, 19 nt, Artificial Sequence
  Description of Artificial Sequence: Synthetic oligonucleotide
accaaggggcagcagaguc

SEQ ID NO: 2005648 - RNA, 19 nt, Artificial Sequence
  Description of Artificial Sequence: Synthetic oligonucleotide
agccauguaggacacucuc

SEQ ID NO: 2005649 - RNA, 19 nt, Artificial Sequence
  Description of Artificial Sequence: Synthetic oligonucleotide
uaacuuagcaaagaaccaa

SEQ ID NO: 2005650 - RNA, 19 nt, Artificial Sequence
  Description of Artificial Sequence: Synthetic oligonucleotide
gauaguggccaccgcaccc

SEQ ID NO: 2005651 - RNA, 19 nt, Artificial Sequence
  Description of Artificial Sequence: Synthetic oligonucleotide
uccgcgaaggaccugccgc

SEQ ID NO: 2005652 - RNA, 19 nt, Artificial Sequence
  Description of Artificial Sequence: Synthetic oligonucleotide
ugcuuauaaugaauggcau

SEQ ID NO: 2005653 - RNA, 19 nt, Artificial Sequence
  Description of Artificial Sequence: Synthetic oligonucleotide
uucaccuuggucacaguuc

SEQ ID NO: 2005654 - RNA, 19 nt, Artificial Sequence
  Description of Artificial Sequence: Synthetic oligonucleotide
cuagucuaggaccaacaac

SEQ ID NO: 2005655 - RNA, 19 nt, Artificial Sequence
  Description of Artificial Sequence: Synthetic oligonucleotide
ugguuuauguugccaauau

SEQ ID NO: 2005656 - RNA, 19 nt, Artificial Sequence
  Description of Artificial Sequence: Synthetic oligonucleotide
uauucuucgggugucacua

SEQ ID NO: 2005657 - RNA, 19 nt, Artificial Sequence
  Description of Artificial Sequence: Synthetic oligonucleotide
aaugggcaaucuaacaccu

SEQ ID NO: 2005658 - RNA, 19 nt, Artificial Sequence
  Description of Artificial Sequence: Synthetic oligonucleotide
  modified_base (7)..(7): a, c, u, g, unknown or other
  modified_base (15)..(15): a, c, u, g, unknown or other
cugggunaggggagnaccc

SEQ ID NO: 2005659 - RNA, 19 nt, Artificial Sequence
  Description of Artificial Sequence: Synthetic oligonucleotide
caaucuaacaccugguuua

SEQ ID NO: 2005660 - RNA, 19 nt, Artificial Sequence
  Description of Artificial Sequence: Synthetic oligonucleotide
uucuauagacaagcaagca

SEQ ID NO: 2005661 - RNA, 19 nt, Artificial Sequence
  Description of Artificial Sequence: Synthetic oligonucleotide
ugcauaguccgcuucuuuc

SEQ ID NO: 2005662 - RNA, 19 nt, Artificial Sequence
  Description of Artificial Sequence: Synthetic oligonucleotide
gaccaacaacauucuauag

SEQ ID NO: 2005663 - RNA, 19 nt, Artificial Sequence
  Description of Artificial Sequence: Synthetic oligonucleotide
guggcucucaggaauaaag

SEQ ID NO: 2005664 - RNA, 19 nt, Artificial Sequence
  Description of Artificial Sequence: Synthetic oligonucleotide
caacgccggagccagaagg

SEQ ID NO: 2005665 - RNA, 19 nt, Artificial Sequence
  Description of Artificial Sequence: Synthetic oligonucleotide
cacugggaauagaugaaag

SEQ ID NO: 2005666 - RNA, 19 nt, Artificial Sequence
  Description of Artificial Sequence: Synthetic oligonucleotide
uacauguagggcacaccgc

SEQ ID NO: 2005667 - RNA, 19 nt, Artificial Sequence
  Description of Artificial Sequence: Synthetic oligonucleotide
gagacgugcgucacgaagc

SEQ ID NO: 2005668 - RNA, 19 nt, Artificial Sequence
  Description of Artificial Sequence: Synthetic oligonucleotide
  modified_base (9)..(9): a, c, u, g, unknown or other
  modified_base (17)..(17): a, c, u, g, unknown or other
aacugggunaggggagnac

SEQ ID NO: 2005669 - RNA, 19 nt, Artificial Sequence
  Description of Artificial Sequence: Synthetic oligonucleotide
gugugagccauguaggaca

SEQ ID NO: 2005670 - RNA, 19 nt, Artificial Sequence
  Description of Artificial Sequence: Synthetic oligonucleotide
ugcugcaacgggcucaggu

SEQ ID NO: 2005671 - RNA, 19 nt, Artificial Sequence
  Description of Artificial Sequence: Synthetic oligonucleotide
agacgugcgucacgaagcg

SEQ ID NO: 2005672 - RNA, 19 nt, Artificial Sequence
  Description of Artificial Sequence: Synthetic oligonucleotide
ggugucacuacuuucgguc

SEQ ID NO: 2005673 - RNA, 19 nt, Artificial Sequence
  Description of Artificial Sequence: Synthetic oligonucleotide
acagcauuauaugaacaca

SEQ ID NO: 2005674 - RNA, 19 nt, Artificial Sequence
  Description of Artificial Sequence: Synthetic oligonucleotide
agcgcgcaggcccaagagc

SEQ ID NO: 2005675 - RNA, 19 nt, Artificial Sequence
  Description of Artificial Sequence: Synthetic oligonucleotide
aaagugccuggacuucugu

SEQ ID NO: 2005676 - RNA, 19 nt, Artificial Sequence
  Description of Artificial Sequence: Synthetic oligonucleotide
  modified_base (12)..(12): a, c, u, g, unknown or other
gacaacugggunaggggag

SEQ ID NO: 2005677 - RNA, 19 nt, Artificial Sequence
  Description of Artificial Sequence: Synthetic oligonucleotide
cucaggaauaaagugccug

SEQ ID NO: 2005678 - RNA, 19 nt, Artificial Sequence
  Description of Artificial Sequence: Synthetic oligonucleotide
caccaaaguaguccaagac

SEQ ID NO: 2005679 - RNA, 19 nt, Artificial Sequence
  Description of Artificial Sequence: Synthetic oligonucleotide
caagagaucuagucuagga

SEQ ID NO: 2005680 - RNA, 19 nt, Artificial Sequence
  Description of Artificial Sequence: Synthetic oligonucleotide
  modified_base (2)..(2): a, c, u, g, unknown or other
gnacccucaggcacagugg

SEQ ID NO: 2005681 - RNA, 19 nt, Artificial Sequence
  Description of Artificial Sequence: Synthetic oligonucleotide
aaaccacugggaauagaug

SEQ ID NO: 2005682 - RNA, 19 nt, Artificial Sequence
  Description of Artificial Sequence: Synthetic oligonucleotide
ugucacuacuuucggucca

SEQ ID NO: 2005683 - RNA, 19 nt, Artificial Sequence
  Description of Artificial Sequence: Synthetic oligonucleotide
acaacauucuauagacaag

SEQ ID NO: 2005684 - RNA, 19 nt, Artificial Sequence
  Description of Artificial Sequence: Synthetic oligonucleotide
uucgguccaccaaaguagu

SEQ ID NO: 2005685 - RNA, 19 nt, Artificial Sequence
  Description of Artificial Sequence: Synthetic oligonucleotide
ugugagccauguaggacac

SEQ ID NO: 2005686 - RNA, 19 nt, Artificial Sequence
  Description of Artificial Sequence: Synthetic oligonucleotide
ugcgucacgaagcgggcca

SEQ ID NO: 2005687 - RNA, 19 nt, Artificial Sequence
  Description of Artificial Sequence: Synthetic oligonucleotide
acgugcgucacgaagcggg

SEQ ID NO: 2005688 - RNA, 19 nt, Artificial Sequence
  Description of Artificial Sequence: Synthetic oligonucleotide
aaggaauaaggaauucuuu

SEQ ID NO: 2005689 - RNA, 19 nt, Artificial Sequence
  Description of Artificial Sequence: Synthetic oligonucleotide
ccaauuauggcuggaaggc

SEQ ID NO: 2005690 - RNA, 19 nt, Artificial Sequence
  Description of Artificial Sequence: Synthetic oligonucleotide
cuuggucacaguuccugac

SEQ ID NO: 2005691 - RNA, 19 nt, Artificial Sequence
  Description of Artificial Sequence: Synthetic oligonucleotide
aaggaauucuuugcauagu

SEQ ID NO: 2005692 - RNA, 19 nt, Artificial Sequence
  Description of Artificial Sequence: Synthetic oligonucleotide
caaguuuucaucucagggu

SEQ ID NO: 2005693 - RNA, 19 nt, Artificial Sequence
  Description of Artificial Sequence: Synthetic oligonucleotide
cugggaauagaugaaagaa

SEQ ID NO: 2005694 - RNA, 19 nt, Artificial Sequence
  Description of Artificial Sequence: Synthetic oligonucleotide
ggauuuuccugcaagucgc

SEQ ID NO: 2005695 - RNA, 19 nt, Artificial Sequence
  Description of Artificial Sequence: Synthetic oligonucleotide
uagucgccuguccacgucc

SEQ ID NO: 2005696 - RNA, 19 nt, Artificial Sequence
  Description of Artificial Sequence: Synthetic oligonucleotide
gagaucuagucuaggacca

SEQ ID NO: 2005697 - RNA, 19 nt, Artificial Sequence
  Description of Artificial Sequence: Synthetic oligonucleotide
auauucuucgggugucacu

SEQ ID NO: 2005698 - RNA, 19 nt, Artificial Sequence
  Description of Artificial Sequence: Synthetic oligonucleotide
aggaccaacaacauucuau

SEQ ID NO: 2005699 - RNA, 19 nt, Artificial Sequence
  Description of Artificial Sequence: Synthetic oligonucleotide
gugucacuacuuucggucc

SEQ ID NO: 2005700 - RNA, 19 nt, Artificial Sequence
  Description of Artificial Sequence: Synthetic oligonucleotide
gucaaugggcaaucuaaca

SEQ ID NO: 2005701 - RNA, 19 nt, Artificial Sequence
  Description of Artificial Sequence: Synthetic oligonucleotide
ucaauguagccuguggauu

SEQ ID NO: 2005702 - RNA, 19 nt, Artificial Sequence
  Description of Artificial Sequence: Synthetic oligonucleotide
gcucucaggaauaaagugc

SEQ ID NO: 2005703 - RNA, 19 nt, Artificial Sequence
  Description of Artificial Sequence: Synthetic oligonucleotide
cacgaagcgggccacgcgc

SEQ ID NO: 2005704 - RNA, 19 nt, Artificial Sequence
  Description of Artificial Sequence: Synthetic oligonucleotide
guccaagacccagauauug

SEQ ID NO: 2005705 - RNA, 19 nt, Artificial Sequence
  Description of Artificial Sequence: Synthetic oligonucleotide
caauuauggcuggaaggcc

SEQ ID NO: 2005706 - RNA, 19 nt, Artificial Sequence
  Description of Artificial Sequence: Synthetic oligonucleotide
uagggcacaccgcugccug

SEQ ID NO: 2005707 - RNA, 19 nt, Artificial Sequence
  Description of Artificial Sequence: Synthetic oligonucleotide
acguccgcgaaggaccugc

SEQ ID NO: 2005708 - RNA, 19 nt, Artificial Sequence
  Description of Artificial Sequence: Synthetic oligonucleotide
aaucuaacaccugguuuau

SEQ ID NO: 2005709 - RNA, 19 nt, Artificial Sequence
  Description of Artificial Sequence: Synthetic oligonucleotide
gagguagucgccuguccac

SEQ ID NO: 2005710 - RNA, 19 nt, Artificial Sequence
  Description of Artificial Sequence: Synthetic oligonucleotide
ugcaagucgcucacuaguu

SEQ ID NO: 2005711 - RNA, 19 nt, Artificial Sequence
  Description of Artificial Sequence: Synthetic oligonucleotide
  modified_base (3)..(3): a, c, u, g, unknown or other
  modified_base (11)..(11): a, c, u, g, unknown or other
gunaggggagnacccucag

SEQ ID NO: 2005712 - RNA, 19 nt, Artificial Sequence
  Description of Artificial Sequence: Synthetic oligonucleotide
aggccaaguuuucaucuca

SEQ ID NO: 2005713 - RNA, 19 nt, Artificial Sequence
  Description of Artificial Sequence: Synthetic oligonucleotide
uguagggcacaccgcugcc

SEQ ID NO: 2005714 - RNA, 19 nt, Artificial Sequence
  Description of Artificial Sequence: Synthetic oligonucleotide
cuuucgguccaccaaagua

SEQ ID NO: 2005715 - RNA, 19 nt, Artificial Sequence
  Description of Artificial Sequence: Synthetic oligonucleotide
  modified_base (6)..(6): a, c, u, g, unknown or other
  modified_base (14)..(14): a, c, u, g, unknown or other
ugggunaggggagnacccu

SEQ ID NO: 2005716 - RNA, 19 nt, Artificial Sequence
  Description of Artificial Sequence: Synthetic oligonucleotide
agcauuauaugaacacaca

SEQ ID NO: 2005717 - RNA, 19 nt, Artificial Sequence
  Description of Artificial Sequence: Synthetic oligonucleotide
gcauuauaugaacacacaa

SEQ ID NO: 2005718 - RNA, 19 nt, Artificial Sequence
  Description of Artificial Sequence: Synthetic oligonucleotide
uccgagacgugcgucacga

SEQ ID NO: 2005719 - RNA, 19 nt, Artificial Sequence
  Description of Artificial Sequence: Synthetic oligonucleotide
uuauaaugaauggcauuuu

SEQ ID NO: 2005720 - RNA, 19 nt, Artificial Sequence
  Description of Artificial Sequence: Synthetic oligonucleotide
auuuuccugcaagucgcuc

SEQ ID NO: 2005721 - RNA, 19 nt, Artificial Sequence
  Description of Artificial Sequence: Synthetic oligonucleotide
  modified_base (7)..(7): a, c, u, g, unknown or other
ggggagnacccucaggcac

SEQ ID NO: 2005722 - RNA, 19 nt, Artificial Sequence
  Description of Artificial Sequence: Synthetic oligonucleotide
agugucaaugggcaaucua

SEQ ID NO: 2005723 - RNA, 19 nt, Artificial Sequence
  Description of Artificial Sequence: Synthetic oligonucleotide
gaucuagucuaggaccaac

SEQ ID NO: 2005724 - RNA, 19 nt, Artificial Sequence
  Description of Artificial Sequence: Synthetic oligonucleotide
auguuuccuacagaagaca

SEQ ID NO: 2005725 - RNA, 19 nt, Artificial Sequence
  Description of Artificial Sequence: Synthetic oligonucleotide
ggaauucuuugcauagucc

SEQ ID NO: 2005726 - RNA, 19 nt, Artificial Sequence
  Description of Artificial Sequence: Synthetic oligonucleotide
ucucaggaauaaagugccu

SEQ ID NO: 2005727 - RNA, 19 nt, Artificial Sequence
  Description of Artificial Sequence: Synthetic oligonucleotide
gucgcucacuaguugcugc

SEQ ID NO: 2005728 - RNA, 19 nt, Artificial Sequence
  Description of Artificial Sequence: Synthetic oligonucleotide
ccuuuaagcaugugugagc

SEQ ID NO: 2005729 - RNA, 19 nt, Artificial Sequence
  Description of Artificial Sequence: Synthetic oligonucleotide
agggugucgaaggaauaag

SEQ ID NO: 2005730 - RNA, 19 nt, Artificial Sequence
  Description of Artificial Sequence: Synthetic oligonucleotide
cugcaacgggcucagguac

SEQ ID NO: 2005731 - RNA, 19 nt, Artificial Sequence
  Description of Artificial Sequence: Synthetic oligonucleotide
augaaaugacguccgcgaa

SEQ ID NO: 2005732 - RNA, 19 nt, Artificial Sequence
  Description of Artificial Sequence: Synthetic oligonucleotide
uucgggugucacuacuuuc

SEQ ID NO: 2005733 - RNA, 19 nt, Artificial Sequence
  Description of Artificial Sequence: Synthetic oligonucleotide
agcguggagauaguggcca

SEQ ID NO: 2005734 - RNA, 19 nt, Artificial Sequence
  Description of Artificial Sequence: Synthetic oligonucleotide
ggagauaguggccaccgca

SEQ ID NO: 2005735 - RNA, 19 nt, Artificial Sequence
  Description of Artificial Sequence: Synthetic oligonucleotide
cagcagaguccgcugacag

SEQ ID NO: 2005736 - RNA, 19 nt, Artificial Sequence
  Description of Artificial Sequence: Synthetic oligonucleotide
ugcaacgggcucagguaca

SEQ ID NO: 2005737 - RNA, 19 nt, Artificial Sequence
  Description of Artificial Sequence: Synthetic oligonucleotide
acaagggacucuggggauc

SEQ ID NO: 2005738 - RNA, 19 nt, Artificial Sequence
  Description of Artificial Sequence: Synthetic oligonucleotide
ucgcucacuaguugcugca

SEQ ID NO: 2005739 - RNA, 19 nt, Artificial Sequence
  Description of Artificial Sequence: Synthetic oligonucleotide
guccuuuaagcauguguga

SEQ ID NO: 2005740 - RNA, 19 nt, Artificial Sequence
  Description of Artificial Sequence: Synthetic oligonucleotide
auagacaagcaagcagaca

SEQ ID NO: 2005741 - RNA, 19 nt, Artificial Sequence
  Description of Artificial Sequence: Synthetic oligonucleotide
aaaugacguccgcgaagga

SEQ ID NO: 2005742 - RNA, 19 nt, Artificial Sequence
  Description of Artificial Sequence: Synthetic oligonucleotide
agguagucgccuguccacg

SEQ ID NO: 2005743 - RNA, 19 nt, Artificial Sequence
  Description of Artificial Sequence: Synthetic oligonucleotide
agacccagauauugguuau

SEQ ID NO: 2005744 - RNA, 19 nt, Artificial Sequence
  Description of Artificial Sequence: Synthetic oligonucleotide
cauccuugcuuauaaugaa

SEQ ID NO: 2005745 - RNA, 19 nt, Artificial Sequence
  Description of Artificial Sequence: Synthetic oligonucleotide
cauaguccgcuucuuucuc

SEQ ID NO: 2005746 - RNA, 19 nt, Artificial Sequence
  Description of Artificial Sequence: Synthetic oligonucleotide
guggcagcggagguagucg

SEQ ID NO: 2005747 - RNA, 19 nt, Artificial Sequence
  Description of Artificial Sequence: Synthetic oligonucleotide
ggaccaacaacauucuaua

SEQ ID NO: 2005748 - RNA, 19 nt, Artificial Sequence
  Description of Artificial Sequence: Synthetic oligonucleotide
cauguagggcacaccgcug

SEQ ID NO: 2005749 - RNA, 19 nt, Artificial Sequence
  Description of Artificial Sequence: Synthetic oligonucleotide
gggugucgaaggaauaagg

SEQ ID NO: 2005750 - RNA, 19 nt, Artificial Sequence
  Description of Artificial Sequence: Synthetic oligonucleotide
ccaacagugccaccaacgc

SEQ ID NO: 2005751 - RNA, 19 nt, Artificial Sequence
  Description of Artificial Sequence: Synthetic oligonucleotide
agugucaauguagccugug

SEQ ID NO: 2005752 - RNA, 19 nt, Artificial Sequence
  Description of Artificial Sequence: Synthetic oligonucleotide
aucuagucuaggaccaaca

SEQ ID NO: 2005753 - RNA, 19 nt, Artificial Sequence
  Description of Artificial Sequence: Synthetic oligonucleotide
gaaccaauuauggcuggaa

SEQ ID NO: 2005754 - RNA, 19 nt, Artificial Sequence
  Description of Artificial Sequence: Synthetic oligonucleotide
ucgaaggaauaaggaauuc

SEQ ID NO: 2005755 - RNA, 19 nt, Artificial Sequence
  Description of Artificial Sequence: Synthetic oligonucleotide
ucagggugucgaaggaaua

SEQ ID NO: 2005756 - RNA, 19 nt, Artificial Sequence
  Description of Artificial Sequence: Synthetic oligonucleotide
ugacguccgcgaaggaccu

SEQ ID NO: 2005757 - RNA, 19 nt, Artificial Sequence
  Description of Artificial Sequence: Synthetic oligonucleotide
gagcgcgcaggcccaagag

SEQ ID NO: 2005758 - RNA, 19 nt, Artificial Sequence
  Description of Artificial Sequence: Synthetic oligonucleotide
  modified_base (8)..(8): a, c, u, g, unknown or other
aggggagnacccucaggca

SEQ ID NO: 2005759 - RNA, 19 nt, Artificial Sequence
  Description of Artificial Sequence: Synthetic oligonucleotide
  modified_base (11)..(11): a, c, u, g, unknown or other
  modified_base (19)..(19): a, c, u, g, unknown or other
acaacugggunaggggagn

SEQ ID NO: 2005760 - RNA, 19 nt, Artificial Sequence
  Description of Artificial Sequence: Synthetic oligonucleotide
aauguagccuguggauuuu

SEQ ID NO: 2005761 - RNA, 19 nt, Artificial Sequence
  Description of Artificial Sequence: Synthetic oligonucleotide
ugccuggacuucuguaccu

SEQ ID NO: 2005762 - RNA, 19 nt, Artificial Sequence
  Description of Artificial Sequence: Synthetic oligonucleotide
ggugucgaaggaauaagga

SEQ ID NO: 2005763 - RNA, 19 nt, Artificial Sequence
  Description of Artificial Sequence: Synthetic oligonucleotide
acccagauauugguuauau

SEQ ID NO: 2005764 - RNA, 19 nt, Artificial Sequence
  Description of Artificial Sequence: Synthetic oligonucleotide
aguccgagacgugcgucac

SEQ ID NO: 2005765 - RNA, 19 nt, Artificial Sequence
  Description of Artificial Sequence: Synthetic oligonucleotide
aguuccugacagcauuaua

SEQ ID NO: 2005766 - RNA, 19 nt, Artificial Sequence
  Description of Artificial Sequence: Synthetic oligonucleotide
ucaucgcgggguggcagcg

SEQ ID NO: 2005767 - RNA, 19 nt, Artificial Sequence
  Description of Artificial Sequence: Synthetic oligonucleotide
cuaguugcugcaacgggcu

SEQ ID NO: 2005768 - RNA, 19 nt, Artificial Sequence
  Description of Artificial Sequence: Synthetic oligonucleotide
ucucagggugucgaaggaa

SEQ ID NO: 2005769 - RNA, 19 nt, Artificial Sequence
  Description of Artificial Sequence: Synthetic oligonucleotide
acgccggagccagaagggc

SEQ ID NO: 2005770 - RNA, 19 nt, Artificial Sequence
  Description of Artificial Sequence: Synthetic oligonucleotide
agucgccuguccacguccc

SEQ ID NO: 2005771 - RNA, 19 nt, Artificial Sequence
  Description of Artificial Sequence: Synthetic oligonucleotide
uuugcauaguccgcuucuu

SEQ ID NO: 2005772 - RNA, 19 nt, Artificial Sequence
  Description of Artificial Sequence: Synthetic oligonucleotide
aaccaaggggcagcagagu

SEQ ID NO: 2005773 - RNA, 19 nt, Artificial Sequence
  Description of Artificial Sequence: Synthetic oligonucleotide
ggagguagucgccugucca

SEQ ID NO: 2005774 - RNA, 19 nt, Artificial Sequence
  Description of Artificial Sequence: Synthetic oligonucleotide
gaaggaccugccgcgcacc

SEQ ID NO: 2005775 - RNA, 19 nt, Artificial Sequence
  Description of Artificial Sequence: Synthetic oligonucleotide
agucgcucacuaguugcug

SEQ ID NO: 2005776 - RNA, 19 nt, Artificial Sequence
  Description of Artificial Sequence: Synthetic oligonucleotide
gcaagcagacaaaaucaac

SEQ ID NO: 2005777 - RNA, 19 nt, Artificial Sequence
  Description of Artificial Sequence: Synthetic oligonucleotide
guccgcgaaggaccugccg

SEQ ID NO: 2005778 - RNA, 19 nt, Artificial Sequence
  Description of Artificial Sequence: Synthetic oligonucleotide
gggcucagguacauguagg

SEQ ID NO: 2005779 - RNA, 19 nt, Artificial Sequence
  Description of Artificial Sequence: Synthetic oligonucleotide
  modified_base (4)..(4): a, c, u, g, unknown or other
  modified_base (12)..(12): a, c, u, g, unknown or other
ggunaggggagnacccuca

SEQ ID NO: 2005780 - RNA, 19 nt, Artificial Sequence
  Description of Artificial Sequence: Synthetic oligonucleotide
agcggagguagucgccugu

SEQ ID NO: 2005781 - RNA, 19 nt, Artificial Sequence
  Description of Artificial Sequence: Synthetic oligonucleotide
aucgcgggguggcagcgga

SEQ ID NO: 2005782 - RNA, 19 nt, Artificial Sequence
  Description of Artificial Sequence: Synthetic oligonucleotide
auuauggcuggaaggccaa

SEQ ID NO: 2005783 - RNA, 19 nt, Artificial Sequence
  Description of Artificial Sequence: Synthetic oligonucleotide
  modified_base (16)..(16): a, c, u, g, unknown or other
cacagacaacugggunagg

SEQ ID NO: 2005784 - RNA, 19 nt, Artificial Sequence
  Description of Artificial Sequence: Synthetic oligonucleotide
cugcaagucgcucacuagu

SEQ ID NO: 2005785 - RNA, 19 nt, Artificial Sequence
  Description of Artificial Sequence: Synthetic oligonucleotide
guccgagacgugcgucacg

SEQ ID NO: 2005786 - RNA, 19 nt, Artificial Sequence
  Description of Artificial Sequence: Synthetic oligonucleotide
cuaggaccaacaacauucu

SEQ ID NO: 2005787 - RNA, 19 nt, Artificial Sequence
  Description of Artificial Sequence: Synthetic oligonucleotide
cagaguccgcugacagccc

SEQ ID NO: 2005788 - RNA, 19 nt, Artificial Sequence
  Description of Artificial Sequence: Synthetic oligonucleotide
caguccgagacgugcguca

SEQ ID NO: 2005789 - RNA, 19 nt, Artificial Sequence
  Description of Artificial Sequence: Synthetic oligonucleotide
gaagcgggccacgcgcggc

SEQ ID NO: 2005790 - RNA, 19 nt, Artificial Sequence
  Description of Artificial Sequence: Synthetic oligonucleotide
acgaagcgggccacgcgcg

SEQ ID NO: 2005791 - RNA, 19 nt, Artificial Sequence
  Description of Artificial Sequence: Synthetic oligonucleotide
gguuuauguugccaauaua

SEQ ID NO: 2005792 - RNA, 19 nt, Artificial Sequence
  Description of Artificial Sequence: Synthetic oligonucleotide
guagucgccuguccacguc

SEQ ID NO: 2005793 - RNA, 19 nt, Artificial Sequence
  Description of Artificial Sequence: Synthetic oligonucleotide
cucagggugucgaaggaau

SEQ ID NO: 2005794 - RNA, 19 nt, Artificial Sequence
  Description of Artificial Sequence: Synthetic oligonucleotide
uggugugcgcggguucacc

SEQ ID NO: 2005795 - RNA, 19 nt, Artificial Sequence
  Description of Artificial Sequence: Synthetic oligonucleotide
gcucacuaguugcugcaac

SEQ ID NO: 2005796 - RNA, 19 nt, Artificial Sequence
  Description of Artificial Sequence: Synthetic oligonucleotide
ccaagagaucuagucuagg

SEQ ID NO: 2005797 - RNA, 19 nt, Artificial Sequence
  Description of Artificial Sequence: Synthetic oligonucleotide
cgagacgugcgucacgaag

SEQ ID NO: 2005798 - RNA, 19 nt, Artificial Sequence
  Description of Artificial Sequence: Synthetic oligonucleotide
guuuccuacagaagacagu

SEQ ID NO: 2005799 - RNA, 19 nt, Artificial Sequence
  Description of Artificial Sequence: Synthetic oligonucleotide
cugguuuauguugccaaua

SEQ ID NO: 2005800 - RNA, 19 nt, Artificial Sequence
  Description of Artificial Sequence: Synthetic oligonucleotide
cacgcgcggcgcgucaucg

SEQ ID NO: 2005801 - RNA, 19 nt, Artificial Sequence
  Description of Artificial Sequence: Synthetic oligonucleotide
  modified_base (5)..(5): a, c, u, g, unknown or other
ggagnacccucaggcacag

SEQ ID NO: 2005802 - RNA, 19 nt, Artificial Sequence
  Description of Artificial Sequence: Synthetic oligonucleotide
cagggugucgaaggaauaa

SEQ ID NO: 2005803 - RNA, 19 nt, Artificial Sequence
  Description of Artificial Sequence: Synthetic oligonucleotide
gcaaucuaacaccugguuu

SEQ ID NO: 2005804 - RNA, 19 nt, Artificial Sequence
  Description of Artificial Sequence: Synthetic oligonucleotide
gcuuauaaugaauggcauu

SEQ ID NO: 2005805 - RNA, 19 nt, Artificial Sequence
  Description of Artificial Sequence: Synthetic oligonucleotide
agaucuagucuaggaccaa

SEQ ID NO: 2005806 - RNA, 19 nt, Artificial Sequence
  Description of Artificial Sequence: Synthetic oligonucleotide
ccgcgaaggaccugccgcg

SEQ ID NO: 2005807 - RNA, 19 nt, Artificial Sequence
  Description of Artificial Sequence: Synthetic oligonucleotide
ccggcgacaccaacagugc

SEQ ID NO: 2005808 - RNA, 19 nt, Artificial Sequence
  Description of Artificial Sequence: Synthetic oligonucleotide
ccgcugacagcccagagaa

SEQ ID NO: 2005809 - RNA, 19 nt, Artificial Sequence
  Description of Artificial Sequence: Synthetic oligonucleotide
gauuuuccugcaagucgcu

SEQ ID NO: 2005810 - RNA, 19 nt, Artificial Sequence
  Description of Artificial Sequence: Synthetic oligonucleotide
uggccaccgcaccccaguc

SEQ ID NO: 2005811 - RNA, 19 nt, Artificial Sequence
  Description of Artificial Sequence: Synthetic oligonucleotide
caccgcaccccaguccgag

SEQ ID NO: 2005812 - RNA, 19 nt, Artificial Sequence
  Description of Artificial Sequence: Synthetic oligonucleotide
aguccgcugacagcccaga

SEQ ID NO: 2005813 - RNA, 19 nt, Artificial Sequence
  Description of Artificial Sequence: Synthetic oligonucleotide
cagcggagguagucgccug

SEQ ID NO: 2005814 - RNA, 19 nt, Artificial Sequence
  Description of Artificial Sequence: Synthetic oligonucleotide
  modified_base (6)..(6): a, c, u, g, unknown or other
gggagnacccucaggcaca

SEQ ID NO: 2005815 - RNA, 19 nt, Artificial Sequence
  Description of Artificial Sequence: Synthetic oligonucleotide
caagacccagauauugguu

SEQ ID NO: 2005816 - RNA, 19 nt, Artificial Sequence
  Description of Artificial Sequence: Synthetic oligonucleotide
gugcgucacgaagcgggcc

SEQ ID NO: 2005817 - RNA, 19 nt, Artificial Sequence
  Description of Artificial Sequence: Synthetic oligonucleotide
  modified_base (5)..(5): a, c, u, g, unknown or other
  modified_base (13)..(13): a, c, u, g, unknown or other
gggunaggggagnacccuc

SEQ ID NO: 2005818 - RNA, 19 nt, Artificial Sequence
  Description of Artificial Sequence: Synthetic oligonucleotide
aguccaagacccagauauu

SEQ ID NO: 2005819 - RNA, 19 nt, Artificial Sequence
  Description of Artificial Sequence: Synthetic oligonucleotide
ccaccaacgccggagccag

SEQ ID NO: 2005820 - RNA, 19 nt, Artificial Sequence
  Description of Artificial Sequence: Synthetic oligonucleotide
ccaagacccagauauuggu

SEQ ID NO: 2005821 - RNA, 19 nt, Artificial Sequence
  Description of Artificial Sequence: Synthetic oligonucleotide
gacccagauauugguuaua

SEQ ID NO: 2005822 - RNA, 19 nt, Artificial Sequence
  Description of Artificial Sequence: Synthetic oligonucleotide
accgcaccccaguccgaga

SEQ ID NO: 2005823 - RNA, 19 nt, Artificial Sequence
  Description of Artificial Sequence: Synthetic oligonucleotide
caucgcgggguggcagcgg

SEQ ID NO: 2005824 - RNA, 19 nt, Artificial Sequence
  Description of Artificial Sequence: Synthetic oligonucleotide
accccgggccggcgacacc

SEQ ID NO: 2005825 - RNA, 19 nt, Artificial Sequence
  Description of Artificial Sequence: Synthetic oligonucleotide
cgggugucacuacuuucgg

SEQ ID NO: 2005826 - RNA, 19 nt, Artificial Sequence
  Description of Artificial Sequence: Synthetic oligonucleotide
ggcgcgucaucgcggggug

SEQ ID NO: 2005827 - RNA, 19 nt, Artificial Sequence
  Description of Artificial Sequence: Synthetic oligonucleotide
ccuacagaagacagucugu

SEQ ID NO: 2005828 - RNA, 19 nt, Artificial Sequence
  Description of Artificial Sequence: Synthetic oligonucleotide
gagccauguaggacacucu

SEQ ID NO: 2005829 - RNA, 19 nt, Artificial Sequence
  Description of Artificial Sequence: Synthetic oligonucleotide
ccgcaccccaguccgagac

SEQ ID NO: 2005830 - RNA, 19 nt, Artificial Sequence
  Description of Artificial Sequence: Synthetic oligonucleotide
cuucgggugucacuacuuu

SEQ ID NO: 2005831 - RNA, 19 nt, Artificial Sequence
  Description of Artificial Sequence: Synthetic oligonucleotide
ggagcgcgcaggcccaaga

SEQ ID NO: 2005832 - RNA, 19 nt, Artificial Sequence
  Description of Artificial Sequence: Synthetic oligonucleotide
gaccccgggccggcgacac

SEQ ID NO: 2005833 - RNA, 19 nt, Artificial Sequence
  Description of Artificial Sequence: Synthetic oligonucleotide
caacgggcucagguacaug

SEQ ID NO: 2005834 - RNA, 19 nt, Artificial Sequence
  Description of Artificial Sequence: Synthetic oligonucleotide
cuggugugcgcggguucac

SEQ ID NO: 2005835 - RNA, 19 nt, Artificial Sequence
  Description of Artificial Sequence: Synthetic oligonucleotide
gcuggugugcgcggguuca

SEQ ID NO: 2005836 - RNA, 19 nt, Artificial Sequence
  Description of Artificial Sequence: Synthetic oligonucleotide
cgugcgucacgaagcgggc

SEQ ID NO: 2005837 - RNA, 19 nt, Artificial Sequence
  Description of Artificial Sequence: Synthetic oligonucleotide
gguagucgccuguccacgu

SEQ ID NO: 2005838 - RNA, 19 nt, Artificial Sequence
  Description of Artificial Sequence: Synthetic oligonucleotide
gcguggagauaguggccac

SEQ ID NO: 2005839 - RNA, 19 nt, Artificial Sequence
  Description of Artificial Sequence: Synthetic oligonucleotide
gccaccaacgccggagcca

SEQ ID NO: 2005840 - RNA, 19 nt, Artificial Sequence
  Description of Artificial Sequence: Synthetic oligonucleotide
guagggcacaccgcugccu

SEQ ID NO: 2005841 - RNA, 19 nt, Artificial Sequence
  Description of Artificial Sequence: Synthetic oligonucleotide
ccugccgcgcaccgccucc

SEQ ID NO: 2005842 - RNA, 19 nt, Artificial Sequence
  Description of Artificial Sequence: Synthetic oligonucleotide
gggugucacuacuuucggu

SEQ ID NO: 2005843 - RNA, 19 nt, Artificial Sequence
  Description of Artificial Sequence: Synthetic oligonucleotide
ggggaccgucacugaauga

SEQ ID NO: 2005844 - RNA, 19 nt, Artificial Sequence
  Description of Artificial Sequence: Synthetic oligonucleotide
cgaaggaccugccgcgcac

SEQ ID NO: 2005845 - RNA, 19 nt, Artificial Sequence
  Description of Artificial Sequence: Synthetic oligonucleotide
ccaauauaugggcaccuuu

SEQ ID NO: 2005846 - RNA, 19 nt, Artificial Sequence
  Description of Artificial Sequence: Synthetic oligonucleotide
gcgaaggaccugccgcgca

SEQ ID NO: 2005847 - RNA, 19 nt, Artificial Sequence
  Description of Artificial Sequence: Synthetic oligonucleotide
cggagguagucgccugucc

SEQ ID NO: 2005848 - RNA, 19 nt, Artificial Sequence
  Description of Artificial Sequence: Synthetic oligonucleotide
cgaaggaauaaggaauucu

SEQ ID NO: 2005849 - RNA, 19 nt, Artificial Sequence
  Description of Artificial Sequence: Synthetic oligonucleotide
gccuggacuucuguaccuc

SEQ ID NO: 2005850 - RNA, 19 nt, Artificial Sequence
  Description of Artificial Sequence: Synthetic oligonucleotide
ccaguccgagacgugcguc

SEQ ID NO: 2005851 - RNA, 19 nt, Artificial Sequence
  Description of Artificial Sequence: Synthetic oligonucleotide
cgaagcgggccacgcgcgg

SEQ ID NO: 2005852 - RNA, 19 nt, Artificial Sequence
  Description of Artificial Sequence: Synthetic oligonucleotide
cgcaccccaguccgagacg

SEQ ID NO: 2005853 - RNA, 19 nt, Artificial Sequence
  Description of Artificial Sequence: Synthetic oligonucleotide
cgcgucaucgcgggguggc

SEQ ID NO: 2005854 - RNA, 19 nt, Artificial Sequence
  Description of Artificial Sequence: Synthetic oligonucleotide
ccugguuuauguugccaau

SEQ ID NO: 2005855 - RNA, 19 nt, Artificial Sequence
  Description of Artificial Sequence: Synthetic oligonucleotide
gcggagguagucgccuguc

SEQ ID NO: 2005856 - RNA, 19 nt, Artificial Sequence
  Description of Artificial Sequence: Synthetic oligonucleotide
gcagcggagguagucgccu

SEQ ID NO: 2005857 - RNA, 19 nt, Artificial Sequence
  Description of Artificial Sequence: Synthetic oligonucleotide
cgucaucgcgggguggcag

SEQ ID NO: 2005858 - RNA, 19 nt, Artificial Sequence
  Description of Artificial Sequence: Synthetic oligonucleotide
gcaccccaguccgagacgu

SEQ ID NO: 2005859 - RNA, 19 nt, Artificial Sequence
  Description of Artificial Sequence: Synthetic oligonucleotide
gcgcggcgcgucaucgcgg

SEQ ID NO: 2005860 - RNA, 19 nt, Artificial Sequence
  Description of Artificial Sequence: Synthetic oligonucleotide
cgcugacagcccagagaag

SEQ ID NO: 2005861 - RNA, 19 nt, Artificial Sequence
  Description of Artificial Sequence: Synthetic oligonucleotide
cgccggagccagaagggca

SEQ ID NO: 2005862 - RNA, 19 nt, Artificial Sequence
  Description of Artificial Sequence: Synthetic oligonucleotide
gcgaccccgggccggcgac

SEQ ID NO: 2005863 - RNA, 19 nt, Artificial Sequence
  Description of Artificial Sequence: Synthetic oligonucleotide
cguccgcgaaggaccugcc

SEQ ID NO: 2005864 - RNA, 19 nt, Artificial Sequence
  Description of Artificial Sequence: Synthetic oligonucleotide
gcgucacgaagcgggccac

SEQ ID NO: 2005865 - RNA, 19 nt, Artificial Sequence
  Description of Artificial Sequence: Synthetic oligonucleotide
gcgcgucaucgcggggugg

SEQ ID NO: 2005866 - RNA, 19 nt, Artificial Sequence
  Description of Artificial Sequence: Synthetic oligonucleotide
cuguaccuccagugucaau

SEQ ID NO: 2005867 - RNA, 19 nt, Artificial Sequence
  Description of Artificial Sequence: Synthetic oligonucleotide
  modified_base (4)..(4): a, c, u, g, unknown or other
gagnacccucaggcacagu

SEQ ID NO: 2005868 - RNA, 19 nt, Artificial Sequence
  Description of Artificial Sequence: Synthetic oligonucleotide
cgcgaaggaccugccgcgc

SEQ ID NO: 2005869 - RNA, 19 nt, Artificial Sequence
  Description of Artificial Sequence: Synthetic oligonucleotide
caccaacgccggagccaga

SEQ ID NO: 2005870 - RNA, 19 nt, Artificial Sequence
  Description of Artificial Sequence: Synthetic oligonucleotide
agggagcgcgcaggcccaa

SEQ ID NO: 2005871 - RNA, 19 nt, Artificial Sequence
  Description of Artificial Sequence: Synthetic oligonucleotide
gcaacgggcucagguacau

SEQ ID NO: 2005872 - RNA, 19 nt, Artificial Sequence
  Description of Artificial Sequence: Synthetic oligonucleotide
ggccacgcgcggcgcguca

SEQ ID NO: 2005873 - RNA, 19 nt, Artificial Sequence
  Description of Artificial Sequence: Synthetic oligonucleotide
gcgcaggcccaagagcccu

SEQ ID NO: 2005874 - RNA, 19 nt, Artificial Sequence
  Description of Artificial Sequence: Synthetic oligonucleotide
gcgucaucgcgggguggca

SEQ ID NO: 2005875 - RNA, 19 nt, Artificial Sequence
  Description of Artificial Sequence: Synthetic oligonucleotide
cccaguccgagacgugcgu

SEQ ID NO: 2005876 - RNA, 19 nt, Artificial Sequence
  Description of Artificial Sequence: Synthetic oligonucleotide
ccaccgcaccccaguccga

SEQ ID NO: 2005877 - RNA, 19 nt, Artificial Sequence
  Description of Artificial Sequence: Synthetic oligonucleotide
ccgagacgugcgucacgaa

SEQ ID NO: 2005878 - RNA, 19 nt, Artificial Sequence
  Description of Artificial Sequence: Synthetic oligonucleotide
ccgccuccagcguggagau

SEQ ID NO: 2005879 - RNA, 19 nt, Artificial Sequence
  Description of Artificial Sequence: Synthetic oligonucleotide
cgcucacuaguugcugcaa

SEQ ID NO: 2005880 - RNA, 19 nt, Artificial Sequence
  Description of Artificial Sequence: Synthetic oligonucleotide
cggcgcgucaucgcggggu

SEQ ID NO: 2005881 - RNA, 19 nt, Artificial Sequence
  Description of Artificial Sequence: Synthetic oligonucleotide
  modified_base (1)..(1): a, c, u, g, unknown or other
  modified_base (9)..(9): a, c, u, g, unknown or other
naggggagnacccucaggc

SEQ ID NO: 2005882 - RNA, 19 nt, Artificial Sequence
  Description of Artificial Sequence: Synthetic oligonucleotide
aauagcuucucuuugauca

SEQ ID NO: 2005883 - RNA, 19 nt, Artificial Sequence
  Description of Artificial Sequence: Synthetic oligonucleotide
agcacgaauaaauaaacgc

SEQ ID NO: 2005884 - RNA, 19 nt, Artificial Sequence
  Description of Artificial Sequence: Synthetic oligonucleotide
gauacuagcaccaauaaac

SEQ ID NO: 2005885 - RNA, 19 nt, Artificial Sequence
  Description of Artificial Sequence: Synthetic oligonucleotide
uauauccagaaccagaaug

SEQ ID NO: 2005886 - RNA, 19 nt, Artificial Sequence
  Description of Artificial Sequence: Synthetic oligonucleotide
auuguaaggauacuagcac

SEQ ID NO: 2005887 - RNA, 19 nt, Artificial Sequence
  Description of Artificial Sequence: Synthetic oligonucleotide
ucuaguauuguaaggauac

SEQ ID NO: 2005888 - RNA, 19 nt, Artificial Sequence
  Description of Artificial Sequence: Synthetic oligonucleotide
cuuaaggucuauuuggagg

SEQ ID NO: 2005889 - RNA, 19 nt, Artificial Sequence
  Description of Artificial Sequence: Synthetic oligonucleotide
aagacaaaaguggaggugg

SEQ ID NO: 2005890 - RNA, 19 nt, Artificial Sequence
  Description of Artificial Sequence: Synthetic oligonucleotide
uauuguaaggauacuagca

SEQ ID NO: 2005891 - RNA, 19 nt, Artificial Sequence
  Description of Artificial Sequence: Synthetic oligonucleotide
aaacaaucccaucugacca

SEQ ID NO: 2005892 - RNA, 19 nt, Artificial Sequence
  Description of Artificial Sequence: Synthetic oligonucleotide
aaauaaacgccaaaguuug

SEQ ID NO: 2005893 - RNA, 19 nt, Artificial Sequence
  Description of Artificial Sequence: Synthetic oligonucleotide
ucugcuaggaggccgaggg

SEQ ID NO: 2005894 - RNA, 19 nt, Artificial Sequence
  Description of Artificial Sequence: Synthetic oligonucleotide
aacgccaaaguuugugggc

SEQ ID NO: 2005895 - RNA, 19 nt, Artificial Sequence
  Description of Artificial Sequence: Synthetic oligonucleotide
acucauugguccuacaagg

SEQ ID NO: 2005896 - RNA, 19 nt, Artificial Sequence
  Description of Artificial Sequence: Synthetic oligonucleotide
auaaauaaacgccaaaguu

SEQ ID NO: 2005897 - RNA, 19 nt, Artificial Sequence
  Description of Artificial Sequence: Synthetic oligonucleotide
uccuacaagggacaagugg

SEQ ID NO: 2005898 - RNA, 19 nt, Artificial Sequence
  Description of Artificial Sequence: Synthetic oligonucleotide
guuaagaaccuucacaaac

SEQ ID NO: 2005899 - RNA, 19 nt, Artificial Sequence
  Description of Artificial Sequence: Synthetic oligonucleotide
aauaaacaaucccaucuga

SEQ ID NO: 2005900 - RNA, 19 nt, Artificial Sequence
  Description of Artificial Sequence: Synthetic oligonucleotide
ugugguuuccuuauugacc

SEQ ID NO: 2005901 - RNA, 19 nt, Artificial Sequence
  Description of Artificial Sequence: Synthetic oligonucleotide
aaggcagcaacuucauacg

SEQ ID NO: 2005902 - RNA, 19 nt, Artificial Sequence
  Description of Artificial Sequence: Synthetic oligonucleotide
gugguuuccuuauugaccg

SEQ ID NO: 2005903 - RNA, 19 nt, Artificial Sequence
  Description of Artificial Sequence: Synthetic oligonucleotide
aagcaggucuaauagcuuc

SEQ ID NO: 2005904 - RNA, 19 nt, Artificial Sequence
  Description of Artificial Sequence: Synthetic oligonucleotide
uuaguucuuggacaguucc

SEQ ID NO: 2005905 - RNA, 19 nt, Artificial Sequence
  Description of Artificial Sequence: Synthetic oligonucleotide
auugucucguaauugagug

SEQ ID NO: 2005906 - RNA, 19 nt, Artificial Sequence
  Description of Artificial Sequence: Synthetic oligonucleotide
uuaaggucuauuuggaggu

SEQ ID NO: 2005907 - RNA, 19 nt, Artificial Sequence
  Description of Artificial Sequence: Synthetic oligonucleotide
cuucacaaacaacacaagg

SEQ ID NO: 2005908 - RNA, 19 nt, Artificial Sequence
  Description of Artificial Sequence: Synthetic oligonucleotide
agaaguucacaaugugugc

SEQ ID NO: 2005909 - RNA, 19 nt, Artificial Sequence
  Description of Artificial Sequence: Synthetic oligonucleotide
uaugacagugguucgaagc

SEQ ID NO: 2005910 - RNA, 19 nt, Artificial Sequence
  Description of Artificial Sequence: Synthetic oligonucleotide
agugguucggcauuguguc

SEQ ID NO: 2005911 - RNA, 19 nt, Artificial Sequence
  Description of Artificial Sequence: Synthetic oligonucleotide
uaaacgccaaaguuugugg

SEQ ID NO: 2005912 - RNA, 19 nt, Artificial Sequence
  Description of Artificial Sequence: Synthetic oligonucleotide
uguaaggauacuagcacca

SEQ ID NO: 2005913 - RNA, 19 nt, Artificial Sequence
  Description of Artificial Sequence: Synthetic oligonucleotide
uuaauaugacagugguucg

SEQ ID NO: 2005914 - RNA, 19 nt, Artificial Sequence
  Description of Artificial Sequence: Synthetic oligonucleotide
ugggucuugggccuuaagg

SEQ ID NO: 2005915 - RNA, 19 nt, Artificial Sequence
  Description of Artificial Sequence: Synthetic oligonucleotide
cagaaguucacaaugugug

SEQ ID NO: 2005916 - RNA, 19 nt, Artificial Sequence
  Description of Artificial Sequence: Synthetic oligonucleotide
uaaucaaagagcucuagua

SEQ ID NO: 2005917 - RNA, 19 nt, Artificial Sequence
  Description of Artificial Sequence: Synthetic oligonucleotide
ucuggaaacugcauggaga

SEQ ID NO: 2005918 - RNA, 19 nt, Artificial Sequence
  Description of Artificial Sequence: Synthetic oligonucleotide
acaaaaguggagguggcgc

SEQ ID NO: 2005919 - RNA, 19 nt, Artificial Sequence
  Description of Artificial Sequence: Synthetic oligonucleotide
aagaagucugagcaugcag

SEQ ID NO: 2005920 - RNA, 19 nt, Artificial Sequence
  Description of Artificial Sequence: Synthetic oligonucleotide
uggagaaaauaccauguac

SEQ ID NO: 2005921 - RNA, 19 nt, Artificial Sequence
  Description of Artificial Sequence: Synthetic oligonucleotide
ucuauuuggaggugcugcg

SEQ ID NO: 2005922 - RNA, 19 nt, Artificial Sequence
  Description of Artificial Sequence: Synthetic oligonucleotide
agcucuuuguuguagcggg

SEQ ID NO: 2005923 - RNA, 19 nt, Artificial Sequence
  Description of Artificial Sequence: Synthetic oligonucleotide
cuucuguucaauugucucg

SEQ ID NO: 2005924 - RNA, 19 nt, Artificial Sequence
  Description of Artificial Sequence: Synthetic oligonucleotide
ucuaauagcuucucuuuga

SEQ ID NO: 2005925 - RNA, 19 nt, Artificial Sequence
  Description of Artificial Sequence: Synthetic oligonucleotide
aguauuguaaggauacuag

SEQ ID NO: 2005926 - RNA, 19 nt, Artificial Sequence
  Description of Artificial Sequence: Synthetic oligonucleotide
gaccgaacguuguagagag

SEQ ID NO: 2005927 - RNA, 19 nt, Artificial Sequence
  Description of Artificial Sequence: Synthetic oligonucleotide
ugccaagcaggucuaauag

SEQ ID NO: 2005928 - RNA, 19 nt, Artificial Sequence
  Description of Artificial Sequence: Synthetic oligonucleotide
agguuaagaaccuucacaa

SEQ ID NO: 2005929 - RNA, 19 nt, Artificial Sequence
  Description of Artificial Sequence: Synthetic oligonucleotide
agagcucuaguauuguaag

SEQ ID NO: 2005930 - RNA, 19 nt, Artificial Sequence
  Description of Artificial Sequence: Synthetic oligonucleotide
ugcaggggcacauucacag

SEQ ID NO: 2005931 - RNA, 19 nt, Artificial Sequence
  Description of Artificial Sequence: Synthetic oligonucleotide
acaacacaaggaccgaacg

SEQ ID NO: 2005932 - RNA, 19 nt, Artificial Sequence
  Description of Artificial Sequence: Synthetic oligonucleotide
aaaguuugugggcagguua

SEQ ID NO: 2005933 - RNA, 19 nt, Artificial Sequence
  Description of Artificial Sequence: Synthetic oligonucleotide
auaaacaaucccaucugac

SEQ ID NO: 2005934 - RNA, 19 nt, Artificial Sequence
  Description of Artificial Sequence: Synthetic oligonucleotide
gacucauugguccuacaag

SEQ ID NO: 2005935 - RNA, 19 nt, Artificial Sequence
  Description of Artificial Sequence: Synthetic oligonucleotide
guauuguaaggauacuagc

SEQ ID NO: 2005936 - RNA, 19 nt, Artificial Sequence
  Description of Artificial Sequence: Synthetic oligonucleotide
uuauugaccgagcaguuuu

SEQ ID NO: 2005937 - RNA, 19 nt, Artificial Sequence
  Description of Artificial Sequence: Synthetic oligonucleotide
ucggcauugugucacaggu

SEQ ID NO: 2005938 - RNA, 19 nt, Artificial Sequence
  Description of Artificial Sequence: Synthetic oligonucleotide
ucuuugaucagcucauaaa

SEQ ID NO: 2005939 - RNA, 19 nt, Artificial Sequence
  Description of Artificial Sequence: Synthetic oligonucleotide
agcaacuucauacgccuuc

SEQ ID NO: 2005940 - RNA, 19 nt, Artificial Sequence
  Description of Artificial Sequence: Synthetic oligonucleotide
aagcacgaauaaauaaacg

SEQ ID NO: 2005941 - RNA, 19 nt, Artificial Sequence
  Description of Artificial Sequence: Synthetic oligonucleotide
uccggagugggacucauug

SEQ ID NO: 2005942 - RNA, 19 nt, Artificial Sequence
  Description of Artificial Sequence: Synthetic oligonucleotide
uuugauuccagagcugggc

SEQ ID NO: 2005943 - RNA, 19 nt, Artificial Sequence
  Description of Artificial Sequence: Synthetic oligonucleotide
uuugugggcagguuaagaa

SEQ ID NO: 2005944 - RNA, 19 nt, Artificial Sequence
  Description of Artificial Sequence: Synthetic oligonucleotide
gaagcacgaauaaauaaac

SEQ ID NO: 2005945 - RNA, 19 nt, Artificial Sequence
  Description of Artificial Sequence: Synthetic oligonucleotide
ugugauggcagguuaguuc

SEQ ID NO: 2005946 - RNA, 19 nt, Artificial Sequence
  Description of Artificial Sequence: Synthetic oligonucleotide
augguuucagagugguucg

SEQ ID NO: 2005947 - RNA, 19 nt, Artificial Sequence
  Description of Artificial Sequence: Synthetic oligonucleotide
caauaaacaaucccaucug

SEQ ID NO: 2005948 - RNA, 19 nt, Artificial Sequence
  Description of Artificial Sequence: Synthetic oligonucleotide
ucauugguccuacaaggga

SEQ ID NO: 2005949 - RNA, 19 nt, Artificial Sequence
  Description of Artificial Sequence: Synthetic oligonucleotide
caucugaccaccaauguca

SEQ ID NO: 2005950 - RNA, 19 nt, Artificial Sequence
  Description of Artificial Sequence: Synthetic oligonucleotide
aucuucaccauggagagcu

SEQ ID NO: 2005951 - RNA, 19 nt, Artificial Sequence
  Description of Artificial Sequence: Synthetic oligonucleotide
uggcagugagaugugaugg

SEQ ID NO: 2005952 - RNA, 19 nt, Artificial Sequence
  Description of Artificial Sequence: Synthetic oligonucleotide
uuugaucagcucauaaaua

SEQ ID NO: 2005953 - RNA, 19 nt, Artificial Sequence
  Description of Artificial Sequence: Synthetic oligonucleotide
gaccgagcaguuuugauuc

SEQ ID NO: 2005954 - RNA, 19 nt, Artificial Sequence
  Description of Artificial Sequence: Synthetic oligonucleotide
ugucucguaauugagugcu

SEQ ID NO: 2005955 - RNA, 19 nt, Artificial Sequence
  Description of Artificial Sequence: Synthetic oligonucleotide
agugagguuuggcagaagu

SEQ ID NO: 2005956 - RNA, 19 nt, Artificial Sequence
  Description of Artificial Sequence: Synthetic oligonucleotide
cacgaauaaauaaacgcca

SEQ ID NO: 2005957 - RNA, 19 nt, Artificial Sequence
  Description of Artificial Sequence: Synthetic oligonucleotide
ucgaagcacgaauaaauaa

SEQ ID NO: 2005958 - RNA, 19 nt, Artificial Sequence
  Description of Artificial Sequence: Synthetic oligonucleotide
uuccuuauugaccgagcag

SEQ ID NO: 2005959 - RNA, 19 nt, Artificial Sequence
  Description of Artificial Sequence: Synthetic oligonucleotide
uaagaaccuucacaaacaa

SEQ ID NO: 2005960 - RNA, 19 nt, Artificial Sequence
  Description of Artificial Sequence: Synthetic oligonucleotide
guaauugagugcuucaaaa

SEQ ID NO: 2005961 - RNA, 19 nt, Artificial Sequence
  Description of Artificial Sequence: Synthetic oligonucleotide
uucacaaugugugcauggg

SEQ ID NO: 2005962 - RNA, 19 nt, Artificial Sequence
  Description of Artificial Sequence: Synthetic oligonucleotide
auaaacgccaaaguuugug

SEQ ID NO: 2005963 - RNA, 19 nt, Artificial Sequence
  Description of Artificial Sequence: Synthetic oligonucleotide
ggcauugugucacaggugc

SEQ ID NO: 2005964 - RNA, 19 nt, Artificial Sequence
  Description of Artificial Sequence: Synthetic oligonucleotide
aauugucucguaauugagu

SEQ ID NO: 2005965 - RNA, 19 nt, Artificial Sequence
  Description of Artificial Sequence: Synthetic oligonucleotide
ccuacaagggacaaguggc

SEQ ID NO: 2005966 - RNA, 19 nt, Artificial Sequence
  Description of Artificial Sequence: Synthetic oligonucleotide
augacagugguucgaagca

SEQ ID NO: 2005967 - RNA, 19 nt, Artificial Sequence
  Description of Artificial Sequence: Synthetic oligonucleotide
aagaaccuucacaaacaac

SEQ ID NO: 2005968 - RNA, 19 nt, Artificial Sequence
  Description of Artificial Sequence: Synthetic oligonucleotide
agugguucgaagcacgaau

SEQ ID NO: 2005969 - RNA, 19 nt, Artificial Sequence
  Description of Artificial Sequence: Synthetic oligonucleotide
gagcucuaguauuguaagg

SEQ ID NO: 2005970 - RNA, 19 nt, Artificial Sequence
  Description of Artificial Sequence: Synthetic oligonucleotide
uagcgggucagguugcagg

SEQ ID NO: 2005971 - RNA, 19 nt, Artificial Sequence
  Description of Artificial Sequence: Synthetic oligonucleotide
agcucuaguauuguaagga

SEQ ID NO: 2005972 - RNA, 19 nt, Artificial Sequence
  Description of Artificial Sequence: Synthetic oligonucleotide
ucuuuguuguagcggguca

SEQ ID NO: 2005973 - RNA, 19 nt, Artificial Sequence
  Description of Artificial Sequence: Synthetic oligonucleotide
uuuucugcuaggaggccga

SEQ ID NO: 2005974 - RNA, 19 nt, Artificial Sequence
  Description of Artificial Sequence: Synthetic oligonucleotide
aauaugacagugguucgaa

SEQ ID NO: 2005975 - RNA, 19 nt, Artificial Sequence
  Description of Artificial Sequence: Synthetic oligonucleotide
uuuuaauaugacagugguu

SEQ ID NO: 2005976 - RNA, 19 nt, Artificial Sequence
  Description of Artificial Sequence: Synthetic oligonucleotide
auauccagaaccagaaugu

SEQ ID NO: 2005977 - RNA, 19 nt, Artificial Sequence
  Description of Artificial Sequence: Synthetic oligonucleotide
aaccuggucccacugcaug

SEQ ID NO: 2005978 - RNA, 19 nt, Artificial Sequence
  Description of Artificial Sequence: Synthetic oligonucleotide
uucgaagcacgaauaaaua

SEQ ID NO: 2005979 - RNA, 19 nt, Artificial Sequence
  Description of Artificial Sequence: Synthetic oligonucleotide
accagcuuuuaauaugaca

SEQ ID NO: 2005980 - RNA, 19 nt, Artificial Sequence
  Description of Artificial Sequence: Synthetic oligonucleotide
gacgguucaugucagaugu

SEQ ID NO: 2005981 - RNA, 19 nt, Artificial Sequence
  Description of Artificial Sequence: Synthetic oligonucleotide
ucucuagguacuuggcuga

SEQ ID NO: 2005982 - RNA, 19 nt, Artificial Sequence
  Description of Artificial Sequence: Synthetic oligonucleotide
gaaguucacaaugugugca

SEQ ID NO: 2005983 - RNA, 19 nt, Artificial Sequence
  Description of Artificial Sequence: Synthetic oligonucleotide
aaggaccgaacguuguaga

SEQ ID NO: 2005984 - RNA, 19 nt, Artificial Sequence
  Description of Artificial Sequence: Synthetic oligonucleotide
ugcucauguucucaucaug

SEQ ID NO: 2005985 - RNA, 19 nt, Artificial Sequence
  Description of Artificial Sequence: Synthetic oligonucleotide
ucaucaggggccauuccac

SEQ ID NO: 2005986 - RNA, 19 nt, Artificial Sequence
  Description of Artificial Sequence: Synthetic oligonucleotide
cucauguucucaucauggc

SEQ ID NO: 2005987 - RNA, 19 nt, Artificial Sequence
  Description of Artificial Sequence: Synthetic oligonucleotide
uucuguucaauugucucgu

SEQ ID NO: 2005988 - RNA, 19 nt, Artificial Sequence
  Description of Artificial Sequence: Synthetic oligonucleotide
uucggcauugugucacagg

SEQ ID NO: 2005989 - RNA, 19 nt, Artificial Sequence
  Description of Artificial Sequence: Synthetic oligonucleotide
uaauaugacagugguucga

SEQ ID NO: 2005990 - RNA, 19 nt, Artificial Sequence
  Description of Artificial Sequence: Synthetic oligonucleotide
gcacgaauaaauaaacgcc

SEQ ID NO: 2005991 - RNA, 19 nt, Artificial Sequence
  Description of Artificial Sequence: Synthetic oligonucleotide
gucuauuuggaggugcugc

SEQ ID NO: 2005992 - RNA, 19 nt, Artificial Sequence
  Description of Artificial Sequence: Synthetic oligonucleotide
cuucauacgccuucuucug

SEQ ID NO: 2005993 - RNA, 19 nt, Artificial Sequence
  Description of Artificial Sequence: Synthetic oligonucleotide
uaguauuguaaggauacua

SEQ ID NO: 2005994 - RNA, 19 nt, Artificial Sequence
  Description of Artificial Sequence: Synthetic oligonucleotide
gcaguuuugauuccagagc

SEQ ID NO: 2005995 - RNA, 19 nt, Artificial Sequence
  Description of Artificial Sequence: Synthetic oligonucleotide
uaaggauacuagcaccaau

SEQ ID NO: 2005996 - RNA, 19 nt, Artificial Sequence
  Description of Artificial Sequence: Synthetic oligonucleotide
caccaaguaaggcagcaac

SEQ ID NO: 2005997 - RNA, 19 nt, Artificial Sequence
  Description of Artificial Sequence: Synthetic oligonucleotide
gacaaaaguggagguggcg

SEQ ID NO: 2005998 - RNA, 19 nt, Artificial Sequence
  Description of Artificial Sequence: Synthetic oligonucleotide
caggguguccugcagagac

SEQ ID NO: 2005999 - RNA, 19 nt, Artificial Sequence
  Description of Artificial Sequence: Synthetic oligonucleotide
ugagcaugcaggugcuuug

SEQ ID NO: 2006000 - RNA, 19 nt, Artificial Sequence
  Description of Artificial Sequence: Synthetic oligonucleotide
aggucuaauagcuucucuu

SEQ ID NO: 2006001 - RNA, 19 nt, Artificial Sequence
  Description of Artificial Sequence: Synthetic oligonucleotide
gacaguuccggagugggac

SEQ ID NO: 2006002 - RNA, 19 nt, Artificial Sequence
  Description of Artificial Sequence: Synthetic oligonucleotide
uacuagcaccaauaaacaa

SEQ ID NO: 2006003 - RNA, 19 nt, Artificial Sequence
  Description of Artificial Sequence: Synthetic oligonucleotide
uaccauguacaagacaaaa

SEQ ID NO: 2006004 - RNA, 19 nt, Artificial Sequence
  Description of Artificial Sequence: Synthetic oligonucleotide
uugucucguaauugagugc

SEQ ID NO: 2006005 - RNA, 19 nt, Artificial Sequence
  Description of Artificial Sequence: Synthetic oligonucleotide
gcucauguucucaucaugg

SEQ ID NO: 2006006 - RNA, 19 nt, Artificial Sequence
  Description of Artificial Sequence: Synthetic oligonucleotide
aggaccgaacguuguagag

SEQ ID NO: 2006007 - RNA, 19 nt, Artificial Sequence
  Description of Artificial Sequence: Synthetic oligonucleotide
gagcucuuuguuguagcgg

SEQ ID NO: 2006008 - RNA, 19 nt, Artificial Sequence
  Description of Artificial Sequence: Synthetic oligonucleotide
auggcagguuaguucuugg

SEQ ID NO: 2006009 - RNA, 19 nt, Artificial Sequence
  Description of Artificial Sequence: Synthetic oligonucleotide
caugcaggugcuuuguaca

SEQ ID NO: 2006010 - RNA, 19 nt, Artificial Sequence
  Description of Artificial Sequence: Synthetic oligonucleotide
ggcugaugguuucagagug

SEQ ID NO: 2006011 - RNA, 19 nt, Artificial Sequence
  Description of Artificial Sequence: Synthetic oligonucleotide
auaugacagugguucgaag

SEQ ID NO: 2006012 - RNA, 19 nt, Artificial Sequence
  Description of Artificial Sequence: Synthetic oligonucleotide
aggauacuagcaccaauaa

SEQ ID NO: 2006013 - RNA, 19 nt, Artificial Sequence
  Description of Artificial Sequence: Synthetic oligonucleotide
ugcuaggaggccgagggca

SEQ ID NO: 2006014 - RNA, 19 nt, Artificial Sequence
  Description of Artificial Sequence: Synthetic oligonucleotide
agcuugcuguccccugucc

SEQ ID NO: 2006015 - RNA, 19 nt, Artificial Sequence
  Description of Artificial Sequence: Synthetic oligonucleotide
auuuggaggugcugcguug

SEQ ID NO: 2006016 - RNA, 19 nt, Artificial Sequence
  Description of Artificial Sequence: Synthetic oligonucleotide
uucauacgccuucuucugu

SEQ ID NO: 2006017 - RNA, 19 nt, Artificial Sequence
  Description of Artificial Sequence: Synthetic oligonucleotide
ucuagguacuuggcugacg

SEQ ID NO: 2006018 - RNA, 19 nt, Artificial Sequence
  Description of Artificial Sequence: Synthetic oligonucleotide
ugguucgaagcacgaauaa

SEQ ID NO: 2006019 - RNA, 19 nt, Artificial Sequence
  Description of Artificial Sequence: Synthetic oligonucleotide
uuuggaggugcugcguugc

SEQ ID NO: 2006020 - RNA, 19 nt, Artificial Sequence
  Description of Artificial Sequence: Synthetic oligonucleotide
ugggccuuaaggucuauuu

SEQ ID NO: 2006021 - RNA, 19 nt, Artificial Sequence
  Description of Artificial Sequence: Synthetic oligonucleotide
caggggcacauucacagug

SEQ ID NO: 2006022 - RNA, 19 nt, Artificial Sequence
  Description of Artificial Sequence: Synthetic oligonucleotide
ugagcuugcuguccccugu

SEQ ID NO: 2006023 - RNA, 19 nt, Artificial Sequence
  Description of Artificial Sequence: Synthetic oligonucleotide
acaguaauugcuguccuuu

SEQ ID NO: 2006024 - RNA, 19 nt, Artificial Sequence
  Description of Artificial Sequence: Synthetic oligonucleotide
uuccacaagaccagcuuuu

SEQ ID NO: 2006025 - RNA, 19 nt, Artificial Sequence
  Description of Artificial Sequence: Synthetic oligonucleotide
uugccaagcaggucuaaua

SEQ ID NO: 2006026 - RNA, 19 nt, Artificial Sequence
  Description of Artificial Sequence: Synthetic oligonucleotide
uaagaagucugagcaugca

SEQ ID NO: 2006027 - RNA, 19 nt, Artificial Sequence
  Description of Artificial Sequence: Synthetic oligonucleotide
aaacaacacaaggaccgaa

SEQ ID NO: 2006028 - RNA, 19 nt, Artificial Sequence
  Description of Artificial Sequence: Synthetic oligonucleotide
caaggaccgaacguuguag

SEQ ID NO: 2006029 - RNA, 19 nt, Artificial Sequence
  Description of Artificial Sequence: Synthetic oligonucleotide
ucucguaauugagugcuuc

SEQ ID NO: 2006030 - RNA, 19 nt, Artificial Sequence
  Description of Artificial Sequence: Synthetic oligonucleotide
gggaucuucaccauggaga

SEQ ID NO: 2006031 - RNA, 19 nt, Artificial Sequence
  Description of Artificial Sequence: Synthetic oligonucleotide
ugucagauguggccagagu

SEQ ID NO: 2006032 - RNA, 19 nt, Artificial Sequence
  Description of Artificial Sequence: Synthetic oligonucleotide
agagugguucggcauugug

SEQ ID NO: 2006033 - RNA, 19 nt, Artificial Sequence
  Description of Artificial Sequence: Synthetic oligonucleotide
aacguuguagagaguucug

SEQ ID NO: 2006034 - RNA, 19 nt, Artificial Sequence
  Description of Artificial Sequence: Synthetic oligonucleotide
ugucaccaaguaaggcagc

SEQ ID NO: 2006035 - RNA, 19 nt, Artificial Sequence
  Description of Artificial Sequence: Synthetic oligonucleotide
ggaaacugcauggagaaaa

SEQ ID NO: 2006036 - RNA, 19 nt, Artificial Sequence
  Description of Artificial Sequence: Synthetic oligonucleotide
guuucagagugguucggca

SEQ ID NO: 2006037 - RNA, 19 nt, Artificial Sequence
  Description of Artificial Sequence: Synthetic oligonucleotide
ugucagcaggcaaucuccu

SEQ ID NO: 2006038 - RNA, 19 nt, Artificial Sequence
  Description of Artificial Sequence: Synthetic oligonucleotide
ucguaauugagugcuucaa

SEQ ID NO: 2006039 - RNA, 19 nt, Artificial Sequence
  Description of Artificial Sequence: Synthetic oligonucleotide
caucaggggccauuccacc

SEQ ID NO: 2006040 - RNA, 19 nt, Artificial Sequence
  Description of Artificial Sequence: Synthetic oligonucleotide
aauaaacgccaaaguuugu

SEQ ID NO: 2006041 - RNA, 19 nt, Artificial Sequence
  Description of Artificial Sequence: Synthetic oligonucleotide
aagcugucugcaggggcac

SEQ ID NO: 2006042 - RNA, 19 nt, Artificial Sequence
  Description of Artificial Sequence: Synthetic oligonucleotide
ucagagugguucggcauug

SEQ ID NO: 2006043 - RNA, 19 nt, Artificial Sequence
  Description of Artificial Sequence: Synthetic oligonucleotide
agaugugauggcagguuag

SEQ ID NO: 2006044 - RNA, 19 nt, Artificial Sequence
  Description of Artificial Sequence: Synthetic oligonucleotide
ugguucggcauugugucac

SEQ ID NO: 2006045 - RNA, 19 nt, Artificial Sequence
  Description of Artificial Sequence: Synthetic oligonucleotide
uguagagaguucugugguu

SEQ ID NO: 2006046 - RNA, 19 nt, Artificial Sequence
  Description of Artificial Sequence: Synthetic oligonucleotide
ggcagguuaguucuuggac

SEQ ID NO: 2006047 - RNA, 19 nt, Artificial Sequence
  Description of Artificial Sequence: Synthetic oligonucleotide
ggugcucauguucucauca

SEQ ID NO: 2006048 - RNA, 19 nt, Artificial Sequence
  Description of Artificial Sequence: Synthetic oligonucleotide
ccugcagagacaguaauug

SEQ ID NO: 2006049 - RNA, 19 nt, Artificial Sequence
  Description of Artificial Sequence: Synthetic oligonucleotide
cauugugucacaggugcuc

SEQ ID NO: 2006050 - RNA, 19 nt, Artificial Sequence
  Description of Artificial Sequence: Synthetic oligonucleotide
gaagucugagcaugcaggu

SEQ ID NO: 2006051 - RNA, 19 nt, Artificial Sequence
  Description of Artificial Sequence: Synthetic oligonucleotide
guggcuucggggcuggaac

SEQ ID NO: 2006052 - RNA, 19 nt, Artificial Sequence
  Description of Artificial Sequence: Synthetic oligonucleotide
uuguagcgggucagguugc

SEQ ID NO: 2006053 - RNA, 19 nt, Artificial Sequence
  Description of Artificial Sequence: Synthetic oligonucleotide
uguuguagcgggucagguu

SEQ ID NO: 2006054 - RNA, 19 nt, Artificial Sequence
  Description of Artificial Sequence: Synthetic oligonucleotide
gaacguuguagagaguucu

SEQ ID NO: 2006055 - RNA, 19 nt, Artificial Sequence
  Description of Artificial Sequence: Synthetic oligonucleotide
auacgccuucuucuguuca

SEQ ID NO: 2006056 - RNA, 19 nt, Artificial Sequence
  Description of Artificial Sequence: Synthetic oligonucleotide
accugagcuugcugucccc

SEQ ID NO: 2006057 - RNA, 19 nt, Artificial Sequence
  Description of Artificial Sequence: Synthetic oligonucleotide
cuucggggcuggaaccugg

SEQ ID NO: 2006058 - RNA, 19 nt, Artificial Sequence
  Description of Artificial Sequence: Synthetic oligonucleotide
gagaugugauggcagguua

SEQ ID NO: 2006059 - RNA, 19 nt, Artificial Sequence
  Description of Artificial Sequence: Synthetic oligonucleotide
ugagaugugauggcagguu

SEQ ID NO: 2006060 - RNA, 19 nt, Artificial Sequence
  Description of Artificial Sequence: Synthetic oligonucleotide
ugguuucagagugguucgg

SEQ ID NO: 2006061 - RNA, 19 nt, Artificial Sequence
  Description of Artificial Sequence: Synthetic oligonucleotide
cuacaagggacaaguggca

SEQ ID NO: 2006062 - RNA, 19 nt, Artificial Sequence
  Description of Artificial Sequence: Synthetic oligonucleotide
agguuuggcagaaguucac

SEQ ID NO: 2006063 - RNA, 19 nt, Artificial Sequence
  Description of Artificial Sequence: Synthetic oligonucleotide
cucuaguauuguaaggaua

SEQ ID NO: 2006064 - RNA, 19 nt, Artificial Sequence
  Description of Artificial Sequence: Synthetic oligonucleotide
ugcugcguugccugaggug

SEQ ID NO: 2006065 - RNA, 19 nt, Artificial Sequence
  Description of Artificial Sequence: Synthetic oligonucleotide
guucgaagcacgaauaaau

SEQ ID NO: 2006066 - RNA, 19 nt, Artificial Sequence
  Description of Artificial Sequence: Synthetic oligonucleotide
ucugaccaccaaugucacc

SEQ ID NO: 2006067 - RNA, 19 nt, Artificial Sequence
  Description of Artificial Sequence: Synthetic oligonucleotide
cucguaauugagugcuuca

SEQ ID NO: 2006068 - RNA, 19 nt, Artificial Sequence
  Description of Artificial Sequence: Synthetic oligonucleotide
uuucugucaucaggggcca

SEQ ID NO: 2006069 - RNA, 19 nt, Artificial Sequence
  Description of Artificial Sequence: Synthetic oligonucleotide
uaaggucuauuuggaggug

SEQ ID NO: 2006070 - RNA, 19 nt, Artificial Sequence
  Description of Artificial Sequence: Synthetic oligonucleotide
uugaccgagcaguuuugau

SEQ ID NO: 2006071 - RNA, 19 nt, Artificial Sequence
  Description of Artificial Sequence: Synthetic oligonucleotide
ugacagugguucgaagcac

SEQ ID NO: 2006072 - RNA, 19 nt, Artificial Sequence
  Description of Artificial Sequence: Synthetic oligonucleotide
cacaagaccagcuuuuaau

SEQ ID NO: 2006073 - RNA, 19 nt, Artificial Sequence
  Description of Artificial Sequence: Synthetic oligonucleotide
acaaguggcagggcccggg

SEQ ID NO: 2006074 - RNA, 19 nt, Artificial Sequence
  Description of Artificial Sequence: Synthetic oligonucleotide
acguuguagagaguucugu

SEQ ID NO: 2006075 - RNA, 19 nt, Artificial Sequence
  Description of Artificial Sequence: Synthetic oligonucleotide
acaguuccggagugggacu

SEQ ID NO: 2006076 - RNA, 19 nt, Artificial Sequence
  Description of Artificial Sequence: Synthetic oligonucleotide
aguuuugauuccagagcug

SEQ ID NO: 2006077 - RNA, 19 nt, Artificial Sequence
  Description of Artificial Sequence: Synthetic oligonucleotide
acgccaaaguuugugggca

SEQ ID NO: 2006078 - RNA, 19 nt, Artificial Sequence
  Description of Artificial Sequence: Synthetic oligonucleotide
uuugccaagcaggucuaau

SEQ ID NO: 2006079 - RNA, 19 nt, Artificial Sequence
  Description of Artificial Sequence: Synthetic oligonucleotide
uacgccuucuucuguucaa

SEQ ID NO: 2006080 - RNA, 19 nt, Artificial Sequence
  Description of Artificial Sequence: Synthetic oligonucleotide
cuagguacuuggcugacgu

SEQ ID NO: 2006081 - RNA, 19 nt, Artificial Sequence
  Description of Artificial Sequence: Synthetic oligonucleotide
ggaggugcugcguugccug

SEQ ID NO: 2006082 - RNA, 19 nt, Artificial Sequence
  Description of Artificial Sequence: Synthetic oligonucleotide
ccuuaaggucuauuuggag

SEQ ID NO: 2006083 - RNA, 19 nt, Artificial Sequence
  Description of Artificial Sequence: Synthetic oligonucleotide
ccauguacaagacaaaagu

SEQ ID NO: 2006084 - RNA, 19 nt, Artificial Sequence
  Description of Artificial Sequence: Synthetic oligonucleotide
gggccuuaaggucuauuug

SEQ ID NO: 2006085 - RNA, 19 nt, Artificial Sequence
  Description of Artificial Sequence: Synthetic oligonucleotide
acaaggaccgaacguugua

SEQ ID NO: 2006086 - RNA, 19 nt, Artificial Sequence
  Description of Artificial Sequence: Synthetic oligonucleotide
caccugagcuugcuguccc

SEQ ID NO: 2006087 - RNA, 19 nt, Artificial Sequence
  Description of Artificial Sequence: Synthetic oligonucleotide
cucuuuguuguagcggguc

SEQ ID NO: 2006088 - RNA, 19 nt, Artificial Sequence
  Description of Artificial Sequence: Synthetic oligonucleotide
acacaaggaccgaacguug

SEQ ID NO: 2006089 - RNA, 19 nt, Artificial Sequence
  Description of Artificial Sequence: Synthetic oligonucleotide
gcaggcaaucuccuccagg

SEQ ID NO: 2006090 - RNA, 19 nt, Artificial Sequence
  Description of Artificial Sequence: Synthetic oligonucleotide
ggacgguucaugucagaug

SEQ ID NO: 2006091 - RNA, 19 nt, Artificial Sequence
  Description of Artificial Sequence: Synthetic oligonucleotide
ggcagugagaugugauggc

SEQ ID NO: 2006092 - RNA, 19 nt, Artificial Sequence
  Description of Artificial Sequence: Synthetic oligonucleotide
auugaccgagcaguuuuga

SEQ ID NO: 2006093 - RNA, 19 nt, Artificial Sequence
  Description of Artificial Sequence: Synthetic oligonucleotide
ucuugggccuuaaggucua

SEQ ID NO: 2006094 - RNA, 19 nt, Artificial Sequence
  Description of Artificial Sequence: Synthetic oligonucleotide
uggcgccguaagaagucug

SEQ ID NO: 2006095 - RNA, 19 nt, Artificial Sequence
  Description of Artificial Sequence: Synthetic oligonucleotide
guuaguucuuggacaguuc

SEQ ID NO: 2006096 - RNA, 19 nt, Artificial Sequence
  Description of Artificial Sequence: Synthetic oligonucleotide
guuugugggcagguuaaga

SEQ ID NO: 2006097 - RNA, 19 nt, Artificial Sequence
  Description of Artificial Sequence: Synthetic oligonucleotide
agcaggucuaauagcuucu

SEQ ID NO: 2006098 - RNA, 19 nt, Artificial Sequence
  Description of Artificial Sequence: Synthetic oligonucleotide
cguaagaagucugagcaug

SEQ ID NO: 2006099 - RNA, 19 nt, Artificial Sequence
  Description of Artificial Sequence: Synthetic oligonucleotide
ggaaccuggucccacugca

SEQ ID NO: 2006100 - RNA, 19 nt, Artificial Sequence
  Description of Artificial Sequence: Synthetic oligonucleotide
ggugcugcguugccugagg

SEQ ID NO: 2006101 - RNA, 19 nt, Artificial Sequence
  Description of Artificial Sequence: Synthetic oligonucleotide
ggauacuagcaccaauaaa

SEQ ID NO: 2006102 - RNA, 19 nt, Artificial Sequence
  Description of Artificial Sequence: Synthetic oligonucleotide
gagugguucggcauugugu

SEQ ID NO: 2006103 - RNA, 19 nt, Artificial Sequence
  Description of Artificial Sequence: Synthetic oligonucleotide
guucaauugucucguaauu

SEQ ID NO: 2006104 - RNA, 19 nt, Artificial Sequence
  Description of Artificial Sequence: Synthetic oligonucleotide
ucaccaaguaaggcagcaa

SEQ ID NO: 2006105 - RNA, 19 nt, Artificial Sequence
  Description of Artificial Sequence: Synthetic oligonucleotide
cuggaaccuggucccacug

SEQ ID NO: 2006106 - RNA, 19 nt, Artificial Sequence
  Description of Artificial Sequence: Synthetic oligonucleotide
guacuuggcugacgucuug

SEQ ID NO: 2006107 - RNA, 19 nt, Artificial Sequence
  Description of Artificial Sequence: Synthetic oligonucleotide
ucugucaucaggggccauu

SEQ ID NO: 2006108 - RNA, 19 nt, Artificial Sequence
  Description of Artificial Sequence: Synthetic oligonucleotide
ggguguccugcagagacag

SEQ ID NO: 2006109 - RNA, 19 nt, Artificial Sequence
  Description of Artificial Sequence: Synthetic oligonucleotide
ucuguucaauugucucgua

SEQ ID NO: 2006110 - RNA, 19 nt, Artificial Sequence
  Description of Artificial Sequence: Synthetic oligonucleotide
agagugagguuuggcagaa

SEQ ID NO: 2006111 - RNA, 19 nt, Artificial Sequence
  Description of Artificial Sequence: Synthetic oligonucleotide
cgaagcacgaauaaauaaa

SEQ ID NO: 2006112 - RNA, 19 nt, Artificial Sequence
  Description of Artificial Sequence: Synthetic oligonucleotide
gguuucagagugguucggc

SEQ ID NO: 2006113 - RNA, 19 nt, Artificial Sequence
  Description of Artificial Sequence: Synthetic oligonucleotide
gaugugauggcagguuagu

SEQ ID NO: 2006114 - RNA, 19 nt, Artificial Sequence
  Description of Artificial Sequence: Synthetic oligonucleotide
uccacaagaccagcuuuua

SEQ ID NO: 2006115 - RNA, 19 nt, Artificial Sequence
  Description of Artificial Sequence: Synthetic oligonucleotide
caguguggcugaugguuuc

SEQ ID NO: 2006116 - RNA, 19 nt, Artificial Sequence
  Description of Artificial Sequence: Synthetic oligonucleotide
gguccuacaagggacaagu

SEQ ID NO: 2006117 - RNA, 19 nt, Artificial Sequence
  Description of Artificial Sequence: Synthetic oligonucleotide
auucacaguguggcugaug

SEQ ID NO: 2006118 - RNA, 19 nt, Artificial Sequence
  Description of Artificial Sequence: Synthetic oligonucleotide
caccaauaaacaaucccau

SEQ ID NO: 2006119 - RNA, 19 nt, Artificial Sequence
  Description of Artificial Sequence: Synthetic oligonucleotide
gguuaagaaccuucacaaa

SEQ ID NO: 2006120 - RNA, 19 nt, Artificial Sequence
  Description of Artificial Sequence: Synthetic oligonucleotide
ugggacucauugguccuac

SEQ ID NO: 2006121 - RNA, 19 nt, Artificial Sequence
  Description of Artificial Sequence: Synthetic oligonucleotide
caagaccagcuuuuaauau

SEQ ID NO: 2006122 - RNA, 19 nt, Artificial Sequence
  Description of Artificial Sequence: Synthetic oligonucleotide
cuaauagcuucucuuugau

SEQ ID NO: 2006123 - RNA, 19 nt, Artificial Sequence
  Description of Artificial Sequence: Synthetic oligonucleotide
cguuguagagaguucugug

SEQ ID NO: 2006124 - RNA, 19 nt, Artificial Sequence
  Description of Artificial Sequence: Synthetic oligonucleotide
uuucugcuaggaggccgag

SEQ ID NO: 2006125 - RNA, 19 nt, Artificial Sequence
  Description of Artificial Sequence: Synthetic oligonucleotide
gcagagugggcucuggaaa

SEQ ID NO: 2006126 - RNA, 19 nt, Artificial Sequence
  Description of Artificial Sequence: Synthetic oligonucleotide
ugcguugccugagguguca

SEQ ID NO: 2006127 - RNA, 19 nt, Artificial Sequence
  Description of Artificial Sequence: Synthetic oligonucleotide
aggucuauuuggaggugcu

SEQ ID NO: 2006128 - RNA, 19 nt, Artificial Sequence
  Description of Artificial Sequence: Synthetic oligonucleotide
gcugacgucuugcugggga

SEQ ID NO: 2006129 - RNA, 19 nt, Artificial Sequence
  Description of Artificial Sequence: Synthetic oligonucleotide
ccaagcaggucuaauagcu

SEQ ID NO: 2006130 - RNA, 19 nt, Artificial Sequence
  Description of Artificial Sequence: Synthetic oligonucleotide
ccaucugaccaccaauguc

SEQ ID NO: 2006131 - RNA, 19 nt, Artificial Sequence
  Description of Artificial Sequence: Synthetic oligonucleotide
guucggcauugugucacag

SEQ ID NO: 2006132 - RNA, 19 nt, Artificial Sequence
  Description of Artificial Sequence: Synthetic oligonucleotide
gucagcaggcaaucuccuc

SEQ ID NO: 2006133 - RNA, 19 nt, Artificial Sequence
  Description of Artificial Sequence: Synthetic oligonucleotide
uugugucacaggugcucau

SEQ ID NO: 2006134 - RNA, 19 nt, Artificial Sequence
  Description of Artificial Sequence: Synthetic oligonucleotide
caaacaacacaaggaccga

SEQ ID NO: 2006135 - RNA, 19 nt, Artificial Sequence
  Description of Artificial Sequence: Synthetic oligonucleotide
uguagcgggucagguugca

SEQ ID NO: 2006136 - RNA, 19 nt, Artificial Sequence
  Description of Artificial Sequence: Synthetic oligonucleotide
cgguucaugucagaugugg

SEQ ID NO: 2006137 - RNA, 19 nt, Artificial Sequence
  Description of Artificial Sequence: Synthetic oligonucleotide
uugguccuacaagggacaa

SEQ ID NO: 2006138 - RNA, 19 nt, Artificial Sequence
  Description of Artificial Sequence: Synthetic oligonucleotide
cagguugcaggguguccug

SEQ ID NO: 2006139 - RNA, 19 nt, Artificial Sequence
  Description of Artificial Sequence: Synthetic oligonucleotide
guaaggauacuagcaccaa

SEQ ID NO: 2006140 - RNA, 19 nt, Artificial Sequence
  Description of Artificial Sequence: Synthetic oligonucleotide
gagcuugcuguccccuguc

SEQ ID NO: 2006141 - RNA, 19 nt, Artificial Sequence
  Description of Artificial Sequence: Synthetic oligonucleotide
acagugguucgaagcacga

SEQ ID NO: 2006142 - RNA, 19 nt, Artificial Sequence
  Description of Artificial Sequence: Synthetic oligonucleotide
gaccagcuuuuaauaugac

SEQ ID NO: 2006143 - RNA, 19 nt, Artificial Sequence
  Description of Artificial Sequence: Synthetic oligonucleotide
cugcuaggaggccgagggc

SEQ ID NO: 2006144 - RNA, 19 nt, Artificial Sequence
  Description of Artificial Sequence: Synthetic oligonucleotide
uggaaacugcauggagaaa

SEQ ID NO: 2006145 - RNA, 19 nt, Artificial Sequence
  Description of Artificial Sequence: Synthetic oligonucleotide
ugacgucuugcuggggauc

SEQ ID NO: 2006146 - RNA, 19 nt, Artificial Sequence
  Description of Artificial Sequence: Synthetic oligonucleotide
gccaaaguuugugggcagg

SEQ ID NO: 2006147 - RNA, 19 nt, Artificial Sequence
  Description of Artificial Sequence: Synthetic oligonucleotide
ggucuaauagcuucucuuu

SEQ ID NO: 2006148 - RNA, 19 nt, Artificial Sequence
  Description of Artificial Sequence: Synthetic oligonucleotide
cuguccuuuucugcuagga

SEQ ID NO: 2006149 - RNA, 19 nt, Artificial Sequence
  Description of Artificial Sequence: Synthetic oligonucleotide
cuuggcagugagaugugau

SEQ ID NO: 2006150 - RNA, 19 nt, Artificial Sequence
  Description of Artificial Sequence: Synthetic oligonucleotide
cagcaggcaaucuccucca

SEQ ID NO: 2006151 - RNA, 19 nt, Artificial Sequence
  Description of Artificial Sequence: Synthetic oligonucleotide
ggaccgaacguuguagaga

SEQ ID NO: 2006152 - RNA, 19 nt, Artificial Sequence
  Description of Artificial Sequence: Synthetic oligonucleotide
aggggcacauucacagugu

SEQ ID NO: 2006153 - RNA, 19 nt, Artificial Sequence
  Description of Artificial Sequence: Synthetic oligonucleotide
augugauggcagguuaguu

SEQ ID NO: 2006154 - RNA, 19 nt, Artificial Sequence
  Description of Artificial Sequence: Synthetic oligonucleotide
gcuguccuuuucugcuagg

SEQ ID NO: 2006155 - RNA, 19 nt, Artificial Sequence
  Description of Artificial Sequence: Synthetic oligonucleotide
gguucgaagcacgaauaaa

SEQ ID NO: 2006156 - RNA, 19 nt, Artificial Sequence
  Description of Artificial Sequence: Synthetic oligonucleotide
gacaguaauugcuguccuu

SEQ ID NO: 2006157 - RNA, 19 nt, Artificial Sequence
  Description of Artificial Sequence: Synthetic oligonucleotide
ggagguggcgccguaagaa

SEQ ID NO: 2006158 - RNA, 19 nt, Artificial Sequence
  Description of Artificial Sequence: Synthetic oligonucleotide
guagcgggucagguugcag

SEQ ID NO: 2006159 - RNA, 19 nt, Artificial Sequence
  Description of Artificial Sequence: Synthetic oligonucleotide
gugguucggcauuguguca

SEQ ID NO: 2006160 - RNA, 19 nt, Artificial Sequence
  Description of Artificial Sequence: Synthetic oligonucleotide
aggugcugcguugccugag

SEQ ID NO: 2006161 - RNA, 19 nt, Artificial Sequence
  Description of Artificial Sequence: Synthetic oligonucleotide
cugaggugucagcaggcaa

SEQ ID NO: 2006162 - RNA, 19 nt, Artificial Sequence
  Description of Artificial Sequence: Synthetic oligonucleotide
guaaggcagcaacuucaua

SEQ ID NO: 2006163 - RNA, 19 nt, Artificial Sequence
  Description of Artificial Sequence: Synthetic oligonucleotide
ggucuauuuggaggugcug

SEQ ID NO: 2006164 - RNA, 19 nt, Artificial Sequence
  Description of Artificial Sequence: Synthetic oligonucleotide
gccuuaaggucuauuugga

SEQ ID NO: 2006165 - RNA, 19 nt, Artificial Sequence
  Description of Artificial Sequence: Synthetic oligonucleotide
gagugagguuuggcagaag

SEQ ID NO: 2006166 - RNA, 19 nt, Artificial Sequence
  Description of Artificial Sequence: Synthetic oligonucleotide
cgccguaagaagucugagc

SEQ ID NO: 2006167 - RNA, 19 nt, Artificial Sequence
  Description of Artificial Sequence: Synthetic oligonucleotide
gguugcaggguguccugca

SEQ ID NO: 2006168 - RNA, 19 nt, Artificial Sequence
  Description of Artificial Sequence: Synthetic oligonucleotide
cacaaggaccgaacguugu

SEQ ID NO: 2006169 - RNA, 19 nt, Artificial Sequence
  Description of Artificial Sequence: Synthetic oligonucleotide
caguuccggagugggacuc

SEQ ID NO: 2006170 - RNA, 19 nt, Artificial Sequence
  Description of Artificial Sequence: Synthetic oligonucleotide
aaguggagguggcgccgua

SEQ ID NO: 2006171 - RNA, 19 nt, Artificial Sequence
  Description of Artificial Sequence: Synthetic oligonucleotide
gggcagguuaagaaccuuc

SEQ ID NO: 2006172 - RNA, 19 nt, Artificial Sequence
  Description of Artificial Sequence: Synthetic oligonucleotide
gcugcguugccugaggugu

SEQ ID NO: 2006173 - RNA, 19 nt, Artificial Sequence
  Description of Artificial Sequence: Synthetic oligonucleotide
cccgggacgguucauguca

SEQ ID NO: 2006174 - RNA, 19 nt, Artificial Sequence
  Description of Artificial Sequence: Synthetic oligonucleotide
cugcguugccugagguguc

SEQ ID NO: 2006175 - RNA, 19 nt, Artificial Sequence
  Description of Artificial Sequence: Synthetic oligonucleotide
gaauguucucugagauaua

SEQ ID NO: 2006176 - RNA, 19 nt, Artificial Sequence
  Description of Artificial Sequence: Synthetic oligonucleotide
aguuccggagugggacuca

SEQ ID NO: 2006177 - RNA, 19 nt, Artificial Sequence
  Description of Artificial Sequence: Synthetic oligonucleotide
gguggcgccguaagaaguc

SEQ ID NO: 2006178 - RNA, 19 nt, Artificial Sequence
  Description of Artificial Sequence: Synthetic oligonucleotide
acgccuucuucuguucaau

SEQ ID NO: 2006179 - RNA, 19 nt, Artificial Sequence
  Description of Artificial Sequence: Synthetic oligonucleotide
ggagugggacucauugguc

SEQ ID NO: 2006180 - RNA, 19 nt, Artificial Sequence
  Description of Artificial Sequence: Synthetic oligonucleotide
caaagagcucuaguauugu

SEQ ID NO: 2006181 - RNA, 19 nt, Artificial Sequence
  Description of Artificial Sequence: Synthetic oligonucleotide
aggguguccugcagagaca

SEQ ID NO: 2006182 - RNA, 19 nt, Artificial Sequence
  Description of Artificial Sequence: Synthetic oligonucleotide
cgaacguuguagagaguuc

SEQ ID NO: 2006183 - RNA, 19 nt, Artificial Sequence
  Description of Artificial Sequence: Synthetic oligonucleotide
uuccggagugggacucauu

SEQ ID NO: 2006184 - RNA, 19 nt, Artificial Sequence
  Description of Artificial Sequence: Synthetic oligonucleotide
cguaauugagugcuucaaa

SEQ ID NO: 2006185 - RNA, 19 nt, Artificial Sequence
  Description of Artificial Sequence: Synthetic oligonucleotide
cuauuuggaggugcugcgu

SEQ ID NO: 2006186 - RNA, 19 nt, Artificial Sequence
  Description of Artificial Sequence: Synthetic oligonucleotide
ccaccaaugucaccaagua

SEQ ID NO: 2006187 - RNA, 19 nt, Artificial Sequence
  Description of Artificial Sequence: Synthetic oligonucleotide
ucugagcaugcaggugcuu

SEQ ID NO: 2006188 - RNA, 19 nt, Artificial Sequence
  Description of Artificial Sequence: Synthetic oligonucleotide
gguucggcauugugucaca

SEQ ID NO: 2006189 - RNA, 19 nt, Artificial Sequence
  Description of Artificial Sequence: Synthetic oligonucleotide
caagcaggucuaauagcuu

SEQ ID NO: 2006190 - RNA, 19 nt, Artificial Sequence
  Description of Artificial Sequence: Synthetic oligonucleotide
gcagcagagugggcucugg

SEQ ID NO: 2006191 - RNA, 19 nt, Artificial Sequence
  Description of Artificial Sequence: Synthetic oligonucleotide
cuuauugaccgagcaguuu

SEQ ID NO: 2006192 - RNA, 19 nt, Artificial Sequence
  Description of Artificial Sequence: Synthetic oligonucleotide
ggcgccguaagaagucuga

SEQ ID NO: 2006193 - RNA, 19 nt, Artificial Sequence
  Description of Artificial Sequence: Synthetic oligonucleotide
gcgccguaagaagucugag

SEQ ID NO: 2006194 - RNA, 19 nt, Artificial Sequence
  Description of Artificial Sequence: Synthetic oligonucleotide
gcaggucuaauagcuucuc

SEQ ID NO: 2006195 - RNA, 19 nt, Artificial Sequence
  Description of Artificial Sequence: Synthetic oligonucleotide
ggaggccgagggcaggcuc

SEQ ID NO: 2006196 - RNA, 19 nt, Artificial Sequence
  Description of Artificial Sequence: Synthetic oligonucleotide
caguaauugcuguccuuuu

SEQ ID NO: 2006197 - RNA, 19 nt, Artificial Sequence
  Description of Artificial Sequence: Synthetic oligonucleotide
gaggccgagggcaggcucu

SEQ ID NO: 2006198 - RNA, 19 nt, Artificial Sequence
  Description of Artificial Sequence: Synthetic oligonucleotide
caggugcucauguucucau

SEQ ID NO: 2006199 - RNA, 19 nt, Artificial Sequence
  Description of Artificial Sequence: Synthetic oligonucleotide
ccgggacgguucaugucag

SEQ ID NO: 2006200 - RNA, 19 nt, Artificial Sequence
  Description of Artificial Sequence: Synthetic oligonucleotide
cugacgucuugcuggggau

SEQ ID NO: 2006201 - RNA, 19 nt, Artificial Sequence
  Description of Artificial Sequence: Synthetic oligonucleotide
cagugguucgaagcacgaa

SEQ ID NO: 2006202 - RNA, 19 nt, Artificial Sequence
  Description of Artificial Sequence: Synthetic oligonucleotide
cguugccugaggugucagc

SEQ ID NO: 2006203 - RNA, 19 nt, Artificial Sequence
  Description of Artificial Sequence: Synthetic oligonucleotide
gugcugcguugccugaggu

SEQ ID NO: 2006204 - RNA, 19 nt, Artificial Sequence
  Description of Artificial Sequence: Synthetic oligonucleotide
gucugagcaugcaggugcu

SEQ ID NO: 2006205 - RNA, 19 nt, Artificial Sequence
  Description of Artificial Sequence: Synthetic oligonucleotide
cuuugccaagcaggucuaa

SEQ ID NO: 2006206 - RNA, 19 nt, Artificial Sequence
  Description of Artificial Sequence: Synthetic oligonucleotide
uucugucaucaggggccau

SEQ ID NO: 2006207 - RNA, 19 nt, Artificial Sequence
  Description of Artificial Sequence: Synthetic oligonucleotide
aggggccauuccaccugag

SEQ ID NO: 2006208 - RNA, 19 nt, Artificial Sequence
  Description of Artificial Sequence: Synthetic oligonucleotide
gcuucggggcuggaaccug

SEQ ID NO: 2006209 - RNA, 19 nt, Artificial Sequence
  Description of Artificial Sequence: Synthetic oligonucleotide
gugggacucauugguccua

SEQ ID NO: 2006210 - RNA, 19 nt, Artificial Sequence
  Description of Artificial Sequence: Synthetic oligonucleotide
gggacgguucaugucagau

SEQ ID NO: 2006211 - RNA, 19 nt, Artificial Sequence
  Description of Artificial Sequence: Synthetic oligonucleotide
gggacucauugguccuaca

SEQ ID NO: 2006212 - RNA, 19 nt, Artificial Sequence
  Description of Artificial Sequence: Synthetic oligonucleotide
gcuggaaccuggucccacu

SEQ ID NO: 2006213 - RNA, 19 nt, Artificial Sequence
  Description of Artificial Sequence: Synthetic oligonucleotide
ggacaguuccggaguggga

SEQ ID NO: 2006214 - RNA, 19 nt, Artificial Sequence
  Description of Artificial Sequence: Synthetic oligonucleotide
ccgaacguuguagagaguu

SEQ ID NO: 2006215 - RNA, 19 nt, Artificial Sequence
  Description of Artificial Sequence: Synthetic oligonucleotide
cagggcccgggacgguuca

SEQ ID NO: 2006216 - RNA, 19 nt, Artificial Sequence
  Description of Artificial Sequence: Synthetic oligonucleotide
gguggcuucggggcuggaa

SEQ ID NO: 2006217 - RNA, 19 nt, Artificial Sequence
  Description of Artificial Sequence: Synthetic oligonucleotide
ggcugacgucuugcugggg

SEQ ID NO: 2006218 - RNA, 19 nt, Artificial Sequence
  Description of Artificial Sequence: Synthetic oligonucleotide
gggcccgggacgguucaug

SEQ ID NO: 2006219 - RNA, 19 nt, Artificial Sequence
  Description of Artificial Sequence: Synthetic oligonucleotide
gcguugccugaggugucag

SEQ ID NO: 2006220 - RNA, 19 nt, Artificial Sequence
  Description of Artificial Sequence: Synthetic oligonucleotide
ccugaggugucagcaggca

SEQ ID NO: 2006221 - RNA, 19 nt, Artificial Sequence
  Description of Artificial Sequence: Synthetic oligonucleotide
ccuuauugaccgagcaguu

SEQ ID NO: 2006222 - RNA, 19 nt, Artificial Sequence
  Description of Artificial Sequence: Synthetic oligonucleotide
gcccgggacgguucauguc

SEQ ID NO: 2006223 - RNA, 19 nt, Artificial Sequence
  Description of Artificial Sequence: Synthetic oligonucleotide
ccaaaguuugugggcaggu

SEQ ID NO: 2006224 - RNA, 19 nt, Artificial Sequence
  Description of Artificial Sequence: Synthetic oligonucleotide
ggcccgggacgguucaugu

SEQ ID NO: 2006225 - RNA, 19 nt, Artificial Sequence
  Description of Artificial Sequence: Synthetic oligonucleotide
cagcaacuucauacgccuu

SEQ ID NO: 2006226 - RNA, 19 nt, Artificial Sequence
  Description of Artificial Sequence: Synthetic oligonucleotide
gcauugugucacaggugcu

SEQ ID NO: 2006227 - RNA, 19 nt, Artificial Sequence
  Description of Artificial Sequence: Synthetic oligonucleotide
ggcuucggggcuggaaccu

SEQ ID NO: 2006228 - RNA, 19 nt, Artificial Sequence
  Description of Artificial Sequence: Synthetic oligonucleotide
gucucguaauugagugcuu

SEQ ID NO: 2006229 - RNA, 19 nt, Artificial Sequence
  Description of Artificial Sequence: Synthetic oligonucleotide
gcucuuuguuguagcgggu

SEQ ID NO: 2006230 - RNA, 19 nt, Artificial Sequence
  Description of Artificial Sequence: Synthetic oligonucleotide
gcagggcccgggacgguuc

SEQ ID NO: 2006231 - RNA, 19 nt, Artificial Sequence
  Description of Artificial Sequence: Synthetic oligonucleotide
cagagugguucggcauugu

SEQ ID NO: 2006232 - RNA, 19 nt, Artificial Sequence
  Description of Artificial Sequence: Synthetic oligonucleotide
cuugggccuuaaggucuau

SEQ ID NO: 2006233 - RNA, 19 nt, Artificial Sequence
  Description of Artificial Sequence: Synthetic oligonucleotide
cgggacgguucaugucaga

SEQ ID NO: 2006234 - RNA, 19 nt, Artificial Sequence
  Description of Artificial Sequence: Synthetic oligonucleotide
gcgggucagguugcagggu

SEQ ID NO: 2006235 - RNA, 19 nt, Artificial Sequence
  Description of Artificial Sequence: Synthetic oligonucleotide
cuuguuuucaguaagaggc

SEQ ID NO: 2006236 - RNA, 19 nt, Artificial Sequence
  Description of Artificial Sequence: Synthetic oligonucleotide
agugaagcggcucaggacc

SEQ ID NO: 2006237 - RNA, 19 nt, Artificial Sequence
  Description of Artificial Sequence: Synthetic oligonucleotide
aguguugauucucucaccc

SEQ ID NO: 2006238 - RNA, 19 nt, Artificial Sequence
  Description of Artificial Sequence: Synthetic oligonucleotide
uucaguaagaggcacucgg

SEQ ID NO: 2006239 - RNA, 19 nt, Artificial Sequence
  Description of Artificial Sequence: Synthetic oligonucleotide
cuuuugagaguucaggcgg

SEQ ID NO: 2006240 - RNA, 19 nt, Artificial Sequence
  Description of Artificial Sequence: Synthetic oligonucleotide
aguaagaggcacucgggcc

SEQ ID NO: 2006241 - RNA, 19 nt, Artificial Sequence
  Description of Artificial Sequence: Synthetic oligonucleotide
cauagcagaacacagcagc

SEQ ID NO: 2006242 - RNA, 19 nt, Artificial Sequence
  Description of Artificial Sequence: Synthetic oligonucleotide
guaauaugccugcacaagg

SEQ ID NO: 2006243 - RNA, 19 nt, Artificial Sequence
  Description of Artificial Sequence: Synthetic oligonucleotide
uaaguguugauucucucac

SEQ ID NO: 2006244 - RNA, 19 nt, Artificial Sequence
  Description of Artificial Sequence: Synthetic oligonucleotide
aauguugccagcucugaga

SEQ ID NO: 2006245 - RNA, 19 nt, Artificial Sequence
  Description of Artificial Sequence: Synthetic oligonucleotide
uucuuuugguccuuacugg

SEQ ID NO: 2006246 - RNA, 19 nt, Artificial Sequence
  Description of Artificial Sequence: Synthetic oligonucleotide
acuagcguccucuugaagu

SEQ ID NO: 2006247 - RNA, 19 nt, Artificial Sequence
  Description of Artificial Sequence: Synthetic oligonucleotide
agggucacugaauucuugc

SEQ ID NO: 2006248 - RNA, 19 nt, Artificial Sequence
  Description of Artificial Sequence: Synthetic oligonucleotide
cugguugagcucuugagcc

SEQ ID NO: 2006249 - RNA, 19 nt, Artificial Sequence
  Description of Artificial Sequence: Synthetic oligonucleotide
ucguguagacucuucagag

SEQ ID NO: 2006250 - RNA, 19 nt, Artificial Sequence
  Description of Artificial Sequence: Synthetic oligonucleotide
guguagacucuucagagag

SEQ ID NO: 2006251 - RNA, 19 nt, Artificial Sequence
  Description of Artificial Sequence: Synthetic oligonucleotide
uccaagaguucacaaacga

SEQ ID NO: 2006252 - RNA, 19 nt, Artificial Sequence
  Description of Artificial Sequence: Synthetic oligonucleotide
ucugagugcaacuguagca

SEQ ID NO: 2006253 - RNA, 19 nt, Artificial Sequence
  Description of Artificial Sequence: Synthetic oligonucleotide
ucaguaagaggcacucggg

SEQ ID NO: 2006254 - RNA, 19 nt, Artificial Sequence
  Description of Artificial Sequence: Synthetic oligonucleotide
ugcuuuugagaguucaggc

SEQ ID NO: 2006255 - RNA, 19 nt, Artificial Sequence
  Description of Artificial Sequence: Synthetic oligonucleotide
aucauuguuggguggcccc

SEQ ID NO: 2006256 - RNA, 19 nt, Artificial Sequence
  Description of Artificial Sequence: Synthetic oligonucleotide
ugcgcauagcagaacacag

SEQ ID NO: 2006257 - RNA, 19 nt, Artificial Sequence
  Description of Artificial Sequence: Synthetic oligonucleotide
uccacuagcguccucuuga

SEQ ID NO: 2006258 - RNA, 19 nt, Artificial Sequence
  Description of Artificial Sequence: Synthetic oligonucleotide
ugcaagagcuucccgauac

SEQ ID NO: 2006259 - RNA, 19 nt, Artificial Sequence
  Description of Artificial Sequence: Synthetic oligonucleotide
agacagccucaucugagcc

SEQ ID NO: 2006260 - RNA, 19 nt, Artificial Sequence
  Description of Artificial Sequence: Synthetic oligonucleotide
acaaacgaguucccacugc

SEQ ID NO: 2006261 - RNA, 19 nt, Artificial Sequence
  Description of Artificial Sequence: Synthetic oligonucleotide
aacgaguucccacugccgu

SEQ ID NO: 2006262 - RNA, 19 nt, Artificial Sequence
  Description of Artificial Sequence: Synthetic oligonucleotide
uaugccugcacaaggcggc

SEQ ID NO: 2006263 - RNA, 19 nt, Artificial Sequence
  Description of Artificial Sequence: Synthetic oligonucleotide
acugccgucugcgaaaucg

SEQ ID NO: 2006264 - RNA, 19 nt, Artificial Sequence
  Description of Artificial Sequence: Synthetic oligonucleotide
uuacuggcuucucuggaag

SEQ ID NO: 2006265 - RNA, 19 nt, Artificial Sequence
  Description of Artificial Sequence: Synthetic oligonucleotide
uguagacucuucagagagg

SEQ ID NO: 2006266 - RNA, 19 nt, Artificial Sequence
  Description of Artificial Sequence: Synthetic oligonucleotide
ugccuuugcagcaccgugg

SEQ ID NO: 2006267 - RNA, 19 nt, Artificial Sequence
  Description of Artificial Sequence: Synthetic oligonucleotide
ugucaaggcagggugauca

SEQ ID NO: 2006268 - RNA, 19 nt, Artificial Sequence
  Description of Artificial Sequence: Synthetic oligonucleotide
agaguucacaaacgaguuc

SEQ ID NO: 2006269 - RNA, 19 nt, Artificial Sequence
  Description of Artificial Sequence: Synthetic oligonucleotide
agagcuucccgauacgcug

SEQ ID NO: 2006270 - RNA, 19 nt, Artificial Sequence
  Description of Artificial Sequence: Synthetic oligonucleotide
ucacaaacgaguucccacu

SEQ ID NO: 2006271 - RNA, 19 nt, Artificial Sequence
  Description of Artificial Sequence: Synthetic oligonucleotide
auggugguaccucggaggg

SEQ ID NO: 2006272 - RNA, 19 nt, Artificial Sequence
  Description of Artificial Sequence: Synthetic oligonucleotide
aauggcccgcucugagugc

SEQ ID NO: 2006273 - RNA, 19 nt, Artificial Sequence
  Description of Artificial Sequence: Synthetic oligonucleotide
gaauucuugcuucuuccac

SEQ ID NO: 2006274 - RNA, 19 nt, Artificial Sequence
  Description of Artificial Sequence: Synthetic oligonucleotide
uuuugagaguucaggcggc

SEQ ID NO: 2006275 - RNA, 19 nt, Artificial Sequence
  Description of Artificial Sequence: Synthetic oligonucleotide
ugcacaaggcggcugacac

SEQ ID NO: 2006276 - RNA, 19 nt, Artificial Sequence
  Description of Artificial Sequence: Synthetic oligonucleotide
uuguaaguguugauucucu

SEQ ID NO: 2006277 - RNA, 19 nt, Artificial Sequence
  Description of Artificial Sequence: Synthetic oligonucleotide
uacacacucuccacaacug

SEQ ID NO: 2006278 - RNA, 19 nt, Artificial Sequence
  Description of Artificial Sequence: Synthetic oligonucleotide
agggcagugauggugguac

SEQ ID NO: 2006279 - RNA, 19 nt, Artificial Sequence
  Description of Artificial Sequence: Synthetic oligonucleotide
ugcaggaugccucguguag

SEQ ID NO: 2006280 - RNA, 19 nt, Artificial Sequence
  Description of Artificial Sequence: Synthetic oligonucleotide
aacugauccaggaacuucu

SEQ ID NO: 2006281 - RNA, 19 nt, Artificial Sequence
  Description of Artificial Sequence: Synthetic oligonucleotide
guucaggcggcccugcugg

SEQ ID NO: 2006282 - RNA, 19 nt, Artificial Sequence
  Description of Artificial Sequence: Synthetic oligonucleotide
ugauguuccuccaggcaug

SEQ ID NO: 2006283 - RNA, 19 nt, Artificial Sequence
  Description of Artificial Sequence: Synthetic oligonucleotide
ugggcuucaagcugguuga

SEQ ID NO: 2006284 - RNA, 19 nt, Artificial Sequence
  Description of Artificial Sequence: Synthetic oligonucleotide
uggagaauggcuuguuuuc

SEQ ID NO: 2006285 - RNA, 19 nt, Artificial Sequence
  Description of Artificial Sequence: Synthetic oligonucleotide
acucuccacaacugucucc

SEQ ID NO: 2006286 - RNA, 19 nt, Artificial Sequence
  Description of Artificial Sequence: Synthetic oligonucleotide
ucauggauggugcucuccu

SEQ ID NO: 2006287 - RNA, 19 nt, Artificial Sequence
  Description of Artificial Sequence: Synthetic oligonucleotide
gucacauacacacucucca

SEQ ID NO: 2006288 - RNA, 19 nt, Artificial Sequence
  Description of Artificial Sequence: Synthetic oligonucleotide
gagccaguugcucacgcag

SEQ ID NO: 2006289 - RNA, 19 nt, Artificial Sequence
  Description of Artificial Sequence: Synthetic oligonucleotide
cuuguuggagaauggcuug

SEQ ID NO: 2006290 - RNA, 19 nt, Artificial Sequence
  Description of Artificial Sequence: Synthetic oligonucleotide
agcacuugcuccucauggg

SEQ ID NO: 2006291 - RNA, 19 nt, Artificial Sequence
  Description of Artificial Sequence: Synthetic oligonucleotide
acgcugguaauaugccugc

SEQ ID NO: 2006292 - RNA, 19 nt, Artificial Sequence
  Description of Artificial Sequence: Synthetic oligonucleotide
gauacgcugguaauaugcc

SEQ ID NO: 2006293 - RNA, 19 nt, Artificial Sequence
  Description of Artificial Sequence: Synthetic oligonucleotide
guaaguguugauucucuca

SEQ ID NO: 2006294 - RNA, 19 nt, Artificial Sequence
  Description of Artificial Sequence: Synthetic oligonucleotide
uguccaauggcccgcucug

SEQ ID NO: 2006295 - RNA, 19 nt, Artificial Sequence
  Description of Artificial Sequence: Synthetic oligonucleotide
agacucuucagagaggcca

SEQ ID NO: 2006296 - RNA, 19 nt, Artificial Sequence
  Description of Artificial Sequence: Synthetic oligonucleotide
ugagaguucaggcggcccu

SEQ ID NO: 2006297 - RNA, 19 nt, Artificial Sequence
  Description of Artificial Sequence: Synthetic oligonucleotide
cugagugcaacuguagcag

SEQ ID NO: 2006298 - RNA, 19 nt, Artificial Sequence
  Description of Artificial Sequence: Synthetic oligonucleotide
caagaguucacaaacgagu

SEQ ID NO: 2006299 - RNA, 19 nt, Artificial Sequence
  Description of Artificial Sequence: Synthetic oligonucleotide
aggaccucauggauggugc

SEQ ID NO: 2006300 - RNA, 19 nt, Artificial Sequence
  Description of Artificial Sequence: Synthetic oligonucleotide
caguaagaggcacucgggc

SEQ ID NO: 2006301 - RNA, 19 nt, Artificial Sequence
  Description of Artificial Sequence: Synthetic oligonucleotide
cuagucugcgcauagcaga

SEQ ID NO: 2006302 - RNA, 19 nt, Artificial Sequence
  Description of Artificial Sequence: Synthetic oligonucleotide
uccaauggcccgcucugag

SEQ ID NO: 2006303 - RNA, 19 nt, Artificial Sequence
  Description of Artificial Sequence: Synthetic oligonucleotide
cucugagugcaacuguagc

SEQ ID NO: 2006304 - RNA, 19 nt, Artificial Sequence
  Description of Artificial Sequence: Synthetic oligonucleotide
ugguaauaugccugcacaa

SEQ ID NO: 2006305 - RNA, 19 nt, Artificial Sequence
  Description of Artificial Sequence: Synthetic oligonucleotide
aaacgaguucccacugccg

SEQ ID NO: 2006306 - RNA, 19 nt, Artificial Sequence
  Description of Artificial Sequence: Synthetic oligonucleotide
agggugaucauuguugggu

SEQ ID NO: 2006307 - RNA, 19 nt, Artificial Sequence
  Description of Artificial Sequence: Synthetic oligonucleotide
uuccuugcaugaaccagca

SEQ ID NO: 2006308 - RNA, 19 nt, Artificial Sequence
  Description of Artificial Sequence: Synthetic oligonucleotide
acugauguuccuccaggca

SEQ ID NO: 2006309 - RNA, 19 nt, Artificial Sequence
  Description of Artificial Sequence: Synthetic oligonucleotide
ugguccuguggcauggucu

SEQ ID NO: 2006310 - RNA, 19 nt, Artificial Sequence
  Description of Artificial Sequence: Synthetic oligonucleotide
uuccacagcuuguaagugu

SEQ ID NO: 2006311 - RNA, 19 nt, Artificial Sequence
  Description of Artificial Sequence: Synthetic oligonucleotide
auaugccugcacaaggcgg

SEQ ID NO: 2006312 - RNA, 19 nt, Artificial Sequence
  Description of Artificial Sequence: Synthetic oligonucleotide
cuccucaugggccugcaag

SEQ ID NO: 2006313 - RNA, 19 nt, Artificial Sequence
  Description of Artificial Sequence: Synthetic oligonucleotide
caauggcccgcucugagug

SEQ ID NO: 2006314 - RNA, 19 nt, Artificial Sequence
  Description of Artificial Sequence: Synthetic oligonucleotide
cuuguaaguguugauucuc

SEQ ID NO: 2006315 - RNA, 19 nt, Artificial Sequence
  Description of Artificial Sequence: Synthetic oligonucleotide
ugagugcaacuguagcagc

SEQ ID NO: 2006316 - RNA, 19 nt, Artificial Sequence
  Description of Artificial Sequence: Synthetic oligonucleotide
aaguccucgcuuguuggag

SEQ ID NO: 2006317 - RNA, 19 nt, Artificial Sequence
  Description of Artificial Sequence: Synthetic oligonucleotide
guaagaggcacucgggcca

SEQ ID NO: 2006318 - RNA, 19 nt, Artificial Sequence
  Description of Artificial Sequence: Synthetic oligonucleotide
ugcaacuguagcagcucgc

SEQ ID NO: 2006319 - RNA, 19 nt, Artificial Sequence
  Description of Artificial Sequence: Synthetic oligonucleotide
uugauucucucacccugca

SEQ ID NO: 2006320 - RNA, 19 nt, Artificial Sequence
  Description of Artificial Sequence: Synthetic oligonucleotide
accucggagggcuagucug

SEQ ID NO: 2006321 - RNA, 19 nt, Artificial Sequence
  Description of Artificial Sequence: Synthetic oligonucleotide
gagccuucugcuuuugaga

SEQ ID NO: 2006322 - RNA, 19 nt, Artificial Sequence
  Description of Artificial Sequence: Synthetic oligonucleotide
cuagcguccucuugaaguc

SEQ ID NO: 2006323 - RNA, 19 nt, Artificial Sequence
  Description of Artificial Sequence: Synthetic oligonucleotide
auacgcugguaauaugccu

SEQ ID NO: 2006324 - RNA, 19 nt, Artificial Sequence
  Description of Artificial Sequence: Synthetic oligonucleotide
ugguuagcuccacggguag

SEQ ID NO: 2006325 - RNA, 19 nt, Artificial Sequence
  Description of Artificial Sequence: Synthetic oligonucleotide
cagugauggugguaccucg

SEQ ID NO: 2006326 - RNA, 19 nt, Artificial Sequence
  Description of Artificial Sequence: Synthetic oligonucleotide
uccauccgugccuccaggg

SEQ ID NO: 2006327 - RNA, 19 nt, Artificial Sequence
  Description of Artificial Sequence: Synthetic oligonucleotide
cuguggacauggaugggag

SEQ ID NO: 2006328 - RNA, 19 nt, Artificial Sequence
  Description of Artificial Sequence: Synthetic oligonucleotide
ucuuccuuguccccugguc

SEQ ID NO: 2006329 - RNA, 19 nt, Artificial Sequence
  Description of Artificial Sequence: Synthetic oligonucleotide
cugguaauaugccugcaca

SEQ ID NO: 2006330 - RNA, 19 nt, Artificial Sequence
  Description of Artificial Sequence: Synthetic oligonucleotide
gguuugcucagcuuccugc

SEQ ID NO: 2006331 - RNA, 19 nt, Artificial Sequence
  Description of Artificial Sequence: Synthetic oligonucleotide
cacaaggcggcugacacug

SEQ ID NO: 2006332 - RNA, 19 nt, Artificial Sequence
  Description of Artificial Sequence: Synthetic oligonucleotide
uguagcagcucgcccugcc

SEQ ID NO: 2006333 - RNA, 19 nt, Artificial Sequence
  Description of Artificial Sequence: Synthetic oligonucleotide
aguucacaaacgaguuccc

SEQ ID NO: 2006334 - RNA, 19 nt, Artificial Sequence
  Description of Artificial Sequence: Synthetic oligonucleotide
ucugcgcauagcagaacac

SEQ ID NO: 2006335 - RNA, 19 nt, Artificial Sequence
  Description of Artificial Sequence: Synthetic oligonucleotide
cauccgugccuccaggggc

SEQ ID NO: 2006336 - RNA, 19 nt, Artificial Sequence
  Description of Artificial Sequence: Synthetic oligonucleotide
gauguuccuccaggcaugg

SEQ ID NO: 2006337 - RNA, 19 nt, Artificial Sequence
  Description of Artificial Sequence: Synthetic oligonucleotide
uugcaugaaccagcaaugc

SEQ ID NO: 2006338 - RNA, 19 nt, Artificial Sequence
  Description of Artificial Sequence: Synthetic oligonucleotide
aagcugguugagcucuuga

SEQ ID NO: 2006339 - RNA, 19 nt, Artificial Sequence
  Description of Artificial Sequence: Synthetic oligonucleotide
uagucugcgcauagcagaa

SEQ ID NO: 2006340 - RNA, 19 nt, Artificial Sequence
  Description of Artificial Sequence: Synthetic oligonucleotide
ugaaccagcaaugccuguc

SEQ ID NO: 2006341 - RNA, 19 nt, Artificial Sequence
  Description of Artificial Sequence: Synthetic oligonucleotide
gaucauuguuggguggccc

SEQ ID NO: 2006342 - RNA, 19 nt, Artificial Sequence
  Description of Artificial Sequence: Synthetic oligonucleotide
ucacugaauucuugcuucu

SEQ ID NO: 2006343 - RNA, 19 nt, Artificial Sequence
  Description of Artificial Sequence: Synthetic oligonucleotide
acauuccuugcaugaacca

SEQ ID NO: 2006344 - RNA, 19 nt, Artificial Sequence
  Description of Artificial Sequence: Synthetic oligonucleotide
ggucugucaaggcagggug

SEQ ID NO: 2006345 - RNA, 19 nt, Artificial Sequence
  Description of Artificial Sequence: Synthetic oligonucleotide
ggugaucauuguugggugg

SEQ ID NO: 2006346 - RNA, 19 nt, Artificial Sequence
  Description of Artificial Sequence: Synthetic oligonucleotide
auuguuggguggccccagg

SEQ ID NO: 2006347 - RNA, 19 nt, Artificial Sequence
  Description of Artificial Sequence: Synthetic oligonucleotide
uguuggguggccccagguc

SEQ ID NO: 2006348 - RNA, 19 nt, Artificial Sequence
  Description of Artificial Sequence: Synthetic oligonucleotide
cgauacgcugguaauaugc

SEQ ID NO: 2006349 - RNA, 19 nt, Artificial Sequence
  Description of Artificial Sequence: Synthetic oligonucleotide
aagagcuucccgauacgcu

SEQ ID NO: 2006350 - RNA, 19 nt, Artificial Sequence
  Description of Artificial Sequence: Synthetic oligonucleotide
guugauucucucacccugc

SEQ ID NO: 2006351 - RNA, 19 nt, Artificial Sequence
  Description of Artificial Sequence: Synthetic oligonucleotide
ugagugguccuguggcaug

SEQ ID NO: 2006352 - RNA, 19 nt, Artificial Sequence
  Description of Artificial Sequence: Synthetic oligonucleotide
gugaucauuguuggguggc

SEQ ID NO: 2006353 - RNA, 19 nt, Artificial Sequence
  Description of Artificial Sequence: Synthetic oligonucleotide
cucguguagacucuucaga

SEQ ID NO: 2006354 - RNA, 19 nt, Artificial Sequence
  Description of Artificial Sequence: Synthetic oligonucleotide
uuugagaguucaggcggcc

SEQ ID NO: 2006355 - RNA, 19 nt, Artificial Sequence
  Description of Artificial Sequence: Synthetic oligonucleotide
uggggaugcucccucggcu

SEQ ID NO: 2006356 - RNA, 19 nt, Artificial Sequence
  Description of Artificial Sequence: Synthetic oligonucleotide
ugaucauuguuggguggcc

SEQ ID NO: 2006357 - RNA, 19 nt, Artificial Sequence
  Description of Artificial Sequence: Synthetic oligonucleotide
agggcuagucugcgcauag

SEQ ID NO: 2006358 - RNA, 19 nt, Artificial Sequence
  Description of Artificial Sequence: Synthetic oligonucleotide
acagcgcacacuccuccag

SEQ ID NO: 2006359 - RNA, 19 nt, Artificial Sequence
  Description of Artificial Sequence: Synthetic oligonucleotide
gucugcgcauagcagaaca

SEQ ID NO: 2006360 - RNA, 19 nt, Artificial Sequence
  Description of Artificial Sequence: Synthetic oligonucleotide
gagugguccuguggcaugg

SEQ ID NO: 2006361 - RNA, 19 nt, Artificial Sequence
  Description of Artificial Sequence: Synthetic oligonucleotide
ggcagggugaucauuguug

SEQ ID NO: 2006362 - RNA, 19 nt, Artificial Sequence
  Description of Artificial Sequence: Synthetic oligonucleotide
ugccagcucugagauaaag

SEQ ID NO: 2006363 - RNA, 19 nt, Artificial Sequence
  Description of Artificial Sequence: Synthetic oligonucleotide
cugccgucugcgaaaucgg

SEQ ID NO: 2006364 - RNA, 19 nt, Artificial Sequence
  Description of Artificial Sequence: Synthetic oligonucleotide
gagcuucccgauacgcugg

SEQ ID NO: 2006365 - RNA, 19 nt, Artificial Sequence
  Description of Artificial Sequence: Synthetic oligonucleotide
caggaugccucguguagac

SEQ ID NO: 2006366 - RNA, 19 nt, Artificial Sequence
  Description of Artificial Sequence: Synthetic oligonucleotide
cagugaagcggcucaggac

SEQ ID NO: 2006367 - RNA, 19 nt, Artificial Sequence
  Description of Artificial Sequence: Synthetic oligonucleotide
ugguugagcucuugagccu

SEQ ID NO: 2006368 - RNA, 19 nt, Artificial Sequence
  Description of Artificial Sequence: Synthetic oligonucleotide
ggaugccucguguagacuc

SEQ ID NO: 2006369 - RNA, 19 nt, Artificial Sequence
  Description of Artificial Sequence: Synthetic oligonucleotide
uccacggguagggucacug

SEQ ID NO: 2006370 - RNA, 19 nt, Artificial Sequence
  Description of Artificial Sequence: Synthetic oligonucleotide
caacuguagcagcucgccc

SEQ ID NO: 2006371 - RNA, 19 nt, Artificial Sequence
  Description of Artificial Sequence: Synthetic oligonucleotide
cauggggaugcucccucgg

SEQ ID NO: 2006372 - RNA, 19 nt, Artificial Sequence
  Description of Artificial Sequence: Synthetic oligonucleotide
agccaguugcucacgcagc

SEQ ID NO: 2006373 - RNA, 19 nt, Artificial Sequence
  Description of Artificial Sequence: Synthetic oligonucleotide
acagcuuguaaguguugau

SEQ ID NO: 2006374 - RNA, 19 nt, Artificial Sequence
  Description of Artificial Sequence: Synthetic oligonucleotide
uuguuggguggccccaggu

SEQ ID NO: 2006375 - RNA, 19 nt, Artificial Sequence
  Description of Artificial Sequence: Synthetic oligonucleotide
cagggugaucauuguuggg

SEQ ID NO: 2006376 - RNA, 19 nt, Artificial Sequence
  Description of Artificial Sequence: Synthetic oligonucleotide
agucuuccuuguccccugg

SEQ ID NO: 2006377 - RNA, 19 nt, Artificial Sequence
  Description of Artificial Sequence: Synthetic oligonucleotide
cuuacuggcuucucuggaa

SEQ ID NO: 2006378 - RNA, 19 nt, Artificial Sequence
  Description of Artificial Sequence: Synthetic oligonucleotide
ugggucucaagcugggcuu

SEQ ID NO: 2006379 - RNA, 19 nt, Artificial Sequence
  Description of Artificial Sequence: Synthetic oligonucleotide
ucccucggcucccggagcc

SEQ ID NO: 2006380 - RNA, 19 nt, Artificial Sequence
  Description of Artificial Sequence: Synthetic oligonucleotide
uugagaguucaggcggccc

SEQ ID NO: 2006381 - RNA, 19 nt, Artificial Sequence
  Description of Artificial Sequence: Synthetic oligonucleotide
aguccucgcuuguuggaga

SEQ ID NO: 2006382 - RNA, 19 nt, Artificial Sequence
  Description of Artificial Sequence: Synthetic oligonucleotide
aagguuugcucagcuuccu

SEQ ID NO: 2006383 - RNA, 19 nt, Artificial Sequence
  Description of Artificial Sequence: Synthetic oligonucleotide
agcaccguggacagcgcac

SEQ ID NO: 2006384 - RNA, 19 nt, Artificial Sequence
  Description of Artificial Sequence: Synthetic oligonucleotide
uggucugucaaggcagggu

SEQ ID NO: 2006385 - RNA, 19 nt, Artificial Sequence
  Description of Artificial Sequence: Synthetic oligonucleotide
acacccgccuguccuguuc

SEQ ID NO: 2006386 - RNA, 19 nt, Artificial Sequence
  Description of Artificial Sequence: Synthetic oligonucleotide
uggugaucccgcagcugcc

SEQ ID NO: 2006387 - RNA, 19 nt, Artificial Sequence
  Description of Artificial Sequence: Synthetic oligonucleotide
gguccuguggcauggucug

SEQ ID NO: 2006388 - RNA, 19 nt, Artificial Sequence
  Description of Artificial Sequence: Synthetic oligonucleotide
gggugaucauuguugggug

SEQ ID NO: 2006389 - RNA, 19 nt, Artificial Sequence
  Description of Artificial Sequence: Synthetic oligonucleotide
cauggauggugcucuccug

SEQ ID NO: 2006390 - RNA, 19 nt, Artificial Sequence
  Description of Artificial Sequence: Synthetic oligonucleotide
aggccagugaagcggcuca

SEQ ID NO: 2006391 - RNA, 19 nt, Artificial Sequence
  Description of Artificial Sequence: Synthetic oligonucleotide
uaccucggagggcuagucu

SEQ ID NO: 2006392 - RNA, 19 nt, Artificial Sequence
  Description of Artificial Sequence: Synthetic oligonucleotide
cugccuuugcagcaccgug

SEQ ID NO: 2006393 - RNA, 19 nt, Artificial Sequence
  Description of Artificial Sequence: Synthetic oligonucleotide
uucccgauacgcugguaau

SEQ ID NO: 2006394 - RNA, 19 nt, Artificial Sequence
  Description of Artificial Sequence: Synthetic oligonucleotide
cuucccgauacgcugguaa

SEQ ID NO: 2006395 - RNA, 19 nt, Artificial Sequence
  Description of Artificial Sequence: Synthetic oligonucleotide
uuguccccugguccggccc

SEQ ID NO: 2006396 - RNA, 19 nt, Artificial Sequence
  Description of Artificial Sequence: Synthetic oligonucleotide
agguuugcucagcuuccug

SEQ ID NO: 2006397 - RNA, 19 nt, Artificial Sequence
  Description of Artificial Sequence: Synthetic oligonucleotide
ugcucacgcagcuccugca

SEQ ID NO: 2006398 - RNA, 19 nt, Artificial Sequence
  Description of Artificial Sequence: Synthetic oligonucleotide
ggcauggucugucaaggca

SEQ ID NO: 2006399 - RNA, 19 nt, Artificial Sequence
  Description of Artificial Sequence: Synthetic oligonucleotide
ggcuagucugcgcauagca

SEQ ID NO: 2006400 - RNA, 19 nt, Artificial Sequence
  Description of Artificial Sequence: Synthetic oligonucleotide
gcugguaauaugccugcac

SEQ ID NO: 2006401 - RNA, 19 nt, Artificial Sequence
  Description of Artificial Sequence: Synthetic oligonucleotide
ggucacauacacacucucc

SEQ ID NO: 2006402 - RNA, 19 nt, Artificial Sequence
  Description of Artificial Sequence: Synthetic oligonucleotide
gcacuugcuccucaugggc

SEQ ID NO: 2006403 - RNA, 19 nt, Artificial Sequence
  Description of Artificial Sequence: Synthetic oligonucleotide
caggcauggggaugcuccc

SEQ ID NO: 2006404 - RNA, 19 nt, Artificial Sequence
  Description of Artificial Sequence: Synthetic oligonucleotide
cagcaaugccuguccaaug

SEQ ID NO: 2006405 - RNA, 19 nt, Artificial Sequence
  Description of Artificial Sequence: Synthetic oligonucleotide
ugcaccgccugguuagcuc

SEQ ID NO: 2006406 - RNA, 19 nt, Artificial Sequence
  Description of Artificial Sequence: Synthetic oligonucleotide
gguccucucucuccugagg

SEQ ID NO: 2006407 - RNA, 19 nt, Artificial Sequence
  Description of Artificial Sequence: Synthetic oligonucleotide
uggacagcgcacacuccuc

SEQ ID NO: 2006408 - RNA, 19 nt, Artificial Sequence
  Description of Artificial Sequence: Synthetic oligonucleotide
ccagacagccucaucugag

SEQ ID NO: 2006409 - RNA, 19 nt, Artificial Sequence
  Description of Artificial Sequence: Synthetic oligonucleotide
accagcaaugccuguccaa

SEQ ID NO: 2006410 - RNA, 19 nt, Artificial Sequence
  Description of Artificial Sequence: Synthetic oligonucleotide
aaggcggcugacacuggug

SEQ ID NO: 2006411 - RNA, 19 nt, Artificial Sequence
  Description of Artificial Sequence: Synthetic oligonucleotide
gaucccgcagcugccuuug

SEQ ID NO: 2006412 - RNA, 19 nt, Artificial Sequence
  Description of Artificial Sequence: Synthetic oligonucleotide
caggaccucauggauggug

SEQ ID NO: 2006413 - RNA, 19 nt, Artificial Sequence
  Description of Artificial Sequence: Synthetic oligonucleotide
agucugcgcauagcagaac

SEQ ID NO: 2006414 - RNA, 19 nt, Artificial Sequence
  Description of Artificial Sequence: Synthetic oligonucleotide
gagaguucaggcggcccug

SEQ ID NO: 2006415 - RNA, 19 nt, Artificial Sequence
  Description of Artificial Sequence: Synthetic oligonucleotide
gcaacuguagcagcucgcc

SEQ ID NO: 2006416 - RNA, 19 nt, Artificial Sequence
  Description of Artificial Sequence: Synthetic oligonucleotide
gcaagagcuucccgauacg

SEQ ID NO: 2006417 - RNA, 19 nt, Artificial Sequence
  Description of Artificial Sequence: Synthetic oligonucleotide
gugugaacugauccaggaa

SEQ ID NO: 2006418 - RNA, 19 nt, Artificial Sequence
  Description of Artificial Sequence: Synthetic oligonucleotide
cacucuccacaacugucuc

SEQ ID NO: 2006419 - RNA, 19 nt, Artificial Sequence
  Description of Artificial Sequence: Synthetic oligonucleotide
cagcgcacacuccuccagc

SEQ ID NO: 2006420 - RNA, 19 nt, Artificial Sequence
  Description of Artificial Sequence: Synthetic oligonucleotide
cugguuagcuccacgggua

SEQ ID NO: 2006421 - RNA, 19 nt, Artificial Sequence
  Description of Artificial Sequence: Synthetic oligonucleotide
uguccccugguccggcccu

SEQ ID NO: 2006422 - RNA, 19 nt, Artificial Sequence
  Description of Artificial Sequence: Synthetic oligonucleotide
ccucaucugagccagggca

SEQ ID NO: 2006423 - RNA, 19 nt, Artificial Sequence
  Description of Artificial Sequence: Synthetic oligonucleotide
augaaccagcaaugccugu

SEQ ID NO: 2006424 - RNA, 19 nt, Artificial Sequence
  Description of Artificial Sequence: Synthetic oligonucleotide
ugguaccucggagggcuag

SEQ ID NO: 2006425 - RNA, 19 nt, Artificial Sequence
  Description of Artificial Sequence: Synthetic oligonucleotide
gccugguuagcuccacggg

SEQ ID NO: 2006426 - RNA, 19 nt, Artificial Sequence
  Description of Artificial Sequence: Synthetic oligonucleotide
gcuagucugcgcauagcag

SEQ ID NO: 2006427 - RNA, 19 nt, Artificial Sequence
  Description of Artificial Sequence: Synthetic oligonucleotide
uuagcuccacggguagggu

SEQ ID NO: 2006428 - RNA, 19 nt, Artificial Sequence
  Description of Artificial Sequence: Synthetic oligonucleotide
ucgcccugccuccauccgu

SEQ ID NO: 2006429 - RNA, 19 nt, Artificial Sequence
  Description of Artificial Sequence: Synthetic oligonucleotide
cuuguccccugguccggcc

SEQ ID NO: 2006430 - RNA, 19 nt, Artificial Sequence
  Description of Artificial Sequence: Synthetic oligonucleotide
guggacagcgcacacuccu

SEQ ID NO: 2006431 - RNA, 19 nt, Artificial Sequence
  Description of Artificial Sequence: Synthetic oligonucleotide
ggcacucgggccaauguug

SEQ ID NO: 2006432 - RNA, 19 nt, Artificial Sequence
  Description of Artificial Sequence: Synthetic oligonucleotide
ccucguguagacucuucag

SEQ ID NO: 2006433 - RNA, 19 nt, Artificial Sequence
  Description of Artificial Sequence: Synthetic oligonucleotide
agcggcucaggaccucaug

SEQ ID NO: 2006434 - RNA, 19 nt, Artificial Sequence
  Description of Artificial Sequence: Synthetic oligonucleotide
uuuucccagacagccucau

SEQ ID NO: 2006435 - RNA, 19 nt, Artificial Sequence
  Description of Artificial Sequence: Synthetic oligonucleotide
cacuagcguccucuugaag

SEQ ID NO: 2006436 - RNA, 19 nt, Artificial Sequence
  Description of Artificial Sequence: Synthetic oligonucleotide
cucggagggcuagucugcg

SEQ ID NO: 2006437 - RNA, 19 nt, Artificial Sequence
  Description of Artificial Sequence: Synthetic oligonucleotide
ucggagggcuagucugcgc

SEQ ID NO: 2006438 - RNA, 19 nt, Artificial Sequence
  Description of Artificial Sequence: Synthetic oligonucleotide
ucaaggcagggugaucauu

SEQ ID NO: 2006439 - RNA, 19 nt, Artificial Sequence
  Description of Artificial Sequence: Synthetic oligonucleotide
ucccgauacgcugguaaua

SEQ ID NO: 2006440 - RNA, 19 nt, Artificial Sequence
  Description of Artificial Sequence: Synthetic oligonucleotide
ugguccggcccuugcuggc

SEQ ID NO: 2006441 - RNA, 19 nt, Artificial Sequence
  Description of Artificial Sequence: Synthetic oligonucleotide
cucgcccugccuccauccg

SEQ ID NO: 2006442 - RNA, 19 nt, Artificial Sequence
  Description of Artificial Sequence: Synthetic oligonucleotide
cuccacuagcguccucuug

SEQ ID NO: 2006443 - RNA, 19 nt, Artificial Sequence
  Description of Artificial Sequence: Synthetic oligonucleotide
uagcguccucuugaagucu

SEQ ID NO: 2006444 - RNA, 19 nt, Artificial Sequence
  Description of Artificial Sequence: Synthetic oligonucleotide
auggugcucuccuggugau

SEQ ID NO: 2006445 - RNA, 19 nt, Artificial Sequence
  Description of Artificial Sequence: Synthetic oligonucleotide
cucuugaagucuuccuugu

SEQ ID NO: 2006446 - RNA, 19 nt, Artificial Sequence
  Description of Artificial Sequence: Synthetic oligonucleotide
guugcucacgcagcuccug

SEQ ID NO: 2006447 - RNA, 19 nt, Artificial Sequence
  Description of Artificial Sequence: Synthetic oligonucleotide
uucucucacccugcagggu

SEQ ID NO: 2006448 - RNA, 19 nt, Artificial Sequence
  Description of Artificial Sequence: Synthetic oligonucleotide
cuguccuguuccaagaguu

SEQ ID NO: 2006449 - RNA, 19 nt, Artificial Sequence
  Description of Artificial Sequence: Synthetic oligonucleotide
uccuugcaugaaccagcaa

SEQ ID NO: 2006450 - RNA, 19 nt, Artificial Sequence
  Description of Artificial Sequence: Synthetic oligonucleotide
ugccucguguagacucuuc

SEQ ID NO: 2006451 - RNA, 19 nt, Artificial Sequence
  Description of Artificial Sequence: Synthetic oligonucleotide
gcucacgcagcuccugcag

SEQ ID NO: 2006452 - RNA, 19 nt, Artificial Sequence
  Description of Artificial Sequence: Synthetic oligonucleotide
ugaucccgcagcugccuuu

SEQ ID NO: 2006453 - RNA, 19 nt, Artificial Sequence
  Description of Artificial Sequence: Synthetic oligonucleotide
gagugcaacuguagcagcu

SEQ ID NO: 2006454 - RNA, 19 nt, Artificial Sequence
  Description of Artificial Sequence: Synthetic oligonucleotide
ucaagcugguugagcucuu

SEQ ID NO: 2006455 - RNA, 19 nt, Artificial Sequence
  Description of Artificial Sequence: Synthetic oligonucleotide
agcuucccgauacgcuggu

SEQ ID NO: 2006456 - RNA, 19 nt, Artificial Sequence
  Description of Artificial Sequence: Synthetic oligonucleotide
ccuugcaugaaccagcaau

SEQ ID NO: 2006457 - RNA, 19 nt, Artificial Sequence
  Description of Artificial Sequence: Synthetic oligonucleotide
gaggccagugaagcggcuc

SEQ ID NO: 2006458 - RNA, 19 nt, Artificial Sequence
  Description of Artificial Sequence: Synthetic oligonucleotide
ccucgcuuguuggagaaug

SEQ ID NO: 2006459 - RNA, 19 nt, Artificial Sequence
  Description of Artificial Sequence: Synthetic oligonucleotide
ccauccgugccuccagggg

SEQ ID NO: 2006460 - RNA, 19 nt, Artificial Sequence
  Description of Artificial Sequence: Synthetic oligonucleotide
ucuccacuagcguccucuu

SEQ ID NO: 2006461 - RNA, 19 nt, Artificial Sequence
  Description of Artificial Sequence: Synthetic oligonucleotide
gguuagcuccacggguagg

SEQ ID NO: 2006462 - RNA, 19 nt, Artificial Sequence
  Description of Artificial Sequence: Synthetic oligonucleotide
gaguucccacugccgucug

SEQ ID NO: 2006463 - RNA, 19 nt, Artificial Sequence
  Description of Artificial Sequence: Synthetic oligonucleotide
ggugcugugugaacugauc

SEQ ID NO: 2006464 - RNA, 19 nt, Artificial Sequence
  Description of Artificial Sequence: Synthetic oligonucleotide
ccguggacagcgcacacuc

SEQ ID NO: 2006465 - RNA, 19 nt, Artificial Sequence
  Description of Artificial Sequence: Synthetic oligonucleotide
guccucgcuuguuggagaa

SEQ ID NO: 2006466 - RNA, 19 nt, Artificial Sequence
  Description of Artificial Sequence: Synthetic oligonucleotide
gcucccucggcucccggag

SEQ ID NO: 2006467 - RNA, 19 nt, Artificial Sequence
  Description of Artificial Sequence: Synthetic oligonucleotide
auggcccgcucugagugca

SEQ ID NO: 2006468 - RNA, 19 nt, Artificial Sequence
  Description of Artificial Sequence: Synthetic oligonucleotide
ggcuucaagcugguugagc

SEQ ID NO: 2006469 - RNA, 19 nt, Artificial Sequence
  Description of Artificial Sequence: Synthetic oligonucleotide
cgccugguuagcuccacgg

SEQ ID NO: 2006470 - RNA, 19 nt, Artificial Sequence
  Description of Artificial Sequence: Synthetic oligonucleotide
gcgcauagcagaacacagc

SEQ ID NO: 2006471 - RNA, 19 nt, Artificial Sequence
  Description of Artificial Sequence: Synthetic oligonucleotide
acggguagggucacugaau

SEQ ID NO: 2006472 - RNA, 19 nt, Artificial Sequence
  Description of Artificial Sequence: Synthetic oligonucleotide
gucugucaaggcaggguga

SEQ ID NO: 2006473 - RNA, 19 nt, Artificial Sequence
  Description of Artificial Sequence: Synthetic oligonucleotide
gaugccucguguagacucu

SEQ ID NO: 2006474 - RNA, 19 nt, Artificial Sequence
  Description of Artificial Sequence: Synthetic oligonucleotide
accgccugguuagcuccac

SEQ ID NO: 2006475 - RNA, 19 nt, Artificial Sequence
  Description of Artificial Sequence: Synthetic oligonucleotide
ccucggagggcuagucugc

SEQ ID NO: 2006476 - RNA, 19 nt, Artificial Sequence
  Description of Artificial Sequence: Synthetic oligonucleotide
gccuuugcagcaccgugga

SEQ ID NO: 2006477 - RNA, 19 nt, Artificial Sequence
  Description of Artificial Sequence: Synthetic oligonucleotide
ggggaugcucccucggcuc

SEQ ID NO: 2006478 - RNA, 19 nt, Artificial Sequence
  Description of Artificial Sequence: Synthetic oligonucleotide
ggugcuggucacauacaca

SEQ ID NO: 2006479 - RNA, 19 nt, Artificial Sequence
  Description of Artificial Sequence: Synthetic oligonucleotide
gcacucgggccaauguugc

SEQ ID NO: 2006480 - RNA, 19 nt, Artificial Sequence
  Description of Artificial Sequence: Synthetic oligonucleotide
uucaggcggcccugcuggu

SEQ ID NO: 2006481 - RNA, 19 nt, Artificial Sequence
  Description of Artificial Sequence: Synthetic oligonucleotide
augggaggacugagugguc

SEQ ID NO: 2006482 - RNA, 19 nt, Artificial Sequence
  Description of Artificial Sequence: Synthetic oligonucleotide
gcagugauggugguaccuc

SEQ ID NO: 2006483 - RNA, 19 nt, Artificial Sequence
  Description of Artificial Sequence: Synthetic oligonucleotide
ggguagggucacugaauuc

SEQ ID NO: 2006484 - RNA, 19 nt, Artificial Sequence
  Description of Artificial Sequence: Synthetic oligonucleotide
cuguccaauggcccgcucu

SEQ ID NO: 2006485 - RNA, 19 nt, Artificial Sequence
  Description of Artificial Sequence: Synthetic oligonucleotide
acaaggcggcugacacugg

SEQ ID NO: 2006486 - RNA, 19 nt, Artificial Sequence
  Description of Artificial Sequence: Synthetic oligonucleotide
ccugguccggcccuugcug

SEQ ID NO: 2006487 - RNA, 19 nt, Artificial Sequence
  Description of Artificial Sequence: Synthetic oligonucleotide
ggagccaguugcucacgca

SEQ ID NO: 2006488 - RNA, 19 nt, Artificial Sequence
  Description of Artificial Sequence: Synthetic oligonucleotide
ccacaacugucuccacuag

SEQ ID NO: 2006489 - RNA, 19 nt, Artificial Sequence
  Description of Artificial Sequence: Synthetic oligonucleotide
guaccucggagggcuaguc

SEQ ID NO: 2006490 - RNA, 19 nt, Artificial Sequence
  Description of Artificial Sequence: Synthetic oligonucleotide
gccagugaagcggcucagg

SEQ ID NO: 2006491 - RNA, 19 nt, Artificial Sequence
  Description of Artificial Sequence: Synthetic oligonucleotide
gguccuuacuggcuucucu

SEQ ID NO: 2006492 - RNA, 19 nt, Artificial Sequence
  Description of Artificial Sequence: Synthetic oligonucleotide
ugguccuuacuggcuucuc

SEQ ID NO: 2006493 - RNA, 19 nt, Artificial Sequence
  Description of Artificial Sequence: Synthetic oligonucleotide
gcuuguuggagaauggcuu

SEQ ID NO: 2006494 - RNA, 19 nt, Artificial Sequence
  Description of Artificial Sequence: Synthetic oligonucleotide
aggcaggggcuucuuucuu

SEQ ID NO: 2006495 - RNA, 19 nt, Artificial Sequence
  Description of Artificial Sequence: Synthetic oligonucleotide
gaggacugagugguccugu

SEQ ID NO: 2006496 - RNA, 19 nt, Artificial Sequence
  Description of Artificial Sequence: Synthetic oligonucleotide
gcggcugacacuggugcug

SEQ ID NO: 2006497 - RNA, 19 nt, Artificial Sequence
  Description of Artificial Sequence: Synthetic oligonucleotide
cugcaggaugccucgugua

SEQ ID NO: 2006498 - RNA, 19 nt, Artificial Sequence
  Description of Artificial Sequence: Synthetic oligonucleotide
cagcucugagauaaagguu

SEQ ID NO: 2006499 - RNA, 19 nt, Artificial Sequence
  Description of Artificial Sequence: Synthetic oligonucleotide
ccuuacuggcuucucugga

SEQ ID NO: 2006500 - RNA, 19 nt, Artificial Sequence
  Description of Artificial Sequence: Synthetic oligonucleotide
agcguccucuugaagucuu

SEQ ID NO: 2006501 - RNA, 19 nt, Artificial Sequence
  Description of Artificial Sequence: Synthetic oligonucleotide
cugucaaggcagggugauc

SEQ ID NO: 2006502 - RNA, 19 nt, Artificial Sequence
  Description of Artificial Sequence: Synthetic oligonucleotide
cugccuccauccgugccuc

SEQ ID NO: 2006503 - RNA, 19 nt, Artificial Sequence
  Description of Artificial Sequence: Synthetic oligonucleotide
cccggagccaguugcucac

SEQ ID NO: 2006504 - RNA, 19 nt, Artificial Sequence
  Description of Artificial Sequence: Synthetic oligonucleotide
cuguggcauggucugucaa

SEQ ID NO: 2006505 - RNA, 19 nt, Artificial Sequence
  Description of Artificial Sequence: Synthetic oligonucleotide
cagcuuguaaguguugauu

SEQ ID NO: 2006506 - RNA, 19 nt, Artificial Sequence
  Description of Artificial Sequence: Synthetic oligonucleotide
augccugcacaaggcggcu

SEQ ID NO: 2006507 - RNA, 19 nt, Artificial Sequence
  Description of Artificial Sequence: Synthetic oligonucleotide
cguguagacucuucagaga

SEQ ID NO: 2006508 - RNA, 19 nt, Artificial Sequence
  Description of Artificial Sequence: Synthetic oligonucleotide
ccgauacgcugguaauaug

SEQ ID NO: 2006509 - RNA, 19 nt, Artificial Sequence
  Description of Artificial Sequence: Synthetic oligonucleotide
gagggcuagucugcgcaua

SEQ ID NO: 2006510 - RNA, 19 nt, Artificial Sequence
  Description of Artificial Sequence: Synthetic oligonucleotide
agugguccuguggcauggu

SEQ ID NO: 2006511 - RNA, 19 nt, Artificial Sequence
  Description of Artificial Sequence: Synthetic oligonucleotide
uccucgcuuguuggagaau

SEQ ID NO: 2006512 - RNA, 19 nt, Artificial Sequence
  Description of Artificial Sequence: Synthetic oligonucleotide
uccggcccuugcuggccac

SEQ ID NO: 2006513 - RNA, 19 nt, Artificial Sequence
  Description of Artificial Sequence: Synthetic oligonucleotide
aagcggcucaggaccucau

SEQ ID NO: 2006514 - RNA, 19 nt, Artificial Sequence
  Description of Artificial Sequence: Synthetic oligonucleotide
caaggcggcugacacuggu

SEQ ID NO: 2006515 - RNA, 19 nt, Artificial Sequence
  Description of Artificial Sequence: Synthetic oligonucleotide
acccgccuguccuguucca

SEQ ID NO: 2006516 - RNA, 19 nt, Artificial Sequence
  Description of Artificial Sequence: Synthetic oligonucleotide
guccaauggcccgcucuga

SEQ ID NO: 2006517 - RNA, 19 nt, Artificial Sequence
  Description of Artificial Sequence: Synthetic oligonucleotide
ccugguuagcuccacgggu

SEQ ID NO: 2006518 - RNA, 19 nt, Artificial Sequence
  Description of Artificial Sequence: Synthetic oligonucleotide
cugcaagagcuucccgaua

SEQ ID NO: 2006519 - RNA, 19 nt, Artificial Sequence
  Description of Artificial Sequence: Synthetic oligonucleotide
gaguucaggcggcccugcu

SEQ ID NO: 2006520 - RNA, 19 nt, Artificial Sequence
  Description of Artificial Sequence: Synthetic oligonucleotide
ggaugcucccucggcuccc

SEQ ID NO: 2006521 - RNA, 19 nt, Artificial Sequence
  Description of Artificial Sequence: Synthetic oligonucleotide
gucaaggcagggugaucau

SEQ ID NO: 2006522 - RNA, 19 nt, Artificial Sequence
  Description of Artificial Sequence: Synthetic oligonucleotide
gcucuccuggugaucccgc

SEQ ID NO: 2006523 - RNA, 19 nt, Artificial Sequence
  Description of Artificial Sequence: Synthetic oligonucleotide
agaggccagugaagcggcu

SEQ ID NO: 2006524 - RNA, 19 nt, Artificial Sequence
  Description of Artificial Sequence: Synthetic oligonucleotide
guagggucacugaauucuu

SEQ ID NO: 2006525 - RNA, 19 nt, Artificial Sequence
  Description of Artificial Sequence: Synthetic oligonucleotide
cccagacagccucaucuga

SEQ ID NO: 2006526 - RNA, 19 nt, Artificial Sequence
  Description of Artificial Sequence: Synthetic oligonucleotide
uggcccgcucugagugcaa

SEQ ID NO: 2006527 - RNA, 19 nt, Artificial Sequence
  Description of Artificial Sequence: Synthetic oligonucleotide
cugagugguccuguggcau

SEQ ID NO: 2006528 - RNA, 19 nt, Artificial Sequence
  Description of Artificial Sequence: Synthetic oligonucleotide
gguccggcccuugcuggcc

SEQ ID NO: 2006529 - RNA, 19 nt, Artificial Sequence
  Description of Artificial Sequence: Synthetic oligonucleotide
gggcuagucugcgcauagc

SEQ ID NO: 2006530 - RNA, 19 nt, Artificial Sequence
  Description of Artificial Sequence: Synthetic oligonucleotide
uccccugguccggcccuug

SEQ ID NO: 2006531 - RNA, 19 nt, Artificial Sequence
  Description of Artificial Sequence: Synthetic oligonucleotide
gguggccccagguccucuc

SEQ ID NO: 2006532 - RNA, 19 nt, Artificial Sequence
  Description of Artificial Sequence: Synthetic oligonucleotide
gggucucaagcugggcuuc

SEQ ID NO: 2006533 - RNA, 19 nt, Artificial Sequence
  Description of Artificial Sequence: Synthetic oligonucleotide
augccucguguagacucuu

SEQ ID NO: 2006534 - RNA, 19 nt, Artificial Sequence
  Description of Artificial Sequence: Synthetic oligonucleotide
gggcuucaagcugguugag

SEQ ID NO: 2006535 - RNA, 19 nt, Artificial Sequence
  Description of Artificial Sequence: Synthetic oligonucleotide
gcaccguggacagcgcaca

SEQ ID NO: 2006536 - RNA, 19 nt, Artificial Sequence
  Description of Artificial Sequence: Synthetic oligonucleotide
cccacugccgucugcgaaa

SEQ ID NO: 2006537 - RNA, 19 nt, Artificial Sequence
  Description of Artificial Sequence: Synthetic oligonucleotide
gucucaagcugggcuucaa

SEQ ID NO: 2006538 - RNA, 19 nt, Artificial Sequence
  Description of Artificial Sequence: Synthetic oligonucleotide
cggagggcuagucugcgca

SEQ ID NO: 2006539 - RNA, 19 nt, Artificial Sequence
  Description of Artificial Sequence: Synthetic oligonucleotide
ccgccugguuagcuccacg

SEQ ID NO: 2006540 - RNA, 19 nt, Artificial Sequence
  Description of Artificial Sequence: Synthetic oligonucleotide
cggagccaguugcucacgc

SEQ ID NO: 2006541 - RNA, 19 nt, Artificial Sequence
  Description of Artificial Sequence: Synthetic oligonucleotide
ggaccucauggauggugcu

SEQ ID NO: 2006542 - RNA, 19 nt, Artificial Sequence
  Description of Artificial Sequence: Synthetic oligonucleotide
cacugccgucugcgaaauc

SEQ ID NO: 2006543 - RNA, 19 nt, Artificial Sequence
  Description of Artificial Sequence: Synthetic oligonucleotide
ggucucaagcugggcuuca

SEQ ID NO: 2006544 - RNA, 19 nt, Artificial Sequence
  Description of Artificial Sequence: Synthetic oligonucleotide
uccgugccuccaggggcuc

SEQ ID NO: 2006545 - RNA, 19 nt, Artificial Sequence
  Description of Artificial Sequence: Synthetic oligonucleotide
ccacuagcguccucuugaa

SEQ ID NO: 2006546 - RNA, 19 nt, Artificial Sequence
  Description of Artificial Sequence: Synthetic oligonucleotide
ggugaucccgcagcugccu

SEQ ID NO: 2006547 - RNA, 19 nt, Artificial Sequence
  Description of Artificial Sequence: Synthetic oligonucleotide
gccccagguccucucucuc

SEQ ID NO: 2006548 - RNA, 19 nt, Artificial Sequence
  Description of Artificial Sequence: Synthetic oligonucleotide
cacuggugcuggucacaua

SEQ ID NO: 2006549 - RNA, 19 nt, Artificial Sequence
  Description of Artificial Sequence: Synthetic oligonucleotide
ccagcaaugccuguccaau

SEQ ID NO: 2006550 - RNA, 19 nt, Artificial Sequence
  Description of Artificial Sequence: Synthetic oligonucleotide
cgcucugagugcaacugua

SEQ ID NO: 2006551 - RNA, 19 nt, Artificial Sequence
  Description of Artificial Sequence: Synthetic oligonucleotide
gugaucccgcagcugccuu

SEQ ID NO: 2006552 - RNA, 19 nt, Artificial Sequence
  Description of Artificial Sequence: Synthetic oligonucleotide
cacugaauucuugcuucuu

SEQ ID NO: 2006553 - RNA, 19 nt, Artificial Sequence
  Description of Artificial Sequence: Synthetic oligonucleotide
cccgauacgcugguaauau

SEQ ID NO: 2006554 - RNA, 19 nt, Artificial Sequence
  Description of Artificial Sequence: Synthetic oligonucleotide
ggcccgcucugagugcaac

SEQ ID NO: 2006555 - RNA, 19 nt, Artificial Sequence
  Description of Artificial Sequence: Synthetic oligonucleotide
ggcggcugacacuggugcu

SEQ ID NO: 2006556 - RNA, 19 nt, Artificial Sequence
  Description of Artificial Sequence: Synthetic oligonucleotide
ggagggcuagucugcgcau

SEQ ID NO: 2006557 - RNA, 19 nt, Artificial Sequence
  Description of Artificial Sequence: Synthetic oligonucleotide
ccaauggcccgcucugagu

SEQ ID NO: 2006558 - RNA, 19 nt, Artificial Sequence
  Description of Artificial Sequence: Synthetic oligonucleotide
gguaccucggagggcuagu

SEQ ID NO: 2006559 - RNA, 19 nt, Artificial Sequence
  Description of Artificial Sequence: Synthetic oligonucleotide
gugccuccaggggcucuga

SEQ ID NO: 2006560 - RNA, 19 nt, Artificial Sequence
  Description of Artificial Sequence: Synthetic oligonucleotide
gcuccucaugggccugcaa

SEQ ID NO: 2006561 - RNA, 19 nt, Artificial Sequence
  Description of Artificial Sequence: Synthetic oligonucleotide
cucggcucccggagccagu

SEQ ID NO: 2006562 - RNA, 19 nt, Artificial Sequence
  Description of Artificial Sequence: Synthetic oligonucleotide
gugguaccucggagggcua

SEQ ID NO: 2006563 - RNA, 19 nt, Artificial Sequence
  Description of Artificial Sequence: Synthetic oligonucleotide
cugcaccgccugguuagcu

SEQ ID NO: 2006564 - RNA, 19 nt, Artificial Sequence
  Description of Artificial Sequence: Synthetic oligonucleotide
cggguagggucacugaauu

SEQ ID NO: 2006565 - RNA, 19 nt, Artificial Sequence
  Description of Artificial Sequence: Synthetic oligonucleotide
ccgcucugagugcaacugu

SEQ ID NO: 2006566 - RNA, 19 nt, Artificial Sequence
  Description of Artificial Sequence: Synthetic oligonucleotide
gcuucccgauacgcuggua

SEQ ID NO: 2006567 - RNA, 19 nt, Artificial Sequence
  Description of Artificial Sequence: Synthetic oligonucleotide
cccugguccggcccuugcu

SEQ ID NO: 2006568 - RNA, 19 nt, Artificial Sequence
  Description of Artificial Sequence: Synthetic oligonucleotide
cuccaggcauggggaugcu

SEQ ID NO: 2006569 - RNA, 19 nt, Artificial Sequence
  Description of Artificial Sequence: Synthetic oligonucleotide
cagcucgcccugccuccau

SEQ ID NO: 2006570 - RNA, 19 nt, Artificial Sequence
  Description of Artificial Sequence: Synthetic oligonucleotide
cuccacggguagggucacu

SEQ ID NO: 2006571 - RNA, 19 nt, Artificial Sequence
  Description of Artificial Sequence: Synthetic oligonucleotide
ggcccuugcuggccacauu

SEQ ID NO: 2006572 - RNA, 19 nt, Artificial Sequence
  Description of Artificial Sequence: Synthetic oligonucleotide
guccccugguccggcccuu

SEQ ID NO: 2006573 - RNA, 19 nt, Artificial Sequence
  Description of Artificial Sequence: Synthetic oligonucleotide
aacgaucacuuucaaaacc

SEQ ID NO: 2006574 - RNA, 19 nt, Artificial Sequence
  Description of Artificial Sequence: Synthetic oligonucleotide
ugaaacacuugauaguugg

SEQ ID NO: 2006575 - RNA, 19 nt, Artificial Sequence
  Description of Artificial Sequence: Synthetic oligonucleotide
uuuauguagcuucucaacc

SEQ ID NO: 2006576 - RNA, 19 nt, Artificial Sequence
  Description of Artificial Sequence: Synthetic oligonucleotide
acaacgaucacuuucaaaa

SEQ ID NO: 2006577 - RNA, 19 nt, Artificial Sequence
  Description of Artificial Sequence: Synthetic oligonucleotide
gaaggaucugaccacaacg

SEQ ID NO: 2006578 - RNA, 19 nt, Artificial Sequence
  Description of Artificial Sequence: Synthetic oligonucleotide
gaaacauccugucaaugcg

SEQ ID NO: 2006579 - RNA, 19 nt, Artificial Sequence
  Description of Artificial Sequence: Synthetic oligonucleotide
uguuggaccauuuguaugc

SEQ ID NO: 2006580 - RNA, 19 nt, Artificial Sequence
  Description of Artificial Sequence: Synthetic oligonucleotide
gauaguuggauuuggacca

SEQ ID NO: 2006581 - RNA, 19 nt, Artificial Sequence
  Description of Artificial Sequence: Synthetic oligonucleotide
uaugucaagcuuaccaucc

SEQ ID NO: 2006582 - RNA, 19 nt, Artificial Sequence
  Description of Artificial Sequence: Synthetic oligonucleotide
aauugugcggucgaugaac

SEQ ID NO: 2006583 - RNA, 19 nt, Artificial Sequence
  Description of Artificial Sequence: Synthetic oligonucleotide
aaaccuuucccaaugucac

SEQ ID NO: 2006584 - RNA, 19 nt, Artificial Sequence
  Description of Artificial Sequence: Synthetic oligonucleotide
ucuggauaaaugaauggac

SEQ ID NO: 2006585 - RNA, 19 nt, Artificial Sequence
  Description of Artificial Sequence: Synthetic oligonucleotide
aagcuuaccauccucugug

SEQ ID NO: 2006586 - RNA, 19 nt, Artificial Sequence
  Description of Artificial Sequence: Synthetic oligonucleotide
uaccaaguugcucagacgu

SEQ ID NO: 2006587 - RNA, 19 nt, Artificial Sequence
  Description of Artificial Sequence: Synthetic oligonucleotide
aaggccagacgcuagaccu

SEQ ID NO: 2006588 - RNA, 19 nt, Artificial Sequence
  Description of Artificial Sequence: Synthetic oligonucleotide
gguucaaaaggccagacgc

SEQ ID NO: 2006589 - RNA, 19 nt, Artificial Sequence
  Description of Artificial Sequence: Synthetic oligonucleotide
aaugucaccagaagcauug

SEQ ID NO: 2006590 - RNA, 19 nt, Artificial Sequence
  Description of Artificial Sequence: Synthetic oligonucleotide
acaucaucgacguacugag

SEQ ID NO: 2006591 - RNA, 19 nt, Artificial Sequence
  Description of Artificial Sequence: Synthetic oligonucleotide
uagacguucucauuguacc

SEQ ID NO: 2006592 - RNA, 19 nt, Artificial Sequence
  Description of Artificial Sequence: Synthetic oligonucleotide
uaccccuucacaauugugc

SEQ ID NO: 2006593 - RNA, 19 nt, Artificial Sequence
  Description of Artificial Sequence: Synthetic oligonucleotide
uauguagcuucucaaccag

SEQ ID NO: 2006594 - RNA, 19 nt, Artificial Sequence
  Description of Artificial Sequence: Synthetic oligonucleotide
auaugucaagcuuaccauc

SEQ ID NO: 2006595 - RNA, 19 nt, Artificial Sequence
  Description of Artificial Sequence: Synthetic oligonucleotide
uuauguagcuucucaacca

SEQ ID NO: 2006596 - RNA, 19 nt, Artificial Sequence
  Description of Artificial Sequence: Synthetic oligonucleotide
agucgaacacccuacucac

SEQ ID NO: 2006597 - RNA, 19 nt, Artificial Sequence
  Description of Artificial Sequence: Synthetic oligonucleotide
ucgaacacccuacucacgc

SEQ ID NO: 2006598 - RNA, 19 nt, Artificial Sequence
  Description of Artificial Sequence: Synthetic oligonucleotide
cugacagacacuugcgugg

SEQ ID NO: 2006599 - RNA, 19 nt, Artificial Sequence
  Description of Artificial Sequence: Synthetic oligonucleotide
cuuuauguagcuucucaac

SEQ ID NO: 2006600 - RNA, 19 nt, Artificial Sequence
  Description of Artificial Sequence: Synthetic oligonucleotide
aaugcggcugaugacauca

SEQ ID NO: 2006601 - RNA, 19 nt, Artificial Sequence
  Description of Artificial Sequence: Synthetic oligonucleotide
aacauccugucaaugcggc

SEQ ID NO: 2006602 - RNA, 19 nt, Artificial Sequence
  Description of Artificial Sequence: Synthetic oligonucleotide
ugauaguggagcagggcag

SEQ ID NO: 2006603 - RNA, 19 nt, Artificial Sequence
  Description of Artificial Sequence: Synthetic oligonucleotide
uugauaguuggauuuggac

SEQ ID NO: 2006604 - RNA, 19 nt, Artificial Sequence
  Description of Artificial Sequence: Synthetic oligonucleotide
aauggauugcgcuggccug

SEQ ID NO: 2006605 - RNA, 19 nt, Artificial Sequence
  Description of Artificial Sequence: Synthetic oligonucleotide
gagcgcaacgccuggaugg

SEQ ID NO: 2006606 - RNA, 19 nt, Artificial Sequence
  Description of Artificial Sequence: Synthetic oligonucleotide
acaauugugcggucgauga

SEQ ID NO: 2006607 - RNA, 19 nt, Artificial Sequence
  Description of Artificial Sequence: Synthetic oligonucleotide
caugacaacgaucacuuuc

SEQ ID NO: 2006608 - RNA, 19 nt, Artificial Sequence
  Description of Artificial Sequence: Synthetic oligonucleotide
ucugggguagcugauagug

SEQ ID NO: 2006609 - RNA, 19 nt, Artificial Sequence
  Description of Artificial Sequence: Synthetic oligonucleotide
ugguucaaaaggccagacg

SEQ ID NO: 2006610 - RNA, 19 nt, Artificial Sequence
  Description of Artificial Sequence: Synthetic oligonucleotide
ugcaaguuguccuggaagu

SEQ ID NO: 2006611 - RNA, 19 nt, Artificial Sequence
  Description of Artificial Sequence: Synthetic oligonucleotide
uugaccgaaugcaaguugu

SEQ ID NO: 2006612 - RNA, 19 nt, Artificial Sequence
  Description of Artificial Sequence: Synthetic oligonucleotide
aaacauccugucaaugcgg

SEQ ID NO: 2006613 - RNA, 19 nt, Artificial Sequence
  Description of Artificial Sequence: Synthetic oligonucleotide
ugugcggucgaugaacagg

SEQ ID NO: 2006614 - RNA, 19 nt, Artificial Sequence
  Description of Artificial Sequence: Synthetic oligonucleotide
uucugaaacacuugauagu

SEQ ID NO: 2006615 - RNA, 19 nt, Artificial Sequence
  Description of Artificial Sequence: Synthetic oligonucleotide
ugacaguucugccagcaga

SEQ ID NO: 2006616 - RNA, 19 nt, Artificial Sequence
  Description of Artificial Sequence: Synthetic oligonucleotide
ucucaaccaggucaugaag

SEQ ID NO: 2006617 - RNA, 19 nt, Artificial Sequence
  Description of Artificial Sequence: Synthetic oligonucleotide
accauuuguaugcuugcag

SEQ ID NO: 2006618 - RNA, 19 nt, Artificial Sequence
  Description of Artificial Sequence: Synthetic oligonucleotide
acccuacucacgcuggagc

SEQ ID NO: 2006619 - RNA, 19 nt, Artificial Sequence
  Description of Artificial Sequence: Synthetic oligonucleotide
ucugaaacacuugauaguu

SEQ ID NO: 2006620 - RNA, 19 nt, Artificial Sequence
  Description of Artificial Sequence: Synthetic oligonucleotide
accugcgugguacugcagc

SEQ ID NO: 2006621 - RNA, 19 nt, Artificial Sequence
  Description of Artificial Sequence: Synthetic oligonucleotide
uugcggaagucccauuggg

SEQ ID NO: 2006622 - RNA, 19 nt, Artificial Sequence
  Description of Artificial Sequence: Synthetic oligonucleotide
ucaccagaagcauugcgga

SEQ ID NO: 2006623 - RNA, 19 nt, Artificial Sequence
  Description of Artificial Sequence: Synthetic oligonucleotide
gacacuugcguggugaaug

SEQ ID NO: 2006624 - RNA, 19 nt, Artificial Sequence
  Description of Artificial Sequence: Synthetic oligonucleotide
accccuucacaauugugcg

SEQ ID NO: 2006625 - RNA, 19 nt, Artificial Sequence
  Description of Artificial Sequence: Synthetic oligonucleotide
aaguuguccuggaagugcg

SEQ ID NO: 2006626 - RNA, 19 nt, Artificial Sequence
  Description of Artificial Sequence: Synthetic oligonucleotide
uucacaauugugcggucga

SEQ ID NO: 2006627 - RNA, 19 nt, Artificial Sequence
  Description of Artificial Sequence: Synthetic oligonucleotide
caggcugacagacacuugc

SEQ ID NO: 2006628 - RNA, 19 nt, Artificial Sequence
  Description of Artificial Sequence: Synthetic oligonucleotide
gguagaaccagagugguug

SEQ ID NO: 2006629 - RNA, 19 nt, Artificial Sequence
  Description of Artificial Sequence: Synthetic oligonucleotide
agacgcuagaccugcgugg

SEQ ID NO: 2006630 - RNA, 19 nt, Artificial Sequence
  Description of Artificial Sequence: Synthetic oligonucleotide
agaccauccucucaugaug

SEQ ID NO: 2006631 - RNA, 19 nt, Artificial Sequence
  Description of Artificial Sequence: Synthetic oligonucleotide
auccuuaaggcagucgaac

SEQ ID NO: 2006632 - RNA, 19 nt, Artificial Sequence
  Description of Artificial Sequence: Synthetic oligonucleotide
cuggauaaaugaauggaca

SEQ ID NO: 2006633 - RNA, 19 nt, Artificial Sequence
  Description of Artificial Sequence: Synthetic oligonucleotide
accgaaugcaaguuguccu

SEQ ID NO: 2006634 - RNA, 19 nt, Artificial Sequence
  Description of Artificial Sequence: Synthetic oligonucleotide
auuuguaugcuugcagaag

SEQ ID NO: 2006635 - RNA, 19 nt, Artificial Sequence
  Description of Artificial Sequence: Synthetic oligonucleotide
ucucaugaugcccugccaa

SEQ ID NO: 2006636 - RNA, 19 nt, Artificial Sequence
  Description of Artificial Sequence: Synthetic oligonucleotide
aaggaucugaccacaacgu

SEQ ID NO: 2006637 - RNA, 19 nt, Artificial Sequence
  Description of Artificial Sequence: Synthetic oligonucleotide
uguaugcuugcagaaguug

SEQ ID NO: 2006638 - RNA, 19 nt, Artificial Sequence
  Description of Artificial Sequence: Synthetic oligonucleotide
gaucugaccacaacgucug

SEQ ID NO: 2006639 - RNA, 19 nt, Artificial Sequence
  Description of Artificial Sequence: Synthetic oligonucleotide
uuaacagcccacuguugug

SEQ ID NO: 2006640 - RNA, 19 nt, Artificial Sequence
  Description of Artificial Sequence: Synthetic oligonucleotide
acacuugauaguuggauuu

SEQ ID NO: 2006641 - RNA, 19 nt, Artificial Sequence
  Description of Artificial Sequence: Synthetic oligonucleotide
aaugcaaguuguccuggaa

SEQ ID NO: 2006642 - RNA, 19 nt, Artificial Sequence
  Description of Artificial Sequence: Synthetic oligonucleotide
gauggcuugugagaaggcc

SEQ ID NO: 2006643 - RNA, 19 nt, Artificial Sequence
  Description of Artificial Sequence: Synthetic oligonucleotide
aaggcagucgaacacccua

SEQ ID NO: 2006644 - RNA, 19 nt, Artificial Sequence
  Description of Artificial Sequence: Synthetic oligonucleotide
ggucuggauaaaugaaugg

SEQ ID NO: 2006645 - RNA, 19 nt, Artificial Sequence
  Description of Artificial Sequence: Synthetic oligonucleotide
ugcagagcgcuucaaggac

SEQ ID NO: 2006646 - RNA, 19 nt, Artificial Sequence
  Description of Artificial Sequence: Synthetic oligonucleotide
guugcucagacguuccagc

SEQ ID NO: 2006647 - RNA, 19 nt, Artificial Sequence
  Description of Artificial Sequence: Synthetic oligonucleotide
gaacacccuacucacgcug

SEQ ID NO: 2006648 - RNA, 19 nt, Artificial Sequence
  Description of Artificial Sequence: Synthetic oligonucleotide
ugcgugguacugcagcuug

SEQ ID NO: 2006649 - RNA, 19 nt, Artificial Sequence
  Description of Artificial Sequence: Synthetic oligonucleotide
cacaacgucuggcaucugg

SEQ ID NO: 2006650 - RNA, 19 nt, Artificial Sequence
  Description of Artificial Sequence: Synthetic oligonucleotide
gaaggagcagaccauccuc

SEQ ID NO: 2006651 - RNA, 19 nt, Artificial Sequence
  Description of Artificial Sequence: Synthetic oligonucleotide
accagaagcauugcggaag

SEQ ID NO: 2006652 - RNA, 19 nt, Artificial Sequence
  Description of Artificial Sequence: Synthetic oligonucleotide
agauggcuugccuaccaag

SEQ ID NO: 2006653 - RNA, 19 nt, Artificial Sequence
  Description of Artificial Sequence: Synthetic oligonucleotide
acacuugcguggugaaugg

SEQ ID NO: 2006654 - RNA, 19 nt, Artificial Sequence
  Description of Artificial Sequence: Synthetic oligonucleotide
gacaucaucgacguacuga

SEQ ID NO: 2006655 - RNA, 19 nt, Artificial Sequence
  Description of Artificial Sequence: Synthetic oligonucleotide
cuuguugcgcaugccaucc

SEQ ID NO: 2006656 - RNA, 19 nt, Artificial Sequence
  Description of Artificial Sequence: Synthetic oligonucleotide
cauugcggaagucccauug

SEQ ID NO: 2006657 - RNA, 19 nt, Artificial Sequence
  Description of Artificial Sequence: Synthetic oligonucleotide
guugaccgaaugcaaguug

SEQ ID NO: 2006658 - RNA, 19 nt, Artificial Sequence
  Description of Artificial Sequence: Synthetic oligonucleotide
uucggaagucccuccaugu

SEQ ID NO: 2006659 - RNA, 19 nt, Artificial Sequence
  Description of Artificial Sequence: Synthetic oligonucleotide
augacaacgaucacuuuca

SEQ ID NO: 2006660 - RNA, 19 nt, Artificial Sequence
  Description of Artificial Sequence: Synthetic oligonucleotide
caacgaucacuuucaaaac

SEQ ID NO: 2006661 - RNA, 19 nt, Artificial Sequence
  Description of Artificial Sequence: Synthetic oligonucleotide
gcgcaugccauccuuaagg

SEQ ID NO: 2006662 - RNA, 19 nt, Artificial Sequence
  Description of Artificial Sequence: Synthetic oligonucleotide
cugauaguggagcagggca

SEQ ID NO: 2006663 - RNA, 19 nt, Artificial Sequence
  Description of Artificial Sequence: Synthetic oligonucleotide
guugugaagagggugguuc

SEQ ID NO: 2006664 - RNA, 19 nt, Artificial Sequence
  Description of Artificial Sequence: Synthetic oligonucleotide
uugccggcaggugucaugg

SEQ ID NO: 2006665 - RNA, 19 nt, Artificial Sequence
  Description of Artificial Sequence: Synthetic oligonucleotide
uucucaaccaggucaugaa

SEQ ID NO: 2006666 - RNA, 19 nt, Artificial Sequence
  Description of Artificial Sequence: Synthetic oligonucleotide
uccaggguucggaaguccc

SEQ ID NO: 2006667 - RNA, 19 nt, Artificial Sequence
  Description of Artificial Sequence: Synthetic oligonucleotide
aagugcgcgaugaaggccu

SEQ ID NO: 2006668 - RNA, 19 nt, Artificial Sequence
  Description of Artificial Sequence: Synthetic oligonucleotide
uguaccccuucacaauugu

SEQ ID NO: 2006669 - RNA, 19 nt, Artificial Sequence
  Description of Artificial Sequence: Synthetic oligonucleotide
cuucacaauugugcggucg

SEQ ID NO: 2006670 - RNA, 19 nt, Artificial Sequence
  Description of Artificial Sequence: Synthetic oligonucleotide
aucugauuugcagagcgcu

SEQ ID NO: 2006671 - RNA, 19 nt, Artificial Sequence
  Description of Artificial Sequence: Synthetic oligonucleotide
aacacccuacucacgcugg

SEQ ID NO: 2006672 - RNA, 19 nt, Artificial Sequence
  Description of Artificial Sequence: Synthetic oligonucleotide
gaugaacaggcuccucaug

SEQ ID NO: 2006673 - RNA, 19 nt, Artificial Sequence
  Description of Artificial Sequence: Synthetic oligonucleotide
caucugggguagcugauag

SEQ ID NO: 2006674 - RNA, 19 nt, Artificial Sequence
  Description of Artificial Sequence: Synthetic oligonucleotide
gaccgaaugcaaguugucc

SEQ ID NO: 2006675 - RNA, 19 nt, Artificial Sequence
  Description of Artificial Sequence: Synthetic oligonucleotide
aggguucggaagucccucc

SEQ ID NO: 2006676 - RNA, 19 nt, Artificial Sequence
  Description of Artificial Sequence: Synthetic oligonucleotide
gaaacuucccacagcgcug

SEQ ID NO: 2006677 - RNA, 19 nt, Artificial Sequence
  Description of Artificial Sequence: Synthetic oligonucleotide
acgaucacuuucaaaaccu

SEQ ID NO: 2006678 - RNA, 19 nt, Artificial Sequence
  Description of Artificial Sequence: Synthetic oligonucleotide
acaacgucuggcaucuggg

SEQ ID NO: 2006679 - RNA, 19 nt, Artificial Sequence
  Description of Artificial Sequence: Synthetic oligonucleotide
agacacgcccaucugauuu

SEQ ID NO: 2006680 - RNA, 19 nt, Artificial Sequence
  Description of Artificial Sequence: Synthetic oligonucleotide
ugaacaggcuccucaugac

SEQ ID NO: 2006681 - RNA, 19 nt, Artificial Sequence
  Description of Artificial Sequence: Synthetic oligonucleotide
augaugcccugccaauggg

SEQ ID NO: 2006682 - RNA, 19 nt, Artificial Sequence
  Description of Artificial Sequence: Synthetic oligonucleotide
aggcuuaacagcccacugu

SEQ ID NO: 2006683 - RNA, 19 nt, Artificial Sequence
  Description of Artificial Sequence: Synthetic oligonucleotide
gugguucucagauggcuug

SEQ ID NO: 2006684 - RNA, 19 nt, Artificial Sequence
  Description of Artificial Sequence: Synthetic oligonucleotide
gaauggauugcgcuggccu

SEQ ID NO: 2006685 - RNA, 19 nt, Artificial Sequence
  Description of Artificial Sequence: Synthetic oligonucleotide
cugaaacacuugauaguug

SEQ ID NO: 2006686 - RNA, 19 nt, Artificial Sequence
  Description of Artificial Sequence: Synthetic oligonucleotide
ugcggaagucccauugggu

SEQ ID NO: 2006687 - RNA, 19 nt, Artificial Sequence
  Description of Artificial Sequence: Synthetic oligonucleotide
uaacagcccacuguuguga

SEQ ID NO: 2006688 - RNA, 19 nt, Artificial Sequence
  Description of Artificial Sequence: Synthetic oligonucleotide
uugugaagagggugguucu

SEQ ID NO: 2006689 - RNA, 19 nt, Artificial Sequence
  Description of Artificial Sequence: Synthetic oligonucleotide
uucaaaaggccagacgcua

SEQ ID NO: 2006690 - RNA, 19 nt, Artificial Sequence
  Description of Artificial Sequence: Synthetic oligonucleotide
cagucgaacacccuacuca

SEQ ID NO: 2006691 - RNA, 19 nt, Artificial Sequence
  Description of Artificial Sequence: Synthetic oligonucleotide
aacaggcuccucaugacaa

SEQ ID NO: 2006692 - RNA, 19 nt, Artificial Sequence
  Description of Artificial Sequence: Synthetic oligonucleotide
ugaugcccugccaaugggu

SEQ ID NO: 2006693 - RNA, 19 nt, Artificial Sequence
  Description of Artificial Sequence: Synthetic oligonucleotide
ucaaugcggcugaugacau

SEQ ID NO: 2006694 - RNA, 19 nt, Artificial Sequence
  Description of Artificial Sequence: Synthetic oligonucleotide
gaugcccugccaaugggug

SEQ ID NO: 2006695 - RNA, 19 nt, Artificial Sequence
  Description of Artificial Sequence: Synthetic oligonucleotide
caucgacguacugaggcgg

SEQ ID NO: 2006696 - RNA, 19 nt, Artificial Sequence
  Description of Artificial Sequence: Synthetic oligonucleotide
ggcguuuuguccugcacag

SEQ ID NO: 2006697 - RNA, 19 nt, Artificial Sequence
  Description of Artificial Sequence: Synthetic oligonucleotide
uggacauuucuggaaacau

SEQ ID NO: 2006698 - RNA, 19 nt, Artificial Sequence
  Description of Artificial Sequence: Synthetic oligonucleotide
gaacaggcuccucaugaca

SEQ ID NO: 2006699 - RNA, 19 nt, Artificial Sequence
  Description of Artificial Sequence: Synthetic oligonucleotide
uuggaccauaugucaagcu

SEQ ID NO: 2006700 - RNA, 19 nt, Artificial Sequence
  Description of Artificial Sequence: Synthetic oligonucleotide
guagacguucucauuguac

SEQ ID NO: 2006701 - RNA, 19 nt, Artificial Sequence
  Description of Artificial Sequence: Synthetic oligonucleotide
ugcgcaugccauccuuaag

SEQ ID NO: 2006702 - RNA, 19 nt, Artificial Sequence
  Description of Artificial Sequence: Synthetic oligonucleotide
aguugcucagacguuccag

SEQ ID NO: 2006703 - RNA, 19 nt, Artificial Sequence
  Description of Artificial Sequence: Synthetic oligonucleotide
uguagacguucucauugua

SEQ ID NO: 2006704 - RNA, 19 nt, Artificial Sequence
  Description of Artificial Sequence: Synthetic oligonucleotide
ccauaugucaagcuuacca

SEQ ID NO: 2006705 - RNA, 19 nt, Artificial Sequence
  Description of Artificial Sequence: Synthetic oligonucleotide
ucccgguugaccgaaugca

SEQ ID NO: 2006706 - RNA, 19 nt, Artificial Sequence
  Description of Artificial Sequence: Synthetic oligonucleotide
auggaaggcuuccaggguu

SEQ ID NO: 2006707 - RNA, 19 nt, Artificial Sequence
  Description of Artificial Sequence: Synthetic oligonucleotide
gaccauaugucaagcuuac

SEQ ID NO: 2006708 - RNA, 19 nt, Artificial Sequence
  Description of Artificial Sequence: Synthetic oligonucleotide
guucggaagucccuccaug

SEQ ID NO: 2006709 - RNA, 19 nt, Artificial Sequence
  Description of Artificial Sequence: Synthetic oligonucleotide
cuuaacagcccacuguugu

SEQ ID NO: 2006710 - RNA, 19 nt, Artificial Sequence
  Description of Artificial Sequence: Synthetic oligonucleotide
gcugacagacacuugcgug

SEQ ID NO: 2006711 - RNA, 19 nt, Artificial Sequence
  Description of Artificial Sequence: Synthetic oligonucleotide
uucucgcggcccuccagcg

SEQ ID NO: 2006712 - RNA, 19 nt, Artificial Sequence
  Description of Artificial Sequence: Synthetic oligonucleotide
accacaacgucuggcaucu

SEQ ID NO: 2006713 - RNA, 19 nt, Artificial Sequence
  Description of Artificial Sequence: Synthetic oligonucleotide
gaccacaacgucuggcauc

SEQ ID NO: 2006714 - RNA, 19 nt, Artificial Sequence
  Description of Artificial Sequence: Synthetic oligonucleotide
ggucaugaaggaucugacc

SEQ ID NO: 2006715 - RNA, 19 nt, Artificial Sequence
  Description of Artificial Sequence: Synthetic oligonucleotide
ugcguggugaauggauugc

SEQ ID NO: 2006716 - RNA, 19 nt, Artificial Sequence
  Description of Artificial Sequence: Synthetic oligonucleotide
cacuguugugaagagggug

SEQ ID NO: 2006717 - RNA, 19 nt, Artificial Sequence
  Description of Artificial Sequence: Synthetic oligonucleotide
cuucucgcggcccuccagc

SEQ ID NO: 2006718 - RNA, 19 nt, Artificial Sequence
  Description of Artificial Sequence: Synthetic oligonucleotide
gacaacgaucacuuucaaa

SEQ ID NO: 2006719 - RNA, 19 nt, Artificial Sequence
  Description of Artificial Sequence: Synthetic oligonucleotide
ggaagugcgcgaugaaggc

SEQ ID NO: 2006720 - RNA, 19 nt, Artificial Sequence
  Description of Artificial Sequence: Synthetic oligonucleotide
agaccugcgugguacugca

SEQ ID NO: 2006721 - RNA, 19 nt, Artificial Sequence
  Description of Artificial Sequence: Synthetic oligonucleotide
gcgaugaaggccuucucgc

SEQ ID NO: 2006722 - RNA, 19 nt, Artificial Sequence
  Description of Artificial Sequence: Synthetic oligonucleotide
caucaucgacguacugagg

SEQ ID NO: 2006723 - RNA, 19 nt, Artificial Sequence
  Description of Artificial Sequence: Synthetic oligonucleotide
gaaugcaaguuguccugga

SEQ ID NO: 2006724 - RNA, 19 nt, Artificial Sequence
  Description of Artificial Sequence: Synthetic oligonucleotide
cauaugucaagcuuaccau

SEQ ID NO: 2006725 - RNA, 19 nt, Artificial Sequence
  Description of Artificial Sequence: Synthetic oligonucleotide
cagacgcuagaccugcgug

SEQ ID NO: 2006726 - RNA, 19 nt, Artificial Sequence
  Description of Artificial Sequence: Synthetic oligonucleotide
caggcuccucaugacaacg

SEQ ID NO: 2006727 - RNA, 19 nt, Artificial Sequence
  Description of Artificial Sequence: Synthetic oligonucleotide
ugaccgaaugcaaguuguc

SEQ ID NO: 2006728 - RNA, 19 nt, Artificial Sequence
  Description of Artificial Sequence: Synthetic oligonucleotide
auugccggcaggugucaug

SEQ ID NO: 2006729 - RNA, 19 nt, Artificial Sequence
  Description of Artificial Sequence: Synthetic oligonucleotide
ggaagucccuccaugucgg

SEQ ID NO: 2006730 - RNA, 19 nt, Artificial Sequence
  Description of Artificial Sequence: Synthetic oligonucleotide
ucggaagucccuccauguc

SEQ ID NO: 2006731 - RNA, 19 nt, Artificial Sequence
  Description of Artificial Sequence: Synthetic oligonucleotide
ugucaccuucugaaacacu

SEQ ID NO: 2006732 - RNA, 19 nt, Artificial Sequence
  Description of Artificial Sequence: Synthetic oligonucleotide
cagagugguuggcugggcc

SEQ ID NO: 2006733 - RNA, 19 nt, Artificial Sequence
  Description of Artificial Sequence: Synthetic oligonucleotide
uuguccuggaagugcgcga

SEQ ID NO: 2006734 - RNA, 19 nt, Artificial Sequence
  Description of Artificial Sequence: Synthetic oligonucleotide
agcgcaacgccuggauggc

SEQ ID NO: 2006735 - RNA, 19 nt, Artificial Sequence
  Description of Artificial Sequence: Synthetic oligonucleotide
ugaccacaacgucuggcau

SEQ ID NO: 2006736 - RNA, 19 nt, Artificial Sequence
  Description of Artificial Sequence: Synthetic oligonucleotide
uguugcgcaugccauccuu

SEQ ID NO: 2006737 - RNA, 19 nt, Artificial Sequence
  Description of Artificial Sequence: Synthetic oligonucleotide
cagagcgcuucaaggacug

SEQ ID NO: 2006738 - RNA, 19 nt, Artificial Sequence
  Description of Artificial Sequence: Synthetic oligonucleotide
aggcagucgaacacccuac

SEQ ID NO: 2006739 - RNA, 19 nt, Artificial Sequence
  Description of Artificial Sequence: Synthetic oligonucleotide
uaaggcagucgaacacccu

SEQ ID NO: 2006740 - RNA, 19 nt, Artificial Sequence
  Description of Artificial Sequence: Synthetic oligonucleotide
gaaacacuugauaguugga

SEQ ID NO: 2006741 - RNA, 19 nt, Artificial Sequence
  Description of Artificial Sequence: Synthetic oligonucleotide
cacuugauaguuggauuug

SEQ ID NO: 2006742 - RNA, 19 nt, Artificial Sequence
  Description of Artificial Sequence: Synthetic oligonucleotide
ugccuaccaaguugcucag

SEQ ID NO: 2006743 - RNA, 19 nt, Artificial Sequence
  Description of Artificial Sequence: Synthetic oligonucleotide
agaguggcguuuuguccug

SEQ ID NO: 2006744 - RNA, 19 nt, Artificial Sequence
  Description of Artificial Sequence: Synthetic oligonucleotide
ggaccauuuguaugcuugc

SEQ ID NO: 2006745 - RNA, 19 nt, Artificial Sequence
  Description of Artificial Sequence: Synthetic oligonucleotide
uugugcggucgaugaacag

SEQ ID NO: 2006746 - RNA, 19 nt, Artificial Sequence
  Description of Artificial Sequence: Synthetic oligonucleotide
ugcgcgaugaaggccuucu

SEQ ID NO: 2006747 - RNA, 19 nt, Artificial Sequence
  Description of Artificial Sequence: Synthetic oligonucleotide
ugacaacgaucacuuucaa

SEQ ID NO: 2006748 - RNA, 19 nt, Artificial Sequence
  Description of Artificial Sequence: Synthetic oligonucleotide
agcgcuucaaggacuguug

SEQ ID NO: 2006749 - RNA, 19 nt, Artificial Sequence
  Description of Artificial Sequence: Synthetic oligonucleotide
ccucuuggcagacacgccc

SEQ ID NO: 2006750 - RNA, 19 nt, Artificial Sequence
  Description of Artificial Sequence: Synthetic oligonucleotide
gucccgguugaccgaaugc

SEQ ID NO: 2006751 - RNA, 19 nt, Artificial Sequence
  Description of Artificial Sequence: Synthetic oligonucleotide
ugacagacacuugcguggu

SEQ ID NO: 2006752 - RNA, 19 nt, Artificial Sequence
  Description of Artificial Sequence: Synthetic oligonucleotide
acgucuggcaucuggggua

SEQ ID NO: 2006753 - RNA, 19 nt, Artificial Sequence
  Description of Artificial Sequence: Synthetic oligonucleotide
caggcuuaacagcccacug

SEQ ID NO: 2006754 - RNA, 19 nt, Artificial Sequence
  Description of Artificial Sequence: Synthetic oligonucleotide
auugugcggucgaugaaca

SEQ ID NO: 2006755 - RNA, 19 nt, Artificial Sequence
  Description of Artificial Sequence: Synthetic oligonucleotide
uggcacugauggcuuguga

SEQ ID NO: 2006756 - RNA, 19 nt, Artificial Sequence
  Description of Artificial Sequence: Synthetic oligonucleotide
gugacaguucugccagcag

SEQ ID NO: 2006757 - RNA, 19 nt, Artificial Sequence
  Description of Artificial Sequence: Synthetic oligonucleotide
gucccauugggucuggaua

SEQ ID NO: 2006758 - RNA, 19 nt, Artificial Sequence
  Description of Artificial Sequence: Synthetic oligonucleotide
cuugccuaccaaguugcuc

SEQ ID NO: 2006759 - RNA, 19 nt, Artificial Sequence
  Description of Artificial Sequence: Synthetic oligonucleotide
gcucagacguuccagcuca

SEQ ID NO: 2006760 - RNA, 19 nt, Artificial Sequence
  Description of Artificial Sequence: Synthetic oligonucleotide
agucccauugggucuggau

SEQ ID NO: 2006761 - RNA, 19 nt, Artificial Sequence
  Description of Artificial Sequence: Synthetic oligonucleotide
agcuuaccauccucugugu

SEQ ID NO: 2006762 - RNA, 19 nt, Artificial Sequence
  Description of Artificial Sequence: Synthetic oligonucleotide
cacagagaaggagcagacc

SEQ ID NO: 2006763 - RNA, 19 nt, Artificial Sequence
  Description of Artificial Sequence: Synthetic oligonucleotide
caaaaggccagacgcuaga

SEQ ID NO: 2006764 - RNA, 19 nt, Artificial Sequence
  Description of Artificial Sequence: Synthetic oligonucleotide
uccucaugacaacgaucac

SEQ ID NO: 2006765 - RNA, 19 nt, Artificial Sequence
  Description of Artificial Sequence: Synthetic oligonucleotide
uggagcgcaacgccuggau

SEQ ID NO: 2006766 - RNA, 19 nt, Artificial Sequence
  Description of Artificial Sequence: Synthetic oligonucleotide
ugaggucccgguugaccga

SEQ ID NO: 2006767 - RNA, 19 nt, Artificial Sequence
  Description of Artificial Sequence: Synthetic oligonucleotide
gacgcucagcacauccgcc

SEQ ID NO: 2006768 - RNA, 19 nt, Artificial Sequence
  Description of Artificial Sequence: Synthetic oligonucleotide
cuuguuggaccauuuguau

SEQ ID NO: 2006769 - RNA, 19 nt, Artificial Sequence
  Description of Artificial Sequence: Synthetic oligonucleotide
ccauuuguaugcuugcaga

SEQ ID NO: 2006770 - RNA, 19 nt, Artificial Sequence
  Description of Artificial Sequence: Synthetic oligonucleotide
acuugcguggugaauggau

SEQ ID NO: 2006771 - RNA, 19 nt, Artificial Sequence
  Description of Artificial Sequence: Synthetic oligonucleotide
aguuggauuuggaccauau

SEQ ID NO: 2006772 - RNA, 19 nt, Artificial Sequence
  Description of Artificial Sequence: Synthetic oligonucleotide
cccuacucacgcuggagcg

SEQ ID NO: 2006773 - RNA, 19 nt, Artificial Sequence
  Description of Artificial Sequence: Synthetic oligonucleotide
uggauugcgcuggccuggg

SEQ ID NO: 2006774 - RNA, 19 nt, Artificial Sequence
  Description of Artificial Sequence: Synthetic oligonucleotide
agcagaccauccucucaug

SEQ ID NO: 2006775 - RNA, 19 nt, Artificial Sequence
  Description of Artificial Sequence: Synthetic oligonucleotide
aacgccuggauggcacuga

SEQ ID NO: 2006776 - RNA, 19 nt, Artificial Sequence
  Description of Artificial Sequence: Synthetic oligonucleotide
uggcagacacgcccaucug

SEQ ID NO: 2006777 - RNA, 19 nt, Artificial Sequence
  Description of Artificial Sequence: Synthetic oligonucleotide
cauggucugucaccuucug

SEQ ID NO: 2006778 - RNA, 19 nt, Artificial Sequence
  Description of Artificial Sequence: Synthetic oligonucleotide
ggcuugccuaccaaguugc

SEQ ID NO: 2006779 - RNA, 19 nt, Artificial Sequence
  Description of Artificial Sequence: Synthetic oligonucleotide
aguggcguuuuguccugca

SEQ ID NO: 2006780 - RNA, 19 nt, Artificial Sequence
  Description of Artificial Sequence: Synthetic oligonucleotide
gugaauggauugcgcuggc

SEQ ID NO: 2006781 - RNA, 19 nt, Artificial Sequence
  Description of Artificial Sequence: Synthetic oligonucleotide
cggucgaugaacaggcucc

SEQ ID NO: 2006782 - RNA, 19 nt, Artificial Sequence
  Description of Artificial Sequence: Synthetic oligonucleotide
gucgaacacccuacucacg

SEQ ID NO: 2006783 - RNA, 19 nt, Artificial Sequence
  Description of Artificial Sequence: Synthetic oligonucleotide
cagcuuguuggaccauuug

SEQ ID NO: 2006784 - RNA, 19 nt, Artificial Sequence
  Description of Artificial Sequence: Synthetic oligonucleotide
agcauugcggaagucccau

SEQ ID NO: 2006785 - RNA, 19 nt, Artificial Sequence
  Description of Artificial Sequence: Synthetic oligonucleotide
gcgcuucaaggacuguugg

SEQ ID NO: 2006786 - RNA, 19 nt, Artificial Sequence
  Description of Artificial Sequence: Synthetic oligonucleotide
agggugguucucagauggc

SEQ ID NO: 2006787 - RNA, 19 nt, Artificial Sequence
  Description of Artificial Sequence: Synthetic oligonucleotide
gucauugccggcagguguc

SEQ ID NO: 2006788 - RNA, 19 nt, Artificial Sequence
  Description of Artificial Sequence: Synthetic oligonucleotide
cuggcacggggccuggaac

SEQ ID NO: 2006789 - RNA, 19 nt, Artificial Sequence
  Description of Artificial Sequence: Synthetic oligonucleotide
augcccugccaauggguga

SEQ ID NO: 2006790 - RNA, 19 nt, Artificial Sequence
  Description of Artificial Sequence: Synthetic oligonucleotide
uuguugcgcaugccauccu

SEQ ID NO: 2006791 - RNA, 19 nt, Artificial Sequence
  Description of Artificial Sequence: Synthetic oligonucleotide
uaccauccucuguguagac

SEQ ID NO: 2006792 - RNA, 19 nt, Artificial Sequence
  Description of Artificial Sequence: Synthetic oligonucleotide
cgcgaugaaggccuucucg

SEQ ID NO: 2006793 - RNA, 19 nt, Artificial Sequence
  Description of Artificial Sequence: Synthetic oligonucleotide
ccgguugaccgaaugcaag

SEQ ID NO: 2006794 - RNA, 19 nt, Artificial Sequence
  Description of Artificial Sequence: Synthetic oligonucleotide
guaccccuucacaauugug

SEQ ID NO: 2006795 - RNA, 19 nt, Artificial Sequence
  Description of Artificial Sequence: Synthetic oligonucleotide
guggcguuuuguccugcac

SEQ ID NO: 2006796 - RNA, 19 nt, Artificial Sequence
  Description of Artificial Sequence: Synthetic oligonucleotide
uuggaccauuuguaugcuu

SEQ ID NO: 2006797 - RNA, 19 nt, Artificial Sequence
  Description of Artificial Sequence: Synthetic oligonucleotide
ucauugccggcagguguca

SEQ ID NO: 2006798 - RNA, 19 nt, Artificial Sequence
  Description of Artificial Sequence: Synthetic oligonucleotide
gauaguggagcagggcagu

SEQ ID NO: 2006799 - RNA, 19 nt, Artificial Sequence
  Description of Artificial Sequence: Synthetic oligonucleotide
ucaugacaacgaucacuuu

SEQ ID NO: 2006800 - RNA, 19 nt, Artificial Sequence
  Description of Artificial Sequence: Synthetic oligonucleotide
acacccuacucacgcugga

SEQ ID NO: 2006801 - RNA, 19 nt, Artificial Sequence
  Description of Artificial Sequence: Synthetic oligonucleotide
ucacaauugugcggucgau

SEQ ID NO: 2006802 - RNA, 19 nt, Artificial Sequence
  Description of Artificial Sequence: Synthetic oligonucleotide
aguuggcuguagaguggcg

SEQ ID NO: 2006803 - RNA, 19 nt, Artificial Sequence
  Description of Artificial Sequence: Synthetic oligonucleotide
ugcggucgaugaacaggcu

SEQ ID NO: 2006804 - RNA, 19 nt, Artificial Sequence
  Description of Artificial Sequence: Synthetic oligonucleotide
guguagacguucucauugu

SEQ ID NO: 2006805 - RNA, 19 nt, Artificial Sequence
  Description of Artificial Sequence: Synthetic oligonucleotide
ggaacagcuuuauguagcu

SEQ ID NO: 2006806 - RNA, 19 nt, Artificial Sequence
  Description of Artificial Sequence: Synthetic oligonucleotide
cuacucacgcuggagcgca

SEQ ID NO: 2006807 - RNA, 19 nt, Artificial Sequence
  Description of Artificial Sequence: Synthetic oligonucleotide
gcugauaguggagcagggc

SEQ ID NO: 2006808 - RNA, 19 nt, Artificial Sequence
  Description of Artificial Sequence: Synthetic oligonucleotide
gcguggugaauggauugcg

SEQ ID NO: 2006809 - RNA, 19 nt, Artificial Sequence
  Description of Artificial Sequence: Synthetic oligonucleotide
ggaucugaccacaacgucu

SEQ ID NO: 2006810 - RNA, 19 nt, Artificial Sequence
  Description of Artificial Sequence: Synthetic oligonucleotide
ggagcgcaacgccuggaug

SEQ ID NO: 2006811 - RNA, 19 nt, Artificial Sequence
  Description of Artificial Sequence: Synthetic oligonucleotide
aggugucauggaaggcuuc

SEQ ID NO: 2006812 - RNA, 19 nt, Artificial Sequence
  Description of Artificial Sequence: Synthetic oligonucleotide
ugaugacaucaucgacgua

SEQ ID NO: 2006813 - RNA, 19 nt, Artificial Sequence
  Description of Artificial Sequence: Synthetic oligonucleotide
auggcacugauggcuugug

SEQ ID NO: 2006814 - RNA, 19 nt, Artificial Sequence
  Description of Artificial Sequence: Synthetic oligonucleotide
gcuuguuggaccauuugua

SEQ ID NO: 2006815 - RNA, 19 nt, Artificial Sequence
  Description of Artificial Sequence: Synthetic oligonucleotide
auaguuggauuuggaccau

SEQ ID NO: 2006816 - RNA, 19 nt, Artificial Sequence
  Description of Artificial Sequence: Synthetic oligonucleotide
ccccuucacaauugugcgg

SEQ ID NO: 2006817 - RNA, 19 nt, Artificial Sequence
  Description of Artificial Sequence: Synthetic oligonucleotide
cccgacgcucagcacaucc

SEQ ID NO: 2006818 - RNA, 19 nt, Artificial Sequence
  Description of Artificial Sequence: Synthetic oligonucleotide
cacccuacucacgcuggag

SEQ ID NO: 2006819 - RNA, 19 nt, Artificial Sequence
  Description of Artificial Sequence: Synthetic oligonucleotide
gcuugcagaaguuggcugu

SEQ ID NO: 2006820 - RNA, 19 nt, Artificial Sequence
  Description of Artificial Sequence: Synthetic oligonucleotide
cguggugaauggauugcgc

SEQ ID NO: 2006821 - RNA, 19 nt, Artificial Sequence
  Description of Artificial Sequence: Synthetic oligonucleotide
ccgacgcucagcacauccg

SEQ ID NO: 2006822 - RNA, 19 nt, Artificial Sequence
  Description of Artificial Sequence: Synthetic oligonucleotide
cucucaugaugcccugcca

SEQ ID NO: 2006823 - RNA, 19 nt, Artificial Sequence
  Description of Artificial Sequence: Synthetic oligonucleotide
gcggucgaugaacaggcuc

SEQ ID NO: 2006824 - RNA, 19 nt, Artificial Sequence
  Description of Artificial Sequence: Synthetic oligonucleotide
ggucccgguugaccgaaug

SEQ ID NO: 2006825 - RNA, 19 nt, Artificial Sequence
  Description of Artificial Sequence: Synthetic oligonucleotide
gcagucgaacacccuacuc

SEQ ID NO: 2006826 - RNA, 19 nt, Artificial Sequence
  Description of Artificial Sequence: Synthetic oligonucleotide
gauggcacugauggcuugu

SEQ ID NO: 2006827 - RNA, 19 nt, Artificial Sequence
  Description of Artificial Sequence: Synthetic oligonucleotide
cuugcguggugaauggauu

SEQ ID NO: 2006828 - RNA, 19 nt, Artificial Sequence
  Description of Artificial Sequence: Synthetic oligonucleotide
gacgcuagaccugcguggu

SEQ ID NO: 2006829 - RNA, 19 nt, Artificial Sequence
  Description of Artificial Sequence: Synthetic oligonucleotide
caauugugcggucgaugaa

SEQ ID NO: 2006830 - RNA, 19 nt, Artificial Sequence
  Description of Artificial Sequence: Synthetic oligonucleotide
cugccaaugggugacaguu

SEQ ID NO: 2006831 - RNA, 19 nt, Artificial Sequence
  Description of Artificial Sequence: Synthetic oligonucleotide
uaguuggauuuggaccaua

SEQ ID NO: 2006832 - RNA, 19 nt, Artificial Sequence
  Description of Artificial Sequence: Synthetic oligonucleotide
acguacugaggcgguagaa

SEQ ID NO: 2006833 - RNA, 19 nt, Artificial Sequence
  Description of Artificial Sequence: Synthetic oligonucleotide
gccauccuuaaggcagucg

SEQ ID NO: 2006834 - RNA, 19 nt, Artificial Sequence
  Description of Artificial Sequence: Synthetic oligonucleotide
guacugcagcuuguuggac

SEQ ID NO: 2006835 - RNA, 19 nt, Artificial Sequence
  Description of Artificial Sequence: Synthetic oligonucleotide
ucagacguuccagcucauu

SEQ ID NO: 2006836 - RNA, 19 nt, Artificial Sequence
  Description of Artificial Sequence: Synthetic oligonucleotide
aucgacguacugaggcggu

SEQ ID NO: 2006837 - RNA, 19 nt, Artificial Sequence
  Description of Artificial Sequence: Synthetic oligonucleotide
ggccagacgcuagaccugc

SEQ ID NO: 2006838 - RNA, 19 nt, Artificial Sequence
  Description of Artificial Sequence: Synthetic oligonucleotide
caccagaagcauugcggaa

SEQ ID NO: 2006839 - RNA, 19 nt, Artificial Sequence
  Description of Artificial Sequence: Synthetic oligonucleotide
ggauggcacugauggcuug

SEQ ID NO: 2006840 - RNA, 19 nt, Artificial Sequence
  Description of Artificial Sequence: Synthetic oligonucleotide
gaguggcguuuuguccugc

SEQ ID NO: 2006841 - RNA, 19 nt, Artificial Sequence
  Description of Artificial Sequence: Synthetic oligonucleotide
cgaaugcaaguuguccugg

SEQ ID NO: 2006842 - RNA, 19 nt, Artificial Sequence
  Description of Artificial Sequence: Synthetic oligonucleotide
cuccagcgucuccuuguug

SEQ ID NO: 2006843 - RNA, 19 nt, Artificial Sequence
  Description of Artificial Sequence: Synthetic oligonucleotide
ggauaaaugaauggacauu

SEQ ID NO: 2006844 - RNA, 19 nt, Artificial Sequence
  Description of Artificial Sequence: Synthetic oligonucleotide
cagaccauccucucaugau

SEQ ID NO: 2006845 - RNA, 19 nt, Artificial Sequence
  Description of Artificial Sequence: Synthetic oligonucleotide
cucaugaugcccugccaau

SEQ ID NO: 2006846 - RNA, 19 nt, Artificial Sequence
  Description of Artificial Sequence: Synthetic oligonucleotide
cagcuuuauguagcuucuc

SEQ ID NO: 2006847 - RNA, 19 nt, Artificial Sequence
  Description of Artificial Sequence: Synthetic oligonucleotide
aggccagacgcuagaccug

SEQ ID NO: 2006848 - RNA, 19 nt, Artificial Sequence
  Description of Artificial Sequence: Synthetic oligonucleotide
guugcgcaugccauccuua

SEQ ID NO: 2006849 - RNA, 19 nt, Artificial Sequence
  Description of Artificial Sequence: Synthetic oligonucleotide
cgacgcucagcacauccgc

SEQ ID NO: 2006850 - RNA, 19 nt, Artificial Sequence
  Description of Artificial Sequence: Synthetic oligonucleotide
guucaccccgacgcucagc

SEQ ID NO: 2006851 - RNA, 19 nt, Artificial Sequence
  Description of Artificial Sequence: Synthetic oligonucleotide
ccuacucacgcuggagcgc

SEQ ID NO: 2006852 - RNA, 19 nt, Artificial Sequence
  Description of Artificial Sequence: Synthetic oligonucleotide
ucgacguacugaggcggua

SEQ ID NO: 2006853 - RNA, 19 nt, Artificial Sequence
  Description of Artificial Sequence: Synthetic oligonucleotide
cagauggcuugccuaccaa

SEQ ID NO: 2006854 - RNA, 19 nt, Artificial Sequence
  Description of Artificial Sequence: Synthetic oligonucleotide
gaggucccgguugaccgaa

SEQ ID NO: 2006855 - RNA, 19 nt, Artificial Sequence
  Description of Artificial Sequence: Synthetic oligonucleotide
gaccugcgugguacugcag

SEQ ID NO: 2006856 - RNA, 19 nt, Artificial Sequence
  Description of Artificial Sequence: Synthetic oligonucleotide
ugccauccuuaaggcaguc

SEQ ID NO: 2006857 - RNA, 19 nt, Artificial Sequence
  Description of Artificial Sequence: Synthetic oligonucleotide
gguucaccccgacgcucag

SEQ ID NO: 2006858 - RNA, 19 nt, Artificial Sequence
  Description of Artificial Sequence: Synthetic oligonucleotide
guuggaccauuuguaugcu

SEQ ID NO: 2006859 - RNA, 19 nt, Artificial Sequence
  Description of Artificial Sequence: Synthetic oligonucleotide
cagaagcauugcggaaguc

SEQ ID NO: 2006860 - RNA, 19 nt, Artificial Sequence
  Description of Artificial Sequence: Synthetic oligonucleotide
gcguuuuguccugcacagg

SEQ ID NO: 2006861 - RNA, 19 nt, Artificial Sequence
  Description of Artificial Sequence: Synthetic oligonucleotide
ggguucggaagucccucca

SEQ ID NO: 2006862 - RNA, 19 nt, Artificial Sequence
  Description of Artificial Sequence: Synthetic oligonucleotide
ggccuggaacagcuuuaug

SEQ ID NO: 2006863 - RNA, 19 nt, Artificial Sequence
  Description of Artificial Sequence: Synthetic oligonucleotide
ggcugacagacacuugcgu

SEQ ID NO: 2006864 - RNA, 19 nt, Artificial Sequence
  Description of Artificial Sequence: Synthetic oligonucleotide
guuuuguccugcacaggau

SEQ ID NO: 2006865 - RNA, 19 nt, Artificial Sequence
  Description of Artificial Sequence: Synthetic oligonucleotide
cgcuagaccugcgugguac

SEQ ID NO: 2006866 - RNA, 19 nt, Artificial Sequence
  Description of Artificial Sequence: Synthetic oligonucleotide
gucgaugaacaggcuccuc

SEQ ID NO: 2006867 - RNA, 19 nt, Artificial Sequence
  Description of Artificial Sequence: Synthetic oligonucleotide
gagcgcuucaaggacuguu

SEQ ID NO: 2006868 - RNA, 19 nt, Artificial Sequence
  Description of Artificial Sequence: Synthetic oligonucleotide
gcugcaggcuaggcaguag

SEQ ID NO: 2006869 - RNA, 19 nt, Artificial Sequence
  Description of Artificial Sequence: Synthetic oligonucleotide
gggucauugccggcaggug

SEQ ID NO: 2006870 - RNA, 19 nt, Artificial Sequence
  Description of Artificial Sequence: Synthetic oligonucleotide
ccugucaaugcggcugaug

SEQ ID NO: 2006871 - RNA, 19 nt, Artificial Sequence
  Description of Artificial Sequence: Synthetic oligonucleotide
gggugacaguucugccagc

SEQ ID NO: 2006872 - RNA, 19 nt, Artificial Sequence
  Description of Artificial Sequence: Synthetic oligonucleotide
caaggacuguugguucaaa

SEQ ID NO: 2006873 - RNA, 19 nt, Artificial Sequence
  Description of Artificial Sequence: Synthetic oligonucleotide
agugguuggcugggccuuu

SEQ ID NO: 2006874 - RNA, 19 nt, Artificial Sequence
  Description of Artificial Sequence: Synthetic oligonucleotide
cgacguacugaggcgguag

SEQ ID NO: 2006875 - RNA, 19 nt, Artificial Sequence
  Description of Artificial Sequence: Synthetic oligonucleotide
ccaggcugacagacacuug

SEQ ID NO: 2006876 - RNA, 19 nt, Artificial Sequence
  Description of Artificial Sequence: Synthetic oligonucleotide
cacuugcguggugaaugga

SEQ ID NO: 2006877 - RNA, 19 nt, Artificial Sequence
  Description of Artificial Sequence: Synthetic oligonucleotide
acgcuagaccugcguggua

SEQ ID NO: 2006878 - RNA, 19 nt, Artificial Sequence
  Description of Artificial Sequence: Synthetic oligonucleotide
cuguugugaagaggguggu

SEQ ID NO: 2006879 - RNA, 19 nt, Artificial Sequence
  Description of Artificial Sequence: Synthetic oligonucleotide
uccugucaaugcggcugau

SEQ ID NO: 2006880 - RNA, 19 nt, Artificial Sequence
  Description of Artificial Sequence: Synthetic oligonucleotide
ggcagucgaacacccuacu

SEQ ID NO: 2006881 - RNA, 19 nt, Artificial Sequence
  Description of Artificial Sequence: Synthetic oligonucleotide
cgcuggagcgcaacgccug

SEQ ID NO: 2006882 - RNA, 19 nt, Artificial Sequence
  Description of Artificial Sequence: Synthetic oligonucleotide
gagugguuggcugggccuu

SEQ ID NO: 2006883 - RNA, 19 nt, Artificial Sequence
  Description of Artificial Sequence: Synthetic oligonucleotide
gcacauccgccauguugca

SEQ ID NO: 2006884 - RNA, 19 nt, Artificial Sequence
  Description of Artificial Sequence: Synthetic oligonucleotide
cagaggggcccaggcugac

SEQ ID NO: 2006885 - RNA, 19 nt, Artificial Sequence
  Description of Artificial Sequence: Synthetic oligonucleotide
ggggucauugccggcaggu

SEQ ID NO: 2006886 - RNA, 19 nt, Artificial Sequence
  Description of Artificial Sequence: Synthetic oligonucleotide
cccgguugaccgaaugcaa

SEQ ID NO: 2006887 - RNA, 19 nt, Artificial Sequence
  Description of Artificial Sequence: Synthetic oligonucleotide
gcagacacgcccaucugau

SEQ ID NO: 2006888 - RNA, 19 nt, Artificial Sequence
  Description of Artificial Sequence: Synthetic oligonucleotide
gguucggaagucccuccau

SEQ ID NO: 2006889 - RNA, 19 nt, Artificial Sequence
  Description of Artificial Sequence: Synthetic oligonucleotide
gguugaccgaaugcaaguu

SEQ ID NO: 2006890 - RNA, 19 nt, Artificial Sequence
  Description of Artificial Sequence: Synthetic oligonucleotide
cuggagcgcaacgccugga

SEQ ID NO: 2006891 - RNA, 19 nt, Artificial Sequence
  Description of Artificial Sequence: Synthetic oligonucleotide
gcuagaccugcgugguacu

SEQ ID NO: 2006892 - RNA, 19 nt, Artificial Sequence
  Description of Artificial Sequence: Synthetic oligonucleotide
gccagacgcuagaccugcg

SEQ ID NO: 2006893 - RNA, 19 nt, Artificial Sequence
  Description of Artificial Sequence: Synthetic oligonucleotide
cgucuggcaucugggguag

SEQ ID NO: 2006894 - RNA, 19 nt, Artificial Sequence
  Description of Artificial Sequence: Synthetic oligonucleotide
ccugcgugguacugcagcu

SEQ ID NO: 2006895 - RNA, 19 nt, Artificial Sequence
  Description of Artificial Sequence: Synthetic oligonucleotide
ggucgaugaacaggcuccu

SEQ ID NO: 2006896 - RNA, 19 nt, Artificial Sequence
  Description of Artificial Sequence: Synthetic oligonucleotide
gcgcgaugaaggccuucuc

SEQ ID NO: 2006897 - RNA, 19 nt, Artificial Sequence
  Description of Artificial Sequence: Synthetic oligonucleotide
agugcgcgaugaaggccuu

SEQ ID NO: 2006898 - RNA, 19 nt, Artificial Sequence
  Description of Artificial Sequence: Synthetic oligonucleotide
gugcgcgaugaaggccuuc

SEQ ID NO: 2006899 - RNA, 19 nt, Artificial Sequence
  Description of Artificial Sequence: Synthetic oligonucleotide
cgguugaccgaaugcaagu

SEQ ID NO: 2006900 - RNA, 19 nt, Artificial Sequence
  Description of Artificial Sequence: Synthetic oligonucleotide
cggaagucccauugggucu

SEQ ID NO: 2006901 - RNA, 19 nt, Artificial Sequence
  Description of Artificial Sequence: Synthetic oligonucleotide
gcacggggccuggaacagc

SEQ ID NO: 2006902 - RNA, 19 nt, Artificial Sequence
  Description of Artificial Sequence: Synthetic oligonucleotide
cagacacgcccaucugauu

SEQ ID NO: 2006903 - RNA, 19 nt, Artificial Sequence
  Description of Artificial Sequence: Synthetic oligonucleotide
ccagacgcuagaccugcgu

SEQ ID NO: 2006904 - RNA, 19 nt, Artificial Sequence
  Description of Artificial Sequence: Synthetic oligonucleotide
cgaugaacaggcuccucau

SEQ ID NO: 2006905 - RNA, 19 nt, Artificial Sequence
  Description of Artificial Sequence: Synthetic oligonucleotide
gccuaccaaguugcucaga

SEQ ID NO: 2006906 - RNA, 19 nt, Artificial Sequence
  Description of Artificial Sequence: Synthetic oligonucleotide
ggcuguagaguggcguuuu

SEQ ID NO: 2006907 - RNA, 19 nt, Artificial Sequence
  Description of Artificial Sequence: Synthetic oligonucleotide
cucagacguuccagcucau

SEQ ID NO: 2006908 - RNA, 19 nt, Artificial Sequence
  Description of Artificial Sequence: Synthetic oligonucleotide
ccugccaaugggugacagu

SEQ ID NO: 2006909 - RNA, 19 nt, Artificial Sequence
  Description of Artificial Sequence: Synthetic oligonucleotide
ccagguucaccccgacgcu

SEQ ID NO: 2006910 - RNA, 19 nt, Artificial Sequence
  Description of Artificial Sequence: Synthetic oligonucleotide
cgcuucaaggacuguuggu

SEQ ID NO: 2006911 - RNA, 19 nt, Artificial Sequence
  Description of Artificial Sequence: Synthetic oligonucleotide
gggccuggaacagcuuuau

SEQ ID NO: 2006912 - RNA, 19 nt, Artificial Sequence
  Description of Artificial Sequence: Synthetic oligonucleotide
cugcgugguacugcagcuu

SEQ ID NO: 2006913 - RNA, 19 nt, Artificial Sequence
  Description of Artificial Sequence: Synthetic oligonucleotide
cgaacacccuacucacgcu

SEQ ID NO: 2006914 - RNA, 19 nt, Artificial Sequence
  Description of Artificial Sequence: Synthetic oligonucleotide
cccauugggucuggauaaa

SEQ ID NO: 2006915 - RNA, 19 nt, Artificial Sequence
  Description of Artificial Sequence: Synthetic oligonucleotide
gcgcaacgccuggauggca

SEQ ID NO: 2006916 - RNA, 19 nt, Artificial Sequence
  Description of Artificial Sequence: Synthetic oligonucleotide
gcauugcggaagucccauu

SEQ ID NO: 2006917 - RNA, 19 nt, Artificial Sequence
  Description of Artificial Sequence: Synthetic oligonucleotide
cauugccggcaggugucau

SEQ ID NO: 2006918 - RNA, 19 nt, Artificial Sequence
  Description of Artificial Sequence: Synthetic oligonucleotide
gcgcuggcacggggccugg

SEQ ID NO: 2006919 - RNA, 19 nt, Artificial Sequence
  Description of Artificial Sequence: Synthetic oligonucleotide
gcccugccaaugggugaca

SEQ ID NO: 2006920 - RNA, 19 nt, Artificial Sequence
  Description of Artificial Sequence: Synthetic oligonucleotide
gcgucuccuuguugcgcau

SEQ ID NO: 2006921 - RNA, 19 nt, Artificial Sequence
  Description of Artificial Sequence: Synthetic oligonucleotide
cgguagaaccagagugguu

SEQ ID NO: 2006922 - RNA, 19 nt, Artificial Sequence
  Description of Artificial Sequence: Synthetic oligonucleotide
ccccgacgcucagcacauc

SEQ ID NO: 2006923 - RNA, 19 nt, Artificial Sequence
  Description of Artificial Sequence: Synthetic oligonucleotide
aacagaaauagccagguga

SEQ ID NO: 2006924 - RNA, 19 nt, Artificial Sequence
  Description of Artificial Sequence: Synthetic oligonucleotide
aagaguguggcuguggugc

SEQ ID NO: 2006925 - RNA, 19 nt, Artificial Sequence
  Description of Artificial Sequence: Synthetic oligonucleotide
uuuguggccauaaaugaag

SEQ ID NO: 2006926 - RNA, 19 nt, Artificial Sequence
  Description of Artificial Sequence: Synthetic oligonucleotide
aagaccgucacccagcuga

SEQ ID NO: 2006927 - RNA, 19 nt, Artificial Sequence
  Description of Artificial Sequence: Synthetic oligonucleotide
uaauaggccauccaugcag

SEQ ID NO: 2006928 - RNA, 19 nt, Artificial Sequence
  Description of Artificial Sequence: Synthetic oligonucleotide
uguaauaggccauccaugc

SEQ ID NO: 2006929 - RNA, 19 nt, Artificial Sequence
  Description of Artificial Sequence: Synthetic oligonucleotide
auaaaugaaggguacccgg

SEQ ID NO: 2006930 - RNA, 19 nt, Artificial Sequence
  Description of Artificial Sequence: Synthetic oligonucleotide
gaaauagccaggugaaggg

SEQ ID NO: 2006931 - RNA, 19 nt, Artificial Sequence
  Description of Artificial Sequence: Synthetic oligonucleotide
augagaacugcucagagca

SEQ ID NO: 2006932 - RNA, 19 nt, Artificial Sequence
  Description of Artificial Sequence: Synthetic oligonucleotide
uuuauuguugcugcuagag

SEQ ID NO: 2006933 - RNA, 19 nt, Artificial Sequence
  Description of Artificial Sequence: Synthetic oligonucleotide
aucacaaagauggucagcg

SEQ ID NO: 2006934 - RNA, 19 nt, Artificial Sequence
  Description of Artificial Sequence: Synthetic oligonucleotide
uauuuguggccauaaauga

SEQ ID NO: 2006935 - RNA, 19 nt, Artificial Sequence
  Description of Artificial Sequence: Synthetic oligonucleotide
agagauucuugauuucagc

SEQ ID NO: 2006936 - RNA, 19 nt, Artificial Sequence
  Description of Artificial Sequence: Synthetic oligonucleotide
agaaauagccaggugaagg

SEQ ID NO: 2006937 - RNA, 19 nt, Artificial Sequence
  Description of Artificial Sequence: Synthetic oligonucleotide
agacgcuugacguaguggg

SEQ ID NO: 2006938 - RNA, 19 nt, Artificial Sequence
  Description of Artificial Sequence: Synthetic oligonucleotide
uuuuggacccagcuggccg

SEQ ID NO: 2006939 - RNA, 19 nt, Artificial Sequence
  Description of Artificial Sequence: Synthetic oligonucleotide
caaguagaugaaaaggggc

SEQ ID NO: 2006940 - RNA, 19 nt, Artificial Sequence
  Description of Artificial Sequence: Synthetic oligonucleotide
aacuuaaccugcugggcuc

SEQ ID NO: 2006941 - RNA, 19 nt, Artificial Sequence
  Description of Artificial Sequence: Synthetic oligonucleotide
gagcaaguagaugaaaagg

SEQ ID NO: 2006942 - RNA, 19 nt, Artificial Sequence
  Description of Artificial Sequence: Synthetic oligonucleotide
uguaguugggacaggacac

SEQ ID NO: 2006943 - RNA, 19 nt, Artificial Sequence
  Description of Artificial Sequence: Synthetic oligonucleotide
agagcaaguagaugaaaag

SEQ ID NO: 2006944 - RNA, 19 nt, Artificial Sequence
  Description of Artificial Sequence: Synthetic oligonucleotide
aaaggggcccagcauacuc

SEQ ID NO: 2006945 - RNA, 19 nt, Artificial Sequence
  Description of Artificial Sequence: Synthetic oligonucleotide
guauuuguggccauaaaug

SEQ ID NO: 2006946 - RNA, 19 nt, Artificial Sequence
  Description of Artificial Sequence: Synthetic oligonucleotide
ugcuagagagccacgauca

SEQ ID NO: 2006947 - RNA, 19 nt, Artificial Sequence
  Description of Artificial Sequence: Synthetic oligonucleotide
aguagaugaaaaggggccc

SEQ ID NO: 2006948 - RNA, 19 nt, Artificial Sequence
  Description of Artificial Sequence: Synthetic oligonucleotide
ugaggcuccaccuugucca

SEQ ID NO: 2006949 - RNA, 19 nt, Artificial Sequence
  Description of Artificial Sequence: Synthetic oligonucleotide
aauaggccauccaugcagc

SEQ ID NO: 2006950 - RNA, 19 nt, Artificial Sequence
  Description of Artificial Sequence: Synthetic oligonucleotide
aagggcaugguuccgugag

SEQ ID NO: 2006951 - RNA, 19 nt, Artificial Sequence
  Description of Artificial Sequence: Synthetic oligonucleotide
ugacguagugggaugagug

SEQ ID NO: 2006952 - RNA, 19 nt, Artificial Sequence
  Description of Artificial Sequence: Synthetic oligonucleotide
accucguaaguguaguugg

SEQ ID NO: 2006953 - RNA, 19 nt, Artificial Sequence
  Description of Artificial Sequence: Synthetic oligonucleotide
uucgcauccagaauuucca

SEQ ID NO: 2006954 - RNA, 19 nt, Artificial Sequence
  Description of Artificial Sequence: Synthetic oligonucleotide
aagcggugcacgaagaggg

SEQ ID NO: 2006955 - RNA, 19 nt, Artificial Sequence
  Description of Artificial Sequence: Synthetic oligonucleotide
cagaauuuccaccucguag

SEQ ID NO: 2006956 - RNA, 19 nt, Artificial Sequence
  Description of Artificial Sequence: Synthetic oligonucleotide
gauggcaaagccaauccag

SEQ ID NO: 2006957 - RNA, 19 nt, Artificial Sequence
  Description of Artificial Sequence: Synthetic oligonucleotide
ggauaugggaucuuccugg

SEQ ID NO: 2006958 - RNA, 19 nt, Artificial Sequence
  Description of Artificial Sequence: Synthetic oligonucleotide
auuuccaccucguagugcu

SEQ ID NO: 2006959 - RNA, 19 nt, Artificial Sequence
  Description of Artificial Sequence: Synthetic oligonucleotide
uaaaugaaggguacccgga

SEQ ID NO: 2006960 - RNA, 19 nt, Artificial Sequence
  Description of Artificial Sequence: Synthetic oligonucleotide
accucguagugcuucaugg

SEQ ID NO: 2006961 - RNA, 19 nt, Artificial Sequence
  Description of Artificial Sequence: Synthetic oligonucleotide
aaauagccaggugaagggg

SEQ ID NO: 2006962 - RNA, 19 nt, Artificial Sequence
  Description of Artificial Sequence: Synthetic oligonucleotide
uuucgcaagggcaugguuc

SEQ ID NO: 2006963 - RNA, 19 nt, Artificial Sequence
  Description of Artificial Sequence: Synthetic oligonucleotide
ugaaaaggggcccagcaua

SEQ ID NO: 2006964 - RNA, 19 nt, Artificial Sequence
  Description of Artificial Sequence: Synthetic oligonucleotide
guaaguguaguugggacag

SEQ ID NO: 2006965 - RNA, 19 nt, Artificial Sequence
  Description of Artificial Sequence: Synthetic oligonucleotide
uuuugaagauguuucgcaa

SEQ ID NO: 2006966 - RNA, 19 nt, Artificial Sequence
  Description of Artificial Sequence: Synthetic oligonucleotide
auccaugcagcaaagcccc

SEQ ID NO: 2006967 - RNA, 19 nt, Artificial Sequence
  Description of Artificial Sequence: Synthetic oligonucleotide
ugggugaagcccaccaagg

SEQ ID NO: 2006968 - RNA, 19 nt, Artificial Sequence
  Description of Artificial Sequence: Synthetic oligonucleotide
cauaaaugaaggguacccg

SEQ ID NO: 2006969 - RNA, 19 nt, Artificial Sequence
  Description of Artificial Sequence: Synthetic oligonucleotide
uuauuguugcugcuagaga

SEQ ID NO: 2006970 - RNA, 19 nt, Artificial Sequence
  Description of Artificial Sequence: Synthetic oligonucleotide
gacguagugggaugagugg

SEQ ID NO: 2006971 - RNA, 19 nt, Artificial Sequence
  Description of Artificial Sequence: Synthetic oligonucleotide
uguggccauaaaugaaggg

SEQ ID NO: 2006972 - RNA, 19 nt, Artificial Sequence
  Description of Artificial Sequence: Synthetic oligonucleotide
ucuuucagggacuuucccu

SEQ ID NO: 2006973 - RNA, 19 nt, Artificial Sequence
  Description of Artificial Sequence: Synthetic oligonucleotide
aagauguuucgcaagggca

SEQ ID NO: 2006974 - RNA, 19 nt, Artificial Sequence
  Description of Artificial Sequence: Synthetic oligonucleotide
uucgcaagggcaugguucc

SEQ ID NO: 2006975 - RNA, 19 nt, Artificial Sequence
  Description of Artificial Sequence: Synthetic oligonucleotide
gaugaaaaggggcccagca

SEQ ID NO: 2006976 - RNA, 19 nt, Artificial Sequence
  Description of Artificial Sequence: Synthetic oligonucleotide
aagagauucuugauuucag

SEQ ID NO: 2006977 - RNA, 19 nt, Artificial Sequence
  Description of Artificial Sequence: Synthetic oligonucleotide
aagauggucagcgccaacu

SEQ ID NO: 2006978 - RNA, 19 nt, Artificial Sequence
  Description of Artificial Sequence: Synthetic oligonucleotide
aaaugaaggguacccggaa

SEQ ID NO: 2006979 - RNA, 19 nt, Artificial Sequence
  Description of Artificial Sequence: Synthetic oligonucleotide
auuguugcugcuagagagc

SEQ ID NO: 2006980 - RNA, 19 nt, Artificial Sequence
  Description of Artificial Sequence: Synthetic oligonucleotide
aagagggucuccagcagac

SEQ ID NO: 2006981 - RNA, 19 nt, Artificial Sequence
  Description of Artificial Sequence: Synthetic oligonucleotide
ggguaagcagauuuuauug

SEQ ID NO: 2006982 - RNA, 19 nt, Artificial Sequence
  Description of Artificial Sequence: Synthetic oligonucleotide
gauuucagcaaugguggcc

SEQ ID NO: 2006983 - RNA, 19 nt, Artificial Sequence
  Description of Artificial Sequence: Synthetic oligonucleotide
caugagaacugcucagagc

SEQ ID NO: 2006984 - RNA, 19 nt, Artificial Sequence
  Description of Artificial Sequence: Synthetic oligonucleotide
ggggcauugggguagagag

SEQ ID NO: 2006985 - RNA, 19 nt, Artificial Sequence
  Description of Artificial Sequence: Synthetic oligonucleotide
uuucccuugggguccaagc

SEQ ID NO: 2006986 - RNA, 19 nt, Artificial Sequence
  Description of Artificial Sequence: Synthetic oligonucleotide
ucguaaguguaguugggac

SEQ ID NO: 2006987 - RNA, 19 nt, Artificial Sequence
  Description of Artificial Sequence: Synthetic oligonucleotide
gaagcggugcacgaagagg

SEQ ID NO: 2006988 - RNA, 19 nt, Artificial Sequence
  Description of Artificial Sequence: Synthetic oligonucleotide
acguagugggaugaguggc

SEQ ID NO: 2006989 - RNA, 19 nt, Artificial Sequence
  Description of Artificial Sequence: Synthetic oligonucleotide
gaugcaagcgaggugcacc

SEQ ID NO: 2006990 - RNA, 19 nt, Artificial Sequence
  Description of Artificial Sequence: Synthetic oligonucleotide
aggacagaggggcauuggg

SEQ ID NO: 2006991 - RNA, 19 nt, Artificial Sequence
  Description of Artificial Sequence: Synthetic oligonucleotide
uggguagucacggaacucc

SEQ ID NO: 2006992 - RNA, 19 nt, Artificial Sequence
  Description of Artificial Sequence: Synthetic oligonucleotide
uggccauaaaugaagggua

SEQ ID NO: 2006993 - RNA, 19 nt, Artificial Sequence
  Description of Artificial Sequence: Synthetic oligonucleotide
aaagauggucagcgccaac

SEQ ID NO: 2006994 - RNA, 19 nt, Artificial Sequence
  Description of Artificial Sequence: Synthetic oligonucleotide
ucauggcuccuccacagga

SEQ ID NO: 2006995 - RNA, 19 nt, Artificial Sequence
  Description of Artificial Sequence: Synthetic oligonucleotide
cccaccaaggagaagaggg

SEQ ID NO: 2006996 - RNA, 19 nt, Artificial Sequence
  Description of Artificial Sequence: Synthetic oligonucleotide
ugauggcaaagccaaucca

SEQ ID NO: 2006997 - RNA, 19 nt, Artificial Sequence
  Description of Artificial Sequence: Synthetic oligonucleotide
ugggauaugggaucuuccu

SEQ ID NO: 2006998 - RNA, 19 nt, Artificial Sequence
  Description of Artificial Sequence: Synthetic oligonucleotide
ucgguugccgcccugccgc

SEQ ID NO: 2006999 - RNA, 19 nt, Artificial Sequence
  Description of Artificial Sequence: Synthetic oligonucleotide
gauguaauaggccauccau

SEQ ID NO: 2007000 - RNA, 19 nt, Artificial Sequence
  Description of Artificial Sequence: Synthetic oligonucleotide
agucaggaagaccgucacc

SEQ ID NO: 2007001 - RNA, 19 nt, Artificial Sequence
  Description of Artificial Sequence: Synthetic oligonucleotide
aagaagaguguggcugugg

SEQ ID NO: 2007002 - RNA, 19 nt, Artificial Sequence
  Description of Artificial Sequence: Synthetic oligonucleotide
ucccgaagagccaugugga

SEQ ID NO: 2007003 - RNA, 19 nt, Artificial Sequence
  Description of Artificial Sequence: Synthetic oligonucleotide
uugggguagagagugcucc

SEQ ID NO: 2007004 - RNA, 19 nt, Artificial Sequence
  Description of Artificial Sequence: Synthetic oligonucleotide
caagcggagggacuggcgg

SEQ ID NO: 2007005 - RNA, 19 nt, Artificial Sequence
  Description of Artificial Sequence: Synthetic oligonucleotide
ugcgucaugauggcaaagc

SEQ ID NO: 2007006 - RNA, 19 nt, Artificial Sequence
  Description of Artificial Sequence: Synthetic oligonucleotide
ucagggacuuucccuuggg

SEQ ID NO: 2007007 - RNA, 19 nt, Artificial Sequence
  Description of Artificial Sequence: Synthetic oligonucleotide
accgucacccagcugaucu

SEQ ID NO: 2007008 - RNA, 19 nt, Artificial Sequence
  Description of Artificial Sequence: Synthetic oligonucleotide
guguaguugggacaggaca

SEQ ID NO: 2007009 - RNA, 19 nt, Artificial Sequence
  Description of Artificial Sequence: Synthetic oligonucleotide
aauagccaggugaaggggu

SEQ ID NO: 2007010 - RNA, 19 nt, Artificial Sequence
  Description of Artificial Sequence: Synthetic oligonucleotide
acaggaagcuucugcaaca

SEQ ID NO: 2007011 - RNA, 19 nt, Artificial Sequence
  Description of Artificial Sequence: Synthetic oligonucleotide
caaagccaauccaggaccc

SEQ ID NO: 2007012 - RNA, 19 nt, Artificial Sequence
  Description of Artificial Sequence: Synthetic oligonucleotide
gggugguugauguaauagg

SEQ ID NO: 2007013 - RNA, 19 nt, Artificial Sequence
  Description of Artificial Sequence: Synthetic oligonucleotide
gcaaagccaauccaggacc

SEQ ID NO: 2007014 - RNA, 19 nt, Artificial Sequence
  Description of Artificial Sequence: Synthetic oligonucleotide
caggaaagggaugaugggc

SEQ ID NO: 2007015 - RNA, 19 nt, Artificial Sequence
  Description of Artificial Sequence: Synthetic oligonucleotide
uuuuggguaagcagauuuu

SEQ ID NO: 2007016 - RNA, 19 nt, Artificial Sequence
  Description of Artificial Sequence: Synthetic oligonucleotide
agaguguggcuguggugcc

SEQ ID NO: 2007017 - RNA, 19 nt, Artificial Sequence
  Description of Artificial Sequence: Synthetic oligonucleotide
ugcgggugcgucuugguga

SEQ ID NO: 2007018 - RNA, 19 nt, Artificial Sequence
  Description of Artificial Sequence: Synthetic oligonucleotide
uggguaagcagauuuuauu

SEQ ID NO: 2007019 - RNA, 19 nt, Artificial Sequence
  Description of Artificial Sequence: Synthetic oligonucleotide
agggacuuucccuuggggu

SEQ ID NO: 2007020 - RNA, 19 nt, Artificial Sequence
  Description of Artificial Sequence: Synthetic oligonucleotide
gcaaguagaugaaaagggg

SEQ ID NO: 2007021 - RNA, 19 nt, Artificial Sequence
  Description of Artificial Sequence: Synthetic oligonucleotide
agugcuccuggcugagccc

SEQ ID NO: 2007022 - RNA, 19 nt, Artificial Sequence
  Description of Artificial Sequence: Synthetic oligonucleotide
ugagaacugcucagagcag

SEQ ID NO: 2007023 - RNA, 19 nt, Artificial Sequence
  Description of Artificial Sequence: Synthetic oligonucleotide
uggccgaaggucccgaaga

SEQ ID NO: 2007024 - RNA, 19 nt, Artificial Sequence
  Description of Artificial Sequence: Synthetic oligonucleotide
uuggguaagcagauuuuau

SEQ ID NO: 2007025 - RNA, 19 nt, Artificial Sequence
  Description of Artificial Sequence: Synthetic oligonucleotide
aaguguaguugggacagga

SEQ ID NO: 2007026 - RNA, 19 nt, Artificial Sequence
  Description of Artificial Sequence: Synthetic oligonucleotide
uugauguaauaggccaucc

SEQ ID NO: 2007027 - RNA, 19 nt, Artificial Sequence
  Description of Artificial Sequence: Synthetic oligonucleotide
guagucacggaacuccuuc

SEQ ID NO: 2007028 - RNA, 19 nt, Artificial Sequence
  Description of Artificial Sequence: Synthetic oligonucleotide
gcagaugcaagcgaggugc

SEQ ID NO: 2007029 - RNA, 19 nt, Artificial Sequence
  Description of Artificial Sequence: Synthetic oligonucleotide
agaagcggugcacgaagag

SEQ ID NO: 2007030 - RNA, 19 nt, Artificial Sequence
  Description of Artificial Sequence: Synthetic oligonucleotide
aggaagaccgucacccagc

SEQ ID NO: 2007031 - RNA, 19 nt, Artificial Sequence
  Description of Artificial Sequence: Synthetic oligonucleotide
auggcaaagccaauccagg

SEQ ID NO: 2007032 - RNA, 19 nt, Artificial Sequence
  Description of Artificial Sequence: Synthetic oligonucleotide
agauuuuauuguugcugcu

SEQ ID NO: 2007033 - RNA, 19 nt, Artificial Sequence
  Description of Artificial Sequence: Synthetic oligonucleotide
gccaacuuaaccugcuggg

SEQ ID NO: 2007034 - RNA, 19 nt, Artificial Sequence
  Description of Artificial Sequence: Synthetic oligonucleotide
guagcugcggugcuugccc

SEQ ID NO: 2007035 - RNA, 19 nt, Artificial Sequence
  Description of Artificial Sequence: Synthetic oligonucleotide
guugcugcuagagagccac

SEQ ID NO: 2007036 - RNA, 19 nt, Artificial Sequence
  Description of Artificial Sequence: Synthetic oligonucleotide
ugagagaagcggugcacga

SEQ ID NO: 2007037 - RNA, 19 nt, Artificial Sequence
  Description of Artificial Sequence: Synthetic oligonucleotide
uuuggguaagcagauuuua

SEQ ID NO: 2007038 - RNA, 19 nt, Artificial Sequence
  Description of Artificial Sequence: Synthetic oligonucleotide
cugggugaagcccaccaag

SEQ ID NO: 2007039 - RNA, 19 nt, Artificial Sequence
  Description of Artificial Sequence: Synthetic oligonucleotide
acuuaaccugcugggcucc

SEQ ID NO: 2007040 - RNA, 19 nt, Artificial Sequence
  Description of Artificial Sequence: Synthetic oligonucleotide
aaggguacccggaaguaga

SEQ ID NO: 2007041 - RNA, 19 nt, Artificial Sequence
  Description of Artificial Sequence: Synthetic oligonucleotide
gaaggguacccggaaguag

SEQ ID NO: 2007042 - RNA, 19 nt, Artificial Sequence
  Description of Artificial Sequence: Synthetic oligonucleotide
uggacgugaagucguauuu

SEQ ID NO: 2007043 - RNA, 19 nt, Artificial Sequence
  Description of Artificial Sequence: Synthetic oligonucleotide
gcagauuuuauuguugcug

SEQ ID NO: 2007044 - RNA, 19 nt, Artificial Sequence
  Description of Artificial Sequence: Synthetic oligonucleotide
cagauggucaucuggguga

SEQ ID NO: 2007045 - RNA, 19 nt, Artificial Sequence
  Description of Artificial Sequence: Synthetic oligonucleotide
uuuggacccagcuggccga

SEQ ID NO: 2007046 - RNA, 19 nt, Artificial Sequence
  Description of Artificial Sequence: Synthetic oligonucleotide
ucguagugcuucauggcuc

SEQ ID NO: 2007047 - RNA, 19 nt, Artificial Sequence
  Description of Artificial Sequence: Synthetic oligonucleotide
gaagaguguggcuguggug

SEQ ID NO: 2007048 - RNA, 19 nt, Artificial Sequence
  Description of Artificial Sequence: Synthetic oligonucleotide
uccuccacaggauggcgcc

SEQ ID NO: 2007049 - RNA, 19 nt, Artificial Sequence
  Description of Artificial Sequence: Synthetic oligonucleotide
uggucaucugggugaagcc

SEQ ID NO: 2007050 - RNA, 19 nt, Artificial Sequence
  Description of Artificial Sequence: Synthetic oligonucleotide
cuggcagaucacaaagaug

SEQ ID NO: 2007051 - RNA, 19 nt, Artificial Sequence
  Description of Artificial Sequence: Synthetic oligonucleotide
gugagagaagcggugcacg

SEQ ID NO: 2007052 - RNA, 19 nt, Artificial Sequence
  Description of Artificial Sequence: Synthetic oligonucleotide
acagaaauagccaggugaa

SEQ ID NO: 2007053 - RNA, 19 nt, Artificial Sequence
  Description of Artificial Sequence: Synthetic oligonucleotide
aggaaagggaugaugggca

SEQ ID NO: 2007054 - RNA, 19 nt, Artificial Sequence
  Description of Artificial Sequence: Synthetic oligonucleotide
gaaaaggggcccagcauac

SEQ ID NO: 2007055 - RNA, 19 nt, Artificial Sequence
  Description of Artificial Sequence: Synthetic oligonucleotide
agcccaugagaacugcuca

SEQ ID NO: 2007056 - RNA, 19 nt, Artificial Sequence
  Description of Artificial Sequence: Synthetic oligonucleotide
gaucacaaagauggucagc

SEQ ID NO: 2007057 - RNA, 19 nt, Artificial Sequence
  Description of Artificial Sequence: Synthetic oligonucleotide
ccgaaggucccgaagagcc

SEQ ID NO: 2007058 - RNA, 19 nt, Artificial Sequence
  Description of Artificial Sequence: Synthetic oligonucleotide
gucagcgccaacuuaaccu

SEQ ID NO: 2007059 - RNA, 19 nt, Artificial Sequence
  Description of Artificial Sequence: Synthetic oligonucleotide
agcgaggugcaccacugug

SEQ ID NO: 2007060 - RNA, 19 nt, Artificial Sequence
  Description of Artificial Sequence: Synthetic oligonucleotide
aguguaguugggacaggac

SEQ ID NO: 2007061 - RNA, 19 nt, Artificial Sequence
  Description of Artificial Sequence: Synthetic oligonucleotide
cacgaucaccccaggacag

SEQ ID NO: 2007062 - RNA, 19 nt, Artificial Sequence
  Description of Artificial Sequence: Synthetic oligonucleotide
ugcacgaagagggucucca

SEQ ID NO: 2007063 - RNA, 19 nt, Artificial Sequence
  Description of Artificial Sequence: Synthetic oligonucleotide
agagagugcuccuggcuga

SEQ ID NO: 2007064 - RNA, 19 nt, Artificial Sequence
  Description of Artificial Sequence: Synthetic oligonucleotide
guagaagagcaaguagaug

SEQ ID NO: 2007065 - RNA, 19 nt, Artificial Sequence
  Description of Artificial Sequence: Synthetic oligonucleotide
caagcgaggugcaccacug

SEQ ID NO: 2007066 - RNA, 19 nt, Artificial Sequence
  Description of Artificial Sequence: Synthetic oligonucleotide
gauguuucgcaagggcaug

SEQ ID NO: 2007067 - RNA, 19 nt, Artificial Sequence
  Description of Artificial Sequence: Synthetic oligonucleotide
agugggaugaguggcagau

SEQ ID NO: 2007068 - RNA, 19 nt, Artificial Sequence
  Description of Artificial Sequence: Synthetic oligonucleotide
cugcuagagagccacgauc

SEQ ID NO: 2007069 - RNA, 19 nt, Artificial Sequence
  Description of Artificial Sequence: Synthetic oligonucleotide
ccauaaaugaaggguaccc

SEQ ID NO: 2007070 - RNA, 19 nt, Artificial Sequence
  Description of Artificial Sequence: Synthetic oligonucleotide
uccuucagguagcugcggu

SEQ ID NO: 2007071 - RNA, 19 nt, Artificial Sequence
  Description of Artificial Sequence: Synthetic oligonucleotide
uccaggaagcacagcuucu

SEQ ID NO: 2007072 - RNA, 19 nt, Artificial Sequence
  Description of Artificial Sequence: Synthetic oligonucleotide
uagucacggaacuccuuca

SEQ ID NO: 2007073 - RNA, 19 nt, Artificial Sequence
  Description of Artificial Sequence: Synthetic oligonucleotide
caccaaggagaagagggcc

SEQ ID NO: 2007074 - RNA, 19 nt, Artificial Sequence
  Description of Artificial Sequence: Synthetic oligonucleotide
cacacugcgucaugauggc

SEQ ID NO: 2007075 - RNA, 19 nt, Artificial Sequence
  Description of Artificial Sequence: Synthetic oligonucleotide
aagccaauccaggacccca

SEQ ID NO: 2007076 - RNA, 19 nt, Artificial Sequence
  Description of Artificial Sequence: Synthetic oligonucleotide
agagccacgaucaccccag

SEQ ID NO: 2007077 - RNA, 19 nt, Artificial Sequence
  Description of Artificial Sequence: Synthetic oligonucleotide
uccgugagagaagcggugc

SEQ ID NO: 2007078 - RNA, 19 nt, Artificial Sequence
  Description of Artificial Sequence: Synthetic oligonucleotide
uggugaagagauucuugau

SEQ ID NO: 2007079 - RNA, 19 nt, Artificial Sequence
  Description of Artificial Sequence: Synthetic oligonucleotide
augcaagcgaggugcacca

SEQ ID NO: 2007080 - RNA, 19 nt, Artificial Sequence
  Description of Artificial Sequence: Synthetic oligonucleotide
gagaaguugccaagcuggc

SEQ ID NO: 2007081 - RNA, 19 nt, Artificial Sequence
  Description of Artificial Sequence: Synthetic oligonucleotide
auguuucgcaagggcaugg

SEQ ID NO: 2007082 - RNA, 19 nt, Artificial Sequence
  Description of Artificial Sequence: Synthetic oligonucleotide
agauguuucgcaagggcau

SEQ ID NO: 2007083 - RNA, 19 nt, Artificial Sequence
  Description of Artificial Sequence: Synthetic oligonucleotide
ucugggugaagcccaccaa

SEQ ID NO: 2007084 - RNA, 19 nt, Artificial Sequence
  Description of Artificial Sequence: Synthetic oligonucleotide
uggaacacacugcgucaug

SEQ ID NO: 2007085 - RNA, 19 nt, Artificial Sequence
  Description of Artificial Sequence: Synthetic oligonucleotide
caauccaggaccccaccuc

SEQ ID NO: 2007086 - RNA, 19 nt, Artificial Sequence
  Description of Artificial Sequence: Synthetic oligonucleotide
gacgugaagucguauuugu

SEQ ID NO: 2007087 - RNA, 19 nt, Artificial Sequence
  Description of Artificial Sequence: Synthetic oligonucleotide
gaaagggaugaugggcaug

SEQ ID NO: 2007088 - RNA, 19 nt, Artificial Sequence
  Description of Artificial Sequence: Synthetic oligonucleotide
uacccggaaguagaagagc

SEQ ID NO: 2007089 - RNA, 19 nt, Artificial Sequence
  Description of Artificial Sequence: Synthetic oligonucleotide
guagagagggugguugaug

SEQ ID NO: 2007090 - RNA, 19 nt, Artificial Sequence
  Description of Artificial Sequence: Synthetic oligonucleotide
caggaccccaccucguaag

SEQ ID NO: 2007091 - RNA, 19 nt, Artificial Sequence
  Description of Artificial Sequence: Synthetic oligonucleotide
uucucccucgucuucgcau

SEQ ID NO: 2007092 - RNA, 19 nt, Artificial Sequence
  Description of Artificial Sequence: Synthetic oligonucleotide
ugcugcuagagagccacga

SEQ ID NO: 2007093 - RNA, 19 nt, Artificial Sequence
  Description of Artificial Sequence: Synthetic oligonucleotide
ugguuccgugagagaagcg

SEQ ID NO: 2007094 - RNA, 19 nt, Artificial Sequence
  Description of Artificial Sequence: Synthetic oligonucleotide
gggauaugggaucuuccug

SEQ ID NO: 2007095 - RNA, 19 nt, Artificial Sequence
  Description of Artificial Sequence: Synthetic oligonucleotide
guaguugggacaggacacc

SEQ ID NO: 2007096 - RNA, 19 nt, Artificial Sequence
  Description of Artificial Sequence: Synthetic oligonucleotide
guaauaggccauccaugca

SEQ ID NO: 2007097 - RNA, 19 nt, Artificial Sequence
  Description of Artificial Sequence: Synthetic oligonucleotide
aggguaccacugcgggugc

SEQ ID NO: 2007098 - RNA, 19 nt, Artificial Sequence
  Description of Artificial Sequence: Synthetic oligonucleotide
caggacaccaacagaaaua

SEQ ID NO: 2007099 - RNA, 19 nt, Artificial Sequence
  Description of Artificial Sequence: Synthetic oligonucleotide
ucgcauccagaauuuccac

SEQ ID NO: 2007100 - RNA, 19 nt, Artificial Sequence
  Description of Artificial Sequence: Synthetic oligonucleotide
guagugggaugaguggcag

SEQ ID NO: 2007101 - RNA, 19 nt, Artificial Sequence
  Description of Artificial Sequence: Synthetic oligonucleotide
cagacgcuugacguagugg

SEQ ID NO: 2007102 - RNA, 19 nt, Artificial Sequence
  Description of Artificial Sequence: Synthetic oligonucleotide
uugacguagugggaugagu

SEQ ID NO: 2007103 - RNA, 19 nt, Artificial Sequence
  Description of Artificial Sequence: Synthetic oligonucleotide
cagggacuuucccuugggg

SEQ ID NO: 2007104 - RNA, 19 nt, Artificial Sequence
  Description of Artificial Sequence: Synthetic oligonucleotide
gaucaccccaggacagagg

SEQ ID NO: 2007105 - RNA, 19 nt, Artificial Sequence
  Description of Artificial Sequence: Synthetic oligonucleotide
guggccauaaaugaagggu

SEQ ID NO: 2007106 - RNA, 19 nt, Artificial Sequence
  Description of Artificial Sequence: Synthetic oligonucleotide
aagggguucuuggugggau

SEQ ID NO: 2007107 - RNA, 19 nt, Artificial Sequence
  Description of Artificial Sequence: Synthetic oligonucleotide
uucagguagcugcggugcu

SEQ ID NO: 2007108 - RNA, 19 nt, Artificial Sequence
  Description of Artificial Sequence: Synthetic oligonucleotide
ucgucuucgcauccagaau

SEQ ID NO: 2007109 - RNA, 19 nt, Artificial Sequence
  Description of Artificial Sequence: Synthetic oligonucleotide
ugccgacuggacgugaagu

SEQ ID NO: 2007110 - RNA, 19 nt, Artificial Sequence
  Description of Artificial Sequence: Synthetic oligonucleotide
ggcccagauggucaucugg

SEQ ID NO: 2007111 - RNA, 19 nt, Artificial Sequence
  Description of Artificial Sequence: Synthetic oligonucleotide
cagcagacgcuugacguag

SEQ ID NO: 2007112 - RNA, 19 nt, Artificial Sequence
  Description of Artificial Sequence: Synthetic oligonucleotide
auugggguagagagugcuc

SEQ ID NO: 2007113 - RNA, 19 nt, Artificial Sequence
  Description of Artificial Sequence: Synthetic oligonucleotide
gaagaagaguguggcugug

SEQ ID NO: 2007114 - RNA, 19 nt, Artificial Sequence
  Description of Artificial Sequence: Synthetic oligonucleotide
auggucagcgccaacuuaa

SEQ ID NO: 2007115 - RNA, 19 nt, Artificial Sequence
  Description of Artificial Sequence: Synthetic oligonucleotide
cacugcgucaugauggcaa

SEQ ID NO: 2007116 - RNA, 19 nt, Artificial Sequence
  Description of Artificial Sequence: Synthetic oligonucleotide
acaggauggcgccgcuccg

SEQ ID NO: 2007117 - RNA, 19 nt, Artificial Sequence
  Description of Artificial Sequence: Synthetic oligonucleotide
agaugcaagcgaggugcac

SEQ ID NO: 2007118 - RNA, 19 nt, Artificial Sequence
  Description of Artificial Sequence: Synthetic oligonucleotide
gguaagcagauuuuauugu

SEQ ID NO: 2007119 - RNA, 19 nt, Artificial Sequence
  Description of Artificial Sequence: Synthetic oligonucleotide
ucaucugggugaagcccac

SEQ ID NO: 2007120 - RNA, 19 nt, Artificial Sequence
  Description of Artificial Sequence: Synthetic oligonucleotide
acccggaaguagaagagca

SEQ ID NO: 2007121 - RNA, 19 nt, Artificial Sequence
  Description of Artificial Sequence: Synthetic oligonucleotide
aagucguauuuguggccau

SEQ ID NO: 2007122 - RNA, 19 nt, Artificial Sequence
  Description of Artificial Sequence: Synthetic oligonucleotide
guaagcagauuuuauuguu

SEQ ID NO: 2007123 - RNA, 19 nt, Artificial Sequence
  Description of Artificial Sequence: Synthetic oligonucleotide
aagggaugaugggcaugcg

SEQ ID NO: 2007124 - RNA, 19 nt, Artificial Sequence
  Description of Artificial Sequence: Synthetic oligonucleotide
gccacgaucaccccaggac

SEQ ID NO: 2007125 - RNA, 19 nt, Artificial Sequence
  Description of Artificial Sequence: Synthetic oligonucleotide
guugccgcccugccgcacg

SEQ ID NO: 2007126 - RNA, 19 nt, Artificial Sequence
  Description of Artificial Sequence: Synthetic oligonucleotide
agcucgguugccgcccugc

SEQ ID NO: 2007127 - RNA, 19 nt, Artificial Sequence
  Description of Artificial Sequence: Synthetic oligonucleotide
cagaaauagccaggugaag

SEQ ID NO: 2007128 - RNA, 19 nt, Artificial Sequence
  Description of Artificial Sequence: Synthetic oligonucleotide
uugcugcuagagagccacg

SEQ ID NO: 2007129 - RNA, 19 nt, Artificial Sequence
  Description of Artificial Sequence: Synthetic oligonucleotide
uccaccucguagugcuuca

SEQ ID NO: 2007130 - RNA, 19 nt, Artificial Sequence
  Description of Artificial Sequence: Synthetic oligonucleotide
aaaaggggcccagcauacu

SEQ ID NO: 2007131 - RNA, 19 nt, Artificial Sequence
  Description of Artificial Sequence: Synthetic oligonucleotide
uggucagcgccaacuuaac

SEQ ID NO: 2007132 - RNA, 19 nt, Artificial Sequence
  Description of Artificial Sequence: Synthetic oligonucleotide
gauaugggaucuuccuggu

SEQ ID NO: 2007133 - RNA, 19 nt, Artificial Sequence
  Description of Artificial Sequence: Synthetic oligonucleotide
ugugccgacuggacgugaa

SEQ ID NO: 2007134 - RNA, 19 nt, Artificial Sequence
  Description of Artificial Sequence: Synthetic oligonucleotide
aagcgaggugcaccacugu

SEQ ID NO: 2007135 - RNA, 19 nt, Artificial Sequence
  Description of Artificial Sequence: Synthetic oligonucleotide
gagcccaugagaacugcuc

SEQ ID NO: 2007136 - RNA, 19 nt, Artificial Sequence
  Description of Artificial Sequence: Synthetic oligonucleotide
gagccauguggauggagaa

SEQ ID NO: 2007137 - RNA, 19 nt, Artificial Sequence
  Description of Artificial Sequence: Synthetic oligonucleotide
gucaucugggugaagccca

SEQ ID NO: 2007138 - RNA, 19 nt, Artificial Sequence
  Description of Artificial Sequence: Synthetic oligonucleotide
uaaccugcugggcuccgua

SEQ ID NO: 2007139 - RNA, 19 nt, Artificial Sequence
  Description of Artificial Sequence: Synthetic oligonucleotide
gauggucagcgccaacuua

SEQ ID NO: 2007140 - RNA, 19 nt, Artificial Sequence
  Description of Artificial Sequence: Synthetic oligonucleotide
caugcgcagggguggguag

SEQ ID NO: 2007141 - RNA, 19 nt, Artificial Sequence
  Description of Artificial Sequence: Synthetic oligonucleotide
acugcgucaugauggcaaa

SEQ ID NO: 2007142 - RNA, 19 nt, Artificial Sequence
  Description of Artificial Sequence: Synthetic oligonucleotide
gcgucaugauggcaaagcc

SEQ ID NO: 2007143 - RNA, 19 nt, Artificial Sequence
  Description of Artificial Sequence: Synthetic oligonucleotide
cucgguugccgcccugccg

SEQ ID NO: 2007144 - RNA, 19 nt, Artificial Sequence
  Description of Artificial Sequence: Synthetic oligonucleotide
gagaagagggccacuggaa

SEQ ID NO: 2007145 - RNA, 19 nt, Artificial Sequence
  Description of Artificial Sequence: Synthetic oligonucleotide
ggacccagcuggccgaagg

SEQ ID NO: 2007146 - RNA, 19 nt, Artificial Sequence
  Description of Artificial Sequence: Synthetic oligonucleotide
uguagagagggugguugau

SEQ ID NO: 2007147 - RNA, 19 nt, Artificial Sequence
  Description of Artificial Sequence: Synthetic oligonucleotide
uguuucgcaagggcauggu

SEQ ID NO: 2007148 - RNA, 19 nt, Artificial Sequence
  Description of Artificial Sequence: Synthetic oligonucleotide
ugcggugcuugcccuuggc

SEQ ID NO: 2007149 - RNA, 19 nt, Artificial Sequence
  Description of Artificial Sequence: Synthetic oligonucleotide
guuuuggacccagcuggcc

SEQ ID NO: 2007150 - RNA, 19 nt, Artificial Sequence
  Description of Artificial Sequence: Synthetic oligonucleotide
gaggugcaccacugugugc

SEQ ID NO: 2007151 - RNA, 19 nt, Artificial Sequence
  Description of Artificial Sequence: Synthetic oligonucleotide
gcccagauggucaucuggg

SEQ ID NO: 2007152 - RNA, 19 nt, Artificial Sequence
  Description of Artificial Sequence: Synthetic oligonucleotide
caacuuaaccugcugggcu

SEQ ID NO: 2007153 - RNA, 19 nt, Artificial Sequence
  Description of Artificial Sequence: Synthetic oligonucleotide
uccugguuuuggacccagc

SEQ ID NO: 2007154 - RNA, 19 nt, Artificial Sequence
  Description of Artificial Sequence: Synthetic oligonucleotide
agagggucuccagcagacg

SEQ ID NO: 2007155 - RNA, 19 nt, Artificial Sequence
  Description of Artificial Sequence: Synthetic oligonucleotide
cuggccgaaggucccgaag

SEQ ID NO: 2007156 - RNA, 19 nt, Artificial Sequence
  Description of Artificial Sequence: Synthetic oligonucleotide
ugugugccgacuggacgug

SEQ ID NO: 2007157 - RNA, 19 nt, Artificial Sequence
  Description of Artificial Sequence: Synthetic oligonucleotide
ggugcgucuuggugaagag

SEQ ID NO: 2007158 - RNA, 19 nt, Artificial Sequence
  Description of Artificial Sequence: Synthetic oligonucleotide
cucguagugcuucauggcu

SEQ ID NO: 2007159 - RNA, 19 nt, Artificial Sequence
  Description of Artificial Sequence: Synthetic oligonucleotide
cagcgccaacuuaaccugc

SEQ ID NO: 2007160 - RNA, 19 nt, Artificial Sequence
  Description of Artificial Sequence: Synthetic oligonucleotide
ccggaaguagaagagcaag

SEQ ID NO: 2007161 - RNA, 19 nt, Artificial Sequence
  Description of Artificial Sequence: Synthetic oligonucleotide
ccagauggucaucugggug

SEQ ID NO: 2007162 - RNA, 19 nt, Artificial Sequence
  Description of Artificial Sequence: Synthetic oligonucleotide
cucguaaguguaguuggga

SEQ ID NO: 2007163 - RNA, 19 nt, Artificial Sequence
  Description of Artificial Sequence: Synthetic oligonucleotide
caccucguagugcuucaug

SEQ ID NO: 2007164 - RNA, 19 nt, Artificial Sequence
  Description of Artificial Sequence: Synthetic oligonucleotide
acgugaagucguauuugug

SEQ ID NO: 2007165 - RNA, 19 nt, Artificial Sequence
  Description of Artificial Sequence: Synthetic oligonucleotide
cucagucaggaagaccguc

SEQ ID NO: 2007166 - RNA, 19 nt, Artificial Sequence
  Description of Artificial Sequence: Synthetic oligonucleotide
ggucagcgccaacuuaacc

SEQ ID NO: 2007167 - RNA, 19 nt, Artificial Sequence
  Description of Artificial Sequence: Synthetic oligonucleotide
acagaggggcauuggggua

SEQ ID NO: 2007168 - RNA, 19 nt, Artificial Sequence
  Description of Artificial Sequence: Synthetic oligonucleotide
ggacgugaagucguauuug

SEQ ID NO: 2007169 - RNA, 19 nt, Artificial Sequence
  Description of Artificial Sequence: Synthetic oligonucleotide
ccucguagugcuucauggc

SEQ ID NO: 2007170 - RNA, 19 nt, Artificial Sequence
  Description of Artificial Sequence: Synthetic oligonucleotide
gccauaaaugaaggguacc

SEQ ID NO: 2007171 - RNA, 19 nt, Artificial Sequence
  Description of Artificial Sequence: Synthetic oligonucleotide
gaagaccgucacccagcug

SEQ ID NO: 2007172 - RNA, 19 nt, Artificial Sequence
  Description of Artificial Sequence: Synthetic oligonucleotide
acgcuugacguagugggau

SEQ ID NO: 2007173 - RNA, 19 nt, Artificial Sequence
  Description of Artificial Sequence: Synthetic oligonucleotide
ccaacuuaaccugcugggc

SEQ ID NO: 2007174 - RNA, 19 nt, Artificial Sequence
  Description of Artificial Sequence: Synthetic oligonucleotide
ggcagaugcaagcgaggug

SEQ ID NO: 2007175 - RNA, 19 nt, Artificial Sequence
  Description of Artificial Sequence: Synthetic oligonucleotide
ggacuuucccuuggggucc

SEQ ID NO: 2007176 - RNA, 19 nt, Artificial Sequence
  Description of Artificial Sequence: Synthetic oligonucleotide
cccagcauacucagucagg

SEQ ID NO: 2007177 - RNA, 19 nt, Artificial Sequence
  Description of Artificial Sequence: Synthetic oligonucleotide
uagugcuucauggcuccuc

SEQ ID NO: 2007178 - RNA, 19 nt, Artificial Sequence
  Description of Artificial Sequence: Synthetic oligonucleotide
cguagugcuucauggcucc

SEQ ID NO: 2007179 - RNA, 19 nt, Artificial Sequence
  Description of Artificial Sequence: Synthetic oligonucleotide
cuuaaccugcugggcuccg

SEQ ID NO: 2007180 - RNA, 19 nt, Artificial Sequence
  Description of Artificial Sequence: Synthetic oligonucleotide
caggacagaggggcauugg

SEQ ID NO: 2007181 - RNA, 19 nt, Artificial Sequence
  Description of Artificial Sequence: Synthetic oligonucleotide
ggugcuugcccuuggccca

SEQ ID NO: 2007182 - RNA, 19 nt, Artificial Sequence
  Description of Artificial Sequence: Synthetic oligonucleotide
gguccaagcggagggacug

SEQ ID NO: 2007183 - RNA, 19 nt, Artificial Sequence
  Description of Artificial Sequence: Synthetic oligonucleotide
agccacgaucaccccagga

SEQ ID NO: 2007184 - RNA, 19 nt, Artificial Sequence
  Description of Artificial Sequence: Synthetic oligonucleotide
ggaacacacugcgucauga

SEQ ID NO: 2007185 - RNA, 19 nt, Artificial Sequence
  Description of Artificial Sequence: Synthetic oligonucleotide
gucguauuuguggccauaa

SEQ ID NO: 2007186 - RNA, 19 nt, Artificial Sequence
  Description of Artificial Sequence: Synthetic oligonucleotide
cuccacaggauggcgccgc

SEQ ID NO: 2007187 - RNA, 19 nt, Artificial Sequence
  Description of Artificial Sequence: Synthetic oligonucleotide
gguggccugaggcuccacc

SEQ ID NO: 2007188 - RNA, 19 nt, Artificial Sequence
  Description of Artificial Sequence: Synthetic oligonucleotide
ggccauaaaugaaggguac

SEQ ID NO: 2007189 - RNA, 19 nt, Artificial Sequence
  Description of Artificial Sequence: Synthetic oligonucleotide
gugccgacuggacgugaag

SEQ ID NO: 2007190 - RNA, 19 nt, Artificial Sequence
  Description of Artificial Sequence: Synthetic oligonucleotide
cgcauccagaauuuccacc

SEQ ID NO: 2007191 - RNA, 19 nt, Artificial Sequence
  Description of Artificial Sequence: Synthetic oligonucleotide
ccgacuggacgugaagucg

SEQ ID NO: 2007192 - RNA, 19 nt, Artificial Sequence
  Description of Artificial Sequence: Synthetic oligonucleotide
ggaugaguggcagaugcaa

SEQ ID NO: 2007193 - RNA, 19 nt, Artificial Sequence
  Description of Artificial Sequence: Synthetic oligonucleotide
cugcgggugcgucuuggug

SEQ ID NO: 2007194 - RNA, 19 nt, Artificial Sequence
  Description of Artificial Sequence: Synthetic oligonucleotide
uuaaccugcugggcuccgu

SEQ ID NO: 2007195 - RNA, 19 nt, Artificial Sequence
  Description of Artificial Sequence: Synthetic oligonucleotide
gagccacgaucaccccagg

SEQ ID NO: 2007196 - RNA, 19 nt, Artificial Sequence
  Description of Artificial Sequence: Synthetic oligonucleotide
aggggcauugggguagaga

SEQ ID NO: 2007197 - RNA, 19 nt, Artificial Sequence
  Description of Artificial Sequence: Synthetic oligonucleotide
gacgcuugacguaguggga

SEQ ID NO: 2007198 - RNA, 19 nt, Artificial Sequence
  Description of Artificial Sequence: Synthetic oligonucleotide
gcugcagcucgguugccgc

SEQ ID NO: 2007199 - RNA, 19 nt, Artificial Sequence
  Description of Artificial Sequence: Synthetic oligonucleotide
ggaagaagaguguggcugu

SEQ ID NO: 2007200 - RNA, 19 nt, Artificial Sequence
  Description of Artificial Sequence: Synthetic oligonucleotide
ucgcaagggcaugguuccg

SEQ ID NO: 2007201 - RNA, 19 nt, Artificial Sequence
  Description of Artificial Sequence: Synthetic oligonucleotide
ggugggauaugggaucuuc

SEQ ID NO: 2007202 - RNA, 19 nt, Artificial Sequence
  Description of Artificial Sequence: Synthetic oligonucleotide
agccaggugaagggguucu

SEQ ID NO: 2007203 - RNA, 19 nt, Artificial Sequence
  Description of Artificial Sequence: Synthetic oligonucleotide
gagggugguugauguaaua

SEQ ID NO: 2007204 - RNA, 19 nt, Artificial Sequence
  Description of Artificial Sequence: Synthetic oligonucleotide
ggugcaccacugugugccg

SEQ ID NO: 2007205 - RNA, 19 nt, Artificial Sequence
  Description of Artificial Sequence: Synthetic oligonucleotide
gggacaggacaccaacaga

SEQ ID NO: 2007206 - RNA, 19 nt, Artificial Sequence
  Description of Artificial Sequence: Synthetic oligonucleotide
gaacacacugcgucaugau

SEQ ID NO: 2007207 - RNA, 19 nt, Artificial Sequence
  Description of Artificial Sequence: Synthetic oligonucleotide
gccgcuccgcugcagcucg

SEQ ID NO: 2007208 - RNA, 19 nt, Artificial Sequence
  Description of Artificial Sequence: Synthetic oligonucleotide
gcuucauggcuccuccaca

SEQ ID NO: 2007209 - RNA, 19 nt, Artificial Sequence
  Description of Artificial Sequence: Synthetic oligonucleotide
cacugcgggugcgucuugg

SEQ ID NO: 2007210 - RNA, 19 nt, Artificial Sequence
  Description of Artificial Sequence: Synthetic oligonucleotide
cguaaguguaguugggaca

SEQ ID NO: 2007211 - RNA, 19 nt, Artificial Sequence
  Description of Artificial Sequence: Synthetic oligonucleotide
agcgccaacuuaaccugcu

SEQ ID NO: 2007212 - RNA, 19 nt, Artificial Sequence
  Description of Artificial Sequence: Synthetic oligonucleotide
caggauggcgccgcuccgc

SEQ ID NO: 2007213 - RNA, 19 nt, Artificial Sequence
  Description of Artificial Sequence: Synthetic oligonucleotide
agagggugguugauguaau

SEQ ID NO: 2007214 - RNA, 19 nt, Artificial Sequence
  Description of Artificial Sequence: Synthetic oligonucleotide
agccccaguaguaggugca

SEQ ID NO: 2007215 - RNA, 19 nt, Artificial Sequence
  Description of Artificial Sequence: Synthetic oligonucleotide
cgucuuggugaagagauuc

SEQ ID NO: 2007216 - RNA, 19 nt, Artificial Sequence
  Description of Artificial Sequence: Synthetic oligonucleotide
gguuuuggacccagcuggc

SEQ ID NO: 2007217 - RNA, 19 nt, Artificial Sequence
  Description of Artificial Sequence: Synthetic oligonucleotide
gaaggucccgaagagccau

SEQ ID NO: 2007218 - RNA, 19 nt, Artificial Sequence
  Description of Artificial Sequence: Synthetic oligonucleotide
ccgaagagccauguggaug

SEQ ID NO: 2007219 - RNA, 19 nt, Artificial Sequence
  Description of Artificial Sequence: Synthetic oligonucleotide
gccgacuggacgugaaguc

SEQ ID NO: 2007220 - RNA, 19 nt, Artificial Sequence
  Description of Artificial Sequence: Synthetic oligonucleotide
ugggguccaagcggaggga

SEQ ID NO: 2007221 - RNA, 19 nt, Artificial Sequence
  Description of Artificial Sequence: Synthetic oligonucleotide
acuggacgugaagucguau

SEQ ID NO: 2007222 - RNA, 19 nt, Artificial Sequence
  Description of Artificial Sequence: Synthetic oligonucleotide
caagggcaugguuccguga

SEQ ID NO: 2007223 - RNA, 19 nt, Artificial Sequence
  Description of Artificial Sequence: Synthetic oligonucleotide
aggucccgaagagccaugu

SEQ ID NO: 2007224 - RNA, 19 nt, Artificial Sequence
  Description of Artificial Sequence: Synthetic oligonucleotide
gguggguagucacggaacu

SEQ ID NO: 2007225 - RNA, 19 nt, Artificial Sequence
  Description of Artificial Sequence: Synthetic oligonucleotide
cugcgucaugauggcaaag

SEQ ID NO: 2007226 - RNA, 19 nt, Artificial Sequence
  Description of Artificial Sequence: Synthetic oligonucleotide
gcuagagagccacgaucac

SEQ ID NO: 2007227 - RNA, 19 nt, Artificial Sequence
  Description of Artificial Sequence: Synthetic oligonucleotide
agggguucuuggugggaua

SEQ ID NO: 2007228 - RNA, 19 nt, Artificial Sequence
  Description of Artificial Sequence: Synthetic oligonucleotide
ccagcauacucagucagga

SEQ ID NO: 2007229 - RNA, 19 nt, Artificial Sequence
  Description of Artificial Sequence: Synthetic oligonucleotide
gccauguggauggagaagu

SEQ ID NO: 2007230 - RNA, 19 nt, Artificial Sequence
  Description of Artificial Sequence: Synthetic oligonucleotide
aguugggacaggacaccaa

SEQ ID NO: 2007231 - RNA, 19 nt, Artificial Sequence
  Description of Artificial Sequence: Synthetic oligonucleotide
ccacgaucaccccaggaca

SEQ ID NO: 2007232 - RNA, 19 nt, Artificial Sequence
  Description of Artificial Sequence: Synthetic oligonucleotide
acgaucaccccaggacaga

SEQ ID NO: 2007233 - RNA, 19 nt, Artificial Sequence
  Description of Artificial Sequence: Synthetic oligonucleotide
caucugggugaagcccacc

SEQ ID NO: 2007234 - RNA, 19 nt, Artificial Sequence
  Description of Artificial Sequence: Synthetic oligonucleotide
guggguagucacggaacuc

SEQ ID NO: 2007235 - RNA, 19 nt, Artificial Sequence
  Description of Artificial Sequence: Synthetic oligonucleotide
cagaugcaagcgaggugca

SEQ ID NO: 2007236 - RNA, 19 nt, Artificial Sequence
  Description of Artificial Sequence: Synthetic oligonucleotide
ucccucgucuucgcaucca

SEQ ID NO: 2007237 - RNA, 19 nt, Artificial Sequence
  Description of Artificial Sequence: Synthetic oligonucleotide
agucguauuuguggccaua

SEQ ID NO: 2007238 - RNA, 19 nt, Artificial Sequence
  Description of Artificial Sequence: Synthetic oligonucleotide
caugcagcaaagccccagu

SEQ ID NO: 2007239 - RNA, 19 nt, Artificial Sequence
  Description of Artificial Sequence: Synthetic oligonucleotide
cagcauacucagucaggaa

SEQ ID NO: 2007240 - RNA, 19 nt, Artificial Sequence
  Description of Artificial Sequence: Synthetic oligonucleotide
cugcggugcuugcccuugg

SEQ ID NO: 2007241 - RNA, 19 nt, Artificial Sequence
  Description of Artificial Sequence: Synthetic oligonucleotide
ugcgcagggguggguaguc

SEQ ID NO: 2007242 - RNA, 19 nt, Artificial Sequence
  Description of Artificial Sequence: Synthetic oligonucleotide
gugggaugaguggcagaug

SEQ ID NO: 2007243 - RNA, 19 nt, Artificial Sequence
  Description of Artificial Sequence: Synthetic oligonucleotide
gggacuggcgggcagggua

SEQ ID NO: 2007244 - RNA, 19 nt, Artificial Sequence
  Description of Artificial Sequence: Synthetic oligonucleotide
gacccagcuggccgaaggu

SEQ ID NO: 2007245 - RNA, 19 nt, Artificial Sequence
  Description of Artificial Sequence: Synthetic oligonucleotide
ugcaagcgaggugcaccac

SEQ ID NO: 2007246 - RNA, 19 nt, Artificial Sequence
  Description of Artificial Sequence: Synthetic oligonucleotide
cuggacgugaagucguauu

SEQ ID NO: 2007247 - RNA, 19 nt, Artificial Sequence
  Description of Artificial Sequence: Synthetic oligonucleotide
ggacaccaacagaaauagc

SEQ ID NO: 2007248 - RNA, 19 nt, Artificial Sequence
  Description of Artificial Sequence: Synthetic oligonucleotide
ggucccgaagagccaugug

SEQ ID NO: 2007249 - RNA, 19 nt, Artificial Sequence
  Description of Artificial Sequence: Synthetic oligonucleotide
gcuugacguagugggauga

SEQ ID NO: 2007250 - RNA, 19 nt, Artificial Sequence
  Description of Artificial Sequence: Synthetic oligonucleotide
ggguacccggaaguagaag

SEQ ID NO: 2007251 - RNA, 19 nt, Artificial Sequence
  Description of Artificial Sequence: Synthetic oligonucleotide
ccaugcagcaaagccccag

SEQ ID NO: 2007252 - RNA, 19 nt, Artificial Sequence
  Description of Artificial Sequence: Synthetic oligonucleotide
gacuggcgggcaggguacc

SEQ ID NO: 2007253 - RNA, 19 nt, Artificial Sequence
  Description of Artificial Sequence: Synthetic oligonucleotide
aggguacccggaaguagaa

SEQ ID NO: 2007254 - RNA, 19 nt, Artificial Sequence
  Description of Artificial Sequence: Synthetic oligonucleotide
agagggccacuggaacaca

SEQ ID NO: 2007255 - RNA, 19 nt, Artificial Sequence
  Description of Artificial Sequence: Synthetic oligonucleotide
cagcuggccgaaggucccg

SEQ ID NO: 2007256 - RNA, 19 nt, Artificial Sequence
  Description of Artificial Sequence: Synthetic oligonucleotide
guuucgcaagggcaugguu

SEQ ID NO: 2007257 - RNA, 19 nt, Artificial Sequence
  Description of Artificial Sequence: Synthetic oligonucleotide
ugcuccuggcugagcccau

SEQ ID NO: 2007258 - RNA, 19 nt, Artificial Sequence
  Description of Artificial Sequence: Synthetic oligonucleotide
cauggcuccuccacaggau

SEQ ID NO: 2007259 - RNA, 19 nt, Artificial Sequence
  Description of Artificial Sequence: Synthetic oligonucleotide
gcccaccaaggagaagagg

SEQ ID NO: 2007260 - RNA, 19 nt, Artificial Sequence
  Description of Artificial Sequence: Synthetic oligonucleotide
ccaacagaaauagccaggu

SEQ ID NO: 2007261 - RNA, 19 nt, Artificial Sequence
  Description of Artificial Sequence: Synthetic oligonucleotide
cgggcaggguaccacugcg

SEQ ID NO: 2007262 - RNA, 19 nt, Artificial Sequence
  Description of Artificial Sequence: Synthetic oligonucleotide
ggacuggcgggcaggguac

SEQ ID NO: 2007263 - RNA, 19 nt, Artificial Sequence
  Description of Artificial Sequence: Synthetic oligonucleotide
gcgccaacuuaaccugcug

SEQ ID NO: 2007264 - RNA, 19 nt, Artificial Sequence
  Description of Artificial Sequence: Synthetic oligonucleotide
gacuuucccuuggggucca

SEQ ID NO: 2007265 - RNA, 19 nt, Artificial Sequence
  Description of Artificial Sequence: Synthetic oligonucleotide
ggcaugguuccgugagaga

SEQ ID NO: 2007266 - RNA, 19 nt, Artificial Sequence
  Description of Artificial Sequence: Synthetic oligonucleotide
ccugguuuuggacccagcu

SEQ ID NO: 2007267 - RNA, 19 nt, Artificial Sequence
  Description of Artificial Sequence: Synthetic oligonucleotide
gcaagcgaggugcaccacu

SEQ ID NO: 2007268 - RNA, 19 nt, Artificial Sequence
  Description of Artificial Sequence: Synthetic oligonucleotide
auccaggaccccaccucgu

SEQ ID NO: 2007269 - RNA, 19 nt, Artificial Sequence
  Description of Artificial Sequence: Synthetic oligonucleotide
cccucgucuucgcauccag

SEQ ID NO: 2007270 - RNA, 19 nt, Artificial Sequence
  Description of Artificial Sequence: Synthetic oligonucleotide
cguagugggaugaguggca

SEQ ID NO: 2007271 - RNA, 19 nt, Artificial Sequence
  Description of Artificial Sequence: Synthetic oligonucleotide
gacuggacgugaagucgua

SEQ ID NO: 2007272 - RNA, 19 nt, Artificial Sequence
  Description of Artificial Sequence: Synthetic oligonucleotide
agcuggccgaaggucccga

SEQ ID NO: 2007273 - RNA, 19 nt, Artificial Sequence
  Description of Artificial Sequence: Synthetic oligonucleotide
gguguguagagaggguggu

SEQ ID NO: 2007274 - RNA, 19 nt, Artificial Sequence
  Description of Artificial Sequence: Synthetic oligonucleotide
agcagacgcuugacguagu

SEQ ID NO: 2007275 - RNA, 19 nt, Artificial Sequence
  Description of Artificial Sequence: Synthetic oligonucleotide
gggguccaagcggagggac

SEQ ID NO: 2007276 - RNA, 19 nt, Artificial Sequence
  Description of Artificial Sequence: Synthetic oligonucleotide
cgugagagaagcggugcac

SEQ ID NO: 2007277 - RNA, 19 nt, Artificial Sequence
  Description of Artificial Sequence: Synthetic oligonucleotide
ccccaccucguaaguguag

SEQ ID NO: 2007278 - RNA, 19 nt, Artificial Sequence
  Description of Artificial Sequence: Synthetic oligonucleotide
agaccgucacccagcugau

SEQ ID NO: 2007279 - RNA, 19 nt, Artificial Sequence
  Description of Artificial Sequence: Synthetic oligonucleotide
gcucgguugccgcccugcc

SEQ ID NO: 2007280 - RNA, 19 nt, Artificial Sequence
  Description of Artificial Sequence: Synthetic oligonucleotide
auggcgccgcuccgcugca

SEQ ID NO: 2007281 - RNA, 19 nt, Artificial Sequence
  Description of Artificial Sequence: Synthetic oligonucleotide
cgaucaccccaggacagag

SEQ ID NO: 2007282 - RNA, 19 nt, Artificial Sequence
  Description of Artificial Sequence: Synthetic oligonucleotide
cgcuugacguagugggaug

SEQ ID NO: 2007283 - RNA, 19 nt, Artificial Sequence
  Description of Artificial Sequence: Synthetic oligonucleotide
gaccgucacccagcugauc

SEQ ID NO: 2007284 - RNA, 19 nt, Artificial Sequence
  Description of Artificial Sequence: Synthetic oligonucleotide
ccgucacccagcugaucug

SEQ ID NO: 2007285 - RNA, 19 nt, Artificial Sequence
  Description of Artificial Sequence: Synthetic oligonucleotide
gugcaccacugugugccga

SEQ ID NO: 2007286 - RNA, 19 nt, Artificial Sequence
  Description of Artificial Sequence: Synthetic oligonucleotide
ccgcccugccgcacgagac

SEQ ID NO: 2007287 - RNA, 19 nt, Artificial Sequence
  Description of Artificial Sequence: Synthetic oligonucleotide
cuggaacacacugcgucau

SEQ ID NO: 2007288 - RNA, 19 nt, Artificial Sequence
  Description of Artificial Sequence: Synthetic oligonucleotide
gggcaugcgcagggguggg

SEQ ID NO: 2007289 - RNA, 19 nt, Artificial Sequence
  Description of Artificial Sequence: Synthetic oligonucleotide
accccaccucguaagugua

SEQ ID NO: 2007290 - RNA, 19 nt, Artificial Sequence
  Description of Artificial Sequence: Synthetic oligonucleotide
gcgggugcgucuuggugaa

SEQ ID NO: 2007291 - RNA, 19 nt, Artificial Sequence
  Description of Artificial Sequence: Synthetic oligonucleotide
guguggcuguggugcccac

SEQ ID NO: 2007292 - RNA, 19 nt, Artificial Sequence
  Description of Artificial Sequence: Synthetic oligonucleotide
gcugcuagagagccacgau

SEQ ID NO: 2007293 - RNA, 19 nt, Artificial Sequence
  Description of Artificial Sequence: Synthetic oligonucleotide
ugcuugcccuuggcccaga

SEQ ID NO: 2007294 - RNA, 19 nt, Artificial Sequence
  Description of Artificial Sequence: Synthetic oligonucleotide
cccggaaguagaagagcaa

SEQ ID NO: 2007295 - RNA, 19 nt, Artificial Sequence
  Description of Artificial Sequence: Synthetic oligonucleotide
ccgugagagaagcggugca

SEQ ID NO: 2007296 - RNA, 19 nt, Artificial Sequence
  Description of Artificial Sequence: Synthetic oligonucleotide
gcccugccgcacgagacac

SEQ ID NO: 2007297 - RNA, 19 nt, Artificial Sequence
  Description of Artificial Sequence: Synthetic oligonucleotide
gugugccgacuggacguga

SEQ ID NO: 2007298 - RNA, 19 nt, Artificial Sequence
  Description of Artificial Sequence: Synthetic oligonucleotide
cgucuucgcauccagaauu

SEQ ID NO: 2007299 - RNA, 19 nt, Artificial Sequence
  Description of Artificial Sequence: Synthetic oligonucleotide
gcgaggugcaccacugugu

SEQ ID NO: 2007300 - RNA, 19 nt, Artificial Sequence
  Description of Artificial Sequence: Synthetic oligonucleotide
ccucgucuucgcauccaga

SEQ ID NO: 2007301 - RNA, 19 nt, Artificial Sequence
  Description of Artificial Sequence: Synthetic oligonucleotide
ggcagaucacaaagauggu

SEQ ID NO: 2007302 - RNA, 19 nt, Artificial Sequence
  Description of Artificial Sequence: Synthetic oligonucleotide
cagcucgguugccgcccug

SEQ ID NO: 2007303 - RNA, 19 nt, Artificial Sequence
  Description of Artificial Sequence: Synthetic oligonucleotide
gggguucuuggugggauau

SEQ ID NO: 2007304 - RNA, 19 nt, Artificial Sequence
  Description of Artificial Sequence: Synthetic oligonucleotide
cccaguaguaggugcaguu

SEQ ID NO: 2007305 - RNA, 19 nt, Artificial Sequence
  Description of Artificial Sequence: Synthetic oligonucleotide
ccaggaccccaccucguaa

SEQ ID NO: 2007306 - RNA, 19 nt, Artificial Sequence
  Description of Artificial Sequence: Synthetic oligonucleotide
cgacuggacgugaagucgu

SEQ ID NO: 2007307 - RNA, 19 nt, Artificial Sequence
  Description of Artificial Sequence: Synthetic oligonucleotide
gcuggccgaaggucccgaa

SEQ ID NO: 2007308 - RNA, 19 nt, Artificial Sequence
  Description of Artificial Sequence: Synthetic oligonucleotide
acuuucccuugggguccaa

SEQ ID NO: 2007309 - RNA, 19 nt, Artificial Sequence
  Description of Artificial Sequence: Synthetic oligonucleotide
gguugccgcccugccgcac

SEQ ID NO: 2007310 - RNA, 19 nt, Artificial Sequence
  Description of Artificial Sequence: Synthetic oligonucleotide
cccaccucguaaguguagu

SEQ ID NO: 2007311 - RNA, 19 nt, Artificial Sequence
  Description of Artificial Sequence: Synthetic oligonucleotide
ccauguggauggagaaguu

SEQ ID NO: 2007312 - RNA, 19 nt, Artificial Sequence
  Description of Artificial Sequence: Synthetic oligonucleotide
cccgaagagccauguggau

SEQ ID NO: 2007313 - RNA, 19 nt, Artificial Sequence
  Description of Artificial Sequence: Synthetic oligonucleotide
gcgcagggguggguaguca

SEQ ID NO: 2007314 - RNA, 19 nt, Artificial Sequence
  Description of Artificial Sequence: Synthetic oligonucleotide
ccgcuccgcugcagcucgg

SEQ ID NO: 2007315 - RNA, 19 nt, Artificial Sequence
  Description of Artificial Sequence: Synthetic oligonucleotide
gcuugcccuuggcccagau

SEQ ID NO: 2007316 - RNA, 19 nt, Artificial Sequence
  Description of Artificial Sequence: Synthetic oligonucleotide
gcgucuuggugaagagauu

SEQ ID NO: 2007317 - RNA, 19 nt, Artificial Sequence
  Description of Artificial Sequence: Synthetic oligonucleotide
ggcaugcgcaggggugggu

SEQ ID NO: 2007318 - RNA, 19 nt, Artificial Sequence
  Description of Artificial Sequence: Synthetic oligonucleotide
cgcaagggcaugguuccgu

SEQ ID NO: 2007319 - RNA, 19 nt, Artificial Sequence
  Description of Artificial Sequence: Synthetic oligonucleotide
cgccgcuccgcugcagcuc

SEQ ID NO: 2007320 - RNA, 19 nt, Artificial Sequence
  Description of Artificial Sequence: Synthetic oligonucleotide
cgguugccgcccugccgca

SEQ ID NO: 2007321 - RNA, 19 nt, Artificial Sequence
  Description of Artificial Sequence: Synthetic oligonucleotide
cgcuccgcugcagcucggu

SEQ ID NO: 2007322 - RNA, 19 nt, Artificial Sequence
  Description of Artificial Sequence: Synthetic oligonucleotide
uugaguuuaauaaagaugc

SEQ ID NO: 2007323 - RNA, 19 nt, Artificial Sequence
  Description of Artificial Sequence: Synthetic oligonucleotide
gaagccaugaaauuaaugg

SEQ ID NO: 2007324 - RNA, 19 nt, Artificial Sequence
  Description of Artificial Sequence: Synthetic oligonucleotide
uuaagaauguaaauaagcc

SEQ ID NO: 2007325 - RNA, 19 nt, Artificial Sequence
  Description of Artificial Sequence: Synthetic oligonucleotide
aaaagaucaucacuaggcc

SEQ ID NO: 2007326 - RNA, 19 nt, Artificial Sequence
  Description of Artificial Sequence: Synthetic oligonucleotide
aaggcaauugaguugaggg

SEQ ID NO: 2007327 - RNA, 19 nt, Artificial Sequence
  Description of Artificial Sequence: Synthetic oligonucleotide
ucaagugacacuaacaaga

SEQ ID NO: 2007328 - RNA, 19 nt, Artificial Sequence
  Description of Artificial Sequence: Synthetic oligonucleotide
aacagccucagcuuggucc

SEQ ID NO: 2007329 - RNA, 19 nt, Artificial Sequence
  Description of Artificial Sequence: Synthetic oligonucleotide
uucaucucuaaauagagug

SEQ ID NO: 2007330 - RNA, 19 nt, Artificial Sequence
  Description of Artificial Sequence: Synthetic oligonucleotide
uguccuaucagcaaggacu

SEQ ID NO: 2007331 - RNA, 19 nt, Artificial Sequence
  Description of Artificial Sequence: Synthetic oligonucleotide
aacaacaacaucagguucc

SEQ ID NO: 2007332 - RNA, 19 nt, Artificial Sequence
  Description of Artificial Sequence: Synthetic oligonucleotide
acguguaggaaucuuaggc

SEQ ID NO: 2007333 - RNA, 19 nt, Artificial Sequence
  Description of Artificial Sequence: Synthetic oligonucleotide
cuaccaacuagcaagaagc

SEQ ID NO: 2007334 - RNA, 19 nt, Artificial Sequence
  Description of Artificial Sequence: Synthetic oligonucleotide
aaugucaagugacacuaac

SEQ ID NO: 2007335 - RNA, 19 nt, Artificial Sequence
  Description of Artificial Sequence: Synthetic oligonucleotide
ucgcuuaacaacaacauca

SEQ ID NO: 2007336 - RNA, 19 nt, Artificial Sequence
  Description of Artificial Sequence: Synthetic oligonucleotide
aaauaagcccaccucuccc

SEQ ID NO: 2007337 - RNA, 19 nt, Artificial Sequence
  Description of Artificial Sequence: Synthetic oligonucleotide
ucaccuaccaacuagcaag

SEQ ID NO: 2007338 - RNA, 19 nt, Artificial Sequence
  Description of Artificial Sequence: Synthetic oligonucleotide
acuaacaagagucuuagcu

SEQ ID NO: 2007339 - RNA, 19 nt, Artificial Sequence
  Description of Artificial Sequence: Synthetic oligonucleotide
uaagaauguaaauaagccc

SEQ ID NO: 2007340 - RNA, 19 nt, Artificial Sequence
  Description of Artificial Sequence: Synthetic oligonucleotide
aagaauguaaauaagccca

SEQ ID NO: 2007341 - RNA, 19 nt, Artificial Sequence
  Description of Artificial Sequence: Synthetic oligonucleotide
agugacacuaacaagaguc

SEQ ID NO: 2007342 - RNA, 19 nt, Artificial Sequence
  Description of Artificial Sequence: Synthetic oligonucleotide
uguaaauaagcccaccucu

SEQ ID NO: 2007343 - RNA, 19 nt, Artificial Sequence
  Description of Artificial Sequence: Synthetic oligonucleotide
ucuaaauagaguguggacc

SEQ ID NO: 2007344 - RNA, 19 nt, Artificial Sequence
  Description of Artificial Sequence: Synthetic oligonucleotide
aauguaaauaagcccaccu

SEQ ID NO: 2007345 - RNA, 19 nt, Artificial Sequence
  Description of Artificial Sequence: Synthetic oligonucleotide
auuuccuugaguuuaauaa

SEQ ID NO: 2007346 - RNA, 19 nt, Artificial Sequence
  Description of Artificial Sequence: Synthetic oligonucleotide
cuugaguuuaauaaagaug

SEQ ID NO: 2007347 - RNA, 19 nt, Artificial Sequence
  Description of Artificial Sequence: Synthetic oligonucleotide
aacgcauccugucacagag

SEQ ID NO: 2007348 - RNA, 19 nt, Artificial Sequence
  Description of Artificial Sequence: Synthetic oligonucleotide
gaagacaucauucaacgca

SEQ ID NO: 2007349 - RNA, 19 nt, Artificial Sequence
  Description of Artificial Sequence: Synthetic oligonucleotide
uggaugacaauguagagaa

SEQ ID NO: 2007350 - RNA, 19 nt, Artificial Sequence
  Description of Artificial Sequence: Synthetic oligonucleotide
acaucaguaauccucacug

SEQ ID NO: 2007351 - RNA, 19 nt, Artificial Sequence
  Description of Artificial Sequence: Synthetic oligonucleotide
cuugcuaaugucaagugac

SEQ ID NO: 2007352 - RNA, 19 nt, Artificial Sequence
  Description of Artificial Sequence: Synthetic oligonucleotide
aauuaauggcuguuucauc

SEQ ID NO: 2007353 - RNA, 19 nt, Artificial Sequence
  Description of Artificial Sequence: Synthetic oligonucleotide
auacagauaguuaagaaug

SEQ ID NO: 2007354 - RNA, 19 nt, Artificial Sequence
  Description of Artificial Sequence: Synthetic oligonucleotide
aagcccuuaaaauacagau

SEQ ID NO: 2007355 - RNA, 19 nt, Artificial Sequence
  Description of Artificial Sequence: Synthetic oligonucleotide
uugaguugaggguuaaggg

SEQ ID NO: 2007356 - RNA, 19 nt, Artificial Sequence
  Description of Artificial Sequence: Synthetic oligonucleotide
aucagauuuucuuuugggg

SEQ ID NO: 2007357 - RNA, 19 nt, Artificial Sequence
  Description of Artificial Sequence: Synthetic oligonucleotide
uaucagauuuucuuuuggg

SEQ ID NO: 2007358 - RNA, 19 nt, Artificial Sequence
  Description of Artificial Sequence: Synthetic oligonucleotide
ucuauaucucauacuaacc

SEQ ID NO: 2007359 - RNA, 19 nt, Artificial Sequence
  Description of Artificial Sequence: Synthetic oligonucleotide
ugucaagugacacuaacaa

SEQ ID NO: 2007360 - RNA, 19 nt, Artificial Sequence
  Description of Artificial Sequence: Synthetic oligonucleotide
uucucaaacgagcagcugc

SEQ ID NO: 2007361 - RNA, 19 nt, Artificial Sequence
  Description of Artificial Sequence: Synthetic oligonucleotide
cucauacuaaccaaagccc

SEQ ID NO: 2007362 - RNA, 19 nt, Artificial Sequence
  Description of Artificial Sequence: Synthetic oligonucleotide
cucaccauuuauaaggaag

SEQ ID NO: 2007363 - RNA, 19 nt, Artificial Sequence
  Description of Artificial Sequence: Synthetic oligonucleotide
aagucugcugaacagcaag

SEQ ID NO: 2007364 - RNA, 19 nt, Artificial Sequence
  Description of Artificial Sequence: Synthetic oligonucleotide
ucaccauuuauaaggaaga

SEQ ID NO: 2007365 - RNA, 19 nt, Artificial Sequence
  Description of Artificial Sequence: Synthetic oligonucleotide
guuauaaccaccuccccgc

SEQ ID NO: 2007366 - RNA, 19 nt, Artificial Sequence
  Description of Artificial Sequence: Synthetic oligonucleotide
ucaacuugggcauuuagau

SEQ ID NO: 2007367 - RNA, 19 nt, Artificial Sequence
  Description of Artificial Sequence: Synthetic oligonucleotide
aaugucuauaucucauacu

SEQ ID NO: 2007368 - RNA, 19 nt, Artificial Sequence
  Description of Artificial Sequence: Synthetic oligonucleotide
ugugaaagugugcguaagg

SEQ ID NO: 2007369 - RNA, 19 nt, Artificial Sequence
  Description of Artificial Sequence: Synthetic oligonucleotide
aaucuuaggcccucggucu

SEQ ID NO: 2007370 - RNA, 19 nt, Artificial Sequence
  Description of Artificial Sequence: Synthetic oligonucleotide
aagucaagcucacaaagaa

SEQ ID NO: 2007371 - RNA, 19 nt, Artificial Sequence
  Description of Artificial Sequence: Synthetic oligonucleotide
ugugcguaaggcaauugag

SEQ ID NO: 2007372 - RNA, 19 nt, Artificial Sequence
  Description of Artificial Sequence: Synthetic oligonucleotide
aaguucuguacauaaaaua

SEQ ID NO: 2007373 - RNA, 19 nt, Artificial Sequence
  Description of Artificial Sequence: Synthetic oligonucleotide
auguaaauaagcccaccuc

SEQ ID NO: 2007374 - RNA, 19 nt, Artificial Sequence
  Description of Artificial Sequence: Synthetic oligonucleotide
ugaaauuaauggcuguuuc

SEQ ID NO: 2007375 - RNA, 19 nt, Artificial Sequence
  Description of Artificial Sequence: Synthetic oligonucleotide
aaauguuacuuuucaagua

SEQ ID NO: 2007376 - RNA, 19 nt, Artificial Sequence
  Description of Artificial Sequence: Synthetic oligonucleotide
ucaacuguuuacaucagua

SEQ ID NO: 2007377 - RNA, 19 nt, Artificial Sequence
  Description of Artificial Sequence: Synthetic oligonucleotide
uggcuagucacugugaaag

SEQ ID NO: 2007378 - RNA, 19 nt, Artificial Sequence
  Description of Artificial Sequence: Synthetic oligonucleotide
accaaagcccuuaaaauac

SEQ ID NO: 2007379 - RNA, 19 nt, Artificial Sequence
  Description of Artificial Sequence: Synthetic oligonucleotide
agaaagucugcugaacagc

SEQ ID NO: 2007380 - RNA, 19 nt, Artificial Sequence
  Description of Artificial Sequence: Synthetic oligonucleotide
aaccaaagcccuuaaaaua

SEQ ID NO: 2007381 - RNA, 19 nt, Artificial Sequence
  Description of Artificial Sequence: Synthetic oligonucleotide
ucauacuaaccaaagcccu

SEQ ID NO: 2007382 - RNA, 19 nt, Artificial Sequence
  Description of Artificial Sequence: Synthetic oligonucleotide
uucaacuugggcauuuaga

SEQ ID NO: 2007383 - RNA, 19 nt, Artificial Sequence
  Description of Artificial Sequence: Synthetic oligonucleotide
aggacuucuaccccaaaag

SEQ ID NO: 2007384 - RNA, 19 nt, Artificial Sequence
  Description of Artificial Sequence: Synthetic oligonucleotide
uugucgcuuaacaacaaca

SEQ ID NO: 2007385 - RNA, 19 nt, Artificial Sequence
  Description of Artificial Sequence: Synthetic oligonucleotide
cauccugucacagagacug

SEQ ID NO: 2007386 - RNA, 19 nt, Artificial Sequence
  Description of Artificial Sequence: Synthetic oligonucleotide
ugaguugaggguuaagggu

SEQ ID NO: 2007387 - RNA, 19 nt, Artificial Sequence
  Description of Artificial Sequence: Synthetic oligonucleotide
augucuauaucucauacua

SEQ ID NO: 2007388 - RNA, 19 nt, Artificial Sequence
  Description of Artificial Sequence: Synthetic oligonucleotide
gucuauaucucauacuaac

SEQ ID NO: 2007389 - RNA, 19 nt, Artificial Sequence
  Description of Artificial Sequence: Synthetic oligonucleotide
auaguuaagaauguaaaua

SEQ ID NO: 2007390 - RNA, 19 nt, Artificial Sequence
  Description of Artificial Sequence: Synthetic oligonucleotide
auucaacgcauccugucac

SEQ ID NO: 2007391 - RNA, 19 nt, Artificial Sequence
  Description of Artificial Sequence: Synthetic oligonucleotide
ugacguguaggaaucuuag

SEQ ID NO: 2007392 - RNA, 19 nt, Artificial Sequence
  Description of Artificial Sequence: Synthetic oligonucleotide
ucaguaauccucacuggug

SEQ ID NO: 2007393 - RNA, 19 nt, Artificial Sequence
  Description of Artificial Sequence: Synthetic oligonucleotide
uaacaagagucuuagcuuc

SEQ ID NO: 2007394 - RNA, 19 nt, Artificial Sequence
  Description of Artificial Sequence: Synthetic oligonucleotide
aucagguuccagaacagcc

SEQ ID NO: 2007395 - RNA, 19 nt, Artificial Sequence
  Description of Artificial Sequence: Synthetic oligonucleotide
ucuugcuaaugucaaguga

SEQ ID NO: 2007396 - RNA, 19 nt, Artificial Sequence
  Description of Artificial Sequence: Synthetic oligonucleotide
cuaggccuccuuuagaaag

SEQ ID NO: 2007397 - RNA, 19 nt, Artificial Sequence
  Description of Artificial Sequence: Synthetic oligonucleotide
accaccuccccgcaaaggc

SEQ ID NO: 2007398 - RNA, 19 nt, Artificial Sequence
  Description of Artificial Sequence: Synthetic oligonucleotide
ucaaacgagcagcugcuag

SEQ ID NO: 2007399 - RNA, 19 nt, Artificial Sequence
  Description of Artificial Sequence: Synthetic oligonucleotide
uaaccaaagcccuuaaaau

SEQ ID NO: 2007400 - RNA, 19 nt, Artificial Sequence
  Description of Artificial Sequence: Synthetic oligonucleotide
aguuuaauaaagaugcuaa

SEQ ID NO: 2007401 - RNA, 19 nt, Artificial Sequence
  Description of Artificial Sequence: Synthetic oligonucleotide
uuuauaaggaagacaucau

SEQ ID NO: 2007402 - RNA, 19 nt, Artificial Sequence
  Description of Artificial Sequence: Synthetic oligonucleotide
cuauaucucauacuaacca

SEQ ID NO: 2007403 - RNA, 19 nt, Artificial Sequence
  Description of Artificial Sequence: Synthetic oligonucleotide
ucggacugcaaguuucugg

SEQ ID NO: 2007404 - RNA, 19 nt, Artificial Sequence
  Description of Artificial Sequence: Synthetic oligonucleotide
ucaucucuaaauagagugu

SEQ ID NO: 2007405 - RNA, 19 nt, Artificial Sequence
  Description of Artificial Sequence: Synthetic oligonucleotide
cuuccugcauucucaaacg

SEQ ID NO: 2007406 - RNA, 19 nt, Artificial Sequence
  Description of Artificial Sequence: Synthetic oligonucleotide
gaaucuuaggcccucgguc

SEQ ID NO: 2007407 - RNA, 19 nt, Artificial Sequence
  Description of Artificial Sequence: Synthetic oligonucleotide
ggcauuuagaucuuccugc

SEQ ID NO: 2007408 - RNA, 19 nt, Artificial Sequence
  Description of Artificial Sequence: Synthetic oligonucleotide
uuagcuucauccaccagau

SEQ ID NO: 2007409 - RNA, 19 nt, Artificial Sequence
  Description of Artificial Sequence: Synthetic oligonucleotide
ucuuagcuuuuccuuaugu

SEQ ID NO: 2007410 - RNA, 19 nt, Artificial Sequence
  Description of Artificial Sequence: Synthetic oligonucleotide
gguuauaaccaccuccccg

SEQ ID NO: 2007411 - RNA, 19 nt, Artificial Sequence
  Description of Artificial Sequence: Synthetic oligonucleotide
guguaggaaucuuaggccc

SEQ ID NO: 2007412 - RNA, 19 nt, Artificial Sequence
  Description of Artificial Sequence: Synthetic oligonucleotide
ucucuaaauagagugugga

SEQ ID NO: 2007413 - RNA, 19 nt, Artificial Sequence
  Description of Artificial Sequence: Synthetic oligonucleotide
caaugucuauaucucauac

SEQ ID NO: 2007414 - RNA, 19 nt, Artificial Sequence
  Description of Artificial Sequence: Synthetic oligonucleotide
aucaguaauccucacuggu

SEQ ID NO: 2007415 - RNA, 19 nt, Artificial Sequence
  Description of Artificial Sequence: Synthetic oligonucleotide
aauuuccuugaguuuaaua

SEQ ID NO: 2007416 - RNA, 19 nt, Artificial Sequence
  Description of Artificial Sequence: Synthetic oligonucleotide
agaaauuuccuugaguuua

SEQ ID NO: 2007417 - RNA, 19 nt, Artificial Sequence
  Description of Artificial Sequence: Synthetic oligonucleotide
aacgcccucagucggacug

SEQ ID NO: 2007418 - RNA, 19 nt, Artificial Sequence
  Description of Artificial Sequence: Synthetic oligonucleotide
ugucgcuuaacaacaacau

SEQ ID NO: 2007419 - RNA, 19 nt, Artificial Sequence
  Description of Artificial Sequence: Synthetic oligonucleotide
uaacaacaacaucagguuc

SEQ ID NO: 2007420 - RNA, 19 nt, Artificial Sequence
  Description of Artificial Sequence: Synthetic oligonucleotide
cuuagcuucauccaccaga

SEQ ID NO: 2007421 - RNA, 19 nt, Artificial Sequence
  Description of Artificial Sequence: Synthetic oligonucleotide
cuaaccaaagcccuuaaaa

SEQ ID NO: 2007422 - RNA, 19 nt, Artificial Sequence
  Description of Artificial Sequence: Synthetic oligonucleotide
agacuguccuaucagcaag

SEQ ID NO: 2007423 - RNA, 19 nt, Artificial Sequence
  Description of Artificial Sequence: Synthetic oligonucleotide
gaagaggauguaccagccg

SEQ ID NO: 2007424 - RNA, 19 nt, Artificial Sequence
  Description of Artificial Sequence: Synthetic oligonucleotide
ucucaaacgagcagcugcu

SEQ ID NO: 2007425 - RNA, 19 nt, Artificial Sequence
  Description of Artificial Sequence: Synthetic oligonucleotide
gaugcagcugaagaggaug

SEQ ID NO: 2007426 - RNA, 19 nt, Artificial Sequence
  Description of Artificial Sequence: Synthetic oligonucleotide
uacaucaguaauccucacu

SEQ ID NO: 2007427 - RNA, 19 nt, Artificial Sequence
  Description of Artificial Sequence: Synthetic oligonucleotide
aaacgagcagcugcuagag

SEQ ID NO: 2007428 - RNA, 19 nt, Artificial Sequence
  Description of Artificial Sequence: Synthetic oligonucleotide
aucacuaggccuccuuuag

SEQ ID NO: 2007429 - RNA, 19 nt, Artificial Sequence
  Description of Artificial Sequence: Synthetic oligonucleotide
aguaauccucacugguggg

SEQ ID NO: 2007430 - RNA, 19 nt, Artificial Sequence
  Description of Artificial Sequence: Synthetic oligonucleotide
agaauguaaauaagcccac

SEQ ID NO: 2007431 - RNA, 19 nt, Artificial Sequence
  Description of Artificial Sequence: Synthetic oligonucleotide
gacguguaggaaucuuagg

SEQ ID NO: 2007432 - RNA, 19 nt, Artificial Sequence
  Description of Artificial Sequence: Synthetic oligonucleotide
aaggacuucuaccccaaaa

SEQ ID NO: 2007433 - RNA, 19 nt, Artificial Sequence
  Description of Artificial Sequence: Synthetic oligonucleotide
ugcuagagccucuugucgc

SEQ ID NO: 2007434 - RNA, 19 nt, Artificial Sequence
  Description of Artificial Sequence: Synthetic oligonucleotide
gucaagugacacuaacaag

SEQ ID NO: 2007435 - RNA, 19 nt, Artificial Sequence
  Description of Artificial Sequence: Synthetic oligonucleotide
ugcguaaggcaauugaguu

SEQ ID NO: 2007436 - RNA, 19 nt, Artificial Sequence
  Description of Artificial Sequence: Synthetic oligonucleotide
agauaguuaagaauguaaa

SEQ ID NO: 2007437 - RNA, 19 nt, Artificial Sequence
  Description of Artificial Sequence: Synthetic oligonucleotide
caaagcccuuaaaauacag

SEQ ID NO: 2007438 - RNA, 19 nt, Artificial Sequence
  Description of Artificial Sequence: Synthetic oligonucleotide
auggcaaugucuauaucuc

SEQ ID NO: 2007439 - RNA, 19 nt, Artificial Sequence
  Description of Artificial Sequence: Synthetic oligonucleotide
cucuaaauagaguguggac

SEQ ID NO: 2007440 - RNA, 19 nt, Artificial Sequence
  Description of Artificial Sequence: Synthetic oligonucleotide
uaccaacuagcaagaagcc

SEQ ID NO: 2007441 - RNA, 19 nt, Artificial Sequence
  Description of Artificial Sequence: Synthetic oligonucleotide
cagcugaagaggauguacc

SEQ ID NO: 2007442 - RNA, 19 nt, Artificial Sequence
  Description of Artificial Sequence: Synthetic oligonucleotide
caucaguaauccucacugg

SEQ ID NO: 2007443 - RNA, 19 nt, Artificial Sequence
  Description of Artificial Sequence: Synthetic oligonucleotide
uucaagcugucuuagcuuu

SEQ ID NO: 2007444 - RNA, 19 nt, Artificial Sequence
  Description of Artificial Sequence: Synthetic oligonucleotide
ugucuauaucucauacuaa

SEQ ID NO: 2007445 - RNA, 19 nt, Artificial Sequence
  Description of Artificial Sequence: Synthetic oligonucleotide
uuaaggguucaucuugcua

SEQ ID NO: 2007446 - RNA, 19 nt, Artificial Sequence
  Description of Artificial Sequence: Synthetic oligonucleotide
gugaaagugugcguaaggc

SEQ ID NO: 2007447 - RNA, 19 nt, Artificial Sequence
  Description of Artificial Sequence: Synthetic oligonucleotide
augaugggccccugcgucc

SEQ ID NO: 2007448 - RNA, 19 nt, Artificial Sequence
  Description of Artificial Sequence: Synthetic oligonucleotide
aagugacacuaacaagagu

SEQ ID NO: 2007449 - RNA, 19 nt, Artificial Sequence
  Description of Artificial Sequence: Synthetic oligonucleotide
accccaaaagaucaucacu

SEQ ID NO: 2007450 - RNA, 19 nt, Artificial Sequence
  Description of Artificial Sequence: Synthetic oligonucleotide
aggauguaccagccguagc

SEQ ID NO: 2007451 - RNA, 19 nt, Artificial Sequence
  Description of Artificial Sequence: Synthetic oligonucleotide
auguaccagccguagcugg

SEQ ID NO: 2007452 - RNA, 19 nt, Artificial Sequence
  Description of Artificial Sequence: Synthetic oligonucleotide
aucuugcuaaugucaagug

SEQ ID NO: 2007453 - RNA, 19 nt, Artificial Sequence
  Description of Artificial Sequence: Synthetic oligonucleotide
cagauaguuaagaauguaa

SEQ ID NO: 2007454 - RNA, 19 nt, Artificial Sequence
  Description of Artificial Sequence: Synthetic oligonucleotide
acugugacguguaggaauc

SEQ ID NO: 2007455 - RNA, 19 nt, Artificial Sequence
  Description of Artificial Sequence: Synthetic oligonucleotide
aaggcccgggaccaucuuc

SEQ ID NO: 2007456 - RNA, 19 nt, Artificial Sequence
  Description of Artificial Sequence: Synthetic oligonucleotide
ucauucaacgcauccuguc

SEQ ID NO: 2007457 - RNA, 19 nt, Artificial Sequence
  Description of Artificial Sequence: Synthetic oligonucleotide
agaugaaguagaaggcccg

SEQ ID NO: 2007458 - RNA, 19 nt, Artificial Sequence
  Description of Artificial Sequence: Synthetic oligonucleotide
gaugaugggccccugcguc

SEQ ID NO: 2007459 - RNA, 19 nt, Artificial Sequence
  Description of Artificial Sequence: Synthetic oligonucleotide
uucaccuaccaacuagcaa

SEQ ID NO: 2007460 - RNA, 19 nt, Artificial Sequence
  Description of Artificial Sequence: Synthetic oligonucleotide
cuaaauagaguguggaccu

SEQ ID NO: 2007461 - RNA, 19 nt, Artificial Sequence
  Description of Artificial Sequence: Synthetic oligonucleotide
agccaugaaauuaauggcu

SEQ ID NO: 2007462 - RNA, 19 nt, Artificial Sequence
  Description of Artificial Sequence: Synthetic oligonucleotide
uagaucuuccugcauucuc

SEQ ID NO: 2007463 - RNA, 19 nt, Artificial Sequence
  Description of Artificial Sequence: Synthetic oligonucleotide
uguaccagccguagcuggc

SEQ ID NO: 2007464 - RNA, 19 nt, Artificial Sequence
  Description of Artificial Sequence: Synthetic oligonucleotide
agucagaggguuauaacca

SEQ ID NO: 2007465 - RNA, 19 nt, Artificial Sequence
  Description of Artificial Sequence: Synthetic oligonucleotide
aaauagaguguggaccuaa

SEQ ID NO: 2007466 - RNA, 19 nt, Artificial Sequence
  Description of Artificial Sequence: Synthetic oligonucleotide
guuuaauaaagaugcuaaa

SEQ ID NO: 2007467 - RNA, 19 nt, Artificial Sequence
  Description of Artificial Sequence: Synthetic oligonucleotide
ucuguaacuucugccuucc

SEQ ID NO: 2007468 - RNA, 19 nt, Artificial Sequence
  Description of Artificial Sequence: Synthetic oligonucleotide
agcaaggacuucuacccca

SEQ ID NO: 2007469 - RNA, 19 nt, Artificial Sequence
  Description of Artificial Sequence: Synthetic oligonucleotide
ugggcauuuagaucuuccu

SEQ ID NO: 2007470 - RNA, 19 nt, Artificial Sequence
  Description of Artificial Sequence: Synthetic oligonucleotide
cugcuagagccucuugucg

SEQ ID NO: 2007471 - RNA, 19 nt, Artificial Sequence
  Description of Artificial Sequence: Synthetic oligonucleotide
uuaauggcuguuucaucuc

SEQ ID NO: 2007472 - RNA, 19 nt, Artificial Sequence
  Description of Artificial Sequence: Synthetic oligonucleotide
cucuugucgcuuaacaaca

SEQ ID NO: 2007473 - RNA, 19 nt, Artificial Sequence
  Description of Artificial Sequence: Synthetic oligonucleotide
cuaaugucaagugacacua

SEQ ID NO: 2007474 - RNA, 19 nt, Artificial Sequence
  Description of Artificial Sequence: Synthetic oligonucleotide
ugcuaaugucaagugacac

SEQ ID NO: 2007475 - RNA, 19 nt, Artificial Sequence
  Description of Artificial Sequence: Synthetic oligonucleotide
aggcaauugaguugagggu

SEQ ID NO: 2007476 - RNA, 19 nt, Artificial Sequence
  Description of Artificial Sequence: Synthetic oligonucleotide
agaggguuauaaccaccuc

SEQ ID NO: 2007477 - RNA, 19 nt, Artificial Sequence
  Description of Artificial Sequence: Synthetic oligonucleotide
gacuguccuaucagcaagg

SEQ ID NO: 2007478 - RNA, 19 nt, Artificial Sequence
  Description of Artificial Sequence: Synthetic oligonucleotide
aauugaguugaggguuaag

SEQ ID NO: 2007479 - RNA, 19 nt, Artificial Sequence
  Description of Artificial Sequence: Synthetic oligonucleotide
agaucaucacuaggccucc

SEQ ID NO: 2007480 - RNA, 19 nt, Artificial Sequence
  Description of Artificial Sequence: Synthetic oligonucleotide
aucucuaaauagagugugg

SEQ ID NO: 2007481 - RNA, 19 nt, Artificial Sequence
  Description of Artificial Sequence: Synthetic oligonucleotide
uggcaaugucuauaucuca

SEQ ID NO: 2007482 - RNA, 19 nt, Artificial Sequence
  Description of Artificial Sequence: Synthetic oligonucleotide
gaggguuaaggguucaucu

SEQ ID NO: 2007483 - RNA, 19 nt, Artificial Sequence
  Description of Artificial Sequence: Synthetic oligonucleotide
ugggcucaccauuuauaag

SEQ ID NO: 2007484 - RNA, 19 nt, Artificial Sequence
  Description of Artificial Sequence: Synthetic oligonucleotide
aggaaucuuaggcccucgg

SEQ ID NO: 2007485 - RNA, 19 nt, Artificial Sequence
  Description of Artificial Sequence: Synthetic oligonucleotide
agcugcuagagccucuugu

SEQ ID NO: 2007486 - RNA, 19 nt, Artificial Sequence
  Description of Artificial Sequence: Synthetic oligonucleotide
uaccccaaaagaucaucac

SEQ ID NO: 2007487 - RNA, 19 nt, Artificial Sequence
  Description of Artificial Sequence: Synthetic oligonucleotide
acuagcaagaagccaugaa

SEQ ID NO: 2007488 - RNA, 19 nt, Artificial Sequence
  Description of Artificial Sequence: Synthetic oligonucleotide
uguuuacaucaguaauccu

SEQ ID NO: 2007489 - RNA, 19 nt, Artificial Sequence
  Description of Artificial Sequence: Synthetic oligonucleotide
aaggguucaucuugcuaau

SEQ ID NO: 2007490 - RNA, 19 nt, Artificial Sequence
  Description of Artificial Sequence: Synthetic oligonucleotide
agcaaaccccaucaacugu

SEQ ID NO: 2007491 - RNA, 19 nt, Artificial Sequence
  Description of Artificial Sequence: Synthetic oligonucleotide
ggguuaaggguucaucuug

SEQ ID NO: 2007492 - RNA, 19 nt, Artificial Sequence
  Description of Artificial Sequence: Synthetic oligonucleotide
ucucccuuggcuagucacu

SEQ ID NO: 2007493 - RNA, 19 nt, Artificial Sequence
  Description of Artificial Sequence: Synthetic oligonucleotide
ucaagcucacaaagaaauu

SEQ ID NO: 2007494 - RNA, 19 nt, Artificial Sequence
  Description of Artificial Sequence: Synthetic oligonucleotide
aguagaaggcccgggacca

SEQ ID NO: 2007495 - RNA, 19 nt, Artificial Sequence
  Description of Artificial Sequence: Synthetic oligonucleotide
cuugucgcuuaacaacaac

SEQ ID NO: 2007496 - RNA, 19 nt, Artificial Sequence
  Description of Artificial Sequence: Synthetic oligonucleotide
guaaauaagcccaccucuc

SEQ ID NO: 2007497 - RNA, 19 nt, Artificial Sequence
  Description of Artificial Sequence: Synthetic oligonucleotide
agguuccucggcgugcucc

SEQ ID NO: 2007498 - RNA, 19 nt, Artificial Sequence
  Description of Artificial Sequence: Synthetic oligonucleotide
uucaacgcauccugucaca

SEQ ID NO: 2007499 - RNA, 19 nt, Artificial Sequence
  Description of Artificial Sequence: Synthetic oligonucleotide
guagagaaagaugcagcug

SEQ ID NO: 2007500 - RNA, 19 nt, Artificial Sequence
  Description of Artificial Sequence: Synthetic oligonucleotide
ucacuaggccuccuuuaga

SEQ ID NO: 2007501 - RNA, 19 nt, Artificial Sequence
  Description of Artificial Sequence: Synthetic oligonucleotide
agaucuuccugcauucuca

SEQ ID NO: 2007502 - RNA, 19 nt, Artificial Sequence
  Description of Artificial Sequence: Synthetic oligonucleotide
auaucucauacuaaccaaa

SEQ ID NO: 2007503 - RNA, 19 nt, Artificial Sequence
  Description of Artificial Sequence: Synthetic oligonucleotide
gauguaccagccguagcug

SEQ ID NO: 2007504 - RNA, 19 nt, Artificial Sequence
  Description of Artificial Sequence: Synthetic oligonucleotide
caacuugggcauuuagauc

SEQ ID NO: 2007505 - RNA, 19 nt, Artificial Sequence
  Description of Artificial Sequence: Synthetic oligonucleotide
gaggauguaccagccguag

SEQ ID NO: 2007506 - RNA, 19 nt, Artificial Sequence
  Description of Artificial Sequence: Synthetic oligonucleotide
ucuaccccaaaagaucauc

SEQ ID NO: 2007507 - RNA, 19 nt, Artificial Sequence
  Description of Artificial Sequence: Synthetic oligonucleotide
agagacuguccuaucagca

SEQ ID NO: 2007508 - RNA, 19 nt, Artificial Sequence
  Description of Artificial Sequence: Synthetic oligonucleotide
cuaccccaaaagaucauca

SEQ ID NO: 2007509 - RNA, 19 nt, Artificial Sequence
  Description of Artificial Sequence: Synthetic oligonucleotide
uaauccucacuggugggcu

SEQ ID NO: 2007510 - RNA, 19 nt, Artificial Sequence
  Description of Artificial Sequence: Synthetic oligonucleotide
gucgcuuaacaacaacauc

SEQ ID NO: 2007511 - RNA, 19 nt, Artificial Sequence
  Description of Artificial Sequence: Synthetic oligonucleotide
ccucuugucgcuuaacaac

SEQ ID NO: 2007512 - RNA, 19 nt, Artificial Sequence
  Description of Artificial Sequence: Synthetic oligonucleotide
gcuuaacaacaacaucagg

SEQ ID NO: 2007513 - RNA, 19 nt, Artificial Sequence
  Description of Artificial Sequence: Synthetic oligonucleotide
cauucaacgcauccuguca

SEQ ID NO: 2007514 - RNA, 19 nt, Artificial Sequence
  Description of Artificial Sequence: Synthetic oligonucleotide
uggaccuaauggcaauguc

SEQ ID NO: 2007515 - RNA, 19 nt, Artificial Sequence
  Description of Artificial Sequence: Synthetic oligonucleotide
acaucucaaucuucugccu

SEQ ID NO: 2007516 - RNA, 19 nt, Artificial Sequence
  Description of Artificial Sequence: Synthetic oligonucleotide
ucuugucgcuuaacaacaa

SEQ ID NO: 2007517 - RNA, 19 nt, Artificial Sequence
  Description of Artificial Sequence: Synthetic oligonucleotide
aacuagcaagaagccauga

SEQ ID NO: 2007518 - RNA, 19 nt, Artificial Sequence
  Description of Artificial Sequence: Synthetic oligonucleotide
augaaauuaauggcuguuu

SEQ ID NO: 2007519 - RNA, 19 nt, Artificial Sequence
  Description of Artificial Sequence: Synthetic oligonucleotide
cguguaggaaucuuaggcc

SEQ ID NO: 2007520 - RNA, 19 nt, Artificial Sequence
  Description of Artificial Sequence: Synthetic oligonucleotide
guaauccucacuggugggc

SEQ ID NO: 2007521 - RNA, 19 nt, Artificial Sequence
  Description of Artificial Sequence: Synthetic oligonucleotide
gaccuaauggcaaugucua

SEQ ID NO: 2007522 - RNA, 19 nt, Artificial Sequence
  Description of Artificial Sequence: Synthetic oligonucleotide
caaacgagcagcugcuaga

SEQ ID NO: 2007523 - RNA, 19 nt, Artificial Sequence
  Description of Artificial Sequence: Synthetic oligonucleotide
ggacagagguuccucggcg

SEQ ID NO: 2007524 - RNA, 19 nt, Artificial Sequence
  Description of Artificial Sequence: Synthetic oligonucleotide
caacuagcaagaagccaug

SEQ ID NO: 2007525 - RNA, 19 nt, Artificial Sequence
  Description of Artificial Sequence: Synthetic oligonucleotide
augucaagugacacuaaca

SEQ ID NO: 2007526 - RNA, 19 nt, Artificial Sequence
  Description of Artificial Sequence: Synthetic oligonucleotide
agaugaugggccccugcgu

SEQ ID NO: 2007527 - RNA, 19 nt, Artificial Sequence
  Description of Artificial Sequence: Synthetic oligonucleotide
caacuguuuacaucaguaa

SEQ ID NO: 2007528 - RNA, 19 nt, Artificial Sequence
  Description of Artificial Sequence: Synthetic oligonucleotide
ugaggguuaaggguucauc

SEQ ID NO: 2007529 - RNA, 19 nt, Artificial Sequence
  Description of Artificial Sequence: Synthetic oligonucleotide
aguugaggguuaaggguuc

SEQ ID NO: 2007530 - RNA, 19 nt, Artificial Sequence
  Description of Artificial Sequence: Synthetic oligonucleotide
ugaacagcaagaggccuuc

SEQ ID NO: 2007531 - RNA, 19 nt, Artificial Sequence
  Description of Artificial Sequence: Synthetic oligonucleotide
gugugcguaaggcaauuga

SEQ ID NO: 2007532 - RNA, 19 nt, Artificial Sequence
  Description of Artificial Sequence: Synthetic oligonucleotide
ccuaccaacuagcaagaag

SEQ ID NO: 2007533 - RNA, 19 nt, Artificial Sequence
  Description of Artificial Sequence: Synthetic oligonucleotide
uacuaaccaaagcccuuaa

SEQ ID NO: 2007534 - RNA, 19 nt, Artificial Sequence
  Description of Artificial Sequence: Synthetic oligonucleotide
uuacaucaguaauccucac

SEQ ID NO: 2007535 - RNA, 19 nt, Artificial Sequence
  Description of Artificial Sequence: Synthetic oligonucleotide
acuaaccaaagcccuuaaa

SEQ ID NO: 2007536 - RNA, 19 nt, Artificial Sequence
  Description of Artificial Sequence: Synthetic oligonucleotide
cuaacaagagucuuagcuu

SEQ ID NO: 2007537 - RNA, 19 nt, Artificial Sequence
  Description of Artificial Sequence: Synthetic oligonucleotide
uuacaaaguucuguacaua

SEQ ID NO: 2007538 - RNA, 19 nt, Artificial Sequence
  Description of Artificial Sequence: Synthetic oligonucleotide
ucacugugaaagugugcgu

SEQ ID NO: 2007539 - RNA, 19 nt, Artificial Sequence
  Description of Artificial Sequence: Synthetic oligonucleotide
ggggugacagaugaaguag

SEQ ID NO: 2007540 - RNA, 19 nt, Artificial Sequence
  Description of Artificial Sequence: Synthetic oligonucleotide
aaagugugcguaaggcaau

SEQ ID NO: 2007541 - RNA, 19 nt, Artificial Sequence
  Description of Artificial Sequence: Synthetic oligonucleotide
gugggcucaccauuuauaa

SEQ ID NO: 2007542 - RNA, 19 nt, Artificial Sequence
  Description of Artificial Sequence: Synthetic oligonucleotide
agggagcccacugugacgu

SEQ ID NO: 2007543 - RNA, 19 nt, Artificial Sequence
  Description of Artificial Sequence: Synthetic oligonucleotide
aauagaguguggaccuaau

SEQ ID NO: 2007544 - RNA, 19 nt, Artificial Sequence
  Description of Artificial Sequence: Synthetic oligonucleotide
cuaauggcaaugucuauau

SEQ ID NO: 2007545 - RNA, 19 nt, Artificial Sequence
  Description of Artificial Sequence: Synthetic oligonucleotide
aggguuaaggguucaucuu

SEQ ID NO: 2007546 - RNA, 19 nt, Artificial Sequence
  Description of Artificial Sequence: Synthetic oligonucleotide
cuagucacugugaaagugu

SEQ ID NO: 2007547 - RNA, 19 nt, Artificial Sequence
  Description of Artificial Sequence: Synthetic oligonucleotide
aaaccccaucaacuguuua

SEQ ID NO: 2007548 - RNA, 19 nt, Artificial Sequence
  Description of Artificial Sequence: Synthetic oligonucleotide
ggaagacaucauucaacgc

SEQ ID NO: 2007549 - RNA, 19 nt, Artificial Sequence
  Description of Artificial Sequence: Synthetic oligonucleotide
auggcuguuucaucucuaa

SEQ ID NO: 2007550 - RNA, 19 nt, Artificial Sequence
  Description of Artificial Sequence: Synthetic oligonucleotide
cacagagacuguccuauca

SEQ ID NO: 2007551 - RNA, 19 nt, Artificial Sequence
  Description of Artificial Sequence: Synthetic oligonucleotide
ucaccagucagaggguuau

SEQ ID NO: 2007552 - RNA, 19 nt, Artificial Sequence
  Description of Artificial Sequence: Synthetic oligonucleotide
cacuaacaagagucuuagc

SEQ ID NO: 2007553 - RNA, 19 nt, Artificial Sequence
  Description of Artificial Sequence: Synthetic oligonucleotide
gguuaaggguucaucuugc

SEQ ID NO: 2007554 - RNA, 19 nt, Artificial Sequence
  Description of Artificial Sequence: Synthetic oligonucleotide
uucaccagucagaggguua

SEQ ID NO: 2007555 - RNA, 19 nt, Artificial Sequence
  Description of Artificial Sequence: Synthetic oligonucleotide
cugccucugccucaacgcc

SEQ ID NO: 2007556 - RNA, 19 nt, Artificial Sequence
  Description of Artificial Sequence: Synthetic oligonucleotide
auacuaaccaaagcccuua

SEQ ID NO: 2007557 - RNA, 19 nt, Artificial Sequence
  Description of Artificial Sequence: Synthetic oligonucleotide
uggcuguuucaucucuaaa

SEQ ID NO: 2007558 - RNA, 19 nt, Artificial Sequence
  Description of Artificial Sequence: Synthetic oligonucleotide
cugugaaagugugcguaag

SEQ ID NO: 2007559 - RNA, 19 nt, Artificial Sequence
  Description of Artificial Sequence: Synthetic oligonucleotide
ugacacuaacaagagucuu

SEQ ID NO: 2007560 - RNA, 19 nt, Artificial Sequence
  Description of Artificial Sequence: Synthetic oligonucleotide
cagggagcccacugugacg

SEQ ID NO: 2007561 - RNA, 19 nt, Artificial Sequence
  Description of Artificial Sequence: Synthetic oligonucleotide
ccuccuuuagaaagucugc

SEQ ID NO: 2007562 - RNA, 19 nt, Artificial Sequence
  Description of Artificial Sequence: Synthetic oligonucleotide
agggcgcgcggacagaggu

SEQ ID NO: 2007563 - RNA, 19 nt, Artificial Sequence
  Description of Artificial Sequence: Synthetic oligonucleotide
gccguagcuggccagcagg

SEQ ID NO: 2007564 - RNA, 19 nt, Artificial Sequence
  Description of Artificial Sequence: Synthetic oligonucleotide
cuguccuaucagcaaggac

SEQ ID NO: 2007565 - RNA, 19 nt, Artificial Sequence
  Description of Artificial Sequence: Synthetic oligonucleotide
cuuggcuagucacugugaa

SEQ ID NO: 2007566 - RNA, 19 nt, Artificial Sequence
  Description of Artificial Sequence: Synthetic oligonucleotide
cccaaaagaucaucacuag

SEQ ID NO: 2007567 - RNA, 19 nt, Artificial Sequence
  Description of Artificial Sequence: Synthetic oligonucleotide
acuaggccuccuuuagaaa

SEQ ID NO: 2007568 - RNA, 19 nt, Artificial Sequence
  Description of Artificial Sequence: Synthetic oligonucleotide
cagcaaggacuucuacccc

SEQ ID NO: 2007569 - RNA, 19 nt, Artificial Sequence
  Description of Artificial Sequence: Synthetic oligonucleotide
gcuagucacugugaaagug

SEQ ID NO: 2007570 - RNA, 19 nt, Artificial Sequence
  Description of Artificial Sequence: Synthetic oligonucleotide
gcaaguuucuggaugacaa

SEQ ID NO: 2007571 - RNA, 19 nt, Artificial Sequence
  Description of Artificial Sequence: Synthetic oligonucleotide
ggauguaccagccguagcu

SEQ ID NO: 2007572 - RNA, 19 nt, Artificial Sequence
  Description of Artificial Sequence: Synthetic oligonucleotide
cugucuuagcuuuuccuua

SEQ ID NO: 2007573 - RNA, 19 nt, Artificial Sequence
  Description of Artificial Sequence: Synthetic oligonucleotide
cuucaccuaccaacuagca

SEQ ID NO: 2007574 - RNA, 19 nt, Artificial Sequence
  Description of Artificial Sequence: Synthetic oligonucleotide
gcguaaggcaauugaguug

SEQ ID NO: 2007575 - RNA, 19 nt, Artificial Sequence
  Description of Artificial Sequence: Synthetic oligonucleotide
accagucagaggguuauaa

SEQ ID NO: 2007576 - RNA, 19 nt, Artificial Sequence
  Description of Artificial Sequence: Synthetic oligonucleotide
cucacuggugggcucacca

SEQ ID NO: 2007577 - RNA, 19 nt, Artificial Sequence
  Description of Artificial Sequence: Synthetic oligonucleotide
uccagcgcagggcgcgcgg

SEQ ID NO: 2007578 - RNA, 19 nt, Artificial Sequence
  Description of Artificial Sequence: Synthetic oligonucleotide
ucggucuccagcgcagggc

SEQ ID NO: 2007579 - RNA, 19 nt, Artificial Sequence
  Description of Artificial Sequence: Synthetic oligonucleotide
aaagucugcugaacagcaa

SEQ ID NO: 2007580 - RNA, 19 nt, Artificial Sequence
  Description of Artificial Sequence: Synthetic oligonucleotide
gucuuagcuuuuccuuaug

SEQ ID NO: 2007581 - RNA, 19 nt, Artificial Sequence
  Description of Artificial Sequence: Synthetic oligonucleotide
uggugggcucaccauuuau

SEQ ID NO: 2007582 - RNA, 19 nt, Artificial Sequence
  Description of Artificial Sequence: Synthetic oligonucleotide
uccugucacagagacuguc

SEQ ID NO: 2007583 - RNA, 19 nt, Artificial Sequence
  Description of Artificial Sequence: Synthetic oligonucleotide
ugcugucccacaucucaau

SEQ ID NO: 2007584 - RNA, 19 nt, Artificial Sequence
  Description of Artificial Sequence: Synthetic oligonucleotide
aucauucaacgcauccugu

SEQ ID NO: 2007585 - RNA, 19 nt, Artificial Sequence
  Description of Artificial Sequence: Synthetic oligonucleotide
caucuugcuaaugucaagu

SEQ ID NO: 2007586 - RNA, 19 nt, Artificial Sequence
  Description of Artificial Sequence: Synthetic oligonucleotide
ucaagcugucuuagcuuuu

SEQ ID NO: 2007587 - RNA, 19 nt, Artificial Sequence
  Description of Artificial Sequence: Synthetic oligonucleotide
ggcuguuucaucucuaaau

SEQ ID NO: 2007588 - RNA, 19 nt, Artificial Sequence
  Description of Artificial Sequence: Synthetic oligonucleotide
ugugacguguaggaaucuu

SEQ ID NO: 2007589 - RNA, 19 nt, Artificial Sequence
  Description of Artificial Sequence: Synthetic oligonucleotide
uaaauagaguguggaccua

SEQ ID NO: 2007590 - RNA, 19 nt, Artificial Sequence
  Description of Artificial Sequence: Synthetic oligonucleotide
uuuucaacuugggcauuua

SEQ ID NO: 2007591 - RNA, 19 nt, Artificial Sequence
  Description of Artificial Sequence: Synthetic oligonucleotide
uguggccuuccuguguuuc

SEQ ID NO: 2007592 - RNA, 19 nt, Artificial Sequence
  Description of Artificial Sequence: Synthetic oligonucleotide
gcugcuagagccucuuguc

SEQ ID NO: 2007593 - RNA, 19 nt, Artificial Sequence
  Description of Artificial Sequence: Synthetic oligonucleotide
ucaacgcccucagucggac

SEQ ID NO: 2007594 - RNA, 19 nt, Artificial Sequence
  Description of Artificial Sequence: Synthetic oligonucleotide
agcaagaggccuucaccua

SEQ ID NO: 2007595 - RNA, 19 nt, Artificial Sequence
  Description of Artificial Sequence: Synthetic oligonucleotide
gaguugaggguuaaggguu

SEQ ID NO: 2007596 - RNA, 19 nt, Artificial Sequence
  Description of Artificial Sequence: Synthetic oligonucleotide
cugcguccaggucuccagg

SEQ ID NO: 2007597 - RNA, 19 nt, Artificial Sequence
  Description of Artificial Sequence: Synthetic oligonucleotide
cucccuuggcuagucacug

SEQ ID NO: 2007598 - RNA, 19 nt, Artificial Sequence
  Description of Artificial Sequence: Synthetic oligonucleotide
cagaggguuauaaccaccu

SEQ ID NO: 2007599 - RNA, 19 nt, Artificial Sequence
  Description of Artificial Sequence: Synthetic oligonucleotide
caccuaccaacuagcaaga

SEQ ID NO: 2007600 - RNA, 19 nt, Artificial Sequence
  Description of Artificial Sequence: Synthetic oligonucleotide
agugugcguaaggcaauug

SEQ ID NO: 2007601 - RNA, 19 nt, Artificial Sequence
  Description of Artificial Sequence: Synthetic oligonucleotide
uagcuucauccaccagaug

SEQ ID NO: 2007602 - RNA, 19 nt, Artificial Sequence
  Description of Artificial Sequence: Synthetic oligonucleotide
ucacagagacuguccuauc

SEQ ID NO: 2007603 - RNA, 19 nt, Artificial Sequence
  Description of Artificial Sequence: Synthetic oligonucleotide
gcuaaugucaagugacacu

SEQ ID NO: 2007604 - RNA, 19 nt, Artificial Sequence
  Description of Artificial Sequence: Synthetic oligonucleotide
aagugugcguaaggcaauu

SEQ ID NO: 2007605 - RNA, 19 nt, Artificial Sequence
  Description of Artificial Sequence: Synthetic oligonucleotide
guaccagccguagcuggcc

SEQ ID NO: 2007606 - RNA, 19 nt, Artificial Sequence
  Description of Artificial Sequence: Synthetic oligonucleotide
caagcucacaaagaaauuu

SEQ ID NO: 2007607 - RNA, 19 nt, Artificial Sequence
  Description of Artificial Sequence: Synthetic oligonucleotide
ugaugggccccugcgucca

SEQ ID NO: 2007608 - RNA, 19 nt, Artificial Sequence
  Description of Artificial Sequence: Synthetic oligonucleotide
agcccuuaaaauacagaua

SEQ ID NO: 2007609 - RNA, 19 nt, Artificial Sequence
  Description of Artificial Sequence: Synthetic oligonucleotide
gcggacagagguuccucgg

SEQ ID NO: 2007610 - RNA, 19 nt, Artificial Sequence
  Description of Artificial Sequence: Synthetic oligonucleotide
cuaucagcaaggacuucua

SEQ ID NO: 2007611 - RNA, 19 nt, Artificial Sequence
  Description of Artificial Sequence: Synthetic oligonucleotide
auguuacuuuucaaguauu

SEQ ID NO: 2007612 - RNA, 19 nt, Artificial Sequence
  Description of Artificial Sequence: Synthetic oligonucleotide
agagguuccucggcgugcu

SEQ ID NO: 2007613 - RNA, 19 nt, Artificial Sequence
  Description of Artificial Sequence: Synthetic oligonucleotide
ccagucagaggguuauaac

SEQ ID NO: 2007614 - RNA, 19 nt, Artificial Sequence
  Description of Artificial Sequence: Synthetic oligonucleotide
guaggaaucuuaggcccuc

SEQ ID NO: 2007615 - RNA, 19 nt, Artificial Sequence
  Description of Artificial Sequence: Synthetic oligonucleotide
ggguuauaaccaccucccc

SEQ ID NO: 2007616 - RNA, 19 nt, Artificial Sequence
  Description of Artificial Sequence: Synthetic oligonucleotide
cacugugacguguaggaau

SEQ ID NO: 2007617 - RNA, 19 nt, Artificial Sequence
  Description of Artificial Sequence: Synthetic oligonucleotide
ccaacuagcaagaagccau

SEQ ID NO: 2007618 - RNA, 19 nt, Artificial Sequence
  Description of Artificial Sequence: Synthetic oligonucleotide
cguaaggcaauugaguuga

SEQ ID NO: 2007619 - RNA, 19 nt, Artificial Sequence
  Description of Artificial Sequence: Synthetic oligonucleotide
cccacugugacguguagga

SEQ ID NO: 2007620 - RNA, 19 nt, Artificial Sequence
  Description of Artificial Sequence: Synthetic oligonucleotide
gucacagagacuguccuau

SEQ ID NO: 2007621 - RNA, 19 nt, Artificial Sequence
  Description of Artificial Sequence: Synthetic oligonucleotide
ggaccuaauggcaaugucu

SEQ ID NO: 2007622 - RNA, 19 nt, Artificial Sequence
  Description of Artificial Sequence: Synthetic oligonucleotide
cacugugaaagugugcgua

SEQ ID NO: 2007623 - RNA, 19 nt, Artificial Sequence
  Description of Artificial Sequence: Synthetic oligonucleotide
agagccucuugucgcuuaa

SEQ ID NO: 2007624 - RNA, 19 nt, Artificial Sequence
  Description of Artificial Sequence: Synthetic oligonucleotide
gacagagguuccucggcgu

SEQ ID NO: 2007625 - RNA, 19 nt, Artificial Sequence
  Description of Artificial Sequence: Synthetic oligonucleotide
acgcccucagucggacugc

SEQ ID NO: 2007626 - RNA, 19 nt, Artificial Sequence
  Description of Artificial Sequence: Synthetic oligonucleotide
ucccuuggcuagucacugu

SEQ ID NO: 2007627 - RNA, 19 nt, Artificial Sequence
  Description of Artificial Sequence: Synthetic oligonucleotide
ccucaacgcccucagucgg

SEQ ID NO: 2007628 - RNA, 19 nt, Artificial Sequence
  Description of Artificial Sequence: Synthetic oligonucleotide
agucggacugcaaguuucu

SEQ ID NO: 2007629 - RNA, 19 nt, Artificial Sequence
  Description of Artificial Sequence: Synthetic oligonucleotide
uccaggucuccaggagcag

SEQ ID NO: 2007630 - RNA, 19 nt, Artificial Sequence
  Description of Artificial Sequence: Synthetic oligonucleotide
aggguucaucuugcuaaug

SEQ ID NO: 2007631 - RNA, 19 nt, Artificial Sequence
  Description of Artificial Sequence: Synthetic oligonucleotide
gugacacuaacaagagucu

SEQ ID NO: 2007632 - RNA, 19 nt, Artificial Sequence
  Description of Artificial Sequence: Synthetic oligonucleotide
gugcguaaggcaauugagu

SEQ ID NO: 2007633 - RNA, 19 nt, Artificial Sequence
  Description of Artificial Sequence: Synthetic oligonucleotide
gugacguguaggaaucuua

SEQ ID NO: 2007634 - RNA, 19 nt, Artificial Sequence
  Description of Artificial Sequence: Synthetic oligonucleotide
agaaggcccgggaccaucu

SEQ ID NO: 2007635 - RNA, 19 nt, Artificial Sequence
  Description of Artificial Sequence: Synthetic oligonucleotide
gcaaugucuauaucucaua

SEQ ID NO: 2007636 - RNA, 19 nt, Artificial Sequence
  Description of Artificial Sequence: Synthetic oligonucleotide
uugaggguuaaggguucau

SEQ ID NO: 2007637 - RNA, 19 nt, Artificial Sequence
  Description of Artificial Sequence: Synthetic oligonucleotide
gaacagccucagcuugguc

SEQ ID NO: 2007638 - RNA, 19 nt, Artificial Sequence
  Description of Artificial Sequence: Synthetic oligonucleotide
auacagaagcaaaccccau

SEQ ID NO: 2007639 - RNA, 19 nt, Artificial Sequence
  Description of Artificial Sequence: Synthetic oligonucleotide
accucucccuuggcuaguc

SEQ ID NO: 2007640 - RNA, 19 nt, Artificial Sequence
  Description of Artificial Sequence: Synthetic oligonucleotide
acuggugggcucaccauuu

SEQ ID NO: 2007641 - RNA, 19 nt, Artificial Sequence
  Description of Artificial Sequence: Synthetic oligonucleotide
caacgcauccugucacaga

SEQ ID NO: 2007642 - RNA, 19 nt, Artificial Sequence
  Description of Artificial Sequence: Synthetic oligonucleotide
cuccuuuagaaagucugcu

SEQ ID NO: 2007643 - RNA, 19 nt, Artificial Sequence
  Description of Artificial Sequence: Synthetic oligonucleotide
guaaggcaauugaguugag

SEQ ID NO: 2007644 - RNA, 19 nt, Artificial Sequence
  Description of Artificial Sequence: Synthetic oligonucleotide
cccuuggcuagucacugug

SEQ ID NO: 2007645 - RNA, 19 nt, Artificial Sequence
  Description of Artificial Sequence: Synthetic oligonucleotide
ccugcguccaggucuccag

SEQ ID NO: 2007646 - RNA, 19 nt, Artificial Sequence
  Description of Artificial Sequence: Synthetic oligonucleotide
ccuugaguuuaauaaagau

SEQ ID NO: 2007647 - RNA, 19 nt, Artificial Sequence
  Description of Artificial Sequence: Synthetic oligonucleotide
ggaaucuuaggcccucggu

SEQ ID NO: 2007648 - RNA, 19 nt, Artificial Sequence
  Description of Artificial Sequence: Synthetic oligonucleotide
agaggauguaccagccgua

SEQ ID NO: 2007649 - RNA, 19 nt, Artificial Sequence
  Description of Artificial Sequence: Synthetic oligonucleotide
ggcucaccauuuauaagga

SEQ ID NO: 2007650 - RNA, 19 nt, Artificial Sequence
  Description of Artificial Sequence: Synthetic oligonucleotide
guugaggguuaaggguuca

SEQ ID NO: 2007651 - RNA, 19 nt, Artificial Sequence
  Description of Artificial Sequence: Synthetic oligonucleotide
gucggacugcaaguuucug

SEQ ID NO: 2007652 - RNA, 19 nt, Artificial Sequence
  Description of Artificial Sequence: Synthetic oligonucleotide
ccaccucucccuuggcuag

SEQ ID NO: 2007653 - RNA, 19 nt, Artificial Sequence
  Description of Artificial Sequence: Synthetic oligonucleotide
cggacugcaaguuucugga

SEQ ID NO: 2007654 - RNA, 19 nt, Artificial Sequence
  Description of Artificial Sequence: Synthetic oligonucleotide
gcugucuuagcuuuuccuu

SEQ ID NO: 2007655 - RNA, 19 nt, Artificial Sequence
  Description of Artificial Sequence: Synthetic oligonucleotide
ggcaauugaguugaggguu

SEQ ID NO: 2007656 - RNA, 19 nt, Artificial Sequence
  Description of Artificial Sequence: Synthetic oligonucleotide
gaugggccccugcguccag

SEQ ID NO: 2007657 - RNA, 19 nt, Artificial Sequence
  Description of Artificial Sequence: Synthetic oligonucleotide
cagggcgcgcggacagagg

SEQ ID NO: 2007658 - RNA, 19 nt, Artificial Sequence
  Description of Artificial Sequence: Synthetic oligonucleotide
gggugacagaugaaguaga

SEQ ID NO: 2007659 - RNA, 19 nt, Artificial Sequence
  Description of Artificial Sequence: Synthetic oligonucleotide
agaugcagcugaagaggau

SEQ ID NO: 2007660 - RNA, 19 nt, Artificial Sequence
  Description of Artificial Sequence: Synthetic oligonucleotide
agguuccagaacagccuca

SEQ ID NO: 2007661 - RNA, 19 nt, Artificial Sequence
  Description of Artificial Sequence: Synthetic oligonucleotide
ccuaauggcaaugucuaua

SEQ ID NO: 2007662 - RNA, 19 nt, Artificial Sequence
  Description of Artificial Sequence: Synthetic oligonucleotide
ggcaaugucuauaucucau

SEQ ID NO: 2007663 - RNA, 19 nt, Artificial Sequence
  Description of Artificial Sequence: Synthetic oligonucleotide
gagccucuugucgcuuaac

SEQ ID NO: 2007664 - RNA, 19 nt, Artificial Sequence
  Description of Artificial Sequence: Synthetic oligonucleotide
ucuccagcgcagggcgcgc

SEQ ID NO: 2007665 - RNA, 19 nt, Artificial Sequence
  Description of Artificial Sequence: Synthetic oligonucleotide
augcugucccacaucucaa

SEQ ID NO: 2007666 - RNA, 19 nt, Artificial Sequence
  Description of Artificial Sequence: Synthetic oligonucleotide
cgcggacagagguuccucg

SEQ ID NO: 2007667 - RNA, 19 nt, Artificial Sequence
  Description of Artificial Sequence: Synthetic oligonucleotide
caauugaguugaggguuaa

SEQ ID NO: 2007668 - RNA, 19 nt, Artificial Sequence
  Description of Artificial Sequence: Synthetic oligonucleotide
ggugggcucaccauuuaua

SEQ ID NO: 2007669 - RNA, 19 nt, Artificial Sequence
  Description of Artificial Sequence: Synthetic oligonucleotide
cagcugcuagagccucuug

SEQ ID NO: 2007670 - RNA, 19 nt, Artificial Sequence
  Description of Artificial Sequence: Synthetic oligonucleotide
guguggaccuaauggcaau

SEQ ID NO: 2007671 - RNA, 19 nt, Artificial Sequence
  Description of Artificial Sequence: Synthetic oligonucleotide
accuaccaacuagcaagaa

SEQ ID NO: 2007672 - RNA, 19 nt, Artificial Sequence
  Description of Artificial Sequence: Synthetic oligonucleotide
gcucaccauuuauaaggaa

SEQ ID NO: 2007673 - RNA, 19 nt, Artificial Sequence
  Description of Artificial Sequence: Synthetic oligonucleotide
gcaauugaguugaggguua

SEQ ID NO: 2007674 - RNA, 19 nt, Artificial Sequence
  Description of Artificial Sequence: Synthetic oligonucleotide
ggcgcgcggacagagguuc

SEQ ID NO: 2007675 - RNA, 19 nt, Artificial Sequence
  Description of Artificial Sequence: Synthetic oligonucleotide
cggacagagguuccucggc

SEQ ID NO: 2007676 - RNA, 19 nt, Artificial Sequence
  Description of Artificial Sequence: Synthetic oligonucleotide
gcuagagccucuugucgcu

SEQ ID NO: 2007677 - RNA, 19 nt, Artificial Sequence
  Description of Artificial Sequence: Synthetic oligonucleotide
cuccagcgcagggcgcgcg

SEQ ID NO: 2007678 - RNA, 19 nt, Artificial Sequence
  Description of Artificial Sequence: Synthetic oligonucleotide
gcagggcgcgcggacagag

SEQ ID NO: 2007679 - RNA, 19 nt, Artificial Sequence
  Description of Artificial Sequence: Synthetic oligonucleotide
cuuaggcccucggucucca

SEQ ID NO: 2007680 - RNA, 19 nt, Artificial Sequence
  Description of Artificial Sequence: Synthetic oligonucleotide
ccuuggcuagucacuguga

SEQ ID NO: 2007681 - RNA, 19 nt, Artificial Sequence
  Description of Artificial Sequence: Synthetic oligonucleotide
acgcauccugucacagaga

SEQ ID NO: 2007682 - RNA, 19 nt, Artificial Sequence
  Description of Artificial Sequence: Synthetic oligonucleotide
auccugucacagagacugu

SEQ ID NO: 2007683 - RNA, 19 nt, Artificial Sequence
  Description of Artificial Sequence: Synthetic oligonucleotide
caaggacuucuaccccaaa

SEQ ID NO: 2007684 - RNA, 19 nt, Artificial Sequence
  Description of Artificial Sequence: Synthetic oligonucleotide
ggcuagucacugugaaagu

SEQ ID NO: 2007685 - RNA, 19 nt, Artificial Sequence
  Description of Artificial Sequence: Synthetic oligonucleotide
cagcgcagggcgcgcggac

SEQ ID NO: 2007686 - RNA, 19 nt, Artificial Sequence
  Description of Artificial Sequence: Synthetic oligonucleotide
ccaccagaugaugggcccc

SEQ ID NO: 2007687 - RNA, 19 nt, Artificial Sequence
  Description of Artificial Sequence: Synthetic oligonucleotide
caaaccccaucaacuguuu

SEQ ID NO: 2007688 - RNA, 19 nt, Artificial Sequence
  Description of Artificial Sequence: Synthetic oligonucleotide
gcaaaccccaucaacuguu

SEQ ID NO: 2007689 - RNA, 19 nt, Artificial Sequence
  Description of Artificial Sequence: Synthetic oligonucleotide
gcaaggacuucuaccccaa

SEQ ID NO: 2007690 - RNA, 19 nt, Artificial Sequence
  Description of Artificial Sequence: Synthetic oligonucleotide
cucagucggacugcaaguu

SEQ ID NO: 2007691 - RNA, 19 nt, Artificial Sequence
  Description of Artificial Sequence: Synthetic oligonucleotide
ccccuucaccagucagagg

SEQ ID NO: 2007692 - RNA, 19 nt, Artificial Sequence
  Description of Artificial Sequence: Synthetic oligonucleotide
cucaaacgagcagcugcua

SEQ ID NO: 2007693 - RNA, 19 nt, Artificial Sequence
  Description of Artificial Sequence: Synthetic oligonucleotide
ccucagucggacugcaagu

SEQ ID NO: 2007694 - RNA, 19 nt, Artificial Sequence
  Description of Artificial Sequence: Synthetic oligonucleotide
gcccgggaccaucuucuuc

SEQ ID NO: 2007695 - RNA, 19 nt, Artificial Sequence
  Description of Artificial Sequence: Synthetic oligonucleotide
caccuccccgcaaaggcuu

SEQ ID NO: 2007696 - RNA, 19 nt, Artificial Sequence
  Description of Artificial Sequence: Synthetic oligonucleotide
gcccucggucuccagcgca

SEQ ID NO: 2007697 - RNA, 19 nt, Artificial Sequence
  Description of Artificial Sequence: Synthetic oligonucleotide
caccagaugaugggccccu

SEQ ID NO: 2007698 - RNA, 19 nt, Artificial Sequence
  Description of Artificial Sequence: Synthetic oligonucleotide
ggccuucaccuaccaacua

SEQ ID NO: 2007699 - RNA, 19 nt, Artificial Sequence
  Description of Artificial Sequence: Synthetic oligonucleotide
ggacugcaaguuucuggau

SEQ ID NO: 2007700 - RNA, 19 nt, Artificial Sequence
  Description of Artificial Sequence: Synthetic oligonucleotide
gaaggcccgggaccaucuu

SEQ ID NO: 2007701 - RNA, 19 nt, Artificial Sequence
  Description of Artificial Sequence: Synthetic oligonucleotide
cugugacguguaggaaucu

SEQ ID NO: 2007702 - RNA, 19 nt, Artificial Sequence
  Description of Artificial Sequence: Synthetic oligonucleotide
accuccccgcaaaggcuuu

SEQ ID NO: 2007703 - RNA, 19 nt, Artificial Sequence
  Description of Artificial Sequence: Synthetic oligonucleotide
gcccaccucucccuuggcu

SEQ ID NO: 2007704 - RNA, 19 nt, Artificial Sequence
  Description of Artificial Sequence: Synthetic oligonucleotide
ccucacuggugggcucacc

SEQ ID NO: 2007705 - RNA, 19 nt, Artificial Sequence
  Description of Artificial Sequence: Synthetic oligonucleotide
caacgcccucagucggacu

SEQ ID NO: 2007706 - RNA, 19 nt, Artificial Sequence
  Description of Artificial Sequence: Synthetic oligonucleotide
gccccugcguccaggucuc

SEQ ID NO: 2007707 - RNA, 19 nt, Artificial Sequence
  Description of Artificial Sequence: Synthetic oligonucleotide
gcgcggacagagguuccuc

SEQ ID NO: 2007708 - RNA, 19 nt, Artificial Sequence
  Description of Artificial Sequence: Synthetic oligonucleotide
guagaaggcccgggaccau

SEQ ID NO: 2007709 - RNA, 19 nt, Artificial Sequence
  Description of Artificial Sequence: Synthetic oligonucleotide
caccagucagaggguuaua

SEQ ID NO: 2007710 - RNA, 19 nt, Artificial Sequence
  Description of Artificial Sequence: Synthetic oligonucleotide
ccacugugacguguaggaa

SEQ ID NO: 2007711 - RNA, 19 nt, Artificial Sequence
  Description of Artificial Sequence: Synthetic oligonucleotide
cugccucaacgcccucagu

SEQ ID NO: 2007712 - RNA, 19 nt, Artificial Sequence
  Description of Artificial Sequence: Synthetic oligonucleotide
ggcccgggaccaucuucuu

SEQ ID NO: 2007713 - RNA, 19 nt, Artificial Sequence
  Description of Artificial Sequence: Synthetic oligonucleotide
ccccugcguccaggucucc

SEQ ID NO: 2007714 - RNA, 19 nt, Artificial Sequence
  Description of Artificial Sequence: Synthetic oligonucleotide
cgcccucagucggacugca

SEQ ID NO: 2007715 - RNA, 19 nt, Artificial Sequence
  Description of Artificial Sequence: Synthetic oligonucleotide
gggcgcgcggacagagguu

SEQ ID NO: 2007716 - RNA, 19 nt, Artificial Sequence
  Description of Artificial Sequence: Synthetic oligonucleotide
cgcgcggacagagguuccu

SEQ ID NO: 2007717 - RNA, 19 nt, Artificial Sequence
  Description of Artificial Sequence: Synthetic oligonucleotide
cgcagggcgcgcggacaga

SEQ ID NO: 2007718 - RNA, 19 nt, Artificial Sequence
  Description of Artificial Sequence: Synthetic oligonucleotide
ccuccccgcaaaggcuuuu

SEQ ID NO: 2007719 - RNA, 19 nt, Artificial Sequence
  Description of Artificial Sequence: Synthetic oligonucleotide
uuaauaaucaaguacaaug

SEQ ID NO: 2007720 - RNA, 19 nt, Artificial Sequence
  Description of Artificial Sequence: Synthetic oligonucleotide
aauaagcuagaggagaccc

SEQ ID NO: 2007721 - RNA, 19 nt, Artificial Sequence
  Description of Artificial Sequence: Synthetic oligonucleotide
aaaucaaguguuuauugag

SEQ ID NO: 2007722 - RNA, 19 nt, Artificial Sequence
  Description of Artificial Sequence: Synthetic oligonucleotide
uuuggggccaaucaaauca

SEQ ID NO: 2007723 - RNA, 19 nt, Artificial Sequence
  Description of Artificial Sequence: Synthetic oligonucleotide
aaaacaagagcccugcccu

SEQ ID NO: 2007724 - RNA, 19 nt, Artificial Sequence
  Description of Artificial Sequence: Synthetic oligonucleotide
uguuaugugcugaauauug

SEQ ID NO: 2007725 - RNA, 19 nt, Artificial Sequence
  Description of Artificial Sequence: Synthetic oligonucleotide
aacacaucguuccuccacc

SEQ ID NO: 2007726 - RNA, 19 nt, Artificial Sequence
  Description of Artificial Sequence: Synthetic oligonucleotide
gucacauugcuuuugaacc

SEQ ID NO: 2007727 - RNA, 19 nt, Artificial Sequence
  Description of Artificial Sequence: Synthetic oligonucleotide
uaaucaaguacaaugggaa

SEQ ID NO: 2007728 - RNA, 19 nt, Artificial Sequence
  Description of Artificial Sequence: Synthetic oligonucleotide
uucaccaucgucccgaccc

SEQ ID NO: 2007729 - RNA, 19 nt, Artificial Sequence
  Description of Artificial Sequence: Synthetic oligonucleotide
ucaaaucaaguguuuauug

SEQ ID NO: 2007730 - RNA, 19 nt, Artificial Sequence
  Description of Artificial Sequence: Synthetic oligonucleotide
uacucaaagcccuucauug

SEQ ID NO: 2007731 - RNA, 19 nt, Artificial Sequence
  Description of Artificial Sequence: Synthetic oligonucleotide
uauuguucaggguacucgg

SEQ ID NO: 2007732 - RNA, 19 nt, Artificial Sequence
  Description of Artificial Sequence: Synthetic oligonucleotide
ugcccaaugggguaaaagg

SEQ ID NO: 2007733 - RNA, 19 nt, Artificial Sequence
  Description of Artificial Sequence: Synthetic oligonucleotide
uuuugaaccgggcaagacc

SEQ ID NO: 2007734 - RNA, 19 nt, Artificial Sequence
  Description of Artificial Sequence: Synthetic oligonucleotide
guugucagaguucacacag

SEQ ID NO: 2007735 - RNA, 19 nt, Artificial Sequence
  Description of Artificial Sequence: Synthetic oligonucleotide
uucgguuaagacauguuug

SEQ ID NO: 2007736 - RNA, 19 nt, Artificial Sequence
  Description of Artificial Sequence: Synthetic oligonucleotide
aaauaagcuagaggagacc

SEQ ID NO: 2007737 - RNA, 19 nt, Artificial Sequence
  Description of Artificial Sequence: Synthetic oligonucleotide
uuuggaaggggcuucaccu

SEQ ID NO: 2007738 - RNA, 19 nt, Artificial Sequence
  Description of Artificial Sequence: Synthetic oligonucleotide
ugaauauuguucaggguac

SEQ ID NO: 2007739 - RNA, 19 nt, Artificial Sequence
  Description of Artificial Sequence: Synthetic oligonucleotide
acaucguuccuccaccacc

SEQ ID NO: 2007740 - RNA, 19 nt, Artificial Sequence
  Description of Artificial Sequence: Synthetic oligonucleotide
agcuagaggagacccaggc

SEQ ID NO: 2007741 - RNA, 19 nt, Artificial Sequence
  Description of Artificial Sequence: Synthetic oligonucleotide
gaaacagucgcucugccca

SEQ ID NO: 2007742 - RNA, 19 nt, Artificial Sequence
  Description of Artificial Sequence: Synthetic oligonucleotide
caugguuugcuucuguggg

SEQ ID NO: 2007743 - RNA, 19 nt, Artificial Sequence
  Description of Artificial Sequence: Synthetic oligonucleotide
ucaugguuugcuucugugg

SEQ ID NO: 2007744 - RNA, 19 nt, Artificial Sequence
  Description of Artificial Sequence: Synthetic oligonucleotide
caacaaguguuuuggaagg

SEQ ID NO: 2007745 - RNA, 19 nt, Artificial Sequence
  Description of Artificial Sequence: Synthetic oligonucleotide
aguacaaugggaagggagg

SEQ ID NO: 2007746 - RNA, 19 nt, Artificial Sequence
  Description of Artificial Sequence: Synthetic oligonucleotide
guaaacacaucguuccucc

SEQ ID NO: 2007747 - RNA, 19 nt, Artificial Sequence
  Description of Artificial Sequence: Synthetic oligonucleotide
aauauuguucaggguacuc

SEQ ID NO: 2007748 - RNA, 19 nt, Artificial Sequence
  Description of Artificial Sequence: Synthetic oligonucleotide
aagcccuucauugucuugg

SEQ ID NO: 2007749 - RNA, 19 nt, Artificial Sequence
  Description of Artificial Sequence: Synthetic oligonucleotide
ucgguuaagacauguuugc

SEQ ID NO: 2007750 - RNA, 19 nt, Artificial Sequence
  Description of Artificial Sequence: Synthetic oligonucleotide
aggauguacaccgaguggg

SEQ ID NO: 2007751 - RNA, 19 nt, Artificial Sequence
  Description of Artificial Sequence: Synthetic oligonucleotide
auauuguucaggguacucg

SEQ ID NO: 2007752 - RNA, 19 nt, Artificial Sequence
  Description of Artificial Sequence: Synthetic oligonucleotide
aaguacaaugggaagggag

SEQ ID NO: 2007753 - RNA, 19 nt, Artificial Sequence
  Description of Artificial Sequence: Synthetic oligonucleotide
uguggguccacaaucgagu

SEQ ID NO: 2007754 - RNA, 19 nt, Artificial Sequence
  Description of Artificial Sequence: Synthetic oligonucleotide
gagcguacagucuaucacc

SEQ ID NO: 2007755 - RNA, 19 nt, Artificial Sequence
  Description of Artificial Sequence: Synthetic oligonucleotide
uauugagugccuguuaugu

SEQ ID NO: 2007756 - RNA, 19 nt, Artificial Sequence
  Description of Artificial Sequence: Synthetic oligonucleotide
ugggguaaaaggagucugg

SEQ ID NO: 2007757 - RNA, 19 nt, Artificial Sequence
  Description of Artificial Sequence: Synthetic oligonucleotide
caacguggcauccuguugg

SEQ ID NO: 2007758 - RNA, 19 nt, Artificial Sequence
  Description of Artificial Sequence: Synthetic oligonucleotide
cauugucuuggucacauug

SEQ ID NO: 2007759 - RNA, 19 nt, Artificial Sequence
  Description of Artificial Sequence: Synthetic oligonucleotide
gaguucacacaguaaacac

SEQ ID NO: 2007760 - RNA, 19 nt, Artificial Sequence
  Description of Artificial Sequence: Synthetic oligonucleotide
uaagcuagaggagacccag

SEQ ID NO: 2007761 - RNA, 19 nt, Artificial Sequence
  Description of Artificial Sequence: Synthetic oligonucleotide
caaguguuuuggaaggggc

SEQ ID NO: 2007762 - RNA, 19 nt, Artificial Sequence
  Description of Artificial Sequence: Synthetic oligonucleotide
aaucaaguguuuauugagu

SEQ ID NO: 2007763 - RNA, 19 nt, Artificial Sequence
  Description of Artificial Sequence: Synthetic oligonucleotide
gagacgccaaauaagcuag

SEQ ID NO: 2007764 - RNA, 19 nt, Artificial Sequence
  Description of Artificial Sequence: Synthetic oligonucleotide
ucaggagucaccucgcggu

SEQ ID NO: 2007765 - RNA, 19 nt, Artificial Sequence
  Description of Artificial Sequence: Synthetic oligonucleotide
ugauguuccaggugaaggu

SEQ ID NO: 2007766 - RNA, 19 nt, Artificial Sequence
  Description of Artificial Sequence: Synthetic oligonucleotide
auaaucaaguacaauggga

SEQ ID NO: 2007767 - RNA, 19 nt, Artificial Sequence
  Description of Artificial Sequence: Synthetic oligonucleotide
aauuccuggacagcucuag

SEQ ID NO: 2007768 - RNA, 19 nt, Artificial Sequence
  Description of Artificial Sequence: Synthetic oligonucleotide
acggauuucgguccagccg

SEQ ID NO: 2007769 - RNA, 19 nt, Artificial Sequence
  Description of Artificial Sequence: Synthetic oligonucleotide
cacaguaaacacaucguuc

SEQ ID NO: 2007770 - RNA, 19 nt, Artificial Sequence
  Description of Artificial Sequence: Synthetic oligonucleotide
uuccuggacagcucuagag

SEQ ID NO: 2007771 - RNA, 19 nt, Artificial Sequence
  Description of Artificial Sequence: Synthetic oligonucleotide
acaaugggaagggaggagg

SEQ ID NO: 2007772 - RNA, 19 nt, Artificial Sequence
  Description of Artificial Sequence: Synthetic oligonucleotide
cagucuaucaccugcgcac

SEQ ID NO: 2007773 - RNA, 19 nt, Artificial Sequence
  Description of Artificial Sequence: Synthetic oligonucleotide
aaacaagagcccugcccuc

SEQ ID NO: 2007774 - RNA, 19 nt, Artificial Sequence
  Description of Artificial Sequence: Synthetic oligonucleotide
acgccaaauaagcuagagg

SEQ ID NO: 2007775 - RNA, 19 nt, Artificial Sequence
  Description of Artificial Sequence: Synthetic oligonucleotide
aacaaguguuuuggaaggg

SEQ ID NO: 2007776 - RNA, 19 nt, Artificial Sequence
  Description of Artificial Sequence: Synthetic oligonucleotide
agcaucagggugacgagcc

SEQ ID NO: 2007777 - RNA, 19 nt, Artificial Sequence
  Description of Artificial Sequence: Synthetic oligonucleotide
uugcuuuugaaccgggcaa

SEQ ID NO: 2007778 - RNA, 19 nt, Artificial Sequence
  Description of Artificial Sequence: Synthetic oligonucleotide
gagggagcuacacaagcug

SEQ ID NO: 2007779 - RNA, 19 nt, Artificial Sequence
  Description of Artificial Sequence: Synthetic oligonucleotide
gguuaagacauguuugcug

SEQ ID NO: 2007780 - RNA, 19 nt, Artificial Sequence
  Description of Artificial Sequence: Synthetic oligonucleotide
aacaagagcccugcccucg

SEQ ID NO: 2007781 - RNA, 19 nt, Artificial Sequence
  Description of Artificial Sequence: Synthetic oligonucleotide
agagacgccaaauaagcua

SEQ ID NO: 2007782 - RNA, 19 nt, Artificial Sequence
  Description of Artificial Sequence: Synthetic oligonucleotide
gagugggcgacguuggcag

SEQ ID NO: 2007783 - RNA, 19 nt, Artificial Sequence
  Description of Artificial Sequence: Synthetic oligonucleotide
aaugggguaaaaggagucu

SEQ ID NO: 2007784 - RNA, 19 nt, Artificial Sequence
  Description of Artificial Sequence: Synthetic oligonucleotide
agaguucacacaguaaaca

SEQ ID NO: 2007785 - RNA, 19 nt, Artificial Sequence
  Description of Artificial Sequence: Synthetic oligonucleotide
acaaguguuuuggaagggg

SEQ ID NO: 2007786 - RNA, 19 nt, Artificial Sequence
  Description of Artificial Sequence: Synthetic oligonucleotide
cagaugcggacccugaccc

SEQ ID NO: 2007787 - RNA, 19 nt, Artificial Sequence
  Description of Artificial Sequence: Synthetic oligonucleotide
uggacagcucuagagacgc

SEQ ID NO: 2007788 - RNA, 19 nt, Artificial Sequence
  Description of Artificial Sequence: Synthetic oligonucleotide
uaccguugccagaaggcag

SEQ ID NO: 2007789 - RNA, 19 nt, Artificial Sequence
  Description of Artificial Sequence: Synthetic oligonucleotide
gauguacaccgagugggcg

SEQ ID NO: 2007790 - RNA, 19 nt, Artificial Sequence
  Description of Artificial Sequence: Synthetic oligonucleotide
acaaucgaguccuccagga

SEQ ID NO: 2007791 - RNA, 19 nt, Artificial Sequence
  Description of Artificial Sequence: Synthetic oligonucleotide
aagcuucuggucaggaguc

SEQ ID NO: 2007792 - RNA, 19 nt, Artificial Sequence
  Description of Artificial Sequence: Synthetic oligonucleotide
gguaaaaggagucugggcu

SEQ ID NO: 2007793 - RNA, 19 nt, Artificial Sequence
  Description of Artificial Sequence: Synthetic oligonucleotide
gggccaaucaaaucaagug

SEQ ID NO: 2007794 - RNA, 19 nt, Artificial Sequence
  Description of Artificial Sequence: Synthetic oligonucleotide
uagagacgccaaauaagcu

SEQ ID NO: 2007795 - RNA, 19 nt, Artificial Sequence
  Description of Artificial Sequence: Synthetic oligonucleotide
guaaaaggagucugggcuc

SEQ ID NO: 2007796 - RNA, 19 nt, Artificial Sequence
  Description of Artificial Sequence: Synthetic oligonucleotide
agcucagucaccgccgcgc

SEQ ID NO: 2007797 - RNA, 19 nt, Artificial Sequence
  Description of Artificial Sequence: Synthetic oligonucleotide
acacaguaaacacaucguu

SEQ ID NO: 2007798 - RNA, 19 nt, Artificial Sequence
  Description of Artificial Sequence: Synthetic oligonucleotide
ugcuuuugaaccgggcaag

SEQ ID NO: 2007799 - RNA, 19 nt, Artificial Sequence
  Description of Artificial Sequence: Synthetic oligonucleotide
uacuucaccaucgucccga

SEQ ID NO: 2007800 - RNA, 19 nt, Artificial Sequence
  Description of Artificial Sequence: Synthetic oligonucleotide
uguucaggguacucgggac

SEQ ID NO: 2007801 - RNA, 19 nt, Artificial Sequence
  Description of Artificial Sequence: Synthetic oligonucleotide
uucauugucuuggucacau

SEQ ID NO: 2007802 - RNA, 19 nt, Artificial Sequence
  Description of Artificial Sequence: Synthetic oligonucleotide
ucgaggagcguacagucua

SEQ ID NO: 2007803 - RNA, 19 nt, Artificial Sequence
  Description of Artificial Sequence: Synthetic oligonucleotide
agggagcuacacaagcugc

SEQ ID NO: 2007804 - RNA, 19 nt, Artificial Sequence
  Description of Artificial Sequence: Synthetic oligonucleotide
caaugggguaaaaggaguc

SEQ ID NO: 2007805 - RNA, 19 nt, Artificial Sequence
  Description of Artificial Sequence: Synthetic oligonucleotide
gacggauuucgguccagcc

SEQ ID NO: 2007806 - RNA, 19 nt, Artificial Sequence
  Description of Artificial Sequence: Synthetic oligonucleotide
ucgcagcucagucaccgcc

SEQ ID NO: 2007807 - RNA, 19 nt, Artificial Sequence
  Description of Artificial Sequence: Synthetic oligonucleotide
cuggacagcucuagagacg

SEQ ID NO: 2007808 - RNA, 19 nt, Artificial Sequence
  Description of Artificial Sequence: Synthetic oligonucleotide
acagucuaucaccugcgca

SEQ ID NO: 2007809 - RNA, 19 nt, Artificial Sequence
  Description of Artificial Sequence: Synthetic oligonucleotide
gacccaggcuucccgacgg

SEQ ID NO: 2007810 - RNA, 19 nt, Artificial Sequence
  Description of Artificial Sequence: Synthetic oligonucleotide
ucaguagccagcaggcgua

SEQ ID NO: 2007811 - RNA, 19 nt, Artificial Sequence
  Description of Artificial Sequence: Synthetic oligonucleotide
ucaccaucgucccgacccg

SEQ ID NO: 2007812 - RNA, 19 nt, Artificial Sequence
  Description of Artificial Sequence: Synthetic oligonucleotide
cacaaucgaguccuccagg

SEQ ID NO: 2007813 - RNA, 19 nt, Artificial Sequence
  Description of Artificial Sequence: Synthetic oligonucleotide
gacgccaaauaagcuagag

SEQ ID NO: 2007814 - RNA, 19 nt, Artificial Sequence
  Description of Artificial Sequence: Synthetic oligonucleotide
aguucacacaguaaacaca

SEQ ID NO: 2007815 - RNA, 19 nt, Artificial Sequence
  Description of Artificial Sequence: Synthetic oligonucleotide
acguuggcaggaaacaguc

SEQ ID NO: 2007816 - RNA, 19 nt, Artificial Sequence
  Description of Artificial Sequence: Synthetic oligonucleotide
uucccgacggauuucgguc

SEQ ID NO: 2007817 - RNA, 19 nt, Artificial Sequence
  Description of Artificial Sequence: Synthetic oligonucleotide
ucucaacaaguguuuugga

SEQ ID NO: 2007818 - RNA, 19 nt, Artificial Sequence
  Description of Artificial Sequence: Synthetic oligonucleotide
guugccagaaggcagcgaa

SEQ ID NO: 2007819 - RNA, 19 nt, Artificial Sequence
  Description of Artificial Sequence: Synthetic oligonucleotide
ugugacccugggcaaguca

SEQ ID NO: 2007820 - RNA, 19 nt, Artificial Sequence
  Description of Artificial Sequence: Synthetic oligonucleotide
guagccagcaggcguacug

SEQ ID NO: 2007821 - RNA, 19 nt, Artificial Sequence
  Description of Artificial Sequence: Synthetic oligonucleotide
guacagucuaucaccugcg

SEQ ID NO: 2007822 - RNA, 19 nt, Artificial Sequence
  Description of Artificial Sequence: Synthetic oligonucleotide
cuguggguccacaaucgag

SEQ ID NO: 2007823 - RNA, 19 nt, Artificial Sequence
  Description of Artificial Sequence: Synthetic oligonucleotide
gucaggagucaccucgcgg

SEQ ID NO: 2007824 - RNA, 19 nt, Artificial Sequence
  Description of Artificial Sequence: Synthetic oligonucleotide
ucuguggguccacaaucga

SEQ ID NO: 2007825 - RNA, 19 nt, Artificial Sequence
  Description of Artificial Sequence: Synthetic oligonucleotide
cucaacaaguguuuuggaa

SEQ ID NO: 2007826 - RNA, 19 nt, Artificial Sequence
  Description of Artificial Sequence: Synthetic oligonucleotide
aggagacccaggcuucccg

SEQ ID NO: 2007827 - RNA, 19 nt, Artificial Sequence
  Description of Artificial Sequence: Synthetic oligonucleotide
aggcguacugcagaugcgg

SEQ ID NO: 2007828 - RNA, 19 nt, Artificial Sequence
  Description of Artificial Sequence: Synthetic oligonucleotide
ucuggcccaggaaauacuu

SEQ ID NO: 2007829 - RNA, 19 nt, Artificial Sequence
  Description of Artificial Sequence: Synthetic oligonucleotide
guucggguaccguugccag

SEQ ID NO: 2007830 - RNA, 19 nt, Artificial Sequence
  Description of Artificial Sequence: Synthetic oligonucleotide
auguacaccgagugggcga

SEQ ID NO: 2007831 - RNA, 19 nt, Artificial Sequence
  Description of Artificial Sequence: Synthetic oligonucleotide
gcaggcguacugcagaugc

SEQ ID NO: 2007832 - RNA, 19 nt, Artificial Sequence
  Description of Artificial Sequence: Synthetic oligonucleotide
cgccaaauaagcuagagga

SEQ ID NO: 2007833 - RNA, 19 nt, Artificial Sequence
  Description of Artificial Sequence: Synthetic oligonucleotide
cucgggacacaucagagaa

SEQ ID NO: 2007834 - RNA, 19 nt, Artificial Sequence
  Description of Artificial Sequence: Synthetic oligonucleotide
agacccaggcuucccgacg

SEQ ID NO: 2007835 - RNA, 19 nt, Artificial Sequence
  Description of Artificial Sequence: Synthetic oligonucleotide
uggggccaaucaaaucaag

SEQ ID NO: 2007836 - RNA, 19 nt, Artificial Sequence
  Description of Artificial Sequence: Synthetic oligonucleotide
ucagucaccgccgcgccgc

SEQ ID NO: 2007837 - RNA, 19 nt, Artificial Sequence
  Description of Artificial Sequence: Synthetic oligonucleotide
auacuucaccaucgucccg

SEQ ID NO: 2007838 - RNA, 19 nt, Artificial Sequence
  Description of Artificial Sequence: Synthetic oligonucleotide
auguuugcuguagggguuc

SEQ ID NO: 2007839 - RNA, 19 nt, Artificial Sequence
  Description of Artificial Sequence: Synthetic oligonucleotide
aucgucccgacccgggcgg

SEQ ID NO: 2007840 - RNA, 19 nt, Artificial Sequence
  Description of Artificial Sequence: Synthetic oligonucleotide
ggagcguacagucuaucac

SEQ ID NO: 2007841 - RNA, 19 nt, Artificial Sequence
  Description of Artificial Sequence: Synthetic oligonucleotide
ugcccaacguggcauccug

SEQ ID NO: 2007842 - RNA, 19 nt, Artificial Sequence
  Description of Artificial Sequence: Synthetic oligonucleotide
cccaaugggguaaaaggag

SEQ ID NO: 2007843 - RNA, 19 nt, Artificial Sequence
  Description of Artificial Sequence: Synthetic oligonucleotide
caucagggugacgagcccg

SEQ ID NO: 2007844 - RNA, 19 nt, Artificial Sequence
  Description of Artificial Sequence: Synthetic oligonucleotide
gacagcucuagagacgcca

SEQ ID NO: 2007845 - RNA, 19 nt, Artificial Sequence
  Description of Artificial Sequence: Synthetic oligonucleotide
cacccgcgcagcaucaggg

SEQ ID NO: 2007846 - RNA, 19 nt, Artificial Sequence
  Description of Artificial Sequence: Synthetic oligonucleotide
uggcugucucaacaagugu

SEQ ID NO: 2007847 - RNA, 19 nt, Artificial Sequence
  Description of Artificial Sequence: Synthetic oligonucleotide
ucuucgguuaagacauguu

SEQ ID NO: 2007848 - RNA, 19 nt, Artificial Sequence
  Description of Artificial Sequence: Synthetic oligonucleotide
cguacagucuaucaccugc

SEQ ID NO: 2007849 - RNA, 19 nt, Artificial Sequence
  Description of Artificial Sequence: Synthetic oligonucleotide
aaccgggcaagaccaaauu

SEQ ID NO: 2007850 - RNA, 19 nt, Artificial Sequence
  Description of Artificial Sequence: Synthetic oligonucleotide
guacucgggacacaucaga

SEQ ID NO: 2007851 - RNA, 19 nt, Artificial Sequence
  Description of Artificial Sequence: Synthetic oligonucleotide
augguuugcuucugugggu

SEQ ID NO: 2007852 - RNA, 19 nt, Artificial Sequence
  Description of Artificial Sequence: Synthetic oligonucleotide
aacagucgcucugcccaac

SEQ ID NO: 2007853 - RNA, 19 nt, Artificial Sequence
  Description of Artificial Sequence: Synthetic oligonucleotide
gugguugauguuccaggug

SEQ ID NO: 2007854 - RNA, 19 nt, Artificial Sequence
  Description of Artificial Sequence: Synthetic oligonucleotide
aggagucaccucgcggugc

SEQ ID NO: 2007855 - RNA, 19 nt, Artificial Sequence
  Description of Artificial Sequence: Synthetic oligonucleotide
gcgugguugauguuccagg

SEQ ID NO: 2007856 - RNA, 19 nt, Artificial Sequence
  Description of Artificial Sequence: Synthetic oligonucleotide
ugcagaugcggacccugac

SEQ ID NO: 2007857 - RNA, 19 nt, Artificial Sequence
  Description of Artificial Sequence: Synthetic oligonucleotide
aaacagucgcucugcccaa

SEQ ID NO: 2007858 - RNA, 19 nt, Artificial Sequence
  Description of Artificial Sequence: Synthetic oligonucleotide
uguuugcuguagggguucg

SEQ ID NO: 2007859 - RNA, 19 nt, Artificial Sequence
  Description of Artificial Sequence: Synthetic oligonucleotide
ucggguaccguugccagaa

SEQ ID NO: 2007860 - RNA, 19 nt, Artificial Sequence
  Description of Artificial Sequence: Synthetic oligonucleotide
ggguacucgggacacauca

SEQ ID NO: 2007861 - RNA, 19 nt, Artificial Sequence
  Description of Artificial Sequence: Synthetic oligonucleotide
cuuuugaaccgggcaagac

SEQ ID NO: 2007862 - RNA, 19 nt, Artificial Sequence
  Description of Artificial Sequence: Synthetic oligonucleotide
caucgucccgacccgggcg

SEQ ID NO: 2007863 - RNA, 19 nt, Artificial Sequence
  Description of Artificial Sequence: Synthetic oligonucleotide
uguagggguucggguaccg

SEQ ID NO: 2007864 - RNA, 19 nt, Artificial Sequence
  Description of Artificial Sequence: Synthetic oligonucleotide
gagucugggcucaguagcc

SEQ ID NO: 2007865 - RNA, 19 nt, Artificial Sequence
  Description of Artificial Sequence: Synthetic oligonucleotide
gaugcggacccugacccac

SEQ ID NO: 2007866 - RNA, 19 nt, Artificial Sequence
  Description of Artificial Sequence: Synthetic oligonucleotide
auuccuggacagcucuaga

SEQ ID NO: 2007867 - RNA, 19 nt, Artificial Sequence
  Description of Artificial Sequence: Synthetic oligonucleotide
agugccuguuaugugcuga

SEQ ID NO: 2007868 - RNA, 19 nt, Artificial Sequence
  Description of Artificial Sequence: Synthetic oligonucleotide
uucacacaguaaacacauc

SEQ ID NO: 2007869 - RNA, 19 nt, Artificial Sequence
  Description of Artificial Sequence: Synthetic oligonucleotide
guucaggguacucgggaca

SEQ ID NO: 2007870 - RNA, 19 nt, Artificial Sequence
  Description of Artificial Sequence: Synthetic oligonucleotide
ccaggauguacaccgagug

SEQ ID NO: 2007871 - RNA, 19 nt, Artificial Sequence
  Description of Artificial Sequence: Synthetic oligonucleotide
acagaagcuucuggucagg

SEQ ID NO: 2007872 - RNA, 19 nt, Artificial Sequence
  Description of Artificial Sequence: Synthetic oligonucleotide
ggguaccguugccagaagg

SEQ ID NO: 2007873 - RNA, 19 nt, Artificial Sequence
  Description of Artificial Sequence: Synthetic oligonucleotide
uagggguucggguaccguu

SEQ ID NO: 2007874 - RNA, 19 nt, Artificial Sequence
  Description of Artificial Sequence: Synthetic oligonucleotide
uccggagcacgcucuggcc

SEQ ID NO: 2007875 - RNA, 19 nt, Artificial Sequence
  Description of Artificial Sequence: Synthetic oligonucleotide
guacaaugggaagggagga

SEQ ID NO: 2007876 - RNA, 19 nt, Artificial Sequence
  Description of Artificial Sequence: Synthetic oligonucleotide
uaucaccugcgcacugccu

SEQ ID NO: 2007877 - RNA, 19 nt, Artificial Sequence
  Description of Artificial Sequence: Synthetic oligonucleotide
caggcguacugcagaugcg

SEQ ID NO: 2007878 - RNA, 19 nt, Artificial Sequence
  Description of Artificial Sequence: Synthetic oligonucleotide
agccgggcgugguugaugu

SEQ ID NO: 2007879 - RNA, 19 nt, Artificial Sequence
  Description of Artificial Sequence: Synthetic oligonucleotide
uuucugcccaaugggguaa

SEQ ID NO: 2007880 - RNA, 19 nt, Artificial Sequence
  Description of Artificial Sequence: Synthetic oligonucleotide
ucacugcaccuuucugccc

SEQ ID NO: 2007881 - RNA, 19 nt, Artificial Sequence
  Description of Artificial Sequence: Synthetic oligonucleotide
ggccaaucaaaucaagugu

SEQ ID NO: 2007882 - RNA, 19 nt, Artificial Sequence
  Description of Artificial Sequence: Synthetic oligonucleotide
auaagcuagaggagaccca

SEQ ID NO: 2007883 - RNA, 19 nt, Artificial Sequence
  Description of Artificial Sequence: Synthetic oligonucleotide
ugacccugggcaagucacu

SEQ ID NO: 2007884 - RNA, 19 nt, Artificial Sequence
  Description of Artificial Sequence: Synthetic oligonucleotide
cugcgcacugccugugacc

SEQ ID NO: 2007885 - RNA, 19 nt, Artificial Sequence
  Description of Artificial Sequence: Synthetic oligonucleotide
cugcccaaugggguaaaag

SEQ ID NO: 2007886 - RNA, 19 nt, Artificial Sequence
  Description of Artificial Sequence: Synthetic oligonucleotide
uccaggugaagguggucau

SEQ ID NO: 2007887 - RNA, 19 nt, Artificial Sequence
  Description of Artificial Sequence: Synthetic oligonucleotide
gugacccugggcaagucac

SEQ ID NO: 2007888 - RNA, 19 nt, Artificial Sequence
  Description of Artificial Sequence: Synthetic oligonucleotide
gcagaugcggacccugacc

SEQ ID NO: 2007889 - RNA, 19 nt, Artificial Sequence
  Description of Artificial Sequence: Synthetic oligonucleotide
cacugcaccuuucugccca

SEQ ID NO: 2007890 - RNA, 19 nt, Artificial Sequence
  Description of Artificial Sequence: Synthetic oligonucleotide
uuucgguccagccgcuguu

SEQ ID NO: 2007891 - RNA, 19 nt, Artificial Sequence
  Description of Artificial Sequence: Synthetic oligonucleotide
ucgcucugcccaacguggc

SEQ ID NO: 2007892 - RNA, 19 nt, Artificial Sequence
  Description of Artificial Sequence: Synthetic oligonucleotide
cggauuucgguccagccgc

SEQ ID NO: 2007893 - RNA, 19 nt, Artificial Sequence
  Description of Artificial Sequence: Synthetic oligonucleotide
agucuaucaccugcgcacu

SEQ ID NO: 2007894 - RNA, 19 nt, Artificial Sequence
  Description of Artificial Sequence: Synthetic oligonucleotide
ucugcccaacguggcaucc

SEQ ID NO: 2007895 - RNA, 19 nt, Artificial Sequence
  Description of Artificial Sequence: Synthetic oligonucleotide
acgaugucuucgguuaaga

SEQ ID NO: 2007896 - RNA, 19 nt, Artificial Sequence
  Description of Artificial Sequence: Synthetic oligonucleotide
cacgcucuggcccaggaaa

SEQ ID NO: 2007897 - RNA, 19 nt, Artificial Sequence
  Description of Artificial Sequence: Synthetic oligonucleotide
cagggugacgagcccgggg

SEQ ID NO: 2007898 - RNA, 19 nt, Artificial Sequence
  Description of Artificial Sequence: Synthetic oligonucleotide
ggacacaucagagaauaaa

SEQ ID NO: 2007899 - RNA, 19 nt, Artificial Sequence
  Description of Artificial Sequence: Synthetic oligonucleotide
uucggguaccguugccaga

SEQ ID NO: 2007900 - RNA, 19 nt, Artificial Sequence
  Description of Artificial Sequence: Synthetic oligonucleotide
guaccguugccagaaggca

SEQ ID NO: 2007901 - RNA, 19 nt, Artificial Sequence
  Description of Artificial Sequence: Synthetic oligonucleotide
uggccaagauguacucaaa

SEQ ID NO: 2007902 - RNA, 19 nt, Artificial Sequence
  Description of Artificial Sequence: Synthetic oligonucleotide
ucgggacacaucagagaau

SEQ ID NO: 2007903 - RNA, 19 nt, Artificial Sequence
  Description of Artificial Sequence: Synthetic oligonucleotide
cuuucugcccaauggggua

SEQ ID NO: 2007904 - RNA, 19 nt, Artificial Sequence
  Description of Artificial Sequence: Synthetic oligonucleotide
guggguccacaaucgaguc

SEQ ID NO: 2007905 - RNA, 19 nt, Artificial Sequence
  Description of Artificial Sequence: Synthetic oligonucleotide
accgagugggcgacguugg

SEQ ID NO: 2007906 - RNA, 19 nt, Artificial Sequence
  Description of Artificial Sequence: Synthetic oligonucleotide
cacgaugucuucgguuaag

SEQ ID NO: 2007907 - RNA, 19 nt, Artificial Sequence
  Description of Artificial Sequence: Synthetic oligonucleotide
uggucacauugcuuuugaa

SEQ ID NO: 2007908 - RNA, 19 nt, Artificial Sequence
  Description of Artificial Sequence: Synthetic oligonucleotide
cacaucguuccuccaccac

SEQ ID NO: 2007909 - RNA, 19 nt, Artificial Sequence
  Description of Artificial Sequence: Synthetic oligonucleotide
uacaccgagugggcgacgu

SEQ ID NO: 2007910 - RNA, 19 nt, Artificial Sequence
  Description of Artificial Sequence: Synthetic oligonucleotide
cuggcccaggaaauacuuc

SEQ ID NO: 2007911 - RNA, 19 nt, Artificial Sequence
  Description of Artificial Sequence: Synthetic oligonucleotide
caccgagugggcgacguug

SEQ ID NO: 2007912 - RNA, 19 nt, Artificial Sequence
  Description of Artificial Sequence: Synthetic oligonucleotide
cagcaucagggugacgagc

SEQ ID NO: 2007913 - RNA, 19 nt, Artificial Sequence
  Description of Artificial Sequence: Synthetic oligonucleotide
ucgcggugcacgaugucuu

SEQ ID NO: 2007914 - RNA, 19 nt, Artificial Sequence
  Description of Artificial Sequence: Synthetic oligonucleotide
ugcggacccugacccacca

SEQ ID NO: 2007915 - RNA, 19 nt, Artificial Sequence
  Description of Artificial Sequence: Synthetic oligonucleotide
guuaugugcugaauauugu

SEQ ID NO: 2007916 - RNA, 19 nt, Artificial Sequence
  Description of Artificial Sequence: Synthetic oligonucleotide
gcucgcagcucagucaccg

SEQ ID NO: 2007917 - RNA, 19 nt, Artificial Sequence
  Description of Artificial Sequence: Synthetic oligonucleotide
acgcccgccaggcucgcag

SEQ ID NO: 2007918 - RNA, 19 nt, Artificial Sequence
  Description of Artificial Sequence: Synthetic oligonucleotide
agggguucggguaccguug

SEQ ID NO: 2007919 - RNA, 19 nt, Artificial Sequence
  Description of Artificial Sequence: Synthetic oligonucleotide
ucgguccagccgcuguugu

SEQ ID NO: 2007920 - RNA, 19 nt, Artificial Sequence
  Description of Artificial Sequence: Synthetic oligonucleotide
guuugcuguagggguucgg

SEQ ID NO: 2007921 - RNA, 19 nt, Artificial Sequence
  Description of Artificial Sequence: Synthetic oligonucleotide
gucaccgccgcgccgcgcc

SEQ ID NO: 2007922 - RNA, 19 nt, Artificial Sequence
  Description of Artificial Sequence: Synthetic oligonucleotide
uguagcugccagcgcuguc

SEQ ID NO: 2007923 - RNA, 19 nt, Artificial Sequence
  Description of Artificial Sequence: Synthetic oligonucleotide
cucagucaccgccgcgccg

SEQ ID NO: 2007924 - RNA, 19 nt, Artificial Sequence
  Description of Artificial Sequence: Synthetic oligonucleotide
caucagccgggcgugguug

SEQ ID NO: 2007925 - RNA, 19 nt, Artificial Sequence
  Description of Artificial Sequence: Synthetic oligonucleotide
ucggcgcacgcccgccagg

SEQ ID NO: 2007926 - RNA, 19 nt, Artificial Sequence
  Description of Artificial Sequence: Synthetic oligonucleotide
ccacaaucgaguccuccag

SEQ ID NO: 2007927 - RNA, 19 nt, Artificial Sequence
  Description of Artificial Sequence: Synthetic oligonucleotide
gauuucgguccagccgcug

SEQ ID NO: 2007928 - RNA, 19 nt, Artificial Sequence
  Description of Artificial Sequence: Synthetic oligonucleotide
ggagcuacacaagcugcug

SEQ ID NO: 2007929 - RNA, 19 nt, Artificial Sequence
  Description of Artificial Sequence: Synthetic oligonucleotide
caggagucaccucgcggug

SEQ ID NO: 2007930 - RNA, 19 nt, Artificial Sequence
  Description of Artificial Sequence: Synthetic oligonucleotide
caccucgcggugcacgaug

SEQ ID NO: 2007931 - RNA, 19 nt, Artificial Sequence
  Description of Artificial Sequence: Synthetic oligonucleotide
cuucaccaucgucccgacc

SEQ ID NO: 2007932 - RNA, 19 nt, Artificial Sequence
  Description of Artificial Sequence: Synthetic oligonucleotide
gacccgggcgggcucagca

SEQ ID NO: 2007933 - RNA, 19 nt, Artificial Sequence
  Description of Artificial Sequence: Synthetic oligonucleotide
accaucgucccgacccggg

SEQ ID NO: 2007934 - RNA, 19 nt, Artificial Sequence
  Description of Artificial Sequence: Synthetic oligonucleotide
ggauguacaccgagugggc

SEQ ID NO: 2007935 - RNA, 19 nt, Artificial Sequence
  Description of Artificial Sequence: Synthetic oligonucleotide
acgaggcucggcgcacgcc

SEQ ID NO: 2007936 - RNA, 19 nt, Artificial Sequence
  Description of Artificial Sequence: Synthetic oligonucleotide
caggcucgcagcucaguca

SEQ ID NO: 2007937 - RNA, 19 nt, Artificial Sequence
  Description of Artificial Sequence: Synthetic oligonucleotide
ugccugugacccugggcaa

SEQ ID NO: 2007938 - RNA, 19 nt, Artificial Sequence
  Description of Artificial Sequence: Synthetic oligonucleotide
cagaaggcagcgaacacuu

SEQ ID NO: 2007939 - RNA, 19 nt, Artificial Sequence
  Description of Artificial Sequence: Synthetic oligonucleotide
gguacucgggacacaucag

SEQ ID NO: 2007940 - RNA, 19 nt, Artificial Sequence
  Description of Artificial Sequence: Synthetic oligonucleotide
gcgaacacuuggucccagg

SEQ ID NO: 2007941 - RNA, 19 nt, Artificial Sequence
  Description of Artificial Sequence: Synthetic oligonucleotide
augcggacccugacccacc

SEQ ID NO: 2007942 - RNA, 19 nt, Artificial Sequence
  Description of Artificial Sequence: Synthetic oligonucleotide
gaggcucggcgcacgcccg

SEQ ID NO: 2007943 - RNA, 19 nt, Artificial Sequence
  Description of Artificial Sequence: Synthetic oligonucleotide
agcuccggagcacgcucug

SEQ ID NO: 2007944 - RNA, 19 nt, Artificial Sequence
  Description of Artificial Sequence: Synthetic oligonucleotide
ggcgugguugauguuccag

SEQ ID NO: 2007945 - RNA, 19 nt, Artificial Sequence
  Description of Artificial Sequence: Synthetic oligonucleotide
ggcgacguuggcaggaaac

SEQ ID NO: 2007946 - RNA, 19 nt, Artificial Sequence
  Description of Artificial Sequence: Synthetic oligonucleotide
cucugcccaacguggcauc

SEQ ID NO: 2007947 - RNA, 19 nt, Artificial Sequence
  Description of Artificial Sequence: Synthetic oligonucleotide
ccagccgcuguugucagag

SEQ ID NO: 2007948 - RNA, 19 nt, Artificial Sequence
  Description of Artificial Sequence: Synthetic oligonucleotide
gaggagcguacagucuauc

SEQ ID NO: 2007949 - RNA, 19 nt, Artificial Sequence
  Description of Artificial Sequence: Synthetic oligonucleotide
acccgcgcagcaucagggu

SEQ ID NO: 2007950 - RNA, 19 nt, Artificial Sequence
  Description of Artificial Sequence: Synthetic oligonucleotide
agcgaacacuuggucccag

SEQ ID NO: 2007951 - RNA, 19 nt, Artificial Sequence
  Description of Artificial Sequence: Synthetic oligonucleotide
accuuguagcuuggccaag

SEQ ID NO: 2007952 - RNA, 19 nt, Artificial Sequence
  Description of Artificial Sequence: Synthetic oligonucleotide
ccuguuaugugcugaauau

SEQ ID NO: 2007953 - RNA, 19 nt, Artificial Sequence
  Description of Artificial Sequence: Synthetic oligonucleotide
cagcucagucaccgccgcg

SEQ ID NO: 2007954 - RNA, 19 nt, Artificial Sequence
  Description of Artificial Sequence: Synthetic oligonucleotide
acagcucuagagacgccaa

SEQ ID NO: 2007955 - RNA, 19 nt, Artificial Sequence
  Description of Artificial Sequence: Synthetic oligonucleotide
caaguacaaugggaaggga

SEQ ID NO: 2007956 - RNA, 19 nt, Artificial Sequence
  Description of Artificial Sequence: Synthetic oligonucleotide
cauguuugcuguagggguu

SEQ ID NO: 2007957 - RNA, 19 nt, Artificial Sequence
  Description of Artificial Sequence: Synthetic oligonucleotide
ggagcuccggagcacgcuc

SEQ ID NO: 2007958 - RNA, 19 nt, Artificial Sequence
  Description of Artificial Sequence: Synthetic oligonucleotide
aggguacucgggacacauc

SEQ ID NO: 2007959 - RNA, 19 nt, Artificial Sequence
  Description of Artificial Sequence: Synthetic oligonucleotide
ccaacguggcauccuguug

SEQ ID NO: 2007960 - RNA, 19 nt, Artificial Sequence
  Description of Artificial Sequence: Synthetic oligonucleotide
ggagucaccucgcggugca

SEQ ID NO: 2007961 - RNA, 19 nt, Artificial Sequence
  Description of Artificial Sequence: Synthetic oligonucleotide
acguggcauccuguugguc

SEQ ID NO: 2007962 - RNA, 19 nt, Artificial Sequence
  Description of Artificial Sequence: Synthetic oligonucleotide
cacgaggcucggcgcacgc

SEQ ID NO: 2007963 - RNA, 19 nt, Artificial Sequence
  Description of Artificial Sequence: Synthetic oligonucleotide
gucuucgguuaagacaugu

SEQ ID NO: 2007964 - RNA, 19 nt, Artificial Sequence
  Description of Artificial Sequence: Synthetic oligonucleotide
cucggcgcacgcccgccag

SEQ ID NO: 2007965 - RNA, 19 nt, Artificial Sequence
  Description of Artificial Sequence: Synthetic oligonucleotide
agcaggcguacugcagaug

SEQ ID NO: 2007966 - RNA, 19 nt, Artificial Sequence
  Description of Artificial Sequence: Synthetic oligonucleotide
gggaggagggagcuacaca

SEQ ID NO: 2007967 - RNA, 19 nt, Artificial Sequence
  Description of Artificial Sequence: Synthetic oligonucleotide
cgaugucuucgguuaagac

SEQ ID NO: 2007968 - RNA, 19 nt, Artificial Sequence
  Description of Artificial Sequence: Synthetic oligonucleotide
ggagacccaggcuucccga

SEQ ID NO: 2007969 - RNA, 19 nt, Artificial Sequence
  Description of Artificial Sequence: Synthetic oligonucleotide
gaaggggcuucaccuugua

SEQ ID NO: 2007970 - RNA, 19 nt, Artificial Sequence
  Description of Artificial Sequence: Synthetic oligonucleotide
ggggcuucaccuuguagcu

SEQ ID NO: 2007971 - RNA, 19 nt, Artificial Sequence
  Description of Artificial Sequence: Synthetic oligonucleotide
caccaucgucccgacccgg

SEQ ID NO: 2007972 - RNA, 19 nt, Artificial Sequence
  Description of Artificial Sequence: Synthetic oligonucleotide
agucuccgggacagaagcu

SEQ ID NO: 2007973 - RNA, 19 nt, Artificial Sequence
  Description of Artificial Sequence: Synthetic oligonucleotide
accugcgcacugccuguga

SEQ ID NO: 2007974 - RNA, 19 nt, Artificial Sequence
  Description of Artificial Sequence: Synthetic oligonucleotide
cguuggcaggaaacagucg

SEQ ID NO: 2007975 - RNA, 19 nt, Artificial Sequence
  Description of Artificial Sequence: Synthetic oligonucleotide
gccagcgcugucuccuuug

SEQ ID NO: 2007976 - RNA, 19 nt, Artificial Sequence
  Description of Artificial Sequence: Synthetic oligonucleotide
gcaucagggugacgagccc

SEQ ID NO: 2007977 - RNA, 19 nt, Artificial Sequence
  Description of Artificial Sequence: Synthetic oligonucleotide
ggugaagguggucaugguu

SEQ ID NO: 2007978 - RNA, 19 nt, Artificial Sequence
  Description of Artificial Sequence: Synthetic oligonucleotide
cagaagcuucuggucagga

SEQ ID NO: 2007979 - RNA, 19 nt, Artificial Sequence
  Description of Artificial Sequence: Synthetic oligonucleotide
gcggugcacgaugucuucg

SEQ ID NO: 2007980 - RNA, 19 nt, Artificial Sequence
  Description of Artificial Sequence: Synthetic oligonucleotide
gaaccgggcaagaccaaau

SEQ ID NO: 2007981 - RNA, 19 nt, Artificial Sequence
  Description of Artificial Sequence: Synthetic oligonucleotide
cggugcacgaugucuucgg

SEQ ID NO: 2007982 - RNA, 19 nt, Artificial Sequence
  Description of Artificial Sequence: Synthetic oligonucleotide
accaucagccgggcguggu

SEQ ID NO: 2007983 - RNA, 19 nt, Artificial Sequence
  Description of Artificial Sequence: Synthetic oligonucleotide
aguagccagcaggcguacu

SEQ ID NO: 2007984 - RNA, 19 nt, Artificial Sequence
  Description of Artificial Sequence: Synthetic oligonucleotide
gcgacguuggcaggaaaca

SEQ ID NO: 2007985 - RNA, 19 nt, Artificial Sequence
  Description of Artificial Sequence: Synthetic oligonucleotide
agacgccaaauaagcuaga

SEQ ID NO: 2007986 - RNA, 19 nt, Artificial Sequence
  Description of Artificial Sequence: Synthetic oligonucleotide
gugggcgacguuggcagga

SEQ ID NO: 2007987 - RNA, 19 nt, Artificial Sequence
  Description of Artificial Sequence: Synthetic oligonucleotide
gcguacagucuaucaccug

SEQ ID NO: 2007988 - RNA, 19 nt, Artificial Sequence
  Description of Artificial Sequence: Synthetic oligonucleotide
ccaggcucgcagcucaguc

SEQ ID NO: 2007989 - RNA, 19 nt, Artificial Sequence
  Description of Artificial Sequence: Synthetic oligonucleotide
cucgaggagcguacagucu

SEQ ID NO: 2007990 - RNA, 19 nt, Artificial Sequence
  Description of Artificial Sequence: Synthetic oligonucleotide
cgaggcucggcgcacgccc

SEQ ID NO: 2007991 - RNA, 19 nt, Artificial Sequence
  Description of Artificial Sequence: Synthetic oligonucleotide
guacaccgagugggcgacg

SEQ ID NO: 2007992 - RNA, 19 nt, Artificial Sequence
  Description of Artificial Sequence: Synthetic oligonucleotide
ugggcgacguuggcaggaa

SEQ ID NO: 2007993 - RNA, 19 nt, Artificial Sequence
  Description of Artificial Sequence: Synthetic oligonucleotide
cucuggcccaggaaauacu

SEQ ID NO: 2007994 - RNA, 19 nt, Artificial Sequence
  Description of Artificial Sequence: Synthetic oligonucleotide
accucgcggugcacgaugu

SEQ ID NO: 2007995 - RNA, 19 nt, Artificial Sequence
  Description of Artificial Sequence: Synthetic oligonucleotide
cuuguagcuuggccaagau

SEQ ID NO: 2007996 - RNA, 19 nt, Artificial Sequence
  Description of Artificial Sequence: Synthetic oligonucleotide
gcuuuugaaccgggcaaga

SEQ ID NO: 2007997 - RNA, 19 nt, Artificial Sequence
  Description of Artificial Sequence: Synthetic oligonucleotide
ggcgggcucagcacccgcg

SEQ ID NO: 2007998 - RNA, 19 nt, Artificial Sequence
  Description of Artificial Sequence: Synthetic oligonucleotide
cgggcgugguugauguucc

SEQ ID NO: 2007999 - RNA, 19 nt, Artificial Sequence
  Description of Artificial Sequence: Synthetic oligonucleotide
ccugcgcacugccugugac

SEQ ID NO: 2008000 - RNA, 19 nt, Artificial Sequence
  Description of Artificial Sequence: Synthetic oligonucleotide
ccaucgucccgacccgggc

SEQ ID NO: 2008001 - RNA, 19 nt, Artificial Sequence
  Description of Artificial Sequence: Synthetic oligonucleotide
cagucaccgccgcgccgcg

SEQ ID NO: 2008002 - RNA, 19 nt, Artificial Sequence
  Description of Artificial Sequence: Synthetic oligonucleotide
ccucuuuggcugucucaac

SEQ ID NO: 2008003 - RNA, 19 nt, Artificial Sequence
  Description of Artificial Sequence: Synthetic oligonucleotide
gcccucgaggagcguacag

SEQ ID NO: 2008004 - RNA, 19 nt, Artificial Sequence
  Description of Artificial Sequence: Synthetic oligonucleotide
caggcuucccgacggauuu

SEQ ID NO: 2008005 - RNA, 19 nt, Artificial Sequence
  Description of Artificial Sequence: Synthetic oligonucleotide
cagcucuagagacgccaaa

SEQ ID NO: 2008006 - RNA, 19 nt, Artificial Sequence
  Description of Artificial Sequence: Synthetic oligonucleotide
ccugggcaagucacugcac

SEQ ID NO: 2008007 - RNA, 19 nt, Artificial Sequence
  Description of Artificial Sequence: Synthetic oligonucleotide
ccgggcgugguugauguuc

SEQ ID NO: 2008008 - RNA, 19 nt, Artificial Sequence
  Description of Artificial Sequence: Synthetic oligonucleotide
ggguucggguaccguugcc

SEQ ID NO: 2008009 - RNA, 19 nt, Artificial Sequence
  Description of Artificial Sequence: Synthetic oligonucleotide
cguggcauccuguuggucu

SEQ ID NO: 2008010 - RNA, 19 nt, Artificial Sequence
  Description of Artificial Sequence: Synthetic oligonucleotide
gcgggcucagcacccgcgc

SEQ ID NO: 2008011 - RNA, 19 nt, Artificial Sequence
  Description of Artificial Sequence: Synthetic oligonucleotide
caaucgaguccuccaggau

SEQ ID NO: 2008012 - RNA, 19 nt, Artificial Sequence
  Description of Artificial Sequence: Synthetic oligonucleotide
gccugugacccugggcaag

SEQ ID NO: 2008013 - RNA, 19 nt, Artificial Sequence
  Description of Artificial Sequence: Synthetic oligonucleotide
cccgcgcagcaucagggug

SEQ ID NO: 2008014 - RNA, 19 nt, Artificial Sequence
  Description of Artificial Sequence: Synthetic oligonucleotide
ggucaugguuugcuucugu

SEQ ID NO: 2008015 - RNA, 19 nt, Artificial Sequence
  Description of Artificial Sequence: Synthetic oligonucleotide
cccgggcgggcucagcacc

SEQ ID NO: 2008016 - RNA, 19 nt, Artificial Sequence
  Description of Artificial Sequence: Synthetic oligonucleotide
gucuccgggacagaagcuu

SEQ ID NO: 2008017 - RNA, 19 nt, Artificial Sequence
  Description of Artificial Sequence: Synthetic oligonucleotide
ucagccgggcgugguugau

SEQ ID NO: 2008018 - RNA, 19 nt, Artificial Sequence
  Description of Artificial Sequence: Synthetic oligonucleotide
gcuucccgacggauuucgg

SEQ ID NO: 2008019 - RNA, 19 nt, Artificial Sequence
  Description of Artificial Sequence: Synthetic oligonucleotide
ggcguacugcagaugcgga

SEQ ID NO: 2008020 - RNA, 19 nt, Artificial Sequence
  Description of Artificial Sequence: Synthetic oligonucleotide
cgcacgcccgccaggcucg

SEQ ID NO: 2008021 - RNA, 19 nt, Artificial Sequence
  Description of Artificial Sequence: Synthetic oligonucleotide
ucccgacccgggcgggcuc

SEQ ID NO: 2008022 - RNA, 19 nt, Artificial Sequence
  Description of Artificial Sequence: Synthetic oligonucleotide
cugugacccugggcaaguc

SEQ ID NO: 2008023 - RNA, 19 nt, Artificial Sequence
  Description of Artificial Sequence: Synthetic oligonucleotide
caccugcgcacugccugug

SEQ ID NO: 2008024 - RNA, 19 nt, Artificial Sequence
  Description of Artificial Sequence: Synthetic oligonucleotide
ccgcuguugucagaguuca

SEQ ID NO: 2008025 - RNA, 19 nt, Artificial Sequence
  Description of Artificial Sequence: Synthetic oligonucleotide
gggagcuacacaagcugcu

SEQ ID NO: 2008026 - RNA, 19 nt, Artificial Sequence
  Description of Artificial Sequence: Synthetic oligonucleotide
gagucaccucgcggugcac

SEQ ID NO: 2008027 - RNA, 19 nt, Artificial Sequence
  Description of Artificial Sequence: Synthetic oligonucleotide
gcacgaugucuucgguuaa

SEQ ID NO: 2008028 - RNA, 19 nt, Artificial Sequence
  Description of Artificial Sequence: Synthetic oligonucleotide
cagcgaacacuugguccca

SEQ ID NO: 2008029 - RNA, 19 nt, Artificial Sequence
  Description of Artificial Sequence: Synthetic oligonucleotide
gcacgaggcucggcgcacg

SEQ ID NO: 2008030 - RNA, 19 nt, Artificial Sequence
  Description of Artificial Sequence: Synthetic oligonucleotide
ccguugccagaaggcagcg

SEQ ID NO: 2008031 - RNA, 19 nt, Artificial Sequence
  Description of Artificial Sequence: Synthetic oligonucleotide
ucgaguccuccaggaugua

SEQ ID NO: 2008032 - RNA, 19 nt, Artificial Sequence
  Description of Artificial Sequence: Synthetic oligonucleotide
ggacagcucuagagacgcc

SEQ ID NO: 2008033 - RNA, 19 nt, Artificial Sequence
  Description of Artificial Sequence: Synthetic oligonucleotide
gccgcgcccaggucccugc

SEQ ID NO: 2008034 - RNA, 19 nt, Artificial Sequence
  Description of Artificial Sequence: Synthetic oligonucleotide
cagcaggcguacugcagau

SEQ ID NO: 2008035 - RNA, 19 nt, Artificial Sequence
  Description of Artificial Sequence: Synthetic oligonucleotide
cgugguugauguuccaggu

SEQ ID NO: 2008036 - RNA, 19 nt, Artificial Sequence
  Description of Artificial Sequence: Synthetic oligonucleotide
cagucgcucugcccaacgu

SEQ ID NO: 2008037 - RNA, 19 nt, Artificial Sequence
  Description of Artificial Sequence: Synthetic oligonucleotide
ggcacgaggcucggcgcac

SEQ ID NO: 2008038 - RNA, 19 nt, Artificial Sequence
  Description of Artificial Sequence: Synthetic oligonucleotide
cgacggauuucgguccagc

SEQ ID NO: 2008039 - RNA, 19 nt, Artificial Sequence
  Description of Artificial Sequence: Synthetic oligonucleotide
guagggguucggguaccgu

SEQ ID NO: 2008040 - RNA, 19 nt, Artificial Sequence
  Description of Artificial Sequence: Synthetic oligonucleotide
gcucagcacccgcgcagca

SEQ ID NO: 2008041 - RNA, 19 nt, Artificial Sequence
  Description of Artificial Sequence: Synthetic oligonucleotide
ccgccaggcucgcagcuca

SEQ ID NO: 2008042 - RNA, 19 nt, Artificial Sequence
  Description of Artificial Sequence: Synthetic oligonucleotide
gcacgcucuggcccaggaa

SEQ ID NO: 2008043 - RNA, 19 nt, Artificial Sequence
  Description of Artificial Sequence: Synthetic oligonucleotide
ggcucgcagcucagucacc

SEQ ID NO: 2008044 - RNA, 19 nt, Artificial Sequence
  Description of Artificial Sequence: Synthetic oligonucleotide
gggcgugguugauguucca

SEQ ID NO: 2008045 - RNA, 19 nt, Artificial Sequence
  Description of Artificial Sequence: Synthetic oligonucleotide
ggcucggcgcacgcccgcc

SEQ ID NO: 2008046 - RNA, 19 nt, Artificial Sequence
  Description of Artificial Sequence: Synthetic oligonucleotide
cgcgccgcgcccagguccc

SEQ ID NO: 2008047 - RNA, 19 nt, Artificial Sequence
  Description of Artificial Sequence: Synthetic oligonucleotide
gcggacccugacccaccac

SEQ ID NO: 2008048 - RNA, 19 nt, Artificial Sequence
  Description of Artificial Sequence: Synthetic oligonucleotide
cccgacggauuucggucca

SEQ ID NO: 2008049 - RNA, 19 nt, Artificial Sequence
  Description of Artificial Sequence: Synthetic oligonucleotide
ccgacggauuucgguccag

SEQ ID NO: 2008050 - RNA, 19 nt, Artificial Sequence
  Description of Artificial Sequence: Synthetic oligonucleotide
gggcgacguuggcaggaaa

SEQ ID NO: 2008051 - RNA, 19 nt, Artificial Sequence
  Description of Artificial Sequence: Synthetic oligonucleotide
cugcccaacguggcauccu

SEQ ID NO: 2008052 - RNA, 19 nt, Artificial Sequence
  Description of Artificial Sequence: Synthetic oligonucleotide
cccaacguggcauccuguu

SEQ ID NO: 2008053 - RNA, 19 nt, Artificial Sequence
  Description of Artificial Sequence: Synthetic oligonucleotide
gcgcugucuccuuugccuu

SEQ ID NO: 2008054 - RNA, 19 nt, Artificial Sequence
  Description of Artificial Sequence: Synthetic oligonucleotide
ggauuucgguccagccgcu

SEQ ID NO: 2008055 - RNA, 19 nt, Artificial Sequence
  Description of Artificial Sequence: Synthetic oligonucleotide
gcucggcgcacgcccgcca

SEQ ID NO: 2008056 - RNA, 19 nt, Artificial Sequence
  Description of Artificial Sequence: Synthetic oligonucleotide
ccucgcggugcacgauguc

SEQ ID NO: 2008057 - RNA, 19 nt, Artificial Sequence
  Description of Artificial Sequence: Synthetic oligonucleotide
gucccgacccgggcgggcu

SEQ ID NO: 2008058 - RNA, 19 nt, Artificial Sequence
  Description of Artificial Sequence: Synthetic oligonucleotide
cccucgaggagcguacagu

SEQ ID NO: 2008059 - RNA, 19 nt, Artificial Sequence
  Description of Artificial Sequence: Synthetic oligonucleotide
cagccgcuguugucagagu

SEQ ID NO: 2008060 - RNA, 19 nt, Artificial Sequence
  Description of Artificial Sequence: Synthetic oligonucleotide
cgcccgccaggcucgcagc

SEQ ID NO: 2008061 - RNA, 19 nt, Artificial Sequence
  Description of Artificial Sequence: Synthetic oligonucleotide
cggcgcacgcccgccaggc

SEQ ID NO: 2008062 - RNA, 19 nt, Artificial Sequence
  Description of Artificial Sequence: Synthetic oligonucleotide
ccgcgcccaggucccugcc

SEQ ID NO: 2008063 - RNA, 19 nt, Artificial Sequence
  Description of Artificial Sequence: Synthetic oligonucleotide
cugccagcgcugucuccuu

SEQ ID NO: 2008064 - RNA, 19 nt, Artificial Sequence
  Description of Artificial Sequence: Synthetic oligonucleotide
gcgcagcaucagggugacg

SEQ ID NO: 2008065 - RNA, 19 nt, Artificial Sequence
  Description of Artificial Sequence: Synthetic oligonucleotide
caccgccgcgccgcgccca

SEQ ID NO: 2008066 - RNA, 19 nt, Artificial Sequence
  Description of Artificial Sequence: Synthetic oligonucleotide
gcccaacguggcauccugu

SEQ ID NO: 2008067 - RNA, 19 nt, Artificial Sequence
  Description of Artificial Sequence: Synthetic oligonucleotide
cgaggagcguacagucuau

SEQ ID NO: 2008068 - RNA, 19 nt, Artificial Sequence
  Description of Artificial Sequence: Synthetic oligonucleotide
gggcuucaccuuguagcuu

SEQ ID NO: 2008069 - RNA, 19 nt, Artificial Sequence
  Description of Artificial Sequence: Synthetic oligonucleotide
cgggcucagcacccgcgca

SEQ ID NO: 2008070 - RNA, 19 nt, Artificial Sequence
  Description of Artificial Sequence: Synthetic oligonucleotide
cguugccagaaggcagcga

SEQ ID NO: 2008071 - RNA, 19 nt, Artificial Sequence
  Description of Artificial Sequence: Synthetic oligonucleotide
cgucccgacccgggcgggc

SEQ ID NO: 2008072 - RNA, 19 nt, Artificial Sequence
  Description of Artificial Sequence: Synthetic oligonucleotide
ggcgcacgcccgccaggcu

SEQ ID NO: 2008073 - RNA, 19 nt, Artificial Sequence
  Description of Artificial Sequence: Synthetic oligonucleotide
cugcaccuuucugcccaau

SEQ ID NO: 2008074 - RNA, 19 nt, Artificial Sequence
  Description of Artificial Sequence: Synthetic oligonucleotide
gcacgcccgccaggcucgc

SEQ ID NO: 2008075 - RNA, 19 nt, Artificial Sequence
  Description of Artificial Sequence: Synthetic oligonucleotide
gcgcacugccugugacccu

SEQ ID NO: 2008076 - RNA, 19 nt, Artificial Sequence
  Description of Artificial Sequence: Synthetic oligonucleotide
cccgacccgggcgggcuca

SEQ ID NO: 2008077 - RNA, 19 nt, Artificial Sequence
  Description of Artificial Sequence: Synthetic oligonucleotide
ccgacccgggcgggcucag

SEQ ID NO: 2008078 - RNA, 19 nt, Artificial Sequence
  Description of Artificial Sequence: Synthetic oligonucleotide
cccaggcuucccgacggau

SEQ ID NO: 2008079 - RNA, 19 nt, Artificial Sequence
  Description of Artificial Sequence: Synthetic oligonucleotide
cgccgcgcccaggucccug

SEQ ID NO: 2008080 - RNA, 19 nt, Artificial Sequence
  Description of Artificial Sequence: Synthetic oligonucleotide
gccgggcgugguugauguu

SEQ ID NO: 2008081 - RNA, 19 nt, Artificial Sequence
  Description of Artificial Sequence: Synthetic oligonucleotide
auauaaaguacacaguacg

SEQ ID NO: 2008082 - RNA, 19 nt, Artificial Sequence
  Description of Artificial Sequence: Synthetic oligonucleotide
agaaauuccagacauccgc

SEQ ID NO: 2008083 - RNA, 19 nt, Artificial Sequence
  Description of Artificial Sequence: Synthetic oligonucleotide
uuuuacguaaaccagauuu

SEQ ID NO: 2008084 - RNA, 19 nt, Artificial Sequence
  Description of Artificial Sequence: Synthetic oligonucleotide
aagacaaacuuccuaagcu

SEQ ID NO: 2008085 - RNA, 19 nt, Artificial Sequence
  Description of Artificial Sequence: Synthetic oligonucleotide
ucuguuacccguuuaaacc

SEQ ID NO: 2008086 - RNA, 19 nt, Artificial Sequence
  Description of Artificial Sequence: Synthetic oligonucleotide
aguguugaggaucucaggg

SEQ ID NO: 2008087 - RNA, 19 nt, Artificial Sequence
  Description of Artificial Sequence: Synthetic oligonucleotide
cucuaagucaccaacagug

SEQ ID NO: 2008088 - RNA, 19 nt, Artificial Sequence
  Description of Artificial Sequence: Synthetic oligonucleotide
aaucaagucacucagccua

SEQ ID NO: 2008089 - RNA, 19 nt, Artificial Sequence
  Description of Artificial Sequence: Synthetic oligonucleotide
aaccagauuuauuaaaagu

SEQ ID NO: 2008090 - RNA, 19 nt, Artificial Sequence
  Description of Artificial Sequence: Synthetic oligonucleotide
auagggacaauagugcucc

SEQ ID NO: 2008091 - RNA, 19 nt, Artificial Sequence
  Description of Artificial Sequence: Synthetic oligonucleotide
aaaguucucucuaagucac

SEQ ID NO: 2008092 - RNA, 19 nt, Artificial Sequence
  Description of Artificial Sequence: Synthetic oligonucleotide
aagacguaggccuuggucu

SEQ ID NO: 2008093 - RNA, 19 nt, Artificial Sequence
  Description of Artificial Sequence: Synthetic oligonucleotide
auuccagacauccgcagcc

SEQ ID NO: 2008094 - RNA, 19 nt, Artificial Sequence
  Description of Artificial Sequence: Synthetic oligonucleotide
ucagggcucacauaggccg

SEQ ID NO: 2008095 - RNA, 19 nt, Artificial Sequence
  Description of Artificial Sequence: Synthetic oligonucleotide
gauguguguaucuuccagg

SEQ ID NO: 2008096 - RNA, 19 nt, Artificial Sequence
  Description of Artificial Sequence: Synthetic oligonucleotide
ucgaagaagacguaggccu

SEQ ID NO: 2008097 - RNA, 19 nt, Artificial Sequence
  Description of Artificial Sequence: Synthetic oligonucleotide
guacgugagguauacaagg

SEQ ID NO: 2008098 - RNA, 19 nt, Artificial Sequence
  Description of Artificial Sequence: Synthetic oligonucleotide
caagaaauuccagacaucc

SEQ ID NO: 2008099 - RNA, 19 nt, Artificial Sequence
  Description of Artificial Sequence: Synthetic oligonucleotide
aacguuaguaguuugccaa

SEQ ID NO: 2008100 - RNA, 19 nt, Artificial Sequence
  Description of Artificial Sequence: Synthetic oligonucleotide
uauaaaguacacaguacgu

SEQ ID NO: 2008101 - RNA, 19 nt, Artificial Sequence
  Description of Artificial Sequence: Synthetic oligonucleotide
gaagaugucugccugcugc

SEQ ID NO: 2008102 - RNA, 19 nt, Artificial Sequence
  Description of Artificial Sequence: Synthetic oligonucleotide
aucaagaaauuccagacau

SEQ ID NO: 2008103 - RNA, 19 nt, Artificial Sequence
  Description of Artificial Sequence: Synthetic oligonucleotide
ggacauuauguauaaaagg

SEQ ID NO: 2008104 - RNA, 19 nt, Artificial Sequence
  Description of Artificial Sequence: Synthetic oligonucleotide
aacgacaacaaccggacau

SEQ ID NO: 2008105 - RNA, 19 nt, Artificial Sequence
  Description of Artificial Sequence: Synthetic oligonucleotide
agguauacaaggcauucuc

SEQ ID NO: 2008106 - RNA, 19 nt, Artificial Sequence
  Description of Artificial Sequence: Synthetic oligonucleotide
acggccaacaaucauucac

SEQ ID NO: 2008107 - RNA, 19 nt, Artificial Sequence
  Description of Artificial Sequence: Synthetic oligonucleotide
aaaccaccuaguuucagca

SEQ ID NO: 2008108 - RNA, 19 nt, Artificial Sequence
  Description of Artificial Sequence: Synthetic oligonucleotide
uccuucucgaagaagacgu

SEQ ID NO: 2008109 - RNA, 19 nt, Artificial Sequence
  Description of Artificial Sequence: Synthetic oligonucleotide
acaacaaccggacauuaug

SEQ ID NO: 2008110 - RNA, 19 nt, Artificial Sequence
  Description of Artificial Sequence: Synthetic oligonucleotide
uuaguaguuugccaaggca

SEQ ID NO: 2008111 - RNA, 19 nt, Artificial Sequence
  Description of Artificial Sequence: Synthetic oligonucleotide
aaguacacaguacgugagg

SEQ ID NO: 2008112 - RNA, 19 nt, Artificial Sequence
  Description of Artificial Sequence: Synthetic oligonucleotide
uauuuugacgcugggacag

SEQ ID NO: 2008113 - RNA, 19 nt, Artificial Sequence
  Description of Artificial Sequence: Synthetic oligonucleotide
acaacguuaguaguuugcc

SEQ ID NO: 2008114 - RNA, 19 nt, Artificial Sequence
  Description of Artificial Sequence: Synthetic oligonucleotide
aaacuuccuaagcuucagg

SEQ ID NO: 2008115 - RNA, 19 nt, Artificial Sequence
  Description of Artificial Sequence: Synthetic oligonucleotide
aacaaucauucacauuuca

SEQ ID NO: 2008116 - RNA, 19 nt, Artificial Sequence
  Description of Artificial Sequence: Synthetic oligonucleotide
acccguuuaaaccaccuag

SEQ ID NO: 2008117 - RNA, 19 nt, Artificial Sequence
  Description of Artificial Sequence: Synthetic oligonucleotide
agagccaaacgacaacaac

SEQ ID NO: 2008118 - RNA, 19 nt, Artificial Sequence
  Description of Artificial Sequence: Synthetic oligonucleotide
gagccaaacgacaacaacc

SEQ ID NO: 2008119 - RNA, 19 nt, Artificial Sequence
  Description of Artificial Sequence: Synthetic oligonucleotide
gguggcaccacacugagcc

SEQ ID NO: 2008120 - RNA, 19 nt, Artificial Sequence
  Description of Artificial Sequence: Synthetic oligonucleotide
uaaaccaccuaguuucagc

SEQ ID NO: 2008121 - RNA, 19 nt, Artificial Sequence
  Description of Artificial Sequence: Synthetic oligonucleotide
gacaauagugcuccguccc

SEQ ID NO: 2008122 - RNA, 19 nt, Artificial Sequence
  Description of Artificial Sequence: Synthetic oligonucleotide
cauuauguauaaaagguaa

SEQ ID NO: 2008123 - RNA, 19 nt, Artificial Sequence
  Description of Artificial Sequence: Synthetic oligonucleotide
uccggcuucgcacauagga

SEQ ID NO: 2008124 - RNA, 19 nt, Artificial Sequence
  Description of Artificial Sequence: Synthetic oligonucleotide
ugcuccgucccaaaucugg

SEQ ID NO: 2008125 - RNA, 19 nt, Artificial Sequence
  Description of Artificial Sequence: Synthetic oligonucleotide
uaguaguuugccaaggcau

SEQ ID NO: 2008126 - RNA, 19 nt, Artificial Sequence
  Description of Artificial Sequence: Synthetic oligonucleotide
uuuacguaaaccagauuua

SEQ ID NO: 2008127 - RNA, 19 nt, Artificial Sequence
  Description of Artificial Sequence: Synthetic oligonucleotide
uggacaaccccaacagagg

SEQ ID NO: 2008128 - RNA, 19 nt, Artificial Sequence
  Description of Artificial Sequence: Synthetic oligonucleotide
auaaaguacacaguacgug

SEQ ID NO: 2008129 - RNA, 19 nt, Artificial Sequence
  Description of Artificial Sequence: Synthetic oligonucleotide
caaacgacaacaaccggac

SEQ ID NO: 2008130 - RNA, 19 nt, Artificial Sequence
  Description of Artificial Sequence: Synthetic oligonucleotide
aaaucaagucacucagccu

SEQ ID NO: 2008131 - RNA, 19 nt, Artificial Sequence
  Description of Artificial Sequence: Synthetic oligonucleotide
uauacaaggcauucucaca

SEQ ID NO: 2008132 - RNA, 19 nt, Artificial Sequence
  Description of Artificial Sequence: Synthetic oligonucleotide
ugugcugcucaaaucaagu

SEQ ID NO: 2008133 - RNA, 19 nt, Artificial Sequence
  Description of Artificial Sequence: Synthetic oligonucleotide
auacaaggcauucucacaa

SEQ ID NO: 2008134 - RNA, 19 nt, Artificial Sequence
  Description of Artificial Sequence: Synthetic oligonucleotide
gucaugacgguucaucgag

SEQ ID NO: 2008135 - RNA, 19 nt, Artificial Sequence
  Description of Artificial Sequence: Synthetic oligonucleotide
uucuguuacccguuuaaac

SEQ ID NO: 2008136 - RNA, 19 nt, Artificial Sequence
  Description of Artificial Sequence: Synthetic oligonucleotide
guauacaaggcauucucac

SEQ ID NO: 2008137 - RNA, 19 nt, Artificial Sequence
  Description of Artificial Sequence: Synthetic oligonucleotide
uuuccggcuucgcacauag

SEQ ID NO: 2008138 - RNA, 19 nt, Artificial Sequence
  Description of Artificial Sequence: Synthetic oligonucleotide
gggaacguaucacagaugc

SEQ ID NO: 2008139 - RNA, 19 nt, Artificial Sequence
  Description of Artificial Sequence: Synthetic oligonucleotide
agacuaucugcuugaagag

SEQ ID NO: 2008140 - RNA, 19 nt, Artificial Sequence
  Description of Artificial Sequence: Synthetic oligonucleotide
ucucucuaagucaccaaca

SEQ ID NO: 2008141 - RNA, 19 nt, Artificial Sequence
  Description of Artificial Sequence: Synthetic oligonucleotide
agcuaaucugagugugugc

SEQ ID NO: 2008142 - RNA, 19 nt, Artificial Sequence
  Description of Artificial Sequence: Synthetic oligonucleotide
agcuggacaaccccaacag

SEQ ID NO: 2008143 - RNA, 19 nt, Artificial Sequence
  Description of Artificial Sequence: Synthetic oligonucleotide
aaaucuggcuggcaccgug

SEQ ID NO: 2008144 - RNA, 19 nt, Artificial Sequence
  Description of Artificial Sequence: Synthetic oligonucleotide
uacgugagguauacaaggc

SEQ ID NO: 2008145 - RNA, 19 nt, Artificial Sequence
  Description of Artificial Sequence: Synthetic oligonucleotide
agccaaacgacaacaaccg

SEQ ID NO: 2008146 - RNA, 19 nt, Artificial Sequence
  Description of Artificial Sequence: Synthetic oligonucleotide
agugcuccgucccaaaucu

SEQ ID NO: 2008147 - RNA, 19 nt, Artificial Sequence
  Description of Artificial Sequence: Synthetic oligonucleotide
uccuccguggagaagacaa

SEQ ID NO: 2008148 - RNA, 19 nt, Artificial Sequence
  Description of Artificial Sequence: Synthetic oligonucleotide
uucccgaagccuuuuccgg

SEQ ID NO: 2008149 - RNA, 19 nt, Artificial Sequence
  Description of Artificial Sequence: Synthetic oligonucleotide
cagucaugacgguucaucg

SEQ ID NO: 2008150 - RNA, 19 nt, Artificial Sequence
  Description of Artificial Sequence: Synthetic oligonucleotide
aaggcauucucacaacguu

SEQ ID NO: 2008151 - RNA, 19 nt, Artificial Sequence
  Description of Artificial Sequence: Synthetic oligonucleotide
acagucaugacgguucauc

SEQ ID NO: 2008152 - RNA, 19 nt, Artificial Sequence
  Description of Artificial Sequence: Synthetic oligonucleotide
ccuaguuucagcacugucc

SEQ ID NO: 2008153 - RNA, 19 nt, Artificial Sequence
  Description of Artificial Sequence: Synthetic oligonucleotide
cucucuaagucaccaacag

SEQ ID NO: 2008154 - RNA, 19 nt, Artificial Sequence
  Description of Artificial Sequence: Synthetic oligonucleotide
acacagacgacaaaacaag

SEQ ID NO: 2008155 - RNA, 19 nt, Artificial Sequence
  Description of Artificial Sequence: Synthetic oligonucleotide
guuaguaguuugccaaggc

SEQ ID NO: 2008156 - RNA, 19 nt, Artificial Sequence
  Description of Artificial Sequence: Synthetic oligonucleotide
agaccuaguguuuccagcu

SEQ ID NO: 2008157 - RNA, 19 nt, Artificial Sequence
  Description of Artificial Sequence: Synthetic oligonucleotide
auuucuguuacccguuuaa

SEQ ID NO: 2008158 - RNA, 19 nt, Artificial Sequence
  Description of Artificial Sequence: Synthetic oligonucleotide
cacaacguuaguaguuugc

SEQ ID NO: 2008159 - RNA, 19 nt, Artificial Sequence
  Description of Artificial Sequence: Synthetic oligonucleotide
guaucacagaugcaagagc

SEQ ID NO: 2008160 - RNA, 19 nt, Artificial Sequence
  Description of Artificial Sequence: Synthetic oligonucleotide
gaagacguaggccuugguc

SEQ ID NO: 2008161 - RNA, 19 nt, Artificial Sequence
  Description of Artificial Sequence: Synthetic oligonucleotide
cacagcauuucuguuaccc

SEQ ID NO: 2008162 - RNA, 19 nt, Artificial Sequence
  Description of Artificial Sequence: Synthetic oligonucleotide
ugugccacuaccaccuuuc

SEQ ID NO: 2008163 - RNA, 19 nt, Artificial Sequence
  Description of Artificial Sequence: Synthetic oligonucleotide
ugcaagagcuggacaaccc

SEQ ID NO: 2008164 - RNA, 19 nt, Artificial Sequence
  Description of Artificial Sequence: Synthetic oligonucleotide
gagagguggcaccacacug

SEQ ID NO: 2008165 - RNA, 19 nt, Artificial Sequence
  Description of Artificial Sequence: Synthetic oligonucleotide
ucucuaagucaccaacagu

SEQ ID NO: 2008166 - RNA, 19 nt, Artificial Sequence
  Description of Artificial Sequence: Synthetic oligonucleotide
uccgucccaaaucuggcug

SEQ ID NO: 2008167 - RNA, 19 nt, Artificial Sequence
  Description of Artificial Sequence: Synthetic oligonucleotide
uacacaguacgugagguau

SEQ ID NO: 2008168 - RNA, 19 nt, Artificial Sequence
  Description of Artificial Sequence: Synthetic oligonucleotide
augcuugucugagagggcg

SEQ ID NO: 2008169 - RNA, 19 nt, Artificial Sequence
  Description of Artificial Sequence: Synthetic oligonucleotide
accaccuaguuucagcacu

SEQ ID NO: 2008170 - RNA, 19 nt, Artificial Sequence
  Description of Artificial Sequence: Synthetic oligonucleotide
augcaagagcuggacaacc

SEQ ID NO: 2008171 - RNA, 19 nt, Artificial Sequence
  Description of Artificial Sequence: Synthetic oligonucleotide
agccuagagagguggcacc

SEQ ID NO: 2008172 - RNA, 19 nt, Artificial Sequence
  Description of Artificial Sequence: Synthetic oligonucleotide
aacaaccggacauuaugua

SEQ ID NO: 2008173 - RNA, 19 nt, Artificial Sequence
  Description of Artificial Sequence: Synthetic oligonucleotide
guaguguugaggaucucag

SEQ ID NO: 2008174 - RNA, 19 nt, Artificial Sequence
  Description of Artificial Sequence: Synthetic oligonucleotide
ugaguaggucccaguagug

SEQ ID NO: 2008175 - RNA, 19 nt, Artificial Sequence
  Description of Artificial Sequence: Synthetic oligonucleotide
ucaagaaauuccagacauc

SEQ ID NO: 2008176 - RNA, 19 nt, Artificial Sequence
  Description of Artificial Sequence: Synthetic oligonucleotide
ugagguauacaaggcauuc

SEQ ID NO: 2008177 - RNA, 19 nt, Artificial Sequence
  Description of Artificial Sequence: Synthetic oligonucleotide
uguuacccguuuaaaccac

SEQ ID NO: 2008178 - RNA, 19 nt, Artificial Sequence
  Description of Artificial Sequence: Synthetic oligonucleotide
cauagggacaauagugcuc

SEQ ID NO: 2008179 - RNA, 19 nt, Artificial Sequence
  Description of Artificial Sequence: Synthetic oligonucleotide
agacguaggccuuggucuc

SEQ ID NO: 2008180 - RNA, 19 nt, Artificial Sequence
  Description of Artificial Sequence: Synthetic oligonucleotide
uuacccguuuaaaccaccu

SEQ ID NO: 2008181 - RNA, 19 nt, Artificial Sequence
  Description of Artificial Sequence: Synthetic oligonucleotide
uuccuaagcuucagguccc

SEQ ID NO: 2008182 - RNA, 19 nt, Artificial Sequence
  Description of Artificial Sequence: Synthetic oligonucleotide
uuacguaaaccagauuuau

SEQ ID NO: 2008183 - RNA, 19 nt, Artificial Sequence
  Description of Artificial Sequence: Synthetic oligonucleotide
aguacgugagguauacaag

SEQ ID NO: 2008184 - RNA, 19 nt, Artificial Sequence
  Description of Artificial Sequence: Synthetic oligonucleotide
aaccggacauuauguauaa

SEQ ID NO: 2008185 - RNA, 19 nt, Artificial Sequence
  Description of Artificial Sequence: Synthetic oligonucleotide
acguuaguaguuugccaag

SEQ ID NO: 2008186 - RNA, 19 nt, Artificial Sequence
  Description of Artificial Sequence: Synthetic oligonucleotide
accuaguuucagcacuguc

SEQ ID NO: 2008187 - RNA, 19 nt, Artificial Sequence
  Description of Artificial Sequence: Synthetic oligonucleotide
uuugacgcugggacaguca

SEQ ID NO: 2008188 - RNA, 19 nt, Artificial Sequence
  Description of Artificial Sequence: Synthetic oligonucleotide
gacgcugggacagucauga

SEQ ID NO: 2008189 - RNA, 19 nt, Artificial Sequence
  Description of Artificial Sequence: Synthetic oligonucleotide
gccacuaccaccuuuccac

SEQ ID NO: 2008190 - RNA, 19 nt, Artificial Sequence
  Description of Artificial Sequence: Synthetic oligonucleotide
acauccgcagccuucccug

SEQ ID NO: 2008191 - RNA, 19 nt, Artificial Sequence
  Description of Artificial Sequence: Synthetic oligonucleotide
acagacgacaaaacaagcu

SEQ ID NO: 2008192 - RNA, 19 nt, Artificial Sequence
  Description of Artificial Sequence: Synthetic oligonucleotide
cuguuacccguuuaaacca

SEQ ID NO: 2008193 - RNA, 19 nt, Artificial Sequence
  Description of Artificial Sequence: Synthetic oligonucleotide
accaacagugugccacuac

SEQ ID NO: 2008194 - RNA, 19 nt, Artificial Sequence
  Description of Artificial Sequence: Synthetic oligonucleotide
acgugagguauacaaggca

SEQ ID NO: 2008195 - RNA, 19 nt, Artificial Sequence
  Description of Artificial Sequence: Synthetic oligonucleotide
aauagugcuccgucccaaa

SEQ ID NO: 2008196 - RNA, 19 nt, Artificial Sequence
  Description of Artificial Sequence: Synthetic oligonucleotide
uucaucgagaaggggacac

SEQ ID NO: 2008197 - RNA, 19 nt, Artificial Sequence
  Description of Artificial Sequence: Synthetic oligonucleotide
aaguucucucuaagucacc

SEQ ID NO: 2008198 - RNA, 19 nt, Artificial Sequence
  Description of Artificial Sequence: Synthetic oligonucleotide
aaacaagcuucagagccaa

SEQ ID NO: 2008199 - RNA, 19 nt, Artificial Sequence
  Description of Artificial Sequence: Synthetic oligonucleotide
acguaucacagaugcaaga

SEQ ID NO: 2008200 - RNA, 19 nt, Artificial Sequence
  Description of Artificial Sequence: Synthetic oligonucleotide
ucacaacguuaguaguuug

SEQ ID NO: 2008201 - RNA, 19 nt, Artificial Sequence
  Description of Artificial Sequence: Synthetic oligonucleotide
aguaggucccaguaguguu

SEQ ID NO: 2008202 - RNA, 19 nt, Artificial Sequence
  Description of Artificial Sequence: Synthetic oligonucleotide
auuauguauaaaagguaaa

SEQ ID NO: 2008203 - RNA, 19 nt, Artificial Sequence
  Description of Artificial Sequence: Synthetic oligonucleotide
uguaagagggccugcccau

SEQ ID NO: 2008204 - RNA, 19 nt, Artificial Sequence
  Description of Artificial Sequence: Synthetic oligonucleotide
uugacgcugggacagucau

SEQ ID NO: 2008205 - RNA, 19 nt, Artificial Sequence
  Description of Artificial Sequence: Synthetic oligonucleotide
aaacgacaacaaccggaca

SEQ ID NO: 2008206 - RNA, 19 nt, Artificial Sequence
  Description of Artificial Sequence: Synthetic oligonucleotide
cuaccaccuuuccacacgc

SEQ ID NO: 2008207 - RNA, 19 nt, Artificial Sequence
  Description of Artificial Sequence: Synthetic oligonucleotide
cccauagggacaauagugc

SEQ ID NO: 2008208 - RNA, 19 nt, Artificial Sequence
  Description of Artificial Sequence: Synthetic oligonucleotide
guaguuugccaaggcauag

SEQ ID NO: 2008209 - RNA, 19 nt, Artificial Sequence
  Description of Artificial Sequence: Synthetic oligonucleotide
acauuauguauaaaaggua

SEQ ID NO: 2008210 - RNA, 19 nt, Artificial Sequence
  Description of Artificial Sequence: Synthetic oligonucleotide
uguguaucuuccaggcuuu

SEQ ID NO: 2008211 - RNA, 19 nt, Artificial Sequence
  Description of Artificial Sequence: Synthetic oligonucleotide
cuugaagagccgagcggcc

SEQ ID NO: 2008212 - RNA, 19 nt, Artificial Sequence
  Description of Artificial Sequence: Synthetic oligonucleotide
cuaaucugagugugugcug

SEQ ID NO: 2008213 - RNA, 19 nt, Artificial Sequence
  Description of Artificial Sequence: Synthetic oligonucleotide
accuaguguuuccagcugu

SEQ ID NO: 2008214 - RNA, 19 nt, Artificial Sequence
  Description of Artificial Sequence: Synthetic oligonucleotide
aggagcuaaucugagugug

SEQ ID NO: 2008215 - RNA, 19 nt, Artificial Sequence
  Description of Artificial Sequence: Synthetic oligonucleotide
caucaagaaauuccagaca

SEQ ID NO: 2008216 - RNA, 19 nt, Artificial Sequence
  Description of Artificial Sequence: Synthetic oligonucleotide
ugggcaacggcggagacua

SEQ ID NO: 2008217 - RNA, 19 nt, Artificial Sequence
  Description of Artificial Sequence: Synthetic oligonucleotide
uagugcuccgucccaaauc

SEQ ID NO: 2008218 - RNA, 19 nt, Artificial Sequence
  Description of Artificial Sequence: Synthetic oligonucleotide
ucaugacgguucaucgaga

SEQ ID NO: 2008219 - RNA, 19 nt, Artificial Sequence
  Description of Artificial Sequence: Synthetic oligonucleotide
ucccgaagccuuuuccggc

SEQ ID NO: 2008220 - RNA, 19 nt, Artificial Sequence
  Description of Artificial Sequence: Synthetic oligonucleotide
caacaaucauucacauuuc

SEQ ID NO: 2008221 - RNA, 19 nt, Artificial Sequence
  Description of Artificial Sequence: Synthetic oligonucleotide
agagagguggcaccacacu

SEQ ID NO: 2008222 - RNA, 19 nt, Artificial Sequence
  Description of Artificial Sequence: Synthetic oligonucleotide
ggcauucucacaacguuag

SEQ ID NO: 2008223 - RNA, 19 nt, Artificial Sequence
  Description of Artificial Sequence: Synthetic oligonucleotide
gaugcaagagcuggacaac

SEQ ID NO: 2008224 - RNA, 19 nt, Artificial Sequence
  Description of Artificial Sequence: Synthetic oligonucleotide
caaacuuccuaagcuucag

SEQ ID NO: 2008225 - RNA, 19 nt, Artificial Sequence
  Description of Artificial Sequence: Synthetic oligonucleotide
ggucguacggccaacaauc

SEQ ID NO: 2008226 - RNA, 19 nt, Artificial Sequence
  Description of Artificial Sequence: Synthetic oligonucleotide
agcccgaguccucagccag

SEQ ID NO: 2008227 - RNA, 19 nt, Artificial Sequence
  Description of Artificial Sequence: Synthetic oligonucleotide
agccagggaacguaucaca

SEQ ID NO: 2008228 - RNA, 19 nt, Artificial Sequence
  Description of Artificial Sequence: Synthetic oligonucleotide
gaccuaguguuuccagcug

SEQ ID NO: 2008229 - RNA, 19 nt, Artificial Sequence
  Description of Artificial Sequence: Synthetic oligonucleotide
guguaagagggccugccca

SEQ ID NO: 2008230 - RNA, 19 nt, Artificial Sequence
  Description of Artificial Sequence: Synthetic oligonucleotide
acauuucacauggcccugg

SEQ ID NO: 2008231 - RNA, 19 nt, Artificial Sequence
  Description of Artificial Sequence: Synthetic oligonucleotide
uaguuugccaaggcauagc

SEQ ID NO: 2008232 - RNA, 19 nt, Artificial Sequence
  Description of Artificial Sequence: Synthetic oligonucleotide
auaggccgggcagccaugc

SEQ ID NO: 2008233 - RNA, 19 nt, Artificial Sequence
  Description of Artificial Sequence: Synthetic oligonucleotide
ccaacagugugccacuacc

SEQ ID NO: 2008234 - RNA, 19 nt, Artificial Sequence
  Description of Artificial Sequence: Synthetic oligonucleotide
aaggucguacggccaacaa

SEQ ID NO: 2008235 - RNA, 19 nt, Artificial Sequence
  Description of Artificial Sequence: Synthetic oligonucleotide
acauaggccgggcagccau

SEQ ID NO: 2008236 - RNA, 19 nt, Artificial Sequence
  Description of Artificial Sequence: Synthetic oligonucleotide
uaccaccuuuccacacgcg

SEQ ID NO: 2008237 - RNA, 19 nt, Artificial Sequence
  Description of Artificial Sequence: Synthetic oligonucleotide
cuucagagccaaacgacaa

SEQ ID NO: 2008238 - RNA, 19 nt, Artificial Sequence
  Description of Artificial Sequence: Synthetic oligonucleotide
ggacaauagugcuccgucc

SEQ ID NO: 2008239 - RNA, 19 nt, Artificial Sequence
  Description of Artificial Sequence: Synthetic oligonucleotide
caaccggacauuauguaua

SEQ ID NO: 2008240 - RNA, 19 nt, Artificial Sequence
  Description of Artificial Sequence: Synthetic oligonucleotide
cgaggagcuaaucugagug

SEQ ID NO: 2008241 - RNA, 19 nt, Artificial Sequence
  Description of Artificial Sequence: Synthetic oligonucleotide
agacauccgcagccuuccc

SEQ ID NO: 2008242 - RNA, 19 nt, Artificial Sequence
  Description of Artificial Sequence: Synthetic oligonucleotide
cuccguggagaagacaaac

SEQ ID NO: 2008243 - RNA, 19 nt, Artificial Sequence
  Description of Artificial Sequence: Synthetic oligonucleotide
caacguuaguaguuugcca

SEQ ID NO: 2008244 - RNA, 19 nt, Artificial Sequence
  Description of Artificial Sequence: Synthetic oligonucleotide
aggucguacggccaacaau

SEQ ID NO: 2008245 - RNA, 19 nt, Artificial Sequence
  Description of Artificial Sequence: Synthetic oligonucleotide
ucaucgagaaggggacacc

SEQ ID NO: 2008246 - RNA, 19 nt, Artificial Sequence
  Description of Artificial Sequence: Synthetic oligonucleotide
uccccgagucccaccaucu

SEQ ID NO: 2008247 - RNA, 19 nt, Artificial Sequence
  Description of Artificial Sequence: Synthetic oligonucleotide
guacggccaacaaucauuc

SEQ ID NO: 2008248 - RNA, 19 nt, Artificial Sequence
  Description of Artificial Sequence: Synthetic oligonucleotide
caccuuuccacacgcgcac

SEQ ID NO: 2008249 - RNA, 19 nt, Artificial Sequence
  Description of Artificial Sequence: Synthetic oligonucleotide
cugagagggcgucaucuuc

SEQ ID NO: 2008250 - RNA, 19 nt, Artificial Sequence
  Description of Artificial Sequence: Synthetic oligonucleotide
aaccccaacagaggccugu

SEQ ID NO: 2008251 - RNA, 19 nt, Artificial Sequence
  Description of Artificial Sequence: Synthetic oligonucleotide
ggagacuaucugcuugaag

SEQ ID NO: 2008252 - RNA, 19 nt, Artificial Sequence
  Description of Artificial Sequence: Synthetic oligonucleotide
auagugcuccgucccaaau

SEQ ID NO: 2008253 - RNA, 19 nt, Artificial Sequence
  Description of Artificial Sequence: Synthetic oligonucleotide
gguucaucgagaaggggac

SEQ ID NO: 2008254 - RNA, 19 nt, Artificial Sequence
  Description of Artificial Sequence: Synthetic oligonucleotide
gggacaauagugcuccguc

SEQ ID NO: 2008255 - RNA, 19 nt, Artificial Sequence
  Description of Artificial Sequence: Synthetic oligonucleotide
ugcuugucugagagggcgu

SEQ ID NO: 2008256 - RNA, 19 nt, Artificial Sequence
  Description of Artificial Sequence: Synthetic oligonucleotide
ggagaccuaguguuuccag

SEQ ID NO: 2008257 - RNA, 19 nt, Artificial Sequence
  Description of Artificial Sequence: Synthetic oligonucleotide
caugacgguucaucgagaa

SEQ ID NO: 2008258 - RNA, 19 nt, Artificial Sequence
  Description of Artificial Sequence: Synthetic oligonucleotide
gugcugcucaaaucaaguc

SEQ ID NO: 2008259 - RNA, 19 nt, Artificial Sequence
  Description of Artificial Sequence: Synthetic oligonucleotide
uacccguuuaaaccaccua

SEQ ID NO: 2008260 - RNA, 19 nt, Artificial Sequence
  Description of Artificial Sequence: Synthetic oligonucleotide
ggcggagacuaucugcuug

SEQ ID NO: 2008261 - RNA, 19 nt, Artificial Sequence
  Description of Artificial Sequence: Synthetic oligonucleotide
ugcccaucaucaagaaauu

SEQ ID NO: 2008262 - RNA, 19 nt, Artificial Sequence
  Description of Artificial Sequence: Synthetic oligonucleotide
ucguacggccaacaaucau

SEQ ID NO: 2008263 - RNA, 19 nt, Artificial Sequence
  Description of Artificial Sequence: Synthetic oligonucleotide
guuacccguuuaaaccacc

SEQ ID NO: 2008264 - RNA, 19 nt, Artificial Sequence
  Description of Artificial Sequence: Synthetic oligonucleotide
cacuaccaccuuuccacac

SEQ ID NO: 2008265 - RNA, 19 nt, Artificial Sequence
  Description of Artificial Sequence: Synthetic oligonucleotide
ggagaagacaaacuuccua

SEQ ID NO: 2008266 - RNA, 19 nt, Artificial Sequence
  Description of Artificial Sequence: Synthetic oligonucleotide
cucagccuagagagguggc

SEQ ID NO: 2008267 - RNA, 19 nt, Artificial Sequence
  Description of Artificial Sequence: Synthetic oligonucleotide
ucugagagggcgucaucuu

SEQ ID NO: 2008268 - RNA, 19 nt, Artificial Sequence
  Description of Artificial Sequence: Synthetic oligonucleotide
cccaacagaggccuguccc

SEQ ID NO: 2008269 - RNA, 19 nt, Artificial Sequence
  Description of Artificial Sequence: Synthetic oligonucleotide
uuuugacgcugggacaguc

SEQ ID NO: 2008270 - RNA, 19 nt, Artificial Sequence
  Description of Artificial Sequence: Synthetic oligonucleotide
cugaguaggucccaguagu

SEQ ID NO: 2008271 - RNA, 19 nt, Artificial Sequence
  Description of Artificial Sequence: Synthetic oligonucleotide
ccggacauuauguauaaaa

SEQ ID NO: 2008272 - RNA, 19 nt, Artificial Sequence
  Description of Artificial Sequence: Synthetic oligonucleotide
ugccaaggucguacggcca

SEQ ID NO: 2008273 - RNA, 19 nt, Artificial Sequence
  Description of Artificial Sequence: Synthetic oligonucleotide
caacaaccggacauuaugu

SEQ ID NO: 2008274 - RNA, 19 nt, Artificial Sequence
  Description of Artificial Sequence: Synthetic oligonucleotide
gucacucagccuagagagg

SEQ ID NO: 2008275 - RNA, 19 nt, Artificial Sequence
  Description of Artificial Sequence: Synthetic oligonucleotide
cuggguucucuccuccgug

SEQ ID NO: 2008276 - RNA, 19 nt, Artificial Sequence
  Description of Artificial Sequence: Synthetic oligonucleotide
acggcggagacuaucugcu

SEQ ID NO: 2008277 - RNA, 19 nt, Artificial Sequence
  Description of Artificial Sequence: Synthetic oligonucleotide
gaggagcuaaucugagugu

SEQ ID NO: 2008278 - RNA, 19 nt, Artificial Sequence
  Description of Artificial Sequence: Synthetic oligonucleotide
acgguucaucgagaagggg

SEQ ID NO: 2008279 - RNA, 19 nt, Artificial Sequence
  Description of Artificial Sequence: Synthetic oligonucleotide
cagccuagagagguggcac

SEQ ID NO: 2008280 - RNA, 19 nt, Artificial Sequence
  Description of Artificial Sequence: Synthetic oligonucleotide
cccaaaucuggcuggcacc

SEQ ID NO: 2008281 - RNA, 19 nt, Artificial Sequence
  Description of Artificial Sequence: Synthetic oligonucleotide
gccaaacgacaacaaccgg

SEQ ID NO: 2008282 - RNA, 19 nt, Artificial Sequence
  Description of Artificial Sequence: Synthetic oligonucleotide
acgcgcacaggagaccuag

SEQ ID NO: 2008283 - RNA, 19 nt, Artificial Sequence
  Description of Artificial Sequence: Synthetic oligonucleotide
cugugccaguucacaaaac

SEQ ID NO: 2008284 - RNA, 19 nt, Artificial Sequence
  Description of Artificial Sequence: Synthetic oligonucleotide
caaggcauucucacaacgu

SEQ ID NO: 2008285 - RNA, 19 nt, Artificial Sequence
  Description of Artificial Sequence: Synthetic oligonucleotide
acacgcgcacaggagaccu

SEQ ID NO: 2008286 - RNA, 19 nt, Artificial Sequence
  Description of Artificial Sequence: Synthetic oligonucleotide
uacggccaacaaucauuca

SEQ ID NO: 2008287 - RNA, 19 nt, Artificial Sequence
  Description of Artificial Sequence: Synthetic oligonucleotide
agggacaauagugcuccgu

SEQ ID NO: 2008288 - RNA, 19 nt, Artificial Sequence
  Description of Artificial Sequence: Synthetic oligonucleotide
cacagaugcaagagcugga

SEQ ID NO: 2008289 - RNA, 19 nt, Artificial Sequence
  Description of Artificial Sequence: Synthetic oligonucleotide
uuccagacauccgcagccu

SEQ ID NO: 2008290 - RNA, 19 nt, Artificial Sequence
  Description of Artificial Sequence: Synthetic oligonucleotide
uuccggcuucgcacauagg

SEQ ID NO: 2008291 - RNA, 19 nt, Artificial Sequence
  Description of Artificial Sequence: Synthetic oligonucleotide
gguucucuccuccguggag

SEQ ID NO: 2008292 - RNA, 19 nt, Artificial Sequence
  Description of Artificial Sequence: Synthetic oligonucleotide
ugucugagagggcgucauc

SEQ ID NO: 2008293 - RNA, 19 nt, Artificial Sequence
  Description of Artificial Sequence: Synthetic oligonucleotide
caacagaggccugucccug

SEQ ID NO: 2008294 - RNA, 19 nt, Artificial Sequence
  Description of Artificial Sequence: Synthetic oligonucleotide
acgacaacaaccggacauu

SEQ ID NO: 2008295 - RNA, 19 nt, Artificial Sequence
  Description of Artificial Sequence: Synthetic oligonucleotide
aggagaccuaguguuucca

SEQ ID NO: 2008296 - RNA, 19 nt, Artificial Sequence
  Description of Artificial Sequence: Synthetic oligonucleotide
cacauuucacauggcccug

SEQ ID NO: 2008297 - RNA, 19 nt, Artificial Sequence
  Description of Artificial Sequence: Synthetic oligonucleotide
cagaugcaagagcuggaca

SEQ ID NO: 2008298 - RNA, 19 nt, Artificial Sequence
  Description of Artificial Sequence: Synthetic oligonucleotide
gcuaaucugagugugugcu

SEQ ID NO: 2008299 - RNA, 19 nt, Artificial Sequence
  Description of Artificial Sequence: Synthetic oligonucleotide
uccagacauccgcagccuu

SEQ ID NO: 2008300 - RNA, 19 nt, Artificial Sequence
  Description of Artificial Sequence: Synthetic oligonucleotide
agggcucacauaggccggg

SEQ ID NO: 2008301 - RNA, 19 nt, Artificial Sequence
  Description of Artificial Sequence: Synthetic oligonucleotide
ucccugaguaggucccagu

SEQ ID NO: 2008302 - RNA, 19 nt, Artificial Sequence
  Description of Artificial Sequence: Synthetic oligonucleotide
guucucucuaagucaccaa

SEQ ID NO: 2008303 - RNA, 19 nt, Artificial Sequence
  Description of Artificial Sequence: Synthetic oligonucleotide
cacacagguuccucagaca

SEQ ID NO: 2008304 - RNA, 19 nt, Artificial Sequence
  Description of Artificial Sequence: Synthetic oligonucleotide
gccagggaacguaucacag

SEQ ID NO: 2008305 - RNA, 19 nt, Artificial Sequence
  Description of Artificial Sequence: Synthetic oligonucleotide
ccggcuucgcacauaggag

SEQ ID NO: 2008306 - RNA, 19 nt, Artificial Sequence
  Description of Artificial Sequence: Synthetic oligonucleotide
uggccgacugguggcagug

SEQ ID NO: 2008307 - RNA, 19 nt, Artificial Sequence
  Description of Artificial Sequence: Synthetic oligonucleotide
gagcggccuccucuucccg

SEQ ID NO: 2008308 - RNA, 19 nt, Artificial Sequence
  Description of Artificial Sequence: Synthetic oligonucleotide
aggcauucucacaacguua

SEQ ID NO: 2008309 - RNA, 19 nt, Artificial Sequence
  Description of Artificial Sequence: Synthetic oligonucleotide
caccguguaagagggccug

SEQ ID NO: 2008310 - RNA, 19 nt, Artificial Sequence
  Description of Artificial Sequence: Synthetic oligonucleotide
gaguaggucccaguagugu

SEQ ID NO: 2008311 - RNA, 19 nt, Artificial Sequence
  Description of Artificial Sequence: Synthetic oligonucleotide
caacggcggagacuaucug

SEQ ID NO: 2008312 - RNA, 19 nt, Artificial Sequence
  Description of Artificial Sequence: Synthetic oligonucleotide
auuuugacgcugggacagu

SEQ ID NO: 2008313 - RNA, 19 nt, Artificial Sequence
  Description of Artificial Sequence: Synthetic oligonucleotide
cguuaguaguuugccaagg

SEQ ID NO: 2008314 - RNA, 19 nt, Artificial Sequence
  Description of Artificial Sequence: Synthetic oligonucleotide
acgcugggacagucaugac

SEQ ID NO: 2008315 - RNA, 19 nt, Artificial Sequence
  Description of Artificial Sequence: Synthetic oligonucleotide
accccaacagaggccuguc

SEQ ID NO: 2008316 - RNA, 19 nt, Artificial Sequence
  Description of Artificial Sequence: Synthetic oligonucleotide
gggcaaaugcccaggccag

SEQ ID NO: 2008317 - RNA, 19 nt, Artificial Sequence
  Description of Artificial Sequence: Synthetic oligonucleotide
ccaccuaguuucagcacug

SEQ ID NO: 2008318 - RNA, 19 nt, Artificial Sequence
  Description of Artificial Sequence: Synthetic oligonucleotide
ccgucccaaaucuggcugg

SEQ ID NO: 2008319 - RNA, 19 nt, Artificial Sequence
  Description of Artificial Sequence: Synthetic oligonucleotide
ccagcccgaguccucagcc

SEQ ID NO: 2008320 - RNA, 19 nt, Artificial Sequence
  Description of Artificial Sequence: Synthetic oligonucleotide
auggccgacugguggcagu

SEQ ID NO: 2008321 - RNA, 19 nt, Artificial Sequence
  Description of Artificial Sequence: Synthetic oligonucleotide
ccuaguguuuccagcuguc

SEQ ID NO: 2008322 - RNA, 19 nt, Artificial Sequence
  Description of Artificial Sequence: Synthetic oligonucleotide
gcggagacuaucugcuuga

SEQ ID NO: 2008323 - RNA, 19 nt, Artificial Sequence
  Description of Artificial Sequence: Synthetic oligonucleotide
cacacgcgcacaggagacc

SEQ ID NO: 2008324 - RNA, 19 nt, Artificial Sequence
  Description of Artificial Sequence: Synthetic oligonucleotide
cgguucaucgagaagggga

SEQ ID NO: 2008325 - RNA, 19 nt, Artificial Sequence
  Description of Artificial Sequence: Synthetic oligonucleotide
uggcaccguguaagagggc

SEQ ID NO: 2008326 - RNA, 19 nt, Artificial Sequence
  Description of Artificial Sequence: Synthetic oligonucleotide
ccagacauccgcagccuuc

SEQ ID NO: 2008327 - RNA, 19 nt, Artificial Sequence
  Description of Artificial Sequence: Synthetic oligonucleotide
uuuuccggcuucgcacaua

SEQ ID NO: 2008328 - RNA, 19 nt, Artificial Sequence
  Description of Artificial Sequence: Synthetic oligonucleotide
guucaucgagaaggggaca

SEQ ID NO: 2008329 - RNA, 19 nt, Artificial Sequence
  Description of Artificial Sequence: Synthetic oligonucleotide
ggacagucaugacgguuca

SEQ ID NO: 2008330 - RNA, 19 nt, Artificial Sequence
  Description of Artificial Sequence: Synthetic oligonucleotide
ccacacgcgcacaggagac

SEQ ID NO: 2008331 - RNA, 19 nt, Artificial Sequence
  Description of Artificial Sequence: Synthetic oligonucleotide
gucguacggccaacaauca

SEQ ID NO: 2008332 - RNA, 19 nt, Artificial Sequence
  Description of Artificial Sequence: Synthetic oligonucleotide
accccuggcgaggagcuaa

SEQ ID NO: 2008333 - RNA, 19 nt, Artificial Sequence
  Description of Artificial Sequence: Synthetic oligonucleotide
cugcuauuucaucuguuuu

SEQ ID NO: 2008334 - RNA, 19 nt, Artificial Sequence
  Description of Artificial Sequence: Synthetic oligonucleotide
cuugucugagagggcguca

SEQ ID NO: 2008335 - RNA, 19 nt, Artificial Sequence
  Description of Artificial Sequence: Synthetic oligonucleotide
cucacaacguuaguaguuu

SEQ ID NO: 2008336 - RNA, 19 nt, Artificial Sequence
  Description of Artificial Sequence: Synthetic oligonucleotide
cguguaagagggccugccc

SEQ ID NO: 2008337 - RNA, 19 nt, Artificial Sequence
  Description of Artificial Sequence: Synthetic oligonucleotide
gcuggacaaccccaacaga

SEQ ID NO: 2008338 - RNA, 19 nt, Artificial Sequence
  Description of Artificial Sequence: Synthetic oligonucleotide
caaggucguacggccaaca

SEQ ID NO: 2008339 - RNA, 19 nt, Artificial Sequence
  Description of Artificial Sequence: Synthetic oligonucleotide
gacaacaaccggacauuau

SEQ ID NO: 2008340 - RNA, 19 nt, Artificial Sequence
  Description of Artificial Sequence: Synthetic oligonucleotide
gcuccgucccaaaucuggc

SEQ ID NO: 2008341 - RNA, 19 nt, Artificial Sequence
  Description of Artificial Sequence: Synthetic oligonucleotide
cggccaacaaucauucaca

SEQ ID NO: 2008342 - RNA, 19 nt, Artificial Sequence
  Description of Artificial Sequence: Synthetic oligonucleotide
accuuuccacacgcgcaca

SEQ ID NO: 2008343 - RNA, 19 nt, Artificial Sequence
  Description of Artificial Sequence: Synthetic oligonucleotide
ccgacugguggcagugggc

SEQ ID NO: 2008344 - RNA, 19 nt, Artificial Sequence
  Description of Artificial Sequence: Synthetic oligonucleotide
ccaguaguguugaggaucu

SEQ ID NO: 2008345 - RNA, 19 nt, Artificial Sequence
  Description of Artificial Sequence: Synthetic oligonucleotide
gccuaagcuggguucucuc

SEQ ID NO: 2008346 - RNA, 19 nt, Artificial Sequence
  Description of Artificial Sequence: Synthetic oligonucleotide
acacaguacgugagguaua

SEQ ID NO: 2008347 - RNA, 19 nt, Artificial Sequence
  Description of Artificial Sequence: Synthetic oligonucleotide
ggccugcccaucaucaaga

SEQ ID NO: 2008348 - RNA, 19 nt, Artificial Sequence
  Description of Artificial Sequence: Synthetic oligonucleotide
ggcaacggcggagacuauc

SEQ ID NO: 2008349 - RNA, 19 nt, Artificial Sequence
  Description of Artificial Sequence: Synthetic oligonucleotide
ccauagggacaauagugcu

SEQ ID NO: 2008350 - RNA, 19 nt, Artificial Sequence
  Description of Artificial Sequence: Synthetic oligonucleotide
ccguguaagagggccugcc

SEQ ID NO: 2008351 - RNA, 19 nt, Artificial Sequence
  Description of Artificial Sequence: Synthetic oligonucleotide
cuccgucccaaaucuggcu

SEQ ID NO: 2008352 - RNA, 19 nt, Artificial Sequence
  Description of Artificial Sequence: Synthetic oligonucleotide
cagcccgaguccucagcca

SEQ ID NO: 2008353 - RNA, 19 nt, Artificial Sequence
  Description of Artificial Sequence: Synthetic oligonucleotide
ccgggcaaaugcccaggcc

SEQ ID NO: 2008354 - RNA, 19 nt, Artificial Sequence
  Description of Artificial Sequence: Synthetic oligonucleotide
gcuugucugagagggcguc

SEQ ID NO: 2008355 - RNA, 19 nt, Artificial Sequence
  Description of Artificial Sequence: Synthetic oligonucleotide
gugagguauacaaggcauu

SEQ ID NO: 2008356 - RNA, 19 nt, Artificial Sequence
  Description of Artificial Sequence: Synthetic oligonucleotide
accggacauuauguauaaa

SEQ ID NO: 2008357 - RNA, 19 nt, Artificial Sequence
  Description of Artificial Sequence: Synthetic oligonucleotide
cccguuuaaaccaccuagu

SEQ ID NO: 2008358 - RNA, 19 nt, Artificial Sequence
  Description of Artificial Sequence: Synthetic oligonucleotide
gccagcccgaguccucagc

SEQ ID NO: 2008359 - RNA, 19 nt, Artificial Sequence
  Description of Artificial Sequence: Synthetic oligonucleotide
cgugagguauacaaggcau

SEQ ID NO: 2008360 - RNA, 19 nt, Artificial Sequence
  Description of Artificial Sequence: Synthetic oligonucleotide
gcaacggcggagacuaucu

SEQ ID NO: 2008361 - RNA, 19 nt, Artificial Sequence
  Description of Artificial Sequence: Synthetic oligonucleotide
ccuggcgaggagcuaaucu

SEQ ID NO: 2008362 - RNA, 19 nt, Artificial Sequence
  Description of Artificial Sequence: Synthetic oligonucleotide
ggagcuaaucugagugugu

SEQ ID NO: 2008363 - RNA, 19 nt, Artificial Sequence
  Description of Artificial Sequence: Synthetic oligonucleotide
ccagcacgauggccgacug

SEQ ID NO: 2008364 - RNA, 19 nt, Artificial Sequence
  Description of Artificial Sequence: Synthetic oligonucleotide
cguacggccaacaaucauu

SEQ ID NO: 2008365 - RNA, 19 nt, Artificial Sequence
  Description of Artificial Sequence: Synthetic oligonucleotide
cguuuaaaccaccuaguuu

SEQ ID NO: 2008366 - RNA, 19 nt, Artificial Sequence
  Description of Artificial Sequence: Synthetic oligonucleotide
ggccgacugguggcagugg

SEQ ID NO: 2008367 - RNA, 19 nt, Artificial Sequence
  Description of Artificial Sequence: Synthetic oligonucleotide
cuuuuccggcuucgcacau

SEQ ID NO: 2008368 - RNA, 19 nt, Artificial Sequence
  Description of Artificial Sequence: Synthetic oligonucleotide
ccaaggucguacggccaac

SEQ ID NO: 2008369 - RNA, 19 nt, Artificial Sequence
  Description of Artificial Sequence: Synthetic oligonucleotide
gacagucaugacgguucau

SEQ ID NO: 2008370 - RNA, 19 nt, Artificial Sequence
  Description of Artificial Sequence: Synthetic oligonucleotide
ccguuuaaaccaccuaguu

SEQ ID NO: 2008371 - RNA, 19 nt, Artificial Sequence
  Description of Artificial Sequence: Synthetic oligonucleotide
ccuucucgaagaagacgua

SEQ ID NO: 2008372 - RNA, 19 nt, Artificial Sequence
  Description of Artificial Sequence: Synthetic oligonucleotide
caccuaguuucagcacugu

SEQ ID NO: 2008373 - RNA, 19 nt, Artificial Sequence
  Description of Artificial Sequence: Synthetic oligonucleotide
cacgcgcacaggagaccua

SEQ ID NO: 2008374 - RNA, 19 nt, Artificial Sequence
  Description of Artificial Sequence: Synthetic oligonucleotide
caccaacagugugccacua

SEQ ID NO: 2008375 - RNA, 19 nt, Artificial Sequence
  Description of Artificial Sequence: Synthetic oligonucleotide
ccagccuaagcuggguucu

SEQ ID NO: 2008376 - RNA, 19 nt, Artificial Sequence
  Description of Artificial Sequence: Synthetic oligonucleotide
ccgcagccuucccugagua

SEQ ID NO: 2008377 - RNA, 19 nt, Artificial Sequence
  Description of Artificial Sequence: Synthetic oligonucleotide
ccgggcagccaugcuuguc

SEQ ID NO: 2008378 - RNA, 19 nt, Artificial Sequence
  Description of Artificial Sequence: Synthetic oligonucleotide
cccagcacgauggccgacu

SEQ ID NO: 2008379 - RNA, 19 nt, Artificial Sequence
  Description of Artificial Sequence: Synthetic oligonucleotide
cccuggcgaggagcuaauc

SEQ ID NO: 2008380 - RNA, 19 nt, Artificial Sequence
  Description of Artificial Sequence: Synthetic oligonucleotide
cgauggccgacugguggca

SEQ ID NO: 2008381 - RNA, 19 nt, Artificial Sequence
  Description of Artificial Sequence: Synthetic oligonucleotide
caccccuggcgaggagcua

SEQ ID NO: 2008382 - RNA, 19 nt, Artificial Sequence
  Description of Artificial Sequence: Synthetic oligonucleotide
cgcgcacaggagaccuagu

SEQ ID NO: 2008383 - RNA, 19 nt, Artificial Sequence
  Description of Artificial Sequence: Synthetic oligonucleotide
gggcaacggcggagacuau

SEQ ID NO: 2008384 - RNA, 19 nt, Artificial Sequence
  Description of Artificial Sequence: Synthetic oligonucleotide
aaauagaagagguccaccc

SEQ ID NO: 2008385 - RNA, 19 nt, Artificial Sequence
  Description of Artificial Sequence: Synthetic oligonucleotide
auguaaauagaagaggucc

SEQ ID NO: 2008386 - RNA, 19 nt, Artificial Sequence
  Description of Artificial Sequence: Synthetic oligonucleotide
aggcauagaaucucaaucc

SEQ ID NO: 2008387 - RNA, 19 nt, Artificial Sequence
  Description of Artificial Sequence: Synthetic oligonucleotide
aauagaagagguccacccg

SEQ ID NO: 2008388 - RNA, 19 nt, Artificial Sequence
  Description of Artificial Sequence: Synthetic oligonucleotide
auuuucacugugcagucgc

SEQ ID NO: 2008389 - RNA, 19 nt, Artificial Sequence
  Description of Artificial Sequence: Synthetic oligonucleotide
ugacuuuccaucccaaggg

SEQ ID NO: 2008390 - RNA, 19 nt, Artificial Sequence
  Description of Artificial Sequence: Synthetic oligonucleotide
uguaaauagaagaggucca

SEQ ID NO: 2008391 - RNA, 19 nt, Artificial Sequence
  Description of Artificial Sequence: Synthetic oligonucleotide
ugcauguaaauagaagagg

SEQ ID NO: 2008392 - RNA, 19 nt, Artificial Sequence
  Description of Artificial Sequence: Synthetic oligonucleotide
uaggcauagaaucucaauc

SEQ ID NO: 2008393 - RNA, 19 nt, Artificial Sequence
  Description of Artificial Sequence: Synthetic oligonucleotide
ucgcaguacaugaaggccg

SEQ ID NO: 2008394 - RNA, 19 nt, Artificial Sequence
  Description of Artificial Sequence: Synthetic oligonucleotide
uccaugaaggcacguaccg

SEQ ID NO: 2008395 - RNA, 19 nt, Artificial Sequence
  Description of Artificial Sequence: Synthetic oligonucleotide
gaugcucucggacuggccg

SEQ ID NO: 2008396 - RNA, 19 nt, Artificial Sequence
  Description of Artificial Sequence: Synthetic oligonucleotide
ucuaccagggcaauggccu

SEQ ID NO: 2008397 - RNA, 19 nt, Artificial Sequence
  Description of Artificial Sequence: Synthetic oligonucleotide
aaucucaauccaaaguguc

SEQ ID NO: 2008398 - RNA, 19 nt, Artificial Sequence
  Description of Artificial Sequence: Synthetic oligonucleotide
aggacagucuaucugaagu

SEQ ID NO: 2008399 - RNA, 19 nt, Artificial Sequence
  Description of Artificial Sequence: Synthetic oligonucleotide
uccgccaccucccaggagg

SEQ ID NO: 2008400 - RNA, 19 nt, Artificial Sequence
  Description of Artificial Sequence: Synthetic oligonucleotide
cuuuagugacuuuccaucc

SEQ ID NO: 2008401 - RNA, 19 nt, Artificial Sequence
  Description of Artificial Sequence: Synthetic oligonucleotide
ugaguggugguacauccag

SEQ ID NO: 2008402 - RNA, 19 nt, Artificial Sequence
  Description of Artificial Sequence: Synthetic oligonucleotide
uccaaagugucugaggcag

SEQ ID NO: 2008403 - RNA, 19 nt, Artificial Sequence
  Description of Artificial Sequence: Synthetic oligonucleotide
uacacgguuggcaggaucc

SEQ ID NO: 2008404 - RNA, 19 nt, Artificial Sequence
  Description of Artificial Sequence: Synthetic oligonucleotide
uuuagugacuuuccauccc

SEQ ID NO: 2008405 - RNA, 19 nt, Artificial Sequence
  Description of Artificial Sequence: Synthetic oligonucleotide
acaacagcuggcuccaggg

SEQ ID NO: 2008406 - RNA, 19 nt, Artificial Sequence
  Description of Artificial Sequence: Synthetic oligonucleotide
uuagugacuuuccauccca

SEQ ID NO: 2008407 - RNA, 19 nt, Artificial Sequence
  Description of Artificial Sequence: Synthetic oligonucleotide
uggugguacauccagcgca

SEQ ID NO: 2008408 - RNA, 19 nt, Artificial Sequence
  Description of Artificial Sequence: Synthetic oligonucleotide
uucagugacgucuccagcu

SEQ ID NO: 2008409 - RNA, 19 nt, Artificial Sequence
  Description of Artificial Sequence: Synthetic oligonucleotide
uccuguaggucucagccca

SEQ ID NO: 2008410 - RNA, 19 nt, Artificial Sequence
  Description of Artificial Sequence: Synthetic oligonucleotide
auacguggucugcagggcc

SEQ ID NO: 2008411 - RNA, 19 nt, Artificial Sequence
  Description of Artificial Sequence: Synthetic oligonucleotide
ucaggugcauguaaauaga

SEQ ID NO: 2008412 - RNA, 19 nt, Artificial Sequence
  Description of Artificial Sequence: Synthetic oligonucleotide
gaagcgucucuucuauagg

SEQ ID NO: 2008413 - RNA, 19 nt, Artificial Sequence
  Description of Artificial Sequence: Synthetic oligonucleotide
ucugaaguaguugggacac

SEQ ID NO: 2008414 - RNA, 19 nt, Artificial Sequence
  Description of Artificial Sequence: Synthetic oligonucleotide
uucuauaggggugcugugg

SEQ ID NO: 2008415 - RNA, 19 nt, Artificial Sequence
  Description of Artificial Sequence: Synthetic oligonucleotide
ucuauaggggugcuguggu

SEQ ID NO: 2008416 - RNA, 19 nt, Artificial Sequence
  Description of Artificial Sequence: Synthetic oligonucleotide
uccaggcuugguuaaaggc

SEQ ID NO: 2008417 - RNA, 19 nt, Artificial Sequence
  Description of Artificial Sequence: Synthetic oligonucleotide
aagcgguuccuguaggucu

SEQ ID NO: 2008418 - RNA, 19 nt, Artificial Sequence
  Description of Artificial Sequence: Synthetic oligonucleotide
caauccaaagugucugagg

SEQ ID NO: 2008419 - RNA, 19 nt, Artificial Sequence
  Description of Artificial Sequence: Synthetic oligonucleotide
cucaugggcaaccagguuc

SEQ ID NO: 2008420 - RNA, 19 nt, Artificial Sequence
  Description of Artificial Sequence: Synthetic oligonucleotide
uacaugcccugguacacgg

SEQ ID NO: 2008421 - RNA, 19 nt, Artificial Sequence
  Description of Artificial Sequence: Synthetic oligonucleotide
cauguaaauagaagagguc

SEQ ID NO: 2008422 - RNA, 19 nt, Artificial Sequence
  Description of Artificial Sequence: Synthetic oligonucleotide
cuacggaaggcccggagcg

SEQ ID NO: 2008423 - RNA, 19 nt, Artificial Sequence
  Description of Artificial Sequence: Synthetic oligonucleotide
uggcaauuuucacugugca

SEQ ID NO: 2008424 - RNA, 19 nt, Artificial Sequence
  Description of Artificial Sequence: Synthetic oligonucleotide
gacagucuaucugaaguag

SEQ ID NO: 2008425 - RNA, 19 nt, Artificial Sequence
  Description of Artificial Sequence: Synthetic oligonucleotide
caugaaggcacguaccguc

SEQ ID NO: 2008426 - RNA, 19 nt, Artificial Sequence
  Description of Artificial Sequence: Synthetic oligonucleotide
gaugacugcguccccucgg

SEQ ID NO: 2008427 - RNA, 19 nt, Artificial Sequence
  Description of Artificial Sequence: Synthetic oligonucleotide
cauagaaucucaauccaaa

SEQ ID NO: 2008428 - RNA, 19 nt, Artificial Sequence
  Description of Artificial Sequence: Synthetic oligonucleotide
uuguaggcauagaaucuca

SEQ ID NO: 2008429 - RNA, 19 nt, Artificial Sequence
  Description of Artificial Sequence: Synthetic oligonucleotide
caaagaagcggcccacagg

SEQ ID NO: 2008430 - RNA, 19 nt, Artificial Sequence
  Description of Artificial Sequence: Synthetic oligonucleotide
acacucaugggcaaccagg

SEQ ID NO: 2008431 - RNA, 19 nt, Artificial Sequence
  Description of Artificial Sequence: Synthetic oligonucleotide
uucacugugcagucgccgc

SEQ ID NO: 2008432 - RNA, 19 nt, Artificial Sequence
  Description of Artificial Sequence: Synthetic oligonucleotide
ucaggcuuuagugacuuuc

SEQ ID NO: 2008433 - RNA, 19 nt, Artificial Sequence
  Description of Artificial Sequence: Synthetic oligonucleotide
caggcuuuagugacuuucc

SEQ ID NO: 2008434 - RNA, 19 nt, Artificial Sequence
  Description of Artificial Sequence: Synthetic oligonucleotide
caaagugucugaggcaggg

SEQ ID NO: 2008435 - RNA, 19 nt, Artificial Sequence
  Description of Artificial Sequence: Synthetic oligonucleotide
gaggacgcgcuacggaagg

SEQ ID NO: 2008436 - RNA, 19 nt, Artificial Sequence
  Description of Artificial Sequence: Synthetic oligonucleotide
gaaggcacguaccgucgcg

SEQ ID NO: 2008437 - RNA, 19 nt, Artificial Sequence
  Description of Artificial Sequence: Synthetic oligonucleotide
agcuauucccaaagaagcg

SEQ ID NO: 2008438 - RNA, 19 nt, Artificial Sequence
  Description of Artificial Sequence: Synthetic oligonucleotide
uaguuggacaggccaagcu

SEQ ID NO: 2008439 - RNA, 19 nt, Artificial Sequence
  Description of Artificial Sequence: Synthetic oligonucleotide
caggccaagcuccacaaac

SEQ ID NO: 2008440 - RNA, 19 nt, Artificial Sequence
  Description of Artificial Sequence: Synthetic oligonucleotide
gcuuuagugacuuuccauc

SEQ ID NO: 2008441 - RNA, 19 nt, Artificial Sequence
  Description of Artificial Sequence: Synthetic oligonucleotide
ugaaguaguugggacacuc

SEQ ID NO: 2008442 - RNA, 19 nt, Artificial Sequence
  Description of Artificial Sequence: Synthetic oligonucleotide
uuuucacugugcagucgcc

SEQ ID NO: 2008443 - RNA, 19 nt, Artificial Sequence
  Description of Artificial Sequence: Synthetic oligonucleotide
guaaauagaagagguccac

SEQ ID NO: 2008444 - RNA, 19 nt, Artificial Sequence
  Description of Artificial Sequence: Synthetic oligonucleotide
uguaggcauagaaucucaa

SEQ ID NO: 2008445 - RNA, 19 nt, Artificial Sequence
  Description of Artificial Sequence: Synthetic oligonucleotide
aaggcccggagcgacgcgc

SEQ ID NO: 2008446 - RNA, 19 nt, Artificial Sequence
  Description of Artificial Sequence: Synthetic oligonucleotide
gcuauucccaaagaagcgg

SEQ ID NO: 2008447 - RNA, 19 nt, Artificial Sequence
  Description of Artificial Sequence: Synthetic oligonucleotide
cucgaagugguguuccuuc

SEQ ID NO: 2008448 - RNA, 19 nt, Artificial Sequence
  Description of Artificial Sequence: Synthetic oligonucleotide
caaacuugcccuccugaug

SEQ ID NO: 2008449 - RNA, 19 nt, Artificial Sequence
  Description of Artificial Sequence: Synthetic oligonucleotide
aaggcacguaccgucgcgg

SEQ ID NO: 2008450 - RNA, 19 nt, Artificial Sequence
  Description of Artificial Sequence: Synthetic oligonucleotide
uguacaugcccugguacac

SEQ ID NO: 2008451 - RNA, 19 nt, Artificial Sequence
  Description of Artificial Sequence: Synthetic oligonucleotide
aagugguguuccuuccaga

SEQ ID NO: 2008452 - RNA, 19 nt, Artificial Sequence
  Description of Artificial Sequence: Synthetic oligonucleotide
uccagcugggaccggacac

SEQ ID NO: 2008453 - RNA, 19 nt, Artificial Sequence
  Description of Artificial Sequence: Synthetic oligonucleotide
caugcggcgccccaucucc

SEQ ID NO: 2008454 - RNA, 19 nt, Artificial Sequence
  Description of Artificial Sequence: Synthetic oligonucleotide
ucgaagugguguuccuucc

SEQ ID NO: 2008455 - RNA, 19 nt, Artificial Sequence
  Description of Artificial Sequence: Synthetic oligonucleotide
agucuaucugaaguaguug

SEQ ID NO: 2008456 - RNA, 19 nt, Artificial Sequence
  Description of Artificial Sequence: Synthetic oligonucleotide
gacacucaugggcaaccag

SEQ ID NO: 2008457 - RNA, 19 nt, Artificial Sequence
  Description of Artificial Sequence: Synthetic oligonucleotide
ugaaggcacguaccgucgc

SEQ ID NO: 2008458 - RNA, 19 nt, Artificial Sequence
  Description of Artificial Sequence: Synthetic oligonucleotide
ugugcagucgccgcugccc

SEQ ID NO: 2008459 - RNA, 19 nt, Artificial Sequence
  Description of Artificial Sequence: Synthetic oligonucleotide
agaggggcgcccgaggugg

SEQ ID NO: 2008460 - RNA, 19 nt, Artificial Sequence
  Description of Artificial Sequence: Synthetic oligonucleotide
aaggccguguccaguucgc

SEQ ID NO: 2008461 - RNA, 19 nt, Artificial Sequence
  Description of Artificial Sequence: Synthetic oligonucleotide
guuguaggcauagaaucuc

SEQ ID NO: 2008462 - RNA, 19 nt, Artificial Sequence
  Description of Artificial Sequence: Synthetic oligonucleotide
uaguugggacacucauggg

SEQ ID NO: 2008463 - RNA, 19 nt, Artificial Sequence
  Description of Artificial Sequence: Synthetic oligonucleotide
gucgcaguacaugaaggcc

SEQ ID NO: 2008464 - RNA, 19 nt, Artificial Sequence
  Description of Artificial Sequence: Synthetic oligonucleotide
uggccgucgcaguacauga

SEQ ID NO: 2008465 - RNA, 19 nt, Artificial Sequence
  Description of Artificial Sequence: Synthetic oligonucleotide
gaggccgggacauggcgag

SEQ ID NO: 2008466 - RNA, 19 nt, Artificial Sequence
  Description of Artificial Sequence: Synthetic oligonucleotide
cuggcgcucgcauccaugc

SEQ ID NO: 2008467 - RNA, 19 nt, Artificial Sequence
  Description of Artificial Sequence: Synthetic oligonucleotide
cacaacagcuggcuccagg

SEQ ID NO: 2008468 - RNA, 19 nt, Artificial Sequence
  Description of Artificial Sequence: Synthetic oligonucleotide
acgguuggcaggauccagc

SEQ ID NO: 2008469 - RNA, 19 nt, Artificial Sequence
  Description of Artificial Sequence: Synthetic oligonucleotide
aggaugacugcguccccuc

SEQ ID NO: 2008470 - RNA, 19 nt, Artificial Sequence
  Description of Artificial Sequence: Synthetic oligonucleotide
acugugcagucgccgcugc

SEQ ID NO: 2008471 - RNA, 19 nt, Artificial Sequence
  Description of Artificial Sequence: Synthetic oligonucleotide
ugguggcaggcacgaagcg

SEQ ID NO: 2008472 - RNA, 19 nt, Artificial Sequence
  Description of Artificial Sequence: Synthetic oligonucleotide
gaugcagcugguggcaggc

SEQ ID NO: 2008473 - RNA, 19 nt, Artificial Sequence
  Description of Artificial Sequence: Synthetic oligonucleotide
ggcaauuuucacugugcag

SEQ ID NO: 2008474 - RNA, 19 nt, Artificial Sequence
  Description of Artificial Sequence: Synthetic oligonucleotide
ugccauacguggucugcag

SEQ ID NO: 2008475 - RNA, 19 nt, Artificial Sequence
  Description of Artificial Sequence: Synthetic oligonucleotide
aggcacguaccgucgcggc

SEQ ID NO: 2008476 - RNA, 19 nt, Artificial Sequence
  Description of Artificial Sequence: Synthetic oligonucleotide
gagaggacgcgcuacggaa

SEQ ID NO: 2008477 - RNA, 19 nt, Artificial Sequence
  Description of Artificial Sequence: Synthetic oligonucleotide
cucgcauccaugcggcgcc

SEQ ID NO: 2008478 - RNA, 19 nt, Artificial Sequence
  Description of Artificial Sequence: Synthetic oligonucleotide
gguggcguuguacaugccc

SEQ ID NO: 2008479 - RNA, 19 nt, Artificial Sequence
  Description of Artificial Sequence: Synthetic oligonucleotide
ggcauaguuggacaggcca

SEQ ID NO: 2008480 - RNA, 19 nt, Artificial Sequence
  Description of Artificial Sequence: Synthetic oligonucleotide
ugacgucuccagcugggac

SEQ ID NO: 2008481 - RNA, 19 nt, Artificial Sequence
  Description of Artificial Sequence: Synthetic oligonucleotide
auuugccugucagcaggcc

SEQ ID NO: 2008482 - RNA, 19 nt, Artificial Sequence
  Description of Artificial Sequence: Synthetic oligonucleotide
cauauuuguauuugccugu

SEQ ID NO: 2008483 - RNA, 19 nt, Artificial Sequence
  Description of Artificial Sequence: Synthetic oligonucleotide
uacguggucugcagggccu

SEQ ID NO: 2008484 - RNA, 19 nt, Artificial Sequence
  Description of Artificial Sequence: Synthetic oligonucleotide
guacauccagcgcagggca

SEQ ID NO: 2008485 - RNA, 19 nt, Artificial Sequence
  Description of Artificial Sequence: Synthetic oligonucleotide
augaaggcacguaccgucg

SEQ ID NO: 2008486 - RNA, 19 nt, Artificial Sequence
  Description of Artificial Sequence: Synthetic oligonucleotide
cagaccuccgccaccuccc

SEQ ID NO: 2008487 - RNA, 19 nt, Artificial Sequence
  Description of Artificial Sequence: Synthetic oligonucleotide
aucucaauccaaagugucu

SEQ ID NO: 2008488 - RNA, 19 nt, Artificial Sequence
  Description of Artificial Sequence: Synthetic oligonucleotide
agugacgucuccagcuggg

SEQ ID NO: 2008489 - RNA, 19 nt, Artificial Sequence
  Description of Artificial Sequence: Synthetic oligonucleotide
cagaagcgguuccuguagg

SEQ ID NO: 2008490 - RNA, 19 nt, Artificial Sequence
  Description of Artificial Sequence: Synthetic oligonucleotide
accguggcgggccggagag

SEQ ID NO: 2008491 - RNA, 19 nt, Artificial Sequence
  Description of Artificial Sequence: Synthetic oligonucleotide
aggaugcucucggacuggc

SEQ ID NO: 2008492 - RNA, 19 nt, Artificial Sequence
  Description of Artificial Sequence: Synthetic oligonucleotide
gaaucucaauccaaagugu

SEQ ID NO: 2008493 - RNA, 19 nt, Artificial Sequence
  Description of Artificial Sequence: Synthetic oligonucleotide
ggcgcucgcauccaugcgg

SEQ ID NO: 2008494 - RNA, 19 nt, Artificial Sequence
  Description of Artificial Sequence: Synthetic oligonucleotide
aggcuuuagugacuuucca

SEQ ID NO: 2008495 - RNA, 19 nt, Artificial Sequence
  Description of Artificial Sequence: Synthetic oligonucleotide
uuggacaggccaagcucca

SEQ ID NO: 2008496 - RNA, 19 nt, Artificial Sequence
  Description of Artificial Sequence: Synthetic oligonucleotide
acgucuccagcugggaccg

SEQ ID NO: 2008497 - RNA, 19 nt, Artificial Sequence
  Description of Artificial Sequence: Synthetic oligonucleotide
gguacauccagcgcagggc

SEQ ID NO: 2008498 - RNA, 19 nt, Artificial Sequence
  Description of Artificial Sequence: Synthetic oligonucleotide
cuucuauaggggugcugug

SEQ ID NO: 2008499 - RNA, 19 nt, Artificial Sequence
  Description of Artificial Sequence: Synthetic oligonucleotide
uguugcucuugcagagggu

SEQ ID NO: 2008500 - RNA, 19 nt, Artificial Sequence
  Description of Artificial Sequence: Synthetic oligonucleotide
guacaugcccugguacacg

SEQ ID NO: 2008501 - RNA, 19 nt, Artificial Sequence
  Description of Artificial Sequence: Synthetic oligonucleotide
ggcauagaaucucaaucca

SEQ ID NO: 2008502 - RNA, 19 nt, Artificial Sequence
  Description of Artificial Sequence: Synthetic oligonucleotide
ggaccggacacugucaggc

SEQ ID NO: 2008503 - RNA, 19 nt, Artificial Sequence
  Description of Artificial Sequence: Synthetic oligonucleotide
cacccggggacacugcagc

SEQ ID NO: 2008504 - RNA, 19 nt, Artificial Sequence
  Description of Artificial Sequence: Synthetic oligonucleotide
agccaaaggguuguaggca

SEQ ID NO: 2008505 - RNA, 19 nt, Artificial Sequence
  Description of Artificial Sequence: Synthetic oligonucleotide
guguccaguucgcuguggc

SEQ ID NO: 2008506 - RNA, 19 nt, Artificial Sequence
  Description of Artificial Sequence: Synthetic oligonucleotide
gggacauggcgagaggacg

SEQ ID NO: 2008507 - RNA, 19 nt, Artificial Sequence
  Description of Artificial Sequence: Synthetic oligonucleotide
gcagccgaggucaugcugg

SEQ ID NO: 2008508 - RNA, 19 nt, Artificial Sequence
  Description of Artificial Sequence: Synthetic oligonucleotide
cauacguggucugcagggc

SEQ ID NO: 2008509 - RNA, 19 nt, Artificial Sequence
  Description of Artificial Sequence: Synthetic oligonucleotide
uagugacuuuccaucccaa

SEQ ID NO: 2008510 - RNA, 19 nt, Artificial Sequence
  Description of Artificial Sequence: Synthetic oligonucleotide
cagugacgucuccagcugg

SEQ ID NO: 2008511 - RNA, 19 nt, Artificial Sequence
  Description of Artificial Sequence: Synthetic oligonucleotide
gaagcgguuccuguagguc

SEQ ID NO: 2008512 - RNA, 19 nt, Artificial Sequence
  Description of Artificial Sequence: Synthetic oligonucleotide
augacugcguccccucggu

SEQ ID NO: 2008513 - RNA, 19 nt, Artificial Sequence
  Description of Artificial Sequence: Synthetic oligonucleotide
aaaggguuguaggcauaga

SEQ ID NO: 2008514 - RNA, 19 nt, Artificial Sequence
  Description of Artificial Sequence: Synthetic oligonucleotide
aggcacgaagcgucucuuc

SEQ ID NO: 2008515 - RNA, 19 nt, Artificial Sequence
  Description of Artificial Sequence: Synthetic oligonucleotide
uccaucccaaggguuggcc

SEQ ID NO: 2008516 - RNA, 19 nt, Artificial Sequence
  Description of Artificial Sequence: Synthetic oligonucleotide
ugcagccgcuucagugacg

SEQ ID NO: 2008517 - RNA, 19 nt, Artificial Sequence
  Description of Artificial Sequence: Synthetic oligonucleotide
cagaggguacagaccuccg

SEQ ID NO: 2008518 - RNA, 19 nt, Artificial Sequence
  Description of Artificial Sequence: Synthetic oligonucleotide
aggguuguaggcauagaau

SEQ ID NO: 2008519 - RNA, 19 nt, Artificial Sequence
  Description of Artificial Sequence: Synthetic oligonucleotide
gguuaaaggcauccacaac

SEQ ID NO: 2008520 - RNA, 19 nt, Artificial Sequence
  Description of Artificial Sequence: Synthetic oligonucleotide
uggcgcucgcauccaugcg

SEQ ID NO: 2008521 - RNA, 19 nt, Artificial Sequence
  Description of Artificial Sequence: Synthetic oligonucleotide
auccaugcggcgccccauc

SEQ ID NO: 2008522 - RNA, 19 nt, Artificial Sequence
  Description of Artificial Sequence: Synthetic oligonucleotide
ugucaggcuuuagugacuu

SEQ ID NO: 2008523 - RNA, 19 nt, Artificial Sequence
  Description of Artificial Sequence: Synthetic oligonucleotide
aaccguggcgggccggaga

SEQ ID NO: 2008524 - RNA, 19 nt, Artificial Sequence
  Description of Artificial Sequence: Synthetic oligonucleotide
gcauguaaauagaagaggu

SEQ ID NO: 2008525 - RNA, 19 nt, Artificial Sequence
  Description of Artificial Sequence: Synthetic oligonucleotide
gaguggugguacauccagc

SEQ ID NO: 2008526 - RNA, 19 nt, Artificial Sequence
  Description of Artificial Sequence: Synthetic oligonucleotide
uugcccuggagcugugagu

SEQ ID NO: 2008527 - RNA, 19 nt, Artificial Sequence
  Description of Artificial Sequence: Synthetic oligonucleotide
aggcauaguuggacaggcc

SEQ ID NO: 2008528 - RNA, 19 nt, Artificial Sequence
  Description of Artificial Sequence: Synthetic oligonucleotide
guggcaggcacgaagcguc

SEQ ID NO: 2008529 - RNA, 19 nt, Artificial Sequence
  Description of Artificial Sequence: Synthetic oligonucleotide
gacgcgcuacggaaggccc

SEQ ID NO: 2008530 - RNA, 19 nt, Artificial Sequence
  Description of Artificial Sequence: Synthetic oligonucleotide
gcuacggaaggcccggagc

SEQ ID NO: 2008531 - RNA, 19 nt, Artificial Sequence
  Description of Artificial Sequence: Synthetic oligonucleotide
gguguuccuuccagaagcg

SEQ ID NO: 2008532 - RNA, 19 nt, Artificial Sequence
  Description of Artificial Sequence: Synthetic oligonucleotide
cuauaggggugcugugguc

SEQ ID NO: 2008533 - RNA, 19 nt, Artificial Sequence
  Description of Artificial Sequence: Synthetic oligonucleotide
ggugguacauccagcgcag

SEQ ID NO: 2008534 - RNA, 19 nt, Artificial Sequence
  Description of Artificial Sequence: Synthetic oligonucleotide
ugaaggccguguccaguuc

SEQ ID NO: 2008535 - RNA, 19 nt, Artificial Sequence
  Description of Artificial Sequence: Synthetic oligonucleotide
agaggacgcgcuacggaag

SEQ ID NO: 2008536 - RNA, 19 nt, Artificial Sequence
  Description of Artificial Sequence: Synthetic oligonucleotide
ccaggcuugguuaaaggca

SEQ ID NO: 2008537 - RNA, 19 nt, Artificial Sequence
  Description of Artificial Sequence: Synthetic oligonucleotide
gccgucgcaguacaugaag

SEQ ID NO: 2008538 - RNA, 19 nt, Artificial Sequence
  Description of Artificial Sequence: Synthetic oligonucleotide
agcgguuccuguaggucuc

SEQ ID NO: 2008539 - RNA, 19 nt, Artificial Sequence
  Description of Artificial Sequence: Synthetic oligonucleotide
ggcgcuggcgcucgcaucc

SEQ ID NO: 2008540 - RNA, 19 nt, Artificial Sequence
  Description of Artificial Sequence: Synthetic oligonucleotide
gacgcgcggagcgagcagc

SEQ ID NO: 2008541 - RNA, 19 nt, Artificial Sequence
  Description of Artificial Sequence: Synthetic oligonucleotide
gagaggggcgcccgaggug

SEQ ID NO: 2008542 - RNA, 19 nt, Artificial Sequence
  Description of Artificial Sequence: Synthetic oligonucleotide
uggugcccagaaccguggc

SEQ ID NO: 2008543 - RNA, 19 nt, Artificial Sequence
  Description of Artificial Sequence: Synthetic oligonucleotide
ggagcgagcagcagcgcgg

SEQ ID NO: 2008544 - RNA, 19 nt, Artificial Sequence
  Description of Artificial Sequence: Synthetic oligonucleotide
gguacagaccuccgccacc

SEQ ID NO: 2008545 - RNA, 19 nt, Artificial Sequence
  Description of Artificial Sequence: Synthetic oligonucleotide
uccaugcggcgccccaucu

SEQ ID NO: 2008546 - RNA, 19 nt, Artificial Sequence
  Description of Artificial Sequence: Synthetic oligonucleotide
caggugcauguaaauagaa

SEQ ID NO: 2008547 - RNA, 19 nt, Artificial Sequence
  Description of Artificial Sequence: Synthetic oligonucleotide
ccgucgcaguacaugaagg

SEQ ID NO: 2008548 - RNA, 19 nt, Artificial Sequence
  Description of Artificial Sequence: Synthetic oligonucleotide
guaggcauagaaucucaau

SEQ ID NO: 2008549 - RNA, 19 nt, Artificial Sequence
  Description of Artificial Sequence: Synthetic oligonucleotide
gucgccgcugcccagccca

SEQ ID NO: 2008550 - RNA, 19 nt, Artificial Sequence
  Description of Artificial Sequence: Synthetic oligonucleotide
ggcgagaggacgcgcuacg

SEQ ID NO: 2008551 - RNA, 19 nt, Artificial Sequence
  Description of Artificial Sequence: Synthetic oligonucleotide
ccaaagaagcggcccacag

SEQ ID NO: 2008552 - RNA, 19 nt, Artificial Sequence
  Description of Artificial Sequence: Synthetic oligonucleotide
gaaggcccggagcgacgcg

SEQ ID NO: 2008553 - RNA, 19 nt, Artificial Sequence
  Description of Artificial Sequence: Synthetic oligonucleotide
ggaugacugcguccccucg

SEQ ID NO: 2008554 - RNA, 19 nt, Artificial Sequence
  Description of Artificial Sequence: Synthetic oligonucleotide
guacacgguuggcaggauc

SEQ ID NO: 2008555 - RNA, 19 nt, Artificial Sequence
  Description of Artificial Sequence: Synthetic oligonucleotide
cuggccgucgcaguacaug

SEQ ID NO: 2008556 - RNA, 19 nt, Artificial Sequence
  Description of Artificial Sequence: Synthetic oligonucleotide
aggacgcgcuacggaaggc

SEQ ID NO: 2008557 - RNA, 19 nt, Artificial Sequence
  Description of Artificial Sequence: Synthetic oligonucleotide
augggcaaccagguuccag

SEQ ID NO: 2008558 - RNA, 19 nt, Artificial Sequence
  Description of Artificial Sequence: Synthetic oligonucleotide
ugcagaggguacagaccuc

SEQ ID NO: 2008559 - RNA, 19 nt, Artificial Sequence
  Description of Artificial Sequence: Synthetic oligonucleotide
ucccaaagaagcggcccac

SEQ ID NO: 2008560 - RNA, 19 nt, Artificial Sequence
  Description of Artificial Sequence: Synthetic oligonucleotide
cucggacuggccgucgcag

SEQ ID NO: 2008561 - RNA, 19 nt, Artificial Sequence
  Description of Artificial Sequence: Synthetic oligonucleotide
aggggcccuuccucagugg

SEQ ID NO: 2008562 - RNA, 19 nt, Artificial Sequence
  Description of Artificial Sequence: Synthetic oligonucleotide
agucgccgcugcccagccc

SEQ ID NO: 2008563 - RNA, 19 nt, Artificial Sequence
  Description of Artificial Sequence: Synthetic oligonucleotide
uggcgggccggagaggggc

SEQ ID NO: 2008564 - RNA, 19 nt, Artificial Sequence
  Description of Artificial Sequence: Synthetic oligonucleotide
ggcacguaccgucgcggcg

SEQ ID NO: 2008565 - RNA, 19 nt, Artificial Sequence
  Description of Artificial Sequence: Synthetic oligonucleotide
ggacagucuaucugaagua

SEQ ID NO: 2008566 - RNA, 19 nt, Artificial Sequence
  Description of Artificial Sequence: Synthetic oligonucleotide
cgucgcaguacaugaaggc

SEQ ID NO: 2008567 - RNA, 19 nt, Artificial Sequence
  Description of Artificial Sequence: Synthetic oligonucleotide
ccaaggguuggccuuggug

SEQ ID NO: 2008568 - RNA, 19 nt, Artificial Sequence
  Description of Artificial Sequence: Synthetic oligonucleotide
cuguaggucucagcccagc

SEQ ID NO: 2008569 - RNA, 19 nt, Artificial Sequence
  Description of Artificial Sequence: Synthetic oligonucleotide
ucggacuggccgucgcagu

SEQ ID NO: 2008570 - RNA, 19 nt, Artificial Sequence
  Description of Artificial Sequence: Synthetic oligonucleotide
ugggacacucaugggcaac

SEQ ID NO: 2008571 - RNA, 19 nt, Artificial Sequence
  Description of Artificial Sequence: Synthetic oligonucleotide
gacuggccgucgcaguaca

SEQ ID NO: 2008572 - RNA, 19 nt, Artificial Sequence
  Description of Artificial Sequence: Synthetic oligonucleotide
uguggccgcgcuccaugaa

SEQ ID NO: 2008573 - RNA, 19 nt, Artificial Sequence
  Description of Artificial Sequence: Synthetic oligonucleotide
aucccaaggguuggccuug

SEQ ID NO: 2008574 - RNA, 19 nt, Artificial Sequence
  Description of Artificial Sequence: Synthetic oligonucleotide
cugugaguggugguacauc

SEQ ID NO: 2008575 - RNA, 19 nt, Artificial Sequence
  Description of Artificial Sequence: Synthetic oligonucleotide
ugcagucgccgcugcccag

SEQ ID NO: 2008576 - RNA, 19 nt, Artificial Sequence
  Description of Artificial Sequence: Synthetic oligonucleotide
ucucuucuauaggggugcu

SEQ ID NO: 2008577 - RNA, 19 nt, Artificial Sequence
  Description of Artificial Sequence: Synthetic oligonucleotide
uggcaggcacgaagcgucu

SEQ ID NO: 2008578 - RNA, 19 nt, Artificial Sequence
  Description of Artificial Sequence: Synthetic oligonucleotide
caggcuugguuaaaggcau

SEQ ID NO: 2008579 - RNA, 19 nt, Artificial Sequence
  Description of Artificial Sequence: Synthetic oligonucleotide
gcgcugcugccauacgugg

SEQ ID NO: 2008580 - RNA, 19 nt, Artificial Sequence
  Description of Artificial Sequence: Synthetic oligonucleotide
cacucaugggcaaccaggu

SEQ ID NO: 2008581 - RNA, 19 nt, Artificial Sequence
  Description of Artificial Sequence: Synthetic oligonucleotide
uacggaaggcccggagcga

SEQ ID NO: 2008582 - RNA, 19 nt, Artificial Sequence
  Description of Artificial Sequence: Synthetic oligonucleotide
uggacaugcccaggaugac

SEQ ID NO: 2008583 - RNA, 19 nt, Artificial Sequence
  Description of Artificial Sequence: Synthetic oligonucleotide
ccaaagugucugaggcagg

SEQ ID NO: 2008584 - RNA, 19 nt, Artificial Sequence
  Description of Artificial Sequence: Synthetic oligonucleotide
cagucuaucugaaguaguu

SEQ ID NO: 2008585 - RNA, 19 nt, Artificial Sequence
  Description of Artificial Sequence: Synthetic oligonucleotide
guggucaggugcauguaaa

SEQ ID NO: 2008586 - RNA, 19 nt, Artificial Sequence
  Description of Artificial Sequence: Synthetic oligonucleotide
guccccucgguugcccugg

SEQ ID NO: 2008587 - RNA, 19 nt, Artificial Sequence
  Description of Artificial Sequence: Synthetic oligonucleotide
uggcgagaggacgcgcuac

SEQ ID NO: 2008588 - RNA, 19 nt, Artificial Sequence
  Description of Artificial Sequence: Synthetic oligonucleotide
cucuucuauaggggugcug

SEQ ID NO: 2008589 - RNA, 19 nt, Artificial Sequence
  Description of Artificial Sequence: Synthetic oligonucleotide
ccuugguggcaauuuucac

SEQ ID NO: 2008590 - RNA, 19 nt, Artificial Sequence
  Description of Artificial Sequence: Synthetic oligonucleotide
acaggccaagcuccacaaa

SEQ ID NO: 2008591 - RNA, 19 nt, Artificial Sequence
  Description of Artificial Sequence: Synthetic oligonucleotide
ccgcgcuccaugaaggcac

SEQ ID NO: 2008592 - RNA, 19 nt, Artificial Sequence
  Description of Artificial Sequence: Synthetic oligonucleotide
ggguacagaccuccgccac

SEQ ID NO: 2008593 - RNA, 19 nt, Artificial Sequence
  Description of Artificial Sequence: Synthetic oligonucleotide
gugguacauccagcgcagg

SEQ ID NO: 2008594 - RNA, 19 nt, Artificial Sequence
  Description of Artificial Sequence: Synthetic oligonucleotide
cggaccacggcucgggacg

SEQ ID NO: 2008595 - RNA, 19 nt, Artificial Sequence
  Description of Artificial Sequence: Synthetic oligonucleotide
uaccgucgcggcgcuggcg

SEQ ID NO: 2008596 - RNA, 19 nt, Artificial Sequence
  Description of Artificial Sequence: Synthetic oligonucleotide
gcuguggccgcgcuccaug

SEQ ID NO: 2008597 - RNA, 19 nt, Artificial Sequence
  Description of Artificial Sequence: Synthetic oligonucleotide
gcacguaccgucgcggcgc

SEQ ID NO: 2008598 - RNA, 19 nt, Artificial Sequence
  Description of Artificial Sequence: Synthetic oligonucleotide
guggcguuguacaugcccu

SEQ ID NO: 2008599 - RNA, 19 nt, Artificial Sequence
  Description of Artificial Sequence: Synthetic oligonucleotide
ggacgcgcuacggaaggcc

SEQ ID NO: 2008600 - RNA, 19 nt, Artificial Sequence
  Description of Artificial Sequence: Synthetic oligonucleotide
acgcgcuacggaaggcccg

SEQ ID NO: 2008601 - RNA, 19 nt, Artificial Sequence
  Description of Artificial Sequence: Synthetic oligonucleotide
auggcgagaggacgcgcua

SEQ ID NO: 2008602 - RNA, 19 nt, Artificial Sequence
  Description of Artificial Sequence: Synthetic oligonucleotide
gugcagucgccgcugccca

SEQ ID NO: 2008603 - RNA, 19 nt, Artificial Sequence
  Description of Artificial Sequence: Synthetic oligonucleotide
uggcaggauccagcuguug

SEQ ID NO: 2008604 - RNA, 19 nt, Artificial Sequence
  Description of Artificial Sequence: Synthetic oligonucleotide
ggcuuuagugacuuuccau

SEQ ID NO: 2008605 - RNA, 19 nt, Artificial Sequence
  Description of Artificial Sequence: Synthetic oligonucleotide
agagguccacccggggaca

SEQ ID NO: 2008606 - RNA, 19 nt, Artificial Sequence
  Description of Artificial Sequence: Synthetic oligonucleotide
agcgacgcgcggagcgagc

SEQ ID NO: 2008607 - RNA, 19 nt, Artificial Sequence
  Description of Artificial Sequence: Synthetic oligonucleotide
cauggcgagaggacgcgcu

SEQ ID NO: 2008608 - RNA, 19 nt, Artificial Sequence
  Description of Artificial Sequence: Synthetic oligonucleotide
guacagaccuccgccaccu

SEQ ID NO: 2008609 - RNA, 19 nt, Artificial Sequence
  Description of Artificial Sequence: Synthetic oligonucleotide
ugcguccccucgguugccc

SEQ ID NO: 2008610 - RNA, 19 nt, Artificial Sequence
  Description of Artificial Sequence: Synthetic oligonucleotide
ggucaggugcauguaaaua

SEQ ID NO: 2008611 - RNA, 19 nt, Artificial Sequence
  Description of Artificial Sequence: Synthetic oligonucleotide
acgaagcgucucuucuaua

SEQ ID NO: 2008612 - RNA, 19 nt, Artificial Sequence
  Description of Artificial Sequence: Synthetic oligonucleotide
gcucgcauccaugcggcgc

SEQ ID NO: 2008613 - RNA, 19 nt, Artificial Sequence
  Description of Artificial Sequence: Synthetic oligonucleotide
caguacaugaaggccgugu

SEQ ID NO: 2008614 - RNA, 19 nt, Artificial Sequence
  Description of Artificial Sequence: Synthetic oligonucleotide
caagccccaggccgcccag

SEQ ID NO: 2008615 - RNA, 19 nt, Artificial Sequence
  Description of Artificial Sequence: Synthetic oligonucleotide
ggccucgaagugguguucc

SEQ ID NO: 2008616 - RNA, 19 nt, Artificial Sequence
  Description of Artificial Sequence: Synthetic oligonucleotide
ugacugcguccccucgguu

SEQ ID NO: 2008617 - RNA, 19 nt, Artificial Sequence
  Description of Artificial Sequence: Synthetic oligonucleotide
uacagaccuccgccaccuc

SEQ ID NO: 2008618 - RNA, 19 nt, Artificial Sequence
  Description of Artificial Sequence: Synthetic oligonucleotide
gcaaccagguuccaggcuu

SEQ ID NO: 2008619 - RNA, 19 nt, Artificial Sequence
  Description of Artificial Sequence: Synthetic oligonucleotide
ggccgggacauggcgagag

SEQ ID NO: 2008620 - RNA, 19 nt, Artificial Sequence
  Description of Artificial Sequence: Synthetic oligonucleotide
cacgaagcgucucuucuau

SEQ ID NO: 2008621 - RNA, 19 nt, Artificial Sequence
  Description of Artificial Sequence: Synthetic oligonucleotide
cccagaaccguggcgggcc

SEQ ID NO: 2008622 - RNA, 19 nt, Artificial Sequence
  Description of Artificial Sequence: Synthetic oligonucleotide
gcgcggagcgagcagcagc

SEQ ID NO: 2008623 - RNA, 19 nt, Artificial Sequence
  Description of Artificial Sequence: Synthetic oligonucleotide
gguccacccggggacacug

SEQ ID NO: 2008624 - RNA, 19 nt, Artificial Sequence
  Description of Artificial Sequence: Synthetic oligonucleotide
ugcucucggacuggccguc

SEQ ID NO: 2008625 - RNA, 19 nt, Artificial Sequence
  Description of Artificial Sequence: Synthetic oligonucleotide
gagcgagcagcagcgcgga

SEQ ID NO: 2008626 - RNA, 19 nt, Artificial Sequence
  Description of Artificial Sequence: Synthetic oligonucleotide
accagggcaauggccucga

SEQ ID NO: 2008627 - RNA, 19 nt, Artificial Sequence
  Description of Artificial Sequence: Synthetic oligonucleotide
ccgcccaggaugcucucgg

SEQ ID NO: 2008628 - RNA, 19 nt, Artificial Sequence
  Description of Artificial Sequence: Synthetic oligonucleotide
ugccgggugguggcguugu

SEQ ID NO: 2008629 - RNA, 19 nt, Artificial Sequence
  Description of Artificial Sequence: Synthetic oligonucleotide
gaaccguggcgggccggag

SEQ ID NO: 2008630 - RNA, 19 nt, Artificial Sequence
  Description of Artificial Sequence: Synthetic oligonucleotide
agcgcggaccacggcucgg

SEQ ID NO: 2008631 - RNA, 19 nt, Artificial Sequence
  Description of Artificial Sequence: Synthetic oligonucleotide
gcgagaggacgcgcuacgg

SEQ ID NO: 2008632 - RNA, 19 nt, Artificial Sequence
  Description of Artificial Sequence: Synthetic oligonucleotide
aagcggcccacaggcugcu

SEQ ID NO: 2008633 - RNA, 19 nt, Artificial Sequence
  Description of Artificial Sequence: Synthetic oligonucleotide
guaccgucgcggcgcuggc

SEQ ID NO: 2008634 - RNA, 19 nt, Artificial Sequence
  Description of Artificial Sequence: Synthetic oligonucleotide
gccccaucuccauggugcc

SEQ ID NO: 2008635 - RNA, 19 nt, Artificial Sequence
  Description of Artificial Sequence: Synthetic oligonucleotide
cguaccgucgcggcgcugg

SEQ ID NO: 2008636 - RNA, 19 nt, Artificial Sequence
  Description of Artificial Sequence: Synthetic oligonucleotide
gagguccacccggggacac

SEQ ID NO: 2008637 - RNA, 19 nt, Artificial Sequence
  Description of Artificial Sequence: Synthetic oligonucleotide
gccguguccaguucgcugu

SEQ ID NO: 2008638 - RNA, 19 nt, Artificial Sequence
  Description of Artificial Sequence: Synthetic oligonucleotide
aggcccggagcgacgcgcg

SEQ ID NO: 2008639 - RNA, 19 nt, Artificial Sequence
  Description of Artificial Sequence: Synthetic oligonucleotide
cuguggccgcgcuccauga

SEQ ID NO: 2008640 - RNA, 19 nt, Artificial Sequence
  Description of Artificial Sequence: Synthetic oligonucleotide
aggccgcccaggaugcucu

SEQ ID NO: 2008641 - RNA, 19 nt, Artificial Sequence
  Description of Artificial Sequence: Synthetic oligonucleotide
caccucccaggaggcauag

SEQ ID NO: 2008642 - RNA, 19 nt, Artificial Sequence
  Description of Artificial Sequence: Synthetic oligonucleotide
gcgucucuucuauaggggu

SEQ ID NO: 2008643 - RNA, 19 nt, Artificial Sequence
  Description of Artificial Sequence: Synthetic oligonucleotide
cagaaccguggcgggccgg

SEQ ID NO: 2008644 - RNA, 19 nt, Artificial Sequence
  Description of Artificial Sequence: Synthetic oligonucleotide
gccaaaggguuguaggcau

SEQ ID NO: 2008645 - RNA, 19 nt, Artificial Sequence
  Description of Artificial Sequence: Synthetic oligonucleotide
cugucaggcuuuagugacu

SEQ ID NO: 2008646 - RNA, 19 nt, Artificial Sequence
  Description of Artificial Sequence: Synthetic oligonucleotide
gugacgucuccagcuggga

SEQ ID NO: 2008647 - RNA, 19 nt, Artificial Sequence
  Description of Artificial Sequence: Synthetic oligonucleotide
caucccaaggguuggccuu

SEQ ID NO: 2008648 - RNA, 19 nt, Artificial Sequence
  Description of Artificial Sequence: Synthetic oligonucleotide
caguucgcuguggccgcgc

SEQ ID NO: 2008649 - RNA, 19 nt, Artificial Sequence
  Description of Artificial Sequence: Synthetic oligonucleotide
cguggcgggccggagaggg

SEQ ID NO: 2008650 - RNA, 19 nt, Artificial Sequence
  Description of Artificial Sequence: Synthetic oligonucleotide
uccccucgguugcccugga

SEQ ID NO: 2008651 - RNA, 19 nt, Artificial Sequence
  Description of Artificial Sequence: Synthetic oligonucleotide
ccagaaccguggcgggccg

SEQ ID NO: 2008652 - RNA, 19 nt, Artificial Sequence
  Description of Artificial Sequence: Synthetic oligonucleotide
gcgcucgcauccaugcggc

SEQ ID NO: 2008653 - RNA, 19 nt, Artificial Sequence
  Description of Artificial Sequence: Synthetic oligonucleotide
cggcgccccaucuccaugg

SEQ ID NO: 2008654 - RNA, 19 nt, Artificial Sequence
  Description of Artificial Sequence: Synthetic oligonucleotide
gcacgaagcgucucuucua

SEQ ID NO: 2008655 - RNA, 19 nt, Artificial Sequence
  Description of Artificial Sequence: Synthetic oligonucleotide
acaugcccugguacacggu

SEQ ID NO: 2008656 - RNA, 19 nt, Artificial Sequence
  Description of Artificial Sequence: Synthetic oligonucleotide
gcggaccacggcucgggac

SEQ ID NO: 2008657 - RNA, 19 nt, Artificial Sequence
  Description of Artificial Sequence: Synthetic oligonucleotide
guggcgccgagcggcggag

SEQ ID NO: 2008658 - RNA, 19 nt, Artificial Sequence
  Description of Artificial Sequence: Synthetic oligonucleotide
ggacacucaugggcaacca

SEQ ID NO: 2008659 - RNA, 19 nt, Artificial Sequence
  Description of Artificial Sequence: Synthetic oligonucleotide
caccugccgggugguggcg

SEQ ID NO: 2008660 - RNA, 19 nt, Artificial Sequence
  Description of Artificial Sequence: Synthetic oligonucleotide
gcaggcacgaagcgucucu

SEQ ID NO: 2008661 - RNA, 19 nt, Artificial Sequence
  Description of Artificial Sequence: Synthetic oligonucleotide
ggcugcuucccauccuugu

SEQ ID NO: 2008662 - RNA, 19 nt, Artificial Sequence
  Description of Artificial Sequence: Synthetic oligonucleotide
ggggcgcugcugccauacg

SEQ ID NO: 2008663 - RNA, 19 nt, Artificial Sequence
  Description of Artificial Sequence: Synthetic oligonucleotide
agguggcgccgagcggcgg

SEQ ID NO: 2008664 - RNA, 19 nt, Artificial Sequence
  Description of Artificial Sequence: Synthetic oligonucleotide
ggccaagcuccacaaacuu

SEQ ID NO: 2008665 - RNA, 19 nt, Artificial Sequence
  Description of Artificial Sequence: Synthetic oligonucleotide
gguggcgccgagcggcgga

SEQ ID NO: 2008666 - RNA, 19 nt, Artificial Sequence
  Description of Artificial Sequence: Synthetic oligonucleotide
gguggcaggcacgaagcgu

SEQ ID NO: 2008667 - RNA, 19 nt, Artificial Sequence
  Description of Artificial Sequence: Synthetic oligonucleotide
accugccgggugguggcgu

SEQ ID NO: 2008668 - RNA, 19 nt, Artificial Sequence
  Description of Artificial Sequence: Synthetic oligonucleotide
cccggagcgacgcgcggag

SEQ ID NO: 2008669 - RNA, 19 nt, Artificial Sequence
  Description of Artificial Sequence: Synthetic oligonucleotide
gcagccgcuucagugacgu

SEQ ID NO: 2008670 - RNA, 19 nt, Artificial Sequence
  Description of Artificial Sequence: Synthetic oligonucleotide
gcgcggaccacggcucggg

SEQ ID NO: 2008671 - RNA, 19 nt, Artificial Sequence
  Description of Artificial Sequence: Synthetic oligonucleotide
gccgcccaggaugcucucg

SEQ ID NO: 2008672 - RNA, 19 nt, Artificial Sequence
  Description of Artificial Sequence: Synthetic oligonucleotide
cgcgcuccaugaaggcacg

SEQ ID NO: 2008673 - RNA, 19 nt, Artificial Sequence
  Description of Artificial Sequence: Synthetic oligonucleotide
gaggggcgcccgagguggc

SEQ ID NO: 2008674 - RNA, 19 nt, Artificial Sequence
  Description of Artificial Sequence: Synthetic oligonucleotide
ggcccggagcgacgcgcgg

SEQ ID NO: 2008675 - RNA, 19 nt, Artificial Sequence
  Description of Artificial Sequence: Synthetic oligonucleotide
gguuccaggcuugguuaaa

SEQ ID NO: 2008676 - RNA, 19 nt, Artificial Sequence
  Description of Artificial Sequence: Synthetic oligonucleotide
acgcgcggagcgagcagca

SEQ ID NO: 2008677 - RNA, 19 nt, Artificial Sequence
  Description of Artificial Sequence: Synthetic oligonucleotide
ccgggugguggcguuguac

SEQ ID NO: 2008678 - RNA, 19 nt, Artificial Sequence
  Description of Artificial Sequence: Synthetic oligonucleotide
gcaguacaugaaggccgug

SEQ ID NO: 2008679 - RNA, 19 nt, Artificial Sequence
  Description of Artificial Sequence: Synthetic oligonucleotide
gcgccccaucuccauggug

SEQ ID NO: 2008680 - RNA, 19 nt, Artificial Sequence
  Description of Artificial Sequence: Synthetic oligonucleotide
cgcgcuacggaaggcccgg

SEQ ID NO: 2008681 - RNA, 19 nt, Artificial Sequence
  Description of Artificial Sequence: Synthetic oligonucleotide
acuggccgucgcaguacau

SEQ ID NO: 2008682 - RNA, 19 nt, Artificial Sequence
  Description of Artificial Sequence: Synthetic oligonucleotide
ggcgggccggagaggggcg

SEQ ID NO: 2008683 - RNA, 19 nt, Artificial Sequence
  Description of Artificial Sequence: Synthetic oligonucleotide
ccaugcggcgccccaucuc

SEQ ID NO: 2008684 - RNA, 19 nt, Artificial Sequence
  Description of Artificial Sequence: Synthetic oligonucleotide
cgagaggacgcgcuacgga

SEQ ID NO: 2008685 - RNA, 19 nt, Artificial Sequence
  Description of Artificial Sequence: Synthetic oligonucleotide
cggagaggggcgcccgagg

SEQ ID NO: 2008686 - RNA, 19 nt, Artificial Sequence
  Description of Artificial Sequence: Synthetic oligonucleotide
ggagcgacgcgcggagcga

SEQ ID NO: 2008687 - RNA, 19 nt, Artificial Sequence
  Description of Artificial Sequence: Synthetic oligonucleotide
gcccagaaccguggcgggc

SEQ ID NO: 2008688 - RNA, 19 nt, Artificial Sequence
  Description of Artificial Sequence: Synthetic oligonucleotide
ccaaaggguuguaggcaua

SEQ ID NO: 2008689 - RNA, 19 nt, Artificial Sequence
  Description of Artificial Sequence: Synthetic oligonucleotide
cguuguacaugcccuggua

SEQ ID NO: 2008690 - RNA, 19 nt, Artificial Sequence
  Description of Artificial Sequence: Synthetic oligonucleotide
cugaaguaguugggacacu

SEQ ID NO: 2008691 - RNA, 19 nt, Artificial Sequence
  Description of Artificial Sequence: Synthetic oligonucleotide
cagccgcuucagugacguc

SEQ ID NO: 2008692 - RNA, 19 nt, Artificial Sequence
  Description of Artificial Sequence: Synthetic oligonucleotide
ccguguccaguucgcugug

SEQ ID NO: 2008693 - RNA, 19 nt, Artificial Sequence
  Description of Artificial Sequence: Synthetic oligonucleotide
aggccgggacauggcgaga

SEQ ID NO: 2008694 - RNA, 19 nt, Artificial Sequence
  Description of Artificial Sequence: Synthetic oligonucleotide
ggcaggcacgaagcgucuc

SEQ ID NO: 2008695 - RNA, 19 nt, Artificial Sequence
  Description of Artificial Sequence: Synthetic oligonucleotide
ccccaucuccauggugccc

SEQ ID NO: 2008696 - RNA, 19 nt, Artificial Sequence
  Description of Artificial Sequence: Synthetic oligonucleotide
ccaagccccaggccgccca

SEQ ID NO: 2008697 - RNA, 19 nt, Artificial Sequence
  Description of Artificial Sequence: Synthetic oligonucleotide
ccggagaggggcgcccgag

SEQ ID NO: 2008698 - RNA, 19 nt, Artificial Sequence
  Description of Artificial Sequence: Synthetic oligonucleotide
gcgacgcgcggagcgagca

SEQ ID NO: 2008699 - RNA, 19 nt, Artificial Sequence
  Description of Artificial Sequence: Synthetic oligonucleotide
ucgcggcgcuggcgcucgc

SEQ ID NO: 2008700 - RNA, 19 nt, Artificial Sequence
  Description of Artificial Sequence: Synthetic oligonucleotide
cgcucgcauccaugcggcg

SEQ ID NO: 2008701 - RNA, 19 nt, Artificial Sequence
  Description of Artificial Sequence: Synthetic oligonucleotide
cgcaguacaugaaggccgu

SEQ ID NO: 2008702 - RNA, 19 nt, Artificial Sequence
  Description of Artificial Sequence: Synthetic oligonucleotide
acguaccgucgcggcgcug

SEQ ID NO: 2008703 - RNA, 19 nt, Artificial Sequence
  Description of Artificial Sequence: Synthetic oligonucleotide
cguccccucgguugcccug

SEQ ID NO: 2008704 - RNA, 19 nt, Artificial Sequence
  Description of Artificial Sequence: Synthetic oligonucleotide
gcgccgagcggcggaggcc

SEQ ID NO: 2008705 - RNA, 19 nt, Artificial Sequence
  Description of Artificial Sequence: Synthetic oligonucleotide
ccaugaaggcacguaccgu

SEQ ID NO: 2008706 - RNA, 19 nt, Artificial Sequence
  Description of Artificial Sequence: Synthetic oligonucleotide
cauccaugcggcgccccau

SEQ ID NO: 2008707 - RNA, 19 nt, Artificial Sequence
  Description of Artificial Sequence: Synthetic oligonucleotide
ggccgucgcaguacaugaa

SEQ ID NO: 2008708 - RNA, 19 nt, Artificial Sequence
  Description of Artificial Sequence: Synthetic oligonucleotide
cacguaccgucgcggcgcu

SEQ ID NO: 2008709 - RNA, 19 nt, Artificial Sequence
  Description of Artificial Sequence: Synthetic oligonucleotide
ccccucgguugcccuggag

SEQ ID NO: 2008710 - RNA, 19 nt, Artificial Sequence
  Description of Artificial Sequence: Synthetic oligonucleotide
ccaccucccaggaggcaua

SEQ ID NO: 2008711 - RNA, 19 nt, Artificial Sequence
  Description of Artificial Sequence: Synthetic oligonucleotide
gcgguuccuguaggucuca

SEQ ID NO: 2008712 - RNA, 19 nt, Artificial Sequence
  Description of Artificial Sequence: Synthetic oligonucleotide
gccggagaggggcgcccga

SEQ ID NO: 2008713 - RNA, 19 nt, Artificial Sequence
  Description of Artificial Sequence: Synthetic oligonucleotide
gcccggagcgacgcgcgga

SEQ ID NO: 2008714 - RNA, 19 nt, Artificial Sequence
  Description of Artificial Sequence: Synthetic oligonucleotide
cgacgcgcggagcgagcag

SEQ ID NO: 2008715 - RNA, 19 nt, Artificial Sequence
  Description of Artificial Sequence: Synthetic oligonucleotide
gcccgagguggcgccgagc

SEQ ID NO: 2008716 - RNA, 19 nt, Artificial Sequence
  Description of Artificial Sequence: Synthetic oligonucleotide
ggcgccccaucuccauggu

SEQ ID NO: 2008717 - RNA, 19 nt, Artificial Sequence
  Description of Artificial Sequence: Synthetic oligonucleotide
cggacuggccgucgcagua

SEQ ID NO: 2008718 - RNA, 19 nt, Artificial Sequence
  Description of Artificial Sequence: Synthetic oligonucleotide
ccggagcgacgcgcggagc

SEQ ID NO: 2008719 - RNA, 19 nt, Artificial Sequence
  Description of Artificial Sequence: Synthetic oligonucleotide
gcggcggaggccgggacau

SEQ ID NO: 2008720 - RNA, 19 nt, Artificial Sequence
  Description of Artificial Sequence: Synthetic oligonucleotide
ccguggcgggccggagagg

SEQ ID NO: 2008721 - RNA, 19 nt, Artificial Sequence
  Description of Artificial Sequence: Synthetic oligonucleotide
gguacacgguuggcaggau

SEQ ID NO: 2008722 - RNA, 19 nt, Artificial Sequence
  Description of Artificial Sequence: Synthetic oligonucleotide
cgcuccaugaaggcacgua

SEQ ID NO: 2008723 - RNA, 19 nt, Artificial Sequence
  Description of Artificial Sequence: Synthetic oligonucleotide
gcguccccucgguugcccu

SEQ ID NO: 2008724 - RNA, 19 nt, Artificial Sequence
  Description of Artificial Sequence: Synthetic oligonucleotide
gcggcgcuggcgcucgcau

SEQ ID NO: 2008725 - RNA, 19 nt, Artificial Sequence
  Description of Artificial Sequence: Synthetic oligonucleotide
cggcgcuggcgcucgcauc

SEQ ID NO: 2008726 - RNA, 19 nt, Artificial Sequence
  Description of Artificial Sequence: Synthetic oligonucleotide
cgcgcggagcgagcagcag

SEQ ID NO: 2008727 - RNA, 19 nt, Artificial Sequence
  Description of Artificial Sequence: Synthetic oligonucleotide
ccaggggcccuuccucagu

SEQ ID NO: 2008728 - RNA, 19 nt, Artificial Sequence
  Description of Artificial Sequence: Synthetic oligonucleotide
cgcccaggaugcucucgga

SEQ ID NO: 2008729 - RNA, 19 nt, Artificial Sequence
  Description of Artificial Sequence: Synthetic oligonucleotide
ccucgaagugguguuccuu

SEQ ID NO: 2008730 - RNA, 19 nt, Artificial Sequence
  Description of Artificial Sequence: Synthetic oligonucleotide
gcgcuggcgcucgcaucca

SEQ ID NO: 2008731 - RNA, 19 nt, Artificial Sequence
  Description of Artificial Sequence: Synthetic oligonucleotide
gccgggugguggcguugua

SEQ ID NO: 2008732 - RNA, 19 nt, Artificial Sequence
  Description of Artificial Sequence: Synthetic oligonucleotide
cgcggaccacggcucggga

SEQ ID NO: 2008733 - RNA, 19 nt, Artificial Sequence
  Description of Artificial Sequence: Synthetic oligonucleotide
cccaaggguuggccuuggu

SEQ ID NO: 2008734 - RNA, 19 nt, Artificial Sequence
  Description of Artificial Sequence: Synthetic oligonucleotide
gcgcuccaugaaggcacgu

SEQ ID NO: 2008735 - RNA, 19 nt, Artificial Sequence
  Description of Artificial Sequence: Synthetic oligonucleotide
ccugccgggugguggcguu

SEQ ID NO: 2008736 - RNA, 19 nt, Artificial Sequence
  Description of Artificial Sequence: Synthetic oligonucleotide
ccgucgcggcgcuggcgcu

SEQ ID NO: 2008737 - RNA, 19 nt, Artificial Sequence
  Description of Artificial Sequence: Synthetic oligonucleotide
ccccagccaaaggguugua

SEQ ID NO: 2008738 - RNA, 19 nt, Artificial Sequence
  Description of Artificial Sequence: Synthetic oligonucleotide
cguggucugcagggccuuu

SEQ ID NO: 2008739 - RNA, 19 nt, Artificial Sequence
  Description of Artificial Sequence: Synthetic oligonucleotide
aaaguuaagacuuaugacc

SEQ ID NO: 2008740 - RNA, 19 nt, Artificial Sequence
  Description of Artificial Sequence: Synthetic oligonucleotide
aucuagaaaaucuagagac

SEQ ID NO: 2008741 - RNA, 19 nt, Artificial Sequence
  Description of Artificial Sequence: Synthetic oligonucleotide
aauauaaggaacaaauccc

SEQ ID NO: 2008742 - RNA, 19 nt, Artificial Sequence
  Description of Artificial Sequence: Synthetic oligonucleotide
aaaaguuaagacuuaugac

SEQ ID NO: 2008743 - RNA, 19 nt, Artificial Sequence
  Description of Artificial Sequence: Synthetic oligonucleotide
ucaaaauacaaacacuggg

SEQ ID NO: 2008744 - RNA, 19 nt, Artificial Sequence
  Description of Artificial Sequence: Synthetic oligonucleotide
aacuugguaguauagcugc

SEQ ID NO: 2008745 - RNA, 19 nt, Artificial Sequence
  Description of Artificial Sequence: Synthetic oligonucleotide
auuuacagaacucuguagg

SEQ ID NO: 2008746 - RNA, 19 nt, Artificial Sequence
  Description of Artificial Sequence: Synthetic oligonucleotide
ucacaauuccaauauaagg

SEQ ID NO: 2008747 - RNA, 19 nt, Artificial Sequence
  Description of Artificial Sequence: Synthetic oligonucleotide
aacuaaugcaaaccagugc

SEQ ID NO: 2008748 - RNA, 19 nt, Artificial Sequence
  Description of Artificial Sequence: Synthetic oligonucleotide
auauccgccaaucacagac

SEQ ID NO: 2008749 - RNA, 19 nt, Artificial Sequence
  Description of Artificial Sequence: Synthetic oligonucleotide
gaaaaguuaagacuuauga

SEQ ID NO: 2008750 - RNA, 19 nt, Artificial Sequence
  Description of Artificial Sequence: Synthetic oligonucleotide
aaaacuugguaguauagcu

SEQ ID NO: 2008751 - RNA, 19 nt, Artificial Sequence
  Description of Artificial Sequence: Synthetic oligonucleotide
aggauagucauucaugagg

SEQ ID NO: 2008752 - RNA, 19 nt, Artificial Sequence
  Description of Artificial Sequence: Synthetic oligonucleotide
aagacuuaugaccucaaug

SEQ ID NO: 2008753 - RNA, 19 nt, Artificial Sequence
  Description of Artificial Sequence: Synthetic oligonucleotide
ucuagagacagcaugguga

SEQ ID NO: 2008754 - RNA, 19 nt, Artificial Sequence
  Description of Artificial Sequence: Synthetic oligonucleotide
acuaaugcaaaccagugcu

SEQ ID NO: 2008755 - RNA, 19 nt, Artificial Sequence
  Description of Artificial Sequence: Synthetic oligonucleotide
agugcuaccaagaagcgcc

SEQ ID NO: 2008756 - RNA, 19 nt, Artificial Sequence
  Description of Artificial Sequence: Synthetic oligonucleotide
uaugggaucuucaacucgg

SEQ ID NO: 2008757 - RNA, 19 nt, Artificial Sequence
  Description of Artificial Sequence: Synthetic oligonucleotide
uuaaaauucugaaaaguua

SEQ ID NO: 2008758 - RNA, 19 nt, Artificial Sequence
  Description of Artificial Sequence: Synthetic oligonucleotide
uccaaaguuuaaaacuugg

SEQ ID NO: 2008759 - RNA, 19 nt, Artificial Sequence
  Description of Artificial Sequence: Synthetic oligonucleotide
uucuauccugaaaacaacg

SEQ ID NO: 2008760 - RNA, 19 nt, Artificial Sequence
  Description of Artificial Sequence: Synthetic oligonucleotide
aaugcaaaccagugcuacc

SEQ ID NO: 2008761 - RNA, 19 nt, Artificial Sequence
  Description of Artificial Sequence: Synthetic oligonucleotide
agacuuaugaccucaaugu

SEQ ID NO: 2008762 - RNA, 19 nt, Artificial Sequence
  Description of Artificial Sequence: Synthetic oligonucleotide
gaccaguacaaauaaaccc

SEQ ID NO: 2008763 - RNA, 19 nt, Artificial Sequence
  Description of Artificial Sequence: Synthetic oligonucleotide
acuacaauuggacucucac

SEQ ID NO: 2008764 - RNA, 19 nt, Artificial Sequence
  Description of Artificial Sequence: Synthetic oligonucleotide
acagaaacuaaugcaaacc

SEQ ID NO: 2008765 - RNA, 19 nt, Artificial Sequence
  Description of Artificial Sequence: Synthetic oligonucleotide
auauaaggaacaaaucccc

SEQ ID NO: 2008766 - RNA, 19 nt, Artificial Sequence
  Description of Artificial Sequence: Synthetic oligonucleotide
aagagugacaaugacaaca

SEQ ID NO: 2008767 - RNA, 19 nt, Artificial Sequence
  Description of Artificial Sequence: Synthetic oligonucleotide
ugugugucuccaaauaucc

SEQ ID NO: 2008768 - RNA, 19 nt, Artificial Sequence
  Description of Artificial Sequence: Synthetic oligonucleotide
uuuauagaggccucgguca

SEQ ID NO: 2008769 - RNA, 19 nt, Artificial Sequence
  Description of Artificial Sequence: Synthetic oligonucleotide
aguacaaauaaacccagca

SEQ ID NO: 2008770 - RNA, 19 nt, Artificial Sequence
  Description of Artificial Sequence: Synthetic oligonucleotide
uagucauucaugaggauug

SEQ ID NO: 2008771 - RNA, 19 nt, Artificial Sequence
  Description of Artificial Sequence: Synthetic oligonucleotide
ugaaagagugacaaugaca

SEQ ID NO: 2008772 - RNA, 19 nt, Artificial Sequence
  Description of Artificial Sequence: Synthetic oligonucleotide
uggaccaguacaaauaaac

SEQ ID NO: 2008773 - RNA, 19 nt, Artificial Sequence
  Description of Artificial Sequence: Synthetic oligonucleotide
aacaguacugcauacuuaa

SEQ ID NO: 2008774 - RNA, 19 nt, Artificial Sequence
  Description of Artificial Sequence: Synthetic oligonucleotide
uuagaagugaagcuuggcu

SEQ ID NO: 2008775 - RNA, 19 nt, Artificial Sequence
  Description of Artificial Sequence: Synthetic oligonucleotide
cugaaaacaacgauuuccc

SEQ ID NO: 2008776 - RNA, 19 nt, Artificial Sequence
  Description of Artificial Sequence: Synthetic oligonucleotide
ugaggauugucacaauucc

SEQ ID NO: 2008777 - RNA, 19 nt, Artificial Sequence
  Description of Artificial Sequence: Synthetic oligonucleotide
caacgagcagccaagaagg

SEQ ID NO: 2008778 - RNA, 19 nt, Artificial Sequence
  Description of Artificial Sequence: Synthetic oligonucleotide
acaacgagcagccaagaag

SEQ ID NO: 2008779 - RNA, 19 nt, Artificial Sequence
  Description of Artificial Sequence: Synthetic oligonucleotide
cauacuuaaauuuaggaua

SEQ ID NO: 2008780 - RNA, 19 nt, Artificial Sequence
  Description of Artificial Sequence: Synthetic oligonucleotide
agaucauuagugcugagga

SEQ ID NO: 2008781 - RNA, 19 nt, Artificial Sequence
  Description of Artificial Sequence: Synthetic oligonucleotide
uacaauuggacucucacuu

SEQ ID NO: 2008782 - RNA, 19 nt, Artificial Sequence
  Description of Artificial Sequence: Synthetic oligonucleotide
aaaugugaaagagugacaa

SEQ ID NO: 2008783 - RNA, 19 nt, Artificial Sequence
  Description of Artificial Sequence: Synthetic oligonucleotide
cacaauuccaauauaagga

SEQ ID NO: 2008784 - RNA, 19 nt, Artificial Sequence
  Description of Artificial Sequence: Synthetic oligonucleotide
cauggugagauggagaacg

SEQ ID NO: 2008785 - RNA, 19 nt, Artificial Sequence
  Description of Artificial Sequence: Synthetic oligonucleotide
caauagaaucaccaggagg

SEQ ID NO: 2008786 - RNA, 19 nt, Artificial Sequence
  Description of Artificial Sequence: Synthetic oligonucleotide
acuauaggaaucucucuuc

SEQ ID NO: 2008787 - RNA, 19 nt, Artificial Sequence
  Description of Artificial Sequence: Synthetic oligonucleotide
ugacaaugacaacauauga

SEQ ID NO: 2008788 - RNA, 19 nt, Artificial Sequence
  Description of Artificial Sequence: Synthetic oligonucleotide
ucuacuccaaacauccagc

SEQ ID NO: 2008789 - RNA, 19 nt, Artificial Sequence
  Description of Artificial Sequence: Synthetic oligonucleotide
uucuuacucacgauggacc

SEQ ID NO: 2008790 - RNA, 19 nt, Artificial Sequence
  Description of Artificial Sequence: Synthetic oligonucleotide
ugugaaagagugacaauga

SEQ ID NO: 2008791 - RNA, 19 nt, Artificial Sequence
  Description of Artificial Sequence: Synthetic oligonucleotide
cuagaaaaucuagagacag

SEQ ID NO: 2008792 - RNA, 19 nt, Artificial Sequence
  Description of Artificial Sequence: Synthetic oligonucleotide
cuuaugaccucaaugugug

SEQ ID NO: 2008793 - RNA, 19 nt, Artificial Sequence
  Description of Artificial Sequence: Synthetic oligonucleotide
aaggaacaaauccccucgc

SEQ ID NO: 2008794 - RNA, 19 nt, Artificial Sequence
  Description of Artificial Sequence: Synthetic oligonucleotide
ugaaaaguuaagacuuaug

SEQ ID NO: 2008795 - RNA, 19 nt, Artificial Sequence
  Description of Artificial Sequence: Synthetic oligonucleotide
cucacuuccgguuaucacc

SEQ ID NO: 2008796 - RNA, 19 nt, Artificial Sequence
  Description of Artificial Sequence: Synthetic oligonucleotide
aagcuuggcuucaaaauac

SEQ ID NO: 2008797 - RNA, 19 nt, Artificial Sequence
  Description of Artificial Sequence: Synthetic oligonucleotide
ucguaugggaucuucaacu

SEQ ID NO: 2008798 - RNA, 19 nt, Artificial Sequence
  Description of Artificial Sequence: Synthetic oligonucleotide
aacgcgacaacgagcagcc

SEQ ID NO: 2008799 - RNA, 19 nt, Artificial Sequence
  Description of Artificial Sequence: Synthetic oligonucleotide
ucuauccugaaaacaacga

SEQ ID NO: 2008800 - RNA, 19 nt, Artificial Sequence
  Description of Artificial Sequence: Synthetic oligonucleotide
ugaaacgcaggcuccaugc

SEQ ID NO: 2008801 - RNA, 19 nt, Artificial Sequence
  Description of Artificial Sequence: Synthetic oligonucleotide
aaugugugccacccuacag

SEQ ID NO: 2008802 - RNA, 19 nt, Artificial Sequence
  Description of Artificial Sequence: Synthetic oligonucleotide
cugagcaccacuacaauug

SEQ ID NO: 2008803 - RNA, 19 nt, Artificial Sequence
  Description of Artificial Sequence: Synthetic oligonucleotide
aaagagugacaaugacaac

SEQ ID NO: 2008804 - RNA, 19 nt, Artificial Sequence
  Description of Artificial Sequence: Synthetic oligonucleotide
uuauuaucuccuuugguua

SEQ ID NO: 2008805 - RNA, 19 nt, Artificial Sequence
  Description of Artificial Sequence: Synthetic oligonucleotide
gacuucuuacucacgaugg

SEQ ID NO: 2008806 - RNA, 19 nt, Artificial Sequence
  Description of Artificial Sequence: Synthetic oligonucleotide
caacauaugaaauccugug

SEQ ID NO: 2008807 - RNA, 19 nt, Artificial Sequence
  Description of Artificial Sequence: Synthetic oligonucleotide
auacuuaaauuuaggauag

SEQ ID NO: 2008808 - RNA, 19 nt, Artificial Sequence
  Description of Artificial Sequence: Synthetic oligonucleotide
augugaaagagugacaaug

SEQ ID NO: 2008809 - RNA, 19 nt, Artificial Sequence
  Description of Artificial Sequence: Synthetic oligonucleotide
gacucgaugcacuauagga

SEQ ID NO: 2008810 - RNA, 19 nt, Artificial Sequence
  Description of Artificial Sequence: Synthetic oligonucleotide
ugcacuauaggaaucucuc

SEQ ID NO: 2008811 - RNA, 19 nt, Artificial Sequence
  Description of Artificial Sequence: Synthetic oligonucleotide
aaggaaggaugacaggugu

SEQ ID NO: 2008812 - RNA, 19 nt, Artificial Sequence
  Description of Artificial Sequence: Synthetic oligonucleotide
uccucugugaaacgcaggc

SEQ ID NO: 2008813 - RNA, 19 nt, Artificial Sequence
  Description of Artificial Sequence: Synthetic oligonucleotide
caguaaggaaggaugacag

SEQ ID NO: 2008814 - RNA, 19 nt, Artificial Sequence
  Description of Artificial Sequence: Synthetic oligonucleotide
ugaaaguccccuugggugc

SEQ ID NO: 2008815 - RNA, 19 nt, Artificial Sequence
  Description of Artificial Sequence: Synthetic oligonucleotide
aaauauccgccaaucacag

SEQ ID NO: 2008816 - RNA, 19 nt, Artificial Sequence
  Description of Artificial Sequence: Synthetic oligonucleotide
uucaacucgguucgugagg

SEQ ID NO: 2008817 - RNA, 19 nt, Artificial Sequence
  Description of Artificial Sequence: Synthetic oligonucleotide
aaacuaaugcaaaccagug

SEQ ID NO: 2008818 - RNA, 19 nt, Artificial Sequence
  Description of Artificial Sequence: Synthetic oligonucleotide
acaauuccaauauaaggaa

SEQ ID NO: 2008819 - RNA, 19 nt, Artificial Sequence
  Description of Artificial Sequence: Synthetic oligonucleotide
caucaucuagaaaaucuag

SEQ ID NO: 2008820 - RNA, 19 nt, Artificial Sequence
  Description of Artificial Sequence: Synthetic oligonucleotide
aguacugcauacuuaaauu

SEQ ID NO: 2008821 - RNA, 19 nt, Artificial Sequence
  Description of Artificial Sequence: Synthetic oligonucleotide
ugagcaccacuacaauugg

SEQ ID NO: 2008822 - RNA, 19 nt, Artificial Sequence
  Description of Artificial Sequence: Synthetic oligonucleotide
uaugaaauccugugauuga

SEQ ID NO: 2008823 - RNA, 19 nt, Artificial Sequence
  Description of Artificial Sequence: Synthetic oligonucleotide
guucgugaggaaaaggagg

SEQ ID NO: 2008824 - RNA, 19 nt, Artificial Sequence
  Description of Artificial Sequence: Synthetic oligonucleotide
aaucauuccaaaguuuaaa

SEQ ID NO: 2008825 - RNA, 19 nt, Artificial Sequence
  Description of Artificial Sequence: Synthetic oligonucleotide
ucucuagccaauguugucc

SEQ ID NO: 2008826 - RNA, 19 nt, Artificial Sequence
  Description of Artificial Sequence: Synthetic oligonucleotide
uucaugaggauugucacaa

SEQ ID NO: 2008827 - RNA, 19 nt, Artificial Sequence
  Description of Artificial Sequence: Synthetic oligonucleotide
agcaccacuacaauuggac

SEQ ID NO: 2008828 - RNA, 19 nt, Artificial Sequence
  Description of Artificial Sequence: Synthetic oligonucleotide
uagaaaaucuagagacagc

SEQ ID NO: 2008829 - RNA, 19 nt, Artificial Sequence
  Description of Artificial Sequence: Synthetic oligonucleotide
caaauauccgccaaucaca

SEQ ID NO: 2008830 - RNA, 19 nt, Artificial Sequence
  Description of Artificial Sequence: Synthetic oligonucleotide
uccauggugcacaugcacc

SEQ ID NO: 2008831 - RNA, 19 nt, Artificial Sequence
  Description of Artificial Sequence: Synthetic oligonucleotide
uggagaacgcgacaacgag

SEQ ID NO: 2008832 - RNA, 19 nt, Artificial Sequence
  Description of Artificial Sequence: Synthetic oligonucleotide
cuauaggaaucucucuucc

SEQ ID NO: 2008833 - RNA, 19 nt, Artificial Sequence
  Description of Artificial Sequence: Synthetic oligonucleotide
cuuuagaagugaagcuugg

SEQ ID NO: 2008834 - RNA, 19 nt, Artificial Sequence
  Description of Artificial Sequence: Synthetic oligonucleotide
ucucccuacaacaucuuuc

SEQ ID NO: 2008835 - RNA, 19 nt, Artificial Sequence
  Description of Artificial Sequence: Synthetic oligonucleotide
aaacuugguaguauagcug

SEQ ID NO: 2008836 - RNA, 19 nt, Artificial Sequence
  Description of Artificial Sequence: Synthetic oligonucleotide
aucauuagugcugaggaga

SEQ ID NO: 2008837 - RNA, 19 nt, Artificial Sequence
  Description of Artificial Sequence: Synthetic oligonucleotide
auuuaggauagucauucau

SEQ ID NO: 2008838 - RNA, 19 nt, Artificial Sequence
  Description of Artificial Sequence: Synthetic oligonucleotide
auugaaaguccccuugggu

SEQ ID NO: 2008839 - RNA, 19 nt, Artificial Sequence
  Description of Artificial Sequence: Synthetic oligonucleotide
ugaaaacaacgauuucccc

SEQ ID NO: 2008840 - RNA, 19 nt, Artificial Sequence
  Description of Artificial Sequence: Synthetic oligonucleotide
aauuuaggauagucauuca

SEQ ID NO: 2008841 - RNA, 19 nt, Artificial Sequence
  Description of Artificial Sequence: Synthetic oligonucleotide
ucauuagugcugaggagac

SEQ ID NO: 2008842 - RNA, 19 nt, Artificial Sequence
  Description of Artificial Sequence: Synthetic oligonucleotide
ucacuuccgguuaucacca

SEQ ID NO: 2008843 - RNA, 19 nt, Artificial Sequence
  Description of Artificial Sequence: Synthetic oligonucleotide
aaacgcaggcuccaugcug

SEQ ID NO: 2008844 - RNA, 19 nt, Artificial Sequence
  Description of Artificial Sequence: Synthetic oligonucleotide
gaggccucggucaucaacg

SEQ ID NO: 2008845 - RNA, 19 nt, Artificial Sequence
  Description of Artificial Sequence: Synthetic oligonucleotide
guuuauagaggccucgguc

SEQ ID NO: 2008846 - RNA, 19 nt, Artificial Sequence
  Description of Artificial Sequence: Synthetic oligonucleotide
accaguacaaauaaaccca

SEQ ID NO: 2008847 - RNA, 19 nt, Artificial Sequence
  Description of Artificial Sequence: Synthetic oligonucleotide
aacagugcagccgacuucu

SEQ ID NO: 2008848 - RNA, 19 nt, Artificial Sequence
  Description of Artificial Sequence: Synthetic oligonucleotide
uaguauagcugccucuugu

SEQ ID NO: 2008849 - RNA, 19 nt, Artificial Sequence
  Description of Artificial Sequence: Synthetic oligonucleotide
uccugugauugaaaguccc

SEQ ID NO: 2008850 - RNA, 19 nt, Artificial Sequence
  Description of Artificial Sequence: Synthetic oligonucleotide
augaggauugucacaauuc

SEQ ID NO: 2008851 - RNA, 19 nt, Artificial Sequence
  Description of Artificial Sequence: Synthetic oligonucleotide
gacuuaugaccucaaugug

SEQ ID NO: 2008852 - RNA, 19 nt, Artificial Sequence
  Description of Artificial Sequence: Synthetic oligonucleotide
ggaucuacuccaaacaucc

SEQ ID NO: 2008853 - RNA, 19 nt, Artificial Sequence
  Description of Artificial Sequence: Synthetic oligonucleotide
uuagguguggaaacagaaa

SEQ ID NO: 2008854 - RNA, 19 nt, Artificial Sequence
  Description of Artificial Sequence: Synthetic oligonucleotide
uccuuguuuauagaggccu

SEQ ID NO: 2008855 - RNA, 19 nt, Artificial Sequence
  Description of Artificial Sequence: Synthetic oligonucleotide
accucaaugugugccaccc

SEQ ID NO: 2008856 - RNA, 19 nt, Artificial Sequence
  Description of Artificial Sequence: Synthetic oligonucleotide
ggcacuuuagaagugaagc

SEQ ID NO: 2008857 - RNA, 19 nt, Artificial Sequence
  Description of Artificial Sequence: Synthetic oligonucleotide
agaaggagcaauagaauca

SEQ ID NO: 2008858 - RNA, 19 nt, Artificial Sequence
  Description of Artificial Sequence: Synthetic oligonucleotide
caauuccaauauaaggaac

SEQ ID NO: 2008859 - RNA, 19 nt, Artificial Sequence
  Description of Artificial Sequence: Synthetic oligonucleotide
gcugucuucauuuacagaa

SEQ ID NO: 2008860 - RNA, 19 nt, Artificial Sequence
  Description of Artificial Sequence: Synthetic oligonucleotide
aaugugaaagagugacaau

SEQ ID NO: 2008861 - RNA, 19 nt, Artificial Sequence
  Description of Artificial Sequence: Synthetic oligonucleotide
agcauggugagauggagaa

SEQ ID NO: 2008862 - RNA, 19 nt, Artificial Sequence
  Description of Artificial Sequence: Synthetic oligonucleotide
ccuacaguaaggaaggaug

SEQ ID NO: 2008863 - RNA, 19 nt, Artificial Sequence
  Description of Artificial Sequence: Synthetic oligonucleotide
agaaacuaaugcaaaccag

SEQ ID NO: 2008864 - RNA, 19 nt, Artificial Sequence
  Description of Artificial Sequence: Synthetic oligonucleotide
aaggaggucuccucuguga

SEQ ID NO: 2008865 - RNA, 19 nt, Artificial Sequence
  Description of Artificial Sequence: Synthetic oligonucleotide
gaagcuuggcuucaaaaua

SEQ ID NO: 2008866 - RNA, 19 nt, Artificial Sequence
  Description of Artificial Sequence: Synthetic oligonucleotide
aaaccagugcuaccaagaa

SEQ ID NO: 2008867 - RNA, 19 nt, Artificial Sequence
  Description of Artificial Sequence: Synthetic oligonucleotide
uuguuuauagaggccucgg

SEQ ID NO: 2008868 - RNA, 19 nt, Artificial Sequence
  Description of Artificial Sequence: Synthetic oligonucleotide
uaggauagucauucaugag

SEQ ID NO: 2008869 - RNA, 19 nt, Artificial Sequence
  Description of Artificial Sequence: Synthetic oligonucleotide
uguuuauagaggccucggu

SEQ ID NO: 2008870 - RNA, 19 nt, Artificial Sequence
  Description of Artificial Sequence: Synthetic oligonucleotide
gauggaccaguacaaauaa

SEQ ID NO: 2008871 - RNA, 19 nt, Artificial Sequence
  Description of Artificial Sequence: Synthetic oligonucleotide
cucacgauggaccaguaca

SEQ ID NO: 2008872 - RNA, 19 nt, Artificial Sequence
  Description of Artificial Sequence: Synthetic oligonucleotide
acuuuagaagugaagcuug

SEQ ID NO: 2008873 - RNA, 19 nt, Artificial Sequence
  Description of Artificial Sequence: Synthetic oligonucleotide
caugcacccgcccacacag

SEQ ID NO: 2008874 - RNA, 19 nt, Artificial Sequence
  Description of Artificial Sequence: Synthetic oligonucleotide
cuucuauccugaaaacaac

SEQ ID NO: 2008875 - RNA, 19 nt, Artificial Sequence
  Description of Artificial Sequence: Synthetic oligonucleotide
cuuguuuauagaggccucg

SEQ ID NO: 2008876 - RNA, 19 nt, Artificial Sequence
  Description of Artificial Sequence: Synthetic oligonucleotide
aauuggacucucacuuccg

SEQ ID NO: 2008877 - RNA, 19 nt, Artificial Sequence
  Description of Artificial Sequence: Synthetic oligonucleotide
ggaucuucaagacucgaug

SEQ ID NO: 2008878 - RNA, 19 nt, Artificial Sequence
  Description of Artificial Sequence: Synthetic oligonucleotide
gugauugaaaguccccuug

SEQ ID NO: 2008879 - RNA, 19 nt, Artificial Sequence
  Description of Artificial Sequence: Synthetic oligonucleotide
cagaaacuaaugcaaacca

SEQ ID NO: 2008880 - RNA, 19 nt, Artificial Sequence
  Description of Artificial Sequence: Synthetic oligonucleotide
auuagugcugaggagacaa

SEQ ID NO: 2008881 - RNA, 19 nt, Artificial Sequence
  Description of Artificial Sequence: Synthetic oligonucleotide
uccgguuaucaccaucagc

SEQ ID NO: 2008882 - RNA, 19 nt, Artificial Sequence
  Description of Artificial Sequence: Synthetic oligonucleotide
gagaacgcgacaacgagca

SEQ ID NO: 2008883 - RNA, 19 nt, Artificial Sequence
  Description of Artificial Sequence: Synthetic oligonucleotide
agaagcgccaacaugugug

SEQ ID NO: 2008884 - RNA, 19 nt, Artificial Sequence
  Description of Artificial Sequence: Synthetic oligonucleotide
uauaggaaucucucuuccu

SEQ ID NO: 2008885 - RNA, 19 nt, Artificial Sequence
  Description of Artificial Sequence: Synthetic oligonucleotide
ugauaugcccauuuugcuu

SEQ ID NO: 2008886 - RNA, 19 nt, Artificial Sequence
  Description of Artificial Sequence: Synthetic oligonucleotide
uggcucaaccuuuuaauau

SEQ ID NO: 2008887 - RNA, 19 nt, Artificial Sequence
  Description of Artificial Sequence: Synthetic oligonucleotide
agacucgaugcacuauagg

SEQ ID NO: 2008888 - RNA, 19 nt, Artificial Sequence
  Description of Artificial Sequence: Synthetic oligonucleotide
acuuaugaccucaaugugu

SEQ ID NO: 2008889 - RNA, 19 nt, Artificial Sequence
  Description of Artificial Sequence: Synthetic oligonucleotide
cagaucauuagugcugagg

SEQ ID NO: 2008890 - RNA, 19 nt, Artificial Sequence
  Description of Artificial Sequence: Synthetic oligonucleotide
aagaagcgccaacaugugu

SEQ ID NO: 2008891 - RNA, 19 nt, Artificial Sequence
  Description of Artificial Sequence: Synthetic oligonucleotide
uguaggcacuuuagaagug

SEQ ID NO: 2008892 - RNA, 19 nt, Artificial Sequence
  Description of Artificial Sequence: Synthetic oligonucleotide
gaacgcgacaacgagcagc

SEQ ID NO: 2008893 - RNA, 19 nt, Artificial Sequence
  Description of Artificial Sequence: Synthetic oligonucleotide
ggagcaauagaaucaccag

SEQ ID NO: 2008894 - RNA, 19 nt, Artificial Sequence
  Description of Artificial Sequence: Synthetic oligonucleotide
augugugucuccaaauauc

SEQ ID NO: 2008895 - RNA, 19 nt, Artificial Sequence
  Description of Artificial Sequence: Synthetic oligonucleotide
aggagcaauagaaucacca

SEQ ID NO: 2008896 - RNA, 19 nt, Artificial Sequence
  Description of Artificial Sequence: Synthetic oligonucleotide
ggagacaaucauuccaaag

SEQ ID NO: 2008897 - RNA, 19 nt, Artificial Sequence
  Description of Artificial Sequence: Synthetic oligonucleotide
caucuagaaaaucuagaga

SEQ ID NO: 2008898 - RNA, 19 nt, Artificial Sequence
  Description of Artificial Sequence: Synthetic oligonucleotide
ucaacucgguucgugagga

SEQ ID NO: 2008899 - RNA, 19 nt, Artificial Sequence
  Description of Artificial Sequence: Synthetic oligonucleotide
gcauuauuaucuccuuugg

SEQ ID NO: 2008900 - RNA, 19 nt, Artificial Sequence
  Description of Artificial Sequence: Synthetic oligonucleotide
uugcuuuucauggaucuuc

SEQ ID NO: 2008901 - RNA, 19 nt, Artificial Sequence
  Description of Artificial Sequence: Synthetic oligonucleotide
gaacaaauccccucgcucu

SEQ ID NO: 2008902 - RNA, 19 nt, Artificial Sequence
  Description of Artificial Sequence: Synthetic oligonucleotide
acuuccgguuaucaccauc

SEQ ID NO: 2008903 - RNA, 19 nt, Artificial Sequence
  Description of Artificial Sequence: Synthetic oligonucleotide
aucaucuagaaaaucuaga

SEQ ID NO: 2008904 - RNA, 19 nt, Artificial Sequence
  Description of Artificial Sequence: Synthetic oligonucleotide
cuuagguguggaaacagaa

SEQ ID NO: 2008905 - RNA, 19 nt, Artificial Sequence
  Description of Artificial Sequence: Synthetic oligonucleotide
gaggucuccucugugaaac

SEQ ID NO: 2008906 - RNA, 19 nt, Artificial Sequence
  Description of Artificial Sequence: Synthetic oligonucleotide
aacuugauaugcccauuuu

SEQ ID NO: 2008907 - RNA, 19 nt, Artificial Sequence
  Description of Artificial Sequence: Synthetic oligonucleotide
uauccgccaaucacagacc

SEQ ID NO: 2008908 - RNA, 19 nt, Artificial Sequence
  Description of Artificial Sequence: Synthetic oligonucleotide
caaaccagugcuaccaaga

SEQ ID NO: 2008909 - RNA, 19 nt, Artificial Sequence
  Description of Artificial Sequence: Synthetic oligonucleotide
aagacucgaugcacuauag

SEQ ID NO: 2008910 - RNA, 19 nt, Artificial Sequence
  Description of Artificial Sequence: Synthetic oligonucleotide
cuuccgguuaucaccauca

SEQ ID NO: 2008911 - RNA, 19 nt, Artificial Sequence
  Description of Artificial Sequence: Synthetic oligonucleotide
gugaaagagugacaaugac

SEQ ID NO: 2008912 - RNA, 19 nt, Artificial Sequence
  Description of Artificial Sequence: Synthetic oligonucleotide
ccaaauauccgccaaucac

SEQ ID NO: 2008913 - RNA, 19 nt, Artificial Sequence
  Description of Artificial Sequence: Synthetic oligonucleotide
aggaucuacuccaaacauc

SEQ ID NO: 2008914 - RNA, 19 nt, Artificial Sequence
  Description of Artificial Sequence: Synthetic oligonucleotide
uccagaucauuagugcuga

SEQ ID NO: 2008915 - RNA, 19 nt, Artificial Sequence
  Description of Artificial Sequence: Synthetic oligonucleotide
uuacucacgauggaccagu

SEQ ID NO: 2008916 - RNA, 19 nt, Artificial Sequence
  Description of Artificial Sequence: Synthetic oligonucleotide
ugggugcacuccauggugc

SEQ ID NO: 2008917 - RNA, 19 nt, Artificial Sequence
  Description of Artificial Sequence: Synthetic oligonucleotide
caggugugaacucacucac

SEQ ID NO: 2008918 - RNA, 19 nt, Artificial Sequence
  Description of Artificial Sequence: Synthetic oligonucleotide
acucacgauggaccaguac

SEQ ID NO: 2008919 - RNA, 19 nt, Artificial Sequence
  Description of Artificial Sequence: Synthetic oligonucleotide
auagucauucaugaggauu

SEQ ID NO: 2008920 - RNA, 19 nt, Artificial Sequence
  Description of Artificial Sequence: Synthetic oligonucleotide
uuauagaggccucggucau

SEQ ID NO: 2008921 - RNA, 19 nt, Artificial Sequence
  Description of Artificial Sequence: Synthetic oligonucleotide
ugcacccgcccacacagcc

SEQ ID NO: 2008922 - RNA, 19 nt, Artificial Sequence
  Description of Artificial Sequence: Synthetic oligonucleotide
cuucuuacucacgauggac

SEQ ID NO: 2008923 - RNA, 19 nt, Artificial Sequence
  Description of Artificial Sequence: Synthetic oligonucleotide
ccacccuacaguaaggaag

SEQ ID NO: 2008924 - RNA, 19 nt, Artificial Sequence
  Description of Artificial Sequence: Synthetic oligonucleotide
uaagacuuaugaccucaau

SEQ ID NO: 2008925 - RNA, 19 nt, Artificial Sequence
  Description of Artificial Sequence: Synthetic oligonucleotide
aauauccgccaaucacaga

SEQ ID NO: 2008926 - RNA, 19 nt, Artificial Sequence
  Description of Artificial Sequence: Synthetic oligonucleotide
cugaggagacaaucauucc

SEQ ID NO: 2008927 - RNA, 19 nt, Artificial Sequence
  Description of Artificial Sequence: Synthetic oligonucleotide
auccugugauugaaagucc

SEQ ID NO: 2008928 - RNA, 19 nt, Artificial Sequence
  Description of Artificial Sequence: Synthetic oligonucleotide
gauaugcccauuuugcuuu

SEQ ID NO: 2008929 - RNA, 19 nt, Artificial Sequence
  Description of Artificial Sequence: Synthetic oligonucleotide
caguacaaauaaacccagc

SEQ ID NO: 2008930 - RNA, 19 nt, Artificial Sequence
  Description of Artificial Sequence: Synthetic oligonucleotide
ugugugccacccuacagua

SEQ ID NO: 2008931 - RNA, 19 nt, Artificial Sequence
  Description of Artificial Sequence: Synthetic oligonucleotide
augcaaaccagugcuacca

SEQ ID NO: 2008932 - RNA, 19 nt, Artificial Sequence
  Description of Artificial Sequence: Synthetic oligonucleotide
uggugagauggagaacgcg

SEQ ID NO: 2008933 - RNA, 19 nt, Artificial Sequence
  Description of Artificial Sequence: Synthetic oligonucleotide
accacuacaauuggacucu

SEQ ID NO: 2008934 - RNA, 19 nt, Artificial Sequence
  Description of Artificial Sequence: Synthetic oligonucleotide
cucguaugggaucuucaac

SEQ ID NO: 2008935 - RNA, 19 nt, Artificial Sequence
  Description of Artificial Sequence: Synthetic oligonucleotide
agcgccaacaugugugucu

SEQ ID NO: 2008936 - RNA, 19 nt, Artificial Sequence
  Description of Artificial Sequence: Synthetic oligonucleotide
ucucacuuccgguuaucac

SEQ ID NO: 2008937 - RNA, 19 nt, Artificial Sequence
  Description of Artificial Sequence: Synthetic oligonucleotide
ugguaguauagcugccucu

SEQ ID NO: 2008938 - RNA, 19 nt, Artificial Sequence
  Description of Artificial Sequence: Synthetic oligonucleotide
acgauggaccaguacaaau

SEQ ID NO: 2008939 - RNA, 19 nt, Artificial Sequence
  Description of Artificial Sequence: Synthetic oligonucleotide
acuucuuacucacgaugga

SEQ ID NO: 2008940 - RNA, 19 nt, Artificial Sequence
  Description of Artificial Sequence: Synthetic oligonucleotide
acugagcaccacuacaauu

SEQ ID NO: 2008941 - RNA, 19 nt, Artificial Sequence
  Description of Artificial Sequence: Synthetic oligonucleotide
aggaacaaauccccucgcu

SEQ ID NO: 2008942 - RNA, 19 nt, Artificial Sequence
  Description of Artificial Sequence: Synthetic oligonucleotide
uucaagacucgaugcacua

SEQ ID NO: 2008943 - RNA, 19 nt, Artificial Sequence
  Description of Artificial Sequence: Synthetic oligonucleotide
ucgguucgugaggaaaagg

SEQ ID NO: 2008944 - RNA, 19 nt, Artificial Sequence
  Description of Artificial Sequence: Synthetic oligonucleotide
uggacucucacuuccgguu

SEQ ID NO: 2008945 - RNA, 19 nt, Artificial Sequence
  Description of Artificial Sequence: Synthetic oligonucleotide
gaggagacaaucauuccaa

SEQ ID NO: 2008946 - RNA, 19 nt, Artificial Sequence
  Description of Artificial Sequence: Synthetic oligonucleotide
augacaggugugaacucac

SEQ ID NO: 2008947 - RNA, 19 nt, Artificial Sequence
  Description of Artificial Sequence: Synthetic oligonucleotide
ugucuccaaauauccgcca

SEQ ID NO: 2008948 - RNA, 19 nt, Artificial Sequence
  Description of Artificial Sequence: Synthetic oligonucleotide
acucguaugggaucuucaa

SEQ ID NO: 2008949 - RNA, 19 nt, Artificial Sequence
  Description of Artificial Sequence: Synthetic oligonucleotide
ccaauauaaggaacaaauc

SEQ ID NO: 2008950 - RNA, 19 nt, Artificial Sequence
  Description of Artificial Sequence: Synthetic oligonucleotide
cagccuuagguguggaaac

SEQ ID NO: 2008951 - RNA, 19 nt, Artificial Sequence
  Description of Artificial Sequence: Synthetic oligonucleotide
uuaugaccucaaugugugc

SEQ ID NO: 2008952 - RNA, 19 nt, Artificial Sequence
  Description of Artificial Sequence: Synthetic oligonucleotide
ggaccaguacaaauaaacc

SEQ ID NO: 2008953 - RNA, 19 nt, Artificial Sequence
  Description of Artificial Sequence: Synthetic oligonucleotide
caucuuccaggaacagugc

SEQ ID NO: 2008954 - RNA, 19 nt, Artificial Sequence
  Description of Artificial Sequence: Synthetic oligonucleotide
uuccgguuaucaccaucag

SEQ ID NO: 2008955 - RNA, 19 nt, Artificial Sequence
  Description of Artificial Sequence: Synthetic oligonucleotide
uuggacucucacuuccggu

SEQ ID NO: 2008956 - RNA, 19 nt, Artificial Sequence
  Description of Artificial Sequence: Synthetic oligonucleotide
uuccaauauaaggaacaaa

SEQ ID NO: 2008957 - RNA, 19 nt, Artificial Sequence
  Description of Artificial Sequence: Synthetic oligonucleotide
ucgaugcacuauaggaauc

SEQ ID NO: 2008958 - RNA, 19 nt, Artificial Sequence
  Description of Artificial Sequence: Synthetic oligonucleotide
aaaacuugauaugcccauu

SEQ ID NO: 2008959 - RNA, 19 nt, Artificial Sequence
  Description of Artificial Sequence: Synthetic oligonucleotide
ggauagucauucaugagga

SEQ ID NO: 2008960 - RNA, 19 nt, Artificial Sequence
  Description of Artificial Sequence: Synthetic oligonucleotide
acagccuuagguguggaaa

SEQ ID NO: 2008961 - RNA, 19 nt, Artificial Sequence
  Description of Artificial Sequence: Synthetic oligonucleotide
gcugaggagacaaucauuc

SEQ ID NO: 2008962 - RNA, 19 nt, Artificial Sequence
  Description of Artificial Sequence: Synthetic oligonucleotide
gagauggagaacgcgacaa

SEQ ID NO: 2008963 - RNA, 19 nt, Artificial Sequence
  Description of Artificial Sequence: Synthetic oligonucleotide
auuccaauauaaggaacaa

SEQ ID NO: 2008964 - RNA, 19 nt, Artificial Sequence
  Description of Artificial Sequence: Synthetic oligonucleotide
aguuuaaaacuugguagua

SEQ ID NO: 2008965 - RNA, 19 nt, Artificial Sequence
  Description of Artificial Sequence: Synthetic oligonucleotide
uccugaaaacaacgauuuc

SEQ ID NO: 2008966 - RNA, 19 nt, Artificial Sequence
  Description of Artificial Sequence: Synthetic oligonucleotide
aauccccucgcucucccua

SEQ ID NO: 2008967 - RNA, 19 nt, Artificial Sequence
  Description of Artificial Sequence: Synthetic oligonucleotide
auccgccaaucacagacca

SEQ ID NO: 2008968 - RNA, 19 nt, Artificial Sequence
  Description of Artificial Sequence: Synthetic oligonucleotide
ggaacaaauccccucgcuc

SEQ ID NO: 2008969 - RNA, 19 nt, Artificial Sequence
  Description of Artificial Sequence: Synthetic oligonucleotide
ugcugaggagacaaucauu

SEQ ID NO: 2008970 - RNA, 19 nt, Artificial Sequence
  Description of Artificial Sequence: Synthetic oligonucleotide
ccgcacaucaucuagaaaa

SEQ ID NO: 2008971 - RNA, 19 nt, Artificial Sequence
  Description of Artificial Sequence: Synthetic oligonucleotide
ccaguacaaauaaacccag

SEQ ID NO: 2008972 - RNA, 19 nt, Artificial Sequence
  Description of Artificial Sequence: Synthetic oligonucleotide
guaguauagcugccucuug

SEQ ID NO: 2008973 - RNA, 19 nt, Artificial Sequence
  Description of Artificial Sequence: Synthetic oligonucleotide
cccuacaacaucuuucuuc

SEQ ID NO: 2008974 - RNA, 19 nt, Artificial Sequence
  Description of Artificial Sequence: Synthetic oligonucleotide
acucacacagagcugucuu

SEQ ID NO: 2008975 - RNA, 19 nt, Artificial Sequence
  Description of Artificial Sequence: Synthetic oligonucleotide
auggugagauggagaacgc

SEQ ID NO: 2008976 - RNA, 19 nt, Artificial Sequence
  Description of Artificial Sequence: Synthetic oligonucleotide
uccccuugggugcacucca

SEQ ID NO: 2008977 - RNA, 19 nt, Artificial Sequence
  Description of Artificial Sequence: Synthetic oligonucleotide
cgagcagccaagaaggagc

SEQ ID NO: 2008978 - RNA, 19 nt, Artificial Sequence
  Description of Artificial Sequence: Synthetic oligonucleotide
cuccaaacauccagcaaca

SEQ ID NO: 2008979 - RNA, 19 nt, Artificial Sequence
  Description of Artificial Sequence: Synthetic oligonucleotide
gguucgugaggaaaaggag

SEQ ID NO: 2008980 - RNA, 19 nt, Artificial Sequence
  Description of Artificial Sequence: Synthetic oligonucleotide
gaggauugucacaauucca

SEQ ID NO: 2008981 - RNA, 19 nt, Artificial Sequence
  Description of Artificial Sequence: Synthetic oligonucleotide
acucgaugcacuauaggaa

SEQ ID NO: 2008982 - RNA, 19 nt, Artificial Sequence
  Description of Artificial Sequence: Synthetic oligonucleotide
uccgccaaucacagaccag

SEQ ID NO: 2008983 - RNA, 19 nt, Artificial Sequence
  Description of Artificial Sequence: Synthetic oligonucleotide
acacgggccgggcucacag

SEQ ID NO: 2008984 - RNA, 19 nt, Artificial Sequence
  Description of Artificial Sequence: Synthetic oligonucleotide
cugccucuuguucauccgc

SEQ ID NO: 2008985 - RNA, 19 nt, Artificial Sequence
  Description of Artificial Sequence: Synthetic oligonucleotide
cagccgacuucuuacucac

SEQ ID NO: 2008986 - RNA, 19 nt, Artificial Sequence
  Description of Artificial Sequence: Synthetic oligonucleotide
ccuucuauccugaaaacaa

SEQ ID NO: 2008987 - RNA, 19 nt, Artificial Sequence
  Description of Artificial Sequence: Synthetic oligonucleotide
acgagcagccaagaaggag

SEQ ID NO: 2008988 - RNA, 19 nt, Artificial Sequence
  Description of Artificial Sequence: Synthetic oligonucleotide
cuccucugugaaacgcagg

SEQ ID NO: 2008989 - RNA, 19 nt, Artificial Sequence
  Description of Artificial Sequence: Synthetic oligonucleotide
gcauacuuaaauuuaggau

SEQ ID NO: 2008990 - RNA, 19 nt, Artificial Sequence
  Description of Artificial Sequence: Synthetic oligonucleotide
ccuugggugcacuccaugg

SEQ ID NO: 2008991 - RNA, 19 nt, Artificial Sequence
  Description of Artificial Sequence: Synthetic oligonucleotide
cucacacagagcugucuuc

SEQ ID NO: 2008992 - RNA, 19 nt, Artificial Sequence
  Description of Artificial Sequence: Synthetic oligonucleotide
cuaccaagaagcgccaaca

SEQ ID NO: 2008993 - RNA, 19 nt, Artificial Sequence
  Description of Artificial Sequence: Synthetic oligonucleotide
ugcccauuuugcuuuucau

SEQ ID NO: 2008994 - RNA, 19 nt, Artificial Sequence
  Description of Artificial Sequence: Synthetic oligonucleotide
ugcagccgacuucuuacuc

SEQ ID NO: 2008995 - RNA, 19 nt, Artificial Sequence
  Description of Artificial Sequence: Synthetic oligonucleotide
gugaaacgcaggcuccaug

SEQ ID NO: 2008996 - RNA, 19 nt, Artificial Sequence
  Description of Artificial Sequence: Synthetic oligonucleotide
ccauggugcacaugcaccc

SEQ ID NO: 2008997 - RNA, 19 nt, Artificial Sequence
  Description of Artificial Sequence: Synthetic oligonucleotide
gugagauggagaacgcgac

SEQ ID NO: 2008998 - RNA, 19 nt, Artificial Sequence
  Description of Artificial Sequence: Synthetic oligonucleotide
auggagaacgcgacaacga

SEQ ID NO: 2008999 - RNA, 19 nt, Artificial Sequence
  Description of Artificial Sequence: Synthetic oligonucleotide
aggaggucuccucugugaa

SEQ ID NO: 2009000 - RNA, 19 nt, Artificial Sequence
  Description of Artificial Sequence: Synthetic oligonucleotide
guaggcacuuuagaaguga

SEQ ID NO: 2009001 - RNA, 19 nt, Artificial Sequence
  Description of Artificial Sequence: Synthetic oligonucleotide
ggugagauggagaacgcga

SEQ ID NO: 2009002 - RNA, 19 nt, Artificial Sequence
  Description of Artificial Sequence: Synthetic oligonucleotide
guacugcauacuuaaauuu

SEQ ID NO: 2009003 - RNA, 19 nt, Artificial Sequence
  Description of Artificial Sequence: Synthetic oligonucleotide
gaacucuguaggcacuuua

SEQ ID NO: 2009004 - RNA, 19 nt, Artificial Sequence
  Description of Artificial Sequence: Synthetic oligonucleotide
augcacuauaggaaucucu

SEQ ID NO: 2009005 - RNA, 19 nt, Artificial Sequence
  Description of Artificial Sequence: Synthetic oligonucleotide
aggccucggucaucaacgg

SEQ ID NO: 2009006 - RNA, 19 nt, Artificial Sequence
  Description of Artificial Sequence: Synthetic oligonucleotide
ccaagaagcgccaacaugu

SEQ ID NO: 2009007 - RNA, 19 nt, Artificial Sequence
  Description of Artificial Sequence: Synthetic oligonucleotide
cauggugcacaugcacccg

SEQ ID NO: 2009008 - RNA, 19 nt, Artificial Sequence
  Description of Artificial Sequence: Synthetic oligonucleotide
agugaagcuuggcuucaaa

SEQ ID NO: 2009009 - RNA, 19 nt, Artificial Sequence
  Description of Artificial Sequence: Synthetic oligonucleotide
caagacucgaugcacuaua

SEQ ID NO: 2009010 - RNA, 19 nt, Artificial Sequence
  Description of Artificial Sequence: Synthetic oligonucleotide
aagcgccaacauguguguc

SEQ ID NO: 2009011 - RNA, 19 nt, Artificial Sequence
  Description of Artificial Sequence: Synthetic oligonucleotide
aaauccccucgcucucccu

SEQ ID NO: 2009012 - RNA, 19 nt, Artificial Sequence
  Description of Artificial Sequence: Synthetic oligonucleotide
gaugcacuauaggaaucuc

SEQ ID NO: 2009013 - RNA, 19 nt, Artificial Sequence
  Description of Artificial Sequence: Synthetic oligonucleotide
ugccacccuacaguaagga

SEQ ID NO: 2009014 - RNA, 19 nt, Artificial Sequence
  Description of Artificial Sequence: Synthetic oligonucleotide
gaagugaagcuuggcuuca

SEQ ID NO: 2009015 - RNA, 19 nt, Artificial Sequence
  Description of Artificial Sequence: Synthetic oligonucleotide
acgggccgggcucacagug

SEQ ID NO: 2009016 - RNA, 19 nt, Artificial Sequence
  Description of Artificial Sequence: Synthetic oligonucleotide
cauuauuaucuccuuuggu

SEQ ID NO: 2009017 - RNA, 19 nt, Artificial Sequence
  Description of Artificial Sequence: Synthetic oligonucleotide
cagugcuaccaagaagcgc

SEQ ID NO: 2009018 - RNA, 19 nt, Artificial Sequence
  Description of Artificial Sequence: Synthetic oligonucleotide
cucccuacaacaucuuucu

SEQ ID NO: 2009019 - RNA, 19 nt, Artificial Sequence
  Description of Artificial Sequence: Synthetic oligonucleotide
gacaacgagcagccaagaa

SEQ ID NO: 2009020 - RNA, 19 nt, Artificial Sequence
  Description of Artificial Sequence: Synthetic oligonucleotide
gguguggaaacagaaacua

SEQ ID NO: 2009021 - RNA, 19 nt, Artificial Sequence
  Description of Artificial Sequence: Synthetic oligonucleotide
ggaaggaugacagguguga

SEQ ID NO: 2009022 - RNA, 19 nt, Artificial Sequence
  Description of Artificial Sequence: Synthetic oligonucleotide
aaaguccccuugggugcac

SEQ ID NO: 2009023 - RNA, 19 nt, Artificial Sequence
  Description of Artificial Sequence: Synthetic oligonucleotide
cucuuguucauccgccgca

SEQ ID NO: 2009024 - RNA, 19 nt, Artificial Sequence
  Description of Artificial Sequence: Synthetic oligonucleotide
cuacaauuggacucucacu

SEQ ID NO: 2009025 - RNA, 19 nt, Artificial Sequence
  Description of Artificial Sequence: Synthetic oligonucleotide
ugggaucuucaacucgguu

SEQ ID NO: 2009026 - RNA, 19 nt, Artificial Sequence
  Description of Artificial Sequence: Synthetic oligonucleotide
ccgccaaucacagaccagg

SEQ ID NO: 2009027 - RNA, 19 nt, Artificial Sequence
  Description of Artificial Sequence: Synthetic oligonucleotide
uuugcuuuucauggaucuu

SEQ ID NO: 2009028 - RNA, 19 nt, Artificial Sequence
  Description of Artificial Sequence: Synthetic oligonucleotide
cucgaugcacuauaggaau

SEQ ID NO: 2009029 - RNA, 19 nt, Artificial Sequence
  Description of Artificial Sequence: Synthetic oligonucleotide
acaugcacccgcccacaca

SEQ ID NO: 2009030 - RNA, 19 nt, Artificial Sequence
  Description of Artificial Sequence: Synthetic oligonucleotide
ugaccucaaugugugccac

SEQ ID NO: 2009031 - RNA, 19 nt, Artificial Sequence
  Description of Artificial Sequence: Synthetic oligonucleotide
acgcaggcuccaugcugcc

SEQ ID NO: 2009032 - RNA, 19 nt, Artificial Sequence
  Description of Artificial Sequence: Synthetic oligonucleotide
gccccuuccagaucauuag

SEQ ID NO: 2009033 - RNA, 19 nt, Artificial Sequence
  Description of Artificial Sequence: Synthetic oligonucleotide
cucgguucgugaggaaaag

SEQ ID NO: 2009034 - RNA, 19 nt, Artificial Sequence
  Description of Artificial Sequence: Synthetic oligonucleotide
ggcucaaccuuuuaauaua

SEQ ID NO: 2009035 - RNA, 19 nt, Artificial Sequence
  Description of Artificial Sequence: Synthetic oligonucleotide
agaacgcgacaacgagcag

SEQ ID NO: 2009036 - RNA, 19 nt, Artificial Sequence
  Description of Artificial Sequence: Synthetic oligonucleotide
gaagcgccaacaugugugu

SEQ ID NO: 2009037 - RNA, 19 nt, Artificial Sequence
  Description of Artificial Sequence: Synthetic oligonucleotide
ugccacacgggccgggcuc

SEQ ID NO: 2009038 - RNA, 19 nt, Artificial Sequence
  Description of Artificial Sequence: Synthetic oligonucleotide
gcuaccaagaagcgccaac

SEQ ID NO: 2009039 - RNA, 19 nt, Artificial Sequence
  Description of Artificial Sequence: Synthetic oligonucleotide
aacgagcagccaagaagga

SEQ ID NO: 2009040 - RNA, 19 nt, Artificial Sequence
  Description of Artificial Sequence: Synthetic oligonucleotide
acggcauuauuaucuccuu

SEQ ID NO: 2009041 - RNA, 19 nt, Artificial Sequence
  Description of Artificial Sequence: Synthetic oligonucleotide
gccgacuucuuacucacga

SEQ ID NO: 2009042 - RNA, 19 nt, Artificial Sequence
  Description of Artificial Sequence: Synthetic oligonucleotide
ccaauguuguccuuguuua

SEQ ID NO: 2009043 - RNA, 19 nt, Artificial Sequence
  Description of Artificial Sequence: Synthetic oligonucleotide
agucauucaugaggauugu

SEQ ID NO: 2009044 - RNA, 19 nt, Artificial Sequence
  Description of Artificial Sequence: Synthetic oligonucleotide
cacuauaggaaucucucuu

SEQ ID NO: 2009045 - RNA, 19 nt, Artificial Sequence
  Description of Artificial Sequence: Synthetic oligonucleotide
ccagugcuaccaagaagcg

SEQ ID NO: 2009046 - RNA, 19 nt, Artificial Sequence
  Description of Artificial Sequence: Synthetic oligonucleotide
cacucguaugggaucuuca

SEQ ID NO: 2009047 - RNA, 19 nt, Artificial Sequence
  Description of Artificial Sequence: Synthetic oligonucleotide
ugugaaacgcaggcuccau

SEQ ID NO: 2009048 - RNA, 19 nt, Artificial Sequence
  Description of Artificial Sequence: Synthetic oligonucleotide
acucucacuuccgguuauc

SEQ ID NO: 2009049 - RNA, 19 nt, Artificial Sequence
  Description of Artificial Sequence: Synthetic oligonucleotide
ccaggaucuacuccaaaca

SEQ ID NO: 2009050 - RNA, 19 nt, Artificial Sequence
  Description of Artificial Sequence: Synthetic oligonucleotide
agccuuagguguggaaaca

SEQ ID NO: 2009051 - RNA, 19 nt, Artificial Sequence
  Description of Artificial Sequence: Synthetic oligonucleotide
acucgguucgugaggaaaa

SEQ ID NO: 2009052 - RNA, 19 nt, Artificial Sequence
  Description of Artificial Sequence: Synthetic oligonucleotide
gugcacaugcacccgccca

SEQ ID NO: 2009053 - RNA, 19 nt, Artificial Sequence
  Description of Artificial Sequence: Synthetic oligonucleotide
ggaaccgcugccacacggg

SEQ ID NO: 2009054 - RNA, 19 nt, Artificial Sequence
  Description of Artificial Sequence: Synthetic oligonucleotide
uauagaggccucggucauc

SEQ ID NO: 2009055 - RNA, 19 nt, Artificial Sequence
  Description of Artificial Sequence: Synthetic oligonucleotide
aaucacagaccaggaucua

SEQ ID NO: 2009056 - RNA, 19 nt, Artificial Sequence
  Description of Artificial Sequence: Synthetic oligonucleotide
gaaacgcaggcuccaugcu

SEQ ID NO: 2009057 - RNA, 19 nt, Artificial Sequence
  Description of Artificial Sequence: Synthetic oligonucleotide
gaucuacuccaaacaucca

SEQ ID NO: 2009058 - RNA, 19 nt, Artificial Sequence
  Description of Artificial Sequence: Synthetic oligonucleotide
gcgacaacgagcagccaag

SEQ ID NO: 2009059 - RNA, 19 nt, Artificial Sequence
  Description of Artificial Sequence: Synthetic oligonucleotide
cgacuucuuacucacgaug

SEQ ID NO: 2009060 - RNA, 19 nt, Artificial Sequence
  Description of Artificial Sequence: Synthetic oligonucleotide
gcagccgacuucuuacuca

SEQ ID NO: 2009061 - RNA, 19 nt, Artificial Sequence
  Description of Artificial Sequence: Synthetic oligonucleotide
gcacuuuagaagugaagcu

SEQ ID NO: 2009062 - RNA, 19 nt, Artificial Sequence
  Description of Artificial Sequence: Synthetic oligonucleotide
caugaggauugucacaauu

SEQ ID NO: 2009063 - RNA, 19 nt, Artificial Sequence
  Description of Artificial Sequence: Synthetic oligonucleotide
ucgugaggaaaaggagguc

SEQ ID NO: 2009064 - RNA, 19 nt, Artificial Sequence
  Description of Artificial Sequence: Synthetic oligonucleotide
gugccacccuacaguaagg

SEQ ID NO: 2009065 - RNA, 19 nt, Artificial Sequence
  Description of Artificial Sequence: Synthetic oligonucleotide
uacucacgauggaccagua

SEQ ID NO: 2009066 - RNA, 19 nt, Artificial Sequence
  Description of Artificial Sequence: Synthetic oligonucleotide
aagugaagcuuggcuucaa

SEQ ID NO: 2009067 - RNA, 19 nt, Artificial Sequence
  Description of Artificial Sequence: Synthetic oligonucleotide
ucccuacaacaucuuucuu

SEQ ID NO: 2009068 - RNA, 19 nt, Artificial Sequence
  Description of Artificial Sequence: Synthetic oligonucleotide
gccuuagguguggaaacag

SEQ ID NO: 2009069 - RNA, 19 nt, Artificial Sequence
  Description of Artificial Sequence: Synthetic oligonucleotide
cugugauugaaaguccccu

SEQ ID NO: 2009070 - RNA, 19 nt, Artificial Sequence
  Description of Artificial Sequence: Synthetic oligonucleotide
cucuagccaauguuguccu

SEQ ID NO: 2009071 - RNA, 19 nt, Artificial Sequence
  Description of Artificial Sequence: Synthetic oligonucleotide
caggaucuacuccaaacau

SEQ ID NO: 2009072 - RNA, 19 nt, Artificial Sequence
  Description of Artificial Sequence: Synthetic oligonucleotide
ucuagccaauguuguccuu

SEQ ID NO: 2009073 - RNA, 19 nt, Artificial Sequence
  Description of Artificial Sequence: Synthetic oligonucleotide
cuugguaguauagcugccu

SEQ ID NO: 2009074 - RNA, 19 nt, Artificial Sequence
  Description of Artificial Sequence: Synthetic oligonucleotide
auaugcccauuuugcuuuu

SEQ ID NO: 2009075 - RNA, 19 nt, Artificial Sequence
  Description of Artificial Sequence: Synthetic oligonucleotide
ggugcacaugcacccgccc

SEQ ID NO: 2009076 - RNA, 19 nt, Artificial Sequence
  Description of Artificial Sequence: Synthetic oligonucleotide
guccccuugggugcacucc

SEQ ID NO: 2009077 - RNA, 19 nt, Artificial Sequence
  Description of Artificial Sequence: Synthetic oligonucleotide
cucucacuuccgguuauca

SEQ ID NO: 2009078 - RNA, 19 nt, Artificial Sequence
  Description of Artificial Sequence: Synthetic oligonucleotide
agccccuuccagaucauua

SEQ ID NO: 2009079 - RNA, 19 nt, Artificial Sequence
  Description of Artificial Sequence: Synthetic oligonucleotide
uaugcccauuuugcuuuuc

SEQ ID NO: 2009080 - RNA, 19 nt, Artificial Sequence
  Description of Artificial Sequence: Synthetic oligonucleotide
uucauccgccgcacaucau

SEQ ID NO: 2009081 - RNA, 19 nt, Artificial Sequence
  Description of Artificial Sequence: Synthetic oligonucleotide
cugaaaaguuaagacuuau

SEQ ID NO: 2009082 - RNA, 19 nt, Artificial Sequence
  Description of Artificial Sequence: Synthetic oligonucleotide
auggaccaguacaaauaaa

SEQ ID NO: 2009083 - RNA, 19 nt, Artificial Sequence
  Description of Artificial Sequence: Synthetic oligonucleotide
aggugugaacucacucaca

SEQ ID NO: 2009084 - RNA, 19 nt, Artificial Sequence
  Description of Artificial Sequence: Synthetic oligonucleotide
gccaacaugugugucucca

SEQ ID NO: 2009085 - RNA, 19 nt, Artificial Sequence
  Description of Artificial Sequence: Synthetic oligonucleotide
aaguccccuugggugcacu

SEQ ID NO: 2009086 - RNA, 19 nt, Artificial Sequence
  Description of Artificial Sequence: Synthetic oligonucleotide
acaguacugcauacuuaaa

SEQ ID NO: 2009087 - RNA, 19 nt, Artificial Sequence
  Description of Artificial Sequence: Synthetic oligonucleotide
ccuuagguguggaaacaga

SEQ ID NO: 2009088 - RNA, 19 nt, Artificial Sequence
  Description of Artificial Sequence: Synthetic oligonucleotide
cugugaaacgcaggcucca

SEQ ID NO: 2009089 - RNA, 19 nt, Artificial Sequence
  Description of Artificial Sequence: Synthetic oligonucleotide
gccaauguuguccuuguuu

SEQ ID NO: 2009090 - RNA, 19 nt, Artificial Sequence
  Description of Artificial Sequence: Synthetic oligonucleotide
augcacccgcccacacagc

SEQ ID NO: 2009091 - RNA, 19 nt, Artificial Sequence
  Description of Artificial Sequence: Synthetic oligonucleotide
ggauugucacaauuccaau

SEQ ID NO: 2009092 - RNA, 19 nt, Artificial Sequence
  Description of Artificial Sequence: Synthetic oligonucleotide
gacucucacuuccgguuau

SEQ ID NO: 2009093 - RNA, 19 nt, Artificial Sequence
  Description of Artificial Sequence: Synthetic oligonucleotide
cgauggaccaguacaaaua

SEQ ID NO: 2009094 - RNA, 19 nt, Artificial Sequence
  Description of Artificial Sequence: Synthetic oligonucleotide
cucgcucucccuacaacau

SEQ ID NO: 2009095 - RNA, 19 nt, Artificial Sequence
  Description of Artificial Sequence: Synthetic oligonucleotide
gguaguauagcugccucuu

SEQ ID NO: 2009096 - RNA, 19 nt, Artificial Sequence
  Description of Artificial Sequence: Synthetic oligonucleotide
ggccucggucaucaacggc

SEQ ID NO: 2009097 - RNA, 19 nt, Artificial Sequence
  Description of Artificial Sequence: Synthetic oligonucleotide
ggacucucacuuccgguua

SEQ ID NO: 2009098 - RNA, 19 nt, Artificial Sequence
  Description of Artificial Sequence: Synthetic oligonucleotide
gggugcacuccauggugca

SEQ ID NO: 2009099 - RNA, 19 nt, Artificial Sequence
  Description of Artificial Sequence: Synthetic oligonucleotide
ccgggcucacaguggacag

SEQ ID NO: 2009100 - RNA, 19 nt, Artificial Sequence
  Description of Artificial Sequence: Synthetic oligonucleotide
ccagaucauuagugcugag

SEQ ID NO: 2009101 - RNA, 19 nt, Artificial Sequence
  Description of Artificial Sequence: Synthetic oligonucleotide
uagaggccucggucaucaa

SEQ ID NO: 2009102 - RNA, 19 nt, Artificial Sequence
  Description of Artificial Sequence: Synthetic oligonucleotide
gccgggcucacaguggaca

SEQ ID NO: 2009103 - RNA, 19 nt, Artificial Sequence
  Description of Artificial Sequence: Synthetic oligonucleotide
gggccgggcucacagugga

SEQ ID NO: 2009104 - RNA, 19 nt, Artificial Sequence
  Description of Artificial Sequence: Synthetic oligonucleotide
cccuugggugcacuccaug

SEQ ID NO: 2009105 - RNA, 19 nt, Artificial Sequence
  Description of Artificial Sequence: Synthetic oligonucleotide
cccucgcucucccuacaac

SEQ ID NO: 2009106 - RNA, 19 nt, Artificial Sequence
  Description of Artificial Sequence: Synthetic oligonucleotide
gccaaucacagaccaggau

SEQ ID NO: 2009107 - RNA, 19 nt, Artificial Sequence
  Description of Artificial Sequence: Synthetic oligonucleotide
ccacucguaugggaucuuc

SEQ ID NO: 2009108 - RNA, 19 nt, Artificial Sequence
  Description of Artificial Sequence: Synthetic oligonucleotide
cgcgacaacgagcagccaa

SEQ ID NO: 2009109 - RNA, 19 nt, Artificial Sequence
  Description of Artificial Sequence: Synthetic oligonucleotide
gugugccacccuacaguaa

SEQ ID NO: 2009110 - RNA, 19 nt, Artificial Sequence
  Description of Artificial Sequence: Synthetic oligonucleotide
gccgcacaucaucuagaaa

SEQ ID NO: 2009111 - RNA, 19 nt, Artificial Sequence
  Description of Artificial Sequence: Synthetic oligonucleotide
ccgccgcacaucaucuaga

SEQ ID NO: 2009112 - RNA, 19 nt, Artificial Sequence
  Description of Artificial Sequence: Synthetic oligonucleotide
cgaugcacuauaggaaucu

SEQ ID NO: 2009113 - RNA, 19 nt, Artificial Sequence
  Description of Artificial Sequence: Synthetic oligonucleotide
acgcgacaacgagcagcca

SEQ ID NO: 2009114 - RNA, 19 nt, Artificial Sequence
  Description of Artificial Sequence: Synthetic oligonucleotide
ccgacuucuuacucacgau

SEQ ID NO: 2009115 - RNA, 19 nt, Artificial Sequence
  Description of Artificial Sequence: Synthetic oligonucleotide
cacgggccgggcucacagu

SEQ ID NO: 2009116 - RNA, 19 nt, Artificial Sequence
  Description of Artificial Sequence: Synthetic oligonucleotide
cacuuccgguuaucaccau

SEQ ID NO: 2009117 - RNA, 19 nt, Artificial Sequence
  Description of Artificial Sequence: Synthetic oligonucleotide
ggccgggcucacaguggac

SEQ ID NO: 2009118 - RNA, 19 nt, Artificial Sequence
  Description of Artificial Sequence: Synthetic oligonucleotide
ccccacucguaugggaucu

SEQ ID NO: 2009119 - RNA, 19 nt, Artificial Sequence
  Description of Artificial Sequence: Synthetic oligonucleotide
cgacaacgagcagccaaga

SEQ ID NO: 2009120 - RNA, 19 nt, Artificial Sequence
  Description of Artificial Sequence: Synthetic oligonucleotide
ccucaaugugugccacccu

SEQ ID NO: 2009121 - RNA, 19 nt, Artificial Sequence
  Description of Artificial Sequence: Synthetic oligonucleotide
gcacccgcccacacagccu

SEQ ID NO: 2009122 - RNA, 19 nt, Artificial Sequence
  Description of Artificial Sequence: Synthetic oligonucleotide
ccgcugccacacgggccgg

SEQ ID NO: 2009123 - RNA, 19 nt, Artificial Sequence
  Description of Artificial Sequence: Synthetic oligonucleotide
ccacacgggccgggcucac

SEQ ID NO: 2009124 - RNA, 19 nt, Artificial Sequence
  Description of Artificial Sequence: Synthetic oligonucleotide
ccccuugggugcacuccau

SEQ ID NO: 2009125 - RNA, 19 nt, Artificial Sequence
  Description of Artificial Sequence: Synthetic oligonucleotide
cccacucguaugggaucuu

SEQ ID NO: 2009126 - RNA, 19 nt, Artificial Sequence
  Description of Artificial Sequence: Synthetic oligonucleotide
auacaugacauccagcacc

SEQ ID NO: 2009127 - RNA, 19 nt, Artificial Sequence
  Description of Artificial Sequence: Synthetic oligonucleotide
acaaacauccucaucaugc

SEQ ID NO: 2009128 - RNA, 19 nt, Artificial Sequence
  Description of Artificial Sequence: Synthetic oligonucleotide
aauaugugaguuugccagc

SEQ ID NO: 2009129 - RNA, 19 nt, Artificial Sequence
  Description of Artificial Sequence: Synthetic oligonucleotide
ugcacugacaauaugugag

SEQ ID NO: 2009130 - RNA, 19 nt, Artificial Sequence
  Description of Artificial Sequence: Synthetic oligonucleotide
auuagccugagauauguac

SEQ ID NO: 2009131 - RNA, 19 nt, Artificial Sequence
  Description of Artificial Sequence: Synthetic oligonucleotide
caauaugugaguuugccag

SEQ ID NO: 2009132 - RNA, 19 nt, Artificial Sequence
  Description of Artificial Sequence: Synthetic oligonucleotide
cuuaugaacaccaaucuuc

SEQ ID NO: 2009133 - RNA, 19 nt, Artificial Sequence
  Description of Artificial Sequence: Synthetic oligonucleotide
gaacauacgugucauaacc

SEQ ID NO: 2009134 - RNA, 19 nt, Artificial Sequence
  Description of Artificial Sequence: Synthetic oligonucleotide
uccuuuaccggaaugcugg

SEQ ID NO: 2009135 - RNA, 19 nt, Artificial Sequence
  Description of Artificial Sequence: Synthetic oligonucleotide
uuugccagcacaaagugac

SEQ ID NO: 2009136 - RNA, 19 nt, Artificial Sequence
  Description of Artificial Sequence: Synthetic oligonucleotide
cugaguaucgggcugaugg

SEQ ID NO: 2009137 - RNA, 19 nt, Artificial Sequence
  Description of Artificial Sequence: Synthetic oligonucleotide
augaacaccaaucuucccg

SEQ ID NO: 2009138 - RNA, 19 nt, Artificial Sequence
  Description of Artificial Sequence: Synthetic oligonucleotide
ugagcugaguacuugacag

SEQ ID NO: 2009139 - RNA, 19 nt, Artificial Sequence
  Description of Artificial Sequence: Synthetic oligonucleotide
acuugccuagcucaaaggc

SEQ ID NO: 2009140 - RNA, 19 nt, Artificial Sequence
  Description of Artificial Sequence: Synthetic oligonucleotide
auauguacagagaagcacc

SEQ ID NO: 2009141 - RNA, 19 nt, Artificial Sequence
  Description of Artificial Sequence: Synthetic oligonucleotide
aaagagcugaguaucgggc

SEQ ID NO: 2009142 - RNA, 19 nt, Artificial Sequence
  Description of Artificial Sequence: Synthetic oligonucleotide
ucuguaggcaguauaaggu

SEQ ID NO: 2009143 - RNA, 19 nt, Artificial Sequence
  Description of Artificial Sequence: Synthetic oligonucleotide
uuuaccggaaugcugguca

SEQ ID NO: 2009144 - RNA, 19 nt, Artificial Sequence
  Description of Artificial Sequence: Synthetic oligonucleotide
auaagguacugucaugggg

SEQ ID NO: 2009145 - RNA, 19 nt, Artificial Sequence
  Description of Artificial Sequence: Synthetic oligonucleotide
uacuugacagugaaggugc

SEQ ID NO: 2009146 - RNA, 19 nt, Artificial Sequence
  Description of Artificial Sequence: Synthetic oligonucleotide
ugagauauguacagagaag

SEQ ID NO: 2009147 - RNA, 19 nt, Artificial Sequence
  Description of Artificial Sequence: Synthetic oligonucleotide
gaugaaauuagccugagau

SEQ ID NO: 2009148 - RNA, 19 nt, Artificial Sequence
  Description of Artificial Sequence: Synthetic oligonucleotide
gagauuguaagacagcgca

SEQ ID NO: 2009149 - RNA, 19 nt, Artificial Sequence
  Description of Artificial Sequence: Synthetic oligonucleotide
guauaagguacugucaugg

SEQ ID NO: 2009150 - RNA, 19 nt, Artificial Sequence
  Description of Artificial Sequence: Synthetic oligonucleotide
ugaguuugccagcacaaag

SEQ ID NO: 2009151 - RNA, 19 nt, Artificial Sequence
  Description of Artificial Sequence: Synthetic oligonucleotide
aacaagcuguuccugucac

SEQ ID NO: 2009152 - RNA, 19 nt, Artificial Sequence
  Description of Artificial Sequence: Synthetic oligonucleotide
uggagauuguaagacagcg

SEQ ID NO: 2009153 - RNA, 19 nt, Artificial Sequence
  Description of Artificial Sequence: Synthetic oligonucleotide
uguuccugucacaaaagag

SEQ ID NO: 2009154 - RNA, 19 nt, Artificial Sequence
  Description of Artificial Sequence: Synthetic oligonucleotide
caaucguacaacaccauag

SEQ ID NO: 2009155 - RNA, 19 nt, Artificial Sequence
  Description of Artificial Sequence: Synthetic oligonucleotide
ugaaagucuaggaugugga

SEQ ID NO: 2009156 - RNA, 19 nt, Artificial Sequence
  Description of Artificial Sequence: Synthetic oligonucleotide
aaucguacaacaccauagu

SEQ ID NO: 2009157 - RNA, 19 nt, Artificial Sequence
  Description of Artificial Sequence: Synthetic oligonucleotide
uaagcacugccccagucgg

SEQ ID NO: 2009158 - RNA, 19 nt, Artificial Sequence
  Description of Artificial Sequence: Synthetic oligonucleotide
uuagccugagauauguaca

SEQ ID NO: 2009159 - RNA, 19 nt, Artificial Sequence
  Description of Artificial Sequence: Synthetic oligonucleotide
aaauuagccugagauaugu

SEQ ID NO: 2009160 - RNA, 19 nt, Artificial Sequence
  Description of Artificial Sequence: Synthetic oligonucleotide
aagucuaggauguggagau

SEQ ID NO: 2009161 - RNA, 19 nt, Artificial Sequence
  Description of Artificial Sequence: Synthetic oligonucleotide
uucacucgguccuuuaccg

SEQ ID NO: 2009162 - RNA, 19 nt, Artificial Sequence
  Description of Artificial Sequence: Synthetic oligonucleotide
uugaaagucuaggaugugg

SEQ ID NO: 2009163 - RNA, 19 nt, Artificial Sequence
  Description of Artificial Sequence: Synthetic oligonucleotide
ucaagcuggcaccaucugg

SEQ ID NO: 2009164 - RNA, 19 nt, Artificial Sequence
  Description of Artificial Sequence: Synthetic oligonucleotide
uucugagacaccuucacuc

SEQ ID NO: 2009165 - RNA, 19 nt, Artificial Sequence
  Description of Artificial Sequence: Synthetic oligonucleotide
uuacuugccuagcucaaag

SEQ ID NO: 2009166 - RNA, 19 nt, Artificial Sequence
  Description of Artificial Sequence: Synthetic oligonucleotide
gucuguaggcaguauaagg

SEQ ID NO: 2009167 - RNA, 19 nt, Artificial Sequence
  Description of Artificial Sequence: Synthetic oligonucleotide
uauguacagagaagcaccc

SEQ ID NO: 2009168 - RNA, 19 nt, Artificial Sequence
  Description of Artificial Sequence: Synthetic oligonucleotide
uguaagacagcgcagcgua

SEQ ID NO: 2009169 - RNA, 19 nt, Artificial Sequence
  Description of Artificial Sequence: Synthetic oligonucleotide
acaacaccauaguaggagg

SEQ ID NO: 2009170 - RNA, 19 nt, Artificial Sequence
  Description of Artificial Sequence: Synthetic oligonucleotide
uauaagguacugucauggg

SEQ ID NO: 2009171 - RNA, 19 nt, Artificial Sequence
  Description of Artificial Sequence: Synthetic oligonucleotide
gauuguaagacagcgcagc

SEQ ID NO: 2009172 - RNA, 19 nt, Artificial Sequence
  Description of Artificial Sequence: Synthetic oligonucleotide
acagggagguaucagucac

SEQ ID NO: 2009173 - RNA, 19 nt, Artificial Sequence
  Description of Artificial Sequence: Synthetic oligonucleotide
aucaggucggugccgagcc

SEQ ID NO: 2009174 - RNA, 19 nt, Artificial Sequence
  Description of Artificial Sequence: Synthetic oligonucleotide
auuguaagacagcgcagcg

SEQ ID NO: 2009175 - RNA, 19 nt, Artificial Sequence
  Description of Artificial Sequence: Synthetic oligonucleotide
guuccugucacaaaagagc

SEQ ID NO: 2009176 - RNA, 19 nt, Artificial Sequence
  Description of Artificial Sequence: Synthetic oligonucleotide
aaagucuaggauguggaga

SEQ ID NO: 2009177 - RNA, 19 nt, Artificial Sequence
  Description of Artificial Sequence: Synthetic oligonucleotide
uuccugucacaaaagagcu

SEQ ID NO: 2009178 - RNA, 19 nt, Artificial Sequence
  Description of Artificial Sequence: Synthetic oligonucleotide
gacaauaugugaguuugcc

SEQ ID NO: 2009179 - RNA, 19 nt, Artificial Sequence
  Description of Artificial Sequence: Synthetic oligonucleotide
auuuccgggcacuugugcg

SEQ ID NO: 2009180 - RNA, 19 nt, Artificial Sequence
  Description of Artificial Sequence: Synthetic oligonucleotide
ccagcgaagacucugaagg

SEQ ID NO: 2009181 - RNA, 19 nt, Artificial Sequence
  Description of Artificial Sequence: Synthetic oligonucleotide
gaacugguaggccaggaug

SEQ ID NO: 2009182 - RNA, 19 nt, Artificial Sequence
  Description of Artificial Sequence: Synthetic oligonucleotide
aaccgcaggcaguauacag

SEQ ID NO: 2009183 - RNA, 19 nt, Artificial Sequence
  Description of Artificial Sequence: Synthetic oligonucleotide
agcuuaugaacaccaaucu

SEQ ID NO: 2009184 - RNA, 19 nt, Artificial Sequence
  Description of Artificial Sequence: Synthetic oligonucleotide
cugacaauaugugaguuug

SEQ ID NO: 2009185 - RNA, 19 nt, Artificial Sequence
  Description of Artificial Sequence: Synthetic oligonucleotide
guaagcacugccccagucg

SEQ ID NO: 2009186 - RNA, 19 nt, Artificial Sequence
  Description of Artificial Sequence: Synthetic oligonucleotide
ugggguugacgucagcggg

SEQ ID NO: 2009187 - RNA, 19 nt, Artificial Sequence
  Description of Artificial Sequence: Synthetic oligonucleotide
gacucugaagggccgacgg

SEQ ID NO: 2009188 - RNA, 19 nt, Artificial Sequence
  Description of Artificial Sequence: Synthetic oligonucleotide
ugugugaucagcuguccac

SEQ ID NO: 2009189 - RNA, 19 nt, Artificial Sequence
  Description of Artificial Sequence: Synthetic oligonucleotide
gaaagucuaggauguggag

SEQ ID NO: 2009190 - RNA, 19 nt, Artificial Sequence
  Description of Artificial Sequence: Synthetic oligonucleotide
ugguguguaagcacugccc

SEQ ID NO: 2009191 - RNA, 19 nt, Artificial Sequence
  Description of Artificial Sequence: Synthetic oligonucleotide
uaggauguggagauuguaa

SEQ ID NO: 2009192 - RNA, 19 nt, Artificial Sequence
  Description of Artificial Sequence: Synthetic oligonucleotide
caaacauccucaucaugcc

SEQ ID NO: 2009193 - RNA, 19 nt, Artificial Sequence
  Description of Artificial Sequence: Synthetic oligonucleotide
ugagaagugcccacaacaa

SEQ ID NO: 2009194 - RNA, 19 nt, Artificial Sequence
  Description of Artificial Sequence: Synthetic oligonucleotide
ugaaccgcaggcaguauac

SEQ ID NO: 2009195 - RNA, 19 nt, Artificial Sequence
  Description of Artificial Sequence: Synthetic oligonucleotide
aacaccaaucuucccgucu

SEQ ID NO: 2009196 - RNA, 19 nt, Artificial Sequence
  Description of Artificial Sequence: Synthetic oligonucleotide
gacgguucaagcuggcacc

SEQ ID NO: 2009197 - RNA, 19 nt, Artificial Sequence
  Description of Artificial Sequence: Synthetic oligonucleotide
agcgaagacucugaagggc

SEQ ID NO: 2009198 - RNA, 19 nt, Artificial Sequence
  Description of Artificial Sequence: Synthetic oligonucleotide
ucacaaaagagcugaguau

SEQ ID NO: 2009199 - RNA, 19 nt, Artificial Sequence
  Description of Artificial Sequence: Synthetic oligonucleotide
uuuccgggcacuugugcgg

SEQ ID NO: 2009200 - RNA, 19 nt, Artificial Sequence
  Description of Artificial Sequence: Synthetic oligonucleotide
acuacaccuccacuucagc

SEQ ID NO: 2009201 - RNA, 19 nt, Artificial Sequence
  Description of Artificial Sequence: Synthetic oligonucleotide
aguauaagguacugucaug

SEQ ID NO: 2009202 - RNA, 19 nt, Artificial Sequence
  Description of Artificial Sequence: Synthetic oligonucleotide
auacgugucauaaccacag

SEQ ID NO: 2009203 - RNA, 19 nt, Artificial Sequence
  Description of Artificial Sequence: Synthetic oligonucleotide
uguguaagcacugccccag

SEQ ID NO: 2009204 - RNA, 19 nt, Artificial Sequence
  Description of Artificial Sequence: Synthetic oligonucleotide
uacuugccuagcucaaagg

SEQ ID NO: 2009205 - RNA, 19 nt, Artificial Sequence
  Description of Artificial Sequence: Synthetic oligonucleotide
gagaagugcccacaacaag

SEQ ID NO: 2009206 - RNA, 19 nt, Artificial Sequence
  Description of Artificial Sequence: Synthetic oligonucleotide
gagcuuaugaacaccaauc

SEQ ID NO: 2009207 - RNA, 19 nt, Artificial Sequence
  Description of Artificial Sequence: Synthetic oligonucleotide
ugcuguggagcuuaugaac

SEQ ID NO: 2009208 - RNA, 19 nt, Artificial Sequence
  Description of Artificial Sequence: Synthetic oligonucleotide
aagacagcgcagcguagag

SEQ ID NO: 2009209 - RNA, 19 nt, Artificial Sequence
  Description of Artificial Sequence: Synthetic oligonucleotide
agaugccugguggugaacc

SEQ ID NO: 2009210 - RNA, 19 nt, Artificial Sequence
  Description of Artificial Sequence: Synthetic oligonucleotide
agcuuacuugccuagcuca

SEQ ID NO: 2009211 - RNA, 19 nt, Artificial Sequence
  Description of Artificial Sequence: Synthetic oligonucleotide
cacaaaagagcugaguauc

SEQ ID NO: 2009212 - RNA, 19 nt, Artificial Sequence
  Description of Artificial Sequence: Synthetic oligonucleotide
aggucccagauucucagag

SEQ ID NO: 2009213 - RNA, 19 nt, Artificial Sequence
  Description of Artificial Sequence: Synthetic oligonucleotide
ucauggguuuugaaagucu

SEQ ID NO: 2009214 - RNA, 19 nt, Artificial Sequence
  Description of Artificial Sequence: Synthetic oligonucleotide
acaaaagagcugaguaucg

SEQ ID NO: 2009215 - RNA, 19 nt, Artificial Sequence
  Description of Artificial Sequence: Synthetic oligonucleotide
aagggccgacgguucaagc

SEQ ID NO: 2009216 - RNA, 19 nt, Artificial Sequence
  Description of Artificial Sequence: Synthetic oligonucleotide
aagagaggucccugaguag

SEQ ID NO: 2009217 - RNA, 19 nt, Artificial Sequence
  Description of Artificial Sequence: Synthetic oligonucleotide
ugugcggaggucccaguag

SEQ ID NO: 2009218 - RNA, 19 nt, Artificial Sequence
  Description of Artificial Sequence: Synthetic oligonucleotide
aguagcuuacuugccuagc

SEQ ID NO: 2009219 - RNA, 19 nt, Artificial Sequence
  Description of Artificial Sequence: Synthetic oligonucleotide
uucucagaggugagaagug

SEQ ID NO: 2009220 - RNA, 19 nt, Artificial Sequence
  Description of Artificial Sequence: Synthetic oligonucleotide
gaugccugguggugaaccg

SEQ ID NO: 2009221 - RNA, 19 nt, Artificial Sequence
  Description of Artificial Sequence: Synthetic oligonucleotide
cugagauauguacagagaa

SEQ ID NO: 2009222 - RNA, 19 nt, Artificial Sequence
  Description of Artificial Sequence: Synthetic oligonucleotide
cuucacucgguccuuuacc

SEQ ID NO: 2009223 - RNA, 19 nt, Artificial Sequence
  Description of Artificial Sequence: Synthetic oligonucleotide
ucaccuccuguucaugagc

SEQ ID NO: 2009224 - RNA, 19 nt, Artificial Sequence
  Description of Artificial Sequence: Synthetic oligonucleotide
ugaguaucgggcugauggc

SEQ ID NO: 2009225 - RNA, 19 nt, Artificial Sequence
  Description of Artificial Sequence: Synthetic oligonucleotide
acgugucauaaccacagga

SEQ ID NO: 2009226 - RNA, 19 nt, Artificial Sequence
  Description of Artificial Sequence: Synthetic oligonucleotide
agaauccccucucggcagc

SEQ ID NO: 2009227 - RNA, 19 nt, Artificial Sequence
  Description of Artificial Sequence: Synthetic oligonucleotide
aguauacaggacugcugag

SEQ ID NO: 2009228 - RNA, 19 nt, Artificial Sequence
  Description of Artificial Sequence: Synthetic oligonucleotide
caauggaccagacucgguc

SEQ ID NO: 2009229 - RNA, 19 nt, Artificial Sequence
  Description of Artificial Sequence: Synthetic oligonucleotide
ggcaguauaagguacuguc

SEQ ID NO: 2009230 - RNA, 19 nt, Artificial Sequence
  Description of Artificial Sequence: Synthetic oligonucleotide
agcuguuccugucacaaaa

SEQ ID NO: 2009231 - RNA, 19 nt, Artificial Sequence
  Description of Artificial Sequence: Synthetic oligonucleotide
aacauacgugucauaacca

SEQ ID NO: 2009232 - RNA, 19 nt, Artificial Sequence
  Description of Artificial Sequence: Synthetic oligonucleotide
aaucacugcccagaugugu

SEQ ID NO: 2009233 - RNA, 19 nt, Artificial Sequence
  Description of Artificial Sequence: Synthetic oligonucleotide
guaggaggaaccuguggcc

SEQ ID NO: 2009234 - RNA, 19 nt, Artificial Sequence
  Description of Artificial Sequence: Synthetic oligonucleotide
ucccugaguagcuuacuug

SEQ ID NO: 2009235 - RNA, 19 nt, Artificial Sequence
  Description of Artificial Sequence: Synthetic oligonucleotide
auacaggacugcugagugg

SEQ ID NO: 2009236 - RNA, 19 nt, Artificial Sequence
  Description of Artificial Sequence: Synthetic oligonucleotide
uacgugucauaaccacagg

SEQ ID NO: 2009237 - RNA, 19 nt, Artificial Sequence
  Description of Artificial Sequence: Synthetic oligonucleotide
acaccauaguaggaggaac

SEQ ID NO: 2009238 - RNA, 19 nt, Artificial Sequence
  Description of Artificial Sequence: Synthetic oligonucleotide
ggacucauacaugacaucc

SEQ ID NO: 2009239 - RNA, 19 nt, Artificial Sequence
  Description of Artificial Sequence: Synthetic oligonucleotide
gaguagcuuacuugccuag

SEQ ID NO: 2009240 - RNA, 19 nt, Artificial Sequence
  Description of Artificial Sequence: Synthetic oligonucleotide
guagcgaacauacguguca

SEQ ID NO: 2009241 - RNA, 19 nt, Artificial Sequence
  Description of Artificial Sequence: Synthetic oligonucleotide
caguauacaggacugcuga

SEQ ID NO: 2009242 - RNA, 19 nt, Artificial Sequence
  Description of Artificial Sequence: Synthetic oligonucleotide
aaucuucccgucuccuccu

SEQ ID NO: 2009243 - RNA, 19 nt, Artificial Sequence
  Description of Artificial Sequence: Synthetic oligonucleotide
uaaccacaggacagcagug

SEQ ID NO: 2009244 - RNA, 19 nt, Artificial Sequence
  Description of Artificial Sequence: Synthetic oligonucleotide
aagacucugaagggccgac

SEQ ID NO: 2009245 - RNA, 19 nt, Artificial Sequence
  Description of Artificial Sequence: Synthetic oligonucleotide
caggcaagcccucuggcgc

SEQ ID NO: 2009246 - RNA, 19 nt, Artificial Sequence
  Description of Artificial Sequence: Synthetic oligonucleotide
ucucagaggugagaagugc

SEQ ID NO: 2009247 - RNA, 19 nt, Artificial Sequence
  Description of Artificial Sequence: Synthetic oligonucleotide
ugucuguaggcaguauaag

SEQ ID NO: 2009248 - RNA, 19 nt, Artificial Sequence
  Description of Artificial Sequence: Synthetic oligonucleotide
gguguguaagcacugcccc

SEQ ID NO: 2009249 - RNA, 19 nt, Artificial Sequence
  Description of Artificial Sequence: Synthetic oligonucleotide
ugacuacaccuccacuuca

SEQ ID NO: 2009250 - RNA, 19 nt, Artificial Sequence
  Description of Artificial Sequence: Synthetic oligonucleotide
ugaguagcuuacuugccua

SEQ ID NO: 2009251 - RNA, 19 nt, Artificial Sequence
  Description of Artificial Sequence: Synthetic oligonucleotide
uguggagcuuaugaacacc

SEQ ID NO: 2009252 - RNA, 19 nt, Artificial Sequence
  Description of Artificial Sequence: Synthetic oligonucleotide
cccacaaucguacaacacc

SEQ ID NO: 2009253 - RNA, 19 nt, Artificial Sequence
  Description of Artificial Sequence: Synthetic oligonucleotide
ucaucaugcccagcgaaga

SEQ ID NO: 2009254 - RNA, 19 nt, Artificial Sequence
  Description of Artificial Sequence: Synthetic oligonucleotide
cauaguaggaggaaccugu

SEQ ID NO: 2009255 - RNA, 19 nt, Artificial Sequence
  Description of Artificial Sequence: Synthetic oligonucleotide
ugcggaggucccaguagcg

SEQ ID NO: 2009256 - RNA, 19 nt, Artificial Sequence
  Description of Artificial Sequence: Synthetic oligonucleotide
uaagacagcgcagcguaga

SEQ ID NO: 2009257 - RNA, 19 nt, Artificial Sequence
  Description of Artificial Sequence: Synthetic oligonucleotide
caugagcugaguacuugac

SEQ ID NO: 2009258 - RNA, 19 nt, Artificial Sequence
  Description of Artificial Sequence: Synthetic oligonucleotide
acaaucguacaacaccaua

SEQ ID NO: 2009259 - RNA, 19 nt, Artificial Sequence
  Description of Artificial Sequence: Synthetic oligonucleotide
gaaggcaugcaggcaagcc

SEQ ID NO: 2009260 - RNA, 19 nt, Artificial Sequence
  Description of Artificial Sequence: Synthetic oligonucleotide
agccacucacaaugauacc

SEQ ID NO: 2009261 - RNA, 19 nt, Artificial Sequence
  Description of Artificial Sequence: Synthetic oligonucleotide
aacaccauaguaggaggaa

SEQ ID NO: 2009262 - RNA, 19 nt, Artificial Sequence
  Description of Artificial Sequence: Synthetic oligonucleotide
uucaagcuggcaccaucug

SEQ ID NO: 2009263 - RNA, 19 nt, Artificial Sequence
  Description of Artificial Sequence: Synthetic oligonucleotide
aggcaagcccucuggcgcc

SEQ ID NO: 2009264 - RNA, 19 nt, Artificial Sequence
  Description of Artificial Sequence: Synthetic oligonucleotide
ggaaccuguggccagcaag

SEQ ID NO: 2009265 - RNA, 19 nt, Artificial Sequence
  Description of Artificial Sequence: Synthetic oligonucleotide
uguaagcacugccccaguc

SEQ ID NO: 2009266 - RNA, 19 nt, Artificial Sequence
  Description of Artificial Sequence: Synthetic oligonucleotide
cagcgaagacucugaaggg

SEQ ID NO: 2009267 - RNA, 19 nt, Artificial Sequence
  Description of Artificial Sequence: Synthetic oligonucleotide
aguagcgaacauacguguc

SEQ ID NO: 2009268 - RNA, 19 nt, Artificial Sequence
  Description of Artificial Sequence: Synthetic oligonucleotide
agcuggcaccaucugggcg

SEQ ID NO: 2009269 - RNA, 19 nt, Artificial Sequence
  Description of Artificial Sequence: Synthetic oligonucleotide
ucccacaaucguacaacac

SEQ ID NO: 2009270 - RNA, 19 nt, Artificial Sequence
  Description of Artificial Sequence: Synthetic oligonucleotide
auaugugaguuugccagca

SEQ ID NO: 2009271 - RNA, 19 nt, Artificial Sequence
  Description of Artificial Sequence: Synthetic oligonucleotide
cauacgugucauaaccaca

SEQ ID NO: 2009272 - RNA, 19 nt, Artificial Sequence
  Description of Artificial Sequence: Synthetic oligonucleotide
agauauguacagagaagca

SEQ ID NO: 2009273 - RNA, 19 nt, Artificial Sequence
  Description of Artificial Sequence: Synthetic oligonucleotide
cagcuguccacuguugagg

SEQ ID NO: 2009274 - RNA, 19 nt, Artificial Sequence
  Description of Artificial Sequence: Synthetic oligonucleotide
guacagagaagcacccucc

SEQ ID NO: 2009275 - RNA, 19 nt, Artificial Sequence
  Description of Artificial Sequence: Synthetic oligonucleotide
caagagaggucccugagua

SEQ ID NO: 2009276 - RNA, 19 nt, Artificial Sequence
  Description of Artificial Sequence: Synthetic oligonucleotide
ucccaguagcgaacauacg

SEQ ID NO: 2009277 - RNA, 19 nt, Artificial Sequence
  Description of Artificial Sequence: Synthetic oligonucleotide
cccugaguagcuuacuugc

SEQ ID NO: 2009278 - RNA, 19 nt, Artificial Sequence
  Description of Artificial Sequence: Synthetic oligonucleotide
gacagggagguaucaguca

SEQ ID NO: 2009279 - RNA, 19 nt, Artificial Sequence
  Description of Artificial Sequence: Synthetic oligonucleotide
ucggcccgaggccaaaggc

SEQ ID NO: 2009280 - RNA, 19 nt, Artificial Sequence
  Description of Artificial Sequence: Synthetic oligonucleotide
gacagcgcagcguagagau

SEQ ID NO: 2009281 - RNA, 19 nt, Artificial Sequence
  Description of Artificial Sequence: Synthetic oligonucleotide
aucguacaacaccauagua

SEQ ID NO: 2009282 - RNA, 19 nt, Artificial Sequence
  Description of Artificial Sequence: Synthetic oligonucleotide
uaugugaguuugccagcac

SEQ ID NO: 2009283 - RNA, 19 nt, Artificial Sequence
  Description of Artificial Sequence: Synthetic oligonucleotide
gccacucacaaugauaccc

SEQ ID NO: 2009284 - RNA, 19 nt, Artificial Sequence
  Description of Artificial Sequence: Synthetic oligonucleotide
uaggaggaaccuguggcca

SEQ ID NO: 2009285 - RNA, 19 nt, Artificial Sequence
  Description of Artificial Sequence: Synthetic oligonucleotide
agcguagagaugccuggug

SEQ ID NO: 2009286 - RNA, 19 nt, Artificial Sequence
  Description of Artificial Sequence: Synthetic oligonucleotide
caucugacuacaccuccac

SEQ ID NO: 2009287 - RNA, 19 nt, Artificial Sequence
  Description of Artificial Sequence: Synthetic oligonucleotide
cagaauccccucucggcag

SEQ ID NO: 2009288 - RNA, 19 nt, Artificial Sequence
  Description of Artificial Sequence: Synthetic oligonucleotide
auaccuuggcuguccuguc

SEQ ID NO: 2009289 - RNA, 19 nt, Artificial Sequence
  Description of Artificial Sequence: Synthetic oligonucleotide
agacucggucuucagucug

SEQ ID NO: 2009290 - RNA, 19 nt, Artificial Sequence
  Description of Artificial Sequence: Synthetic oligonucleotide
gcguagagaugccuggugg

SEQ ID NO: 2009291 - RNA, 19 nt, Artificial Sequence
  Description of Artificial Sequence: Synthetic oligonucleotide
uuguaagacagcgcagcgu

SEQ ID NO: 2009292 - RNA, 19 nt, Artificial Sequence
  Description of Artificial Sequence: Synthetic oligonucleotide
ugccuagcucaaaggcagg

SEQ ID NO: 2009293 - RNA, 19 nt, Artificial Sequence
  Description of Artificial Sequence: Synthetic oligonucleotide
agauuguaagacagcgcag

SEQ ID NO: 2009294 - RNA, 19 nt, Artificial Sequence
  Description of Artificial Sequence: Synthetic oligonucleotide
accggaaugcuggucauca

SEQ ID NO: 2009295 - RNA, 19 nt, Artificial Sequence
  Description of Artificial Sequence: Synthetic oligonucleotide
uugacgucagcgggaaggc

SEQ ID NO: 2009296 - RNA, 19 nt, Artificial Sequence
  Description of Artificial Sequence: Synthetic oligonucleotide
agggccgacgguucaagcu

SEQ ID NO: 2009297 - RNA, 19 nt, Artificial Sequence
  Description of Artificial Sequence: Synthetic oligonucleotide
uccucaucaugcccagcga

SEQ ID NO: 2009298 - RNA, 19 nt, Artificial Sequence
  Description of Artificial Sequence: Synthetic oligonucleotide
aggcaguauacaggacugc

SEQ ID NO: 2009299 - RNA, 19 nt, Artificial Sequence
  Description of Artificial Sequence: Synthetic oligonucleotide
ucgguccuuuaccggaaug

SEQ ID NO: 2009300 - RNA, 19 nt, Artificial Sequence
  Description of Artificial Sequence: Synthetic oligonucleotide
cccuuugcaguccacacag

SEQ ID NO: 2009301 - RNA, 19 nt, Artificial Sequence
  Description of Artificial Sequence: Synthetic oligonucleotide
accagacucggucuucagu

SEQ ID NO: 2009302 - RNA, 19 nt, Artificial Sequence
  Description of Artificial Sequence: Synthetic oligonucleotide
auggguuuugaaagucuag

SEQ ID NO: 2009303 - RNA, 19 nt, Artificial Sequence
  Description of Artificial Sequence: Synthetic oligonucleotide
ccaguagcgaacauacgug

SEQ ID NO: 2009304 - RNA, 19 nt, Artificial Sequence
  Description of Artificial Sequence: Synthetic oligonucleotide
accauaguaggaggaaccu

SEQ ID NO: 2009305 - RNA, 19 nt, Artificial Sequence
  Description of Artificial Sequence: Synthetic oligonucleotide
gcagcguagagaugccugg

SEQ ID NO: 2009306 - RNA, 19 nt, Artificial Sequence
  Description of Artificial Sequence: Synthetic oligonucleotide
aauccccucucggcagcgc

SEQ ID NO: 2009307 - RNA, 19 nt, Artificial Sequence
  Description of Artificial Sequence: Synthetic oligonucleotide
guagagaugccugguggug

SEQ ID NO: 2009308 - RNA, 19 nt, Artificial Sequence
  Description of Artificial Sequence: Synthetic oligonucleotide
ucuggcgccugucccacaa

SEQ ID NO: 2009309 - RNA, 19 nt, Artificial Sequence
  Description of Artificial Sequence: Synthetic oligonucleotide
aggccaggaugaaauuagc

SEQ ID NO: 2009310 - RNA, 19 nt, Artificial Sequence
  Description of Artificial Sequence: Synthetic oligonucleotide
uucaccugccaggcaagag

SEQ ID NO: 2009311 - RNA, 19 nt, Artificial Sequence
  Description of Artificial Sequence: Synthetic oligonucleotide
ggguuuugaaagucuagga

SEQ ID NO: 2009312 - RNA, 19 nt, Artificial Sequence
  Description of Artificial Sequence: Synthetic oligonucleotide
gagguaucagucacuucac

SEQ ID NO: 2009313 - RNA, 19 nt, Artificial Sequence
  Description of Artificial Sequence: Synthetic oligonucleotide
uggagcuuaugaacaccaa

SEQ ID NO: 2009314 - RNA, 19 nt, Artificial Sequence
  Description of Artificial Sequence: Synthetic oligonucleotide
uggugugucauggguuuug

SEQ ID NO: 2009315 - RNA, 19 nt, Artificial Sequence
  Description of Artificial Sequence: Synthetic oligonucleotide
gugcggaggucccaguagc

SEQ ID NO: 2009316 - RNA, 19 nt, Artificial Sequence
  Description of Artificial Sequence: Synthetic oligonucleotide
ccacucacaaugauacccc

SEQ ID NO: 2009317 - RNA, 19 nt, Artificial Sequence
  Description of Artificial Sequence: Synthetic oligonucleotide
ggccaaaggccauaccuug

SEQ ID NO: 2009318 - RNA, 19 nt, Artificial Sequence
  Description of Artificial Sequence: Synthetic oligonucleotide
ggauguggagauuguaaga

SEQ ID NO: 2009319 - RNA, 19 nt, Artificial Sequence
  Description of Artificial Sequence: Synthetic oligonucleotide
gguaucagucacuucaccu

SEQ ID NO: 2009320 - RNA, 19 nt, Artificial Sequence
  Description of Artificial Sequence: Synthetic oligonucleotide
cauggguuuugaaagucua

SEQ ID NO: 2009321 - RNA, 19 nt, Artificial Sequence
  Description of Artificial Sequence: Synthetic oligonucleotide
caacaccauaguaggagga

SEQ ID NO: 2009322 - RNA, 19 nt, Artificial Sequence
  Description of Artificial Sequence: Synthetic oligonucleotide
ugacacauuuccgggcacu

SEQ ID NO: 2009323 - RNA, 19 nt, Artificial Sequence
  Description of Artificial Sequence: Synthetic oligonucleotide
acuugugcggaggucccag

SEQ ID NO: 2009324 - RNA, 19 nt, Artificial Sequence
  Description of Artificial Sequence: Synthetic oligonucleotide
gcaggcaagcccucuggcg

SEQ ID NO: 2009325 - RNA, 19 nt, Artificial Sequence
  Description of Artificial Sequence: Synthetic oligonucleotide
caugcaggcaagcccucug

SEQ ID NO: 2009326 - RNA, 19 nt, Artificial Sequence
  Description of Artificial Sequence: Synthetic oligonucleotide
agagaugccugguggugaa

SEQ ID NO: 2009327 - RNA, 19 nt, Artificial Sequence
  Description of Artificial Sequence: Synthetic oligonucleotide
cugcacugacaauauguga

SEQ ID NO: 2009328 - RNA, 19 nt, Artificial Sequence
  Description of Artificial Sequence: Synthetic oligonucleotide
guggagauuguaagacagc

SEQ ID NO: 2009329 - RNA, 19 nt, Artificial Sequence
  Description of Artificial Sequence: Synthetic oligonucleotide
gaucagcuguccacuguug

SEQ ID NO: 2009330 - RNA, 19 nt, Artificial Sequence
  Description of Artificial Sequence: Synthetic oligonucleotide
gucauggguuuugaaaguc

SEQ ID NO: 2009331 - RNA, 19 nt, Artificial Sequence
  Description of Artificial Sequence: Synthetic oligonucleotide
gaguaucgggcugauggca

SEQ ID NO: 2009332 - RNA, 19 nt, Artificial Sequence
  Description of Artificial Sequence: Synthetic oligonucleotide
cagcacaaagugacaaaca

SEQ ID NO: 2009333 - RNA, 19 nt, Artificial Sequence
  Description of Artificial Sequence: Synthetic oligonucleotide
uaucgggcugauggcaaug

SEQ ID NO: 2009334 - RNA, 19 nt, Artificial Sequence
  Description of Artificial Sequence: Synthetic oligonucleotide
guagcuuacuugccuagcu

SEQ ID NO: 2009335 - RNA, 19 nt, Artificial Sequence
  Description of Artificial Sequence: Synthetic oligonucleotide
gaagggccgacgguucaag

SEQ ID NO: 2009336 - RNA, 19 nt, Artificial Sequence
  Description of Artificial Sequence: Synthetic oligonucleotide
caagcuguuccugucacaa

SEQ ID NO: 2009337 - RNA, 19 nt, Artificial Sequence
  Description of Artificial Sequence: Synthetic oligonucleotide
ggagauuguaagacagcgc

SEQ ID NO: 2009338 - RNA, 19 nt, Artificial Sequence
  Description of Artificial Sequence: Synthetic oligonucleotide
cugagugggguugacguca

SEQ ID NO: 2009339 - RNA, 19 nt, Artificial Sequence
  Description of Artificial Sequence: Synthetic oligonucleotide
uugugcggaggucccagua

SEQ ID NO: 2009340 - RNA, 19 nt, Artificial Sequence
  Description of Artificial Sequence: Synthetic oligonucleotide
uggcgccugucccacaauc

SEQ ID NO: 2009341 - RNA, 19 nt, Artificial Sequence
  Description of Artificial Sequence: Synthetic oligonucleotide
uagcgaacauacgugucau

SEQ ID NO: 2009342 - RNA, 19 nt, Artificial Sequence
  Description of Artificial Sequence: Synthetic oligonucleotide
ccacaaucguacaacacca

SEQ ID NO: 2009343 - RNA, 19 nt, Artificial Sequence
  Description of Artificial Sequence: Synthetic oligonucleotide
cuagcucaaaggcaggggu

SEQ ID NO: 2009344 - RNA, 19 nt, Artificial Sequence
  Description of Artificial Sequence: Synthetic oligonucleotide
acucugaagggccgacggu

SEQ ID NO: 2009345 - RNA, 19 nt, Artificial Sequence
  Description of Artificial Sequence: Synthetic oligonucleotide
guccuuuaccggaaugcug

SEQ ID NO: 2009346 - RNA, 19 nt, Artificial Sequence
  Description of Artificial Sequence: Synthetic oligonucleotide
gaauccccucucggcagcg

SEQ ID NO: 2009347 - RNA, 19 nt, Artificial Sequence
  Description of Artificial Sequence: Synthetic oligonucleotide
ucgggcugauggcaaugga

SEQ ID NO: 2009348 - RNA, 19 nt, Artificial Sequence
  Description of Artificial Sequence: Synthetic oligonucleotide
gaaggugcuguggagcuua

SEQ ID NO: 2009349 - RNA, 19 nt, Artificial Sequence
  Description of Artificial Sequence: Synthetic oligonucleotide
caucaggucggugccgagc

SEQ ID NO: 2009350 - RNA, 19 nt, Artificial Sequence
  Description of Artificial Sequence: Synthetic oligonucleotide
gaaccuguggccagcaagu

SEQ ID NO: 2009351 - RNA, 19 nt, Artificial Sequence
  Description of Artificial Sequence: Synthetic oligonucleotide
aggucccugaguagcuuac

SEQ ID NO: 2009352 - RNA, 19 nt, Artificial Sequence
  Description of Artificial Sequence: Synthetic oligonucleotide
uuaccggaaugcuggucau

SEQ ID NO: 2009353 - RNA, 19 nt, Artificial Sequence
  Description of Artificial Sequence: Synthetic oligonucleotide
ccaugacacauuuccgggc

SEQ ID NO: 2009354 - RNA, 19 nt, Artificial Sequence
  Description of Artificial Sequence: Synthetic oligonucleotide
ucauggggcuccucccacu

SEQ ID NO: 2009355 - RNA, 19 nt, Artificial Sequence
  Description of Artificial Sequence: Synthetic oligonucleotide
uggugaaccgcaggcagua

SEQ ID NO: 2009356 - RNA, 19 nt, Artificial Sequence
  Description of Artificial Sequence: Synthetic oligonucleotide
ucaucaggucggugccgag

SEQ ID NO: 2009357 - RNA, 19 nt, Artificial Sequence
  Description of Artificial Sequence: Synthetic oligonucleotide
aggugagaagugcccacaa

SEQ ID NO: 2009358 - RNA, 19 nt, Artificial Sequence
  Description of Artificial Sequence: Synthetic oligonucleotide
gucggcccgaggccaaagg

SEQ ID NO: 2009359 - RNA, 19 nt, Artificial Sequence
  Description of Artificial Sequence: Synthetic oligonucleotide
gugccgagccgcgugaagc

SEQ ID NO: 2009360 - RNA, 19 nt, Artificial Sequence
  Description of Artificial Sequence: Synthetic oligonucleotide
aauuagccugagauaugua

SEQ ID NO: 2009361 - RNA, 19 nt, Artificial Sequence
  Description of Artificial Sequence: Synthetic oligonucleotide
guaagacagcgcagcguag

SEQ ID NO: 2009362 - RNA, 19 nt, Artificial Sequence
  Description of Artificial Sequence: Synthetic oligonucleotide
cugcccagaugugugauca

SEQ ID NO: 2009363 - RNA, 19 nt, Artificial Sequence
  Description of Artificial Sequence: Synthetic oligonucleotide
gaagacucugaagggccga

SEQ ID NO: 2009364 - RNA, 19 nt, Artificial Sequence
  Description of Artificial Sequence: Synthetic oligonucleotide
uccccucucggcagcgccc

SEQ ID NO: 2009365 - RNA, 19 nt, Artificial Sequence
  Description of Artificial Sequence: Synthetic oligonucleotide
cagaugugugaucagcugu

SEQ ID NO: 2009366 - RNA, 19 nt, Artificial Sequence
  Description of Artificial Sequence: Synthetic oligonucleotide
ggccaggaugaaauuagcc

SEQ ID NO: 2009367 - RNA, 19 nt, Artificial Sequence
  Description of Artificial Sequence: Synthetic oligonucleotide
ccugaguagcuuacuugcc

SEQ ID NO: 2009368 - RNA, 19 nt, Artificial Sequence
  Description of Artificial Sequence: Synthetic oligonucleotide
acugcugagugggguugac

SEQ ID NO: 2009369 - RNA, 19 nt, Artificial Sequence
  Description of Artificial Sequence: Synthetic oligonucleotide
gggccgacgguucaagcug

SEQ ID NO: 2009370 - RNA, 19 nt, Artificial Sequence
  Description of Artificial Sequence: Synthetic oligonucleotide
guauacaggacugcugagu

SEQ ID NO: 2009371 - RNA, 19 nt, Artificial Sequence
  Description of Artificial Sequence: Synthetic oligonucleotide
aguucaccuccuguucaug

SEQ ID NO: 2009372 - RNA, 19 nt, Artificial Sequence
  Description of Artificial Sequence: Synthetic oligonucleotide
gugcuguggagcuuaugaa

SEQ ID NO: 2009373 - RNA, 19 nt, Artificial Sequence
  Description of Artificial Sequence: Synthetic oligonucleotide
aguaucgggcugauggcaa

SEQ ID NO: 2009374 - RNA, 19 nt, Artificial Sequence
  Description of Artificial Sequence: Synthetic oligonucleotide
agggagguaucagucacuu

SEQ ID NO: 2009375 - RNA, 19 nt, Artificial Sequence
  Description of Artificial Sequence: Synthetic oligonucleotide
cauggggcuccucccacuc

SEQ ID NO: 2009376 - RNA, 19 nt, Artificial Sequence
  Description of Artificial Sequence: Synthetic oligonucleotide
cacugccccagucggcccg

SEQ ID NO: 2009377 - RNA, 19 nt, Artificial Sequence
  Description of Artificial Sequence: Synthetic oligonucleotide
auguacagagaagcacccu

SEQ ID NO: 2009378 - RNA, 19 nt, Artificial Sequence
  Description of Artificial Sequence: Synthetic oligonucleotide
cuuuaccggaaugcugguc

SEQ ID NO: 2009379 - RNA, 19 nt, Artificial Sequence
  Description of Artificial Sequence: Synthetic oligonucleotide
gcgaacauacgugucauaa

SEQ ID NO: 2009380 - RNA, 19 nt, Artificial Sequence
  Description of Artificial Sequence: Synthetic oligonucleotide
ucggugccgagccgcguga

SEQ ID NO: 2009381 - RNA, 19 nt, Artificial Sequence
  Description of Artificial Sequence: Synthetic oligonucleotide
agcgcagcguagagaugcc

SEQ ID NO: 2009382 - RNA, 19 nt, Artificial Sequence
  Description of Artificial Sequence: Synthetic oligonucleotide
caguagcgaacauacgugu

SEQ ID NO: 2009383 - RNA, 19 nt, Artificial Sequence
  Description of Artificial Sequence: Synthetic oligonucleotide
gucggugccgagccgcgug

SEQ ID NO: 2009384 - RNA, 19 nt, Artificial Sequence
  Description of Artificial Sequence: Synthetic oligonucleotide
gcaguauaagguacuguca

SEQ ID NO: 2009385 - RNA, 19 nt, Artificial Sequence
  Description of Artificial Sequence: Synthetic oligonucleotide
ucccacuccaugacacauu

SEQ ID NO: 2009386 - RNA, 19 nt, Artificial Sequence
  Description of Artificial Sequence: Synthetic oligonucleotide
caggcaagagaggucccug

SEQ ID NO: 2009387 - RNA, 19 nt, Artificial Sequence
  Description of Artificial Sequence: Synthetic oligonucleotide
gugaaccgcaggcaguaua

SEQ ID NO: 2009388 - RNA, 19 nt, Artificial Sequence
  Description of Artificial Sequence: Synthetic oligonucleotide
gagcugaguaucgggcuga

SEQ ID NO: 2009389 - RNA, 19 nt, Artificial Sequence
  Description of Artificial Sequence: Synthetic oligonucleotide
gccccagucggcccgaggc

SEQ ID NO: 2009390 - RNA, 19 nt, Artificial Sequence
  Description of Artificial Sequence: Synthetic oligonucleotide
gccaaaggccauaccuugg

SEQ ID NO: 2009391 - RNA, 19 nt, Artificial Sequence
  Description of Artificial Sequence: Synthetic oligonucleotide
gccuagcucaaaggcaggg

SEQ ID NO: 2009392 - RNA, 19 nt, Artificial Sequence
  Description of Artificial Sequence: Synthetic oligonucleotide
ggcgccugucccacaaucg

SEQ ID NO: 2009393 - RNA, 19 nt, Artificial Sequence
  Description of Artificial Sequence: Synthetic oligonucleotide
ugaagggccgacgguucaa

SEQ ID NO: 2009394 - RNA, 19 nt, Artificial Sequence
  Description of Artificial Sequence: Synthetic oligonucleotide
agacagcgcagcguagaga

SEQ ID NO: 2009395 - RNA, 19 nt, Artificial Sequence
  Description of Artificial Sequence: Synthetic oligonucleotide
cgaacauacgugucauaac

SEQ ID NO: 2009396 - RNA, 19 nt, Artificial Sequence
  Description of Artificial Sequence: Synthetic oligonucleotide
aggccaaaggccauaccuu

SEQ ID NO: 2009397 - RNA, 19 nt, Artificial Sequence
  Description of Artificial Sequence: Synthetic oligonucleotide
cgaagacucugaagggccg

SEQ ID NO: 2009398 - RNA, 19 nt, Artificial Sequence
  Description of Artificial Sequence: Synthetic oligonucleotide
gaaccgcaggcaguauaca

SEQ ID NO: 2009399 - RNA, 19 nt, Artificial Sequence
  Description of Artificial Sequence: Synthetic oligonucleotide
cgacgguucaagcuggcac

SEQ ID NO: 2009400 - RNA, 19 nt, Artificial Sequence
  Description of Artificial Sequence: Synthetic oligonucleotide
cuuacuugccuagcucaaa

SEQ ID NO: 2009401 - RNA, 19 nt, Artificial Sequence
  Description of Artificial Sequence: Synthetic oligonucleotide
cccaguagcgaacauacgu

SEQ ID NO: 2009402 - RNA, 19 nt, Artificial Sequence
  Description of Artificial Sequence: Synthetic oligonucleotide
uggaccagacucggucuuc

SEQ ID NO: 2009403 - RNA, 19 nt, Artificial Sequence
  Description of Artificial Sequence: Synthetic oligonucleotide
agcgaacauacgugucaua

SEQ ID NO: 2009404 - RNA, 19 nt, Artificial Sequence
  Description of Artificial Sequence: Synthetic oligonucleotide
gccugucccacaaucguac

SEQ ID NO: 2009405 - RNA, 19 nt, Artificial Sequence
  Description of Artificial Sequence: Synthetic oligonucleotide
acgucagcgggaaggcaug

SEQ ID NO: 2009406 - RNA, 19 nt, Artificial Sequence
  Description of Artificial Sequence: Synthetic oligonucleotide
cuaggauguggagauugua

SEQ ID NO: 2009407 - RNA, 19 nt, Artificial Sequence
  Description of Artificial Sequence: Synthetic oligonucleotide
ccuucacucgguccuuuac

SEQ ID NO: 2009408 - RNA, 19 nt, Artificial Sequence
  Description of Artificial Sequence: Synthetic oligonucleotide
cugaagggccgacgguuca

SEQ ID NO: 2009409 - RNA, 19 nt, Artificial Sequence
  Description of Artificial Sequence: Synthetic oligonucleotide
cuccaguucugagacaccu

SEQ ID NO: 2009410 - RNA, 19 nt, Artificial Sequence
  Description of Artificial Sequence: Synthetic oligonucleotide
gugaguuugccagcacaaa

SEQ ID NO: 2009411 - RNA, 19 nt, Artificial Sequence
  Description of Artificial Sequence: Synthetic oligonucleotide
ccaaucuucccgucuccuc

SEQ ID NO: 2009412 - RNA, 19 nt, Artificial Sequence
  Description of Artificial Sequence: Synthetic oligonucleotide
ccauaguaggaggaaccug

SEQ ID NO: 2009413 - RNA, 19 nt, Artificial Sequence
  Description of Artificial Sequence: Synthetic oligonucleotide
gugugaucagcuguccacu

SEQ ID NO: 2009414 - RNA, 19 nt, Artificial Sequence
  Description of Artificial Sequence: Synthetic oligonucleotide
ggacugcugagugggguug

SEQ ID NO: 2009415 - RNA, 19 nt, Artificial Sequence
  Description of Artificial Sequence: Synthetic oligonucleotide
ggaagacagggagguauca

SEQ ID NO: 2009416 - RNA, 19 nt, Artificial Sequence
  Description of Artificial Sequence: Synthetic oligonucleotide
cgggcugauggcaauggac

SEQ ID NO: 2009417 - RNA, 19 nt, Artificial Sequence
  Description of Artificial Sequence: Synthetic oligonucleotide
ggccgacgguucaagcugg

SEQ ID NO: 2009418 - RNA, 19 nt, Artificial Sequence
  Description of Artificial Sequence: Synthetic oligonucleotide
gguugccaucugucuguag

SEQ ID NO: 2009419 - RNA, 19 nt, Artificial Sequence
  Description of Artificial Sequence: Synthetic oligonucleotide
accuucacucgguccuuua

SEQ ID NO: 2009420 - RNA, 19 nt, Artificial Sequence
  Description of Artificial Sequence: Synthetic oligonucleotide
uaccggaaugcuggucauc

SEQ ID NO: 2009421 - RNA, 19 nt, Artificial Sequence
  Description of Artificial Sequence: Synthetic oligonucleotide
cgguccuuuaccggaaugc

SEQ ID NO: 2009422 - RNA, 19 nt, Artificial Sequence
  Description of Artificial Sequence: Synthetic oligonucleotide
gcuuaugaacaccaaucuu

SEQ ID NO: 2009423 - RNA, 19 nt, Artificial Sequence
  Description of Artificial Sequence: Synthetic oligonucleotide
cgcagcguagagaugccug

SEQ ID NO: 2009424 - RNA, 19 nt, Artificial Sequence
  Description of Artificial Sequence: Synthetic oligonucleotide
agucggcccgaggccaaag

SEQ ID NO: 2009425 - RNA, 19 nt, Artificial Sequence
  Description of Artificial Sequence: Synthetic oligonucleotide
gcugagugggguugacguc

SEQ ID NO: 2009426 - RNA, 19 nt, Artificial Sequence
  Description of Artificial Sequence: Synthetic oligonucleotide
ggugccgagccgcgugaag

SEQ ID NO: 2009427 - RNA, 19 nt, Artificial Sequence
  Description of Artificial Sequence: Synthetic oligonucleotide
gcaagugguugccaucugu

SEQ ID NO: 2009428 - RNA, 19 nt, Artificial Sequence
  Description of Artificial Sequence: Synthetic oligonucleotide
gcagggguggugugucaug

SEQ ID NO: 2009429 - RNA, 19 nt, Artificial Sequence
  Description of Artificial Sequence: Synthetic oligonucleotide
gggaagacagggagguauc

SEQ ID NO: 2009430 - RNA, 19 nt, Artificial Sequence
  Description of Artificial Sequence: Synthetic oligonucleotide
ggugugucauggguuuuga

SEQ ID NO: 2009431 - RNA, 19 nt, Artificial Sequence
  Description of Artificial Sequence: Synthetic oligonucleotide
ccuccuguucaugagcuga

SEQ ID NO: 2009432 - RNA, 19 nt, Artificial Sequence
  Description of Artificial Sequence: Synthetic oligonucleotide
ugguugccaucugucugua

SEQ ID NO: 2009433 - RNA, 19 nt, Artificial Sequence
  Description of Artificial Sequence: Synthetic oligonucleotide
cagacucggucuucagucu

SEQ ID NO: 2009434 - RNA, 19 nt, Artificial Sequence
  Description of Artificial Sequence: Synthetic oligonucleotide
ccuguucaugagcugagua

SEQ ID NO: 2009435 - RNA, 19 nt, Artificial Sequence
  Description of Artificial Sequence: Synthetic oligonucleotide
gcaagagaggucccugagu

SEQ ID NO: 2009436 - RNA, 19 nt, Artificial Sequence
  Description of Artificial Sequence: Synthetic oligonucleotide
gguugacgucagcgggaag

SEQ ID NO: 2009437 - RNA, 19 nt, Artificial Sequence
  Description of Artificial Sequence: Synthetic oligonucleotide
cacaaucguacaacaccau

SEQ ID NO: 2009438 - RNA, 19 nt, Artificial Sequence
  Description of Artificial Sequence: Synthetic oligonucleotide
gucccugaguagcuuacuu

SEQ ID NO: 2009439 - RNA, 19 nt, Artificial Sequence
  Description of Artificial Sequence: Synthetic oligonucleotide
cuucaccugccaggcaaga

SEQ ID NO: 2009440 - RNA, 19 nt, Artificial Sequence
  Description of Artificial Sequence: Synthetic oligonucleotide
gguccuuuaccggaaugcu

SEQ ID NO: 2009441 - RNA, 19 nt, Artificial Sequence
  Description of Artificial Sequence: Synthetic oligonucleotide
caucugggcggaacuggua

SEQ ID NO: 2009442 - RNA, 19 nt, Artificial Sequence
  Description of Artificial Sequence: Synthetic oligonucleotide
acagcgcagcguagagaug

SEQ ID NO: 2009443 - RNA, 19 nt, Artificial Sequence
  Description of Artificial Sequence: Synthetic oligonucleotide
cucggcagcgccccagucu

SEQ ID NO: 2009444 - RNA, 19 nt, Artificial Sequence
  Description of Artificial Sequence: Synthetic oligonucleotide
gcccucuggcgccuguccc

SEQ ID NO: 2009445 - RNA, 19 nt, Artificial Sequence
  Description of Artificial Sequence: Synthetic oligonucleotide
aaggugcuguggagcuuau

SEQ ID NO: 2009446 - RNA, 19 nt, Artificial Sequence
  Description of Artificial Sequence: Synthetic oligonucleotide
gggagguaucagucacuuc

SEQ ID NO: 2009447 - RNA, 19 nt, Artificial Sequence
  Description of Artificial Sequence: Synthetic oligonucleotide
gcacuugugcggagguccc

SEQ ID NO: 2009448 - RNA, 19 nt, Artificial Sequence
  Description of Artificial Sequence: Synthetic oligonucleotide
ccucaucaugcccagcgaa

SEQ ID NO: 2009449 - RNA, 19 nt, Artificial Sequence
  Description of Artificial Sequence: Synthetic oligonucleotide
agucuaggauguggagauu

SEQ ID NO: 2009450 - RNA, 19 nt, Artificial Sequence
  Description of Artificial Sequence: Synthetic oligonucleotide
guaucgggcugauggcaau

SEQ ID NO: 2009451 - RNA, 19 nt, Artificial Sequence
  Description of Artificial Sequence: Synthetic oligonucleotide
cucugaagggccgacgguu

SEQ ID NO: 2009452 - RNA, 19 nt, Artificial Sequence
  Description of Artificial Sequence: Synthetic oligonucleotide
ccggaaugcuggucaucag

SEQ ID NO: 2009453 - RNA, 19 nt, Artificial Sequence
  Description of Artificial Sequence: Synthetic oligonucleotide
agcugaguaucgggcugau

SEQ ID NO: 2009454 - RNA, 19 nt, Artificial Sequence
  Description of Artificial Sequence: Synthetic oligonucleotide
ccugccaggcaagagaggu

SEQ ID NO: 2009455 - RNA, 19 nt, Artificial Sequence
  Description of Artificial Sequence: Synthetic oligonucleotide
uacugucauggggcuccuc

SEQ ID NO: 2009456 - RNA, 19 nt, Artificial Sequence
  Description of Artificial Sequence: Synthetic oligonucleotide
guguaagcacugccccagu

SEQ ID NO: 2009457 - RNA, 19 nt, Artificial Sequence
  Description of Artificial Sequence: Synthetic oligonucleotide
ccaucugucuguaggcagu

SEQ ID NO: 2009458 - RNA, 19 nt, Artificial Sequence
  Description of Artificial Sequence: Synthetic oligonucleotide
gcaccaucugggcggaacu

SEQ ID NO: 2009459 - RNA, 19 nt, Artificial Sequence
  Description of Artificial Sequence: Synthetic oligonucleotide
gcugaguaucgggcugaug

SEQ ID NO: 2009460 - RNA, 19 nt, Artificial Sequence
  Description of Artificial Sequence: Synthetic oligonucleotide
gcacugccccagucggccc

SEQ ID NO: 2009461 - RNA, 19 nt, Artificial Sequence
  Description of Artificial Sequence: Synthetic oligonucleotide
gcggaggucccaguagcga

SEQ ID NO: 2009462 - RNA, 19 nt, Artificial Sequence
  Description of Artificial Sequence: Synthetic oligonucleotide
cacuugugcggagguccca

SEQ ID NO: 2009463 - RNA, 19 nt, Artificial Sequence
  Description of Artificial Sequence: Synthetic oligonucleotide
ccgaggccaaaggccauac

SEQ ID NO: 2009464 - RNA, 19 nt, Artificial Sequence
  Description of Artificial Sequence: Synthetic oligonucleotide
gugcccacaacaagcuguu

SEQ ID NO: 2009465 - RNA, 19 nt, Artificial Sequence
  Description of Artificial Sequence: Synthetic oligonucleotide
gccaggcaagagagguccc

SEQ ID NO: 2009466 - RNA, 19 nt, Artificial Sequence
  Description of Artificial Sequence: Synthetic oligonucleotide
cagcguagagaugccuggu

SEQ ID NO: 2009467 - RNA, 19 nt, Artificial Sequence
  Description of Artificial Sequence: Synthetic oligonucleotide
ccucuggcgccugucccac

SEQ ID NO: 2009468 - RNA, 19 nt, Artificial Sequence
  Description of Artificial Sequence: Synthetic oligonucleotide
ccucucggcagcgccccag

SEQ ID NO: 2009469 - RNA, 19 nt, Artificial Sequence
  Description of Artificial Sequence: Synthetic oligonucleotide
ccccucucggcagcgcccc

SEQ ID NO: 2009470 - RNA, 19 nt, Artificial Sequence
  Description of Artificial Sequence: Synthetic oligonucleotide
gcccagcgaagacucugaa

SEQ ID NO: 2009471 - RNA, 19 nt, Artificial Sequence
  Description of Artificial Sequence: Synthetic oligonucleotide
cucuggcgccugucccaca

SEQ ID NO: 2009472 - RNA, 19 nt, Artificial Sequence
  Description of Artificial Sequence: Synthetic oligonucleotide
guccacuguugagguccca

SEQ ID NO: 2009473 - RNA, 19 nt, Artificial Sequence
  Description of Artificial Sequence: Synthetic oligonucleotide
gccgacgguucaagcuggc

SEQ ID NO: 2009474 - RNA, 19 nt, Artificial Sequence
  Description of Artificial Sequence: Synthetic oligonucleotide
ggguggugugucauggguu

SEQ ID NO: 2009475 - RNA, 19 nt, Artificial Sequence
  Description of Artificial Sequence: Synthetic oligonucleotide
ccuuuaccggaaugcuggu

SEQ ID NO: 2009476 - RNA, 19 nt, Artificial Sequence
  Description of Artificial Sequence: Synthetic oligonucleotide
ggucccugaguagcuuacu

SEQ ID NO: 2009477 - RNA, 19 nt, Artificial Sequence
  Description of Artificial Sequence: Synthetic oligonucleotide
guggugugucauggguuuu

SEQ ID NO: 2009478 - RNA, 19 nt, Artificial Sequence
  Description of Artificial Sequence: Synthetic oligonucleotide
ggcagggguggugugucau

SEQ ID NO: 2009479 - RNA, 19 nt, Artificial Sequence
  Description of Artificial Sequence: Synthetic oligonucleotide
uggcaccaucugggcggaa

SEQ ID NO: 2009480 - RNA, 19 nt, Artificial Sequence
  Description of Artificial Sequence: Synthetic oligonucleotide
cuccuccugcacugacaau

SEQ ID NO: 2009481 - RNA, 19 nt, Artificial Sequence
  Description of Artificial Sequence: Synthetic oligonucleotide
ggucuucagucuggauggu

SEQ ID NO: 2009482 - RNA, 19 nt, Artificial Sequence
  Description of Artificial Sequence: Synthetic oligonucleotide
ccgacgguucaagcuggca

SEQ ID NO: 2009483 - RNA, 19 nt, Artificial Sequence
  Description of Artificial Sequence: Synthetic oligonucleotide
ccaggcaagagaggucccu

SEQ ID NO: 2009484 - RNA, 19 nt, Artificial Sequence
  Description of Artificial Sequence: Synthetic oligonucleotide
cgccugucccacaaucgua

SEQ ID NO: 2009485 - RNA, 19 nt, Artificial Sequence
  Description of Artificial Sequence: Synthetic oligonucleotide
ccagucggcccgaggccaa

SEQ ID NO: 2009486 - RNA, 19 nt, Artificial Sequence
  Description of Artificial Sequence: Synthetic oligonucleotide
cagucggcccgaggccaaa

SEQ ID NO: 2009487 - RNA, 19 nt, Artificial Sequence
  Description of Artificial Sequence: Synthetic oligonucleotide
ggugaaccgcaggcaguau

SEQ ID NO: 2009488 - RNA, 19 nt, Artificial Sequence
  Description of Artificial Sequence: Synthetic oligonucleotide
cuggcgccugucccacaau

SEQ ID NO: 2009489 - RNA, 19 nt, Artificial Sequence
  Description of Artificial Sequence: Synthetic oligonucleotide
gcgcagcguagagaugccu

SEQ ID NO: 2009490 - RNA, 19 nt, Artificial Sequence
  Description of Artificial Sequence: Synthetic oligonucleotide
cccuggagccacucacaau

SEQ ID NO: 2009491 - RNA, 19 nt, Artificial Sequence
  Description of Artificial Sequence: Synthetic oligonucleotide
cccgaggccaaaggccaua

SEQ ID NO: 2009492 - RNA, 19 nt, Artificial Sequence
  Description of Artificial Sequence: Synthetic oligonucleotide
ggucggugccgagccgcgu

SEQ ID NO: 2009493 - RNA, 19 nt, Artificial Sequence
  Description of Artificial Sequence: Synthetic oligonucleotide
cccucucggcagcgcccca

SEQ ID NO: 2009494 - RNA, 19 nt, Artificial Sequence
  Description of Artificial Sequence: Synthetic oligonucleotide
gcccgaggccaaaggccau

SEQ ID NO: 2009495 - RNA, 19 nt, Artificial Sequence
  Description of Artificial Sequence: Synthetic oligonucleotide
cggugccgagccgcgugaa

SEQ ID NO: 2009496 - RNA, 19 nt, Artificial Sequence
  Description of Artificial Sequence: Synthetic oligonucleotide
acaggaauaauguuggucc

SEQ ID NO: 2009497 - RNA, 19 nt, Artificial Sequence
  Description of Artificial Sequence: Synthetic oligonucleotide
aauagagacucucuucucc

SEQ ID NO: 2009498 - RNA, 19 nt, Artificial Sequence
  Description of Artificial Sequence: Synthetic oligonucleotide
cuuaauggaaaucacaaag

SEQ ID NO: 2009499 - RNA, 19 nt, Artificial Sequence
  Description of Artificial Sequence: Synthetic oligonucleotide
aacugcauagaccagacca

SEQ ID NO: 2009500 - RNA, 19 nt, Artificial Sequence
  Description of Artificial Sequence: Synthetic oligonucleotide
aauaauguugguccucuuc

SEQ ID NO: 2009501 - RNA, 19 nt, Artificial Sequence
  Description of Artificial Sequence: Synthetic oligonucleotide
aguucuucaccuuaggagg

SEQ ID NO: 2009502 - RNA, 19 nt, Artificial Sequence
  Description of Artificial Sequence: Synthetic oligonucleotide
cuugauguggaucuggucg

SEQ ID NO: 2009503 - RNA, 19 nt, Artificial Sequence
  Description of Artificial Sequence: Synthetic oligonucleotide
gacgauaucagagacgugg

SEQ ID NO: 2009504 - RNA, 19 nt, Artificial Sequence
  Description of Artificial Sequence: Synthetic oligonucleotide
acucaauuuuaucaucucc

SEQ ID NO: 2009505 - RNA, 19 nt, Artificial Sequence
  Description of Artificial Sequence: Synthetic oligonucleotide
aacggaagggguuccaggc

SEQ ID NO: 2009506 - RNA, 19 nt, Artificial Sequence
  Description of Artificial Sequence: Synthetic oligonucleotide
agcaacacacauuucuucc

SEQ ID NO: 2009507 - RNA, 19 nt, Artificial Sequence
  Description of Artificial Sequence: Synthetic oligonucleotide
aaggugugggcauucaggg

SEQ ID NO: 2009508 - RNA, 19 nt, Artificial Sequence
  Description of Artificial Sequence: Synthetic oligonucleotide
aguagcaacacacauuucu

SEQ ID NO: 2009509 - RNA, 19 nt, Artificial Sequence
  Description of Artificial Sequence: Synthetic oligonucleotide
uuaauggaaaucacaaagu

SEQ ID NO: 2009510 - RNA, 19 nt, Artificial Sequence
  Description of Artificial Sequence: Synthetic oligonucleotide
uaugcaguuggccuuaaug

SEQ ID NO: 2009511 - RNA, 19 nt, Artificial Sequence
  Description of Artificial Sequence: Synthetic oligonucleotide
ugcaacaguagcaacacac

SEQ ID NO: 2009512 - RNA, 19 nt, Artificial Sequence
  Description of Artificial Sequence: Synthetic oligonucleotide
gaucacauccaccaucgcg

SEQ ID NO: 2009513 - RNA, 19 nt, Artificial Sequence
  Description of Artificial Sequence: Synthetic oligonucleotide
ucgguacucaauuuuauca

SEQ ID NO: 2009514 - RNA, 19 nt, Artificial Sequence
  Description of Artificial Sequence: Synthetic oligonucleotide
aaauagagacucucuucuc

SEQ ID NO: 2009515 - RNA, 19 nt, Artificial Sequence
  Description of Artificial Sequence: Synthetic oligonucleotide
augaagacaccuucaugcc

SEQ ID NO: 2009516 - RNA, 19 nt, Artificial Sequence
  Description of Artificial Sequence: Synthetic oligonucleotide
gauaucagagacgugggag

SEQ ID NO: 2009517 - RNA, 19 nt, Artificial Sequence
  Description of Artificial Sequence: Synthetic oligonucleotide
gauucuucgugacaagggc

SEQ ID NO: 2009518 - RNA, 19 nt, Artificial Sequence
  Description of Artificial Sequence: Synthetic oligonucleotide
aaaguguccuccauuccgc

SEQ ID NO: 2009519 - RNA, 19 nt, Artificial Sequence
  Description of Artificial Sequence: Synthetic oligonucleotide
aauccagacagcucggggu

SEQ ID NO: 2009520 - RNA, 19 nt, Artificial Sequence
  Description of Artificial Sequence: Synthetic oligonucleotide
uucggaggcaaacacagcu

SEQ ID NO: 2009521 - RNA, 19 nt, Artificial Sequence
  Description of Artificial Sequence: Synthetic oligonucleotide
ucugaaauagagacucucu

SEQ ID NO: 2009522 - RNA, 19 nt, Artificial Sequence
  Description of Artificial Sequence: Synthetic oligonucleotide
aucacaggaauaauguugg

SEQ ID NO: 2009523 - RNA, 19 nt, Artificial Sequence
  Description of Artificial Sequence: Synthetic oligonucleotide
cuagcaucuucaaucacag

SEQ ID NO: 2009524 - RNA, 19 nt, Artificial Sequence
  Description of Artificial Sequence: Synthetic oligonucleotide
uaagcaugcgguauuugug

SEQ ID NO: 2009525 - RNA, 19 nt, Artificial Sequence
  Description of Artificial Sequence: Synthetic oligonucleotide
ucagagacgugggagacgg

SEQ ID NO: 2009526 - RNA, 19 nt, Artificial Sequence
  Description of Artificial Sequence: Synthetic oligonucleotide
cugaaaccuggcuucaucg

SEQ ID NO: 2009527 - RNA, 19 nt, Artificial Sequence
  Description of Artificial Sequence: Synthetic oligonucleotide
ucgaccucgaccuccaaag

SEQ ID NO: 2009528 - RNA, 19 nt, Artificial Sequence
  Description of Artificial Sequence: Synthetic oligonucleotide
acaaacuacacgugcaaca

SEQ ID NO: 2009529 - RNA, 19 nt, Artificial Sequence
  Description of Artificial Sequence: Synthetic oligonucleotide
uacaauccggguuuggucu

SEQ ID NO: 2009530 - RNA, 19 nt, Artificial Sequence
  Description of Artificial Sequence: Synthetic oligonucleotide
aagcaugcgguauuugugu

SEQ ID NO: 2009531 - RNA, 19 nt, Artificial Sequence
  Description of Artificial Sequence: Synthetic oligonucleotide
gaaauagagacucucuucu

SEQ ID NO: 2009532 - RNA, 19 nt, Artificial Sequence
  Description of Artificial Sequence: Synthetic oligonucleotide
auaagcaugcgguauuugu

SEQ ID NO: 2009533 - RNA, 19 nt, Artificial Sequence
  Description of Artificial Sequence: Synthetic oligonucleotide
uuucaguucuucaccuuag

SEQ ID NO: 2009534 - RNA, 19 nt, Artificial Sequence
  Description of Artificial Sequence: Synthetic oligonucleotide
gaaggugugggcauucagg

SEQ ID NO: 2009535 - RNA, 19 nt, Artificial Sequence
  Description of Artificial Sequence: Synthetic oligonucleotide
uccuccauuccgcaggaag

SEQ ID NO: 2009536 - RNA, 19 nt, Artificial Sequence
  Description of Artificial Sequence: Synthetic oligonucleotide
ucaguucuucaccuuagga

SEQ ID NO: 2009537 - RNA, 19 nt, Artificial Sequence
  Description of Artificial Sequence: Synthetic oligonucleotide
uggaaaucacaaagugucc

SEQ ID NO: 2009538 - RNA, 19 nt, Artificial Sequence
  Description of Artificial Sequence: Synthetic oligonucleotide
gaccagaccauccgggccg

SEQ ID NO: 2009539 - RNA, 19 nt, Artificial Sequence
  Description of Artificial Sequence: Synthetic oligonucleotide
cuuuccucgacagaugaag

SEQ ID NO: 2009540 - RNA, 19 nt, Artificial Sequence
  Description of Artificial Sequence: Synthetic oligonucleotide
ugcauagaccagaccaucc

SEQ ID NO: 2009541 - RNA, 19 nt, Artificial Sequence
  Description of Artificial Sequence: Synthetic oligonucleotide
uccgcaaagaucacaucca

SEQ ID NO: 2009542 - RNA, 19 nt, Artificial Sequence
  Description of Artificial Sequence: Synthetic oligonucleotide
ucgacaccgcccaggaucg

SEQ ID NO: 2009543 - RNA, 19 nt, Artificial Sequence
  Description of Artificial Sequence: Synthetic oligonucleotide
auaucagagacgugggaga

SEQ ID NO: 2009544 - RNA, 19 nt, Artificial Sequence
  Description of Artificial Sequence: Synthetic oligonucleotide
uucuucgugacaagggcgu

SEQ ID NO: 2009545 - RNA, 19 nt, Artificial Sequence
  Description of Artificial Sequence: Synthetic oligonucleotide
gugccuagcaucuucaauc

SEQ ID NO: 2009546 - RNA, 19 nt, Artificial Sequence
  Description of Artificial Sequence: Synthetic oligonucleotide
accaucgcgauaagcaugc

SEQ ID NO: 2009547 - RNA, 19 nt, Artificial Sequence
  Description of Artificial Sequence: Synthetic oligonucleotide
ggagaacucaacugcauag

SEQ ID NO: 2009548 - RNA, 19 nt, Artificial Sequence
  Description of Artificial Sequence: Synthetic oligonucleotide
cacagcauggucccgcucg

SEQ ID NO: 2009549 - RNA, 19 nt, Artificial Sequence
  Description of Artificial Sequence: Synthetic oligonucleotide
uuaggagguggccuguaca

SEQ ID NO: 2009550 - RNA, 19 nt, Artificial Sequence
  Description of Artificial Sequence: Synthetic oligonucleotide
ccuguacacaccuacaacc

SEQ ID NO: 2009551 - RNA, 19 nt, Artificial Sequence
  Description of Artificial Sequence: Synthetic oligonucleotide
cauagaccagaccauccgg

SEQ ID NO: 2009552 - RNA, 19 nt, Artificial Sequence
  Description of Artificial Sequence: Synthetic oligonucleotide
uuugugugggugccuagca

SEQ ID NO: 2009553 - RNA, 19 nt, Artificial Sequence
  Description of Artificial Sequence: Synthetic oligonucleotide
acuucggaggcaaacacag

SEQ ID NO: 2009554 - RNA, 19 nt, Artificial Sequence
  Description of Artificial Sequence: Synthetic oligonucleotide
ucuagcgucaacugcuccu

SEQ ID NO: 2009555 - RNA, 19 nt, Artificial Sequence
  Description of Artificial Sequence: Synthetic oligonucleotide
agauucuucgugacaaggg

SEQ ID NO: 2009556 - RNA, 19 nt, Artificial Sequence
  Description of Artificial Sequence: Synthetic oligonucleotide
cuacacgugcaacaguagc

SEQ ID NO: 2009557 - RNA, 19 nt, Artificial Sequence
  Description of Artificial Sequence: Synthetic oligonucleotide
uuuccucgacagaugaaga

SEQ ID NO: 2009558 - RNA, 19 nt, Artificial Sequence
  Description of Artificial Sequence: Synthetic oligonucleotide
ugaaaccuggcuucaucgc

SEQ ID NO: 2009559 - RNA, 19 nt, Artificial Sequence
  Description of Artificial Sequence: Synthetic oligonucleotide
guggaucuggucgacaccg

SEQ ID NO: 2009560 - RNA, 19 nt, Artificial Sequence
  Description of Artificial Sequence: Synthetic oligonucleotide
uguacacaccuacaaccac

SEQ ID NO: 2009561 - RNA, 19 nt, Artificial Sequence
  Description of Artificial Sequence: Synthetic oligonucleotide
caaguugaugaggucacgg

SEQ ID NO: 2009562 - RNA, 19 nt, Artificial Sequence
  Description of Artificial Sequence: Synthetic oligonucleotide
ucacuucggaggcaaacac

SEQ ID NO: 2009563 - RNA, 19 nt, Artificial Sequence
  Description of Artificial Sequence: Synthetic oligonucleotide
uccggguuuggucuggcug

SEQ ID NO: 2009564 - RNA, 19 nt, Artificial Sequence
  Description of Artificial Sequence: Synthetic oligonucleotide
gaccucgaccuccaaagcc

SEQ ID NO: 2009565 - RNA, 19 nt, Artificial Sequence
  Description of Artificial Sequence: Synthetic oligonucleotide
accaucacauucuucccug

SEQ ID NO: 2009566 - RNA, 19 nt, Artificial Sequence
  Description of Artificial Sequence: Synthetic oligonucleotide
auucuucgugacaagggcg

SEQ ID NO: 2009567 - RNA, 19 nt, Artificial Sequence
  Description of Artificial Sequence: Synthetic oligonucleotide
aaacuacacgugcaacagu

SEQ ID NO: 2009568 - RNA, 19 nt, Artificial Sequence
  Description of Artificial Sequence: Synthetic oligonucleotide
aacuacacgugcaacagua

SEQ ID NO: 2009569 - RNA, 19 nt, Artificial Sequence
  Description of Artificial Sequence: Synthetic oligonucleotide
caugcgguauuuguguggg

SEQ ID NO: 2009570 - RNA, 19 nt, Artificial Sequence
  Description of Artificial Sequence: Synthetic oligonucleotide
uccaauccagacagcucgg

SEQ ID NO: 2009571 - RNA, 19 nt, Artificial Sequence
  Description of Artificial Sequence: Synthetic oligonucleotide
cagacuggaagccuccgcc

SEQ ID NO: 2009572 - RNA, 19 nt, Artificial Sequence
  Description of Artificial Sequence: Synthetic oligonucleotide
aucgcgauaagcaugcggu

SEQ ID NO: 2009573 - RNA, 19 nt, Artificial Sequence
  Description of Artificial Sequence: Synthetic oligonucleotide
ugugugggugccuagcauc

SEQ ID NO: 2009574 - RNA, 19 nt, Artificial Sequence
  Description of Artificial Sequence: Synthetic oligonucleotide
auagaccagaccauccggg

SEQ ID NO: 2009575 - RNA, 19 nt, Artificial Sequence
  Description of Artificial Sequence: Synthetic oligonucleotide
gucgacaccgcccaggauc

SEQ ID NO: 2009576 - RNA, 19 nt, Artificial Sequence
  Description of Artificial Sequence: Synthetic oligonucleotide
ugccuagcaucuucaauca

SEQ ID NO: 2009577 - RNA, 19 nt, Artificial Sequence
  Description of Artificial Sequence: Synthetic oligonucleotide
cagauucuucgugacaagg

SEQ ID NO: 2009578 - RNA, 19 nt, Artificial Sequence
  Description of Artificial Sequence: Synthetic oligonucleotide
uaggagguggccuguacac

SEQ ID NO: 2009579 - RNA, 19 nt, Artificial Sequence
  Description of Artificial Sequence: Synthetic oligonucleotide
uccucgacagaugaagaca

SEQ ID NO: 2009580 - RNA, 19 nt, Artificial Sequence
  Description of Artificial Sequence: Synthetic oligonucleotide
aacggugggagaacucaac

SEQ ID NO: 2009581 - RNA, 19 nt, Artificial Sequence
  Description of Artificial Sequence: Synthetic oligonucleotide
uguugguccucuucuuggc

SEQ ID NO: 2009582 - RNA, 19 nt, Artificial Sequence
  Description of Artificial Sequence: Synthetic oligonucleotide
caucgcgauaagcaugcgg

SEQ ID NO: 2009583 - RNA, 19 nt, Artificial Sequence
  Description of Artificial Sequence: Synthetic oligonucleotide
uacacagauucuccaggga

SEQ ID NO: 2009584 - RNA, 19 nt, Artificial Sequence
  Description of Artificial Sequence: Synthetic oligonucleotide
uuaucaucucccucugaaa

SEQ ID NO: 2009585 - RNA, 19 nt, Artificial Sequence
  Description of Artificial Sequence: Synthetic oligonucleotide
gucacggccagaacggugg

SEQ ID NO: 2009586 - RNA, 19 nt, Artificial Sequence
  Description of Artificial Sequence: Synthetic oligonucleotide
aucgcugcgucccucccgg

SEQ ID NO: 2009587 - RNA, 19 nt, Artificial Sequence
  Description of Artificial Sequence: Synthetic oligonucleotide
uuccucgacagaugaagac

SEQ ID NO: 2009588 - RNA, 19 nt, Artificial Sequence
  Description of Artificial Sequence: Synthetic oligonucleotide
cuacaauccggguuugguc

SEQ ID NO: 2009589 - RNA, 19 nt, Artificial Sequence
  Description of Artificial Sequence: Synthetic oligonucleotide
uagaccagaccauccgggc

SEQ ID NO: 2009590 - RNA, 19 nt, Artificial Sequence
  Description of Artificial Sequence: Synthetic oligonucleotide
augccggugggguuccacc

SEQ ID NO: 2009591 - RNA, 19 nt, Artificial Sequence
  Description of Artificial Sequence: Synthetic oligonucleotide
gagucuaugcaguuggccu

SEQ ID NO: 2009592 - RNA, 19 nt, Artificial Sequence
  Description of Artificial Sequence: Synthetic oligonucleotide
accuacaaccacagcaugg

SEQ ID NO: 2009593 - RNA, 19 nt, Artificial Sequence
  Description of Artificial Sequence: Synthetic oligonucleotide
uacucaauuuuaucaucuc

SEQ ID NO: 2009594 - RNA, 19 nt, Artificial Sequence
  Description of Artificial Sequence: Synthetic oligonucleotide
aaaccuggcuucaucgcug

SEQ ID NO: 2009595 - RNA, 19 nt, Artificial Sequence
  Description of Artificial Sequence: Synthetic oligonucleotide
agggcuacaauccggguuu

SEQ ID NO: 2009596 - RNA, 19 nt, Artificial Sequence
  Description of Artificial Sequence: Synthetic oligonucleotide
agcgucaacugcuccuggg

SEQ ID NO: 2009597 - RNA, 19 nt, Artificial Sequence
  Description of Artificial Sequence: Synthetic oligonucleotide
aacaguagcaacacacauu

SEQ ID NO: 2009598 - RNA, 19 nt, Artificial Sequence
  Description of Artificial Sequence: Synthetic oligonucleotide
aggaauaauguugguccuc

SEQ ID NO: 2009599 - RNA, 19 nt, Artificial Sequence
  Description of Artificial Sequence: Synthetic oligonucleotide
ucgaccuccaaagccuccg

SEQ ID NO: 2009600 - RNA, 19 nt, Artificial Sequence
  Description of Artificial Sequence: Synthetic oligonucleotide
gcauagaccagaccauccg

SEQ ID NO: 2009601 - RNA, 19 nt, Artificial Sequence
  Description of Artificial Sequence: Synthetic oligonucleotide
gagacgugggagacggugg

SEQ ID NO: 2009602 - RNA, 19 nt, Artificial Sequence
  Description of Artificial Sequence: Synthetic oligonucleotide
uagagacucucuucucccc

SEQ ID NO: 2009603 - RNA, 19 nt, Artificial Sequence
  Description of Artificial Sequence: Synthetic oligonucleotide
agggcguccuccuuuccuc

SEQ ID NO: 2009604 - RNA, 19 nt, Artificial Sequence
  Description of Artificial Sequence: Synthetic oligonucleotide
cuuggccaaguugaugagg

SEQ ID NO: 2009605 - RNA, 19 nt, Artificial Sequence
  Description of Artificial Sequence: Synthetic oligonucleotide
agagacgugggagacggug

SEQ ID NO: 2009606 - RNA, 19 nt, Artificial Sequence
  Description of Artificial Sequence: Synthetic oligonucleotide
cucgguacucaauuuuauc

SEQ ID NO: 2009607 - RNA, 19 nt, Artificial Sequence
  Description of Artificial Sequence: Synthetic oligonucleotide
cacggggacugaaaccugg

SEQ ID NO: 2009608 - RNA, 19 nt, Artificial Sequence
  Description of Artificial Sequence: Synthetic oligonucleotide
uagggcucuagcgucaacu

SEQ ID NO: 2009609 - RNA, 19 nt, Artificial Sequence
  Description of Artificial Sequence: Synthetic oligonucleotide
acgauaucagagacguggg

SEQ ID NO: 2009610 - RNA, 19 nt, Artificial Sequence
  Description of Artificial Sequence: Synthetic oligonucleotide
ucaccuuaggagguggccu

SEQ ID NO: 2009611 - RNA, 19 nt, Artificial Sequence
  Description of Artificial Sequence: Synthetic oligonucleotide
aaguguccuccauuccgca

SEQ ID NO: 2009612 - RNA, 19 nt, Artificial Sequence
  Description of Artificial Sequence: Synthetic oligonucleotide
aucucccucugaaauagag

SEQ ID NO: 2009613 - RNA, 19 nt, Artificial Sequence
  Description of Artificial Sequence: Synthetic oligonucleotide
agcucgggguuucaguucu

SEQ ID NO: 2009614 - RNA, 19 nt, Artificial Sequence
  Description of Artificial Sequence: Synthetic oligonucleotide
uggccuuaauggaaaucac

SEQ ID NO: 2009615 - RNA, 19 nt, Artificial Sequence
  Description of Artificial Sequence: Synthetic oligonucleotide
acggugggagaacucaacu

SEQ ID NO: 2009616 - RNA, 19 nt, Artificial Sequence
  Description of Artificial Sequence: Synthetic oligonucleotide
gacucucuucuccccauac

SEQ ID NO: 2009617 - RNA, 19 nt, Artificial Sequence
  Description of Artificial Sequence: Synthetic oligonucleotide
agcaugcgguauuugugug

SEQ ID NO: 2009618 - RNA, 19 nt, Artificial Sequence
  Description of Artificial Sequence: Synthetic oligonucleotide
ucccucugaaauagagacu

SEQ ID NO: 2009619 - RNA, 19 nt, Artificial Sequence
  Description of Artificial Sequence: Synthetic oligonucleotide
gaucuggucgacaccgccc

SEQ ID NO: 2009620 - RNA, 19 nt, Artificial Sequence
  Description of Artificial Sequence: Synthetic oligonucleotide
caccaucgcgauaagcaug

SEQ ID NO: 2009621 - RNA, 19 nt, Artificial Sequence
  Description of Artificial Sequence: Synthetic oligonucleotide
agaccauccgggccgacga

SEQ ID NO: 2009622 - RNA, 19 nt, Artificial Sequence
  Description of Artificial Sequence: Synthetic oligonucleotide
guuucaguucuucaccuua

SEQ ID NO: 2009623 - RNA, 19 nt, Artificial Sequence
  Description of Artificial Sequence: Synthetic oligonucleotide
agggcucuagcgucaacug

SEQ ID NO: 2009624 - RNA, 19 nt, Artificial Sequence
  Description of Artificial Sequence: Synthetic oligonucleotide
gaugaggucacggccagaa

SEQ ID NO: 2009625 - RNA, 19 nt, Artificial Sequence
  Description of Artificial Sequence: Synthetic oligonucleotide
ccaagguagagaaccuugg

SEQ ID NO: 2009626 - RNA, 19 nt, Artificial Sequence
  Description of Artificial Sequence: Synthetic oligonucleotide
uccccauacacagauucuc

SEQ ID NO: 2009627 - RNA, 19 nt, Artificial Sequence
  Description of Artificial Sequence: Synthetic oligonucleotide
cuuggaacggaagggguuc

SEQ ID NO: 2009628 - RNA, 19 nt, Artificial Sequence
  Description of Artificial Sequence: Synthetic oligonucleotide
gagaacucaacugcauaga

SEQ ID NO: 2009629 - RNA, 19 nt, Artificial Sequence
  Description of Artificial Sequence: Synthetic oligonucleotide
agucuaugcaguuggccuu

SEQ ID NO: 2009630 - RNA, 19 nt, Artificial Sequence
  Description of Artificial Sequence: Synthetic oligonucleotide
gaaaccuggcuucaucgcu

SEQ ID NO: 2009631 - RNA, 19 nt, Artificial Sequence
  Description of Artificial Sequence: Synthetic oligonucleotide
auccaccaucgcgauaagc

SEQ ID NO: 2009632 - RNA, 19 nt, Artificial Sequence
  Description of Artificial Sequence: Synthetic oligonucleotide
uggagucuaugcaguuggc

SEQ ID NO: 2009633 - RNA, 19 nt, Artificial Sequence
  Description of Artificial Sequence: Synthetic oligonucleotide
uggucgacaccgcccagga

SEQ ID NO: 2009634 - RNA, 19 nt, Artificial Sequence
  Description of Artificial Sequence: Synthetic oligonucleotide
augaggucacggccagaac

SEQ ID NO: 2009635 - RNA, 19 nt, Artificial Sequence
  Description of Artificial Sequence: Synthetic oligonucleotide
acauccgcaaagaucacau

SEQ ID NO: 2009636 - RNA, 19 nt, Artificial Sequence
  Description of Artificial Sequence: Synthetic oligonucleotide
cuucaccuuaggagguggc

SEQ ID NO: 2009637 - RNA, 19 nt, Artificial Sequence
  Description of Artificial Sequence: Synthetic oligonucleotide
ucgggguuucaguucuuca

SEQ ID NO: 2009638 - RNA, 19 nt, Artificial Sequence
  Description of Artificial Sequence: Synthetic oligonucleotide
uagcgucaacugcuccugg

SEQ ID NO: 2009639 - RNA, 19 nt, Artificial Sequence
  Description of Artificial Sequence: Synthetic oligonucleotide
cuucacuucggaggcaaac

SEQ ID NO: 2009640 - RNA, 19 nt, Artificial Sequence
  Description of Artificial Sequence: Synthetic oligonucleotide
uuccgcagaggcuguggag

SEQ ID NO: 2009641 - RNA, 19 nt, Artificial Sequence
  Description of Artificial Sequence: Synthetic oligonucleotide
cucgacagaugaagacacc

SEQ ID NO: 2009642 - RNA, 19 nt, Artificial Sequence
  Description of Artificial Sequence: Synthetic oligonucleotide
cccgcaaucagcagcgucc

SEQ ID NO: 2009643 - RNA, 19 nt, Artificial Sequence
  Description of Artificial Sequence: Synthetic oligonucleotide
gguuuggucuggcugugcc

SEQ ID NO: 2009644 - RNA, 19 nt, Artificial Sequence
  Description of Artificial Sequence: Synthetic oligonucleotide
aggcuguggagucuaugca

SEQ ID NO: 2009645 - RNA, 19 nt, Artificial Sequence
  Description of Artificial Sequence: Synthetic oligonucleotide
uccgggccgacgauaucag

SEQ ID NO: 2009646 - RNA, 19 nt, Artificial Sequence
  Description of Artificial Sequence: Synthetic oligonucleotide
acgugcaacaguagcaaca

SEQ ID NO: 2009647 - RNA, 19 nt, Artificial Sequence
  Description of Artificial Sequence: Synthetic oligonucleotide
uccgcaggaaggugugggc

SEQ ID NO: 2009648 - RNA, 19 nt, Artificial Sequence
  Description of Artificial Sequence: Synthetic oligonucleotide
agacuggaagccuccgccu

SEQ ID NO: 2009649 - RNA, 19 nt, Artificial Sequence
  Description of Artificial Sequence: Synthetic oligonucleotide
uggccuguacacaccuaca

SEQ ID NO: 2009650 - RNA, 19 nt, Artificial Sequence
  Description of Artificial Sequence: Synthetic oligonucleotide
aggcuugauguggaucugg

SEQ ID NO: 2009651 - RNA, 19 nt, Artificial Sequence
  Description of Artificial Sequence: Synthetic oligonucleotide
uucgugacaagggcguccu

SEQ ID NO: 2009652 - RNA, 19 nt, Artificial Sequence
  Description of Artificial Sequence: Synthetic oligonucleotide
ugggagacgguggugccug

SEQ ID NO: 2009653 - RNA, 19 nt, Artificial Sequence
  Description of Artificial Sequence: Synthetic oligonucleotide
cuucgugacaagggcgucc

SEQ ID NO: 2009654 - RNA, 19 nt, Artificial Sequence
  Description of Artificial Sequence: Synthetic oligonucleotide
ucguagggcucuagcguca

SEQ ID NO: 2009655 - RNA, 19 nt, Artificial Sequence
  Description of Artificial Sequence: Synthetic oligonucleotide
gcaugcgguauuugugugg

SEQ ID NO: 2009656 - RNA, 19 nt, Artificial Sequence
  Description of Artificial Sequence: Synthetic oligonucleotide
uugugugggugccuagcau

SEQ ID NO: 2009657 - RNA, 19 nt, Artificial Sequence
  Description of Artificial Sequence: Synthetic oligonucleotide
cuagcgucaacugcuccug

SEQ ID NO: 2009658 - RNA, 19 nt, Artificial Sequence
  Description of Artificial Sequence: Synthetic oligonucleotide
aagacaccuucaugccggu

SEQ ID NO: 2009659 - RNA, 19 nt, Artificial Sequence
  Description of Artificial Sequence: Synthetic oligonucleotide
caccuuaggagguggccug

SEQ ID NO: 2009660 - RNA, 19 nt, Artificial Sequence
  Description of Artificial Sequence: Synthetic oligonucleotide
ccucgacagaugaagacac

SEQ ID NO: 2009661 - RNA, 19 nt, Artificial Sequence
  Description of Artificial Sequence: Synthetic oligonucleotide
gccgccuccagacuggaag

SEQ ID NO: 2009662 - RNA, 19 nt, Artificial Sequence
  Description of Artificial Sequence: Synthetic oligonucleotide
ccuagcaucuucaaucaca

SEQ ID NO: 2009663 - RNA, 19 nt, Artificial Sequence
  Description of Artificial Sequence: Synthetic oligonucleotide
cuucggaggcaaacacagc

SEQ ID NO: 2009664 - RNA, 19 nt, Artificial Sequence
  Description of Artificial Sequence: Synthetic oligonucleotide
uucuucaccuuaggaggug

SEQ ID NO: 2009665 - RNA, 19 nt, Artificial Sequence
  Description of Artificial Sequence: Synthetic oligonucleotide
ucggaggcaaacacagcuu

SEQ ID NO: 2009666 - RNA, 19 nt, Artificial Sequence
  Description of Artificial Sequence: Synthetic oligonucleotide
agacgugggagacgguggu

SEQ ID NO: 2009667 - RNA, 19 nt, Artificial Sequence
  Description of Artificial Sequence: Synthetic oligonucleotide
auccgggccgacgauauca

SEQ ID NO: 2009668 - RNA, 19 nt, Artificial Sequence
  Description of Artificial Sequence: Synthetic oligonucleotide
cugugccacauccgcaaag

SEQ ID NO: 2009669 - RNA, 19 nt, Artificial Sequence
  Description of Artificial Sequence: Synthetic oligonucleotide
uucuuccaauccagacagc

SEQ ID NO: 2009670 - RNA, 19 nt, Artificial Sequence
  Description of Artificial Sequence: Synthetic oligonucleotide
accucgaccuccaaagccu

SEQ ID NO: 2009671 - RNA, 19 nt, Artificial Sequence
  Description of Artificial Sequence: Synthetic oligonucleotide
acuacacgugcaacaguag

SEQ ID NO: 2009672 - RNA, 19 nt, Artificial Sequence
  Description of Artificial Sequence: Synthetic oligonucleotide
agguggccuguacacaccu

SEQ ID NO: 2009673 - RNA, 19 nt, Artificial Sequence
  Description of Artificial Sequence: Synthetic oligonucleotide
acacgugcaacaguagcaa

SEQ ID NO: 2009674 - RNA, 19 nt, Artificial Sequence
  Description of Artificial Sequence: Synthetic oligonucleotide
cuucuuggccaaguugaug

SEQ ID NO: 2009675 - RNA, 19 nt, Artificial Sequence
  Description of Artificial Sequence: Synthetic oligonucleotide
cucuagcgucaacugcucc

SEQ ID NO: 2009676 - RNA, 19 nt, Artificial Sequence
  Description of Artificial Sequence: Synthetic oligonucleotide
agggguuccaggcucggua

SEQ ID NO: 2009677 - RNA, 19 nt, Artificial Sequence
  Description of Artificial Sequence: Synthetic oligonucleotide
cuucaugccggugggguuc

SEQ ID NO: 2009678 - RNA, 19 nt, Artificial Sequence
  Description of Artificial Sequence: Synthetic oligonucleotide
gcgucaacugcuccugggg

SEQ ID NO: 2009679 - RNA, 19 nt, Artificial Sequence
  Description of Artificial Sequence: Synthetic oligonucleotide
gccuuaauggaaaucacaa

SEQ ID NO: 2009680 - RNA, 19 nt, Artificial Sequence
  Description of Artificial Sequence: Synthetic oligonucleotide
accuucaugccgguggggu

SEQ ID NO: 2009681 - RNA, 19 nt, Artificial Sequence
  Description of Artificial Sequence: Synthetic oligonucleotide
ugccggugggguuccacca

SEQ ID NO: 2009682 - RNA, 19 nt, Artificial Sequence
  Description of Artificial Sequence: Synthetic oligonucleotide
gggaccagauucuucguga

SEQ ID NO: 2009683 - RNA, 19 nt, Artificial Sequence
  Description of Artificial Sequence: Synthetic oligonucleotide
aaccuuggccccaggcuug

SEQ ID NO: 2009684 - RNA, 19 nt, Artificial Sequence
  Description of Artificial Sequence: Synthetic oligonucleotide
cccaagguagagaaccuug

SEQ ID NO: 2009685 - RNA, 19 nt, Artificial Sequence
  Description of Artificial Sequence: Synthetic oligonucleotide
caacugcauagaccagacc

SEQ ID NO: 2009686 - RNA, 19 nt, Artificial Sequence
  Description of Artificial Sequence: Synthetic oligonucleotide
acggggacugaaaccuggc

SEQ ID NO: 2009687 - RNA, 19 nt, Artificial Sequence
  Description of Artificial Sequence: Synthetic oligonucleotide
cacgugcaacaguagcaac

SEQ ID NO: 2009688 - RNA, 19 nt, Artificial Sequence
  Description of Artificial Sequence: Synthetic oligonucleotide
cuccuuuccucgacagaug

SEQ ID NO: 2009689 - RNA, 19 nt, Artificial Sequence
  Description of Artificial Sequence: Synthetic oligonucleotide
caccuacaaccacagcaug

SEQ ID NO: 2009690 - RNA, 19 nt, Artificial Sequence
  Description of Artificial Sequence: Synthetic oligonucleotide
aggcucgguacucaauuuu

SEQ ID NO: 2009691 - RNA, 19 nt, Artificial Sequence
  Description of Artificial Sequence: Synthetic oligonucleotide
cuacaaccacagcaugguc

SEQ ID NO: 2009692 - RNA, 19 nt, Artificial Sequence
  Description of Artificial Sequence: Synthetic oligonucleotide
uccaccgccucaccucgac

SEQ ID NO: 2009693 - RNA, 19 nt, Artificial Sequence
  Description of Artificial Sequence: Synthetic oligonucleotide
cuggucgacaccgcccagg

SEQ ID NO: 2009694 - RNA, 19 nt, Artificial Sequence
  Description of Artificial Sequence: Synthetic oligonucleotide
cacuucggaggcaaacaca

SEQ ID NO: 2009695 - RNA, 19 nt, Artificial Sequence
  Description of Artificial Sequence: Synthetic oligonucleotide
ucuggucgacaccgcccag

SEQ ID NO: 2009696 - RNA, 19 nt, Artificial Sequence
  Description of Artificial Sequence: Synthetic oligonucleotide
ggcucccgcaaucagcagc

SEQ ID NO: 2009697 - RNA, 19 nt, Artificial Sequence
  Description of Artificial Sequence: Synthetic oligonucleotide
gcgguauuugugugggugc

SEQ ID NO: 2009698 - RNA, 19 nt, Artificial Sequence
  Description of Artificial Sequence: Synthetic oligonucleotide
auggucccgcucguagggc

SEQ ID NO: 2009699 - RNA, 19 nt, Artificial Sequence
  Description of Artificial Sequence: Synthetic oligonucleotide
accgccucugucaccaaag

SEQ ID NO: 2009700 - RNA, 19 nt, Artificial Sequence
  Description of Artificial Sequence: Synthetic oligonucleotide
uggucccgcucguagggcu

SEQ ID NO: 2009701 - RNA, 19 nt, Artificial Sequence
  Description of Artificial Sequence: Synthetic oligonucleotide
gcaacacacauuucuucca

SEQ ID NO: 2009702 - RNA, 19 nt, Artificial Sequence
  Description of Artificial Sequence: Synthetic oligonucleotide
cucgaccuccaaagccucc

SEQ ID NO: 2009703 - RNA, 19 nt, Artificial Sequence
  Description of Artificial Sequence: Synthetic oligonucleotide
gaagggguuccaggcucgg

SEQ ID NO: 2009704 - RNA, 19 nt, Artificial Sequence
  Description of Artificial Sequence: Synthetic oligonucleotide
cugcauagaccagaccauc

SEQ ID NO: 2009705 - RNA, 19 nt, Artificial Sequence
  Description of Artificial Sequence: Synthetic oligonucleotide
gugggugccuagcaucuuc

SEQ ID NO: 2009706 - RNA, 19 nt, Artificial Sequence
  Description of Artificial Sequence: Synthetic oligonucleotide
ccccauacacagauucucc

SEQ ID NO: 2009707 - RNA, 19 nt, Artificial Sequence
  Description of Artificial Sequence: Synthetic oligonucleotide
ggcuucaucgcugcguccc

SEQ ID NO: 2009708 - RNA, 19 nt, Artificial Sequence
  Description of Artificial Sequence: Synthetic oligonucleotide
ugguccucuucuuggccaa

SEQ ID NO: 2009709 - RNA, 19 nt, Artificial Sequence
  Description of Artificial Sequence: Synthetic oligonucleotide
uucccugccugguuuccuc

SEQ ID NO: 2009710 - RNA, 19 nt, Artificial Sequence
  Description of Artificial Sequence: Synthetic oligonucleotide
cagaccauccgggccgacg

SEQ ID NO: 2009711 - RNA, 19 nt, Artificial Sequence
  Description of Artificial Sequence: Synthetic oligonucleotide
accgccucaccucgaccuc

SEQ ID NO: 2009712 - RNA, 19 nt, Artificial Sequence
  Description of Artificial Sequence: Synthetic oligonucleotide
cugaaauagagacucucuu

SEQ ID NO: 2009713 - RNA, 19 nt, Artificial Sequence
  Description of Artificial Sequence: Synthetic oligonucleotide
ggaaaucacaaaguguccu

SEQ ID NO: 2009714 - RNA, 19 nt, Artificial Sequence
  Description of Artificial Sequence: Synthetic oligonucleotide
agcuuggaacggaaggggu

SEQ ID NO: 2009715 - RNA, 19 nt, Artificial Sequence
  Description of Artificial Sequence: Synthetic oligonucleotide
ucgcgauaagcaugcggua

SEQ ID NO: 2009716 - RNA, 19 nt, Artificial Sequence
  Description of Artificial Sequence: Synthetic oligonucleotide
uccaggcucgguacucaau

SEQ ID NO: 2009717 - RNA, 19 nt, Artificial Sequence
  Description of Artificial Sequence: Synthetic oligonucleotide
ggaccagauucuucgugac

SEQ ID NO: 2009718 - RNA, 19 nt, Artificial Sequence
  Description of Artificial Sequence: Synthetic oligonucleotide
cagaacggugggagaacuc

SEQ ID NO: 2009719 - RNA, 19 nt, Artificial Sequence
  Description of Artificial Sequence: Synthetic oligonucleotide
gccuguacacaccuacaac

SEQ ID NO: 2009720 - RNA, 19 nt, Artificial Sequence
  Description of Artificial Sequence: Synthetic oligonucleotide
caauccggguuuggucugg

SEQ ID NO: 2009721 - RNA, 19 nt, Artificial Sequence
  Description of Artificial Sequence: Synthetic oligonucleotide
caccucgaccucgaccucc

SEQ ID NO: 2009722 - RNA, 19 nt, Artificial Sequence
  Description of Artificial Sequence: Synthetic oligonucleotide
gggcucuagcgucaacugc

SEQ ID NO: 2009723 - RNA, 19 nt, Artificial Sequence
  Description of Artificial Sequence: Synthetic oligonucleotide
ggccgacgauaucagagac

SEQ ID NO: 2009724 - RNA, 19 nt, Artificial Sequence
  Description of Artificial Sequence: Synthetic oligonucleotide
uggcuucaucgcugcgucc

SEQ ID NO: 2009725 - RNA, 19 nt, Artificial Sequence
  Description of Artificial Sequence: Synthetic oligonucleotide
ggccuuaauggaaaucaca

SEQ ID NO: 2009726 - RNA, 19 nt, Artificial Sequence
  Description of Artificial Sequence: Synthetic oligonucleotide
ggaauaauguugguccucu

SEQ ID NO: 2009727 - RNA, 19 nt, Artificial Sequence
  Description of Artificial Sequence: Synthetic oligonucleotide
gcaacaguagcaacacaca

SEQ ID NO: 2009728 - RNA, 19 nt, Artificial Sequence
  Description of Artificial Sequence: Synthetic oligonucleotide
cgcaaagaucacauccacc

SEQ ID NO: 2009729 - RNA, 19 nt, Artificial Sequence
  Description of Artificial Sequence: Synthetic oligonucleotide
accuggcuucaucgcugcg

SEQ ID NO: 2009730 - RNA, 19 nt, Artificial Sequence
  Description of Artificial Sequence: Synthetic oligonucleotide
cgggccgacgauaucagag

SEQ ID NO: 2009731 - RNA, 19 nt, Artificial Sequence
  Description of Artificial Sequence: Synthetic oligonucleotide
uggccaaguugaugagguc

SEQ ID NO: 2009732 - RNA, 19 nt, Artificial Sequence
  Description of Artificial Sequence: Synthetic oligonucleotide
uggaacggaagggguucca

SEQ ID NO: 2009733 - RNA, 19 nt, Artificial Sequence
  Description of Artificial Sequence: Synthetic oligonucleotide
cgcucguagggcucuagcg

SEQ ID NO: 2009734 - RNA, 19 nt, Artificial Sequence
  Description of Artificial Sequence: Synthetic oligonucleotide
ggaacggaagggguuccag

SEQ ID NO: 2009735 - RNA, 19 nt, Artificial Sequence
  Description of Artificial Sequence: Synthetic oligonucleotide
gccgacgauaucagagacg

SEQ ID NO: 2009736 - RNA, 19 nt, Artificial Sequence
  Description of Artificial Sequence: Synthetic oligonucleotide
cuuccgcagaggcugugga

SEQ ID NO: 2009737 - RNA, 19 nt, Artificial Sequence
  Description of Artificial Sequence: Synthetic oligonucleotide
guagagaaccuuggcccca

SEQ ID NO: 2009738 - RNA, 19 nt, Artificial Sequence
  Description of Artificial Sequence: Synthetic oligonucleotide
cagcucgggguuucaguuc

SEQ ID NO: 2009739 - RNA, 19 nt, Artificial Sequence
  Description of Artificial Sequence: Synthetic oligonucleotide
gccaaguugaugaggucac

SEQ ID NO: 2009740 - RNA, 19 nt, Artificial Sequence
  Description of Artificial Sequence: Synthetic oligonucleotide
ccuuaauggaaaucacaaa

SEQ ID NO: 2009741 - RNA, 19 nt, Artificial Sequence
  Description of Artificial Sequence: Synthetic oligonucleotide
caguagcaacacacauuuc

SEQ ID NO: 2009742 - RNA, 19 nt, Artificial Sequence
  Description of Artificial Sequence: Synthetic oligonucleotide
caggaauaauguugguccu

SEQ ID NO: 2009743 - RNA, 19 nt, Artificial Sequence
  Description of Artificial Sequence: Synthetic oligonucleotide
ccucaccucgaccucgacc

SEQ ID NO: 2009744 - RNA, 19 nt, Artificial Sequence
  Description of Artificial Sequence: Synthetic oligonucleotide
aagggguuccaggcucggu

SEQ ID NO: 2009745 - RNA, 19 nt, Artificial Sequence
  Description of Artificial Sequence: Synthetic oligonucleotide
ccuccucguccccugaagc

SEQ ID NO: 2009746 - RNA, 19 nt, Artificial Sequence
  Description of Artificial Sequence: Synthetic oligonucleotide
gggcguccuccuuuccucg

SEQ ID NO: 2009747 - RNA, 19 nt, Artificial Sequence
  Description of Artificial Sequence: Synthetic oligonucleotide
caggaucgcugcugccagc

SEQ ID NO: 2009748 - RNA, 19 nt, Artificial Sequence
  Description of Artificial Sequence: Synthetic oligonucleotide
ggccuguacacaccuacaa

SEQ ID NO: 2009749 - RNA, 19 nt, Artificial Sequence
  Description of Artificial Sequence: Synthetic oligonucleotide
gggagaacucaacugcaua

SEQ ID NO: 2009750 - RNA, 19 nt, Artificial Sequence
  Description of Artificial Sequence: Synthetic oligonucleotide
guagcaacacacauuucuu

SEQ ID NO: 2009751 - RNA, 19 nt, Artificial Sequence
  Description of Artificial Sequence: Synthetic oligonucleotide
cucgggguuucaguucuuc

SEQ ID NO: 2009752 - RNA, 19 nt, Artificial Sequence
  Description of Artificial Sequence: Synthetic oligonucleotide
cgugacaagggcguccucc

SEQ ID NO: 2009753 - RNA, 19 nt, Artificial Sequence
  Description of Artificial Sequence: Synthetic oligonucleotide
cgggguuucaguucuucac

SEQ ID NO: 2009754 - RNA, 19 nt, Artificial Sequence
  Description of Artificial Sequence: Synthetic oligonucleotide
gugacaagggcguccuccu

SEQ ID NO: 2009755 - RNA, 19 nt, Artificial Sequence
  Description of Artificial Sequence: Synthetic oligonucleotide
cucguccccugaagccucc

SEQ ID NO: 2009756 - RNA, 19 nt, Artificial Sequence
  Description of Artificial Sequence: Synthetic oligonucleotide
caagggcguccuccuuucc

SEQ ID NO: 2009757 - RNA, 19 nt, Artificial Sequence
  Description of Artificial Sequence: Synthetic oligonucleotide
ccaggaucgcugcugccag

SEQ ID NO: 2009758 - RNA, 19 nt, Artificial Sequence
  Description of Artificial Sequence: Synthetic oligonucleotide
gggccgacgauaucagaga

SEQ ID NO: 2009759 - RNA, 19 nt, Artificial Sequence
  Description of Artificial Sequence: Synthetic oligonucleotide
caccgcccaggaucgcugc

SEQ ID NO: 2009760 - RNA, 19 nt, Artificial Sequence
  Description of Artificial Sequence: Synthetic oligonucleotide
cgugcaacaguagcaacac

SEQ ID NO: 2009761 - RNA, 19 nt, Artificial Sequence
  Description of Artificial Sequence: Synthetic oligonucleotide
ccgcaaagaucacauccac

SEQ ID NO: 2009762 - RNA, 19 nt, Artificial Sequence
  Description of Artificial Sequence: Synthetic oligonucleotide
agacucucuucuccccaua

SEQ ID NO: 2009763 - RNA, 19 nt, Artificial Sequence
  Description of Artificial Sequence: Synthetic oligonucleotide
ccaggcuugauguggaucu

SEQ ID NO: 2009764 - RNA, 19 nt, Artificial Sequence
  Description of Artificial Sequence: Synthetic oligonucleotide
gugcaacaguagcaacaca

SEQ ID NO: 2009765 - RNA, 19 nt, Artificial Sequence
  Description of Artificial Sequence: Synthetic oligonucleotide
ggguuucaguucuucaccu

SEQ ID NO: 2009766 - RNA, 19 nt, Artificial Sequence
  Description of Artificial Sequence: Synthetic oligonucleotide
cgucaacugcuccuggggc

SEQ ID NO: 2009767 - RNA, 19 nt, Artificial Sequence
  Description of Artificial Sequence: Synthetic oligonucleotide
ugaugaggucacggccaga

SEQ ID NO: 2009768 - RNA, 19 nt, Artificial Sequence
  Description of Artificial Sequence: Synthetic oligonucleotide
ucaccucgaccucgaccuc

SEQ ID NO: 2009769 - RNA, 19 nt, Artificial Sequence
  Description of Artificial Sequence: Synthetic oligonucleotide
cucgaccccggccgccucc

SEQ ID NO: 2009770 - RNA, 19 nt, Artificial Sequence
  Description of Artificial Sequence: Synthetic oligonucleotide
cauccaccaucgcgauaag

SEQ ID NO: 2009771 - RNA, 19 nt, Artificial Sequence
  Description of Artificial Sequence: Synthetic oligonucleotide
ggcucuagcgucaacugcu

SEQ ID NO: 2009772 - RNA, 19 nt, Artificial Sequence
  Description of Artificial Sequence: Synthetic oligonucleotide
ccccaccaaagccuccucg

SEQ ID NO: 2009773 - RNA, 19 nt, Artificial Sequence
  Description of Artificial Sequence: Synthetic oligonucleotide
caccgccucaccucgaccu

SEQ ID NO: 2009774 - RNA, 19 nt, Artificial Sequence
  Description of Artificial Sequence: Synthetic oligonucleotide
gucccucccggccgcgcgg

SEQ ID NO: 2009775 - RNA, 19 nt, Artificial Sequence
  Description of Artificial Sequence: Synthetic oligonucleotide
caggaaggugugggcauuc

SEQ ID NO: 2009776 - RNA, 19 nt, Artificial Sequence
  Description of Artificial Sequence: Synthetic oligonucleotide
acaccgcccaggaucgcug

SEQ ID NO: 2009777 - RNA, 19 nt, Artificial Sequence
  Description of Artificial Sequence: Synthetic oligonucleotide
gaauaauguugguccucuu

SEQ ID NO: 2009778 - RNA, 19 nt, Artificial Sequence
  Description of Artificial Sequence: Synthetic oligonucleotide
gcucguagggcucuagcgu

SEQ ID NO: 2009779 - RNA, 19 nt, Artificial Sequence
  Description of Artificial Sequence: Synthetic oligonucleotide
ccaaguugaugaggucacg

SEQ ID NO: 2009780 - RNA, 19 nt, Artificial Sequence
  Description of Artificial Sequence: Synthetic oligonucleotide
caaagaucacauccaccau

SEQ ID NO: 2009781 - RNA, 19 nt, Artificial Sequence
  Description of Artificial Sequence: Synthetic oligonucleotide
ggcuacaauccggguuugg

SEQ ID NO: 2009782 - RNA, 19 nt, Artificial Sequence
  Description of Artificial Sequence: Synthetic oligonucleotide
cuucaucgcugcgucccuc

SEQ ID NO: 2009783 - RNA, 19 nt, Artificial Sequence
  Description of Artificial Sequence: Synthetic oligonucleotide
caugccggugggguuccac

SEQ ID NO: 2009784 - RNA, 19 nt, Artificial Sequence
  Description of Artificial Sequence: Synthetic oligonucleotide
ggucacggccagaacggug

SEQ ID NO: 2009785 - RNA, 19 nt, Artificial Sequence
  Description of Artificial Sequence: Synthetic oligonucleotide
ccccacggggacugaaacc

SEQ ID NO: 2009786 - RNA, 19 nt, Artificial Sequence
  Description of Artificial Sequence: Synthetic oligonucleotide
ccgacgauaucagagacgu

SEQ ID NO: 2009787 - RNA, 19 nt, Artificial Sequence
  Description of Artificial Sequence: Synthetic oligonucleotide
gucuaugcaguuggccuua

SEQ ID NO: 2009788 - RNA, 19 nt, Artificial Sequence
  Description of Artificial Sequence: Synthetic oligonucleotide
guagggcucuagcgucaac

SEQ ID NO: 2009789 - RNA, 19 nt, Artificial Sequence
  Description of Artificial Sequence: Synthetic oligonucleotide
accgcccaggaucgcugcu

SEQ ID NO: 2009790 - RNA, 19 nt, Artificial Sequence
  Description of Artificial Sequence: Synthetic oligonucleotide
ggggacugaaaccuggcuu

SEQ ID NO: 2009791 - RNA, 19 nt, Artificial Sequence
  Description of Artificial Sequence: Synthetic oligonucleotide
ggugccugaggcugcccca

SEQ ID NO: 2009792 - RNA, 19 nt, Artificial Sequence
  Description of Artificial Sequence: Synthetic oligonucleotide
cugccagcuuggaacggaa

SEQ ID NO: 2009793 - RNA, 19 nt, Artificial Sequence
  Description of Artificial Sequence: Synthetic oligonucleotide
uccagacagcucgggguuu

SEQ ID NO: 2009794 - RNA, 19 nt, Artificial Sequence
  Description of Artificial Sequence: Synthetic oligonucleotide
ucgugacaagggcguccuc

SEQ ID NO: 2009795 - RNA, 19 nt, Artificial Sequence
  Description of Artificial Sequence: Synthetic oligonucleotide
gcggcucccgcaaucagca

SEQ ID NO: 2009796 - RNA, 19 nt, Artificial Sequence
  Description of Artificial Sequence: Synthetic oligonucleotide
gacaccgcccaggaucgcu

SEQ ID NO: 2009797 - RNA, 19 nt, Artificial Sequence
  Description of Artificial Sequence: Synthetic oligonucleotide
accauccgggccgacgaua

SEQ ID NO: 2009798 - RNA, 19 nt, Artificial Sequence
  Description of Artificial Sequence: Synthetic oligonucleotide
ggugccuagcaucuucaau

SEQ ID NO: 2009799 - RNA, 19 nt, Artificial Sequence
  Description of Artificial Sequence: Synthetic oligonucleotide
ggcucgguacucaauuuua

SEQ ID NO: 2009800 - RNA, 19 nt, Artificial Sequence
  Description of Artificial Sequence: Synthetic oligonucleotide
cagggcuacaauccggguu

SEQ ID NO: 2009801 - RNA, 19 nt, Artificial Sequence
  Description of Artificial Sequence: Synthetic oligonucleotide
ugugggugccuagcaucuu

SEQ ID NO: 2009802 - RNA, 19 nt, Artificial Sequence
  Description of Artificial Sequence: Synthetic oligonucleotide
ggagacgguggugccugag

SEQ ID NO: 2009803 - RNA, 19 nt, Artificial Sequence
  Description of Artificial Sequence: Synthetic oligonucleotide
cgguauuugugugggugcc

SEQ ID NO: 2009804 - RNA, 19 nt, Artificial Sequence
  Description of Artificial Sequence: Synthetic oligonucleotide
ggccagaacggugggagaa

SEQ ID NO: 2009805 - RNA, 19 nt, Artificial Sequence
  Description of Artificial Sequence: Synthetic oligonucleotide
gguggugccugaggcugcc

SEQ ID NO: 2009806 - RNA, 19 nt, Artificial Sequence
  Description of Artificial Sequence: Synthetic oligonucleotide
ccgcaaucagcagcguccc

SEQ ID NO: 2009807 - RNA, 19 nt, Artificial Sequence
  Description of Artificial Sequence: Synthetic oligonucleotide
ccucgaccuccaaagccuc

SEQ ID NO: 2009808 - RNA, 19 nt, Artificial Sequence
  Description of Artificial Sequence: Synthetic oligonucleotide
agcuuccgcagaggcugug

SEQ ID NO: 2009809 - RNA, 19 nt, Artificial Sequence
  Description of Artificial Sequence: Synthetic oligonucleotide
ccuacaaccacagcauggu

SEQ ID NO: 2009810 - RNA, 19 nt, Artificial Sequence
  Description of Artificial Sequence: Synthetic oligonucleotide
ugcgucccucccggccgcg

SEQ ID NO: 2009811 - RNA, 19 nt, Artificial Sequence
  Description of Artificial Sequence: Synthetic oligonucleotide
accagaccauccgggccga

SEQ ID NO: 2009812 - RNA, 19 nt, Artificial Sequence
  Description of Artificial Sequence: Synthetic oligonucleotide
cauccgggccgacgauauc

SEQ ID NO: 2009813 - RNA, 19 nt, Artificial Sequence
  Description of Artificial Sequence: Synthetic oligonucleotide
ucccucccggccgcgcggc

SEQ ID NO: 2009814 - RNA, 19 nt, Artificial Sequence
  Description of Artificial Sequence: Synthetic oligonucleotide
cauucuucccugccugguu

SEQ ID NO: 2009815 - RNA, 19 nt, Artificial Sequence
  Description of Artificial Sequence: Synthetic oligonucleotide
ccgcucguagggcucuagc

SEQ ID NO: 2009816 - RNA, 19 nt, Artificial Sequence
  Description of Artificial Sequence: Synthetic oligonucleotide
ucguccccugaagccucca

SEQ ID NO: 2009817 - RNA, 19 nt, Artificial Sequence
  Description of Artificial Sequence: Synthetic oligonucleotide
ucgcugcgucccucccggc

SEQ ID NO: 2009818 - RNA, 19 nt, Artificial Sequence
  Description of Artificial Sequence: Synthetic oligonucleotide
ccucguccccugaagccuc

SEQ ID NO: 2009819 - RNA, 19 nt, Artificial Sequence
  Description of Artificial Sequence: Synthetic oligonucleotide
gccagaacggugggagaac

SEQ ID NO: 2009820 - RNA, 19 nt, Artificial Sequence
  Description of Artificial Sequence: Synthetic oligonucleotide
cagcagcguccccggacuc

SEQ ID NO: 2009821 - RNA, 19 nt, Artificial Sequence
  Description of Artificial Sequence: Synthetic oligonucleotide
cgaccucgaccuccaaagc

SEQ ID NO: 2009822 - RNA, 19 nt, Artificial Sequence
  Description of Artificial Sequence: Synthetic oligonucleotide
gcucuagcgucaacugcuc

SEQ ID NO: 2009823 - RNA, 19 nt, Artificial Sequence
  Description of Artificial Sequence: Synthetic oligonucleotide
cccacggggacugaaaccu

SEQ ID NO: 2009824 - RNA, 19 nt, Artificial Sequence
  Description of Artificial Sequence: Synthetic oligonucleotide
gcgauaagcaugcgguauu

SEQ ID NO: 2009825 - RNA, 19 nt, Artificial Sequence
  Description of Artificial Sequence: Synthetic oligonucleotide
ucgcugcugccagcuugga

SEQ ID NO: 2009826 - RNA, 19 nt, Artificial Sequence
  Description of Artificial Sequence: Synthetic oligonucleotide
caccucgaccccggccgcc

SEQ ID NO: 2009827 - RNA, 19 nt, Artificial Sequence
  Description of Artificial Sequence: Synthetic oligonucleotide
gguauuugugugggugccu

SEQ ID NO: 2009828 - RNA, 19 nt, Artificial Sequence
  Description of Artificial Sequence: Synthetic oligonucleotide
ccacggggacugaaaccug

SEQ ID NO: 2009829 - RNA, 19 nt, Artificial Sequence
  Description of Artificial Sequence: Synthetic oligonucleotide
cgauaucagagacguggga

SEQ ID NO: 2009830 - RNA, 19 nt, Artificial Sequence
  Description of Artificial Sequence: Synthetic oligonucleotide
ggcguccuccuuuccucga

SEQ ID NO: 2009831 - RNA, 19 nt, Artificial Sequence
  Description of Artificial Sequence: Synthetic oligonucleotide
gugggcauucagggcuaca

SEQ ID NO: 2009832 - RNA, 19 nt, Artificial Sequence
  Description of Artificial Sequence: Synthetic oligonucleotide
caggcucgguacucaauuu

SEQ ID NO: 2009833 - RNA, 19 nt, Artificial Sequence
  Description of Artificial Sequence: Synthetic oligonucleotide
ccgccucaccucgaccucg

SEQ ID NO: 2009834 - RNA, 19 nt, Artificial Sequence
  Description of Artificial Sequence: Synthetic oligonucleotide
gugugggcauucagggcua

SEQ ID NO: 2009835 - RNA, 19 nt, Artificial Sequence
  Description of Artificial Sequence: Synthetic oligonucleotide
ccggguuuggucuggcugu

SEQ ID NO: 2009836 - RNA, 19 nt, Artificial Sequence
  Description of Artificial Sequence: Synthetic oligonucleotide
gcagcguccccggacucca

SEQ ID NO: 2009837 - RNA, 19 nt, Artificial Sequence
  Description of Artificial Sequence: Synthetic oligonucleotide
cgguacucaauuuuaucau

SEQ ID NO: 2009838 - RNA, 19 nt, Artificial Sequence
  Description of Artificial Sequence: Synthetic oligonucleotide
gggcuacaauccggguuug

SEQ ID NO: 2009839 - RNA, 19 nt, Artificial Sequence
  Description of Artificial Sequence: Synthetic oligonucleotide
cagcguccccggacuccac

SEQ ID NO: 2009840 - RNA, 19 nt, Artificial Sequence
  Description of Artificial Sequence: Synthetic oligonucleotide
ccggugggguuccaccauc

SEQ ID NO: 2009841 - RNA, 19 nt, Artificial Sequence
  Description of Artificial Sequence: Synthetic oligonucleotide
ucaugccggugggguucca

SEQ ID NO: 2009842 - RNA, 19 nt, Artificial Sequence
  Description of Artificial Sequence: Synthetic oligonucleotide
cacggccagaacgguggga

SEQ ID NO: 2009843 - RNA, 19 nt, Artificial Sequence
  Description of Artificial Sequence: Synthetic oligonucleotide
ccaccaucgcgauaagcau

SEQ ID NO: 2009844 - RNA, 19 nt, Artificial Sequence
  Description of Artificial Sequence: Synthetic oligonucleotide
ccaggcucgguacucaauu

SEQ ID NO: 2009845 - RNA, 19 nt, Artificial Sequence
  Description of Artificial Sequence: Synthetic oligonucleotide
gaccauccgggccgacgau

SEQ ID NO: 2009846 - RNA, 19 nt, Artificial Sequence
  Description of Artificial Sequence: Synthetic oligonucleotide
cuaugcaguuggccuuaau

SEQ ID NO: 2009847 - RNA, 19 nt, Artificial Sequence
  Description of Artificial Sequence: Synthetic oligonucleotide
ccaucgcgauaagcaugcg

SEQ ID NO: 2009848 - RNA, 19 nt, Artificial Sequence
  Description of Artificial Sequence: Synthetic oligonucleotide
gcucgguacucaauuuuau

SEQ ID NO: 2009849 - RNA, 19 nt, Artificial Sequence
  Description of Artificial Sequence: Synthetic oligonucleotide
cuccaccgccucaccucga

SEQ ID NO: 2009850 - RNA, 19 nt, Artificial Sequence
  Description of Artificial Sequence: Synthetic oligonucleotide
gcuuggaacggaagggguu

SEQ ID NO: 2009851 - RNA, 19 nt, Artificial Sequence
  Description of Artificial Sequence: Synthetic oligonucleotide
cgucccucccggccgcgcg

SEQ ID NO: 2009852 - RNA, 19 nt, Artificial Sequence
  Description of Artificial Sequence: Synthetic oligonucleotide
ccgcccaggaucgcugcug

SEQ ID NO: 2009853 - RNA, 19 nt, Artificial Sequence
  Description of Artificial Sequence: Synthetic oligonucleotide
cuggaagccuccgccucgu

SEQ ID NO: 2009854 - RNA, 19 nt, Artificial Sequence
  Description of Artificial Sequence: Synthetic oligonucleotide
cgcaaucagcagcgucccc

SEQ ID NO: 2009855 - RNA, 19 nt, Artificial Sequence
  Description of Artificial Sequence: Synthetic oligonucleotide
cuaccgccucugucaccaa

SEQ ID NO: 2009856 - RNA, 19 nt, Artificial Sequence
  Description of Artificial Sequence: Synthetic oligonucleotide
ccagaacggugggagaacu

SEQ ID NO: 2009857 - RNA, 19 nt, Artificial Sequence
  Description of Artificial Sequence: Synthetic oligonucleotide
ccauccgggccgacgauau

SEQ ID NO: 2009858 - RNA, 19 nt, Artificial Sequence
  Description of Artificial Sequence: Synthetic oligonucleotide
gucccgcucguagggcucu

SEQ ID NO: 2009859 - RNA, 19 nt, Artificial Sequence
  Description of Artificial Sequence: Synthetic oligonucleotide
gguggccuguacacaccua

SEQ ID NO: 2009860 - RNA, 19 nt, Artificial Sequence
  Description of Artificial Sequence: Synthetic oligonucleotide
cccgcucguagggcucuag

SEQ ID NO: 2009861 - RNA, 19 nt, Artificial Sequence
  Description of Artificial Sequence: Synthetic oligonucleotide
cagagacgugggagacggu

SEQ ID NO: 2009862 - RNA, 19 nt, Artificial Sequence
  Description of Artificial Sequence: Synthetic oligonucleotide
cagaggcuguggagucuau

SEQ ID NO: 2009863 - RNA, 19 nt, Artificial Sequence
  Description of Artificial Sequence: Synthetic oligonucleotide
gccccaagguagagaaccu

SEQ ID NO: 2009864 - RNA, 19 nt, Artificial Sequence
  Description of Artificial Sequence: Synthetic oligonucleotide
cagcauggucccgcucgua

SEQ ID NO: 2009865 - RNA, 19 nt, Artificial Sequence
  Description of Artificial Sequence: Synthetic oligonucleotide
ccgggccgacgauaucaga

SEQ ID NO: 2009866 - RNA, 19 nt, Artificial Sequence
  Description of Artificial Sequence: Synthetic oligonucleotide
cgcgauaagcaugcgguau

SEQ ID NO: 2009867 - RNA, 19 nt, Artificial Sequence
  Description of Artificial Sequence: Synthetic oligonucleotide
ccgcgcggcucccgcaauc

SEQ ID NO: 2009868 - RNA, 19 nt, Artificial Sequence
  Description of Artificial Sequence: Synthetic oligonucleotide
gccggugggguuccaccau

SEQ ID NO: 2009869 - RNA, 19 nt, Artificial Sequence
  Description of Artificial Sequence: Synthetic oligonucleotide
ggucgacaccgcccaggau

SEQ ID NO: 2009870 - RNA, 19 nt, Artificial Sequence
  Description of Artificial Sequence: Synthetic oligonucleotide
ccuuaggagguggccugua

SEQ ID NO: 2009871 - RNA, 19 nt, Artificial Sequence
  Description of Artificial Sequence: Synthetic oligonucleotide
ggaucgcugcugccagcuu

SEQ ID NO: 2009872 - RNA, 19 nt, Artificial Sequence
  Description of Artificial Sequence: Synthetic oligonucleotide
gcgucccucccggccgcgc

SEQ ID NO: 2009873 - RNA, 19 nt, Artificial Sequence
  Description of Artificial Sequence: Synthetic oligonucleotide
ccucgaccccggccgccuc

SEQ ID NO: 2009874 - RNA, 19 nt, Artificial Sequence
  Description of Artificial Sequence: Synthetic oligonucleotide
ccuccucuaccgccucugu

SEQ ID NO: 2009875 - RNA, 19 nt, Artificial Sequence
  Description of Artificial Sequence: Synthetic oligonucleotide
cucccgcaaucagcagcgu

SEQ ID NO: 2009876 - RNA, 19 nt, Artificial Sequence
  Description of Artificial Sequence: Synthetic oligonucleotide
cguagggcucuagcgucaa

SEQ ID NO: 2009877 - RNA, 19 nt, Artificial Sequence
  Description of Artificial Sequence: Synthetic oligonucleotide
ccccaagguagagaaccuu

SEQ ID NO: 2009878 - RNA, 19 nt, Artificial Sequence
  Description of Artificial Sequence: Synthetic oligonucleotide
ggccgccuccagacuggaa

SEQ ID NO: 2009879 - RNA, 19 nt, Artificial Sequence
  Description of Artificial Sequence: Synthetic oligonucleotide
cgacaccgcccaggaucgc

SEQ ID NO: 2009880 - RNA, 19 nt, Artificial Sequence
  Description of Artificial Sequence: Synthetic oligonucleotide
ccccggccgccaccucgac

SEQ ID NO: 2009881 - RNA, 19 nt, Artificial Sequence
  Description of Artificial Sequence: Synthetic oligonucleotide
gccgcgcggcucccgcaau

SEQ ID NO: 2009882 - RNA, 19 nt, Artificial Sequence
  Description of Artificial Sequence: Synthetic oligonucleotide
cggccgccuccagacugga

SEQ ID NO: 2009883 - RNA, 19 nt, Artificial Sequence
  Description of Artificial Sequence: Synthetic oligonucleotide
cccucccggccgcgcggcu

SEQ ID NO: 2009884 - RNA, 19 nt, Artificial Sequence
  Description of Artificial Sequence: Synthetic oligonucleotide
uacuccaucaaacaggagc

SEQ ID NO: 2009885 - RNA, 19 nt, Artificial Sequence
  Description of Artificial Sequence: Synthetic oligonucleotide
ucacuuagugcuuagacca

SEQ ID NO: 2009886 - RNA, 19 nt, Artificial Sequence
  Description of Artificial Sequence: Synthetic oligonucleotide
aauaggggaccccagcugg

SEQ ID NO: 2009887 - RNA, 19 nt, Artificial Sequence
  Description of Artificial Sequence: Synthetic oligonucleotide
aaauggagcgccuuccagg

SEQ ID NO: 2009888 - RNA, 19 nt, Artificial Sequence
  Description of Artificial Sequence: Synthetic oligonucleotide
cuaagguuagacuacuucc

SEQ ID NO: 2009889 - RNA, 19 nt, Artificial Sequence
  Description of Artificial Sequence: Synthetic oligonucleotide
uuaaucagcaccagaauuc

SEQ ID NO: 2009890 - RNA, 19 nt, Artificial Sequence
  Description of Artificial Sequence: Synthetic oligonucleotide
uuuacuccaucaaacagga

SEQ ID NO: 2009891 - RNA, 19 nt, Artificial Sequence
  Description of Artificial Sequence: Synthetic oligonucleotide
uaauguuuggcaagagagg

SEQ ID NO: 2009892 - RNA, 19 nt, Artificial Sequence
  Description of Artificial Sequence: Synthetic oligonucleotide
cuugauccagacaaggagg

SEQ ID NO: 2009893 - RNA, 19 nt, Artificial Sequence
  Description of Artificial Sequence: Synthetic oligonucleotide
aggaauggcaagcagcugg

SEQ ID NO: 2009894 - RNA, 19 nt, Artificial Sequence
  Description of Artificial Sequence: Synthetic oligonucleotide
aauggcaagcagcuggguc

SEQ ID NO: 2009895 - RNA, 19 nt, Artificial Sequence
  Description of Artificial Sequence: Synthetic oligonucleotide
agucacuuagugcuuagac

SEQ ID NO: 2009896 - RNA, 19 nt, Artificial Sequence
  Description of Artificial Sequence: Synthetic oligonucleotide
uuuucccugccuaagggag

SEQ ID NO: 2009897 - RNA, 19 nt, Artificial Sequence
  Description of Artificial Sequence: Synthetic oligonucleotide
ucuuuucccugccuaaggg

SEQ ID NO: 2009898 - RNA, 19 nt, Artificial Sequence
  Description of Artificial Sequence: Synthetic oligonucleotide
uagaccaagacacaaggaa

SEQ ID NO: 2009899 - RNA, 19 nt, Artificial Sequence
  Description of Artificial Sequence: Synthetic oligonucleotide
uggagagugucucaggagc

SEQ ID NO: 2009900 - RNA, 19 nt, Artificial Sequence
  Description of Artificial Sequence: Synthetic oligonucleotide
cucucuaucuagcaggugc

SEQ ID NO: 2009901 - RNA, 19 nt, Artificial Sequence
  Description of Artificial Sequence: Synthetic oligonucleotide
ucuaauguuuggcaagaga

SEQ ID NO: 2009902 - RNA, 19 nt, Artificial Sequence
  Description of Artificial Sequence: Synthetic oligonucleotide
ucuaagguuagacuacuuc

SEQ ID NO: 2009903 - RNA, 19 nt, Artificial Sequence
  Description of Artificial Sequence: Synthetic oligonucleotide
agaugucucaggaaaaugg

SEQ ID NO: 2009904 - RNA, 19 nt, Artificial Sequence
  Description of Artificial Sequence: Synthetic oligonucleotide
uaagguuagacuacuuccu

SEQ ID NO: 2009905 - RNA, 19 nt, Artificial Sequence
  Description of Artificial Sequence: Synthetic oligonucleotide
aaaauggagcgccuuccag

SEQ ID NO: 2009906 - RNA, 19 nt, Artificial Sequence
  Description of Artificial Sequence: Synthetic oligonucleotide
aagggauagaggaaagggg

SEQ ID NO: 2009907 - RNA, 19 nt, Artificial Sequence
  Description of Artificial Sequence: Synthetic oligonucleotide
auuaaucagcaccagaauu

SEQ ID NO: 2009908 - RNA, 19 nt, Artificial Sequence
  Description of Artificial Sequence: Synthetic oligonucleotide
uggaugaacagcucuggcc

SEQ ID NO: 2009909 - RNA, 19 nt, Artificial Sequence
  Description of Artificial Sequence: Synthetic oligonucleotide
aagagaggagcuucucauc

SEQ ID NO: 2009910 - RNA, 19 nt, Artificial Sequence
  Description of Artificial Sequence: Synthetic oligonucleotide
aguugcacacacugaggcc

SEQ ID NO: 2009911 - RNA, 19 nt, Artificial Sequence
  Description of Artificial Sequence: Synthetic oligonucleotide
gaaacugaggcggaggccc

SEQ ID NO: 2009912 - RNA, 19 nt, Artificial Sequence
  Description of Artificial Sequence: Synthetic oligonucleotide
ucauggguauagcagagaa

SEQ ID NO: 2009913 - RNA, 19 nt, Artificial Sequence
  Description of Artificial Sequence: Synthetic oligonucleotide
uuguaggcagccuggagag

SEQ ID NO: 2009914 - RNA, 19 nt, Artificial Sequence
  Description of Artificial Sequence: Synthetic oligonucleotide
ucggcaucauuaaucagca

SEQ ID NO: 2009915 - RNA, 19 nt, Artificial Sequence
  Description of Artificial Sequence: Synthetic oligonucleotide
auagcagagaaggaggcag

SEQ ID NO: 2009916 - RNA, 19 nt, Artificial Sequence
  Description of Artificial Sequence: Synthetic oligonucleotide
ucuacccucagcagaagga

SEQ ID NO: 2009917 - RNA, 19 nt, Artificial Sequence
  Description of Artificial Sequence: Synthetic oligonucleotide
gucacuuagugcuuagacc

SEQ ID NO: 2009918 - RNA, 19 nt, Artificial Sequence
  Description of Artificial Sequence: Synthetic oligonucleotide
cagcucucuaucuagcagg

SEQ ID NO: 2009919 - RNA, 19 nt, Artificial Sequence
  Description of Artificial Sequence: Synthetic oligonucleotide
aaggggacuaaggaccugg

SEQ ID NO: 2009920 - RNA, 19 nt, Artificial Sequence
  Description of Artificial Sequence: Synthetic oligonucleotide
uucucaucaguuacuccag

SEQ ID NO: 2009921 - RNA, 19 nt, Artificial Sequence
  Description of Artificial Sequence: Synthetic oligonucleotide
agagaggagcuucucauca

SEQ ID NO: 2009922 - RNA, 19 nt, Artificial Sequence
  Description of Artificial Sequence: Synthetic oligonucleotide
uuagaccaagacacaagga

SEQ ID NO: 2009923 - RNA, 19 nt, Artificial Sequence
  Description of Artificial Sequence: Synthetic oligonucleotide
ccaaaggggacuaaggacc

SEQ ID NO: 2009924 - RNA, 19 nt, Artificial Sequence
  Description of Artificial Sequence: Synthetic oligonucleotide
agguuagacuacuuccuuc

SEQ ID NO: 2009925 - RNA, 19 nt, Artificial Sequence
  Description of Artificial Sequence: Synthetic oligonucleotide
gggacuaaggaccuggaag

SEQ ID NO: 2009926 - RNA, 19 nt, Artificial Sequence
  Description of Artificial Sequence: Synthetic oligonucleotide
uaaucagcaccagaauucc

SEQ ID NO: 2009927 - RNA, 19 nt, Artificial Sequence
  Description of Artificial Sequence: Synthetic oligonucleotide
uuagugcuuagaccaagac

SEQ ID NO: 2009928 - RNA, 19 nt, Artificial Sequence
  Description of Artificial Sequence: Synthetic oligonucleotide
aguuacuccaguucaucca

SEQ ID NO: 2009929 - RNA, 19 nt, Artificial Sequence
  Description of Artificial Sequence: Synthetic oligonucleotide
uuccccaugaagaugucuc

SEQ ID NO: 2009930 - RNA, 19 nt, Artificial Sequence
  Description of Artificial Sequence: Synthetic oligonucleotide
gaagcaguguccaaggaga

SEQ ID NO: 2009931 - RNA, 19 nt, Artificial Sequence
  Description of Artificial Sequence: Synthetic oligonucleotide
gaggugaacucugaauagg

SEQ ID NO: 2009932 - RNA, 19 nt, Artificial Sequence
  Description of Artificial Sequence: Synthetic oligonucleotide
ggacuaaggaccuggaagc

SEQ ID NO: 2009933 - RNA, 19 nt, Artificial Sequence
  Description of Artificial Sequence: Synthetic oligonucleotide
uauguagggagggaggcca

SEQ ID NO: 2009934 - RNA, 19 nt, Artificial Sequence
  Description of Artificial Sequence: Synthetic oligonucleotide
uguggagaugaagaggaug

SEQ ID NO: 2009935 - RNA, 19 nt, Artificial Sequence
  Description of Artificial Sequence: Synthetic oligonucleotide
aggugcugcacacccaaac

SEQ ID NO: 2009936 - RNA, 19 nt, Artificial Sequence
  Description of Artificial Sequence: Synthetic oligonucleotide
agaauuccuggccgcacac

SEQ ID NO: 2009937 - RNA, 19 nt, Artificial Sequence
  Description of Artificial Sequence: Synthetic oligonucleotide
auucucuacccucagcaga

SEQ ID NO: 2009938 - RNA, 19 nt, Artificial Sequence
  Description of Artificial Sequence: Synthetic oligonucleotide
gguuagacuacuuccuucc

SEQ ID NO: 2009939 - RNA, 19 nt, Artificial Sequence
  Description of Artificial Sequence: Synthetic oligonucleotide
uggagcgccuuccaggcag

SEQ ID NO: 2009940 - RNA, 19 nt, Artificial Sequence
  Description of Artificial Sequence: Synthetic oligonucleotide
uucccagucggcaucauua

SEQ ID NO: 2009941 - RNA, 19 nt, Artificial Sequence
  Description of Artificial Sequence: Synthetic oligonucleotide
aucauuaaucagcaccaga

SEQ ID NO: 2009942 - RNA, 19 nt, Artificial Sequence
  Description of Artificial Sequence: Synthetic oligonucleotide
uugcaaaggugcuugggcu

SEQ ID NO: 2009943 - RNA, 19 nt, Artificial Sequence
  Description of Artificial Sequence: Synthetic oligonucleotide
aagaugucucaggaaaaug

SEQ ID NO: 2009944 - RNA, 19 nt, Artificial Sequence
  Description of Artificial Sequence: Synthetic oligonucleotide
ugguagccuauguagggag

SEQ ID NO: 2009945 - RNA, 19 nt, Artificial Sequence
  Description of Artificial Sequence: Synthetic oligonucleotide
acagcucucuaucuagcag

SEQ ID NO: 2009946 - RNA, 19 nt, Artificial Sequence
  Description of Artificial Sequence: Synthetic oligonucleotide
ucucuaucuagcaggugcu

SEQ ID NO: 2009947 - RNA, 19 nt, Artificial Sequence
  Description of Artificial Sequence: Synthetic oligonucleotide
agacuacuuccuuccauuc

SEQ ID NO: 2009948 - RNA, 19 nt, Artificial Sequence
  Description of Artificial Sequence: Synthetic oligonucleotide
aacccugcuugucucagga

SEQ ID NO: 2009949 - RNA, 19 nt, Artificial Sequence
  Description of Artificial Sequence: Synthetic oligonucleotide
ugucccaggguccuucuug

SEQ ID NO: 2009950 - RNA, 19 nt, Artificial Sequence
  Description of Artificial Sequence: Synthetic oligonucleotide
ugugguuggucccaugcuc

SEQ ID NO: 2009951 - RNA, 19 nt, Artificial Sequence
  Description of Artificial Sequence: Synthetic oligonucleotide
uucucuacccucagcagaa

SEQ ID NO: 2009952 - RNA, 19 nt, Artificial Sequence
  Description of Artificial Sequence: Synthetic oligonucleotide
gacaaggagguuccggaug

SEQ ID NO: 2009953 - RNA, 19 nt, Artificial Sequence
  Description of Artificial Sequence: Synthetic oligonucleotide
uuagacuacuuccuuccau

SEQ ID NO: 2009954 - RNA, 19 nt, Artificial Sequence
  Description of Artificial Sequence: Synthetic oligonucleotide
caguuacuccaguucaucc

SEQ ID NO: 2009955 - RNA, 19 nt, Artificial Sequence
  Description of Artificial Sequence: Synthetic oligonucleotide
uggccucucuuuuagcaag

SEQ ID NO: 2009956 - RNA, 19 nt, Artificial Sequence
  Description of Artificial Sequence: Synthetic oligonucleotide
uuccggaugucccaggguc

SEQ ID NO: 2009957 - RNA, 19 nt, Artificial Sequence
  Description of Artificial Sequence: Synthetic oligonucleotide
ucuaucuagcaggugcugc

SEQ ID NO: 2009958 - RNA, 19 nt, Artificial Sequence
  Description of Artificial Sequence: Synthetic oligonucleotide
caucacaggagcacccucc

SEQ ID NO: 2009959 - RNA, 19 nt, Artificial Sequence
  Description of Artificial Sequence: Synthetic oligonucleotide
ucagccgccgugcagugug

SEQ ID NO: 2009960 - RNA, 19 nt, Artificial Sequence
  Description of Artificial Sequence: Synthetic oligonucleotide
ugacaucacaggagcaccc

SEQ ID NO: 2009961 - RNA, 19 nt, Artificial Sequence
  Description of Artificial Sequence: Synthetic oligonucleotide
gaauaggggaccccagcug

SEQ ID NO: 2009962 - RNA, 19 nt, Artificial Sequence
  Description of Artificial Sequence: Synthetic oligonucleotide
agccaaaggggacuaagga

SEQ ID NO: 2009963 - RNA, 19 nt, Artificial Sequence
  Description of Artificial Sequence: Synthetic oligonucleotide
gagcucauggguauagcag

SEQ ID NO: 2009964 - RNA, 19 nt, Artificial Sequence
  Description of Artificial Sequence: Synthetic oligonucleotide
caaggagaggugugguugg

SEQ ID NO: 2009965 - RNA, 19 nt, Artificial Sequence
  Description of Artificial Sequence: Synthetic oligonucleotide
ucugcaccaccuccgaacu

SEQ ID NO: 2009966 - RNA, 19 nt, Artificial Sequence
  Description of Artificial Sequence: Synthetic oligonucleotide
ucuagcaggugcugcacac

SEQ ID NO: 2009967 - RNA, 19 nt, Artificial Sequence
  Description of Artificial Sequence: Synthetic oligonucleotide
accaagacacaaggaaugg

SEQ ID NO: 2009968 - RNA, 19 nt, Artificial Sequence
  Description of Artificial Sequence: Synthetic oligonucleotide
aagguuagacuacuuccuu

SEQ ID NO: 2009969 - RNA, 19 nt, Artificial Sequence
  Description of Artificial Sequence: Synthetic oligonucleotide
auccagacaaggagguucc

SEQ ID NO: 2009970 - RNA, 19 nt, Artificial Sequence
  Description of Artificial Sequence: Synthetic oligonucleotide
agcagagaaggaggcagcc

SEQ ID NO: 2009971 - RNA, 19 nt, Artificial Sequence
  Description of Artificial Sequence: Synthetic oligonucleotide
uagacuacuuccuuccauu

SEQ ID NO: 2009972 - RNA, 19 nt, Artificial Sequence
  Description of Artificial Sequence: Synthetic oligonucleotide
ugcaccaccuccgaacugc

SEQ ID NO: 2009973 - RNA, 19 nt, Artificial Sequence
  Description of Artificial Sequence: Synthetic oligonucleotide
caucaguuacuccaguuca

SEQ ID NO: 2009974 - RNA, 19 nt, Artificial Sequence
  Description of Artificial Sequence: Synthetic oligonucleotide
ggaagcaguguccaaggag

SEQ ID NO: 2009975 - RNA, 19 nt, Artificial Sequence
  Description of Artificial Sequence: Synthetic oligonucleotide
cauggguauagcagagaag

SEQ ID NO: 2009976 - RNA, 19 nt, Artificial Sequence
  Description of Artificial Sequence: Synthetic oligonucleotide
uggcuaggagagcagcugc

SEQ ID NO: 2009977 - RNA, 19 nt, Artificial Sequence
  Description of Artificial Sequence: Synthetic oligonucleotide
gaaggaguuguaggcagcc

SEQ ID NO: 2009978 - RNA, 19 nt, Artificial Sequence
  Description of Artificial Sequence: Synthetic oligonucleotide
cuugggcucacagaggaac

SEQ ID NO: 2009979 - RNA, 19 nt, Artificial Sequence
  Description of Artificial Sequence: Synthetic oligonucleotide
uguggcuaggagagcagcu

SEQ ID NO: 2009980 - RNA, 19 nt, Artificial Sequence
  Description of Artificial Sequence: Synthetic oligonucleotide
cagccaaaggggacuaagg

SEQ ID NO: 2009981 - RNA, 19 nt, Artificial Sequence
  Description of Artificial Sequence: Synthetic oligonucleotide
uugggcucacagaggaacc

SEQ ID NO: 2009982 - RNA, 19 nt, Artificial Sequence
  Description of Artificial Sequence: Synthetic oligonucleotide
gugcugcacacccaaaccc

SEQ ID NO: 2009983 - RNA, 19 nt, Artificial Sequence
  Description of Artificial Sequence: Synthetic oligonucleotide
cacacccaaacccugcuug

SEQ ID NO: 2009984 - RNA, 19 nt, Artificial Sequence
  Description of Artificial Sequence: Synthetic oligonucleotide
cugaauaggggaccccagc

SEQ ID NO: 2009985 - RNA, 19 nt, Artificial Sequence
  Description of Artificial Sequence: Synthetic oligonucleotide
cacacucucucccuggaug

SEQ ID NO: 2009986 - RNA, 19 nt, Artificial Sequence
  Description of Artificial Sequence: Synthetic oligonucleotide
caccuccacacauaagggc

SEQ ID NO: 2009987 - RNA, 19 nt, Artificial Sequence
  Description of Artificial Sequence: Synthetic oligonucleotide
uccagaagggauagaggaa

SEQ ID NO: 2009988 - RNA, 19 nt, Artificial Sequence
  Description of Artificial Sequence: Synthetic oligonucleotide
ucccuggaugaacagcucu

SEQ ID NO: 2009989 - RNA, 19 nt, Artificial Sequence
  Description of Artificial Sequence: Synthetic oligonucleotide
acaucacaggagcacccuc

SEQ ID NO: 2009990 - RNA, 19 nt, Artificial Sequence
  Description of Artificial Sequence: Synthetic oligonucleotide
gagaggagcuucucaucag

SEQ ID NO: 2009991 - RNA, 19 nt, Artificial Sequence
  Description of Artificial Sequence: Synthetic oligonucleotide
uuucccugccuaagggagc

SEQ ID NO: 2009992 - RNA, 19 nt, Artificial Sequence
  Description of Artificial Sequence: Synthetic oligonucleotide
gaaaauggagcgccuucca

SEQ ID NO: 2009993 - RNA, 19 nt, Artificial Sequence
  Description of Artificial Sequence: Synthetic oligonucleotide
uauagcagagaaggaggca

SEQ ID NO: 2009994 - RNA, 19 nt, Artificial Sequence
  Description of Artificial Sequence: Synthetic oligonucleotide
uaagggagcucauggguau

SEQ ID NO: 2009995 - RNA, 19 nt, Artificial Sequence
  Description of Artificial Sequence: Synthetic oligonucleotide
cucuacccucagcagaagg

SEQ ID NO: 2009996 - RNA, 19 nt, Artificial Sequence
  Description of Artificial Sequence: Synthetic oligonucleotide
uaaggaccuggaagcagug

SEQ ID NO: 2009997 - RNA, 19 nt, Artificial Sequence
  Description of Artificial Sequence: Synthetic oligonucleotide
aggcaacgugacuugaugu

SEQ ID NO: 2009998 - RNA, 19 nt, Artificial Sequence
  Description of Artificial Sequence: Synthetic oligonucleotide
gcuugucucaggaagcugg

SEQ ID NO: 2009999 - RNA, 19 nt, Artificial Sequence
  Description of Artificial Sequence: Synthetic oligonucleotide
ugucuaagguuagacuacu

SEQ ID NO: 2010000 - RNA, 19 nt, Artificial Sequence
  Description of Artificial Sequence: Synthetic oligonucleotide
uucuugcccaggcaacgug

SEQ ID NO: 2010001 - RNA, 19 nt, Artificial Sequence
  Description of Artificial Sequence: Synthetic oligonucleotide
uuggcaagagaggagcuuc

SEQ ID NO: 2010002 - RNA, 19 nt, Artificial Sequence
  Description of Artificial Sequence: Synthetic oligonucleotide
cugacaucacaggagcacc

SEQ ID NO: 2010003 - RNA, 19 nt, Artificial Sequence
  Description of Artificial Sequence: Synthetic oligonucleotide
cacacugaggccccgcccc

SEQ ID NO: 2010004 - RNA, 19 nt, Artificial Sequence
  Description of Artificial Sequence: Synthetic oligonucleotide
acuaaggaccuggaagcag

SEQ ID NO: 2010005 - RNA, 19 nt, Artificial Sequence
  Description of Artificial Sequence: Synthetic oligonucleotide
ugcuuagaccaagacacaa

SEQ ID NO: 2010006 - RNA, 19 nt, Artificial Sequence
  Description of Artificial Sequence: Synthetic oligonucleotide
acuuagugcuuagaccaag

SEQ ID NO: 2010007 - RNA, 19 nt, Artificial Sequence
  Description of Artificial Sequence: Synthetic oligonucleotide
agaggaacccucagccgcc

SEQ ID NO: 2010008 - RNA, 19 nt, Artificial Sequence
  Description of Artificial Sequence: Synthetic oligonucleotide
ugggaguugcacacacuga

SEQ ID NO: 2010009 - RNA, 19 nt, Artificial Sequence
  Description of Artificial Sequence: Synthetic oligonucleotide
uuccauucucuacccucag

SEQ ID NO: 2010010 - RNA, 19 nt, Artificial Sequence
  Description of Artificial Sequence: Synthetic oligonucleotide
ucaggaaaauggagcgccu

SEQ ID NO: 2010011 - RNA, 19 nt, Artificial Sequence
  Description of Artificial Sequence: Synthetic oligonucleotide
gacagcucucuaucuagca

SEQ ID NO: 2010012 - RNA, 19 nt, Artificial Sequence
  Description of Artificial Sequence: Synthetic oligonucleotide
cucaguguccagaugggga

SEQ ID NO: 2010013 - RNA, 19 nt, Artificial Sequence
  Description of Artificial Sequence: Synthetic oligonucleotide
ucaguuacuccaguucauc

SEQ ID NO: 2010014 - RNA, 19 nt, Artificial Sequence
  Description of Artificial Sequence: Synthetic oligonucleotide
gagaggugugguugguccc

SEQ ID NO: 2010015 - RNA, 19 nt, Artificial Sequence
  Description of Artificial Sequence: Synthetic oligonucleotide
ucucaggaaaauggagcgc

SEQ ID NO: 2010016 - RNA, 19 nt, Artificial Sequence
  Description of Artificial Sequence: Synthetic oligonucleotide
uccggaugucccagggucc

SEQ ID NO: 2010017 - RNA, 19 nt, Artificial Sequence
  Description of Artificial Sequence: Synthetic oligonucleotide
aacagcucuggccucucuu

SEQ ID NO: 2010018 - RNA, 19 nt, Artificial Sequence
  Description of Artificial Sequence: Synthetic oligonucleotide
cagucggcaucauuaauca

SEQ ID NO: 2010019 - RNA, 19 nt, Artificial Sequence
  Description of Artificial Sequence: Synthetic oligonucleotide
cuggaugaacagcucuggc

SEQ ID NO: 2010020 - RNA, 19 nt, Artificial Sequence
  Description of Artificial Sequence: Synthetic oligonucleotide
uccgaacugcaccuccaca

SEQ ID NO: 2010021 - RNA, 19 nt, Artificial Sequence
  Description of Artificial Sequence: Synthetic oligonucleotide
gcaguguggagaugaagag

SEQ ID NO: 2010022 - RNA, 19 nt, Artificial Sequence
  Description of Artificial Sequence: Synthetic oligonucleotide
caggcaacgugacuugaug

SEQ ID NO: 2010023 - RNA, 19 nt, Artificial Sequence
  Description of Artificial Sequence: Synthetic oligonucleotide
gcaccagaauuccuggccg

SEQ ID NO: 2010024 - RNA, 19 nt, Artificial Sequence
  Description of Artificial Sequence: Synthetic oligonucleotide
gguuccauaaugacaucag

SEQ ID NO: 2010025 - RNA, 19 nt, Artificial Sequence
  Description of Artificial Sequence: Synthetic oligonucleotide
cuuagugcuuagaccaaga

SEQ ID NO: 2010026 - RNA, 19 nt, Artificial Sequence
  Description of Artificial Sequence: Synthetic oligonucleotide
ggugcugcacacccaaacc

SEQ ID NO: 2010027 - RNA, 19 nt, Artificial Sequence
  Description of Artificial Sequence: Synthetic oligonucleotide
agaccaagacacaaggaau

SEQ ID NO: 2010028 - RNA, 19 nt, Artificial Sequence
  Description of Artificial Sequence: Synthetic oligonucleotide
agccuauguagggagggag

SEQ ID NO: 2010029 - RNA, 19 nt, Artificial Sequence
  Description of Artificial Sequence: Synthetic oligonucleotide
ugguccugcagcugguagu

SEQ ID NO: 2010030 - RNA, 19 nt, Artificial Sequence
  Description of Artificial Sequence: Synthetic oligonucleotide
uacccucagcagaaggagu

SEQ ID NO: 2010031 - RNA, 19 nt, Artificial Sequence
  Description of Artificial Sequence: Synthetic oligonucleotide
cuuuucccugccuaaggga

SEQ ID NO: 2010032 - RNA, 19 nt, Artificial Sequence
  Description of Artificial Sequence: Synthetic oligonucleotide
uuuagcaccuggccucuuu

SEQ ID NO: 2010033 - RNA, 19 nt, Artificial Sequence
  Description of Artificial Sequence: Synthetic oligonucleotide
agucggcaucauuaaucag

SEQ ID NO: 2010034 - RNA, 19 nt, Artificial Sequence
  Description of Artificial Sequence: Synthetic oligonucleotide
uuacuccaucaaacaggag

SEQ ID NO: 2010035 - RNA, 19 nt, Artificial Sequence
  Description of Artificial Sequence: Synthetic oligonucleotide
gugucuaagguuagacuac

SEQ ID NO: 2010036 - RNA, 19 nt, Artificial Sequence
  Description of Artificial Sequence: Synthetic oligonucleotide
gccaaaggggacuaaggac

SEQ ID NO: 2010037 - RNA, 19 nt, Artificial Sequence
  Description of Artificial Sequence: Synthetic oligonucleotide
ucucucccuggaugaacag

SEQ ID NO: 2010038 - RNA, 19 nt, Artificial Sequence
  Description of Artificial Sequence: Synthetic oligonucleotide
gaugaacagcucuggccuc

SEQ ID NO: 2010039 - RNA, 19 nt, Artificial Sequence
  Description of Artificial Sequence: Synthetic oligonucleotide
ccagucggcaucauuaauc

SEQ ID NO: 2010040 - RNA, 19 nt, Artificial Sequence
  Description of Artificial Sequence: Synthetic oligonucleotide
gagagugucucaggagccc

SEQ ID NO: 2010041 - RNA, 19 nt, Artificial Sequence
  Description of Artificial Sequence: Synthetic oligonucleotide
uuagcaccuggccucuuuu

SEQ ID NO: 2010042 - RNA, 19 nt, Artificial Sequence
  Description of Artificial Sequence: Synthetic oligonucleotide
gggaggugaacucugaaua

SEQ ID NO: 2010043 - RNA, 19 nt, Artificial Sequence
  Description of Artificial Sequence: Synthetic oligonucleotide
caucauuaaucagcaccag

SEQ ID NO: 2010044 - RNA, 19 nt, Artificial Sequence
  Description of Artificial Sequence: Synthetic oligonucleotide
gugguuggucccaugcucc

SEQ ID NO: 2010045 - RNA, 19 nt, Artificial Sequence
  Description of Artificial Sequence: Synthetic oligonucleotide
cuugcccaggcaacgugac

SEQ ID NO: 2010046 - RNA, 19 nt, Artificial Sequence
  Description of Artificial Sequence: Synthetic oligonucleotide
cuauguagggagggaggcc

SEQ ID NO: 2010047 - RNA, 19 nt, Artificial Sequence
  Description of Artificial Sequence: Synthetic oligonucleotide
caccagaauuccuggccgc

SEQ ID NO: 2010048 - RNA, 19 nt, Artificial Sequence
  Description of Artificial Sequence: Synthetic oligonucleotide
uggcaagagaggagcuucu

SEQ ID NO: 2010049 - RNA, 19 nt, Artificial Sequence
  Description of Artificial Sequence: Synthetic oligonucleotide
ugguuggucccaugcuccc

SEQ ID NO: 2010050 - RNA, 19 nt, Artificial Sequence
  Description of Artificial Sequence: Synthetic oligonucleotide
gguuccggaugucccaggg

SEQ ID NO: 2010051 - RNA, 19 nt, Artificial Sequence
  Description of Artificial Sequence: Synthetic oligonucleotide
cuaagggagcucaugggua

SEQ ID NO: 2010052 - RNA, 19 nt, Artificial Sequence
  Description of Artificial Sequence: Synthetic oligonucleotide
acacccaaacccugcuugu

SEQ ID NO: 2010053 - RNA, 19 nt, Artificial Sequence
  Description of Artificial Sequence: Synthetic oligonucleotide
cccaugaagaugucucagg

SEQ ID NO: 2010054 - RNA, 19 nt, Artificial Sequence
  Description of Artificial Sequence: Synthetic oligonucleotide
ggaauggcaagcagcuggg

SEQ ID NO: 2010055 - RNA, 19 nt, Artificial Sequence
  Description of Artificial Sequence: Synthetic oligonucleotide
ugggcucacagaggaaccc

SEQ ID NO: 2010056 - RNA, 19 nt, Artificial Sequence
  Description of Artificial Sequence: Synthetic oligonucleotide
uuacuccaguucauccauc

SEQ ID NO: 2010057 - RNA, 19 nt, Artificial Sequence
  Description of Artificial Sequence: Synthetic oligonucleotide
ucccagcaguucccagucg

SEQ ID NO: 2010058 - RNA, 19 nt, Artificial Sequence
  Description of Artificial Sequence: Synthetic oligonucleotide
aucuagcaggugcugcaca

SEQ ID NO: 2010059 - RNA, 19 nt, Artificial Sequence
  Description of Artificial Sequence: Synthetic oligonucleotide
ccugcuugucucaggaagc

SEQ ID NO: 2010060 - RNA, 19 nt, Artificial Sequence
  Description of Artificial Sequence: Synthetic oligonucleotide
cuaaggaccuggaagcagu

SEQ ID NO: 2010061 - RNA, 19 nt, Artificial Sequence
  Description of Artificial Sequence: Synthetic oligonucleotide
guuagacuacuuccuucca

SEQ ID NO: 2010062 - RNA, 19 nt, Artificial Sequence
  Description of Artificial Sequence: Synthetic oligonucleotide
uuuggcaagagaggagcuu

SEQ ID NO: 2010063 - RNA, 19 nt, Artificial Sequence
  Description of Artificial Sequence: Synthetic oligonucleotide
ggagcucauggguauagca

SEQ ID NO: 2010064 - RNA, 19 nt, Artificial Sequence
  Description of Artificial Sequence: Synthetic oligonucleotide
gaacccucagccgccgugc

SEQ ID NO: 2010065 - RNA, 19 nt, Artificial Sequence
  Description of Artificial Sequence: Synthetic oligonucleotide
aggagcccaucugguagcc

SEQ ID NO: 2010066 - RNA, 19 nt, Artificial Sequence
  Description of Artificial Sequence: Synthetic oligonucleotide
ccgaacugcaccuccacac

SEQ ID NO: 2010067 - RNA, 19 nt, Artificial Sequence
  Description of Artificial Sequence: Synthetic oligonucleotide
uucccugccuaagggagcu

SEQ ID NO: 2010068 - RNA, 19 nt, Artificial Sequence
  Description of Artificial Sequence: Synthetic oligonucleotide
gcuuagaccaagacacaag

SEQ ID NO: 2010069 - RNA, 19 nt, Artificial Sequence
  Description of Artificial Sequence: Synthetic oligonucleotide
cucucccuggaugaacagc

SEQ ID NO: 2010070 - RNA, 19 nt, Artificial Sequence
  Description of Artificial Sequence: Synthetic oligonucleotide
aggugcuugggcucacaga

SEQ ID NO: 2010071 - RNA, 19 nt, Artificial Sequence
  Description of Artificial Sequence: Synthetic oligonucleotide
agggagcucauggguauag

SEQ ID NO: 2010072 - RNA, 19 nt, Artificial Sequence
  Description of Artificial Sequence: Synthetic oligonucleotide
cccucuaauguuuggcaag

SEQ ID NO: 2010073 - RNA, 19 nt, Artificial Sequence
  Description of Artificial Sequence: Synthetic oligonucleotide
guuacuccaguucauccau

SEQ ID NO: 2010074 - RNA, 19 nt, Artificial Sequence
  Description of Artificial Sequence: Synthetic oligonucleotide
ucccagucggcaucauuaa

SEQ ID NO: 2010075 - RNA, 19 nt, Artificial Sequence
  Description of Artificial Sequence: Synthetic oligonucleotide
aaaggggacuaaggaccug

SEQ ID NO: 2010076 - RNA, 19 nt, Artificial Sequence
  Description of Artificial Sequence: Synthetic oligonucleotide
cuggccgcacacucucucc

SEQ ID NO: 2010077 - RNA, 19 nt, Artificial Sequence
  Description of Artificial Sequence: Synthetic oligonucleotide
cucuaauguuuggcaagag

SEQ ID NO: 2010078 - RNA, 19 nt, Artificial Sequence
  Description of Artificial Sequence: Synthetic oligonucleotide
uccaaggagaggugugguu

SEQ ID NO: 2010079 - RNA, 19 nt, Artificial Sequence
  Description of Artificial Sequence: Synthetic oligonucleotide
guggcuaggagagcagcug

SEQ ID NO: 2010080 - RNA, 19 nt, Artificial Sequence
  Description of Artificial Sequence: Synthetic oligonucleotide
guuccauaaugacaucagu

SEQ ID NO: 2010081 - RNA, 19 nt, Artificial Sequence
  Description of Artificial Sequence: Synthetic oligonucleotide
guagggagggaggccagcc

SEQ ID NO: 2010082 - RNA, 19 nt, Artificial Sequence
  Description of Artificial Sequence: Synthetic oligonucleotide
gacuaaggaccuggaagca

SEQ ID NO: 2010083 - RNA, 19 nt, Artificial Sequence
  Description of Artificial Sequence: Synthetic oligonucleotide
cuagcaggugcugcacacc

SEQ ID NO: 2010084 - RNA, 19 nt, Artificial Sequence
  Description of Artificial Sequence: Synthetic oligonucleotide
aguccucaguguccagaug

SEQ ID NO: 2010085 - RNA, 19 nt, Artificial Sequence
  Description of Artificial Sequence: Synthetic oligonucleotide
ugcuugucucaggaagcug

SEQ ID NO: 2010086 - RNA, 19 nt, Artificial Sequence
  Description of Artificial Sequence: Synthetic oligonucleotide
agguuccggaugucccagg

SEQ ID NO: 2010087 - RNA, 19 nt, Artificial Sequence
  Description of Artificial Sequence: Synthetic oligonucleotide
gcuguccugguccugcagc

SEQ ID NO: 2010088 - RNA, 19 nt, Artificial Sequence
  Description of Artificial Sequence: Synthetic oligonucleotide
ccaaggagaggugugguug

SEQ ID NO: 2010089 - RNA, 19 nt, Artificial Sequence
  Description of Artificial Sequence: Synthetic oligonucleotide
gguagccuauguagggagg

SEQ ID NO: 2010090 - RNA, 19 nt, Artificial Sequence
  Description of Artificial Sequence: Synthetic oligonucleotide
cccagcaguucccagucgg

SEQ ID NO: 2010091 - RNA, 19 nt, Artificial Sequence
  Description of Artificial Sequence: Synthetic oligonucleotide
ggagagugucucaggagcc

SEQ ID NO: 2010092 - RNA, 19 nt, Artificial Sequence
  Description of Artificial Sequence: Synthetic oligonucleotide
aggccccucuaauguuugg

SEQ ID NO: 2010093 - RNA, 19 nt, Artificial Sequence
  Description of Artificial Sequence: Synthetic oligonucleotide
auaggggaccccagcuggg

SEQ ID NO: 2010094 - RNA, 19 nt, Artificial Sequence
  Description of Artificial Sequence: Synthetic oligonucleotide
gggacaagcagaguccuca

SEQ ID NO: 2010095 - RNA, 19 nt, Artificial Sequence
  Description of Artificial Sequence: Synthetic oligonucleotide
aacccucagccgccgugca

SEQ ID NO: 2010096 - RNA, 19 nt, Artificial Sequence
  Description of Artificial Sequence: Synthetic oligonucleotide
ggucccaugcuccccuugc

SEQ ID NO: 2010097 - RNA, 19 nt, Artificial Sequence
  Description of Artificial Sequence: Synthetic oligonucleotide
aaaggugcuugggcucaca

SEQ ID NO: 2010098 - RNA, 19 nt, Artificial Sequence
  Description of Artificial Sequence: Synthetic oligonucleotide
ggacaagcagaguccucag

SEQ ID NO: 2010099 - RNA, 19 nt, Artificial Sequence
  Description of Artificial Sequence: Synthetic oligonucleotide
agcucucuaucuagcaggu

SEQ ID NO: 2010100 - RNA, 19 nt, Artificial Sequence
  Description of Artificial Sequence: Synthetic oligonucleotide
gccuauguagggagggagg

SEQ ID NO: 2010101 - RNA, 19 nt, Artificial Sequence
  Description of Artificial Sequence: Synthetic oligonucleotide
ccaugcuccccuugcaaag

SEQ ID NO: 2010102 - RNA, 19 nt, Artificial Sequence
  Description of Artificial Sequence: Synthetic oligonucleotide
ccaugaagaugucucagga

SEQ ID NO: 2010103 - RNA, 19 nt, Artificial Sequence
  Description of Artificial Sequence: Synthetic oligonucleotide
cagaauuccuggccgcaca

SEQ ID NO: 2010104 - RNA, 19 nt, Artificial Sequence
  Description of Artificial Sequence: Synthetic oligonucleotide
cucuaucuagcaggugcug

SEQ ID NO: 2010105 - RNA, 19 nt, Artificial Sequence
  Description of Artificial Sequence: Synthetic oligonucleotide
accagaauuccuggccgca

SEQ ID NO: 2010106 - RNA, 19 nt, Artificial Sequence
  Description of Artificial Sequence: Synthetic oligonucleotide
aucaguuacuccaguucau

SEQ ID NO: 2010107 - RNA, 19 nt, Artificial Sequence
  Description of Artificial Sequence: Synthetic oligonucleotide
caguguccaaggagaggug

SEQ ID NO: 2010108 - RNA, 19 nt, Artificial Sequence
  Description of Artificial Sequence: Synthetic oligonucleotide
ccaagacacaaggaauggc

SEQ ID NO: 2010109 - RNA, 19 nt, Artificial Sequence
  Description of Artificial Sequence: Synthetic oligonucleotide
gcgccuuccaggcagucac

SEQ ID NO: 2010110 - RNA, 19 nt, Artificial Sequence
  Description of Artificial Sequence: Synthetic oligonucleotide
ggggcgacagcucucuauc

SEQ ID NO: 2010111 - RNA, 19 nt, Artificial Sequence
  Description of Artificial Sequence: Synthetic oligonucleotide
ccagacaaggagguuccgg

SEQ ID NO: 2010112 - RNA, 19 nt, Artificial Sequence
  Description of Artificial Sequence: Synthetic oligonucleotide
gcagucacuuagugcuuag

SEQ ID NO: 2010113 - RNA, 19 nt, Artificial Sequence
  Description of Artificial Sequence: Synthetic oligonucleotide
gacaagcagaguccucagu

SEQ ID NO: 2010114 - RNA, 19 nt, Artificial Sequence
  Description of Artificial Sequence: Synthetic oligonucleotide
ggaacccucagccgccgug

SEQ ID NO: 2010115 - RNA, 19 nt, Artificial Sequence
  Description of Artificial Sequence: Synthetic oligonucleotide
gaguccucaguguccagau

SEQ ID NO: 2010116 - RNA, 19 nt, Artificial Sequence
  Description of Artificial Sequence: Synthetic oligonucleotide
cuggccucucuuuuagcaa

SEQ ID NO: 2010117 - RNA, 19 nt, Artificial Sequence
  Description of Artificial Sequence: Synthetic oligonucleotide
cagcugguaguccagcucu

SEQ ID NO: 2010118 - RNA, 19 nt, Artificial Sequence
  Description of Artificial Sequence: Synthetic oligonucleotide
acccucagcagaaggaguu

SEQ ID NO: 2010119 - RNA, 19 nt, Artificial Sequence
  Description of Artificial Sequence: Synthetic oligonucleotide
ggcggaggccccucuaaug

SEQ ID NO: 2010120 - RNA, 19 nt, Artificial Sequence
  Description of Artificial Sequence: Synthetic oligonucleotide
cugguagccuauguaggga

SEQ ID NO: 2010121 - RNA, 19 nt, Artificial Sequence
  Description of Artificial Sequence: Synthetic oligonucleotide
gaguuguaggcagccugga

SEQ ID NO: 2010122 - RNA, 19 nt, Artificial Sequence
  Description of Artificial Sequence: Synthetic oligonucleotide
cugccuaagggagcucaug

SEQ ID NO: 2010123 - RNA, 19 nt, Artificial Sequence
  Description of Artificial Sequence: Synthetic oligonucleotide
ggucaccugggcauagagc

SEQ ID NO: 2010124 - RNA, 19 nt, Artificial Sequence
  Description of Artificial Sequence: Synthetic oligonucleotide
guuggucccaugcuccccu

SEQ ID NO: 2010125 - RNA, 19 nt, Artificial Sequence
  Description of Artificial Sequence: Synthetic oligonucleotide
aacugaggcggaggccccu

SEQ ID NO: 2010126 - RNA, 19 nt, Artificial Sequence
  Description of Artificial Sequence: Synthetic oligonucleotide
gaggcggaggccccucuaa

SEQ ID NO: 2010127 - RNA, 19 nt, Artificial Sequence
  Description of Artificial Sequence: Synthetic oligonucleotide
cacuuagugcuuagaccaa

SEQ ID NO: 2010128 - RNA, 19 nt, Artificial Sequence
  Description of Artificial Sequence: Synthetic oligonucleotide
uguaggcagccuggagagu

SEQ ID NO: 2010129 - RNA, 19 nt, Artificial Sequence
  Description of Artificial Sequence: Synthetic oligonucleotide
ccuggagagugucucagga

SEQ ID NO: 2010130 - RNA, 19 nt, Artificial Sequence
  Description of Artificial Sequence: Synthetic oligonucleotide
aggugugguuggucccaug

SEQ ID NO: 2010131 - RNA, 19 nt, Artificial Sequence
  Description of Artificial Sequence: Synthetic oligonucleotide
auguagggagggaggccag

SEQ ID NO: 2010132 - RNA, 19 nt, Artificial Sequence
  Description of Artificial Sequence: Synthetic oligonucleotide
gacaucacaggagcacccu

SEQ ID NO: 2010133 - RNA, 19 nt, Artificial Sequence
  Description of Artificial Sequence: Synthetic oligonucleotide
uccuggccgcacacucucu

SEQ ID NO: 2010134 - RNA, 19 nt, Artificial Sequence
  Description of Artificial Sequence: Synthetic oligonucleotide
cucauggguauagcagaga

SEQ ID NO: 2010135 - RNA, 19 nt, Artificial Sequence
  Description of Artificial Sequence: Synthetic oligonucleotide
aagggagcucauggguaua

SEQ ID NO: 2010136 - RNA, 19 nt, Artificial Sequence
  Description of Artificial Sequence: Synthetic oligonucleotide
cccaaacccugcuugucuc

SEQ ID NO: 2010137 - RNA, 19 nt, Artificial Sequence
  Description of Artificial Sequence: Synthetic oligonucleotide
cccgugucuaagguuagac

SEQ ID NO: 2010138 - RNA, 19 nt, Artificial Sequence
  Description of Artificial Sequence: Synthetic oligonucleotide
aggcggaggccccucuaau

SEQ ID NO: 2010139 - RNA, 19 nt, Artificial Sequence
  Description of Artificial Sequence: Synthetic oligonucleotide
ggccagccagggucaaggg

SEQ ID NO: 2010140 - RNA, 19 nt, Artificial Sequence
  Description of Artificial Sequence: Synthetic oligonucleotide
agcgccuuccaggcaguca

SEQ ID NO: 2010141 - RNA, 19 nt, Artificial Sequence
  Description of Artificial Sequence: Synthetic oligonucleotide
cauccaucuuccccaugaa

SEQ ID NO: 2010142 - RNA, 19 nt, Artificial Sequence
  Description of Artificial Sequence: Synthetic oligonucleotide
gcugcacacccaaacccug

SEQ ID NO: 2010143 - RNA, 19 nt, Artificial Sequence
  Description of Artificial Sequence: Synthetic oligonucleotide
caccaccuccgaacugcac

SEQ ID NO: 2010144 - RNA, 19 nt, Artificial Sequence
  Description of Artificial Sequence: Synthetic oligonucleotide
gugugguuggucccaugcu

SEQ ID NO: 2010145 - RNA, 19 nt, Artificial Sequence
  Description of Artificial Sequence: Synthetic oligonucleotide
gugcuuagaccaagacaca

SEQ ID NO: 2010146 - RNA, 19 nt, Artificial Sequence
  Description of Artificial Sequence: Synthetic oligonucleotide
caacgugacuugauguuuu

SEQ ID NO: 2010147 - RNA, 19 nt, Artificial Sequence
  Description of Artificial Sequence: Synthetic oligonucleotide
ggaggcagccaaaggggac

SEQ ID NO: 2010148 - RNA, 19 nt, Artificial Sequence
  Description of Artificial Sequence: Synthetic oligonucleotide
cgacagcucucuaucuagc

SEQ ID NO: 2010149 - RNA, 19 nt, Artificial Sequence
  Description of Artificial Sequence: Synthetic oligonucleotide
acccugcuugucucaggaa

SEQ ID NO: 2010150 - RNA, 19 nt, Artificial Sequence
  Description of Artificial Sequence: Synthetic oligonucleotide
cagccgccgugcagugugg

SEQ ID NO: 2010151 - RNA, 19 nt, Artificial Sequence
  Description of Artificial Sequence: Synthetic oligonucleotide
ggcgacagcucucuaucua

SEQ ID NO: 2010152 - RNA, 19 nt, Artificial Sequence
  Description of Artificial Sequence: Synthetic oligonucleotide
caaaggugcuugggcucac

SEQ ID NO: 2010153 - RNA, 19 nt, Artificial Sequence
  Description of Artificial Sequence: Synthetic oligonucleotide
ggcaacgugacuugauguu

SEQ ID NO: 2010154 - RNA, 19 nt, Artificial Sequence
  Description of Artificial Sequence: Synthetic oligonucleotide
gaauuccuggccgcacacu

SEQ ID NO: 2010155 - RNA, 19 nt, Artificial Sequence
  Description of Artificial Sequence: Synthetic oligonucleotide
aggaacccucagccgccgu

SEQ ID NO: 2010156 - RNA, 19 nt, Artificial Sequence
  Description of Artificial Sequence: Synthetic oligonucleotide
aggggacuaaggaccugga

SEQ ID NO: 2010157 - RNA, 19 nt, Artificial Sequence
  Description of Artificial Sequence: Synthetic oligonucleotide
cugggcaucugcucucccu

SEQ ID NO: 2010158 - RNA, 19 nt, Artificial Sequence
  Description of Artificial Sequence: Synthetic oligonucleotide
cagucacuuagugcuuaga

SEQ ID NO: 2010159 - RNA, 19 nt, Artificial Sequence
  Description of Artificial Sequence: Synthetic oligonucleotide
gcccaggcaacgugacuug

SEQ ID NO: 2010160 - RNA, 19 nt, Artificial Sequence
  Description of Artificial Sequence: Synthetic oligonucleotide
guuccggaugucccagggu

SEQ ID NO: 2010161 - RNA, 19 nt, Artificial Sequence
  Description of Artificial Sequence: Synthetic oligonucleotide
augucccaggguccuucuu

SEQ ID NO: 2010162 - RNA, 19 nt, Artificial Sequence
  Description of Artificial Sequence: Synthetic oligonucleotide
gggagcucauggguauagc

SEQ ID NO: 2010163 - RNA, 19 nt, Artificial Sequence
  Description of Artificial Sequence: Synthetic oligonucleotide
gcggaggccccucuaaugu

SEQ ID NO: 2010164 - RNA, 19 nt, Artificial Sequence
  Description of Artificial Sequence: Synthetic oligonucleotide
ggggacuaaggaccuggaa

SEQ ID NO: 2010165 - RNA, 19 nt, Artificial Sequence
  Description of Artificial Sequence: Synthetic oligonucleotide
caaggagguuccggauguc

SEQ ID NO: 2010166 - RNA, 19 nt, Artificial Sequence
  Description of Artificial Sequence: Synthetic oligonucleotide
gaacagcucuggccucucu

SEQ ID NO: 2010167 - RNA, 19 nt, Artificial Sequence
  Description of Artificial Sequence: Synthetic oligonucleotide
caguucccagucggcauca

SEQ ID NO: 2010168 - RNA, 19 nt, Artificial Sequence
  Description of Artificial Sequence: Synthetic oligonucleotide
gaauggcaagcagcugggu

SEQ ID NO: 2010169 - RNA, 19 nt, Artificial Sequence
  Description of Artificial Sequence: Synthetic oligonucleotide
uuuuagcaccuggccucuu

SEQ ID NO: 2010170 - RNA, 19 nt, Artificial Sequence
  Description of Artificial Sequence: Synthetic oligonucleotide
ccagaauuccuggccgcac

SEQ ID NO: 2010171 - RNA, 19 nt, Artificial Sequence
  Description of Artificial Sequence: Synthetic oligonucleotide
cccagcugggguuccauaa

SEQ ID NO: 2010172 - RNA, 19 nt, Artificial Sequence
  Description of Artificial Sequence: Synthetic oligonucleotide
agcccaucugguagccuau

SEQ ID NO: 2010173 - RNA, 19 nt, Artificial Sequence
  Description of Artificial Sequence: Synthetic oligonucleotide
cugcuugucucaggaagcu

SEQ ID NO: 2010174 - RNA, 19 nt, Artificial Sequence
  Description of Artificial Sequence: Synthetic oligonucleotide
ccgugcaguguggagauga

SEQ ID NO: 2010175 - RNA, 19 nt, Artificial Sequence
  Description of Artificial Sequence: Synthetic oligonucleotide
gccgccgugcaguguggag

SEQ ID NO: 2010176 - RNA, 19 nt, Artificial Sequence
  Description of Artificial Sequence: Synthetic oligonucleotide
ccaaacccugcuugucuca

SEQ ID NO: 2010177 - RNA, 19 nt, Artificial Sequence
  Description of Artificial Sequence: Synthetic oligonucleotide
ccccucuaauguuuggcaa

SEQ ID NO: 2010178 - RNA, 19 nt, Artificial Sequence
  Description of Artificial Sequence: Synthetic oligonucleotide
ccuggccgcacacucucuc

SEQ ID NO: 2010179 - RNA, 19 nt, Artificial Sequence
  Description of Artificial Sequence: Synthetic oligonucleotide
cccaugcuccccuugcaaa

SEQ ID NO: 2010180 - RNA, 19 nt, Artificial Sequence
  Description of Artificial Sequence: Synthetic oligonucleotide
gcucucuaucuagcaggug

SEQ ID NO: 2010181 - RNA, 19 nt, Artificial Sequence
  Description of Artificial Sequence: Synthetic oligonucleotide
ggaggggagggaggugaac

SEQ ID NO: 2010182 - RNA, 19 nt, Artificial Sequence
  Description of Artificial Sequence: Synthetic oligonucleotide
gcaacgugacuugauguuu

SEQ ID NO: 2010183 - RNA, 19 nt, Artificial Sequence
  Description of Artificial Sequence: Synthetic oligonucleotide
caggugcugcacacccaaa

SEQ ID NO: 2010184 - RNA, 19 nt, Artificial Sequence
  Description of Artificial Sequence: Synthetic oligonucleotide
aggcagucacuuagugcuu

SEQ ID NO: 2010185 - RNA, 19 nt, Artificial Sequence
  Description of Artificial Sequence: Synthetic oligonucleotide
agccgccgugcagugugga

SEQ ID NO: 2010186 - RNA, 19 nt, Artificial Sequence
  Description of Artificial Sequence: Synthetic oligonucleotide
ccgugucuaagguuagacu

SEQ ID NO: 2010187 - RNA, 19 nt, Artificial Sequence
  Description of Artificial Sequence: Synthetic oligonucleotide
caccuccgaacugcaccuc

SEQ ID NO: 2010188 - RNA, 19 nt, Artificial Sequence
  Description of Artificial Sequence: Synthetic oligonucleotide
gagcgccuuccaggcaguc

SEQ ID NO: 2010189 - RNA, 19 nt, Artificial Sequence
  Description of Artificial Sequence: Synthetic oligonucleotide
gucuaagguuagacuacuu

SEQ ID NO: 2010190 - RNA, 19 nt, Artificial Sequence
  Description of Artificial Sequence: Synthetic oligonucleotide
caggaaaauggagcgccuu

SEQ ID NO: 2010191 - RNA, 19 nt, Artificial Sequence
  Description of Artificial Sequence: Synthetic oligonucleotide
cacucucucccuggaugaa

SEQ ID NO: 2010192 - RNA, 19 nt, Artificial Sequence
  Description of Artificial Sequence: Synthetic oligonucleotide
cccugccuaagggagcuca

SEQ ID NO: 2010193 - RNA, 19 nt, Artificial Sequence
  Description of Artificial Sequence: Synthetic oligonucleotide
gcccaucugguagccuaug

SEQ ID NO: 2010194 - RNA, 19 nt, Artificial Sequence
  Description of Artificial Sequence: Synthetic oligonucleotide
ucccugccuaagggagcuc

SEQ ID NO: 2010195 - RNA, 19 nt, Artificial Sequence
  Description of Artificial Sequence: Synthetic oligonucleotide
gggcgacagcucucuaucu

SEQ ID NO: 2010196 - RNA, 19 nt, Artificial Sequence
  Description of Artificial Sequence: Synthetic oligonucleotide
ccgccgugcaguguggaga

SEQ ID NO: 2010197 - RNA, 19 nt, Artificial Sequence
  Description of Artificial Sequence: Synthetic oligonucleotide
ggaggccccucuaauguuu

SEQ ID NO: 2010198 - RNA, 19 nt, Artificial Sequence
  Description of Artificial Sequence: Synthetic oligonucleotide
gcaccaccuccgaacugca

SEQ ID NO: 2010199 - RNA, 19 nt, Artificial Sequence
  Description of Artificial Sequence: Synthetic oligonucleotide
ggccucucuuuuagcaagu

SEQ ID NO: 2010200 - RNA, 19 nt, Artificial Sequence
  Description of Artificial Sequence: Synthetic oligonucleotide
gcuugggcucacagaggaa

SEQ ID NO: 2010201 - RNA, 19 nt, Artificial Sequence
  Description of Artificial Sequence: Synthetic oligonucleotide
ccaggcaacgugacuugau

SEQ ID NO: 2010202 - RNA, 19 nt, Artificial Sequence
  Description of Artificial Sequence: Synthetic oligonucleotide
cgugcaguguggagaugaa

SEQ ID NO: 2010203 - RNA, 19 nt, Artificial Sequence
  Description of Artificial Sequence: Synthetic oligonucleotide
cgcacacucucucccugga

SEQ ID NO: 2010204 - RNA, 19 nt, Artificial Sequence
  Description of Artificial Sequence: Synthetic oligonucleotide
cccaggcaacgugacuuga

SEQ ID NO: 2010205 - RNA, 19 nt, Artificial Sequence
  Description of Artificial Sequence: Synthetic oligonucleotide
gcugggaguugcacacacu

SEQ ID NO: 2010206 - RNA, 19 nt, Artificial Sequence
  Description of Artificial Sequence: Synthetic oligonucleotide
gcacacccaaacccugcuu

SEQ ID NO: 2010207 - RNA, 19 nt, Artificial Sequence
  Description of Artificial Sequence: Synthetic oligonucleotide
ggcagccaaaggggacuaa

SEQ ID NO: 2010208 - RNA, 19 nt, Artificial Sequence
  Description of Artificial Sequence: Synthetic oligonucleotide
cccucagccgccgugcagu

SEQ ID NO: 2010209 - RNA, 19 nt, Artificial Sequence
  Description of Artificial Sequence: Synthetic oligonucleotide
gccgugcaguguggagaug

SEQ ID NO: 2010210 - RNA, 19 nt, Artificial Sequence
  Description of Artificial Sequence: Synthetic oligonucleotide
cccagucggcaucauuaau

SEQ ID NO: 2010211 - RNA, 19 nt, Artificial Sequence
  Description of Artificial Sequence: Synthetic oligonucleotide
ggagcccaucugguagccu

SEQ ID NO: 2010212 - RNA, 19 nt, Artificial Sequence
  Description of Artificial Sequence: Synthetic oligonucleotide
ccugccuaagggagcucau

SEQ ID NO: 2010213 - RNA, 19 nt, Artificial Sequence
  Description of Artificial Sequence: Synthetic oligonucleotide
ggagcgccuuccaggcagu

SEQ ID NO: 2010214 - RNA, 19 nt, Artificial Sequence
  Description of Artificial Sequence: Synthetic oligonucleotide
gccucucuuuuagcaaguu

SEQ ID NO: 2010215 - RNA, 19 nt, Artificial Sequence
  Description of Artificial Sequence: Synthetic oligonucleotide
ccggaugucccaggguccu

SEQ ID NO: 2010216 - RNA, 19 nt, Artificial Sequence
  Description of Artificial Sequence: Synthetic oligonucleotide
ccccgugucuaagguuaga

SEQ ID NO: 2010217 - RNA, 19 nt, Artificial Sequence
  Description of Artificial Sequence: Synthetic oligonucleotide
ccccagcugggguuccaua

SEQ ID NO: 2010218 - RNA, 19 nt, Artificial Sequence
  Description of Artificial Sequence: Synthetic oligonucleotide
cggaggccccucuaauguu

SEQ ID NO: 2010219 - RNA, 19 nt, Artificial Sequence
  Description of Artificial Sequence: Synthetic oligonucleotide
aauagugcuaggcuuggcc

SEQ ID NO: 2010220 - RNA, 19 nt, Artificial Sequence
  Description of Artificial Sequence: Synthetic oligonucleotide
aagaccuccaccuugagca

SEQ ID NO: 2010221 - RNA, 19 nt, Artificial Sequence
  Description of Artificial Sequence: Synthetic oligonucleotide
uguagaaguucucugaccc

SEQ ID NO: 2010222 - RNA, 19 nt, Artificial Sequence
  Description of Artificial Sequence: Synthetic oligonucleotide
uuacugaagacacaguagc

SEQ ID NO: 2010223 - RNA, 19 nt, Artificial Sequence
  Description of Artificial Sequence: Synthetic oligonucleotide
uuugguacauacuagcuca

SEQ ID NO: 2010224 - RNA, 19 nt, Artificial Sequence
  Description of Artificial Sequence: Synthetic oligonucleotide
ugguaaaugagccaaaguc

SEQ ID NO: 2010225 - RNA, 19 nt, Artificial Sequence
  Description of Artificial Sequence: Synthetic oligonucleotide
acaccaaucguucacuacc

SEQ ID NO: 2010226 - RNA, 19 nt, Artificial Sequence
  Description of Artificial Sequence: Synthetic oligonucleotide
ucgaacgacgcucugaccg

SEQ ID NO: 2010227 - RNA, 19 nt, Artificial Sequence
  Description of Artificial Sequence: Synthetic oligonucleotide
aguagcuuccuacuaacac

SEQ ID NO: 2010228 - RNA, 19 nt, Artificial Sequence
  Description of Artificial Sequence: Synthetic oligonucleotide
uuuauaacaauagucuaga

SEQ ID NO: 2010229 - RNA, 19 nt, Artificial Sequence
  Description of Artificial Sequence: Synthetic oligonucleotide
uugauuacugaagacacag

SEQ ID NO: 2010230 - RNA, 19 nt, Artificial Sequence
  Description of Artificial Sequence: Synthetic oligonucleotide
aaucguucacuaccauucc

SEQ ID NO: 2010231 - RNA, 19 nt, Artificial Sequence
  Description of Artificial Sequence: Synthetic oligonucleotide
ucguuuagcuugaagacgc

SEQ ID NO: 2010232 - RNA, 19 nt, Artificial Sequence
  Description of Artificial Sequence: Synthetic oligonucleotide
cuuagggugcaccagaccc

SEQ ID NO: 2010233 - RNA, 19 nt, Artificial Sequence
  Description of Artificial Sequence: Synthetic oligonucleotide
uguuguuggguacuaguag

SEQ ID NO: 2010234 - RNA, 19 nt, Artificial Sequence
  Description of Artificial Sequence: Synthetic oligonucleotide
uuuagcuugaagacgcucu

SEQ ID NO: 2010235 - RNA, 19 nt, Artificial Sequence
  Description of Artificial Sequence: Synthetic oligonucleotide
cucgauggaagucuuaggg

SEQ ID NO: 2010236 - RNA, 19 nt, Artificial Sequence
  Description of Artificial Sequence: Synthetic oligonucleotide
ucugcaccgaaucuggaag

SEQ ID NO: 2010237 - RNA, 19 nt, Artificial Sequence
  Description of Artificial Sequence: Synthetic oligonucleotide
auagucuagagauggcacg

SEQ ID NO: 2010238 - RNA, 19 nt, Artificial Sequence
  Description of Artificial Sequence: Synthetic oligonucleotide
uccgauagccaccaggcag

SEQ ID NO: 2010239 - RNA, 19 nt, Artificial Sequence
  Description of Artificial Sequence: Synthetic oligonucleotide
ggagccacaacucaaagcc

SEQ ID NO: 2010240 - RNA, 19 nt, Artificial Sequence
  Description of Artificial Sequence: Synthetic oligonucleotide
caaucguucacuaccauuc

SEQ ID NO: 2010241 - RNA, 19 nt, Artificial Sequence
  Description of Artificial Sequence: Synthetic oligonucleotide
acuaaggccacauagucau

SEQ ID NO: 2010242 - RNA, 19 nt, Artificial Sequence
  Description of Artificial Sequence: Synthetic oligonucleotide
aagccuuuuauaacaauag

SEQ ID NO: 2010243 - RNA, 19 nt, Artificial Sequence
  Description of Artificial Sequence: Synthetic oligonucleotide
ucguucacuaccauuccag

SEQ ID NO: 2010244 - RNA, 19 nt, Artificial Sequence
  Description of Artificial Sequence: Synthetic oligonucleotide
acaguagcuuccuacuaac

SEQ ID NO: 2010245 - RNA, 19 nt, Artificial Sequence
  Description of Artificial Sequence: Synthetic oligonucleotide
accucgcucccucagaccc

SEQ ID NO: 2010246 - RNA, 19 nt, Artificial Sequence
  Description of Artificial Sequence: Synthetic oligonucleotide
guggacuaaggccacauag

SEQ ID NO: 2010247 - RNA, 19 nt, Artificial Sequence
  Description of Artificial Sequence: Synthetic oligonucleotide
uacauacuagcucaggcau

SEQ ID NO: 2010248 - RNA, 19 nt, Artificial Sequence
  Description of Artificial Sequence: Synthetic oligonucleotide
ucgcaguuguucucgaacg

SEQ ID NO: 2010249 - RNA, 19 nt, Artificial Sequence
  Description of Artificial Sequence: Synthetic oligonucleotide
caugcugguggcaauagug

SEQ ID NO: 2010250 - RNA, 19 nt, Artificial Sequence
  Description of Artificial Sequence: Synthetic oligonucleotide
uccuacuaacaccugguca

SEQ ID NO: 2010251 - RNA, 19 nt, Artificial Sequence
  Description of Artificial Sequence: Synthetic oligonucleotide
gaaucccgcaugcuggugg

SEQ ID NO: 2010252 - RNA, 19 nt, Artificial Sequence
  Description of Artificial Sequence: Synthetic oligonucleotide
ucaugugaggcugucaaug

SEQ ID NO: 2010253 - RNA, 19 nt, Artificial Sequence
  Description of Artificial Sequence: Synthetic oligonucleotide
cauacuagcucaggcaugg

SEQ ID NO: 2010254 - RNA, 19 nt, Artificial Sequence
  Description of Artificial Sequence: Synthetic oligonucleotide
uugaagacgcucuccacca

SEQ ID NO: 2010255 - RNA, 19 nt, Artificial Sequence
  Description of Artificial Sequence: Synthetic oligonucleotide
aguuguucucgaacgacgc

SEQ ID NO: 2010256 - RNA, 19 nt, Artificial Sequence
  Description of Artificial Sequence: Synthetic oligonucleotide
uacuaguagcccaugccug

SEQ ID NO: 2010257 - RNA, 19 nt, Artificial Sequence
  Description of Artificial Sequence: Synthetic oligonucleotide
acggcaagccuuuuauaac

SEQ ID NO: 2010258 - RNA, 19 nt, Artificial Sequence
  Description of Artificial Sequence: Synthetic oligonucleotide
uagucuagagauggcacgg

SEQ ID NO: 2010259 - RNA, 19 nt, Artificial Sequence
  Description of Artificial Sequence: Synthetic oligonucleotide
aaucaccucgcucccucgg

SEQ ID NO: 2010260 - RNA, 19 nt, Artificial Sequence
  Description of Artificial Sequence: Synthetic oligonucleotide
caguuguucucgaacgacg

SEQ ID NO: 2010261 - RNA, 19 nt, Artificial Sequence
  Description of Artificial Sequence: Synthetic oligonucleotide
uggacuaaggccacauagu

SEQ ID NO: 2010262 - RNA, 19 nt, Artificial Sequence
  Description of Artificial Sequence: Synthetic oligonucleotide
ucucgaacgacgcucugac

SEQ ID NO: 2010263 - RNA, 19 nt, Artificial Sequence
  Description of Artificial Sequence: Synthetic oligonucleotide
agccggucaacccaccucg

SEQ ID NO: 2010264 - RNA, 19 nt, Artificial Sequence
  Description of Artificial Sequence: Synthetic oligonucleotide
ccuacuaacaccuggucag

SEQ ID NO: 2010265 - RNA, 19 nt, Artificial Sequence
  Description of Artificial Sequence: Synthetic oligonucleotide
auagugcuaggcuuggccu

SEQ ID NO: 2010266 - RNA, 19 nt, Artificial Sequence
  Description of Artificial Sequence: Synthetic oligonucleotide
gguacauacuagcucaggc

SEQ ID NO: 2010267 - RNA, 19 nt, Artificial Sequence
  Description of Artificial Sequence: Synthetic oligonucleotide
ucaaccauucagcucuggu

SEQ ID NO: 2010268 - RNA, 19 nt, Artificial Sequence
  Description of Artificial Sequence: Synthetic oligonucleotide
gagguuggcgcgcucaacc

SEQ ID NO: 2010269 - RNA, 19 nt, Artificial Sequence
  Description of Artificial Sequence: Synthetic oligonucleotide
cucguuuagcuugaagacg

SEQ ID NO: 2010270 - RNA, 19 nt, Artificial Sequence
  Description of Artificial Sequence: Synthetic oligonucleotide
gugguaacauugccaaggg

SEQ ID NO: 2010271 - RNA, 19 nt, Artificial Sequence
  Description of Artificial Sequence: Synthetic oligonucleotide
ucgauggaagucuuagggu

SEQ ID NO: 2010272 - RNA, 19 nt, Artificial Sequence
  Description of Artificial Sequence: Synthetic oligonucleotide
gaaagcacaccaaucguuc

SEQ ID NO: 2010273 - RNA, 19 nt, Artificial Sequence
  Description of Artificial Sequence: Synthetic oligonucleotide
uccucgauggaagucuuag

SEQ ID NO: 2010274 - RNA, 19 nt, Artificial Sequence
  Description of Artificial Sequence: Synthetic oligonucleotide
ggaugcaugcaccacgggg

SEQ ID NO: 2010275 - RNA, 19 nt, Artificial Sequence
  Description of Artificial Sequence: Synthetic oligonucleotide
uguuucccuguccaagucu

SEQ ID NO: 2010276 - RNA, 19 nt, Artificial Sequence
  Description of Artificial Sequence: Synthetic oligonucleotide
guacauacuagcucaggca

SEQ ID NO: 2010277 - RNA, 19 nt, Artificial Sequence
  Description of Artificial Sequence: Synthetic oligonucleotide
ucacuaccauuccagcagc

SEQ ID NO: 2010278 - RNA, 19 nt, Artificial Sequence
  Description of Artificial Sequence: Synthetic oligonucleotide
guucugggacgacagaccc

SEQ ID NO: 2010279 - RNA, 19 nt, Artificial Sequence
  Description of Artificial Sequence: Synthetic oligonucleotide
gaagaccuccaccuugagc

SEQ ID NO: 2010280 - RNA, 19 nt, Artificial Sequence
  Description of Artificial Sequence: Synthetic oligonucleotide
cuguagaaguucucugacc

SEQ ID NO: 2010281 - RNA, 19 nt, Artificial Sequence
  Description of Artificial Sequence: Synthetic oligonucleotide
cuaacaccuggucagcaac

SEQ ID NO: 2010282 - RNA, 19 nt, Artificial Sequence
  Description of Artificial Sequence: Synthetic oligonucleotide
gaagucuuagggugcacca

SEQ ID NO: 2010283 - RNA, 19 nt, Artificial Sequence
  Description of Artificial Sequence: Synthetic oligonucleotide
gaugcaugcaccacgggga

SEQ ID NO: 2010284 - RNA, 19 nt, Artificial Sequence
  Description of Artificial Sequence: Synthetic oligonucleotide
aguucucugacccuccgau

SEQ ID NO: 2010285 - RNA, 19 nt, Artificial Sequence
  Description of Artificial Sequence: Synthetic oligonucleotide
gauggaagucuuagggugc

SEQ ID NO: 2010286 - RNA, 19 nt, Artificial Sequence
  Description of Artificial Sequence: Synthetic oligonucleotide
ccuugauuacugaagacac

SEQ ID NO: 2010287 - RNA, 19 nt, Artificial Sequence
  Description of Artificial Sequence: Synthetic oligonucleotide
augguaaaugagccaaagu

SEQ ID NO: 2010288 - RNA, 19 nt, Artificial Sequence
  Description of Artificial Sequence: Synthetic oligonucleotide
caugguaaaugagccaaag

SEQ ID NO: 2010289 - RNA, 19 nt, Artificial Sequence
  Description of Artificial Sequence: Synthetic oligonucleotide
cuuuaauggggugggacac

SEQ ID NO: 2010290 - RNA, 19 nt, Artificial Sequence
  Description of Artificial Sequence: Synthetic oligonucleotide
guaacauugccaagggcug

SEQ ID NO: 2010291 - RNA, 19 nt, Artificial Sequence
  Description of Artificial Sequence: Synthetic oligonucleotide
agucuuagggugcaccaga

SEQ ID NO: 2010292 - RNA, 19 nt, Artificial Sequence
  Description of Artificial Sequence: Synthetic oligonucleotide
gguacuaguagcccaugcc

SEQ ID NO: 2010293 - RNA, 19 nt, Artificial Sequence
  Description of Artificial Sequence: Synthetic oligonucleotide
ucuuagggugcaccagacc

SEQ ID NO: 2010294 - RNA, 19 nt, Artificial Sequence
  Description of Artificial Sequence: Synthetic oligonucleotide
acuaguagcccaugccugu

SEQ ID NO: 2010295 - RNA, 19 nt, Artificial Sequence
  Description of Artificial Sequence: Synthetic oligonucleotide
cacggggaugguuucagag

SEQ ID NO: 2010296 - RNA, 19 nt, Artificial Sequence
  Description of Artificial Sequence: Synthetic oligonucleotide
ggcuguuucggauaugcug

SEQ ID NO: 2010297 - RNA, 19 nt, Artificial Sequence
  Description of Artificial Sequence: Synthetic oligonucleotide
caccgaaucuggaaggcug

SEQ ID NO: 2010298 - RNA, 19 nt, Artificial Sequence
  Description of Artificial Sequence: Synthetic oligonucleotide
gagagcucgcccucgaaca

SEQ ID NO: 2010299 - RNA, 19 nt, Artificial Sequence
  Description of Artificial Sequence: Synthetic oligonucleotide
cacaugcgcccgaugaucc

SEQ ID NO: 2010300 - RNA, 19 nt, Artificial Sequence
  Description of Artificial Sequence: Synthetic oligonucleotide
agggaaucccgcaugcugg

SEQ ID NO: 2010301 - RNA, 19 nt, Artificial Sequence
  Description of Artificial Sequence: Synthetic oligonucleotide
cauugccaagggcugagag

SEQ ID NO: 2010302 - RNA, 19 nt, Artificial Sequence
  Description of Artificial Sequence: Synthetic oligonucleotide
ugucugucugaagaccucc

SEQ ID NO: 2010303 - RNA, 19 nt, Artificial Sequence
  Description of Artificial Sequence: Synthetic oligonucleotide
gcuguuucggauaugcugc

SEQ ID NO: 2010304 - RNA, 19 nt, Artificial Sequence
  Description of Artificial Sequence: Synthetic oligonucleotide
cucgcaguuguucucgaac

SEQ ID NO: 2010305 - RNA, 19 nt, Artificial Sequence
  Description of Artificial Sequence: Synthetic oligonucleotide
uaggcuuggccucguuuag

SEQ ID NO: 2010306 - RNA, 19 nt, Artificial Sequence
  Description of Artificial Sequence: Synthetic oligonucleotide
agagcucgcccucgaacac

SEQ ID NO: 2010307 - RNA, 19 nt, Artificial Sequence
  Description of Artificial Sequence: Synthetic oligonucleotide
ucugggacgacagacccuc

SEQ ID NO: 2010308 - RNA, 19 nt, Artificial Sequence
  Description of Artificial Sequence: Synthetic oligonucleotide
uuguucucgaacgacgcuc

SEQ ID NO: 2010309 - RNA, 19 nt, Artificial Sequence
  Description of Artificial Sequence: Synthetic oligonucleotide
cugcaccgaaucuggaagg

SEQ ID NO: 2010310 - RNA, 19 nt, Artificial Sequence
  Description of Artificial Sequence: Synthetic oligonucleotide
guucacuaccauuccagca

SEQ ID NO: 2010311 - RNA, 19 nt, Artificial Sequence
  Description of Artificial Sequence: Synthetic oligonucleotide
guuggguacuaguagccca

SEQ ID NO: 2010312 - RNA, 19 nt, Artificial Sequence
  Description of Artificial Sequence: Synthetic oligonucleotide
cucgaacacacuguagaag

SEQ ID NO: 2010313 - RNA, 19 nt, Artificial Sequence
  Description of Artificial Sequence: Synthetic oligonucleotide
aggcaguacuuuaaugggg

SEQ ID NO: 2010314 - RNA, 19 nt, Artificial Sequence
  Description of Artificial Sequence: Synthetic oligonucleotide
uacuagcucaggcauggua

SEQ ID NO: 2010315 - RNA, 19 nt, Artificial Sequence
  Description of Artificial Sequence: Synthetic oligonucleotide
gaugauccggcagccggcg

SEQ ID NO: 2010316 - RNA, 19 nt, Artificial Sequence
  Description of Artificial Sequence: Synthetic oligonucleotide
acacaugcgcccgaugauc

SEQ ID NO: 2010317 - RNA, 19 nt, Artificial Sequence
  Description of Artificial Sequence: Synthetic oligonucleotide
gccucguuuagcuugaaga

SEQ ID NO: 2010318 - RNA, 19 nt, Artificial Sequence
  Description of Artificial Sequence: Synthetic oligonucleotide
uuggguacuaguagcccau

SEQ ID NO: 2010319 - RNA, 19 nt, Artificial Sequence
  Description of Artificial Sequence: Synthetic oligonucleotide
gguaacauugccaagggcu

SEQ ID NO: 2010320 - RNA, 19 nt, Artificial Sequence
  Description of Artificial Sequence: Synthetic oligonucleotide
ggaaccugaagaagggagg

SEQ ID NO: 2010321 - RNA, 19 nt, Artificial Sequence
  Description of Artificial Sequence: Synthetic oligonucleotide
aaguucucugacccuccga

SEQ ID NO: 2010322 - RNA, 19 nt, Artificial Sequence
  Description of Artificial Sequence: Synthetic oligonucleotide
gcugguuguguccagacca

SEQ ID NO: 2010323 - RNA, 19 nt, Artificial Sequence
  Description of Artificial Sequence: Synthetic oligonucleotide
gaccucgcaguuguucucg

SEQ ID NO: 2010324 - RNA, 19 nt, Artificial Sequence
  Description of Artificial Sequence: Synthetic oligonucleotide
ugacccuccgauagccacc

SEQ ID NO: 2010325 - RNA, 19 nt, Artificial Sequence
  Description of Artificial Sequence: Synthetic oligonucleotide
aucguucacuaccauucca

SEQ ID NO: 2010326 - RNA, 19 nt, Artificial Sequence
  Description of Artificial Sequence: Synthetic oligonucleotide
caccuggucagcaacuguc

SEQ ID NO: 2010327 - RNA, 19 nt, Artificial Sequence
  Description of Artificial Sequence: Synthetic oligonucleotide
cucgcccucgaacacacug

SEQ ID NO: 2010328 - RNA, 19 nt, Artificial Sequence
  Description of Artificial Sequence: Synthetic oligonucleotide
uagucauugcaggugguaa

SEQ ID NO: 2010329 - RNA, 19 nt, Artificial Sequence
  Description of Artificial Sequence: Synthetic oligonucleotide
uuccuacuaacaccugguc

SEQ ID NO: 2010330 - RNA, 19 nt, Artificial Sequence
  Description of Artificial Sequence: Synthetic oligonucleotide
cacggcaagccuuuuauaa

SEQ ID NO: 2010331 - RNA, 19 nt, Artificial Sequence
  Description of Artificial Sequence: Synthetic oligonucleotide
aagcagccgaccucgcagu

SEQ ID NO: 2010332 - RNA, 19 nt, Artificial Sequence
  Description of Artificial Sequence: Synthetic oligonucleotide
acggggaugguuucagaga

SEQ ID NO: 2010333 - RNA, 19 nt, Artificial Sequence
  Description of Artificial Sequence: Synthetic oligonucleotide
ggacuaaggccacauaguc

SEQ ID NO: 2010334 - RNA, 19 nt, Artificial Sequence
  Description of Artificial Sequence: Synthetic oligonucleotide
agcguuugguacauacuag

SEQ ID NO: 2010335 - RNA, 19 nt, Artificial Sequence
  Description of Artificial Sequence: Synthetic oligonucleotide
acuaacaccuggucagcaa

SEQ ID NO: 2010336 - RNA, 19 nt, Artificial Sequence
  Description of Artificial Sequence: Synthetic oligonucleotide
guacuaguagcccaugccu

SEQ ID NO: 2010337 - RNA, 19 nt, Artificial Sequence
  Description of Artificial Sequence: Synthetic oligonucleotide
cuugagcacgucagccagg

SEQ ID NO: 2010338 - RNA, 19 nt, Artificial Sequence
  Description of Artificial Sequence: Synthetic oligonucleotide
uugagcacgucagccagga

SEQ ID NO: 2010339 - RNA, 19 nt, Artificial Sequence
  Description of Artificial Sequence: Synthetic oligonucleotide
cacaccaaucguucacuac

SEQ ID NO: 2010340 - RNA, 19 nt, Artificial Sequence
  Description of Artificial Sequence: Synthetic oligonucleotide
gcguuugguacauacuagc

SEQ ID NO: 2010341 - RNA, 19 nt, Artificial Sequence
  Description of Artificial Sequence: Synthetic oligonucleotide
ucucaggagccggucaacc

SEQ ID NO: 2010342 - RNA, 19 nt, Artificial Sequence
  Description of Artificial Sequence: Synthetic oligonucleotide
ugagagccgcuccuccacc

SEQ ID NO: 2010343 - RNA, 19 nt, Artificial Sequence
  Description of Artificial Sequence: Synthetic oligonucleotide
gguaagcucugccacgccc

SEQ ID NO: 2010344 - RNA, 19 nt, Artificial Sequence
  Description of Artificial Sequence: Synthetic oligonucleotide
gacuaaggccacauaguca

SEQ ID NO: 2010345 - RNA, 19 nt, Artificial Sequence
  Description of Artificial Sequence: Synthetic oligonucleotide
guuggugagcuuggcaaag

SEQ ID NO: 2010346 - RNA, 19 nt, Artificial Sequence
  Description of Artificial Sequence: Synthetic oligonucleotide
cugguaagcucugccacgc

SEQ ID NO: 2010347 - RNA, 19 nt, Artificial Sequence
  Description of Artificial Sequence: Synthetic oligonucleotide
ccucguuuagcuugaagac

SEQ ID NO: 2010348 - RNA, 19 nt, Artificial Sequence
  Description of Artificial Sequence: Synthetic oligonucleotide
cucugaccgccauggaagc

SEQ ID NO: 2010349 - RNA, 19 nt, Artificial Sequence
  Description of Artificial Sequence: Synthetic oligonucleotide
ccuccgauagccaccaggc

SEQ ID NO: 2010350 - RNA, 19 nt, Artificial Sequence
  Description of Artificial Sequence: Synthetic oligonucleotide
uuggccucguuuagcuuga

SEQ ID NO: 2010351 - RNA, 19 nt, Artificial Sequence
  Description of Artificial Sequence: Synthetic oligonucleotide
aucugcaccgaaucuggaa

SEQ ID NO: 2010352 - RNA, 19 nt, Artificial Sequence
  Description of Artificial Sequence: Synthetic oligonucleotide
uucucgaacgacgcucuga

SEQ ID NO: 2010353 - RNA, 19 nt, Artificial Sequence
  Description of Artificial Sequence: Synthetic oligonucleotide
agaaagcacaccaaucguu

SEQ ID NO: 2010354 - RNA, 19 nt, Artificial Sequence
  Description of Artificial Sequence: Synthetic oligonucleotide
uguuucggauaugcugcag

SEQ ID NO: 2010355 - RNA, 19 nt, Artificial Sequence
  Description of Artificial Sequence: Synthetic oligonucleotide
agccaaaguccagagccag

SEQ ID NO: 2010356 - RNA, 19 nt, Artificial Sequence
  Description of Artificial Sequence: Synthetic oligonucleotide
aagagguuggcgcgcucaa

SEQ ID NO: 2010357 - RNA, 19 nt, Artificial Sequence
  Description of Artificial Sequence: Synthetic oligonucleotide
ugcugccagcguuugguac

SEQ ID NO: 2010358 - RNA, 19 nt, Artificial Sequence
  Description of Artificial Sequence: Synthetic oligonucleotide
acaugcgcccgaugauccg

SEQ ID NO: 2010359 - RNA, 19 nt, Artificial Sequence
  Description of Artificial Sequence: Synthetic oligonucleotide
ggugacucaugugaggcug

SEQ ID NO: 2010360 - RNA, 19 nt, Artificial Sequence
  Description of Artificial Sequence: Synthetic oligonucleotide
cugaagaccuccaccuuga

SEQ ID NO: 2010361 - RNA, 19 nt, Artificial Sequence
  Description of Artificial Sequence: Synthetic oligonucleotide
ugauccggcagccggcgau

SEQ ID NO: 2010362 - RNA, 19 nt, Artificial Sequence
  Description of Artificial Sequence: Synthetic oligonucleotide
ggcaauagugcuaggcuug

SEQ ID NO: 2010363 - RNA, 19 nt, Artificial Sequence
  Description of Artificial Sequence: Synthetic oligonucleotide
cugguuguguccagaccac

SEQ ID NO: 2010364 - RNA, 19 nt, Artificial Sequence
  Description of Artificial Sequence: Synthetic oligonucleotide
gagagccgcuccuccaccc

SEQ ID NO: 2010365 - RNA, 19 nt, Artificial Sequence
  Description of Artificial Sequence: Synthetic oligonucleotide
cuaggcuuggccucguuua

SEQ ID NO: 2010366 - RNA, 19 nt, Artificial Sequence
  Description of Artificial Sequence: Synthetic oligonucleotide
caagucuggguggacuaag

SEQ ID NO: 2010367 - RNA, 19 nt, Artificial Sequence
  Description of Artificial Sequence: Synthetic oligonucleotide
caugcgcccgaugauccgg

SEQ ID NO: 2010368 - RNA, 19 nt, Artificial Sequence
  Description of Artificial Sequence: Synthetic oligonucleotide
gaagagguuggcgcgcuca

SEQ ID NO: 2010369 - RNA, 19 nt, Artificial Sequence
  Description of Artificial Sequence: Synthetic oligonucleotide
cagcguuugguacauacua

SEQ ID NO: 2010370 - RNA, 19 nt, Artificial Sequence
  Description of Artificial Sequence: Synthetic oligonucleotide
ugaagacgcucuccaccac

SEQ ID NO: 2010371 - RNA, 19 nt, Artificial Sequence
  Description of Artificial Sequence: Synthetic oligonucleotide
uucugggacgacagacccu

SEQ ID NO: 2010372 - RNA, 19 nt, Artificial Sequence
  Description of Artificial Sequence: Synthetic oligonucleotide
gacacggcaagccuuuuau

SEQ ID NO: 2010373 - RNA, 19 nt, Artificial Sequence
  Description of Artificial Sequence: Synthetic oligonucleotide
accgccauggaagccuggg

SEQ ID NO: 2010374 - RNA, 19 nt, Artificial Sequence
  Description of Artificial Sequence: Synthetic oligonucleotide
cacaguagcuuccuacuaa

SEQ ID NO: 2010375 - RNA, 19 nt, Artificial Sequence
  Description of Artificial Sequence: Synthetic oligonucleotide
cucgguucacagugccugc

SEQ ID NO: 2010376 - RNA, 19 nt, Artificial Sequence
  Description of Artificial Sequence: Synthetic oligonucleotide
ugggacgacagacccucuc

SEQ ID NO: 2010377 - RNA, 19 nt, Artificial Sequence
  Description of Artificial Sequence: Synthetic oligonucleotide
ggaagucuuagggugcacc

SEQ ID NO: 2010378 - RNA, 19 nt, Artificial Sequence
  Description of Artificial Sequence: Synthetic oligonucleotide
ggcgcgcucaaccauucag

SEQ ID NO: 2010379 - RNA, 19 nt, Artificial Sequence
  Description of Artificial Sequence: Synthetic oligonucleotide
acacaguagcuuccuacua

SEQ ID NO: 2010380 - RNA, 19 nt, Artificial Sequence
  Description of Artificial Sequence: Synthetic oligonucleotide
aggugacucaugugaggcu

SEQ ID NO: 2010381 - RNA, 19 nt, Artificial Sequence
  Description of Artificial Sequence: Synthetic oligonucleotide
gaagggaggacagcucguc

SEQ ID NO: 2010382 - RNA, 19 nt, Artificial Sequence
  Description of Artificial Sequence: Synthetic oligonucleotide
caccaaucguucacuacca

SEQ ID NO: 2010383 - RNA, 19 nt, Artificial Sequence
  Description of Artificial Sequence: Synthetic oligonucleotide
ugccaagggcugagagccg

SEQ ID NO: 2010384 - RNA, 19 nt, Artificial Sequence
  Description of Artificial Sequence: Synthetic oligonucleotide
gcacggaugaagagguugg

SEQ ID NO: 2010385 - RNA, 19 nt, Artificial Sequence
  Description of Artificial Sequence: Synthetic oligonucleotide
cuuccuacuaacaccuggu

SEQ ID NO: 2010386 - RNA, 19 nt, Artificial Sequence
  Description of Artificial Sequence: Synthetic oligonucleotide
acauacuagcucaggcaug

SEQ ID NO: 2010387 - RNA, 19 nt, Artificial Sequence
  Description of Artificial Sequence: Synthetic oligonucleotide
agcucgcccucgaacacac

SEQ ID NO: 2010388 - RNA, 19 nt, Artificial Sequence
  Description of Artificial Sequence: Synthetic oligonucleotide
agacccucucaggagccgg

SEQ ID NO: 2010389 - RNA, 19 nt, Artificial Sequence
  Description of Artificial Sequence: Synthetic oligonucleotide
agcacgucagccaggauuu

SEQ ID NO: 2010390 - RNA, 19 nt, Artificial Sequence
  Description of Artificial Sequence: Synthetic oligonucleotide
ugguaagcucugccacgcc

SEQ ID NO: 2010391 - RNA, 19 nt, Artificial Sequence
  Description of Artificial Sequence: Synthetic oligonucleotide
agguuggcgcgcucaacca

SEQ ID NO: 2010392 - RNA, 19 nt, Artificial Sequence
  Description of Artificial Sequence: Synthetic oligonucleotide
ugacacggcaagccuuuua

SEQ ID NO: 2010393 - RNA, 19 nt, Artificial Sequence
  Description of Artificial Sequence: Synthetic oligonucleotide
ccgaugauccggcagccgg

SEQ ID NO: 2010394 - RNA, 19 nt, Artificial Sequence
  Description of Artificial Sequence: Synthetic oligonucleotide
agcagcauggaaggugacu

SEQ ID NO: 2010395 - RNA, 19 nt, Artificial Sequence
  Description of Artificial Sequence: Synthetic oligonucleotide
ggcacggaugaagagguug

SEQ ID NO: 2010396 - RNA, 19 nt, Artificial Sequence
  Description of Artificial Sequence: Synthetic oligonucleotide
uccacccgccguaucugca

SEQ ID NO: 2010397 - RNA, 19 nt, Artificial Sequence
  Description of Artificial Sequence: Synthetic oligonucleotide
gaagacgcucuccaccacu

SEQ ID NO: 2010398 - RNA, 19 nt, Artificial Sequence
  Description of Artificial Sequence: Synthetic oligonucleotide
ggacgacagacccucucag

SEQ ID NO: 2010399 - RNA, 19 nt, Artificial Sequence
  Description of Artificial Sequence: Synthetic oligonucleotide
aucaccucgcucccucggu

SEQ ID NO: 2010400 - RNA, 19 nt, Artificial Sequence
  Description of Artificial Sequence: Synthetic oligonucleotide
auggaagucuuagggugca

SEQ ID NO: 2010401 - RNA, 19 nt, Artificial Sequence
  Description of Artificial Sequence: Synthetic oligonucleotide
gguucugggacgacagacc

SEQ ID NO: 2010402 - RNA, 19 nt, Artificial Sequence
  Description of Artificial Sequence: Synthetic oligonucleotide
ucugaccgccauggaagcc

SEQ ID NO: 2010403 - RNA, 19 nt, Artificial Sequence
  Description of Artificial Sequence: Synthetic oligonucleotide
cucgaacgacgcucugacc

SEQ ID NO: 2010404 - RNA, 19 nt, Artificial Sequence
  Description of Artificial Sequence: Synthetic oligonucleotide
accacggggaugguuucag

SEQ ID NO: 2010405 - RNA, 19 nt, Artificial Sequence
  Description of Artificial Sequence: Synthetic oligonucleotide
acccgccguaucugcaccg

SEQ ID NO: 2010406 - RNA, 19 nt, Artificial Sequence
  Description of Artificial Sequence: Synthetic oligonucleotide
caggagccggucaacccac

SEQ ID NO: 2010407 - RNA, 19 nt, Artificial Sequence
  Description of Artificial Sequence: Synthetic oligonucleotide
gaacgacgcucugaccgcc

SEQ ID NO: 2010408 - RNA, 19 nt, Artificial Sequence
  Description of Artificial Sequence: Synthetic oligonucleotide
gcaauagugcuaggcuugg

SEQ ID NO: 2010409 - RNA, 19 nt, Artificial Sequence
  Description of Artificial Sequence: Synthetic oligonucleotide
uuggcgcgcucaaccauuc

SEQ ID NO: 2010410 - RNA, 19 nt, Artificial Sequence
  Description of Artificial Sequence: Synthetic oligonucleotide
cucgcucccucagaccccg

SEQ ID NO: 2010411 - RNA, 19 nt, Artificial Sequence
  Description of Artificial Sequence: Synthetic oligonucleotide
gauagccaccaggcaguag

SEQ ID NO: 2010412 - RNA, 19 nt, Artificial Sequence
  Description of Artificial Sequence: Synthetic oligonucleotide
augcaugcaccacggggau

SEQ ID NO: 2010413 - RNA, 19 nt, Artificial Sequence
  Description of Artificial Sequence: Synthetic oligonucleotide
cuccacccgccguaucugc

SEQ ID NO: 2010414 - RNA, 19 nt, Artificial Sequence
  Description of Artificial Sequence: Synthetic oligonucleotide
ggcgauggaugcaugcacc

SEQ ID NO: 2010415 - RNA, 19 nt, Artificial Sequence
  Description of Artificial Sequence: Synthetic oligonucleotide
accaaucguucacuaccau

SEQ ID NO: 2010416 - RNA, 19 nt, Artificial Sequence
  Description of Artificial Sequence: Synthetic oligonucleotide
ccucgauggaagucuuagg

SEQ ID NO: 2010417 - RNA, 19 nt, Artificial Sequence
  Description of Artificial Sequence: Synthetic oligonucleotide
gguguuguuggguacuagu

SEQ ID NO: 2010418 - RNA, 19 nt, Artificial Sequence
  Description of Artificial Sequence: Synthetic oligonucleotide
cuggguggacuaaggccac

SEQ ID NO: 2010419 - RNA, 19 nt, Artificial Sequence
  Description of Artificial Sequence: Synthetic oligonucleotide
caguagcuuccuacuaaca

SEQ ID NO: 2010420 - RNA, 19 nt, Artificial Sequence
  Description of Artificial Sequence: Synthetic oligonucleotide
gucuuagggugcaccagac

SEQ ID NO: 2010421 - RNA, 19 nt, Artificial Sequence
  Description of Artificial Sequence: Synthetic oligonucleotide
gccguaucugcaccgaauc

SEQ ID NO: 2010422 - RNA, 19 nt, Artificial Sequence
  Description of Artificial Sequence: Synthetic oligonucleotide
caauagugcuaggcuuggc

SEQ ID NO: 2010423 - RNA, 19 nt, Artificial Sequence
  Description of Artificial Sequence: Synthetic oligonucleotide
gcaguacuuuaauggggug

SEQ ID NO: 2010424 - RNA, 19 nt, Artificial Sequence
  Description of Artificial Sequence: Synthetic oligonucleotide
gcgaccgcaggguucuggg

SEQ ID NO: 2010425 - RNA, 19 nt, Artificial Sequence
  Description of Artificial Sequence: Synthetic oligonucleotide
accgaaucuggaaggcugu

SEQ ID NO: 2010426 - RNA, 19 nt, Artificial Sequence
  Description of Artificial Sequence: Synthetic oligonucleotide
gcugccagcguuugguaca

SEQ ID NO: 2010427 - RNA, 19 nt, Artificial Sequence
  Description of Artificial Sequence: Synthetic oligonucleotide
ucaccucgcucccucgguu

SEQ ID NO: 2010428 - RNA, 19 nt, Artificial Sequence
  Description of Artificial Sequence: Synthetic oligonucleotide
guagaaguucucugacccu

SEQ ID NO: 2010429 - RNA, 19 nt, Artificial Sequence
  Description of Artificial Sequence: Synthetic oligonucleotide
augcgcccgaugauccggc

SEQ ID NO: 2010430 - RNA, 19 nt, Artificial Sequence
  Description of Artificial Sequence: Synthetic oligonucleotide
uggguacuaguagcccaug

SEQ ID NO: 2010431 - RNA, 19 nt, Artificial Sequence
  Description of Artificial Sequence: Synthetic oligonucleotide
ugguggcaauagugcuagg

SEQ ID NO: 2010432 - RNA, 19 nt, Artificial Sequence
  Description of Artificial Sequence: Synthetic oligonucleotide
cccuugauuacugaagaca

SEQ ID NO: 2010433 - RNA, 19 nt, Artificial Sequence
  Description of Artificial Sequence: Synthetic oligonucleotide
cguaucugcaccgaaucug

SEQ ID NO: 2010434 - RNA, 19 nt, Artificial Sequence
  Description of Artificial Sequence: Synthetic oligonucleotide
accuggucagcaacugucu

SEQ ID NO: 2010435 - RNA, 19 nt, Artificial Sequence
  Description of Artificial Sequence: Synthetic oligonucleotide
gauccggcagccggcgaug

SEQ ID NO: 2010436 - RNA, 19 nt, Artificial Sequence
  Description of Artificial Sequence: Synthetic oligonucleotide
cacccgccguaucugcacc

SEQ ID NO: 2010437 - RNA, 19 nt, Artificial Sequence
  Description of Artificial Sequence: Synthetic oligonucleotide
acacggcaagccuuuuaua

SEQ ID NO: 2010438 - RNA, 19 nt, Artificial Sequence
  Description of Artificial Sequence: Synthetic oligonucleotide
gacccuccgauagccacca

SEQ ID NO: 2010439 - RNA, 19 nt, Artificial Sequence
  Description of Artificial Sequence: Synthetic oligonucleotide
ugacucaugugaggcuguc

SEQ ID NO: 2010440 - RNA, 19 nt, Artificial Sequence
  Description of Artificial Sequence: Synthetic oligonucleotide
gucaacccaccucgcuccc

SEQ ID NO: 2010441 - RNA, 19 nt, Artificial Sequence
  Description of Artificial Sequence: Synthetic oligonucleotide
guuguucucgaacgacgcu

SEQ ID NO: 2010442 - RNA, 19 nt, Artificial Sequence
  Description of Artificial Sequence: Synthetic oligonucleotide
ccucgguucacagugccug

SEQ ID NO: 2010443 - RNA, 19 nt, Artificial Sequence
  Description of Artificial Sequence: Synthetic oligonucleotide
ugcaugcaccacggggaug

SEQ ID NO: 2010444 - RNA, 19 nt, Artificial Sequence
  Description of Artificial Sequence: Synthetic oligonucleotide
caccucgcucccucgguuc

SEQ ID NO: 2010445 - RNA, 19 nt, Artificial Sequence
  Description of Artificial Sequence: Synthetic oligonucleotide
ggcaguacuuuaauggggu

SEQ ID NO: 2010446 - RNA, 19 nt, Artificial Sequence
  Description of Artificial Sequence: Synthetic oligonucleotide
aacgacgcucugaccgcca

SEQ ID NO: 2010447 - RNA, 19 nt, Artificial Sequence
  Description of Artificial Sequence: Synthetic oligonucleotide
cugguccucgauggaaguc

SEQ ID NO: 2010448 - RNA, 19 nt, Artificial Sequence
  Description of Artificial Sequence: Synthetic oligonucleotide
ggccucguuuagcuugaag

SEQ ID NO: 2010449 - RNA, 19 nt, Artificial Sequence
  Description of Artificial Sequence: Synthetic oligonucleotide
cacuaccauuccagcagca

SEQ ID NO: 2010450 - RNA, 19 nt, Artificial Sequence
  Description of Artificial Sequence: Synthetic oligonucleotide
guaagcucugccacgcccu

SEQ ID NO: 2010451 - RNA, 19 nt, Artificial Sequence
  Description of Artificial Sequence: Synthetic oligonucleotide
uggaagucuuagggugcac

SEQ ID NO: 2010452 - RNA, 19 nt, Artificial Sequence
  Description of Artificial Sequence: Synthetic oligonucleotide
uggcgcgcucaaccauuca

SEQ ID NO: 2010453 - RNA, 19 nt, Artificial Sequence
  Description of Artificial Sequence: Synthetic oligonucleotide
accuccaccuugagcacgu

SEQ ID NO: 2010454 - RNA, 19 nt, Artificial Sequence
  Description of Artificial Sequence: Synthetic oligonucleotide
guucucugacccuccgaua

SEQ ID NO: 2010455 - RNA, 19 nt, Artificial Sequence
  Description of Artificial Sequence: Synthetic oligonucleotide
gcccucucggaccucucag

SEQ ID NO: 2010456 - RNA, 19 nt, Artificial Sequence
  Description of Artificial Sequence: Synthetic oligonucleotide
caugccuguuccccacaca

SEQ ID NO: 2010457 - RNA, 19 nt, Artificial Sequence
  Description of Artificial Sequence: Synthetic oligonucleotide
acgucagccaggauuucuu

SEQ ID NO: 2010458 - RNA, 19 nt, Artificial Sequence
  Description of Artificial Sequence: Synthetic oligonucleotide
cucucaggagccggucaac

SEQ ID NO: 2010459 - RNA, 19 nt, Artificial Sequence
  Description of Artificial Sequence: Synthetic oligonucleotide
augauccggcagccggcga

SEQ ID NO: 2010460 - RNA, 19 nt, Artificial Sequence
  Description of Artificial Sequence: Synthetic oligonucleotide
ugcgcccgaugauccggca

SEQ ID NO: 2010461 - RNA, 19 nt, Artificial Sequence
  Description of Artificial Sequence: Synthetic oligonucleotide
guacuuuaaugggguggga

SEQ ID NO: 2010462 - RNA, 19 nt, Artificial Sequence
  Description of Artificial Sequence: Synthetic oligonucleotide
ccccuugauuacugaagac

SEQ ID NO: 2010463 - RNA, 19 nt, Artificial Sequence
  Description of Artificial Sequence: Synthetic oligonucleotide
ucccucagaccccgcccuc

SEQ ID NO: 2010464 - RNA, 19 nt, Artificial Sequence
  Description of Artificial Sequence: Synthetic oligonucleotide
gcgcgcucaaccauucagc

SEQ ID NO: 2010465 - RNA, 19 nt, Artificial Sequence
  Description of Artificial Sequence: Synthetic oligonucleotide
cuggaaggcuguuucggau

SEQ ID NO: 2010466 - RNA, 19 nt, Artificial Sequence
  Description of Artificial Sequence: Synthetic oligonucleotide
acgacgcucugaccgccau

SEQ ID NO: 2010467 - RNA, 19 nt, Artificial Sequence
  Description of Artificial Sequence: Synthetic oligonucleotide
cugcgcgaccgcaggguuc

SEQ ID NO: 2010468 - RNA, 19 nt, Artificial Sequence
  Description of Artificial Sequence: Synthetic oligonucleotide
cuccgauagccaccaggca

SEQ ID NO: 2010469 - RNA, 19 nt, Artificial Sequence
  Description of Artificial Sequence: Synthetic oligonucleotide
cgaacgacgcucugaccgc

SEQ ID NO: 2010470 - RNA, 19 nt, Artificial Sequence
  Description of Artificial Sequence: Synthetic oligonucleotide
cugguccgugguguuguug

SEQ ID NO: 2010471 - RNA, 19 nt, Artificial Sequence
  Description of Artificial Sequence: Synthetic oligonucleotide
ccagcaugacacggcaagc

SEQ ID NO: 2010472 - RNA, 19 nt, Artificial Sequence
  Description of Artificial Sequence: Synthetic oligonucleotide
cgacagacccucucaggag

SEQ ID NO: 2010473 - RNA, 19 nt, Artificial Sequence
  Description of Artificial Sequence: Synthetic oligonucleotide
gggugggacacaagacagc

SEQ ID NO: 2010474 - RNA, 19 nt, Artificial Sequence
  Description of Artificial Sequence: Synthetic oligonucleotide
aggcuguuucggauaugcu

SEQ ID NO: 2010475 - RNA, 19 nt, Artificial Sequence
  Description of Artificial Sequence: Synthetic oligonucleotide
gaccgccauggaagccugg

SEQ ID NO: 2010476 - RNA, 19 nt, Artificial Sequence
  Description of Artificial Sequence: Synthetic oligonucleotide
auacuagcucaggcauggu

SEQ ID NO: 2010477 - RNA, 19 nt, Artificial Sequence
  Description of Artificial Sequence: Synthetic oligonucleotide
cgaugauccggcagccggc

SEQ ID NO: 2010478 - RNA, 19 nt, Artificial Sequence
  Description of Artificial Sequence: Synthetic oligonucleotide
cagccgaccucgcaguugu

SEQ ID NO: 2010479 - RNA, 19 nt, Artificial Sequence
  Description of Artificial Sequence: Synthetic oligonucleotide
ccgccauggaagccugggg

SEQ ID NO: 2010480 - RNA, 19 nt, Artificial Sequence
  Description of Artificial Sequence: Synthetic oligonucleotide
ggggaugguuucagagagc

SEQ ID NO: 2010481 - RNA, 19 nt, Artificial Sequence
  Description of Artificial Sequence: Synthetic oligonucleotide
ugcuaggcuuggccucguu

SEQ ID NO: 2010482 - RNA, 19 nt, Artificial Sequence
  Description of Artificial Sequence: Synthetic oligonucleotide
gcgcccgaugauccggcag

SEQ ID NO: 2010483 - RNA, 19 nt, Artificial Sequence
  Description of Artificial Sequence: Synthetic oligonucleotide
gcgcucaaccauucagcuc

SEQ ID NO: 2010484 - RNA, 19 nt, Artificial Sequence
  Description of Artificial Sequence: Synthetic oligonucleotide
ccacccgccguaucugcac

SEQ ID NO: 2010485 - RNA, 19 nt, Artificial Sequence
  Description of Artificial Sequence: Synthetic oligonucleotide
ggaaucccgcaugcuggug

SEQ ID NO: 2010486 - RNA, 19 nt, Artificial Sequence
  Description of Artificial Sequence: Synthetic oligonucleotide
gguggacuaaggccacaua

SEQ ID NO: 2010487 - RNA, 19 nt, Artificial Sequence
  Description of Artificial Sequence: Synthetic oligonucleotide
ccgugguguuguuggguac

SEQ ID NO: 2010488 - RNA, 19 nt, Artificial Sequence
  Description of Artificial Sequence: Synthetic oligonucleotide
gugguguuguuggguacua

SEQ ID NO: 2010489 - RNA, 19 nt, Artificial Sequence
  Description of Artificial Sequence: Synthetic oligonucleotide
cacacaugcgcccgaugau

SEQ ID NO: 2010490 - RNA, 19 nt, Artificial Sequence
  Description of Artificial Sequence: Synthetic oligonucleotide
gcacaccaaucguucacua

SEQ ID NO: 2010491 - RNA, 19 nt, Artificial Sequence
  Description of Artificial Sequence: Synthetic oligonucleotide
cguuugguacauacuagcu

SEQ ID NO: 2010492 - RNA, 19 nt, Artificial Sequence
  Description of Artificial Sequence: Synthetic oligonucleotide
gcagccgaccucgcaguug

SEQ ID NO: 2010493 - RNA, 19 nt, Artificial Sequence
  Description of Artificial Sequence: Synthetic oligonucleotide
ccucgcucccucagacccc

SEQ ID NO: 2010494 - RNA, 19 nt, Artificial Sequence
  Description of Artificial Sequence: Synthetic oligonucleotide
gcaagccuuuuauaacaau

SEQ ID NO: 2010495 - RNA, 19 nt, Artificial Sequence
  Description of Artificial Sequence: Synthetic oligonucleotide
gcccucgaacacacuguag

SEQ ID NO: 2010496 - RNA, 19 nt, Artificial Sequence
  Description of Artificial Sequence: Synthetic oligonucleotide
gccgaccucgcaguuguuc

SEQ ID NO: 2010497 - RNA, 19 nt, Artificial Sequence
  Description of Artificial Sequence: Synthetic oligonucleotide
cucgcucccucgguucaca

SEQ ID NO: 2010498 - RNA, 19 nt, Artificial Sequence
  Description of Artificial Sequence: Synthetic oligonucleotide
gcaugguaaaugagccaaa

SEQ ID NO: 2010499 - RNA, 19 nt, Artificial Sequence
  Description of Artificial Sequence: Synthetic oligonucleotide
gggaaucccgcaugcuggu

SEQ ID NO: 2010500 - RNA, 19 nt, Artificial Sequence
  Description of Artificial Sequence: Synthetic oligonucleotide
ccaaucguucacuaccauu

SEQ ID NO: 2010501 - RNA, 19 nt, Artificial Sequence
  Description of Artificial Sequence: Synthetic oligonucleotide
augacacggcaagccuuuu

SEQ ID NO: 2010502 - RNA, 19 nt, Artificial Sequence
  Description of Artificial Sequence: Synthetic oligonucleotide
gcccgaugauccggcagcc

SEQ ID NO: 2010503 - RNA, 19 nt, Artificial Sequence
  Description of Artificial Sequence: Synthetic oligonucleotide
cccgaugauccggcagccg

SEQ ID NO: 2010504 - RNA, 19 nt, Artificial Sequence
  Description of Artificial Sequence: Synthetic oligonucleotide
caccacggggaugguuuca

SEQ ID NO: 2010505 - RNA, 19 nt, Artificial Sequence
  Description of Artificial Sequence: Synthetic oligonucleotide
ccagcguuugguacauacu

SEQ ID NO: 2010506 - RNA, 19 nt, Artificial Sequence
  Description of Artificial Sequence: Synthetic oligonucleotide
gacccucucaggagccggu

SEQ ID NO: 2010507 - RNA, 19 nt, Artificial Sequence
  Description of Artificial Sequence: Synthetic oligonucleotide
ccgaccucgcaguuguucu

SEQ ID NO: 2010508 - RNA, 19 nt, Artificial Sequence
  Description of Artificial Sequence: Synthetic oligonucleotide
gguuggcgcgcucaaccau

SEQ ID NO: 2010509 - RNA, 19 nt, Artificial Sequence
  Description of Artificial Sequence: Synthetic oligonucleotide
gcuaggcuuggccucguuu

SEQ ID NO: 2010510 - RNA, 19 nt, Artificial Sequence
  Description of Artificial Sequence: Synthetic oligonucleotide
agccggcgauggaugcaug

SEQ ID NO: 2010511 - RNA, 19 nt, Artificial Sequence
  Description of Artificial Sequence: Synthetic oligonucleotide
cuaaggccacauagucauu

SEQ ID NO: 2010512 - RNA, 19 nt, Artificial Sequence
  Description of Artificial Sequence: Synthetic oligonucleotide
uggccucguuuagcuugaa

SEQ ID NO: 2010513 - RNA, 19 nt, Artificial Sequence
  Description of Artificial Sequence: Synthetic oligonucleotide
cgaccucgcaguuguucuc

SEQ ID NO: 2010514 - RNA, 19 nt, Artificial Sequence
  Description of Artificial Sequence: Synthetic oligonucleotide
cuaguagcccaugccuguu

SEQ ID NO: 2010515 - RNA, 19 nt, Artificial Sequence
  Description of Artificial Sequence: Synthetic oligonucleotide
ccggcgauggaugcaugca

SEQ ID NO: 2010516 - RNA, 19 nt, Artificial Sequence
  Description of Artificial Sequence: Synthetic oligonucleotide
ccguaucugcaccgaaucu

SEQ ID NO: 2010517 - RNA, 19 nt, Artificial Sequence
  Description of Artificial Sequence: Synthetic oligonucleotide
gcaccgaaucuggaaggcu

SEQ ID NO: 2010518 - RNA, 19 nt, Artificial Sequence
  Description of Artificial Sequence: Synthetic oligonucleotide
gcagccggcgauggaugca

SEQ ID NO: 2010519 - RNA, 19 nt, Artificial Sequence
  Description of Artificial Sequence: Synthetic oligonucleotide
cgcgcucaaccauucagcu

SEQ ID NO: 2010520 - RNA, 19 nt, Artificial Sequence
  Description of Artificial Sequence: Synthetic oligonucleotide
ggguggacuaaggccacau

SEQ ID NO: 2010521 - RNA, 19 nt, Artificial Sequence
  Description of Artificial Sequence: Synthetic oligonucleotide
cgcgaccgcaggguucugg

SEQ ID NO: 2010522 - RNA, 19 nt, Artificial Sequence
  Description of Artificial Sequence: Synthetic oligonucleotide
ccaagucuggguggacuaa

SEQ ID NO: 2010523 - RNA, 19 nt, Artificial Sequence
  Description of Artificial Sequence: Synthetic oligonucleotide
ccucgcaguuguucucgaa

SEQ ID NO: 2010524 - RNA, 19 nt, Artificial Sequence
  Description of Artificial Sequence: Synthetic oligonucleotide
ccacggggaugguuucaga

SEQ ID NO: 2010525 - RNA, 19 nt, Artificial Sequence
  Description of Artificial Sequence: Synthetic oligonucleotide
cugccagcguuugguacau

SEQ ID NO: 2010526 - RNA, 19 nt, Artificial Sequence
  Description of Artificial Sequence: Synthetic oligonucleotide
cccacacacaugcgcccga

SEQ ID NO: 2010527 - RNA, 19 nt, Artificial Sequence
  Description of Artificial Sequence: Synthetic oligonucleotide
cugggacgacagacccucu

SEQ ID NO: 2010528 - RNA, 19 nt, Artificial Sequence
  Description of Artificial Sequence: Synthetic oligonucleotide
ccucgcucccucgguucac

SEQ ID NO: 2010529 - RNA, 19 nt, Artificial Sequence
  Description of Artificial Sequence: Synthetic oligonucleotide
gcugcgcgaccgcaggguu

SEQ ID NO: 2010530 - RNA, 19 nt, Artificial Sequence
  Description of Artificial Sequence: Synthetic oligonucleotide
cgcccucgaacacacugua

SEQ ID NO: 2010531 - RNA, 19 nt, Artificial Sequence
  Description of Artificial Sequence: Synthetic oligonucleotide
ccggucaacccaccucgcu

SEQ ID NO: 2010532 - RNA, 19 nt, Artificial Sequence
  Description of Artificial Sequence: Synthetic oligonucleotide
ccaagggcugagagccgcu

SEQ ID NO: 2010533 - RNA, 19 nt, Artificial Sequence
  Description of Artificial Sequence: Synthetic oligonucleotide
cccgccguaucugcaccga

SEQ ID NO: 2010534 - RNA, 19 nt, Artificial Sequence
  Description of Artificial Sequence: Synthetic oligonucleotide
cccucgguucacagugccu

SEQ ID NO: 2010535 - RNA, 19 nt, Artificial Sequence
  Description of Artificial Sequence: Synthetic oligonucleotide
caugcaccacggggauggu

SEQ ID NO: 2010536 - RNA, 19 nt, Artificial Sequence
  Description of Artificial Sequence: Synthetic oligonucleotide
gugcuaggcuuggccucgu

SEQ ID NO: 2010537 - RNA, 19 nt, Artificial Sequence
  Description of Artificial Sequence: Synthetic oligonucleotide
ccgccguaucugcaccgaa

SEQ ID NO: 2010538 - RNA, 19 nt, Artificial Sequence
  Description of Artificial Sequence: Synthetic oligonucleotide
agccgaccucgcaguuguu

SEQ ID NO: 2010539 - RNA, 19 nt, Artificial Sequence
  Description of Artificial Sequence: Synthetic oligonucleotide
ccgcaugcugguggcaaua

SEQ ID NO: 2010540 - RNA, 19 nt, Artificial Sequence
  Description of Artificial Sequence: Synthetic oligonucleotide
cgccguaucugcaccgaau

SEQ ID NO: 2010541 - RNA, 19 nt, Artificial Sequence
  Description of Artificial Sequence: Synthetic oligonucleotide
cgauagccaccaggcagua

SEQ ID NO: 2010542 - RNA, 19 nt, Artificial Sequence
  Description of Artificial Sequence: Synthetic oligonucleotide
ccgaaucuggaaggcuguu

SEQ ID NO: 2010543 - RNA, 19 nt, Artificial Sequence
  Description of Artificial Sequence: Synthetic oligonucleotide
gcgcgaccgcaggguucug

SEQ ID NO: 2010544 - RNA, 19 nt, Artificial Sequence
  Description of Artificial Sequence: Synthetic oligonucleotide
ccugguccgugguguuguu

SEQ ID NO: 2010545 - RNA, 19 nt, Artificial Sequence
  Description of Artificial Sequence: Synthetic oligonucleotide
gcucgcccucgaacacacu

SEQ ID NO: 2010546 - RNA, 19 nt, Artificial Sequence
  Description of Artificial Sequence: Synthetic oligonucleotide
uauucuaagagcuacaggg

SEQ ID NO: 2010547 - RNA, 19 nt, Artificial Sequence
  Description of Artificial Sequence: Synthetic oligonucleotide
uuuaaugagacuuaacugc

SEQ ID NO: 2010548 - RNA, 19 nt, Artificial Sequence
  Description of Artificial Sequence: Synthetic oligonucleotide
aagaugagugccuagacac

SEQ ID NO: 2010549 - RNA, 19 nt, Artificial Sequence
  Description of Artificial Sequence: Synthetic oligonucleotide
uccuauaugaacuuguggg

SEQ ID NO: 2010550 - RNA, 19 nt, Artificial Sequence
  Description of Artificial Sequence: Synthetic oligonucleotide
uauuuaaugagacuuaacu

SEQ ID NO: 2010551 - RNA, 19 nt, Artificial Sequence
  Description of Artificial Sequence: Synthetic oligonucleotide
ucaaccaacacaaacuucc

SEQ ID NO: 2010552 - RNA, 19 nt, Artificial Sequence
  Description of Artificial Sequence: Synthetic oligonucleotide
guuaccaagaucuuuaggc

SEQ ID NO: 2010553 - RNA, 19 nt, Artificial Sequence
  Description of Artificial Sequence: Synthetic oligonucleotide
acacuaacaacucugaaag

SEQ ID NO: 2010554 - RNA, 19 nt, Artificial Sequence
  Description of Artificial Sequence: Synthetic oligonucleotide
ugcaauaagggaaaagucc

SEQ ID NO: 2010555 - RNA, 19 nt, Artificial Sequence
  Description of Artificial Sequence: Synthetic oligonucleotide
agugggauguaucuggucc

SEQ ID NO: 2010556 - RNA, 19 nt, Artificial Sequence
  Description of Artificial Sequence: Synthetic oligonucleotide
aaaucaaauguccauugcu

SEQ ID NO: 2010557 - RNA, 19 nt, Artificial Sequence
  Description of Artificial Sequence: Synthetic oligonucleotide
agacuuaacugccaucucc

SEQ ID NO: 2010558 - RNA, 19 nt, Artificial Sequence
  Description of Artificial Sequence: Synthetic oligonucleotide
uuuaaauuaugcagugugc

SEQ ID NO: 2010559 - RNA, 19 nt, Artificial Sequence
  Description of Artificial Sequence: Synthetic oligonucleotide
uuaaugagacuuaacugcc

SEQ ID NO: 2010560 - RNA, 19 nt, Artificial Sequence
  Description of Artificial Sequence: Synthetic oligonucleotide
aaaagucccagcucagagg

SEQ ID NO: 2010561 - RNA, 19 nt, Artificial Sequence
  Description of Artificial Sequence: Synthetic oligonucleotide
uuagcuguauuuaaugaga

SEQ ID NO: 2010562 - RNA, 19 nt, Artificial Sequence
  Description of Artificial Sequence: Synthetic oligonucleotide
aaagucccagcucagagga

SEQ ID NO: 2010563 - RNA, 19 nt, Artificial Sequence
  Description of Artificial Sequence: Synthetic oligonucleotide
aaacuuccauuccaccacc

SEQ ID NO: 2010564 - RNA, 19 nt, Artificial Sequence
  Description of Artificial Sequence: Synthetic oligonucleotide
uucucaaccaacacaaacu

SEQ ID NO: 2010565 - RNA, 19 nt, Artificial Sequence
  Description of Artificial Sequence: Synthetic oligonucleotide
aaagaacucugauggcuac

SEQ ID NO: 2010566 - RNA, 19 nt, Artificial Sequence
  Description of Artificial Sequence: Synthetic oligonucleotide
aaauuaugcagugugcucu

SEQ ID NO: 2010567 - RNA, 19 nt, Artificial Sequence
  Description of Artificial Sequence: Synthetic oligonucleotide
ugcagugugcucuacagcc

SEQ ID NO: 2010568 - RNA, 19 nt, Artificial Sequence
  Description of Artificial Sequence: Synthetic oligonucleotide
uccauugcuuucuugaagc

SEQ ID NO: 2010569 - RNA, 19 nt, Artificial Sequence
  Description of Artificial Sequence: Synthetic oligonucleotide
ugcacugugagucagugaa

SEQ ID NO: 2010570 - RNA, 19 nt, Artificial Sequence
  Description of Artificial Sequence: Synthetic oligonucleotide
ucugauuuggagaccagca

SEQ ID NO: 2010571 - RNA, 19 nt, Artificial Sequence
  Description of Artificial Sequence: Synthetic oligonucleotide
aaaagccacacuaacaacu

SEQ ID NO: 2010572 - RNA, 19 nt, Artificial Sequence
  Description of Artificial Sequence: Synthetic oligonucleotide
gauguugaccugcugaggc

SEQ ID NO: 2010573 - RNA, 19 nt, Artificial Sequence
  Description of Artificial Sequence: Synthetic oligonucleotide
uuggacaaaagccacacua

SEQ ID NO: 2010574 - RNA, 19 nt, Artificial Sequence
  Description of Artificial Sequence: Synthetic oligonucleotide
aagaucuuuaggcucagaa

SEQ ID NO: 2010575 - RNA, 19 nt, Artificial Sequence
  Description of Artificial Sequence: Synthetic oligonucleotide
uuaaauuaugcagugugcu

SEQ ID NO: 2010576 - RNA, 19 nt, Artificial Sequence
  Description of Artificial Sequence: Synthetic oligonucleotide
aauggguucacacugccuu

SEQ ID NO: 2010577 - RNA, 19 nt, Artificial Sequence
  Description of Artificial Sequence: Synthetic oligonucleotide
aacucugauggcuacaaau

SEQ ID NO: 2010578 - RNA, 19 nt, Artificial Sequence
  Description of Artificial Sequence: Synthetic oligonucleotide
auguaucugguccaucccc

SEQ ID NO: 2010579 - RNA, 19 nt, Artificial Sequence
  Description of Artificial Sequence: Synthetic oligonucleotide
ucucccuauucuaagagcu

SEQ ID NO: 2010580 - RNA, 19 nt, Artificial Sequence
  Description of Artificial Sequence: Synthetic oligonucleotide
aacacaaucucuggcauug

SEQ ID NO: 2010581 - RNA, 19 nt, Artificial Sequence
  Description of Artificial Sequence: Synthetic oligonucleotide
ugugcaguugguuaguuuc

SEQ ID NO: 2010582 - RNA, 19 nt, Artificial Sequence
  Description of Artificial Sequence: Synthetic oligonucleotide
agugcaauaagggaaaagu

SEQ ID NO: 2010583 - RNA, 19 nt, Artificial Sequence
  Description of Artificial Sequence: Synthetic oligonucleotide
uuagccaagccaacuaccc

SEQ ID NO: 2010584 - RNA, 19 nt, Artificial Sequence
  Description of Artificial Sequence: Synthetic oligonucleotide
caaucucuggcauugcucc

SEQ ID NO: 2010585 - RNA, 19 nt, Artificial Sequence
  Description of Artificial Sequence: Synthetic oligonucleotide
aagggaaaagucccagcuc

SEQ ID NO: 2010586 - RNA, 19 nt, Artificial Sequence
  Description of Artificial Sequence: Synthetic oligonucleotide
uuaguuucucccuugccca

SEQ ID NO: 2010587 - RNA, 19 nt, Artificial Sequence
  Description of Artificial Sequence: Synthetic oligonucleotide
aaugagaccacagcccauc

SEQ ID NO: 2010588 - RNA, 19 nt, Artificial Sequence
  Description of Artificial Sequence: Synthetic oligonucleotide
gauugugcaaggcuggcug

SEQ ID NO: 2010589 - RNA, 19 nt, Artificial Sequence
  Description of Artificial Sequence: Synthetic oligonucleotide
agcacaaaccagucagugc

SEQ ID NO: 2010590 - RNA, 19 nt, Artificial Sequence
  Description of Artificial Sequence: Synthetic oligonucleotide
ugagacuuaacugccaucu

SEQ ID NO: 2010591 - RNA, 19 nt, Artificial Sequence
  Description of Artificial Sequence: Synthetic oligonucleotide
aaucuuccuacauuuugga

SEQ ID NO: 2010592 - RNA, 19 nt, Artificial Sequence
  Description of Artificial Sequence: Synthetic oligonucleotide
augcuuugcacugugaguc

SEQ ID NO: 2010593 - RNA, 19 nt, Artificial Sequence
  Description of Artificial Sequence: Synthetic oligonucleotide
aaugagacuuaacugccau

SEQ ID NO: 2010594 - RNA, 19 nt, Artificial Sequence
  Description of Artificial Sequence: Synthetic oligonucleotide
uucccagcgaguaacuucc

SEQ ID NO: 2010595 - RNA, 19 nt, Artificial Sequence
  Description of Artificial Sequence: Synthetic oligonucleotide
ugugagucagugaaucccc

SEQ ID NO: 2010596 - RNA, 19 nt, Artificial Sequence
  Description of Artificial Sequence: Synthetic oligonucleotide
uucuaagagcuacagggcu

SEQ ID NO: 2010597 - RNA, 19 nt, Artificial Sequence
  Description of Artificial Sequence: Synthetic oligonucleotide
aucucccuauucuaagagc

SEQ ID NO: 2010598 - RNA, 19 nt, Artificial Sequence
  Description of Artificial Sequence: Synthetic oligonucleotide
uuaggcucagaaaucaaau

SEQ ID NO: 2010599 - RNA, 19 nt, Artificial Sequence
  Description of Artificial Sequence: Synthetic oligonucleotide
uuuaggcucagaaaucaaa

SEQ ID NO: 2010600 - RNA, 19 nt, Artificial Sequence
  Description of Artificial Sequence: Synthetic oligonucleotide
uuaccaagaucuuuaggcu

SEQ ID NO: 2010601 - RNA, 19 nt, Artificial Sequence
  Description of Artificial Sequence: Synthetic oligonucleotide
cuaacaacucugaaagaac

SEQ ID NO: 2010602 - RNA, 19 nt, Artificial Sequence
  Description of Artificial Sequence: Synthetic oligonucleotide
aaagccacacuaacaacuc

SEQ ID NO: 2010603 - RNA, 19 nt, Artificial Sequence
  Description of Artificial Sequence: Synthetic oligonucleotide
ugcucuacagccuuagccu

SEQ ID NO: 2010604 - RNA, 19 nt, Artificial Sequence
  Description of Artificial Sequence: Synthetic oligonucleotide
guaaacauguugcuuuagc

SEQ ID NO: 2010605 - RNA, 19 nt, Artificial Sequence
  Description of Artificial Sequence: Synthetic oligonucleotide
uuaacugccaucucccuau

SEQ ID NO: 2010606 - RNA, 19 nt, Artificial Sequence
  Description of Artificial Sequence: Synthetic oligonucleotide
ucaagugaugaugugucag

SEQ ID NO: 2010607 - RNA, 19 nt, Artificial Sequence
  Description of Artificial Sequence: Synthetic oligonucleotide
ucuuuaggcucagaaauca

SEQ ID NO: 2010608 - RNA, 19 nt, Artificial Sequence
  Description of Artificial Sequence: Synthetic oligonucleotide
augaugugucagcacaaac

SEQ ID NO: 2010609 - RNA, 19 nt, Artificial Sequence
  Description of Artificial Sequence: Synthetic oligonucleotide
gaucuuuaggcucagaaau

SEQ ID NO: 2010610 - RNA, 19 nt, Artificial Sequence
  Description of Artificial Sequence: Synthetic oligonucleotide
gauggcuacaaauggguuc

SEQ ID NO: 2010611 - RNA, 19 nt, Artificial Sequence
  Description of Artificial Sequence: Synthetic oligonucleotide
cauccuuacaauaguggag

SEQ ID NO: 2010612 - RNA, 19 nt, Artificial Sequence
  Description of Artificial Sequence: Synthetic oligonucleotide
auucuaagagcuacagggc

SEQ ID NO: 2010613 - RNA, 19 nt, Artificial Sequence
  Description of Artificial Sequence: Synthetic oligonucleotide
acuaacaacucugaaagaa

SEQ ID NO: 2010614 - RNA, 19 nt, Artificial Sequence
  Description of Artificial Sequence: Synthetic oligonucleotide
uggauguugaccugcugag

SEQ ID NO: 2010615 - RNA, 19 nt, Artificial Sequence
  Description of Artificial Sequence: Synthetic oligonucleotide
ugaacugccuugaacugga

SEQ ID NO: 2010616 - RNA, 19 nt, Artificial Sequence
  Description of Artificial Sequence: Synthetic oligonucleotide
agugccuagacaccacuuc

SEQ ID NO: 2010617 - RNA, 19 nt, Artificial Sequence
  Description of Artificial Sequence: Synthetic oligonucleotide
uucuccuauaugaacuugu

SEQ ID NO: 2010618 - RNA, 19 nt, Artificial Sequence
  Description of Artificial Sequence: Synthetic oligonucleotide
gauuuggagaccagcaccc

SEQ ID NO: 2010619 - RNA, 19 nt, Artificial Sequence
  Description of Artificial Sequence: Synthetic oligonucleotide
ucuuagccaagccaacuac

SEQ ID NO: 2010620 - RNA, 19 nt, Artificial Sequence
  Description of Artificial Sequence: Synthetic oligonucleotide
uaaauuaugcagugugcuc

SEQ ID NO: 2010621 - RNA, 19 nt, Artificial Sequence
  Description of Artificial Sequence: Synthetic oligonucleotide
uuuuggacaaaagccacac

SEQ ID NO: 2010622 - RNA, 19 nt, Artificial Sequence
  Description of Artificial Sequence: Synthetic oligonucleotide
guucucaaccaacacaaac

SEQ ID NO: 2010623 - RNA, 19 nt, Artificial Sequence
  Description of Artificial Sequence: Synthetic oligonucleotide
ucuccuauaugaacuugug

SEQ ID NO: 2010624 - RNA, 19 nt, Artificial Sequence
  Description of Artificial Sequence: Synthetic oligonucleotide
uguauuuaaugagacuuaa

SEQ ID NO: 2010625 - RNA, 19 nt, Artificial Sequence
  Description of Artificial Sequence: Synthetic oligonucleotide
aaaccagucagugcaauaa

SEQ ID NO: 2010626 - RNA, 19 nt, Artificial Sequence
  Description of Artificial Sequence: Synthetic oligonucleotide
cuuagccaagccaacuacc

SEQ ID NO: 2010627 - RNA, 19 nt, Artificial Sequence
  Description of Artificial Sequence: Synthetic oligonucleotide
ucucaaccaacacaaacuu

SEQ ID NO: 2010628 - RNA, 19 nt, Artificial Sequence
  Description of Artificial Sequence: Synthetic oligonucleotide
ugaagcuguucugauuugg

SEQ ID NO: 2010629 - RNA, 19 nt, Artificial Sequence
  Description of Artificial Sequence: Synthetic oligonucleotide
cuauucuaagagcuacagg

SEQ ID NO: 2010630 - RNA, 19 nt, Artificial Sequence
  Description of Artificial Sequence: Synthetic oligonucleotide
acauuuuggacaaaagcca

SEQ ID NO: 2010631 - RNA, 19 nt, Artificial Sequence
  Description of Artificial Sequence: Synthetic oligonucleotide
aguggagugggauguaucu

SEQ ID NO: 2010632 - RNA, 19 nt, Artificial Sequence
  Description of Artificial Sequence: Synthetic oligonucleotide
caagugaugaugugucagc

SEQ ID NO: 2010633 - RNA, 19 nt, Artificial Sequence
  Description of Artificial Sequence: Synthetic oligonucleotide
uagcuguauuuaaugagac

SEQ ID NO: 2010634 - RNA, 19 nt, Artificial Sequence
  Description of Artificial Sequence: Synthetic oligonucleotide
uaggcucagaaaucaaaug

SEQ ID NO: 2010635 - RNA, 19 nt, Artificial Sequence
  Description of Artificial Sequence: Synthetic oligonucleotide
agcuguucugauuuggaga

SEQ ID NO: 2010636 - RNA, 19 nt, Artificial Sequence
  Description of Artificial Sequence: Synthetic oligonucleotide
ucccugaguaggcugcugg

SEQ ID NO: 2010637 - RNA, 19 nt, Artificial Sequence
  Description of Artificial Sequence: Synthetic oligonucleotide
accaucaaccccucaagug

SEQ ID NO: 2010638 - RNA, 19 nt, Artificial Sequence
  Description of Artificial Sequence: Synthetic oligonucleotide
uccauucuccuauaugaac

SEQ ID NO: 2010639 - RNA, 19 nt, Artificial Sequence
  Description of Artificial Sequence: Synthetic oligonucleotide
caguugguuaguuucuccc

SEQ ID NO: 2010640 - RNA, 19 nt, Artificial Sequence
  Description of Artificial Sequence: Synthetic oligonucleotide
uggacaaaagccacacuaa

SEQ ID NO: 2010641 - RNA, 19 nt, Artificial Sequence
  Description of Artificial Sequence: Synthetic oligonucleotide
uguugcuuuagcuguauuu

SEQ ID NO: 2010642 - RNA, 19 nt, Artificial Sequence
  Description of Artificial Sequence: Synthetic oligonucleotide
cuccuauaugaacuugugg

SEQ ID NO: 2010643 - RNA, 19 nt, Artificial Sequence
  Description of Artificial Sequence: Synthetic oligonucleotide
gcugcuuuagcucuguccc

SEQ ID NO: 2010644 - RNA, 19 nt, Artificial Sequence
  Description of Artificial Sequence: Synthetic oligonucleotide
gugcucuacagccuuagcc

SEQ ID NO: 2010645 - RNA, 19 nt, Artificial Sequence
  Description of Artificial Sequence: Synthetic oligonucleotide
ugaccgauugugcaaggcu

SEQ ID NO: 2010646 - RNA, 19 nt, Artificial Sequence
  Description of Artificial Sequence: Synthetic oligonucleotide
ugcauaaaucuuccuacau

SEQ ID NO: 2010647 - RNA, 19 nt, Artificial Sequence
  Description of Artificial Sequence: Synthetic oligonucleotide
cuuagccucuuccacauuc

SEQ ID NO: 2010648 - RNA, 19 nt, Artificial Sequence
  Description of Artificial Sequence: Synthetic oligonucleotide
ucuaagagcuacagggcuc

SEQ ID NO: 2010649 - RNA, 19 nt, Artificial Sequence
  Description of Artificial Sequence: Synthetic oligonucleotide
gacuuaacugccaucuccc

SEQ ID NO: 2010650 - RNA, 19 nt, Artificial Sequence
  Description of Artificial Sequence: Synthetic oligonucleotide
acaacucugaaagaacucu

SEQ ID NO: 2010651 - RNA, 19 nt, Artificial Sequence
  Description of Artificial Sequence: Synthetic oligonucleotide
gugaugaugugucagcaca

SEQ ID NO: 2010652 - RNA, 19 nt, Artificial Sequence
  Description of Artificial Sequence: Synthetic oligonucleotide
uaaugagacuuaacugcca

SEQ ID NO: 2010653 - RNA, 19 nt, Artificial Sequence
  Description of Artificial Sequence: Synthetic oligonucleotide
caaugaacugccuugaacu

SEQ ID NO: 2010654 - RNA, 19 nt, Artificial Sequence
  Description of Artificial Sequence: Synthetic oligonucleotide
augcagugugcucuacagc

SEQ ID NO: 2010655 - RNA, 19 nt, Artificial Sequence
  Description of Artificial Sequence: Synthetic oligonucleotide
aaccccucaagugaugaug

SEQ ID NO: 2010656 - RNA, 19 nt, Artificial Sequence
  Description of Artificial Sequence: Synthetic oligonucleotide
cuguucucaaccaacacaa

SEQ ID NO: 2010657 - RNA, 19 nt, Artificial Sequence
  Description of Artificial Sequence: Synthetic oligonucleotide
uuugauuccuugacacuuc

SEQ ID NO: 2010658 - RNA, 19 nt, Artificial Sequence
  Description of Artificial Sequence: Synthetic oligonucleotide
ggauguaucugguccaucc

SEQ ID NO: 2010659 - RNA, 19 nt, Artificial Sequence
  Description of Artificial Sequence: Synthetic oligonucleotide
cuaccuuguacuugugcag

SEQ ID NO: 2010660 - RNA, 19 nt, Artificial Sequence
  Description of Artificial Sequence: Synthetic oligonucleotide
acucuuuccaacaggaaca

SEQ ID NO: 2010661 - RNA, 19 nt, Artificial Sequence
  Description of Artificial Sequence: Synthetic oligonucleotide
aagagcuacagggcucuac

SEQ ID NO: 2010662 - RNA, 19 nt, Artificial Sequence
  Description of Artificial Sequence: Synthetic oligonucleotide
uuaugcagugugcucuaca

SEQ ID NO: 2010663 - RNA, 19 nt, Artificial Sequence
  Description of Artificial Sequence: Synthetic oligonucleotide
ucaugggcaugcauaaauc

SEQ ID NO: 2010664 - RNA, 19 nt, Artificial Sequence
  Description of Artificial Sequence: Synthetic oligonucleotide
acagggcucuaccuuguac

SEQ ID NO: 2010665 - RNA, 19 nt, Artificial Sequence
  Description of Artificial Sequence: Synthetic oligonucleotide
cugugagucagugaauccc

SEQ ID NO: 2010666 - RNA, 19 nt, Artificial Sequence
  Description of Artificial Sequence: Synthetic oligonucleotide
augaacugccuugaacugg

SEQ ID NO: 2010667 - RNA, 19 nt, Artificial Sequence
  Description of Artificial Sequence: Synthetic oligonucleotide
uucucccuugcccauaguc

SEQ ID NO: 2010668 - RNA, 19 nt, Artificial Sequence
  Description of Artificial Sequence: Synthetic oligonucleotide
caucucccuauucuaagag

SEQ ID NO: 2010669 - RNA, 19 nt, Artificial Sequence
  Description of Artificial Sequence: Synthetic oligonucleotide
uacaauaguggagugggau

SEQ ID NO: 2010670 - RNA, 19 nt, Artificial Sequence
  Description of Artificial Sequence: Synthetic oligonucleotide
aagugaugaugugucagca

SEQ ID NO: 2010671 - RNA, 19 nt, Artificial Sequence
  Description of Artificial Sequence: Synthetic oligonucleotide
ugcuuuagcuguauuuaau

SEQ ID NO: 2010672 - RNA, 19 nt, Artificial Sequence
  Description of Artificial Sequence: Synthetic oligonucleotide
gcuuuagcuguauuuaaug

SEQ ID NO: 2010673 - RNA, 19 nt, Artificial Sequence
  Description of Artificial Sequence: Synthetic oligonucleotide
gcuacaaauggguucacac

SEQ ID NO: 2010674 - RNA, 19 nt, Artificial Sequence
  Description of Artificial Sequence: Synthetic oligonucleotide
ucaagacugccacccaaac

SEQ ID NO: 2010675 - RNA, 19 nt, Artificial Sequence
  Description of Artificial Sequence: Synthetic oligonucleotide
ugacucagccucucgcuag

SEQ ID NO: 2010676 - RNA, 19 nt, Artificial Sequence
  Description of Artificial Sequence: Synthetic oligonucleotide
gaggccucaagacugccac

SEQ ID NO: 2010677 - RNA, 19 nt, Artificial Sequence
  Description of Artificial Sequence: Synthetic oligonucleotide
augagacuuaacugccauc

SEQ ID NO: 2010678 - RNA, 19 nt, Artificial Sequence
  Description of Artificial Sequence: Synthetic oligonucleotide
uucugauuuggagaccagc

SEQ ID NO: 2010679 - RNA, 19 nt, Artificial Sequence
  Description of Artificial Sequence: Synthetic oligonucleotide
cacacuaacaacucugaaa

SEQ ID NO: 2010680 - RNA, 19 nt, Artificial Sequence
  Description of Artificial Sequence: Synthetic oligonucleotide
cagcccauccuuacaauag

SEQ ID NO: 2010681 - RNA, 19 nt, Artificial Sequence
  Description of Artificial Sequence: Synthetic oligonucleotide
acaaucucuggcauugcuc

SEQ ID NO: 2010682 - RNA, 19 nt, Artificial Sequence
  Description of Artificial Sequence: Synthetic oligonucleotide
uugauuccuugacacuucu

SEQ ID NO: 2010683 - RNA, 19 nt, Artificial Sequence
  Description of Artificial Sequence: Synthetic oligonucleotide
ccuauaugaacuugugggc

SEQ ID NO: 2010684 - RNA, 19 nt, Artificial Sequence
  Description of Artificial Sequence: Synthetic oligonucleotide
ucucccguuacugcaauga

SEQ ID NO: 2010685 - RNA, 19 nt, Artificial Sequence
  Description of Artificial Sequence: Synthetic oligonucleotide
uauaugaacuugugggcuu

SEQ ID NO: 2010686 - RNA, 19 nt, Artificial Sequence
  Description of Artificial Sequence: Synthetic oligonucleotide
ugcguguccagacucuuuc

SEQ ID NO: 2010687 - RNA, 19 nt, Artificial Sequence
  Description of Artificial Sequence: Synthetic oligonucleotide
uguaaacauguugcuuuag

SEQ ID NO: 2010688 - RNA, 19 nt, Artificial Sequence
  Description of Artificial Sequence: Synthetic oligonucleotide
ucccguuacugcaaugaac

SEQ ID NO: 2010689 - RNA, 19 nt, Artificial Sequence
  Description of Artificial Sequence: Synthetic oligonucleotide
auggcuacaaauggguuca

SEQ ID NO: 2010690 - RNA, 19 nt, Artificial Sequence
  Description of Artificial Sequence: Synthetic oligonucleotide
auaguccauaccucagucu

SEQ ID NO: 2010691 - RNA, 19 nt, Artificial Sequence
  Description of Artificial Sequence: Synthetic oligonucleotide
agucagugcaauaagggaa

SEQ ID NO: 2010692 - RNA, 19 nt, Artificial Sequence
  Description of Artificial Sequence: Synthetic oligonucleotide
cugcauucuucccagcgag

SEQ ID NO: 2010693 - RNA, 19 nt, Artificial Sequence
  Description of Artificial Sequence: Synthetic oligonucleotide
ugaacuugugggcuuugau

SEQ ID NO: 2010694 - RNA, 19 nt, Artificial Sequence
  Description of Artificial Sequence: Synthetic oligonucleotide
cugcagguuaccaagaucu

SEQ ID NO: 2010695 - RNA, 19 nt, Artificial Sequence
  Description of Artificial Sequence: Synthetic oligonucleotide
gcacaaaccagucagugca

SEQ ID NO: 2010696 - RNA, 19 nt, Artificial Sequence
  Description of Artificial Sequence: Synthetic oligonucleotide
ggaugcuuugcacugugag

SEQ ID NO: 2010697 - RNA, 19 nt, Artificial Sequence
  Description of Artificial Sequence: Synthetic oligonucleotide
ucccuguucucaaccaaca

SEQ ID NO: 2010698 - RNA, 19 nt, Artificial Sequence
  Description of Artificial Sequence: Synthetic oligonucleotide
cagccucucgcuaggaugc

SEQ ID NO: 2010699 - RNA, 19 nt, Artificial Sequence
  Description of Artificial Sequence: Synthetic oligonucleotide
gaugagugccuagacacca

SEQ ID NO: 2010700 - RNA, 19 nt, Artificial Sequence
  Description of Artificial Sequence: Synthetic oligonucleotide
aucuuuaggcucagaaauc

SEQ ID NO: 2010701 - RNA, 19 nt, Artificial Sequence
  Description of Artificial Sequence: Synthetic oligonucleotide
cucccugcagguuaccaag

SEQ ID NO: 2010702 - RNA, 19 nt, Artificial Sequence
  Description of Artificial Sequence: Synthetic oligonucleotide
caccuuauccucauggcca

SEQ ID NO: 2010703 - RNA, 19 nt, Artificial Sequence
  Description of Artificial Sequence: Synthetic oligonucleotide
gaccgauugugcaaggcug

SEQ ID NO: 2010704 - RNA, 19 nt, Artificial Sequence
  Description of Artificial Sequence: Synthetic oligonucleotide
ucccuauucuaagagcuac

SEQ ID NO: 2010705 - RNA, 19 nt, Artificial Sequence
  Description of Artificial Sequence: Synthetic oligonucleotide
cucguggccugccaggucc

SEQ ID NO: 2010706 - RNA, 19 nt, Artificial Sequence
  Description of Artificial Sequence: Synthetic oligonucleotide
ggcuuugauuccuugacac

SEQ ID NO: 2010707 - RNA, 19 nt, Artificial Sequence
  Description of Artificial Sequence: Synthetic oligonucleotide
agaugagugccuagacacc

SEQ ID NO: 2010708 - RNA, 19 nt, Artificial Sequence
  Description of Artificial Sequence: Synthetic oligonucleotide
uagccaagccaacuacccc

SEQ ID NO: 2010709 - RNA, 19 nt, Artificial Sequence
  Description of Artificial Sequence: Synthetic oligonucleotide
agauucucauggucucccg

SEQ ID NO: 2010710 - RNA, 19 nt, Artificial Sequence
  Description of Artificial Sequence: Synthetic oligonucleotide
uugcuuuagcuguauuuaa

SEQ ID NO: 2010711 - RNA, 19 nt, Artificial Sequence
  Description of Artificial Sequence: Synthetic oligonucleotide
agcuguauuuaaugagacu

SEQ ID NO: 2010712 - RNA, 19 nt, Artificial Sequence
  Description of Artificial Sequence: Synthetic oligonucleotide
agggacuccauucuccuau

SEQ ID NO: 2010713 - RNA, 19 nt, Artificial Sequence
  Description of Artificial Sequence: Synthetic oligonucleotide
agguuaccaagaucuuuag

SEQ ID NO: 2010714 - RNA, 19 nt, Artificial Sequence
  Description of Artificial Sequence: Synthetic oligonucleotide
accuuauccucauggccag

SEQ ID NO: 2010715 - RNA, 19 nt, Artificial Sequence
  Description of Artificial Sequence: Synthetic oligonucleotide
uuacaauaguggaguggga

SEQ ID NO: 2010716 - RNA, 19 nt, Artificial Sequence
  Description of Artificial Sequence: Synthetic oligonucleotide
auucugacucagccucucg

SEQ ID NO: 2010717 - RNA, 19 nt, Artificial Sequence
  Description of Artificial Sequence: Synthetic oligonucleotide
gaagucucugugcucccug

SEQ ID NO: 2010718 - RNA, 19 nt, Artificial Sequence
  Description of Artificial Sequence: Synthetic oligonucleotide
auaccucagucuuagccaa

SEQ ID NO: 2010719 - RNA, 19 nt, Artificial Sequence
  Description of Artificial Sequence: Synthetic oligonucleotide
gguuaccaagaucuuuagg

SEQ ID NO: 2010720 - RNA, 19 nt, Artificial Sequence
  Description of Artificial Sequence: Synthetic oligonucleotide
ucaaccccucaagugauga

SEQ ID NO: 2010721 - RNA, 19 nt, Artificial Sequence
  Description of Artificial Sequence: Synthetic oligonucleotide
ucauggucucccguuacug

SEQ ID NO: 2010722 - RNA, 19 nt, Artificial Sequence
  Description of Artificial Sequence: Synthetic oligonucleotide
uguccauugcuuucuugaa

SEQ ID NO: 2010723 - RNA, 19 nt, Artificial Sequence
  Description of Artificial Sequence: Synthetic oligonucleotide
ugaaccaccuuauccucau

SEQ ID NO: 2010724 - RNA, 19 nt, Artificial Sequence
  Description of Artificial Sequence: Synthetic oligonucleotide
aacuuccauuccaccaccg

SEQ ID NO: 2010725 - RNA, 19 nt, Artificial Sequence
  Description of Artificial Sequence: Synthetic oligonucleotide
ugauuccuugacacuucug

SEQ ID NO: 2010726 - RNA, 19 nt, Artificial Sequence
  Description of Artificial Sequence: Synthetic oligonucleotide
gccaacuaccccucaaggg

SEQ ID NO: 2010727 - RNA, 19 nt, Artificial Sequence
  Description of Artificial Sequence: Synthetic oligonucleotide
uguugaccugcugaggccu

SEQ ID NO: 2010728 - RNA, 19 nt, Artificial Sequence
  Description of Artificial Sequence: Synthetic oligonucleotide
gcuaggaugcuuugcacug

SEQ ID NO: 2010729 - RNA, 19 nt, Artificial Sequence
  Description of Artificial Sequence: Synthetic oligonucleotide
ucucauggucucccguuac

SEQ ID NO: 2010730 - RNA, 19 nt, Artificial Sequence
  Description of Artificial Sequence: Synthetic oligonucleotide
ugacugaccgauugugcaa

SEQ ID NO: 2010731 - RNA, 19 nt, Artificial Sequence
  Description of Artificial Sequence: Synthetic oligonucleotide
guccauaccucagucuuag

SEQ ID NO: 2010732 - RNA, 19 nt, Artificial Sequence
  Description of Artificial Sequence: Synthetic oligonucleotide
cauugcuuucuugaagcug

SEQ ID NO: 2010733 - RNA, 19 nt, Artificial Sequence
  Description of Artificial Sequence: Synthetic oligonucleotide
cucagucuuagccaagcca

SEQ ID NO: 2010734 - RNA, 19 nt, Artificial Sequence
  Description of Artificial Sequence: Synthetic oligonucleotide
gaagacagaaugagaccac

SEQ ID NO: 2010735 - RNA, 19 nt, Artificial Sequence
  Description of Artificial Sequence: Synthetic oligonucleotide
ugaggccucaagacugcca

SEQ ID NO: 2010736 - RNA, 19 nt, Artificial Sequence
  Description of Artificial Sequence: Synthetic oligonucleotide
ccaacacaaacuuccauuc

SEQ ID NO: 2010737 - RNA, 19 nt, Artificial Sequence
  Description of Artificial Sequence: Synthetic oligonucleotide
guauuuaaugagacuuaac

SEQ ID NO: 2010738 - RNA, 19 nt, Artificial Sequence
  Description of Artificial Sequence: Synthetic oligonucleotide
agccuuagccucuuccaca

SEQ ID NO: 2010739 - RNA, 19 nt, Artificial Sequence
  Description of Artificial Sequence: Synthetic oligonucleotide
auucucauggucucccguu

SEQ ID NO: 2010740 - RNA, 19 nt, Artificial Sequence
  Description of Artificial Sequence: Synthetic oligonucleotide
cagucagugcaauaaggga

SEQ ID NO: 2010741 - RNA, 19 nt, Artificial Sequence
  Description of Artificial Sequence: Synthetic oligonucleotide
gaugcuuugcacugugagu

SEQ ID NO: 2010742 - RNA, 19 nt, Artificial Sequence
  Description of Artificial Sequence: Synthetic oligonucleotide
gaaagaacucugauggcua

SEQ ID NO: 2010743 - RNA, 19 nt, Artificial Sequence
  Description of Artificial Sequence: Synthetic oligonucleotide
acugaccgauugugcaagg

SEQ ID NO: 2010744 - RNA, 19 nt, Artificial Sequence
  Description of Artificial Sequence: Synthetic oligonucleotide
ugugcucccugcagguuac

SEQ ID NO: 2010745 - RNA, 19 nt, Artificial Sequence
  Description of Artificial Sequence: Synthetic oligonucleotide
cacugugagucagugaauc

SEQ ID NO: 2010746 - RNA, 19 nt, Artificial Sequence
  Description of Artificial Sequence: Synthetic oligonucleotide
gugcaauaagggaaaaguc

SEQ ID NO: 2010747 - RNA, 19 nt, Artificial Sequence
  Description of Artificial Sequence: Synthetic oligonucleotide
uggcauugcuccagucugc

SEQ ID NO: 2010748 - RNA, 19 nt, Artificial Sequence
  Description of Artificial Sequence: Synthetic oligonucleotide
uaguggagugggauguauc

SEQ ID NO: 2010749 - RNA, 19 nt, Artificial Sequence
  Description of Artificial Sequence: Synthetic oligonucleotide
uagacaccacuucccaguc

SEQ ID NO: 2010750 - RNA, 19 nt, Artificial Sequence
  Description of Artificial Sequence: Synthetic oligonucleotide
ccuacauuuuggacaaaag

SEQ ID NO: 2010751 - RNA, 19 nt, Artificial Sequence
  Description of Artificial Sequence: Synthetic oligonucleotide
caauaagggaaaaguccca

SEQ ID NO: 2010752 - RNA, 19 nt, Artificial Sequence
  Description of Artificial Sequence: Synthetic oligonucleotide
gcaaugaacugccuugaac

SEQ ID NO: 2010753 - RNA, 19 nt, Artificial Sequence
  Description of Artificial Sequence: Synthetic oligonucleotide
accgauugugcaaggcugg

SEQ ID NO: 2010754 - RNA, 19 nt, Artificial Sequence
  Description of Artificial Sequence: Synthetic oligonucleotide
acuuccauuccaccaccgu

SEQ ID NO: 2010755 - RNA, 19 nt, Artificial Sequence
  Description of Artificial Sequence: Synthetic oligonucleotide
auuaugcagugugcucuac

SEQ ID NO: 2010756 - RNA, 19 nt, Artificial Sequence
  Description of Artificial Sequence: Synthetic oligonucleotide
cucgcuaggaugcuuugca

SEQ ID NO: 2010757 - RNA, 19 nt, Artificial Sequence
  Description of Artificial Sequence: Synthetic oligonucleotide
aagaacucugauggcuaca

SEQ ID NO: 2010758 - RNA, 19 nt, Artificial Sequence
  Description of Artificial Sequence: Synthetic oligonucleotide
ucauggccagucugcagga

SEQ ID NO: 2010759 - RNA, 19 nt, Artificial Sequence
  Description of Artificial Sequence: Synthetic oligonucleotide
uggagugcguguccagacu

SEQ ID NO: 2010760 - RNA, 19 nt, Artificial Sequence
  Description of Artificial Sequence: Synthetic oligonucleotide
gguccugacugaccgauug

SEQ ID NO: 2010761 - RNA, 19 nt, Artificial Sequence
  Description of Artificial Sequence: Synthetic oligonucleotide
caagggaccaucaaccccu

SEQ ID NO: 2010762 - RNA, 19 nt, Artificial Sequence
  Description of Artificial Sequence: Synthetic oligonucleotide
agcccauccuuacaauagu

SEQ ID NO: 2010763 - RNA, 19 nt, Artificial Sequence
  Description of Artificial Sequence: Synthetic oligonucleotide
cuugcccauaguccauacc

SEQ ID NO: 2010764 - RNA, 19 nt, Artificial Sequence
  Description of Artificial Sequence: Synthetic oligonucleotide
aggccucaagacugccacc

SEQ ID NO: 2010765 - RNA, 19 nt, Artificial Sequence
  Description of Artificial Sequence: Synthetic oligonucleotide
uucucauggucucccguua

SEQ ID NO: 2010766 - RNA, 19 nt, Artificial Sequence
  Description of Artificial Sequence: Synthetic oligonucleotide
cuuauccucauggccaguc

SEQ ID NO: 2010767 - RNA, 19 nt, Artificial Sequence
  Description of Artificial Sequence: Synthetic oligonucleotide
ugcuuugcacugugaguca

SEQ ID NO: 2010768 - RNA, 19 nt, Artificial Sequence
  Description of Artificial Sequence: Synthetic oligonucleotide
aaauggguucacacugccu

SEQ ID NO: 2010769 - RNA, 19 nt, Artificial Sequence
  Description of Artificial Sequence: Synthetic oligonucleotide
ugcaaugaacugccuugaa

SEQ ID NO: 2010770 - RNA, 19 nt, Artificial Sequence
  Description of Artificial Sequence: Synthetic oligonucleotide
agaacucugauggcuacaa

SEQ ID NO: 2010771 - RNA, 19 nt, Artificial Sequence
  Description of Artificial Sequence: Synthetic oligonucleotide
agucuuagccaagccaacu

SEQ ID NO: 2010772 - RNA, 19 nt, Artificial Sequence
  Description of Artificial Sequence: Synthetic oligonucleotide
ggaccaucaaccccucaag

SEQ ID NO: 2010773 - RNA, 19 nt, Artificial Sequence
  Description of Artificial Sequence: Synthetic oligonucleotide
cuggagugcguguccagac

SEQ ID NO: 2010774 - RNA, 19 nt, Artificial Sequence
  Description of Artificial Sequence: Synthetic oligonucleotide
cuagacaccacuucccagu

SEQ ID NO: 2010775 - RNA, 19 nt, Artificial Sequence
  Description of Artificial Sequence: Synthetic oligonucleotide
acccaugaaccaccuuauc

SEQ ID NO: 2010776 - RNA, 19 nt, Artificial Sequence
  Description of Artificial Sequence: Synthetic oligonucleotide
ccucaagugaugauguguc

SEQ ID NO: 2010777 - RNA, 19 nt, Artificial Sequence
  Description of Artificial Sequence: Synthetic oligonucleotide
ugccacccaaaccaacauc

SEQ ID NO: 2010778 - RNA, 19 nt, Artificial Sequence
  Description of Artificial Sequence: Synthetic oligonucleotide
acugccacccaaaccaaca

SEQ ID NO: 2010779 - RNA, 19 nt, Artificial Sequence
  Description of Artificial Sequence: Synthetic oligonucleotide
cagcacaaaccagucagug

SEQ ID NO: 2010780 - RNA, 19 nt, Artificial Sequence
  Description of Artificial Sequence: Synthetic oligonucleotide
cucccuugcccauagucca

SEQ ID NO: 2010781 - RNA, 19 nt, Artificial Sequence
  Description of Artificial Sequence: Synthetic oligonucleotide
uugacacuucuggauuggc

SEQ ID NO: 2010782 - RNA, 19 nt, Artificial Sequence
  Description of Artificial Sequence: Synthetic oligonucleotide
acacaaucucuggcauugc

SEQ ID NO: 2010783 - RNA, 19 nt, Artificial Sequence
  Description of Artificial Sequence: Synthetic oligonucleotide
ccuauucuaagagcuacag

SEQ ID NO: 2010784 - RNA, 19 nt, Artificial Sequence
  Description of Artificial Sequence: Synthetic oligonucleotide
gcucagaggaagcaucaug

SEQ ID NO: 2010785 - RNA, 19 nt, Artificial Sequence
  Description of Artificial Sequence: Synthetic oligonucleotide
gagacuuaacugccaucuc

SEQ ID NO: 2010786 - RNA, 19 nt, Artificial Sequence
  Description of Artificial Sequence: Synthetic oligonucleotide
ucucgcuaggaugcuuugc

SEQ ID NO: 2010787 - RNA, 19 nt, Artificial Sequence
  Description of Artificial Sequence: Synthetic oligonucleotide
cucuuuccaacaggaacac

SEQ ID NO: 2010788 - RNA, 19 nt, Artificial Sequence
  Description of Artificial Sequence: Synthetic oligonucleotide
ucgcuaggaugcuuugcac

SEQ ID NO: 2010789 - RNA, 19 nt, Artificial Sequence
  Description of Artificial Sequence: Synthetic oligonucleotide
ccuuacaauaguggagugg

SEQ ID NO: 2010790 - RNA, 19 nt, Artificial Sequence
  Description of Artificial Sequence: Synthetic oligonucleotide
uaacuucccuguucucaac

SEQ ID NO: 2010791 - RNA, 19 nt, Artificial Sequence
  Description of Artificial Sequence: Synthetic oligonucleotide
ccaacuaccccucaaggga

SEQ ID NO: 2010792 - RNA, 19 nt, Artificial Sequence
  Description of Artificial Sequence: Synthetic oligonucleotide
cuauaugaacuugugggcu

SEQ ID NO: 2010793 - RNA, 19 nt, Artificial Sequence
  Description of Artificial Sequence: Synthetic oligonucleotide
gaugaugugucagcacaaa

SEQ ID NO: 2010794 - RNA, 19 nt, Artificial Sequence
  Description of Artificial Sequence: Synthetic oligonucleotide
cagccuuagccucuuccac

SEQ ID NO: 2010795 - RNA, 19 nt, Artificial Sequence
  Description of Artificial Sequence: Synthetic oligonucleotide
ggcucagaaaucaaauguc

SEQ ID NO: 2010796 - RNA, 19 nt, Artificial Sequence
  Description of Artificial Sequence: Synthetic oligonucleotide
gucagugcaauaagggaaa

SEQ ID NO: 2010797 - RNA, 19 nt, Artificial Sequence
  Description of Artificial Sequence: Synthetic oligonucleotide
caccguguccgcaggcagg

SEQ ID NO: 2010798 - RNA, 19 nt, Artificial Sequence
  Description of Artificial Sequence: Synthetic oligonucleotide
cagucuuagccaagccaac

SEQ ID NO: 2010799 - RNA, 19 nt, Artificial Sequence
  Description of Artificial Sequence: Synthetic oligonucleotide
uuacugcaaugaacugccu

SEQ ID NO: 2010800 - RNA, 19 nt, Artificial Sequence
  Description of Artificial Sequence: Synthetic oligonucleotide
cucaagugaugauguguca

SEQ ID NO: 2010801 - RNA, 19 nt, Artificial Sequence
  Description of Artificial Sequence: Synthetic oligonucleotide
ccagcgaguaacuucccug

SEQ ID NO: 2010802 - RNA, 19 nt, Artificial Sequence
  Description of Artificial Sequence: Synthetic oligonucleotide
uggucucccguuacugcaa

SEQ ID NO: 2010803 - RNA, 19 nt, Artificial Sequence
  Description of Artificial Sequence: Synthetic oligonucleotide
ccauccuuacaauagugga

SEQ ID NO: 2010804 - RNA, 19 nt, Artificial Sequence
  Description of Artificial Sequence: Synthetic oligonucleotide
augagugccuagacaccac

SEQ ID NO: 2010805 - RNA, 19 nt, Artificial Sequence
  Description of Artificial Sequence: Synthetic oligonucleotide
cugaccgauugugcaaggc

SEQ ID NO: 2010806 - RNA, 19 nt, Artificial Sequence
  Description of Artificial Sequence: Synthetic oligonucleotide
aauaguggagugggaugua

SEQ ID NO: 2010807 - RNA, 19 nt, Artificial Sequence
  Description of Artificial Sequence: Synthetic oligonucleotide
uugugcaguugguuaguuu

SEQ ID NO: 2010808 - RNA, 19 nt, Artificial Sequence
  Description of Artificial Sequence: Synthetic oligonucleotide
cuuaacugccaucucccua

SEQ ID NO: 2010809 - RNA, 19 nt, Artificial Sequence
  Description of Artificial Sequence: Synthetic oligonucleotide
ccaucaaccccucaaguga

SEQ ID NO: 2010810 - RNA, 19 nt, Artificial Sequence
  Description of Artificial Sequence: Synthetic oligonucleotide
gucuuagccaagccaacua

SEQ ID NO: 2010811 - RNA, 19 nt, Artificial Sequence
  Description of Artificial Sequence: Synthetic oligonucleotide
ucuuuccaacaggaacaca

SEQ ID NO: 2010812 - RNA, 19 nt, Artificial Sequence
  Description of Artificial Sequence: Synthetic oligonucleotide
accccucaagugaugaugu

SEQ ID NO: 2010813 - RNA, 19 nt, Artificial Sequence
  Description of Artificial Sequence: Synthetic oligonucleotide
auaguggagugggauguau

SEQ ID NO: 2010814 - RNA, 19 nt, Artificial Sequence
  Description of Artificial Sequence: Synthetic oligonucleotide
cucaagacugccacccaaa

SEQ ID NO: 2010815 - RNA, 19 nt, Artificial Sequence
  Description of Artificial Sequence: Synthetic oligonucleotide
ccuguucucaaccaacaca

SEQ ID NO: 2010816 - RNA, 19 nt, Artificial Sequence
  Description of Artificial Sequence: Synthetic oligonucleotide
cuccauucuccuauaugaa

SEQ ID NO: 2010817 - RNA, 19 nt, Artificial Sequence
  Description of Artificial Sequence: Synthetic oligonucleotide
uccauaccucagucuuagc

SEQ ID NO: 2010818 - RNA, 19 nt, Artificial Sequence
  Description of Artificial Sequence: Synthetic oligonucleotide
gugugcucuacagccuuag

SEQ ID NO: 2010819 - RNA, 19 nt, Artificial Sequence
  Description of Artificial Sequence: Synthetic oligonucleotide
ggccucaagacugccaccc

SEQ ID NO: 2010820 - RNA, 19 nt, Artificial Sequence
  Description of Artificial Sequence: Synthetic oligonucleotide
ggagugcguguccagacuc

SEQ ID NO: 2010821 - RNA, 19 nt, Artificial Sequence
  Description of Artificial Sequence: Synthetic oligonucleotide
cuuugauuccuugacacuu

SEQ ID NO: 2010822 - RNA, 19 nt, Artificial Sequence
  Description of Artificial Sequence: Synthetic oligonucleotide
caauaguggagugggaugu

SEQ ID NO: 2010823 - RNA, 19 nt, Artificial Sequence
  Description of Artificial Sequence: Synthetic oligonucleotide
gaaccaccuuauccucaug

SEQ ID NO: 2010824 - RNA, 19 nt, Artificial Sequence
  Description of Artificial Sequence: Synthetic oligonucleotide
ccaagaugagugccuagac

SEQ ID NO: 2010825 - RNA, 19 nt, Artificial Sequence
  Description of Artificial Sequence: Synthetic oligonucleotide
cucucgcuaggaugcuuug

SEQ ID NO: 2010826 - RNA, 19 nt, Artificial Sequence
  Description of Artificial Sequence: Synthetic oligonucleotide
caaauguccauugcuuucu

SEQ ID NO: 2010827 - RNA, 19 nt, Artificial Sequence
  Description of Artificial Sequence: Synthetic oligonucleotide
auggguucacacugccuuu

SEQ ID NO: 2010828 - RNA, 19 nt, Artificial Sequence
  Description of Artificial Sequence: Synthetic oligonucleotide
ugcuuucuugaagcuguuc

SEQ ID NO: 2010829 - RNA, 19 nt, Artificial Sequence
  Description of Artificial Sequence: Synthetic oligonucleotide
guucugauuuggagaccag

SEQ ID NO: 2010830 - RNA, 19 nt, Artificial Sequence
  Description of Artificial Sequence: Synthetic oligonucleotide
uaccccucaagggaccauc

SEQ ID NO: 2010831 - RNA, 19 nt, Artificial Sequence
  Description of Artificial Sequence: Synthetic oligonucleotide
cccguuacugcaaugaacu

SEQ ID NO: 2010832 - RNA, 19 nt, Artificial Sequence
  Description of Artificial Sequence: Synthetic oligonucleotide
cauucugacucagccucuc

SEQ ID NO: 2010833 - RNA, 19 nt, Artificial Sequence
  Description of Artificial Sequence: Synthetic oligonucleotide
cccucaagggaccaucaac

SEQ ID NO: 2010834 - RNA, 19 nt, Artificial Sequence
  Description of Artificial Sequence: Synthetic oligonucleotide
ccuagacaccacuucccag

SEQ ID NO: 2010835 - RNA, 19 nt, Artificial Sequence
  Description of Artificial Sequence: Synthetic oligonucleotide
cccauaguccauaccucag

SEQ ID NO: 2010836 - RNA, 19 nt, Artificial Sequence
  Description of Artificial Sequence: Synthetic oligonucleotide
gggcaugcauaaaucuucc

SEQ ID NO: 2010837 - RNA, 19 nt, Artificial Sequence
  Description of Artificial Sequence: Synthetic oligonucleotide
gcgaguaacuucccuguuc

SEQ ID NO: 2010838 - RNA, 19 nt, Artificial Sequence
  Description of Artificial Sequence: Synthetic oligonucleotide
gaacucugauggcuacaaa

SEQ ID NO: 2010839 - RNA, 19 nt, Artificial Sequence
  Description of Artificial Sequence: Synthetic oligonucleotide
guugguuaguuucucccuu

SEQ ID NO: 2010840 - RNA, 19 nt, Artificial Sequence
  Description of Artificial Sequence: Synthetic oligonucleotide
uggguucacacugccuuua

SEQ ID NO: 2010841 - RNA, 19 nt, Artificial Sequence
  Description of Artificial Sequence: Synthetic oligonucleotide
caaaccagucagugcaaua

SEQ ID NO: 2010842 - RNA, 19 nt, Artificial Sequence
  Description of Artificial Sequence: Synthetic oligonucleotide
ucccagcgaguaacuuccc

SEQ ID NO: 2010843 - RNA, 19 nt, Artificial Sequence
  Description of Artificial Sequence: Synthetic oligonucleotide
ugggauguaucugguccau

SEQ ID NO: 2010844 - RNA, 19 nt, Artificial Sequence
  Description of Artificial Sequence: Synthetic oligonucleotide
gcuccagucugcuccagca

SEQ ID NO: 2010845 - RNA, 19 nt, Artificial Sequence
  Description of Artificial Sequence: Synthetic oligonucleotide
gacugccacccaaaccaac

SEQ ID NO: 2010846 - RNA, 19 nt, Artificial Sequence
  Description of Artificial Sequence: Synthetic oligonucleotide
cauucuucccagcgaguaa

SEQ ID NO: 2010847 - RNA, 19 nt, Artificial Sequence
  Description of Artificial Sequence: Synthetic oligonucleotide
uuucucccuugcccauagu

SEQ ID NO: 2010848 - RNA, 19 nt, Artificial Sequence
  Description of Artificial Sequence: Synthetic oligonucleotide
gcucuacagccuuagccuc

SEQ ID NO: 2010849 - RNA, 19 nt, Artificial Sequence
  Description of Artificial Sequence: Synthetic oligonucleotide
agcgaguaacuucccuguu

SEQ ID NO: 2010850 - RNA, 19 nt, Artificial Sequence
  Description of Artificial Sequence: Synthetic oligonucleotide
uacagggcucuaccuugua

SEQ ID NO: 2010851 - RNA, 19 nt, Artificial Sequence
  Description of Artificial Sequence: Synthetic oligonucleotide
cuaagagcuacagggcucu

SEQ ID NO: 2010852 - RNA, 19 nt, Artificial Sequence
  Description of Artificial Sequence: Synthetic oligonucleotide
cuucccuguucucaaccaa

SEQ ID NO: 2010853 - RNA, 19 nt, Artificial Sequence
  Description of Artificial Sequence: Synthetic oligonucleotide
accguguccgcaggcagga

SEQ ID NO: 2010854 - RNA, 19 nt, Artificial Sequence
  Description of Artificial Sequence: Synthetic oligonucleotide
uguccgcaggcaggaagac

SEQ ID NO: 2010855 - RNA, 19 nt, Artificial Sequence
  Description of Artificial Sequence: Synthetic oligonucleotide
cagcgaguaacuucccugu

SEQ ID NO: 2010856 - RNA, 19 nt, Artificial Sequence
  Description of Artificial Sequence: Synthetic oligonucleotide
ccacccaaaccaacauccc

SEQ ID NO: 2010857 - RNA, 19 nt, Artificial Sequence
  Description of Artificial Sequence: Synthetic oligonucleotide
cacaaaccagucagugcaa

SEQ ID NO: 2010858 - RNA, 19 nt, Artificial Sequence
  Description of Artificial Sequence: Synthetic oligonucleotide
gggaaaagucccagcucag

SEQ ID NO: 2010859 - RNA, 19 nt, Artificial Sequence
  Description of Artificial Sequence: Synthetic oligonucleotide
aucaaccccucaagugaug

SEQ ID NO: 2010860 - RNA, 19 nt, Artificial Sequence
  Description of Artificial Sequence: Synthetic oligonucleotide
ccacccaugaaccaccuua

SEQ ID NO: 2010861 - RNA, 19 nt, Artificial Sequence
  Description of Artificial Sequence: Synthetic oligonucleotide
gccuagacaccacuuccca

SEQ ID NO: 2010862 - RNA, 19 nt, Artificial Sequence
  Description of Artificial Sequence: Synthetic oligonucleotide
ccugaguaggcugcuggag

SEQ ID NO: 2010863 - RNA, 19 nt, Artificial Sequence
  Description of Artificial Sequence: Synthetic oligonucleotide
caucaaccccucaagugau

SEQ ID NO: 2010864 - RNA, 19 nt, Artificial Sequence
  Description of Artificial Sequence: Synthetic oligonucleotide
gcccauccuuacaauagug

SEQ ID NO: 2010865 - RNA, 19 nt, Artificial Sequence
  Description of Artificial Sequence: Synthetic oligonucleotide
ccucagucuuagccaagcc

SEQ ID NO: 2010866 - RNA, 19 nt, Artificial Sequence
  Description of Artificial Sequence: Synthetic oligonucleotide
gcguguccagacucuuucc

SEQ ID NO: 2010867 - RNA, 19 nt, Artificial Sequence
  Description of Artificial Sequence: Synthetic oligonucleotide
cucccguuacugcaaugaa

SEQ ID NO: 2010868 - RNA, 19 nt, Artificial Sequence
  Description of Artificial Sequence: Synthetic oligonucleotide
caccaccguguccgcaggc

SEQ ID NO: 2010869 - RNA, 19 nt, Artificial Sequence
  Description of Artificial Sequence: Synthetic oligonucleotide
aguccauaccucagucuua

SEQ ID NO: 2010870 - RNA, 19 nt, Artificial Sequence
  Description of Artificial Sequence: Synthetic oligonucleotide
cucuacagccuuagccucu

SEQ ID NO: 2010871 - RNA, 19 nt, Artificial Sequence
  Description of Artificial Sequence: Synthetic oligonucleotide
gcuuugauuccuugacacu

SEQ ID NO: 2010872 - RNA, 19 nt, Artificial Sequence
  Description of Artificial Sequence: Synthetic oligonucleotide
agggaccaucaaccccuca

SEQ ID NO: 2010873 - RNA, 19 nt, Artificial Sequence
  Description of Artificial Sequence: Synthetic oligonucleotide
cguguccgcaggcaggaag

SEQ ID NO: 2010874 - RNA, 19 nt, Artificial Sequence
  Description of Artificial Sequence: Synthetic oligonucleotide
ccccaagauucucaugguc

SEQ ID NO: 2010875 - RNA, 19 nt, Artificial Sequence
  Description of Artificial Sequence: Synthetic oligonucleotide
ccguuacugcaaugaacug

SEQ ID NO: 2010876 - RNA, 19 nt, Artificial Sequence
  Description of Artificial Sequence: Synthetic oligonucleotide
cuuugcacugugagucagu

SEQ ID NO: 2010877 - RNA, 19 nt, Artificial Sequence
  Description of Artificial Sequence: Synthetic oligonucleotide
gcauucuucccagcgagua

SEQ ID NO: 2010878 - RNA, 19 nt, Artificial Sequence
  Description of Artificial Sequence: Synthetic oligonucleotide
cacccaugaaccaccuuau

SEQ ID NO: 2010879 - RNA, 19 nt, Artificial Sequence
  Description of Artificial Sequence: Synthetic oligonucleotide
ccuugcccauaguccauac

SEQ ID NO: 2010880 - RNA, 19 nt, Artificial Sequence
  Description of Artificial Sequence: Synthetic oligonucleotide
uggcuacaaauggguucac

SEQ ID NO: 2010881 - RNA, 19 nt, Artificial Sequence
  Description of Artificial Sequence: Synthetic oligonucleotide
agacugccacccaaaccaa

SEQ ID NO: 2010882 - RNA, 19 nt, Artificial Sequence
  Description of Artificial Sequence: Synthetic oligonucleotide
gcuuuagcucugucccuga

SEQ ID NO: 2010883 - RNA, 19 nt, Artificial Sequence
  Description of Artificial Sequence: Synthetic oligonucleotide
cuacagggcucuaccuugu

SEQ ID NO: 2010884 - RNA, 19 nt, Artificial Sequence
  Description of Artificial Sequence: Synthetic oligonucleotide
cccuauucuaagagcuaca

SEQ ID NO: 2010885 - RNA, 19 nt, Artificial Sequence
  Description of Artificial Sequence: Synthetic oligonucleotide
cccaagaugagugccuaga

SEQ ID NO: 2010886 - RNA, 19 nt, Artificial Sequence
  Description of Artificial Sequence: Synthetic oligonucleotide
ggcuacaaauggguucaca

SEQ ID NO: 2010887 - RNA, 19 nt, Artificial Sequence
  Description of Artificial Sequence: Synthetic oligonucleotide
gccagucugcaggagucug

SEQ ID NO: 2010888 - RNA, 19 nt, Artificial Sequence
  Description of Artificial Sequence: Synthetic oligonucleotide
gcucccugcagguuaccaa

SEQ ID NO: 2010889 - RNA, 19 nt, Artificial Sequence
  Description of Artificial Sequence: Synthetic oligonucleotide
guccugacugaccgauugu

SEQ ID NO: 2010890 - RNA, 19 nt, Artificial Sequence
  Description of Artificial Sequence: Synthetic oligonucleotide
cuacagccuuagccucuuc

SEQ ID NO: 2010891 - RNA, 19 nt, Artificial Sequence
  Description of Artificial Sequence: Synthetic oligonucleotide
guccgcaggcaggaagaca

SEQ ID NO: 2010892 - RNA, 19 nt, Artificial Sequence
  Description of Artificial Sequence: Synthetic oligonucleotide
caagaucuuuaggcucaga

SEQ ID NO: 2010893 - RNA, 19 nt, Artificial Sequence
  Description of Artificial Sequence: Synthetic oligonucleotide
cgaguaacuucccuguucu

SEQ ID NO: 2010894 - RNA, 19 nt, Artificial Sequence
  Description of Artificial Sequence: Synthetic oligonucleotide
cugcuuuagcucugucccu

SEQ ID NO: 2010895 - RNA, 19 nt, Artificial Sequence
  Description of Artificial Sequence: Synthetic oligonucleotide
ggacagcuucucugccaug

SEQ ID NO: 2010896 - RNA, 19 nt, Artificial Sequence
  Description of Artificial Sequence: Synthetic oligonucleotide
ccaagaucuuuaggcucag

SEQ ID NO: 2010897 - RNA, 19 nt, Artificial Sequence
  Description of Artificial Sequence: Synthetic oligonucleotide
ccgauugugcaaggcuggc

SEQ ID NO: 2010898 - RNA, 19 nt, Artificial Sequence
  Description of Artificial Sequence: Synthetic oligonucleotide
ccucaagacugccacccaa

SEQ ID NO: 2010899 - RNA, 19 nt, Artificial Sequence
  Description of Artificial Sequence: Synthetic oligonucleotide
gagugccuagacaccacuu

SEQ ID NO: 2010900 - RNA, 19 nt, Artificial Sequence
  Description of Artificial Sequence: Synthetic oligonucleotide
caguccucguggccugcca

SEQ ID NO: 2010901 - RNA, 19 nt, Artificial Sequence
  Description of Artificial Sequence: Synthetic oligonucleotide
ccccucaagugaugaugug

SEQ ID NO: 2010902 - RNA, 19 nt, Artificial Sequence
  Description of Artificial Sequence: Synthetic oligonucleotide
agccucucgcuaggaugcu

SEQ ID NO: 2010903 - RNA, 19 nt, Artificial Sequence
  Description of Artificial Sequence: Synthetic oligonucleotide
ccacacuaacaacucugaa

SEQ ID NO: 2010904 - RNA, 19 nt, Artificial Sequence
  Description of Artificial Sequence: Synthetic oligonucleotide
ccacauucugacucagccu

SEQ ID NO: 2010905 - RNA, 19 nt, Artificial Sequence
  Description of Artificial Sequence: Synthetic oligonucleotide
gggacuccauucuccuaua

SEQ ID NO: 2010906 - RNA, 19 nt, Artificial Sequence
  Description of Artificial Sequence: Synthetic oligonucleotide
cccugaguaggcugcugga

SEQ ID NO: 2010907 - RNA, 19 nt, Artificial Sequence
  Description of Artificial Sequence: Synthetic oligonucleotide
gugcaaggcuggcugcuuu

SEQ ID NO: 2010908 - RNA, 19 nt, Artificial Sequence
  Description of Artificial Sequence: Synthetic oligonucleotide
cucagccucucgcuaggau

SEQ ID NO: 2010909 - RNA, 19 nt, Artificial Sequence
  Description of Artificial Sequence: Synthetic oligonucleotide
cccucaagugaugaugugu

SEQ ID NO: 2010910 - RNA, 19 nt, Artificial Sequence
  Description of Artificial Sequence: Synthetic oligonucleotide
cuugugcaguugguuaguu

SEQ ID NO: 2010911 - RNA, 19 nt, Artificial Sequence
  Description of Artificial Sequence: Synthetic oligonucleotide
agguccugacugaccgauu

SEQ ID NO: 2010912 - RNA, 19 nt, Artificial Sequence
  Description of Artificial Sequence: Synthetic oligonucleotide
ccaguccucguggccugcc

SEQ ID NO: 2010913 - RNA, 19 nt, Artificial Sequence
  Description of Artificial Sequence: Synthetic oligonucleotide
ggucucccguuacugcaau

SEQ ID NO: 2010914 - RNA, 19 nt, Artificial Sequence
  Description of Artificial Sequence: Synthetic oligonucleotide
gauuggcccuggagugcgu

SEQ ID NO: 2010915 - RNA, 19 nt, Artificial Sequence
  Description of Artificial Sequence: Synthetic oligonucleotide
ccaagccaacuaccccuca

SEQ ID NO: 2010916 - RNA, 19 nt, Artificial Sequence
  Description of Artificial Sequence: Synthetic oligonucleotide
cccagcgaguaacuucccu

SEQ ID NO: 2010917 - RNA, 19 nt, Artificial Sequence
  Description of Artificial Sequence: Synthetic oligonucleotide
gugcguguccagacucuuu

SEQ ID NO: 2010918 - RNA, 19 nt, Artificial Sequence
  Description of Artificial Sequence: Synthetic oligonucleotide
gcacugugagucagugaau

SEQ ID NO: 2010919 - RNA, 19 nt, Artificial Sequence
  Description of Artificial Sequence: Synthetic oligonucleotide
cuaccccucaagggaccau

SEQ ID NO: 2010920 - RNA, 19 nt, Artificial Sequence
  Description of Artificial Sequence: Synthetic oligonucleotide
gccaugcucccagcuguuu

SEQ ID NO: 2010921 - RNA, 19 nt, Artificial Sequence
  Description of Artificial Sequence: Synthetic oligonucleotide
ccuuauccucauggccagu

SEQ ID NO: 2010922 - RNA, 19 nt, Artificial Sequence
  Description of Artificial Sequence: Synthetic oligonucleotide
gccucucgcuaggaugcuu

SEQ ID NO: 2010923 - RNA, 19 nt, Artificial Sequence
  Description of Artificial Sequence: Synthetic oligonucleotide
ccuuagccucuuccacauu

SEQ ID NO: 2010924 - RNA, 19 nt, Artificial Sequence
  Description of Artificial Sequence: Synthetic oligonucleotide
ccguguccgcaggcaggaa

SEQ ID NO: 2010925 - RNA, 19 nt, Artificial Sequence
  Description of Artificial Sequence: Synthetic oligonucleotide
aaguuauugacaauaaugg

SEQ ID NO: 2010926 - RNA, 19 nt, Artificial Sequence
  Description of Artificial Sequence: Synthetic oligonucleotide
uuucuaaaggacuugcucg

SEQ ID NO: 2010927 - RNA, 19 nt, Artificial Sequence
  Description of Artificial Sequence: Synthetic oligonucleotide
uguacuuuauccuucuugg

SEQ ID NO: 2010928 - RNA, 19 nt, Artificial Sequence
  Description of Artificial Sequence: Synthetic oligonucleotide
aaugggaagagcgaucacc

SEQ ID NO: 2010929 - RNA, 19 nt, Artificial Sequence
  Description of Artificial Sequence: Synthetic oligonucleotide
uuauugacaauaaugggaa

SEQ ID NO: 2010930 - RNA, 19 nt, Artificial Sequence
  Description of Artificial Sequence: Synthetic oligonucleotide
agagcuuucaaaaugguuc

SEQ ID NO: 2010931 - RNA, 19 nt, Artificial Sequence
  Description of Artificial Sequence: Synthetic oligonucleotide
cuuguugggagacaggugg

SEQ ID NO: 2010932 - RNA, 19 nt, Artificial Sequence
  Description of Artificial Sequence: Synthetic oligonucleotide
aguuauugacaauaauggg

SEQ ID NO: 2010933 - RNA, 19 nt, Artificial Sequence
  Description of Artificial Sequence: Synthetic oligonucleotide
aagaacuuaggggaggugg

SEQ ID NO: 2010934 - RNA, 19 nt, Artificial Sequence
  Description of Artificial Sequence: Synthetic oligonucleotide
uacuuuauccuucuuggcc

SEQ ID NO: 2010935 - RNA, 19 nt, Artificial Sequence
  Description of Artificial Sequence: Synthetic oligonucleotide
agagcgaucaccaggaccc

SEQ ID NO: 2010936 - RNA, 19 nt, Artificial Sequence
  Description of Artificial Sequence: Synthetic oligonucleotide
aaaguugaaugcuauugcu

SEQ ID NO: 2010937 - RNA, 19 nt, Artificial Sequence
  Description of Artificial Sequence: Synthetic oligonucleotide
uucucaacuacaaugucca

SEQ ID NO: 2010938 - RNA, 19 nt, Artificial Sequence
  Description of Artificial Sequence: Synthetic oligonucleotide
uacaauguccaucaucuca

SEQ ID NO: 2010939 - RNA, 19 nt, Artificial Sequence
  Description of Artificial Sequence: Synthetic oligonucleotide
uccauuuccacuuguuggg

SEQ ID NO: 2010940 - RNA, 19 nt, Artificial Sequence
  Description of Artificial Sequence: Synthetic oligonucleotide
auguucauggacacgaugc

SEQ ID NO: 2010941 - RNA, 19 nt, Artificial Sequence
  Description of Artificial Sequence: Synthetic oligonucleotide
agcgaugcagcagagaccc

SEQ ID NO: 2010942 - RNA, 19 nt, Artificial Sequence
  Description of Artificial Sequence: Synthetic oligonucleotide
agagucuuaggguaaaugu

SEQ ID NO: 2010943 - RNA, 19 nt, Artificial Sequence
  Description of Artificial Sequence: Synthetic oligonucleotide
aguugaaugcuauugcugu

SEQ ID NO: 2010944 - RNA, 19 nt, Artificial Sequence
  Description of Artificial Sequence: Synthetic oligonucleotide
acuacaauguccaucaucu

SEQ ID NO: 2010945 - RNA, 19 nt, Artificial Sequence
  Description of Artificial Sequence: Synthetic oligonucleotide
cuuuucuugagcuccgggg

SEQ ID NO: 2010946 - RNA, 19 nt, Artificial Sequence
  Description of Artificial Sequence: Synthetic oligonucleotide
ucuuccaauuggcuggacg

SEQ ID NO: 2010947 - RNA, 19 nt, Artificial Sequence
  Description of Artificial Sequence: Synthetic oligonucleotide
ucgagcuggucucagagag

SEQ ID NO: 2010948 - RNA, 19 nt, Artificial Sequence
  Description of Artificial Sequence: Synthetic oligonucleotide
acaguugggccuuaagaac

SEQ ID NO: 2010949 - RNA, 19 nt, Artificial Sequence
  Description of Artificial Sequence: Synthetic oligonucleotide
uguccuaugaugcccucgg

SEQ ID NO: 2010950 - RNA, 19 nt, Artificial Sequence
  Description of Artificial Sequence: Synthetic oligonucleotide
aaaguugcgucuccaaggu

SEQ ID NO: 2010951 - RNA, 19 nt, Artificial Sequence
  Description of Artificial Sequence: Synthetic oligonucleotide
guuauugacaauaauggga

SEQ ID NO: 2010952 - RNA, 19 nt, Artificial Sequence
  Description of Artificial Sequence: Synthetic oligonucleotide
caaaguugaaugcuauugc

SEQ ID NO: 2010953 - RNA, 19 nt, Artificial Sequence
  Description of Artificial Sequence: Synthetic oligonucleotide
ggucauguagaacucagcg

SEQ ID NO: 2010954 - RNA, 19 nt, Artificial Sequence
  Description of Artificial Sequence: Synthetic oligonucleotide
aaugguucuucuccguucu

SEQ ID NO: 2010955 - RNA, 19 nt, Artificial Sequence
  Description of Artificial Sequence: Synthetic oligonucleotide
auugacaauaaugggaaug

SEQ ID NO: 2010956 - RNA, 19 nt, Artificial Sequence
  Description of Artificial Sequence: Synthetic oligonucleotide
cuuauuguacaugucuucc

SEQ ID NO: 2010957 - RNA, 19 nt, Artificial Sequence
  Description of Artificial Sequence: Synthetic oligonucleotide
aacucagcggcagcaagcc

SEQ ID NO: 2010958 - RNA, 19 nt, Artificial Sequence
  Description of Artificial Sequence: Synthetic oligonucleotide
acaauuuuccccaggagag

SEQ ID NO: 2010959 - RNA, 19 nt, Artificial Sequence
  Description of Artificial Sequence: Synthetic oligonucleotide
auugaggaugggcugggac

SEQ ID NO: 2010960 - RNA, 19 nt, Artificial Sequence
  Description of Artificial Sequence: Synthetic oligonucleotide
gucauguagaacucagcgg

SEQ ID NO: 2010961 - RNA, 19 nt, Artificial Sequence
  Description of Artificial Sequence: Synthetic oligonucleotide
uacaugucuuccaauuggc

SEQ ID NO: 2010962 - RNA, 19 nt, Artificial Sequence
  Description of Artificial Sequence: Synthetic oligonucleotide
ugaggaguagacacaguug

SEQ ID NO: 2010963 - RNA, 19 nt, Artificial Sequence
  Description of Artificial Sequence: Synthetic oligonucleotide
ucuauguacugguggacgc

SEQ ID NO: 2010964 - RNA, 19 nt, Artificial Sequence
  Description of Artificial Sequence: Synthetic oligonucleotide
ugggccuuaagaacuuagg

SEQ ID NO: 2010965 - RNA, 19 nt, Artificial Sequence
  Description of Artificial Sequence: Synthetic oligonucleotide
gaguagacacaguugggcc

SEQ ID NO: 2010966 - RNA, 19 nt, Artificial Sequence
  Description of Artificial Sequence: Synthetic oligonucleotide
uagaacuccgagaaguuau

SEQ ID NO: 2010967 - RNA, 19 nt, Artificial Sequence
  Description of Artificial Sequence: Synthetic oligonucleotide
uucuaaaggacuugcucga

SEQ ID NO: 2010968 - RNA, 19 nt, Artificial Sequence
  Description of Artificial Sequence: Synthetic oligonucleotide
caagcauccauacuccuug

SEQ ID NO: 2010969 - RNA, 19 nt, Artificial Sequence
  Description of Artificial Sequence: Synthetic oligonucleotide
uccguucuaguuccaaugc

SEQ ID NO: 2010970 - RNA, 19 nt, Artificial Sequence
  Description of Artificial Sequence: Synthetic oligonucleotide
guuucuaaaggacuugcuc

SEQ ID NO: 2010971 - RNA, 19 nt, Artificial Sequence
  Description of Artificial Sequence: Synthetic oligonucleotide
uuauuguacaugucuucca

SEQ ID NO: 2010972 - RNA, 19 nt, Artificial Sequence
  Description of Artificial Sequence: Synthetic oligonucleotide
cuugguauugaggaugggc

SEQ ID NO: 2010973 - RNA, 19 nt, Artificial Sequence
  Description of Artificial Sequence: Synthetic oligonucleotide
gagacaggugguuaucuug

SEQ ID NO: 2010974 - RNA, 19 nt, Artificial Sequence
  Description of Artificial Sequence: Synthetic oligonucleotide
uccuuauagaacuccgaga

SEQ ID NO: 2010975 - RNA, 19 nt, Artificial Sequence
  Description of Artificial Sequence: Synthetic oligonucleotide
uccuaugaugcccucggug

SEQ ID NO: 2010976 - RNA, 19 nt, Artificial Sequence
  Description of Artificial Sequence: Synthetic oligonucleotide
aagacgaucuggccuucuc

SEQ ID NO: 2010977 - RNA, 19 nt, Artificial Sequence
  Description of Artificial Sequence: Synthetic oligonucleotide
ucuaguuccaaugcugaac

SEQ ID NO: 2010978 - RNA, 19 nt, Artificial Sequence
  Description of Artificial Sequence: Synthetic oligonucleotide
augguucuccagcuuacac

SEQ ID NO: 2010979 - RNA, 19 nt, Artificial Sequence
  Description of Artificial Sequence: Synthetic oligonucleotide
cuccuuauagaacuccgag

SEQ ID NO: 2010980 - RNA, 19 nt, Artificial Sequence
  Description of Artificial Sequence: Synthetic oligonucleotide
uggcuggacguucaggugc

SEQ ID NO: 2010981 - RNA, 19 nt, Artificial Sequence
  Description of Artificial Sequence: Synthetic oligonucleotide
cagcaugcgcauaucaggg

SEQ ID NO: 2010982 - RNA, 19 nt, Artificial Sequence
  Description of Artificial Sequence: Synthetic oligonucleotide
aaaaugguucuucuccguu

SEQ ID NO: 2010983 - RNA, 19 nt, Artificial Sequence
  Description of Artificial Sequence: Synthetic oligonucleotide
gacuagaagacgaucuggc

SEQ ID NO: 2010984 - RNA, 19 nt, Artificial Sequence
  Description of Artificial Sequence: Synthetic oligonucleotide
cuugauuucuccugccaac

SEQ ID NO: 2010985 - RNA, 19 nt, Artificial Sequence
  Description of Artificial Sequence: Synthetic oligonucleotide
caucucaaugcuccgggcg

SEQ ID NO: 2010986 - RNA, 19 nt, Artificial Sequence
  Description of Artificial Sequence: Synthetic oligonucleotide
acuugcucgagcuggucuc

SEQ ID NO: 2010987 - RNA, 19 nt, Artificial Sequence
  Description of Artificial Sequence: Synthetic oligonucleotide
ugaaugcuauugcugugug

SEQ ID NO: 2010988 - RNA, 19 nt, Artificial Sequence
  Description of Artificial Sequence: Synthetic oligonucleotide
aauuggcuggacguucagg

SEQ ID NO: 2010989 - RNA, 19 nt, Artificial Sequence
  Description of Artificial Sequence: Synthetic oligonucleotide
uguucauggacacgaugcu

SEQ ID NO: 2010990 - RNA, 19 nt, Artificial Sequence
  Description of Artificial Sequence: Synthetic oligonucleotide
uugggccuuaagaacuuag

SEQ ID NO: 2010991 - RNA, 19 nt, Artificial Sequence
  Description of Artificial Sequence: Synthetic oligonucleotide
aguagacacaguugggccu

SEQ ID NO: 2010992 - RNA, 19 nt, Artificial Sequence
  Description of Artificial Sequence: Synthetic oligonucleotide
uuucaaaaugguucuucuc

SEQ ID NO: 2010993 - RNA, 19 nt, Artificial Sequence
  Description of Artificial Sequence: Synthetic oligonucleotide
uccacuuguugggagacag

SEQ ID NO: 2010994 - RNA, 19 nt, Artificial Sequence
  Description of Artificial Sequence: Synthetic oligonucleotide
ggagguaugguucuccagc

SEQ ID NO: 2010995 - RNA, 19 nt, Artificial Sequence
  Description of Artificial Sequence: Synthetic oligonucleotide
gaucaccaggaccccagcg

SEQ ID NO: 2010996 - RNA, 19 nt, Artificial Sequence
  Description of Artificial Sequence: Synthetic oligonucleotide
agaaguuauugacaauaau

SEQ ID NO: 2010997 - RNA, 19 nt, Artificial Sequence
  Description of Artificial Sequence: Synthetic oligonucleotide
uguagaacucagcggcagc

SEQ ID NO: 2010998 - RNA, 19 nt, Artificial Sequence
  Description of Artificial Sequence: Synthetic oligonucleotide
ugggacugcgucuuggcca

SEQ ID NO: 2010999 - RNA, 19 nt, Artificial Sequence
  Description of Artificial Sequence: Synthetic oligonucleotide
uauugcuguguguuucuca

SEQ ID NO: 2011000 - RNA, 19 nt, Artificial Sequence
  Description of Artificial Sequence: Synthetic oligonucleotide
cuuauagaacuccgagaag

SEQ ID NO: 2011001 - RNA, 19 nt, Artificial Sequence
  Description of Artificial Sequence: Synthetic oligonucleotide
uugaaugcuauugcugugu

SEQ ID NO: 2011002 - RNA, 19 nt, Artificial Sequence
  Description of Artificial Sequence: Synthetic oligonucleotide
ugcaguggacaucucagau

SEQ ID NO: 2011003 - RNA, 19 nt, Artificial Sequence
  Description of Artificial Sequence: Synthetic oligonucleotide
gucuauguacugguggacg

SEQ ID NO: 2011004 - RNA, 19 nt, Artificial Sequence
  Description of Artificial Sequence: Synthetic oligonucleotide
gggccuuaagaacuuaggg

SEQ ID NO: 2011005 - RNA, 19 nt, Artificial Sequence
  Description of Artificial Sequence: Synthetic oligonucleotide
ugguauugaggaugggcug

SEQ ID NO: 2011006 - RNA, 19 nt, Artificial Sequence
  Description of Artificial Sequence: Synthetic oligonucleotide
auuuccacuuguugggaga

SEQ ID NO: 2011007 - RNA, 19 nt, Artificial Sequence
  Description of Artificial Sequence: Synthetic oligonucleotide
ugcgucuuggccaucuuau

SEQ ID NO: 2011008 - RNA, 19 nt, Artificial Sequence
  Description of Artificial Sequence: Synthetic oligonucleotide
aguugcgucuccaagguca

SEQ ID NO: 2011009 - RNA, 19 nt, Artificial Sequence
  Description of Artificial Sequence: Synthetic oligonucleotide
ucucagaugcucugauccc

SEQ ID NO: 2011010 - RNA, 19 nt, Artificial Sequence
  Description of Artificial Sequence: Synthetic oligonucleotide
ugcguguugggcagcgggg

SEQ ID NO: 2011011 - RNA, 19 nt, Artificial Sequence
  Description of Artificial Sequence: Synthetic oligonucleotide
ccuucugaggaguagacac

SEQ ID NO: 2011012 - RNA, 19 nt, Artificial Sequence
  Description of Artificial Sequence: Synthetic oligonucleotide
gcagcaugcgcauaucagg

SEQ ID NO: 2011013 - RNA, 19 nt, Artificial Sequence
  Description of Artificial Sequence: Synthetic oligonucleotide
auaaugggaaugggaagag

SEQ ID NO: 2011014 - RNA, 19 nt, Artificial Sequence
  Description of Artificial Sequence: Synthetic oligonucleotide
cuccguucuaguuccaaug

SEQ ID NO: 2011015 - RNA, 19 nt, Artificial Sequence
  Description of Artificial Sequence: Synthetic oligonucleotide
cagucaacccuucugagga

SEQ ID NO: 2011016 - RNA, 19 nt, Artificial Sequence
  Description of Artificial Sequence: Synthetic oligonucleotide
agaacuuaggggagguggg

SEQ ID NO: 2011017 - RNA, 19 nt, Artificial Sequence
  Description of Artificial Sequence: Synthetic oligonucleotide
aaugcuccgggcgaaggca

SEQ ID NO: 2011018 - RNA, 19 nt, Artificial Sequence
  Description of Artificial Sequence: Synthetic oligonucleotide
aaguugcgucuccaagguc

SEQ ID NO: 2011019 - RNA, 19 nt, Artificial Sequence
  Description of Artificial Sequence: Synthetic oligonucleotide
cuuacacuuuucuugagcu

SEQ ID NO: 2011020 - RNA, 19 nt, Artificial Sequence
  Description of Artificial Sequence: Synthetic oligonucleotide
gagucuuaggguaaauguc

SEQ ID NO: 2011021 - RNA, 19 nt, Artificial Sequence
  Description of Artificial Sequence: Synthetic oligonucleotide
ccuaugaugcccucggugc

SEQ ID NO: 2011022 - RNA, 19 nt, Artificial Sequence
  Description of Artificial Sequence: Synthetic oligonucleotide
uguguccgugucuauguac

SEQ ID NO: 2011023 - RNA, 19 nt, Artificial Sequence
  Description of Artificial Sequence: Synthetic oligonucleotide
uccgugucuauguacuggu

SEQ ID NO: 2011024 - RNA, 19 nt, Artificial Sequence
  Description of Artificial Sequence: Synthetic oligonucleotide
cauuuccacuuguugggag

SEQ ID NO: 2011025 - RNA, 19 nt, Artificial Sequence
  Description of Artificial Sequence: Synthetic oligonucleotide
guugaaugcuauugcugug

SEQ ID NO: 2011026 - RNA, 19 nt, Artificial Sequence
  Description of Artificial Sequence: Synthetic oligonucleotide
agcaugcgcauaucagggg

SEQ ID NO: 2011027 - RNA, 19 nt, Artificial Sequence
  Description of Artificial Sequence: Synthetic oligonucleotide
ucggcuugcucuguggugc

SEQ ID NO: 2011028 - RNA, 19 nt, Artificial Sequence
  Description of Artificial Sequence: Synthetic oligonucleotide
agccaagcauccauacucc

SEQ ID NO: 2011029 - RNA, 19 nt, Artificial Sequence
  Description of Artificial Sequence: Synthetic oligonucleotide
cacaguugggccuuaagaa

SEQ ID NO: 2011030 - RNA, 19 nt, Artificial Sequence
  Description of Artificial Sequence: Synthetic oligonucleotide
ugcgucuccaaggucaugu

SEQ ID NO: 2011031 - RNA, 19 nt, Artificial Sequence
  Description of Artificial Sequence: Synthetic oligonucleotide
gggagagcuuucaaaaugg

SEQ ID NO: 2011032 - RNA, 19 nt, Artificial Sequence
  Description of Artificial Sequence: Synthetic oligonucleotide
guacuuuauccuucuuggc

SEQ ID NO: 2011033 - RNA, 19 nt, Artificial Sequence
  Description of Artificial Sequence: Synthetic oligonucleotide
cucaacuacaauguccauc

SEQ ID NO: 2011034 - RNA, 19 nt, Artificial Sequence
  Description of Artificial Sequence: Synthetic oligonucleotide
gacguucaggugcugagga

SEQ ID NO: 2011035 - RNA, 19 nt, Artificial Sequence
  Description of Artificial Sequence: Synthetic oligonucleotide
gguauugaggaugggcugg

SEQ ID NO: 2011036 - RNA, 19 nt, Artificial Sequence
  Description of Artificial Sequence: Synthetic oligonucleotide
ugcugaggacuagaagacg

SEQ ID NO: 2011037 - RNA, 19 nt, Artificial Sequence
  Description of Artificial Sequence: Synthetic oligonucleotide
cugccauuccucuuggcuc

SEQ ID NO: 2011038 - RNA, 19 nt, Artificial Sequence
  Description of Artificial Sequence: Synthetic oligonucleotide
ugccauuccucuuggcucu

SEQ ID NO: 2011039 - RNA, 19 nt, Artificial Sequence
  Description of Artificial Sequence: Synthetic oligonucleotide
uguagagcggcugacccuc

SEQ ID NO: 2011040 - RNA, 19 nt, Artificial Sequence
  Description of Artificial Sequence: Synthetic oligonucleotide
ugcuuuccaucucuaguuc

SEQ ID NO: 2011041 - RNA, 19 nt, Artificial Sequence
  Description of Artificial Sequence: Synthetic oligonucleotide
uuacacuuuucuugagcuc

SEQ ID NO: 2011042 - RNA, 19 nt, Artificial Sequence
  Description of Artificial Sequence: Synthetic oligonucleotide
uugguuucuaaaggacuug

SEQ ID NO: 2011043 - RNA, 19 nt, Artificial Sequence
  Description of Artificial Sequence: Synthetic oligonucleotide
uguacugguggacgcccgc

SEQ ID NO: 2011044 - RNA, 19 nt, Artificial Sequence
  Description of Artificial Sequence: Synthetic oligonucleotide
ucaucucaaugcuccgggc

SEQ ID NO: 2011045 - RNA, 19 nt, Artificial Sequence
  Description of Artificial Sequence: Synthetic oligonucleotide
caugcgcauaucaggggag

SEQ ID NO: 2011046 - RNA, 19 nt, Artificial Sequence
  Description of Artificial Sequence: Synthetic oligonucleotide
aacccuucugaggaguaga

SEQ ID NO: 2011047 - RNA, 19 nt, Artificial Sequence
  Description of Artificial Sequence: Synthetic oligonucleotide
gugguuaucuuguacuuua

SEQ ID NO: 2011048 - RNA, 19 nt, Artificial Sequence
  Description of Artificial Sequence: Synthetic oligonucleotide
acgaucuggccuucucagg

SEQ ID NO: 2011049 - RNA, 19 nt, Artificial Sequence
  Description of Artificial Sequence: Synthetic oligonucleotide
caucaucucaaugcuccgg

SEQ ID NO: 2011050 - RNA, 19 nt, Artificial Sequence
  Description of Artificial Sequence: Synthetic oligonucleotide
cucagaugcucugaucccc

SEQ ID NO: 2011051 - RNA, 19 nt, Artificial Sequence
  Description of Artificial Sequence: Synthetic oligonucleotide
uccauacuccuugauuucu

SEQ ID NO: 2011052 - RNA, 19 nt, Artificial Sequence
  Description of Artificial Sequence: Synthetic oligonucleotide
cuguguguuucucagggga

SEQ ID NO: 2011053 - RNA, 19 nt, Artificial Sequence
  Description of Artificial Sequence: Synthetic oligonucleotide
ggaguagacacaguugggc

SEQ ID NO: 2011054 - RNA, 19 nt, Artificial Sequence
  Description of Artificial Sequence: Synthetic oligonucleotide
gcuuacacuuuucuugagc

SEQ ID NO: 2011055 - RNA, 19 nt, Artificial Sequence
  Description of Artificial Sequence: Synthetic oligonucleotide
gugcguguugggcagcggg

SEQ ID NO: 2011056 - RNA, 19 nt, Artificial Sequence
  Description of Artificial Sequence: Synthetic oligonucleotide
ugcuauugcuguguguuuc

SEQ ID NO: 2011057 - RNA, 19 nt, Artificial Sequence
  Description of Artificial Sequence: Synthetic oligonucleotide
aggucauguagaacucagc

SEQ ID NO: 2011058 - RNA, 19 nt, Artificial Sequence
  Description of Artificial Sequence: Synthetic oligonucleotide
gagcggcugacccucauca

SEQ ID NO: 2011059 - RNA, 19 nt, Artificial Sequence
  Description of Artificial Sequence: Synthetic oligonucleotide
cuucugcuccuuauagaac

SEQ ID NO: 2011060 - RNA, 19 nt, Artificial Sequence
  Description of Artificial Sequence: Synthetic oligonucleotide
cuagaagacgaucuggccu

SEQ ID NO: 2011061 - RNA, 19 nt, Artificial Sequence
  Description of Artificial Sequence: Synthetic oligonucleotide
ccuuauagaacuccgagaa

SEQ ID NO: 2011062 - RNA, 19 nt, Artificial Sequence
  Description of Artificial Sequence: Synthetic oligonucleotide
acguucaggugcugaggac

SEQ ID NO: 2011063 - RNA, 19 nt, Artificial Sequence
  Description of Artificial Sequence: Synthetic oligonucleotide
uccccagugcucccaugcg

SEQ ID NO: 2011064 - RNA, 19 nt, Artificial Sequence
  Description of Artificial Sequence: Synthetic oligonucleotide
ggacuagaagacgaucugg

SEQ ID NO: 2011065 - RNA, 19 nt, Artificial Sequence
  Description of Artificial Sequence: Synthetic oligonucleotide
uauugacaauaaugggaau

SEQ ID NO: 2011066 - RNA, 19 nt, Artificial Sequence
  Description of Artificial Sequence: Synthetic oligonucleotide
agcggcagcaagccaagca

SEQ ID NO: 2011067 - RNA, 19 nt, Artificial Sequence
  Description of Artificial Sequence: Synthetic oligonucleotide
uccagcuuacacuuuucuu

SEQ ID NO: 2011068 - RNA, 19 nt, Artificial Sequence
  Description of Artificial Sequence: Synthetic oligonucleotide
gagaaguuauugacaauaa

SEQ ID NO: 2011069 - RNA, 19 nt, Artificial Sequence
  Description of Artificial Sequence: Synthetic oligonucleotide
gaacuccgagaaguuauug

SEQ ID NO: 2011070 - RNA, 19 nt, Artificial Sequence
  Description of Artificial Sequence: Synthetic oligonucleotide
aagcauccauacuccuuga

SEQ ID NO: 2011071 - RNA, 19 nt, Artificial Sequence
  Description of Artificial Sequence: Synthetic oligonucleotide
uucggcuugcucuguggug

SEQ ID NO: 2011072 - RNA, 19 nt, Artificial Sequence
  Description of Artificial Sequence: Synthetic oligonucleotide
cacgaugcugccauuccuc

SEQ ID NO: 2011073 - RNA, 19 nt, Artificial Sequence
  Description of Artificial Sequence: Synthetic oligonucleotide
uucuaguuccaaugcugaa

SEQ ID NO: 2011074 - RNA, 19 nt, Artificial Sequence
  Description of Artificial Sequence: Synthetic oligonucleotide
ugaggacuagaagacgauc

SEQ ID NO: 2011075 - RNA, 19 nt, Artificial Sequence
  Description of Artificial Sequence: Synthetic oligonucleotide
cagcuuacacuuuucuuga

SEQ ID NO: 2011076 - RNA, 19 nt, Artificial Sequence
  Description of Artificial Sequence: Synthetic oligonucleotide
cuauguacugguggacgcc

SEQ ID NO: 2011077 - RNA, 19 nt, Artificial Sequence
  Description of Artificial Sequence: Synthetic oligonucleotide
ccagcgaugcagcagagac

SEQ ID NO: 2011078 - RNA, 19 nt, Artificial Sequence
  Description of Artificial Sequence: Synthetic oligonucleotide
uuguugggagacagguggu

SEQ ID NO: 2011079 - RNA, 19 nt, Artificial Sequence
  Description of Artificial Sequence: Synthetic oligonucleotide
uguccgugucuauguacug

SEQ ID NO: 2011080 - RNA, 19 nt, Artificial Sequence
  Description of Artificial Sequence: Synthetic oligonucleotide
guucuaguuccaaugcuga

SEQ ID NO: 2011081 - RNA, 19 nt, Artificial Sequence
  Description of Artificial Sequence: Synthetic oligonucleotide
gaggacuagaagacgaucu

SEQ ID NO: 2011082 - RNA, 19 nt, Artificial Sequence
  Description of Artificial Sequence: Synthetic oligonucleotide
agcuuacacuuuucuugag

SEQ ID NO: 2011083 - RNA, 19 nt, Artificial Sequence
  Description of Artificial Sequence: Synthetic oligonucleotide
gcuguagagcggcugaccc

SEQ ID NO: 2011084 - RNA, 19 nt, Artificial Sequence
  Description of Artificial Sequence: Synthetic oligonucleotide
gaugggcugggacugcguc

SEQ ID NO: 2011085 - RNA, 19 nt, Artificial Sequence
  Description of Artificial Sequence: Synthetic oligonucleotide
agacaggugguuaucuugu

SEQ ID NO: 2011086 - RNA, 19 nt, Artificial Sequence
  Description of Artificial Sequence: Synthetic oligonucleotide
ugucuauguacugguggac

SEQ ID NO: 2011087 - RNA, 19 nt, Artificial Sequence
  Description of Artificial Sequence: Synthetic oligonucleotide
cauccauacuccuugauuu

SEQ ID NO: 2011088 - RNA, 19 nt, Artificial Sequence
  Description of Artificial Sequence: Synthetic oligonucleotide
ugggaaugggaagagcgau

SEQ ID NO: 2011089 - RNA, 19 nt, Artificial Sequence
  Description of Artificial Sequence: Synthetic oligonucleotide
caggggagagcuuucaaaa

SEQ ID NO: 2011090 - RNA, 19 nt, Artificial Sequence
  Description of Artificial Sequence: Synthetic oligonucleotide
caaugcuccgggcgaaggc

SEQ ID NO: 2011091 - RNA, 19 nt, Artificial Sequence
  Description of Artificial Sequence: Synthetic oligonucleotide
cccgccucaaaguugaaug

SEQ ID NO: 2011092 - RNA, 19 nt, Artificial Sequence
  Description of Artificial Sequence: Synthetic oligonucleotide
gagacucuugggaggacug

SEQ ID NO: 2011093 - RNA, 19 nt, Artificial Sequence
  Description of Artificial Sequence: Synthetic oligonucleotide
aucuuauuguacaugucuu

SEQ ID NO: 2011094 - RNA, 19 nt, Artificial Sequence
  Description of Artificial Sequence: Synthetic oligonucleotide
acacgaugcugccauuccu

SEQ ID NO: 2011095 - RNA, 19 nt, Artificial Sequence
  Description of Artificial Sequence: Synthetic oligonucleotide
agucaacccuucugaggag

SEQ ID NO: 2011096 - RNA, 19 nt, Artificial Sequence
  Description of Artificial Sequence: Synthetic oligonucleotide
ucucaggggaccccugcuc

SEQ ID NO: 2011097 - RNA, 19 nt, Artificial Sequence
  Description of Artificial Sequence: Synthetic oligonucleotide
uucucaggggaccccugcu

SEQ ID NO: 2011098 - RNA, 19 nt, Artificial Sequence
  Description of Artificial Sequence: Synthetic oligonucleotide
uaagaacuuaggggaggug

SEQ ID NO: 2011099 - RNA, 19 nt, Artificial Sequence
  Description of Artificial Sequence: Synthetic oligonucleotide
aggaguagacacaguuggg

SEQ ID NO: 2011100 - RNA, 19 nt, Artificial Sequence
  Description of Artificial Sequence: Synthetic oligonucleotide
guggacaucucagaugcuc

SEQ ID NO: 2011101 - RNA, 19 nt, Artificial Sequence
  Description of Artificial Sequence: Synthetic oligonucleotide
cucggugcguguugggcag

SEQ ID NO: 2011102 - RNA, 19 nt, Artificial Sequence
  Description of Artificial Sequence: Synthetic oligonucleotide
ccagucaacccuucugagg

SEQ ID NO: 2011103 - RNA, 19 nt, Artificial Sequence
  Description of Artificial Sequence: Synthetic oligonucleotide
uuggcucucuccagagccu

SEQ ID NO: 2011104 - RNA, 19 nt, Artificial Sequence
  Description of Artificial Sequence: Synthetic oligonucleotide
cagcgaugcagcagagacc

SEQ ID NO: 2011105 - RNA, 19 nt, Artificial Sequence
  Description of Artificial Sequence: Synthetic oligonucleotide
guagaacucagcggcagca

SEQ ID NO: 2011106 - RNA, 19 nt, Artificial Sequence
  Description of Artificial Sequence: Synthetic oligonucleotide
ucaacccuucugaggagua

SEQ ID NO: 2011107 - RNA, 19 nt, Artificial Sequence
  Description of Artificial Sequence: Synthetic oligonucleotide
aggugguuaucuuguacuu

SEQ ID NO: 2011108 - RNA, 19 nt, Artificial Sequence
  Description of Artificial Sequence: Synthetic oligonucleotide
augcgcauaucaggggagg

SEQ ID NO: 2011109 - RNA, 19 nt, Artificial Sequence
  Description of Artificial Sequence: Synthetic oligonucleotide
cuuaggggaggugggcagg

SEQ ID NO: 2011110 - RNA, 19 nt, Artificial Sequence
  Description of Artificial Sequence: Synthetic oligonucleotide
aggggagagcuuucaaaau

SEQ ID NO: 2011111 - RNA, 19 nt, Artificial Sequence
  Description of Artificial Sequence: Synthetic oligonucleotide
gguuaucuuguacuuuauc

SEQ ID NO: 2011112 - RNA, 19 nt, Artificial Sequence
  Description of Artificial Sequence: Synthetic oligonucleotide
cuggucucagagagugccc

SEQ ID NO: 2011113 - RNA, 19 nt, Artificial Sequence
  Description of Artificial Sequence: Synthetic oligonucleotide
agaugcucugauccccagu

SEQ ID NO: 2011114 - RNA, 19 nt, Artificial Sequence
  Description of Artificial Sequence: Synthetic oligonucleotide
ggaagagcgaucaccagga

SEQ ID NO: 2011115 - RNA, 19 nt, Artificial Sequence
  Description of Artificial Sequence: Synthetic oligonucleotide
uaugaugcccucggugcgu

SEQ ID NO: 2011116 - RNA, 19 nt, Artificial Sequence
  Description of Artificial Sequence: Synthetic oligonucleotide
caucucagaugcucugauc

SEQ ID NO: 2011117 - RNA, 19 nt, Artificial Sequence
  Description of Artificial Sequence: Synthetic oligonucleotide
ggugccaucuccuugguau

SEQ ID NO: 2011118 - RNA, 19 nt, Artificial Sequence
  Description of Artificial Sequence: Synthetic oligonucleotide
caugcuuuccaucucuagu

SEQ ID NO: 2011119 - RNA, 19 nt, Artificial Sequence
  Description of Artificial Sequence: Synthetic oligonucleotide
ucugauccccagugcuccc

SEQ ID NO: 2011120 - RNA, 19 nt, Artificial Sequence
  Description of Artificial Sequence: Synthetic oligonucleotide
uccuccgggcagcaugcgc

SEQ ID NO: 2011121 - RNA, 19 nt, Artificial Sequence
  Description of Artificial Sequence: Synthetic oligonucleotide
agagugcccgcuuggucca

SEQ ID NO: 2011122 - RNA, 19 nt, Artificial Sequence
  Description of Artificial Sequence: Synthetic oligonucleotide
caggugguuaucuuguacu

SEQ ID NO: 2011123 - RNA, 19 nt, Artificial Sequence
  Description of Artificial Sequence: Synthetic oligonucleotide
auagaacuccgagaaguua

SEQ ID NO: 2011124 - RNA, 19 nt, Artificial Sequence
  Description of Artificial Sequence: Synthetic oligonucleotide
gacaucucagaugcucuga

SEQ ID NO: 2011125 - RNA, 19 nt, Artificial Sequence
  Description of Artificial Sequence: Synthetic oligonucleotide
gagguaugguucuccagcu

SEQ ID NO: 2011126 - RNA, 19 nt, Artificial Sequence
  Description of Artificial Sequence: Synthetic oligonucleotide
cuugguuucuaaaggacuu

SEQ ID NO: 2011127 - RNA, 19 nt, Artificial Sequence
  Description of Artificial Sequence: Synthetic oligonucleotide
gguaugguucuccagcuua

SEQ ID NO: 2011128 - RNA, 19 nt, Artificial Sequence
  Description of Artificial Sequence: Synthetic oligonucleotide
uccgcuugauggcuuucuc

SEQ ID NO: 2011129 - RNA, 19 nt, Artificial Sequence
  Description of Artificial Sequence: Synthetic oligonucleotide
guguccuaugaugcccucg

SEQ ID NO: 2011130 - RNA, 19 nt, Artificial Sequence
  Description of Artificial Sequence: Synthetic oligonucleotide
auaucaggggagguauggu

SEQ ID NO: 2011131 - RNA, 19 nt, Artificial Sequence
  Description of Artificial Sequence: Synthetic oligonucleotide
guaugguucuccagcuuac

SEQ ID NO: 2011132 - RNA, 19 nt, Artificial Sequence
  Description of Artificial Sequence: Synthetic oligonucleotide
caguugggccuuaagaacu

SEQ ID NO: 2011133 - RNA, 19 nt, Artificial Sequence
  Description of Artificial Sequence: Synthetic oligonucleotide
acuuguugggagacaggug

SEQ ID NO: 2011134 - RNA, 19 nt, Artificial Sequence
  Description of Artificial Sequence: Synthetic oligonucleotide
gccaucuuauuguacaugu

SEQ ID NO: 2011135 - RNA, 19 nt, Artificial Sequence
  Description of Artificial Sequence: Synthetic oligonucleotide
agugcucccaugcgcuccu

SEQ ID NO: 2011136 - RNA, 19 nt, Artificial Sequence
  Description of Artificial Sequence: Synthetic oligonucleotide
ggcagcaugcgcauaucag

SEQ ID NO: 2011137 - RNA, 19 nt, Artificial Sequence
  Description of Artificial Sequence: Synthetic oligonucleotide
cuggccuucucaggggacc

SEQ ID NO: 2011138 - RNA, 19 nt, Artificial Sequence
  Description of Artificial Sequence: Synthetic oligonucleotide
ggacaucucagaugcucug

SEQ ID NO: 2011139 - RNA, 19 nt, Artificial Sequence
  Description of Artificial Sequence: Synthetic oligonucleotide
uggccauauucucuccguu

SEQ ID NO: 2011140 - RNA, 19 nt, Artificial Sequence
  Description of Artificial Sequence: Synthetic oligonucleotide
gacccucaucaucuguguc

SEQ ID NO: 2011141 - RNA, 19 nt, Artificial Sequence
  Description of Artificial Sequence: Synthetic oligonucleotide
gggccuuucccagucaacc

SEQ ID NO: 2011142 - RNA, 19 nt, Artificial Sequence
  Description of Artificial Sequence: Synthetic oligonucleotide
uccggggccuuucccaguc

SEQ ID NO: 2011143 - RNA, 19 nt, Artificial Sequence
  Description of Artificial Sequence: Synthetic oligonucleotide
gucuuaggguaaaugucuc

SEQ ID NO: 2011144 - RNA, 19 nt, Artificial Sequence
  Description of Artificial Sequence: Synthetic oligonucleotide
ggcagcaagccaagcaucc

SEQ ID NO: 2011145 - RNA, 19 nt, Artificial Sequence
  Description of Artificial Sequence: Synthetic oligonucleotide
agcauccauacuccuugau

SEQ ID NO: 2011146 - RNA, 19 nt, Artificial Sequence
  Description of Artificial Sequence: Synthetic oligonucleotide
uucaggugcugaggacuag

SEQ ID NO: 2011147 - RNA, 19 nt, Artificial Sequence
  Description of Artificial Sequence: Synthetic oligonucleotide
aggaugggcugggacugcg

SEQ ID NO: 2011148 - RNA, 19 nt, Artificial Sequence
  Description of Artificial Sequence: Synthetic oligonucleotide
ucaggggaccccugcuccu

SEQ ID NO: 2011149 - RNA, 19 nt, Artificial Sequence
  Description of Artificial Sequence: Synthetic oligonucleotide
ugcgcauaucaggggaggu

SEQ ID NO: 2011150 - RNA, 19 nt, Artificial Sequence
  Description of Artificial Sequence: Synthetic oligonucleotide
gcaugcgcauaucagggga

SEQ ID NO: 2011151 - RNA, 19 nt, Artificial Sequence
  Description of Artificial Sequence: Synthetic oligonucleotide
cagaugcucugauccccag

SEQ ID NO: 2011152 - RNA, 19 nt, Artificial Sequence
  Description of Artificial Sequence: Synthetic oligonucleotide
agagccucucuccgcuuga

SEQ ID NO: 2011153 - RNA, 19 nt, Artificial Sequence
  Description of Artificial Sequence: Synthetic oligonucleotide
gcccgcuugguccauuucc

SEQ ID NO: 2011154 - RNA, 19 nt, Artificial Sequence
  Description of Artificial Sequence: Synthetic oligonucleotide
cugaggaguagacacaguu

SEQ ID NO: 2011155 - RNA, 19 nt, Artificial Sequence
  Description of Artificial Sequence: Synthetic oligonucleotide
gacgcccgccucaaaguug

SEQ ID NO: 2011156 - RNA, 19 nt, Artificial Sequence
  Description of Artificial Sequence: Synthetic oligonucleotide
cagagccucucuccgcuug

SEQ ID NO: 2011157 - RNA, 19 nt, Artificial Sequence
  Description of Artificial Sequence: Synthetic oligonucleotide
guccacgcuguagagcggc

SEQ ID NO: 2011158 - RNA, 19 nt, Artificial Sequence
  Description of Artificial Sequence: Synthetic oligonucleotide
ggccuuucccagucaaccc

SEQ ID NO: 2011159 - RNA, 19 nt, Artificial Sequence
  Description of Artificial Sequence: Synthetic oligonucleotide
ugcucgagcuggucucaga

SEQ ID NO: 2011160 - RNA, 19 nt, Artificial Sequence
  Description of Artificial Sequence: Synthetic oligonucleotide
ucucaaugcuccgggcgaa

SEQ ID NO: 2011161 - RNA, 19 nt, Artificial Sequence
  Description of Artificial Sequence: Synthetic oligonucleotide
auguacugguggacgcccg

SEQ ID NO: 2011162 - RNA, 19 nt, Artificial Sequence
  Description of Artificial Sequence: Synthetic oligonucleotide
agccucucuccgcuugaug

SEQ ID NO: 2011163 - RNA, 19 nt, Artificial Sequence
  Description of Artificial Sequence: Synthetic oligonucleotide
ggacguucaggugcugagg

SEQ ID NO: 2011164 - RNA, 19 nt, Artificial Sequence
  Description of Artificial Sequence: Synthetic oligonucleotide
gggagguaugguucuccag

SEQ ID NO: 2011165 - RNA, 19 nt, Artificial Sequence
  Description of Artificial Sequence: Synthetic oligonucleotide
caaaaugguucuucuccgu

SEQ ID NO: 2011166 - RNA, 19 nt, Artificial Sequence
  Description of Artificial Sequence: Synthetic oligonucleotide
ccgccucaaaguugaaugc

SEQ ID NO: 2011167 - RNA, 19 nt, Artificial Sequence
  Description of Artificial Sequence: Synthetic oligonucleotide
uuccaauuggcuggacguu

SEQ ID NO: 2011168 - RNA, 19 nt, Artificial Sequence
  Description of Artificial Sequence: Synthetic oligonucleotide
cacgcuguagagcggcuga

SEQ ID NO: 2011169 - RNA, 19 nt, Artificial Sequence
  Description of Artificial Sequence: Synthetic oligonucleotide
cagugcucccaugcgcucc

SEQ ID NO: 2011170 - RNA, 19 nt, Artificial Sequence
  Description of Artificial Sequence: Synthetic oligonucleotide
cacuuguugggagacaggu

SEQ ID NO: 2011171 - RNA, 19 nt, Artificial Sequence
  Description of Artificial Sequence: Synthetic oligonucleotide
uccacgcuguagagcggcu

SEQ ID NO: 2011172 - RNA, 19 nt, Artificial Sequence
  Description of Artificial Sequence: Synthetic oligonucleotide
guacugguggacgcccgcc

SEQ ID NO: 2011173 - RNA, 19 nt, Artificial Sequence
  Description of Artificial Sequence: Synthetic oligonucleotide
augcccucggugcguguug

SEQ ID NO: 2011174 - RNA, 19 nt, Artificial Sequence
  Description of Artificial Sequence: Synthetic oligonucleotide
ugggagacaggugguuauc

SEQ ID NO: 2011175 - RNA, 19 nt, Artificial Sequence
  Description of Artificial Sequence: Synthetic oligonucleotide
gggguguccuaugaugccc

SEQ ID NO: 2011176 - RNA, 19 nt, Artificial Sequence
  Description of Artificial Sequence: Synthetic oligonucleotide
uuccacuuguugggagaca

SEQ ID NO: 2011177 - RNA, 19 nt, Artificial Sequence
  Description of Artificial Sequence: Synthetic oligonucleotide
cuccaaggucauguagaac

SEQ ID NO: 2011178 - RNA, 19 nt, Artificial Sequence
  Description of Artificial Sequence: Synthetic oligonucleotide
gacaggugguuaucuugua

SEQ ID NO: 2011179 - RNA, 19 nt, Artificial Sequence
  Description of Artificial Sequence: Synthetic oligonucleotide
agguaugguucuccagcuu

SEQ ID NO: 2011180 - RNA, 19 nt, Artificial Sequence
  Description of Artificial Sequence: Synthetic oligonucleotide
caggagagucuuaggguaa

SEQ ID NO: 2011181 - RNA, 19 nt, Artificial Sequence
  Description of Artificial Sequence: Synthetic oligonucleotide
gcgaaggcauccuucaugu

SEQ ID NO: 2011182 - RNA, 19 nt, Artificial Sequence
  Description of Artificial Sequence: Synthetic oligonucleotide
ucucuccgcuugauggcuu

SEQ ID NO: 2011183 - RNA, 19 nt, Artificial Sequence
  Description of Artificial Sequence: Synthetic oligonucleotide
ccuucggcuugcucugugg

SEQ ID NO: 2011184 - RNA, 19 nt, Artificial Sequence
  Description of Artificial Sequence: Synthetic oligonucleotide
cucgagcuggucucagaga

SEQ ID NO: 2011185 - RNA, 19 nt, Artificial Sequence
  Description of Artificial Sequence: Synthetic oligonucleotide
acucagcggcagcaagcca

SEQ ID NO: 2011186 - RNA, 19 nt, Artificial Sequence
  Description of Artificial Sequence: Synthetic oligonucleotide
ggaguccacgcuguagagc

SEQ ID NO: 2011187 - RNA, 19 nt, Artificial Sequence
  Description of Artificial Sequence: Synthetic oligonucleotide
uugcucgagcuggucucag

SEQ ID NO: 2011188 - RNA, 19 nt, Artificial Sequence
  Description of Artificial Sequence: Synthetic oligonucleotide
ggccaucuuauuguacaug

SEQ ID NO: 2011189 - RNA, 19 nt, Artificial Sequence
  Description of Artificial Sequence: Synthetic oligonucleotide
acgcccgccucaaaguuga

SEQ ID NO: 2011190 - RNA, 19 nt, Artificial Sequence
  Description of Artificial Sequence: Synthetic oligonucleotide
aggagagucuuaggguaaa

SEQ ID NO: 2011191 - RNA, 19 nt, Artificial Sequence
  Description of Artificial Sequence: Synthetic oligonucleotide
agaacuccgagaaguuauu

SEQ ID NO: 2011192 - RNA, 19 nt, Artificial Sequence
  Description of Artificial Sequence: Synthetic oligonucleotide
guguccgugucuauguacu

SEQ ID NO: 2011193 - RNA, 19 nt, Artificial Sequence
  Description of Artificial Sequence: Synthetic oligonucleotide
cccacaauuuuccccagga

SEQ ID NO: 2011194 - RNA, 19 nt, Artificial Sequence
  Description of Artificial Sequence: Synthetic oligonucleotide
cccagucaacccuucugag

SEQ ID NO: 2011195 - RNA, 19 nt, Artificial Sequence
  Description of Artificial Sequence: Synthetic oligonucleotide
cagggcugggcaugcuuuc

SEQ ID NO: 2011196 - RNA, 19 nt, Artificial Sequence
  Description of Artificial Sequence: Synthetic oligonucleotide
cucccaugcgcuccuccuc

SEQ ID NO: 2011197 - RNA, 19 nt, Artificial Sequence
  Description of Artificial Sequence: Synthetic oligonucleotide
ugggaggacuggaguccac

SEQ ID NO: 2011198 - RNA, 19 nt, Artificial Sequence
  Description of Artificial Sequence: Synthetic oligonucleotide
gaccccugcuccuugguuu

SEQ ID NO: 2011199 - RNA, 19 nt, Artificial Sequence
  Description of Artificial Sequence: Synthetic oligonucleotide
agcaagccaagcauccaua

SEQ ID NO: 2011200 - RNA, 19 nt, Artificial Sequence
  Description of Artificial Sequence: Synthetic oligonucleotide
ggucucagagagugcccgc

SEQ ID NO: 2011201 - RNA, 19 nt, Artificial Sequence
  Description of Artificial Sequence: Synthetic oligonucleotide
caccaggaccccagcgaug

SEQ ID NO: 2011202 - RNA, 19 nt, Artificial Sequence
  Description of Artificial Sequence: Synthetic oligonucleotide
ccaacuccucucugcagug

SEQ ID NO: 2011203 - RNA, 19 nt, Artificial Sequence
  Description of Artificial Sequence: Synthetic oligonucleotide
cgagaaguuauugacaaua

SEQ ID NO: 2011204 - RNA, 19 nt, Artificial Sequence
  Description of Artificial Sequence: Synthetic oligonucleotide
ccacuuguugggagacagg

SEQ ID NO: 2011205 - RNA, 19 nt, Artificial Sequence
  Description of Artificial Sequence: Synthetic oligonucleotide
uggugccaucuccuuggua

SEQ ID NO: 2011206 - RNA, 19 nt, Artificial Sequence
  Description of Artificial Sequence: Synthetic oligonucleotide
aguccacgcuguagagcgg

SEQ ID NO: 2011207 - RNA, 19 nt, Artificial Sequence
  Description of Artificial Sequence: Synthetic oligonucleotide
gguucuucuccguucuagu

SEQ ID NO: 2011208 - RNA, 19 nt, Artificial Sequence
  Description of Artificial Sequence: Synthetic oligonucleotide
ccuccuccgggcagcaugc

SEQ ID NO: 2011209 - RNA, 19 nt, Artificial Sequence
  Description of Artificial Sequence: Synthetic oligonucleotide
caagccaagcauccauacu

SEQ ID NO: 2011210 - RNA, 19 nt, Artificial Sequence
  Description of Artificial Sequence: Synthetic oligonucleotide
agcgaucaccaggacccca

SEQ ID NO: 2011211 - RNA, 19 nt, Artificial Sequence
  Description of Artificial Sequence: Synthetic oligonucleotide
gagcgaucaccaggacccc

SEQ ID NO: 2011212 - RNA, 19 nt, Artificial Sequence
  Description of Artificial Sequence: Synthetic oligonucleotide
ugcccgcuugguccauuuc

SEQ ID NO: 2011213 - RNA, 19 nt, Artificial Sequence
  Description of Artificial Sequence: Synthetic oligonucleotide
guucaggugcugaggacua

SEQ ID NO: 2011214 - RNA, 19 nt, Artificial Sequence
  Description of Artificial Sequence: Synthetic oligonucleotide
uccgggcgaaggcauccuu

SEQ ID NO: 2011215 - RNA, 19 nt, Artificial Sequence
  Description of Artificial Sequence: Synthetic oligonucleotide
ggggagguaugguucucca

SEQ ID NO: 2011216 - RNA, 19 nt, Artificial Sequence
  Description of Artificial Sequence: Synthetic oligonucleotide
cuggacguucaggugcuga

SEQ ID NO: 2011217 - RNA, 19 nt, Artificial Sequence
  Description of Artificial Sequence: Synthetic oligonucleotide
gggcagcaugcgcauauca

SEQ ID NO: 2011218 - RNA, 19 nt, Artificial Sequence
  Description of Artificial Sequence: Synthetic oligonucleotide
ccaauuggcuggacguuca

SEQ ID NO: 2011219 - RNA, 19 nt, Artificial Sequence
  Description of Artificial Sequence: Synthetic oligonucleotide
gggaaugggaagagcgauc

SEQ ID NO: 2011220 - RNA, 19 nt, Artificial Sequence
  Description of Artificial Sequence: Synthetic oligonucleotide
cuugcucgagcuggucuca

SEQ ID NO: 2011221 - RNA, 19 nt, Artificial Sequence
  Description of Artificial Sequence: Synthetic oligonucleotide
uggagacucuugggaggac

SEQ ID NO: 2011222 - RNA, 19 nt, Artificial Sequence
  Description of Artificial Sequence: Synthetic oligonucleotide
cuucggcuugcucuguggu

SEQ ID NO: 2011223 - RNA, 19 nt, Artificial Sequence
  Description of Artificial Sequence: Synthetic oligonucleotide
gucaacccuucugaggagu

SEQ ID NO: 2011224 - RNA, 19 nt, Artificial Sequence
  Description of Artificial Sequence: Synthetic oligonucleotide
gcuccuuauagaacuccga

SEQ ID NO: 2011225 - RNA, 19 nt, Artificial Sequence
  Description of Artificial Sequence: Synthetic oligonucleotide
ucuccgcuugauggcuuuc

SEQ ID NO: 2011226 - RNA, 19 nt, Artificial Sequence
  Description of Artificial Sequence: Synthetic oligonucleotide
gacugcgucuuggccaucu

SEQ ID NO: 2011227 - RNA, 19 nt, Artificial Sequence
  Description of Artificial Sequence: Synthetic oligonucleotide
ccuccgggcagcaugcgca

SEQ ID NO: 2011228 - RNA, 19 nt, Artificial Sequence
  Description of Artificial Sequence: Synthetic oligonucleotide
gccauauucucuccguuuu

SEQ ID NO: 2011229 - RNA, 19 nt, Artificial Sequence
  Description of Artificial Sequence: Synthetic oligonucleotide
guagacacaguugggccuu

SEQ ID NO: 2011230 - RNA, 19 nt, Artificial Sequence
  Description of Artificial Sequence: Synthetic oligonucleotide
ugguggacgcccgccucaa

SEQ ID NO: 2011231 - RNA, 19 nt, Artificial Sequence
  Description of Artificial Sequence: Synthetic oligonucleotide
cugcgucuuggccaucuua

SEQ ID NO: 2011232 - RNA, 19 nt, Artificial Sequence
  Description of Artificial Sequence: Synthetic oligonucleotide
caauuuuccccaggagagu

SEQ ID NO: 2011233 - RNA, 19 nt, Artificial Sequence
  Description of Artificial Sequence: Synthetic oligonucleotide
ucggugcguguugggcagc

SEQ ID NO: 2011234 - RNA, 19 nt, Artificial Sequence
  Description of Artificial Sequence: Synthetic oligonucleotide
ggcugacccucaucaucug

SEQ ID NO: 2011235 - RNA, 19 nt, Artificial Sequence
  Description of Artificial Sequence: Synthetic oligonucleotide
ggcuuucuccugccgcuuc

SEQ ID NO: 2011236 - RNA, 19 nt, Artificial Sequence
  Description of Artificial Sequence: Synthetic oligonucleotide
cccgcuugguccauuucca

SEQ ID NO: 2011237 - RNA, 19 nt, Artificial Sequence
  Description of Artificial Sequence: Synthetic oligonucleotide
ccucggugcguguugggca

SEQ ID NO: 2011238 - RNA, 19 nt, Artificial Sequence
  Description of Artificial Sequence: Synthetic oligonucleotide
cugauccccagugcuccca

SEQ ID NO: 2011239 - RNA, 19 nt, Artificial Sequence
  Description of Artificial Sequence: Synthetic oligonucleotide
gguguccuaugaugcccuc

SEQ ID NO: 2011240 - RNA, 19 nt, Artificial Sequence
  Description of Artificial Sequence: Synthetic oligonucleotide
gcuccgggcgaaggcaucc

SEQ ID NO: 2011241 - RNA, 19 nt, Artificial Sequence
  Description of Artificial Sequence: Synthetic oligonucleotide
ccgugucuauguacuggug

SEQ ID NO: 2011242 - RNA, 19 nt, Artificial Sequence
  Description of Artificial Sequence: Synthetic oligonucleotide
gcucugauccccagugcuc

SEQ ID NO: 2011243 - RNA, 19 nt, Artificial Sequence
  Description of Artificial Sequence: Synthetic oligonucleotide
ucuugagcuccggggccuu

SEQ ID NO: 2011244 - RNA, 19 nt, Artificial Sequence
  Description of Artificial Sequence: Synthetic oligonucleotide
cuucuccguucuaguucca

SEQ ID NO: 2011245 - RNA, 19 nt, Artificial Sequence
  Description of Artificial Sequence: Synthetic oligonucleotide
gcggcagcaagccaagcau

SEQ ID NO: 2011246 - RNA, 19 nt, Artificial Sequence
  Description of Artificial Sequence: Synthetic oligonucleotide
ccgggcgaaggcauccuuc

SEQ ID NO: 2011247 - RNA, 19 nt, Artificial Sequence
  Description of Artificial Sequence: Synthetic oligonucleotide
gaagacgaucuggccuucu

SEQ ID NO: 2011248 - RNA, 19 nt, Artificial Sequence
  Description of Artificial Sequence: Synthetic oligonucleotide
cuguguccgugucuaugua

SEQ ID NO: 2011249 - RNA, 19 nt, Artificial Sequence
  Description of Artificial Sequence: Synthetic oligonucleotide
gggcugggcaugcuuucca

SEQ ID NO: 2011250 - RNA, 19 nt, Artificial Sequence
  Description of Artificial Sequence: Synthetic oligonucleotide
ggagacucuugggaggacu

SEQ ID NO: 2011251 - RNA, 19 nt, Artificial Sequence
  Description of Artificial Sequence: Synthetic oligonucleotide
agacacaguugggccuuaa

SEQ ID NO: 2011252 - RNA, 19 nt, Artificial Sequence
  Description of Artificial Sequence: Synthetic oligonucleotide
guugggccuuaagaacuua

SEQ ID NO: 2011253 - RNA, 19 nt, Artificial Sequence
  Description of Artificial Sequence: Synthetic oligonucleotide
ugcugccauggagacucuu

SEQ ID NO: 2011254 - RNA, 19 nt, Artificial Sequence
  Description of Artificial Sequence: Synthetic oligonucleotide
cuccuccgggcagcaugcg

SEQ ID NO: 2011255 - RNA, 19 nt, Artificial Sequence
  Description of Artificial Sequence: Synthetic oligonucleotide
ggugcguguugggcagcgg

SEQ ID NO: 2011256 - RNA, 19 nt, Artificial Sequence
  Description of Artificial Sequence: Synthetic oligonucleotide
ccgcuugguccauuuccac

SEQ ID NO: 2011257 - RNA, 19 nt, Artificial Sequence
  Description of Artificial Sequence: Synthetic oligonucleotide
cccucggugcguguugggc

SEQ ID NO: 2011258 - RNA, 19 nt, Artificial Sequence
  Description of Artificial Sequence: Synthetic oligonucleotide
ccuugguauugaggauggg

SEQ ID NO: 2011259 - RNA, 19 nt, Artificial Sequence
  Description of Artificial Sequence: Synthetic oligonucleotide
gaugcccucggugcguguu

SEQ ID NO: 2011260 - RNA, 19 nt, Artificial Sequence
  Description of Artificial Sequence: Synthetic oligonucleotide
guccuaugaugcccucggu

SEQ ID NO: 2011261 - RNA, 19 nt, Artificial Sequence
  Description of Artificial Sequence: Synthetic oligonucleotide
gggacugcgucuuggccau

SEQ ID NO: 2011262 - RNA, 19 nt, Artificial Sequence
  Description of Artificial Sequence: Synthetic oligonucleotide
ggaccccagcgaugcagca

SEQ ID NO: 2011263 - RNA, 19 nt, Artificial Sequence
  Description of Artificial Sequence: Synthetic oligonucleotide
gucuuccaauuggcuggac

SEQ ID NO: 2011264 - RNA, 19 nt, Artificial Sequence
  Description of Artificial Sequence: Synthetic oligonucleotide
guugcgucuccaaggucau

SEQ ID NO: 2011265 - RNA, 19 nt, Artificial Sequence
  Description of Artificial Sequence: Synthetic oligonucleotide
ggugguuaucuuguacuuu

SEQ ID NO: 2011266 - RNA, 19 nt, Artificial Sequence
  Description of Artificial Sequence: Synthetic oligonucleotide
gccaagcauccauacuccu

SEQ ID NO: 2011267 - RNA, 19 nt, Artificial Sequence
  Description of Artificial Sequence: Synthetic oligonucleotide
guagagcggcugacccuca

SEQ ID NO: 2011268 - RNA, 19 nt, Artificial Sequence
  Description of Artificial Sequence: Synthetic oligonucleotide
ggggccuuucccagucaac

SEQ ID NO: 2011269 - RNA, 19 nt, Artificial Sequence
  Description of Artificial Sequence: Synthetic oligonucleotide
gcccucggugcguguuggg

SEQ ID NO: 2011270 - RNA, 19 nt, Artificial Sequence
  Description of Artificial Sequence: Synthetic oligonucleotide
cgaucaccaggaccccagc

SEQ ID NO: 2011271 - RNA, 19 nt, Artificial Sequence
  Description of Artificial Sequence: Synthetic oligonucleotide
cgggcgaaggcauccuuca

SEQ ID NO: 2011272 - RNA, 19 nt, Artificial Sequence
  Description of Artificial Sequence: Synthetic oligonucleotide
cuccgcuugauggcuuucu

SEQ ID NO: 2011273 - RNA, 19 nt, Artificial Sequence
  Description of Artificial Sequence: Synthetic oligonucleotide
ccacgcuguagagcggcug

SEQ ID NO: 2011274 - RNA, 19 nt, Artificial Sequence
  Description of Artificial Sequence: Synthetic oligonucleotide
ggccuucucaggggacccc

SEQ ID NO: 2011275 - RNA, 19 nt, Artificial Sequence
  Description of Artificial Sequence: Synthetic oligonucleotide
gcgcauaucaggggaggua

SEQ ID NO: 2011276 - RNA, 19 nt, Artificial Sequence
  Description of Artificial Sequence: Synthetic oligonucleotide
ggguguccuaugaugcccu

SEQ ID NO: 2011277 - RNA, 19 nt, Artificial Sequence
  Description of Artificial Sequence: Synthetic oligonucleotide
agugcccgcuugguccauu

SEQ ID NO: 2011278 - RNA, 19 nt, Artificial Sequence
  Description of Artificial Sequence: Synthetic oligonucleotide
ccaagcauccauacuccuu

SEQ ID NO: 2011279 - RNA, 19 nt, Artificial Sequence
  Description of Artificial Sequence: Synthetic oligonucleotide
cacagggcugggcaugcuu

SEQ ID NO: 2011280 - RNA, 19 nt, Artificial Sequence
  Description of Artificial Sequence: Synthetic oligonucleotide
ggacuggaguccacgcugu

SEQ ID NO: 2011281 - RNA, 19 nt, Artificial Sequence
  Description of Artificial Sequence: Synthetic oligonucleotide
cguucaggugcugaggacu

SEQ ID NO: 2011282 - RNA, 19 nt, Artificial Sequence
  Description of Artificial Sequence: Synthetic oligonucleotide
gggcaggggagagcuuuca

SEQ ID NO: 2011283 - RNA, 19 nt, Artificial Sequence
  Description of Artificial Sequence: Synthetic oligonucleotide
ggacgcccgccucaaaguu

SEQ ID NO: 2011284 - RNA, 19 nt, Artificial Sequence
  Description of Artificial Sequence: Synthetic oligonucleotide
cucuccgcuugauggcuuu

SEQ ID NO: 2011285 - RNA, 19 nt, Artificial Sequence
  Description of Artificial Sequence: Synthetic oligonucleotide
caucuguguccgugucuau

SEQ ID NO: 2011286 - RNA, 19 nt, Artificial Sequence
  Description of Artificial Sequence: Synthetic oligonucleotide
ggcuggacguucaggugcu

SEQ ID NO: 2011287 - RNA, 19 nt, Artificial Sequence
  Description of Artificial Sequence: Synthetic oligonucleotide
ggagagucuuaggguaaau

SEQ ID NO: 2011288 - RNA, 19 nt, Artificial Sequence
  Description of Artificial Sequence: Synthetic oligonucleotide
cggugcguguugggcagcg

SEQ ID NO: 2011289 - RNA, 19 nt, Artificial Sequence
  Description of Artificial Sequence: Synthetic oligonucleotide
gugcccgcuugguccauuu

SEQ ID NO: 2011290 - RNA, 19 nt, Artificial Sequence
  Description of Artificial Sequence: Synthetic oligonucleotide
cuccggggccuuucccagu

SEQ ID NO: 2011291 - RNA, 19 nt, Artificial Sequence
  Description of Artificial Sequence: Synthetic oligonucleotide
gcgucuuggccaucuuauu

SEQ ID NO: 2011292 - RNA, 19 nt, Artificial Sequence
  Description of Artificial Sequence: Synthetic oligonucleotide
gcgaugcagcagagacccc

SEQ ID NO: 2011293 - RNA, 19 nt, Artificial Sequence
  Description of Artificial Sequence: Synthetic oligonucleotide
gggcgaaggcauccuucau

SEQ ID NO: 2011294 - RNA, 19 nt, Artificial Sequence
  Description of Artificial Sequence: Synthetic oligonucleotide
cccagcgaugcagcagaga

SEQ ID NO: 2011295 - RNA, 19 nt, Artificial Sequence
  Description of Artificial Sequence: Synthetic oligonucleotide
ggaugggcugggacugcgu

SEQ ID NO: 2011296 - RNA, 19 nt, Artificial Sequence
  Description of Artificial Sequence: Synthetic oligonucleotide
cuccgggcgaaggcauccu

SEQ ID NO: 2011297 - RNA, 19 nt, Artificial Sequence
  Description of Artificial Sequence: Synthetic oligonucleotide
cggggccuuucccagucaa

SEQ ID NO: 2011298 - RNA, 19 nt, Artificial Sequence
  Description of Artificial Sequence: Synthetic oligonucleotide
ccaggaccccagcgaugca

SEQ ID NO: 2011299 - RNA, 19 nt, Artificial Sequence
  Description of Artificial Sequence: Synthetic oligonucleotide
cgagcuggucucagagagu

SEQ ID NO: 2011300 - RNA, 19 nt, Artificial Sequence
  Description of Artificial Sequence: Synthetic oligonucleotide
gagugcccgcuugguccau

SEQ ID NO: 2011301 - RNA, 19 nt, Artificial Sequence
  Description of Artificial Sequence: Synthetic oligonucleotide
cuugagcuccggggccuuu

SEQ ID NO: 2011302 - RNA, 19 nt, Artificial Sequence
  Description of Artificial Sequence: Synthetic oligonucleotide
ggacugcgucuuggccauc

SEQ ID NO: 2011303 - RNA, 19 nt, Artificial Sequence
  Description of Artificial Sequence: Synthetic oligonucleotide
gugcugccauggagacucu

SEQ ID NO: 2011304 - RNA, 19 nt, Artificial Sequence
  Description of Artificial Sequence: Synthetic oligonucleotide
ccggggccuuucccaguca

SEQ ID NO: 2011305 - RNA, 19 nt, Artificial Sequence
  Description of Artificial Sequence: Synthetic oligonucleotide
ccccugcuccuugguuucu

SEQ ID NO: 2011306 - RNA, 19 nt, Artificial Sequence
  Description of Artificial Sequence: Synthetic oligonucleotide
auuucaauuaacgugaagc

SEQ ID NO: 2011307 - RNA, 19 nt, Artificial Sequence
  Description of Artificial Sequence: Synthetic oligonucleotide
ucaauuaacgugaagcugg

SEQ ID NO: 2011308 - RNA, 19 nt, Artificial Sequence
  Description of Artificial Sequence: Synthetic oligonucleotide
auuaacgugaagcugggac

SEQ ID NO: 2011309 - RNA, 19 nt, Artificial Sequence
  Description of Artificial Sequence: Synthetic oligonucleotide
acuucuuacaguuaaagca

SEQ ID NO: 2011310 - RNA, 19 nt, Artificial Sequence
  Description of Artificial Sequence: Synthetic oligonucleotide
aaacaggucaggcaguagg

SEQ ID NO: 2011311 - RNA, 19 nt, Artificial Sequence
  Description of Artificial Sequence: Synthetic oligonucleotide
aaaucucuacgucacaaag

SEQ ID NO: 2011312 - RNA, 19 nt, Artificial Sequence
  Description of Artificial Sequence: Synthetic oligonucleotide
ugaagcguugcccagacag

SEQ ID NO: 2011313 - RNA, 19 nt, Artificial Sequence
  Description of Artificial Sequence: Synthetic oligonucleotide
ucgaaagagauguacuucg

SEQ ID NO: 2011314 - RNA, 19 nt, Artificial Sequence
  Description of Artificial Sequence: Synthetic oligonucleotide
aagauuucaauuaacguga

SEQ ID NO: 2011315 - RNA, 19 nt, Artificial Sequence
  Description of Artificial Sequence: Synthetic oligonucleotide
aauauccaaaucucuacgu

SEQ ID NO: 2011316 - RNA, 19 nt, Artificial Sequence
  Description of Artificial Sequence: Synthetic oligonucleotide
aacucacagaaacagguca

SEQ ID NO: 2011317 - RNA, 19 nt, Artificial Sequence
  Description of Artificial Sequence: Synthetic oligonucleotide
aagcucuugguuccaaugg

SEQ ID NO: 2011318 - RNA, 19 nt, Artificial Sequence
  Description of Artificial Sequence: Synthetic oligonucleotide
agaacuaaaagauuucaau

SEQ ID NO: 2011319 - RNA, 19 nt, Artificial Sequence
  Description of Artificial Sequence: Synthetic oligonucleotide
uucgaagcaggccacacag

SEQ ID NO: 2011320 - RNA, 19 nt, Artificial Sequence
  Description of Artificial Sequence: Synthetic oligonucleotide
uuacaguuaaagcagucgu

SEQ ID NO: 2011321 - RNA, 19 nt, Artificial Sequence
  Description of Artificial Sequence: Synthetic oligonucleotide
acaaagcacuccuugugcc

SEQ ID NO: 2011322 - RNA, 19 nt, Artificial Sequence
  Description of Artificial Sequence: Synthetic oligonucleotide
ucagauguccuucccacag

SEQ ID NO: 2011323 - RNA, 19 nt, Artificial Sequence
  Description of Artificial Sequence: Synthetic oligonucleotide
auauccaaaucucuacguc

SEQ ID NO: 2011324 - RNA, 19 nt, Artificial Sequence
  Description of Artificial Sequence: Synthetic oligonucleotide
uggcguacaacucacagaa

SEQ ID NO: 2011325 - RNA, 19 nt, Artificial Sequence
  Description of Artificial Sequence: Synthetic oligonucleotide
uauccaaaucucuacguca

SEQ ID NO: 2011326 - RNA, 19 nt, Artificial Sequence
  Description of Artificial Sequence: Synthetic oligonucleotide
cuuguauuccaucuuucgg

SEQ ID NO: 2011327 - RNA, 19 nt, Artificial Sequence
  Description of Artificial Sequence: Synthetic oligonucleotide
agagauguacuucgugccc

SEQ ID NO: 2011328 - RNA, 19 nt, Artificial Sequence
  Description of Artificial Sequence: Synthetic oligonucleotide
ggugaaacaggucucaugc

SEQ ID NO: 2011329 - RNA, 19 nt, Artificial Sequence
  Description of Artificial Sequence: Synthetic oligonucleotide
augauggucuucuugcauc

SEQ ID NO: 2011330 - RNA, 19 nt, Artificial Sequence
  Description of Artificial Sequence: Synthetic oligonucleotide
uuaacgugaagcugggaca

SEQ ID NO: 2011331 - RNA, 19 nt, Artificial Sequence
  Description of Artificial Sequence: Synthetic oligonucleotide
cuuacaguuaaagcagucg

SEQ ID NO: 2011332 - RNA, 19 nt, Artificial Sequence
  Description of Artificial Sequence: Synthetic oligonucleotide
aguagggaaacucaucccu

SEQ ID NO: 2011333 - RNA, 19 nt, Artificial Sequence
  Description of Artificial Sequence: Synthetic oligonucleotide
uguaggacaaguccuugca

SEQ ID NO: 2011334 - RNA, 19 nt, Artificial Sequence
  Description of Artificial Sequence: Synthetic oligonucleotide
accagaacacagcacugcc

SEQ ID NO: 2011335 - RNA, 19 nt, Artificial Sequence
  Description of Artificial Sequence: Synthetic oligonucleotide
uuucaugcggucugcacag

SEQ ID NO: 2011336 - RNA, 19 nt, Artificial Sequence
  Description of Artificial Sequence: Synthetic oligonucleotide
uggcaggugaaacaggucu

SEQ ID NO: 2011337 - RNA, 19 nt, Artificial Sequence
  Description of Artificial Sequence: Synthetic oligonucleotide
aaacaggucucaugccaac

SEQ ID NO: 2011338 - RNA, 19 nt, Artificial Sequence
  Description of Artificial Sequence: Synthetic oligonucleotide
uacucguuggaauagcagu

SEQ ID NO: 2011339 - RNA, 19 nt, Artificial Sequence
  Description of Artificial Sequence: Synthetic oligonucleotide
aaugggagugccacacucc

SEQ ID NO: 2011340 - RNA, 19 nt, Artificial Sequence
  Description of Artificial Sequence: Synthetic oligonucleotide
uuguccaccagcgagcucc

SEQ ID NO: 2011341 - RNA, 19 nt, Artificial Sequence
  Description of Artificial Sequence: Synthetic oligonucleotide
uucaauuaacgugaagcug

SEQ ID NO: 2011342 - RNA, 19 nt, Artificial Sequence
  Description of Artificial Sequence: Synthetic oligonucleotide
cauacagagacucauugca

SEQ ID NO: 2011343 - RNA, 19 nt, Artificial Sequence
  Description of Artificial Sequence: Synthetic oligonucleotide
gaaagagauguacuucgug

SEQ ID NO: 2011344 - RNA, 19 nt, Artificial Sequence
  Description of Artificial Sequence: Synthetic oligonucleotide
gucugcacagcccugcucg

SEQ ID NO: 2011345 - RNA, 19 nt, Artificial Sequence
  Description of Artificial Sequence: Synthetic oligonucleotide
uuaaagcagucguugugcc

SEQ ID NO: 2011346 - RNA, 19 nt, Artificial Sequence
  Description of Artificial Sequence: Synthetic oligonucleotide
guuaaagcagucguugugc

SEQ ID NO: 2011347 - RNA, 19 nt, Artificial Sequence
  Description of Artificial Sequence: Synthetic oligonucleotide
aaguucugguccuccuugg

SEQ ID NO: 2011348 - RNA, 19 nt, Artificial Sequence
  Description of Artificial Sequence: Synthetic oligonucleotide
agucaaagcguucagucau

SEQ ID NO: 2011349 - RNA, 19 nt, Artificial Sequence
  Description of Artificial Sequence: Synthetic oligonucleotide
aucucuacgucacaaaguu

SEQ ID NO: 2011350 - RNA, 19 nt, Artificial Sequence
  Description of Artificial Sequence: Synthetic oligonucleotide
acauguguuggcguagagc

SEQ ID NO: 2011351 - RNA, 19 nt, Artificial Sequence
  Description of Artificial Sequence: Synthetic oligonucleotide
agggaaacucaucccuugc

SEQ ID NO: 2011352 - RNA, 19 nt, Artificial Sequence
  Description of Artificial Sequence: Synthetic oligonucleotide
uaggacaaguccuugcagu

SEQ ID NO: 2011353 - RNA, 19 nt, Artificial Sequence
  Description of Artificial Sequence: Synthetic oligonucleotide
uuggacgaguacucguugg

SEQ ID NO: 2011354 - RNA, 19 nt, Artificial Sequence
  Description of Artificial Sequence: Synthetic oligonucleotide
uacagagacucauugcagu

SEQ ID NO: 2011355 - RNA, 19 nt, Artificial Sequence
  Description of Artificial Sequence: Synthetic oligonucleotide
acaacucacagaaacaggu

SEQ ID NO: 2011356 - RNA, 19 nt, Artificial Sequence
  Description of Artificial Sequence: Synthetic oligonucleotide
aggacaaguccuugcaguc

SEQ ID NO: 2011357 - RNA, 19 nt, Artificial Sequence
  Description of Artificial Sequence: Synthetic oligonucleotide
ucguuggaauagcagucgg

SEQ ID NO: 2011358 - RNA, 19 nt, Artificial Sequence
  Description of Artificial Sequence: Synthetic oligonucleotide
cuuggcguacaacucacag

SEQ ID NO: 2011359 - RNA, 19 nt, Artificial Sequence
  Description of Artificial Sequence: Synthetic oligonucleotide
guuggcguagagcucuucg

SEQ ID NO: 2011360 - RNA, 19 nt, Artificial Sequence
  Description of Artificial Sequence: Synthetic oligonucleotide
aagaggaaaccucguggug

SEQ ID NO: 2011361 - RNA, 19 nt, Artificial Sequence
  Description of Artificial Sequence: Synthetic oligonucleotide
aggcagugcacacaaagca

SEQ ID NO: 2011362 - RNA, 19 nt, Artificial Sequence
  Description of Artificial Sequence: Synthetic oligonucleotide
uccucgaaagagauguacu

SEQ ID NO: 2011363 - RNA, 19 nt, Artificial Sequence
  Description of Artificial Sequence: Synthetic oligonucleotide
uccuuggcggcaaagggcu

SEQ ID NO: 2011364 - RNA, 19 nt, Artificial Sequence
  Description of Artificial Sequence: Synthetic oligonucleotide
uaacgugaagcugggacag

SEQ ID NO: 2011365 - RNA, 19 nt, Artificial Sequence
  Description of Artificial Sequence: Synthetic oligonucleotide
caauuaacgugaagcuggg

SEQ ID NO: 2011366 - RNA, 19 nt, Artificial Sequence
  Description of Artificial Sequence: Synthetic oligonucleotide
cuugcagucacagccaaug

SEQ ID NO: 2011367 - RNA, 19 nt, Artificial Sequence
  Description of Artificial Sequence: Synthetic oligonucleotide
ucaucccuugcugugaagc

SEQ ID NO: 2011368 - RNA, 19 nt, Artificial Sequence
  Description of Artificial Sequence: Synthetic oligonucleotide
gguaugaagcucuugguuc

SEQ ID NO: 2011369 - RNA, 19 nt, Artificial Sequence
  Description of Artificial Sequence: Synthetic oligonucleotide
ugacguuccucgaaagaga

SEQ ID NO: 2011370 - RNA, 19 nt, Artificial Sequence
  Description of Artificial Sequence: Synthetic oligonucleotide
caucccuggcacuuggacg

SEQ ID NO: 2011371 - RNA, 19 nt, Artificial Sequence
  Description of Artificial Sequence: Synthetic oligonucleotide
gacaccugguuuucaugcg

SEQ ID NO: 2011372 - RNA, 19 nt, Artificial Sequence
  Description of Artificial Sequence: Synthetic oligonucleotide
aaucucuacgucacaaagu

SEQ ID NO: 2011373 - RNA, 19 nt, Artificial Sequence
  Description of Artificial Sequence: Synthetic oligonucleotide
uucuuacaguuaaagcagu

SEQ ID NO: 2011374 - RNA, 19 nt, Artificial Sequence
  Description of Artificial Sequence: Synthetic oligonucleotide
acaccugguuuucaugcgg

SEQ ID NO: 2011375 - RNA, 19 nt, Artificial Sequence
  Description of Artificial Sequence: Synthetic oligonucleotide
cugacguuccucgaaagag

SEQ ID NO: 2011376 - RNA, 19 nt, Artificial Sequence
  Description of Artificial Sequence: Synthetic oligonucleotide
uagcagucggugcacagca

SEQ ID NO: 2011377 - RNA, 19 nt, Artificial Sequence
  Description of Artificial Sequence: Synthetic oligonucleotide
cuugcugugaagcguugcc

SEQ ID NO: 2011378 - RNA, 19 nt, Artificial Sequence
  Description of Artificial Sequence: Synthetic oligonucleotide
auagcagucggugcacagc

SEQ ID NO: 2011379 - RNA, 19 nt, Artificial Sequence
  Description of Artificial Sequence: Synthetic oligonucleotide
ucuuacaguuaaagcaguc

SEQ ID NO: 2011380 - RNA, 19 nt, Artificial Sequence
  Description of Artificial Sequence: Synthetic oligonucleotide
ucuacgucacaaaguugug

SEQ ID NO: 2011381 - RNA, 19 nt, Artificial Sequence
  Description of Artificial Sequence: Synthetic oligonucleotide
agaggaugucaucucucuc

SEQ ID NO: 2011382 - RNA, 19 nt, Artificial Sequence
  Description of Artificial Sequence: Synthetic oligonucleotide
ucggguaccuggcaugaug

SEQ ID NO: 2011383 - RNA, 19 nt, Artificial Sequence
  Description of Artificial Sequence: Synthetic oligonucleotide
uagggaaacucaucccuug

SEQ ID NO: 2011384 - RNA, 19 nt, Artificial Sequence
  Description of Artificial Sequence: Synthetic oligonucleotide
ucucugugaggaagccucg

SEQ ID NO: 2011385 - RNA, 19 nt, Artificial Sequence
  Description of Artificial Sequence: Synthetic oligonucleotide
uuggcguacaacucacaga

SEQ ID NO: 2011386 - RNA, 19 nt, Artificial Sequence
  Description of Artificial Sequence: Synthetic oligonucleotide
ugugaagcguugcccagac

SEQ ID NO: 2011387 - RNA, 19 nt, Artificial Sequence
  Description of Artificial Sequence: Synthetic oligonucleotide
acucguuggaauagcaguc

SEQ ID NO: 2011388 - RNA, 19 nt, Artificial Sequence
  Description of Artificial Sequence: Synthetic oligonucleotide
caucccuugcugugaagcg

SEQ ID NO: 2011389 - RNA, 19 nt, Artificial Sequence
  Description of Artificial Sequence: Synthetic oligonucleotide
caucuuucggguaccuggc

SEQ ID NO: 2011390 - RNA, 19 nt, Artificial Sequence
  Description of Artificial Sequence: Synthetic oligonucleotide
uacaguuaaagcagucguu

SEQ ID NO: 2011391 - RNA, 19 nt, Artificial Sequence
  Description of Artificial Sequence: Synthetic oligonucleotide
cucuacgucacaaaguugu

SEQ ID NO: 2011392 - RNA, 19 nt, Artificial Sequence
  Description of Artificial Sequence: Synthetic oligonucleotide
gaagcagccuucgugccag

SEQ ID NO: 2011393 - RNA, 19 nt, Artificial Sequence
  Description of Artificial Sequence: Synthetic oligonucleotide
gagauguacuucgugcccc

SEQ ID NO: 2011394 - RNA, 19 nt, Artificial Sequence
  Description of Artificial Sequence: Synthetic oligonucleotide
ucucuacgucacaaaguug

SEQ ID NO: 2011395 - RNA, 19 nt, Artificial Sequence
  Description of Artificial Sequence: Synthetic oligonucleotide
cugguuaagaaagaaaaua

SEQ ID NO: 2011396 - RNA, 19 nt, Artificial Sequence
  Description of Artificial Sequence: Synthetic oligonucleotide
uggacgaguacucguugga

SEQ ID NO: 2011397 - RNA, 19 nt, Artificial Sequence
  Description of Artificial Sequence: Synthetic oligonucleotide
acaaaguuguggcuuccga

SEQ ID NO: 2011398 - RNA, 19 nt, Artificial Sequence
  Description of Artificial Sequence: Synthetic oligonucleotide
gcguacaacucacagaaac

SEQ ID NO: 2011399 - RNA, 19 nt, Artificial Sequence
  Description of Artificial Sequence: Synthetic oligonucleotide
uaaagcagucguugugcca

SEQ ID NO: 2011400 - RNA, 19 nt, Artificial Sequence
  Description of Artificial Sequence: Synthetic oligonucleotide
aggugaaacaggucucaug

SEQ ID NO: 2011401 - RNA, 19 nt, Artificial Sequence
  Description of Artificial Sequence: Synthetic oligonucleotide
gacagggagcacuucuuac

SEQ ID NO: 2011402 - RNA, 19 nt, Artificial Sequence
  Description of Artificial Sequence: Synthetic oligonucleotide
cucguuggaauagcagucg

SEQ ID NO: 2011403 - RNA, 19 nt, Artificial Sequence
  Description of Artificial Sequence: Synthetic oligonucleotide
agcacugccugguuaagaa

SEQ ID NO: 2011404 - RNA, 19 nt, Artificial Sequence
  Description of Artificial Sequence: Synthetic oligonucleotide
uuccucgaaagagauguac

SEQ ID NO: 2011405 - RNA, 19 nt, Artificial Sequence
  Description of Artificial Sequence: Synthetic oligonucleotide
uccaccagcgagcucccgc

SEQ ID NO: 2011406 - RNA, 19 nt, Artificial Sequence
  Description of Artificial Sequence: Synthetic oligonucleotide
gagcacuucuuacaguuaa

SEQ ID NO: 2011407 - RNA, 19 nt, Artificial Sequence
  Description of Artificial Sequence: Synthetic oligonucleotide
uggguaugaagcucuuggu

SEQ ID NO: 2011408 - RNA, 19 nt, Artificial Sequence
  Description of Artificial Sequence: Synthetic oligonucleotide
acugacguuccucgaaaga

SEQ ID NO: 2011409 - RNA, 19 nt, Artificial Sequence
  Description of Artificial Sequence: Synthetic oligonucleotide
uuggcguagagcucuucga

SEQ ID NO: 2011410 - RNA, 19 nt, Artificial Sequence
  Description of Artificial Sequence: Synthetic oligonucleotide
cuuucggguaccuggcaug

SEQ ID NO: 2011411 - RNA, 19 nt, Artificial Sequence
  Description of Artificial Sequence: Synthetic oligonucleotide
uucugguccuccuugggua

SEQ ID NO: 2011412 - RNA, 19 nt, Artificial Sequence
  Description of Artificial Sequence: Synthetic oligonucleotide
accggugucucuccacgcg

SEQ ID NO: 2011413 - RNA, 19 nt, Artificial Sequence
  Description of Artificial Sequence: Synthetic oligonucleotide
cucacagaaacaggucagg

SEQ ID NO: 2011414 - RNA, 19 nt, Artificial Sequence
  Description of Artificial Sequence: Synthetic oligonucleotide
acucauugcagugguagca

SEQ ID NO: 2011415 - RNA, 19 nt, Artificial Sequence
  Description of Artificial Sequence: Synthetic oligonucleotide
gauguccuucccacagucg

SEQ ID NO: 2011416 - RNA, 19 nt, Artificial Sequence
  Description of Artificial Sequence: Synthetic oligonucleotide
aagcacuccuugugccagg

SEQ ID NO: 2011417 - RNA, 19 nt, Artificial Sequence
  Description of Artificial Sequence: Synthetic oligonucleotide
cuggugggaaccagaacac

SEQ ID NO: 2011418 - RNA, 19 nt, Artificial Sequence
  Description of Artificial Sequence: Synthetic oligonucleotide
cauugcagugguagcaguc

SEQ ID NO: 2011419 - RNA, 19 nt, Artificial Sequence
  Description of Artificial Sequence: Synthetic oligonucleotide
uggcguagagcucuucgaa

SEQ ID NO: 2011420 - RNA, 19 nt, Artificial Sequence
  Description of Artificial Sequence: Synthetic oligonucleotide
cagccuucgugccagugcc

SEQ ID NO: 2011421 - RNA, 19 nt, Artificial Sequence
  Description of Artificial Sequence: Synthetic oligonucleotide
caugcggucugcacagccc

SEQ ID NO: 2011422 - RNA, 19 nt, Artificial Sequence
  Description of Artificial Sequence: Synthetic oligonucleotide
uucagauguccuucccaca

SEQ ID NO: 2011423 - RNA, 19 nt, Artificial Sequence
  Description of Artificial Sequence: Synthetic oligonucleotide
gccauacagagacucauug

SEQ ID NO: 2011424 - RNA, 19 nt, Artificial Sequence
  Description of Artificial Sequence: Synthetic oligonucleotide
uggcacuuggacgaguacu

SEQ ID NO: 2011425 - RNA, 19 nt, Artificial Sequence
  Description of Artificial Sequence: Synthetic oligonucleotide
cucgaaagagauguacuuc

SEQ ID NO: 2011426 - RNA, 19 nt, Artificial Sequence
  Description of Artificial Sequence: Synthetic oligonucleotide
augggagugccacacuccu

SEQ ID NO: 2011427 - RNA, 19 nt, Artificial Sequence
  Description of Artificial Sequence: Synthetic oligonucleotide
uagcagucaaagcguucag

SEQ ID NO: 2011428 - RNA, 19 nt, Artificial Sequence
  Description of Artificial Sequence: Synthetic oligonucleotide
ggaaccagaacacagcacu

SEQ ID NO: 2011429 - RNA, 19 nt, Artificial Sequence
  Description of Artificial Sequence: Synthetic oligonucleotide
agacagcugcuucuugcag

SEQ ID NO: 2011430 - RNA, 19 nt, Artificial Sequence
  Description of Artificial Sequence: Synthetic oligonucleotide
acgaguacucguuggaaua

SEQ ID NO: 2011431 - RNA, 19 nt, Artificial Sequence
  Description of Artificial Sequence: Synthetic oligonucleotide
guuguggcuuccgagcugc

SEQ ID NO: 2011432 - RNA, 19 nt, Artificial Sequence
  Description of Artificial Sequence: Synthetic oligonucleotide
cucauugcagugguagcag

SEQ ID NO: 2011433 - RNA, 19 nt, Artificial Sequence
  Description of Artificial Sequence: Synthetic oligonucleotide
gguuggugcacccagcaca

SEQ ID NO: 2011434 - RNA, 19 nt, Artificial Sequence
  Description of Artificial Sequence: Synthetic oligonucleotide
cuuggacgaguacucguug

SEQ ID NO: 2011435 - RNA, 19 nt, Artificial Sequence
  Description of Artificial Sequence: Synthetic oligonucleotide
agcgcuggcaggugaaaca

SEQ ID NO: 2011436 - RNA, 19 nt, Artificial Sequence
  Description of Artificial Sequence: Synthetic oligonucleotide
cuucuugcaggcagugcac

SEQ ID NO: 2011437 - RNA, 19 nt, Artificial Sequence
  Description of Artificial Sequence: Synthetic oligonucleotide
guacucguuggaauagcag

SEQ ID NO: 2011438 - RNA, 19 nt, Artificial Sequence
  Description of Artificial Sequence: Synthetic oligonucleotide
ucaaagcguucagucaugu

SEQ ID NO: 2011439 - RNA, 19 nt, Artificial Sequence
  Description of Artificial Sequence: Synthetic oligonucleotide
ucugccgggucuccgcccc

SEQ ID NO: 2011440 - RNA, 19 nt, Artificial Sequence
  Description of Artificial Sequence: Synthetic oligonucleotide
ugccgguccuuguaggaca

SEQ ID NO: 2011441 - RNA, 19 nt, Artificial Sequence
  Description of Artificial Sequence: Synthetic oligonucleotide
agcguucagucauguugac

SEQ ID NO: 2011442 - RNA, 19 nt, Artificial Sequence
  Description of Artificial Sequence: Synthetic oligonucleotide
gucguugugccacugacgu

SEQ ID NO: 2011443 - RNA, 19 nt, Artificial Sequence
  Description of Artificial Sequence: Synthetic oligonucleotide
guagagcucuucgaagcag

SEQ ID NO: 2011444 - RNA, 19 nt, Artificial Sequence
  Description of Artificial Sequence: Synthetic oligonucleotide
agcgagcucccgcaccugg

SEQ ID NO: 2011445 - RNA, 19 nt, Artificial Sequence
  Description of Artificial Sequence: Synthetic oligonucleotide
uuucggguaccuggcauga

SEQ ID NO: 2011446 - RNA, 19 nt, Artificial Sequence
  Description of Artificial Sequence: Synthetic oligonucleotide
aaugggcugcuggcagcgc

SEQ ID NO: 2011447 - RNA, 19 nt, Artificial Sequence
  Description of Artificial Sequence: Synthetic oligonucleotide
gcguagagcucuucgaagc

SEQ ID NO: 2011448 - RNA, 19 nt, Artificial Sequence
  Description of Artificial Sequence: Synthetic oligonucleotide
agucguugugccacugacg

SEQ ID NO: 2011449 - RNA, 19 nt, Artificial Sequence
  Description of Artificial Sequence: Synthetic oligonucleotide
cagucguugugccacugac

SEQ ID NO: 2011450 - RNA, 19 nt, Artificial Sequence
  Description of Artificial Sequence: Synthetic oligonucleotide
aauuaacgugaagcuggga

SEQ ID NO: 2011451 - RNA, 19 nt, Artificial Sequence
  Description of Artificial Sequence: Synthetic oligonucleotide
uccucacauguguuggcgu

SEQ ID NO: 2011452 - RNA, 19 nt, Artificial Sequence
  Description of Artificial Sequence: Synthetic oligonucleotide
uucgugccagugccggucc

SEQ ID NO: 2011453 - RNA, 19 nt, Artificial Sequence
  Description of Artificial Sequence: Synthetic oligonucleotide
gcacacaaagcacuccuug

SEQ ID NO: 2011454 - RNA, 19 nt, Artificial Sequence
  Description of Artificial Sequence: Synthetic oligonucleotide
aguacucguuggaauagca

SEQ ID NO: 2011455 - RNA, 19 nt, Artificial Sequence
  Description of Artificial Sequence: Synthetic oligonucleotide
ugcagugguagcagucaaa

SEQ ID NO: 2011456 - RNA, 19 nt, Artificial Sequence
  Description of Artificial Sequence: Synthetic oligonucleotide
gcacuucuuacaguuaaag

SEQ ID NO: 2011457 - RNA, 19 nt, Artificial Sequence
  Description of Artificial Sequence: Synthetic oligonucleotide
ucuccacgcgugcuagggc

SEQ ID NO: 2011458 - RNA, 19 nt, Artificial Sequence
  Description of Artificial Sequence: Synthetic oligonucleotide
aguuguggcuuccgagcug

SEQ ID NO: 2011459 - RNA, 19 nt, Artificial Sequence
  Description of Artificial Sequence: Synthetic oligonucleotide
ucuuggcguacaacucaca

SEQ ID NO: 2011460 - RNA, 19 nt, Artificial Sequence
  Description of Artificial Sequence: Synthetic oligonucleotide
gaaacaggucucaugccaa

SEQ ID NO: 2011461 - RNA, 19 nt, Artificial Sequence
  Description of Artificial Sequence: Synthetic oligonucleotide
ccauacagagacucauugc

SEQ ID NO: 2011462 - RNA, 19 nt, Artificial Sequence
  Description of Artificial Sequence: Synthetic oligonucleotide
agugccgguccuuguagga

SEQ ID NO: 2011463 - RNA, 19 nt, Artificial Sequence
  Description of Artificial Sequence: Synthetic oligonucleotide
uugcagugguagcagucaa

SEQ ID NO: 2011464 - RNA, 19 nt, Artificial Sequence
  Description of Artificial Sequence: Synthetic oligonucleotide
cacaaaguuguggcuuccg

SEQ ID NO: 2011465 - RNA, 19 nt, Artificial Sequence
  Description of Artificial Sequence: Synthetic oligonucleotide
augcggucugcacagcccu

SEQ ID NO: 2011466 - RNA, 19 nt, Artificial Sequence
  Description of Artificial Sequence: Synthetic oligonucleotide
ucuucgaagcaggccacac

SEQ ID NO: 2011467 - RNA, 19 nt, Artificial Sequence
  Description of Artificial Sequence: Synthetic oligonucleotide
cccgagaccacugaugggg

SEQ ID NO: 2011468 - RNA, 19 nt, Artificial Sequence
  Description of Artificial Sequence: Synthetic oligonucleotide
acgucacaaaguuguggcu

SEQ ID NO: 2011469 - RNA, 19 nt, Artificial Sequence
  Description of Artificial Sequence: Synthetic oligonucleotide
agggcauacugcuucucau

SEQ ID NO: 2011470 - RNA, 19 nt, Artificial Sequence
  Description of Artificial Sequence: Synthetic oligonucleotide
cacugacguuccucgaaag

SEQ ID NO: 2011471 - RNA, 19 nt, Artificial Sequence
  Description of Artificial Sequence: Synthetic oligonucleotide
ggcguagagcucuucgaag

SEQ ID NO: 2011472 - RNA, 19 nt, Artificial Sequence
  Description of Artificial Sequence: Synthetic oligonucleotide
auguugacaccugguuuuc

SEQ ID NO: 2011473 - RNA, 19 nt, Artificial Sequence
  Description of Artificial Sequence: Synthetic oligonucleotide
agaccacugaugggguugg

SEQ ID NO: 2011474 - RNA, 19 nt, Artificial Sequence
  Description of Artificial Sequence: Synthetic oligonucleotide
uccacgcgugcuagggcag

SEQ ID NO: 2011475 - RNA, 19 nt, Artificial Sequence
  Description of Artificial Sequence: Synthetic oligonucleotide
cuugccauacagagacuca

SEQ ID NO: 2011476 - RNA, 19 nt, Artificial Sequence
  Description of Artificial Sequence: Synthetic oligonucleotide
ucacaaaguuguggcuucc

SEQ ID NO: 2011477 - RNA, 19 nt, Artificial Sequence
  Description of Artificial Sequence: Synthetic oligonucleotide
gccugguuaagaaagaaaa

SEQ ID NO: 2011478 - RNA, 19 nt, Artificial Sequence
  Description of Artificial Sequence: Synthetic oligonucleotide
uucuugcaggcagugcaca

SEQ ID NO: 2011479 - RNA, 19 nt, Artificial Sequence
  Description of Artificial Sequence: Synthetic oligonucleotide
ucccuugcugugaagcguu

SEQ ID NO: 2011480 - RNA, 19 nt, Artificial Sequence
  Description of Artificial Sequence: Synthetic oligonucleotide
caagaggaaaccucguggu

SEQ ID NO: 2011481 - RNA, 19 nt, Artificial Sequence
  Description of Artificial Sequence: Synthetic oligonucleotide
caaagcacuccuugugcca

SEQ ID NO: 2011482 - RNA, 19 nt, Artificial Sequence
  Description of Artificial Sequence: Synthetic oligonucleotide
ucuugcaucccuggcacuu

SEQ ID NO: 2011483 - RNA, 19 nt, Artificial Sequence
  Description of Artificial Sequence: Synthetic oligonucleotide
cagccaaugggagugccac

SEQ ID NO: 2011484 - RNA, 19 nt, Artificial Sequence
  Description of Artificial Sequence: Synthetic oligonucleotide
uaugaagcucuugguucca

SEQ ID NO: 2011485 - RNA, 19 nt, Artificial Sequence
  Description of Artificial Sequence: Synthetic oligonucleotide
ugguagcagucaaagcguu

SEQ ID NO: 2011486 - RNA, 19 nt, Artificial Sequence
  Description of Artificial Sequence: Synthetic oligonucleotide
cucacauguguuggcguag

SEQ ID NO: 2011487 - RNA, 19 nt, Artificial Sequence
  Description of Artificial Sequence: Synthetic oligonucleotide
ucacauguguuggcguaga

SEQ ID NO: 2011488 - RNA, 19 nt, Artificial Sequence
  Description of Artificial Sequence: Synthetic oligonucleotide
cagugcacacaaagcacuc

SEQ ID NO: 2011489 - RNA, 19 nt, Artificial Sequence
  Description of Artificial Sequence: Synthetic oligonucleotide
ugcacacaaagcacuccuu

SEQ ID NO: 2011490 - RNA, 19 nt, Artificial Sequence
  Description of Artificial Sequence: Synthetic oligonucleotide
cauguugacaccugguuuu

SEQ ID NO: 2011491 - RNA, 19 nt, Artificial Sequence
  Description of Artificial Sequence: Synthetic oligonucleotide
ugguuuucaugcggucugc

SEQ ID NO: 2011492 - RNA, 19 nt, Artificial Sequence
  Description of Artificial Sequence: Synthetic oligonucleotide
agucauguugacaccuggu

SEQ ID NO: 2011493 - RNA, 19 nt, Artificial Sequence
  Description of Artificial Sequence: Synthetic oligonucleotide
gacgaguacucguuggaau

SEQ ID NO: 2011494 - RNA, 19 nt, Artificial Sequence
  Description of Artificial Sequence: Synthetic oligonucleotide
gaggaagccucgccccacc

SEQ ID NO: 2011495 - RNA, 19 nt, Artificial Sequence
  Description of Artificial Sequence: Synthetic oligonucleotide
gauggucuucuugcauccc

SEQ ID NO: 2011496 - RNA, 19 nt, Artificial Sequence
  Description of Artificial Sequence: Synthetic oligonucleotide
aagcagucguugugccacu

SEQ ID NO: 2011497 - RNA, 19 nt, Artificial Sequence
  Description of Artificial Sequence: Synthetic oligonucleotide
ucucucugugaggaagccu

SEQ ID NO: 2011498 - RNA, 19 nt, Artificial Sequence
  Description of Artificial Sequence: Synthetic oligonucleotide
uguugacaccugguuuuca

SEQ ID NO: 2011499 - RNA, 19 nt, Artificial Sequence
  Description of Artificial Sequence: Synthetic oligonucleotide
agaaacaggucaggcagua

SEQ ID NO: 2011500 - RNA, 19 nt, Artificial Sequence
  Description of Artificial Sequence: Synthetic oligonucleotide
ggcggcaaagggcuugucc

SEQ ID NO: 2011501 - RNA, 19 nt, Artificial Sequence
  Description of Artificial Sequence: Synthetic oligonucleotide
uucucauagcagggcacac

SEQ ID NO: 2011502 - RNA, 19 nt, Artificial Sequence
  Description of Artificial Sequence: Synthetic oligonucleotide
aucuuucggguaccuggca

SEQ ID NO: 2011503 - RNA, 19 nt, Artificial Sequence
  Description of Artificial Sequence: Synthetic oligonucleotide
cuccacgcgugcuagggca

SEQ ID NO: 2011504 - RNA, 19 nt, Artificial Sequence
  Description of Artificial Sequence: Synthetic oligonucleotide
agcacacuucuuggcguac

SEQ ID NO: 2011505 - RNA, 19 nt, Artificial Sequence
  Description of Artificial Sequence: Synthetic oligonucleotide
gggacagcaagaggaaacc

SEQ ID NO: 2011506 - RNA, 19 nt, Artificial Sequence
  Description of Artificial Sequence: Synthetic oligonucleotide
cuuggcggcaaagggcuug

SEQ ID NO: 2011507 - RNA, 19 nt, Artificial Sequence
  Description of Artificial Sequence: Synthetic oligonucleotide
caggguacgcuggccaccg

SEQ ID NO: 2011508 - RNA, 19 nt, Artificial Sequence
  Description of Artificial Sequence: Synthetic oligonucleotide
cacauguguuggcguagag

SEQ ID NO: 2011509 - RNA, 19 nt, Artificial Sequence
  Description of Artificial Sequence: Synthetic oligonucleotide
cugccuucagauguccuuc

SEQ ID NO: 2011510 - RNA, 19 nt, Artificial Sequence
  Description of Artificial Sequence: Synthetic oligonucleotide
agggagcacuucuuacagu

SEQ ID NO: 2011511 - RNA, 19 nt, Artificial Sequence
  Description of Artificial Sequence: Synthetic oligonucleotide
uguccaccagcgagcuccc

SEQ ID NO: 2011512 - RNA, 19 nt, Artificial Sequence
  Description of Artificial Sequence: Synthetic oligonucleotide
uggugggaaccagaacaca

SEQ ID NO: 2011513 - RNA, 19 nt, Artificial Sequence
  Description of Artificial Sequence: Synthetic oligonucleotide
cacagcacugccugguuaa

SEQ ID NO: 2011514 - RNA, 19 nt, Artificial Sequence
  Description of Artificial Sequence: Synthetic oligonucleotide
gucaaagcguucagucaug

SEQ ID NO: 2011515 - RNA, 19 nt, Artificial Sequence
  Description of Artificial Sequence: Synthetic oligonucleotide
guacuucuugccauacaga

SEQ ID NO: 2011516 - RNA, 19 nt, Artificial Sequence
  Description of Artificial Sequence: Synthetic oligonucleotide
aucccuugcugugaagcgu

SEQ ID NO: 2011517 - RNA, 19 nt, Artificial Sequence
  Description of Artificial Sequence: Synthetic oligonucleotide
gacaccuccuguggugaug

SEQ ID NO: 2011518 - RNA, 19 nt, Artificial Sequence
  Description of Artificial Sequence: Synthetic oligonucleotide
gucucuccacgcgugcuag

SEQ ID NO: 2011519 - RNA, 19 nt, Artificial Sequence
  Description of Artificial Sequence: Synthetic oligonucleotide
aaccucgugguggcuggug

SEQ ID NO: 2011520 - RNA, 19 nt, Artificial Sequence
  Description of Artificial Sequence: Synthetic oligonucleotide
ggaaaccucgugguggcug

SEQ ID NO: 2011521 - RNA, 19 nt, Artificial Sequence
  Description of Artificial Sequence: Synthetic oligonucleotide
cuucgugccagugccgguc

SEQ ID NO: 2011522 - RNA, 19 nt, Artificial Sequence
  Description of Artificial Sequence: Synthetic oligonucleotide
ucggugcacagcagcugcu

SEQ ID NO: 2011523 - RNA, 19 nt, Artificial Sequence
  Description of Artificial Sequence: Synthetic oligonucleotide
ucggggcagaggaugucau

SEQ ID NO: 2011524 - RNA, 19 nt, Artificial Sequence
  Description of Artificial Sequence: Synthetic oligonucleotide
gcguugcccagacagcugc

SEQ ID NO: 2011525 - RNA, 19 nt, Artificial Sequence
  Description of Artificial Sequence: Synthetic oligonucleotide
cacugaugggguuggugca

SEQ ID NO: 2011526 - RNA, 19 nt, Artificial Sequence
  Description of Artificial Sequence: Synthetic oligonucleotide
ugcucccgguaagugacac

SEQ ID NO: 2011527 - RNA, 19 nt, Artificial Sequence
  Description of Artificial Sequence: Synthetic oligonucleotide
cuccuugugccagggcugc

SEQ ID NO: 2011528 - RNA, 19 nt, Artificial Sequence
  Description of Artificial Sequence: Synthetic oligonucleotide
aggucucaugccaacugcu

SEQ ID NO: 2011529 - RNA, 19 nt, Artificial Sequence
  Description of Artificial Sequence: Synthetic oligonucleotide
gucauguugacaccugguu

SEQ ID NO: 2011530 - RNA, 19 nt, Artificial Sequence
  Description of Artificial Sequence: Synthetic oligonucleotide
agauuucaauuaacgugaa

SEQ ID NO: 2011531 - RNA, 19 nt, Artificial Sequence
  Description of Artificial Sequence: Synthetic oligonucleotide
cucaucccuugcugugaag

SEQ ID NO: 2011532 - RNA, 19 nt, Artificial Sequence
  Description of Artificial Sequence: Synthetic oligonucleotide
caccggugucucuccacgc

SEQ ID NO: 2011533 - RNA, 19 nt, Artificial Sequence
  Description of Artificial Sequence: Synthetic oligonucleotide
ugguccuccuuggguauga

SEQ ID NO: 2011534 - RNA, 19 nt, Artificial Sequence
  Description of Artificial Sequence: Synthetic oligonucleotide
ugggagugccacacuccuc

SEQ ID NO: 2011535 - RNA, 19 nt, Artificial Sequence
  Description of Artificial Sequence: Synthetic oligonucleotide
gcugcucccgguaagugac

SEQ ID NO: 2011536 - RNA, 19 nt, Artificial Sequence
  Description of Artificial Sequence: Synthetic oligonucleotide
ggucaggguacgcuggcca

SEQ ID NO: 2011537 - RNA, 19 nt, Artificial Sequence
  Description of Artificial Sequence: Synthetic oligonucleotide
ggcacuuggacgaguacuc

SEQ ID NO: 2011538 - RNA, 19 nt, Artificial Sequence
  Description of Artificial Sequence: Synthetic oligonucleotide
cguugugccacugacguuc

SEQ ID NO: 2011539 - RNA, 19 nt, Artificial Sequence
  Description of Artificial Sequence: Synthetic oligonucleotide
agccaaugggagugccaca

SEQ ID NO: 2011540 - RNA, 19 nt, Artificial Sequence
  Description of Artificial Sequence: Synthetic oligonucleotide
ggugucucuccacgcgugc

SEQ ID NO: 2011541 - RNA, 19 nt, Artificial Sequence
  Description of Artificial Sequence: Synthetic oligonucleotide
cuggcacuuggacgaguac

SEQ ID NO: 2011542 - RNA, 19 nt, Artificial Sequence
  Description of Artificial Sequence: Synthetic oligonucleotide
gccaaugggagugccacac

SEQ ID NO: 2011543 - RNA, 19 nt, Artificial Sequence
  Description of Artificial Sequence: Synthetic oligonucleotide
guugugccacugacguucc

SEQ ID NO: 2011544 - RNA, 19 nt, Artificial Sequence
  Description of Artificial Sequence: Synthetic oligonucleotide
aggucaggcaguagggaaa

SEQ ID NO: 2011545 - RNA, 19 nt, Artificial Sequence
  Description of Artificial Sequence: Synthetic oligonucleotide
gugguagcagucaaagcgu

SEQ ID NO: 2011546 - RNA, 19 nt, Artificial Sequence
  Description of Artificial Sequence: Synthetic oligonucleotide
acagcacugccugguuaag

SEQ ID NO: 2011547 - RNA, 19 nt, Artificial Sequence
  Description of Artificial Sequence: Synthetic oligonucleotide
gacguuccucgaaagagau

SEQ ID NO: 2011548 - RNA, 19 nt, Artificial Sequence
  Description of Artificial Sequence: Synthetic oligonucleotide
cagggcacacagaaguucu

SEQ ID NO: 2011549 - RNA, 19 nt, Artificial Sequence
  Description of Artificial Sequence: Synthetic oligonucleotide
uggcuuccgagcugccuuc

SEQ ID NO: 2011550 - RNA, 19 nt, Artificial Sequence
  Description of Artificial Sequence: Synthetic oligonucleotide
caguuaaagcagucguugu

SEQ ID NO: 2011551 - RNA, 19 nt, Artificial Sequence
  Description of Artificial Sequence: Synthetic oligonucleotide
gugacaccuccugugguga

SEQ ID NO: 2011552 - RNA, 19 nt, Artificial Sequence
  Description of Artificial Sequence: Synthetic oligonucleotide
gcaucccuggcacuuggac

SEQ ID NO: 2011553 - RNA, 19 nt, Artificial Sequence
  Description of Artificial Sequence: Synthetic oligonucleotide
ccaccggugucucuccacg

SEQ ID NO: 2011554 - RNA, 19 nt, Artificial Sequence
  Description of Artificial Sequence: Synthetic oligonucleotide
agucggggcagaggauguc

SEQ ID NO: 2011555 - RNA, 19 nt, Artificial Sequence
  Description of Artificial Sequence: Synthetic oligonucleotide
gcacuuggacgaguacucg

SEQ ID NO: 2011556 - RNA, 19 nt, Artificial Sequence
  Description of Artificial Sequence: Synthetic oligonucleotide
uuggcggcaaagggcuugu

SEQ ID NO: 2011557 - RNA, 19 nt, Artificial Sequence
  Description of Artificial Sequence: Synthetic oligonucleotide
gggagcacuucuuacaguu

SEQ ID NO: 2011558 - RNA, 19 nt, Artificial Sequence
  Description of Artificial Sequence: Synthetic oligonucleotide
gguccuuguaggacaaguc

SEQ ID NO: 2011559 - RNA, 19 nt, Artificial Sequence
  Description of Artificial Sequence: Synthetic oligonucleotide
ggucaggcaguagggaaac

SEQ ID NO: 2011560 - RNA, 19 nt, Artificial Sequence
  Description of Artificial Sequence: Synthetic oligonucleotide
ugacaccuccuguggugau

SEQ ID NO: 2011561 - RNA, 19 nt, Artificial Sequence
  Description of Artificial Sequence: Synthetic oligonucleotide
ugccaacugcugcccuugu

SEQ ID NO: 2011562 - RNA, 19 nt, Artificial Sequence
  Description of Artificial Sequence: Synthetic oligonucleotide
acagccaaugggagugcca

SEQ ID NO: 2011563 - RNA, 19 nt, Artificial Sequence
  Description of Artificial Sequence: Synthetic oligonucleotide
gccuucgugccagugccgg

SEQ ID NO: 2011564 - RNA, 19 nt, Artificial Sequence
  Description of Artificial Sequence: Synthetic oligonucleotide
gguacgcuggccaccggug

SEQ ID NO: 2011565 - RNA, 19 nt, Artificial Sequence
  Description of Artificial Sequence: Synthetic oligonucleotide
ccagugccgguccuuguag

SEQ ID NO: 2011566 - RNA, 19 nt, Artificial Sequence
  Description of Artificial Sequence: Synthetic oligonucleotide
ugcaggcagugcacacaaa

SEQ ID NO: 2011567 - RNA, 19 nt, Artificial Sequence
  Description of Artificial Sequence: Synthetic oligonucleotide
aaaccucgugguggcuggu

SEQ ID NO: 2011568 - RNA, 19 nt, Artificial Sequence
  Description of Artificial Sequence: Synthetic oligonucleotide
gcgcuggcaggugaaacag

SEQ ID NO: 2011569 - RNA, 19 nt, Artificial Sequence
  Description of Artificial Sequence: Synthetic oligonucleotide
gggguuggugcacccagca

SEQ ID NO: 2011570 - RNA, 19 nt, Artificial Sequence
  Description of Artificial Sequence: Synthetic oligonucleotide
cacuuggacgaguacucgu

SEQ ID NO: 2011571 - RNA, 19 nt, Artificial Sequence
  Description of Artificial Sequence: Synthetic oligonucleotide
uugugccacugacguuccu

SEQ ID NO: 2011572 - RNA, 19 nt, Artificial Sequence
  Description of Artificial Sequence: Synthetic oligonucleotide
ggcaguagggaaacucauc

SEQ ID NO: 2011573 - RNA, 19 nt, Artificial Sequence
  Description of Artificial Sequence: Synthetic oligonucleotide
agcagucguugugccacug

SEQ ID NO: 2011574 - RNA, 19 nt, Artificial Sequence
  Description of Artificial Sequence: Synthetic oligonucleotide
agggcacacagaaguucug

SEQ ID NO: 2011575 - RNA, 19 nt, Artificial Sequence
  Description of Artificial Sequence: Synthetic oligonucleotide
uaccuggcaugauggucuu

SEQ ID NO: 2011576 - RNA, 19 nt, Artificial Sequence
  Description of Artificial Sequence: Synthetic oligonucleotide
ugccagugccgguccuugu

SEQ ID NO: 2011577 - RNA, 19 nt, Artificial Sequence
  Description of Artificial Sequence: Synthetic oligonucleotide
ccucgugguggcugguggg

SEQ ID NO: 2011578 - RNA, 19 nt, Artificial Sequence
  Description of Artificial Sequence: Synthetic oligonucleotide
agcguugcccagacagcug

SEQ ID NO: 2011579 - RNA, 19 nt, Artificial Sequence
  Description of Artificial Sequence: Synthetic oligonucleotide
ucguugugccacugacguu

SEQ ID NO: 2011580 - RNA, 19 nt, Artificial Sequence
  Description of Artificial Sequence: Synthetic oligonucleotide
ucgugguggcuggugggaa

SEQ ID NO: 2011581 - RNA, 19 nt, Artificial Sequence
  Description of Artificial Sequence: Synthetic oligonucleotide
aggguacgcuggccaccgg

SEQ ID NO: 2011582 - RNA, 19 nt, Artificial Sequence
  Description of Artificial Sequence: Synthetic oligonucleotide
cguuccucgaaagagaugu

SEQ ID NO: 2011583 - RNA, 19 nt, Artificial Sequence
  Description of Artificial Sequence: Synthetic oligonucleotide
ccaaaucucuacgucacaa

SEQ ID NO: 2011584 - RNA, 19 nt, Artificial Sequence
  Description of Artificial Sequence: Synthetic oligonucleotide
ggguaugaagcucuugguu

SEQ ID NO: 2011585 - RNA, 19 nt, Artificial Sequence
  Description of Artificial Sequence: Synthetic oligonucleotide
augaagcucuugguuccaa

SEQ ID NO: 2011586 - RNA, 19 nt, Artificial Sequence
  Description of Artificial Sequence: Synthetic oligonucleotide
ggcagaggaugucaucucu

SEQ ID NO: 2011587 - RNA, 19 nt, Artificial Sequence
  Description of Artificial Sequence: Synthetic oligonucleotide
ugcucgggucugccggguc

SEQ ID NO: 2011588 - RNA, 19 nt, Artificial Sequence
  Description of Artificial Sequence: Synthetic oligonucleotide
cucgccccaccagggacag

SEQ ID NO: 2011589 - RNA, 19 nt, Artificial Sequence
  Description of Artificial Sequence: Synthetic oligonucleotide
cgaguacucguuggaauag

SEQ ID NO: 2011590 - RNA, 19 nt, Artificial Sequence
  Description of Artificial Sequence: Synthetic oligonucleotide
agccucgccccaccaggga

SEQ ID NO: 2011591 - RNA, 19 nt, Artificial Sequence
  Description of Artificial Sequence: Synthetic oligonucleotide
cugugaagcguugcccaga

SEQ ID NO: 2011592 - RNA, 19 nt, Artificial Sequence
  Description of Artificial Sequence: Synthetic oligonucleotide
gguagcagucaaagcguuc

SEQ ID NO: 2011593 - RNA, 19 nt, Artificial Sequence
  Description of Artificial Sequence: Synthetic oligonucleotide
ucgugccagugccgguccu

SEQ ID NO: 2011594 - RNA, 19 nt, Artificial Sequence
  Description of Artificial Sequence: Synthetic oligonucleotide
agccuucgugccagugccg

SEQ ID NO: 2011595 - RNA, 19 nt, Artificial Sequence
  Description of Artificial Sequence: Synthetic oligonucleotide
ggugcacccagcacacuuc

SEQ ID NO: 2011596 - RNA, 19 nt, Artificial Sequence
  Description of Artificial Sequence: Synthetic oligonucleotide
cgccccaccagggacaggg

SEQ ID NO: 2011597 - RNA, 19 nt, Artificial Sequence
  Description of Artificial Sequence: Synthetic oligonucleotide
cuuguccaccagcgagcuc

SEQ ID NO: 2011598 - RNA, 19 nt, Artificial Sequence
  Description of Artificial Sequence: Synthetic oligonucleotide
ggacagggagcacuucuua

SEQ ID NO: 2011599 - RNA, 19 nt, Artificial Sequence
  Description of Artificial Sequence: Synthetic oligonucleotide
ggguuggugcacccagcac

SEQ ID NO: 2011600 - RNA, 19 nt, Artificial Sequence
  Description of Artificial Sequence: Synthetic oligonucleotide
gccacugacguuccucgaa

SEQ ID NO: 2011601 - RNA, 19 nt, Artificial Sequence
  Description of Artificial Sequence: Synthetic oligonucleotide
ccuugcugugaagcguugc

SEQ ID NO: 2011602 - RNA, 19 nt, Artificial Sequence
  Description of Artificial Sequence: Synthetic oligonucleotide
cucgugguggcugguggga

SEQ ID NO: 2011603 - RNA, 19 nt, Artificial Sequence
  Description of Artificial Sequence: Synthetic oligonucleotide
gguuuucaugcggucugca

SEQ ID NO: 2011604 - RNA, 19 nt, Artificial Sequence
  Description of Artificial Sequence: Synthetic oligonucleotide
guagggaaacucaucccuu

SEQ ID NO: 2011605 - RNA, 19 nt, Artificial Sequence
  Description of Artificial Sequence: Synthetic oligonucleotide
cugguccuccuuggguaug

SEQ ID NO: 2011606 - RNA, 19 nt, Artificial Sequence
  Description of Artificial Sequence: Synthetic oligonucleotide
gcucccgguaagugacacc

SEQ ID NO: 2011607 - RNA, 19 nt, Artificial Sequence
  Description of Artificial Sequence: Synthetic oligonucleotide
gggucuccgccccacgguc

SEQ ID NO: 2011608 - RNA, 19 nt, Artificial Sequence
  Description of Artificial Sequence: Synthetic oligonucleotide
guacgcuggccaccggugu

SEQ ID NO: 2011609 - RNA, 19 nt, Artificial Sequence
  Description of Artificial Sequence: Synthetic oligonucleotide
aggaaaccucgugguggcu

SEQ ID NO: 2011610 - RNA, 19 nt, Artificial Sequence
  Description of Artificial Sequence: Synthetic oligonucleotide
ccgagcugccuucagaugu

SEQ ID NO: 2011611 - RNA, 19 nt, Artificial Sequence
  Description of Artificial Sequence: Synthetic oligonucleotide
cagcacugccugguuaaga

SEQ ID NO: 2011612 - RNA, 19 nt, Artificial Sequence
  Description of Artificial Sequence: Synthetic oligonucleotide
gugaagcguugcccagaca

SEQ ID NO: 2011613 - RNA, 19 nt, Artificial Sequence
  Description of Artificial Sequence: Synthetic oligonucleotide
gcagucguugugccacuga

SEQ ID NO: 2011614 - RNA, 19 nt, Artificial Sequence
  Description of Artificial Sequence: Synthetic oligonucleotide
caccagcgagcucccgcac

SEQ ID NO: 2011615 - RNA, 19 nt, Artificial Sequence
  Description of Artificial Sequence: Synthetic oligonucleotide
ggacgaguacucguuggaa

SEQ ID NO: 2011616 - RNA, 19 nt, Artificial Sequence
  Description of Artificial Sequence: Synthetic oligonucleotide
gccucgccccaccagggac

SEQ ID NO: 2011617 - RNA, 19 nt, Artificial Sequence
  Description of Artificial Sequence: Synthetic oligonucleotide
gagacucauugcaguggua

SEQ ID NO: 2011618 - RNA, 19 nt, Artificial Sequence
  Description of Artificial Sequence: Synthetic oligonucleotide
cucuucgaagcaggccaca

SEQ ID NO: 2011619 - RNA, 19 nt, Artificial Sequence
  Description of Artificial Sequence: Synthetic oligonucleotide
acgcgugcuagggcagcug

SEQ ID NO: 2011620 - RNA, 19 nt, Artificial Sequence
  Description of Artificial Sequence: Synthetic oligonucleotide
cagcaagaggaaaccucgu

SEQ ID NO: 2011621 - RNA, 19 nt, Artificial Sequence
  Description of Artificial Sequence: Synthetic oligonucleotide
caacugcugcccuuguauu

SEQ ID NO: 2011622 - RNA, 19 nt, Artificial Sequence
  Description of Artificial Sequence: Synthetic oligonucleotide
uccuugugccagggcugcu

SEQ ID NO: 2011623 - RNA, 19 nt, Artificial Sequence
  Description of Artificial Sequence: Synthetic oligonucleotide
ccgggucuccgccccacgg

SEQ ID NO: 2011624 - RNA, 19 nt, Artificial Sequence
  Description of Artificial Sequence: Synthetic oligonucleotide
gcucuucgaagcaggccac

SEQ ID NO: 2011625 - RNA, 19 nt, Artificial Sequence
  Description of Artificial Sequence: Synthetic oligonucleotide
ccccgagaccacugauggg

SEQ ID NO: 2011626 - RNA, 19 nt, Artificial Sequence
  Description of Artificial Sequence: Synthetic oligonucleotide
ccucacauguguuggcgua

SEQ ID NO: 2011627 - RNA, 19 nt, Artificial Sequence
  Description of Artificial Sequence: Synthetic oligonucleotide
cguagagcucuucgaagca

SEQ ID NO: 2011628 - RNA, 19 nt, Artificial Sequence
  Description of Artificial Sequence: Synthetic oligonucleotide
gccaccggugucucuccac

SEQ ID NO: 2011629 - RNA, 19 nt, Artificial Sequence
  Description of Artificial Sequence: Synthetic oligonucleotide
ccucgaaagagauguacuu

SEQ ID NO: 2011630 - RNA, 19 nt, Artificial Sequence
  Description of Artificial Sequence: Synthetic oligonucleotide
gcguucagucauguugaca

SEQ ID NO: 2011631 - RNA, 19 nt, Artificial Sequence
  Description of Artificial Sequence: Synthetic oligonucleotide
caugccaacugcugcccuu

SEQ ID NO: 2011632 - RNA, 19 nt, Artificial Sequence
  Description of Artificial Sequence: Synthetic oligonucleotide
ccaccagcgagcucccgca

SEQ ID NO: 2011633 - RNA, 19 nt, Artificial Sequence
  Description of Artificial Sequence: Synthetic oligonucleotide
cagucggggcagaggaugu

SEQ ID NO: 2011634 - RNA, 19 nt, Artificial Sequence
  Description of Artificial Sequence: Synthetic oligonucleotide
cugcucccgguaagugaca

SEQ ID NO: 2011635 - RNA, 19 nt, Artificial Sequence
  Description of Artificial Sequence: Synthetic oligonucleotide
gcccugcucgggucugccg

SEQ ID NO: 2011636 - RNA, 19 nt, Artificial Sequence
  Description of Artificial Sequence: Synthetic oligonucleotide
ggagcaguggaagcagccu

SEQ ID NO: 2011637 - RNA, 19 nt, Artificial Sequence
  Description of Artificial Sequence: Synthetic oligonucleotide
ccacugacguuccucgaaa

SEQ ID NO: 2011638 - RNA, 19 nt, Artificial Sequence
  Description of Artificial Sequence: Synthetic oligonucleotide
ccuggcaugauggucuucu

SEQ ID NO: 2011639 - RNA, 19 nt, Artificial Sequence
  Description of Artificial Sequence: Synthetic oligonucleotide
cgccccacggucaggguac

SEQ ID NO: 2011640 - RNA, 19 nt, Artificial Sequence
  Description of Artificial Sequence: Synthetic oligonucleotide
guuccucgaaagagaugua

SEQ ID NO: 2011641 - RNA, 19 nt, Artificial Sequence
  Description of Artificial Sequence: Synthetic oligonucleotide
gcacuccuugugccagggc

SEQ ID NO: 2011642 - RNA, 19 nt, Artificial Sequence
  Description of Artificial Sequence: Synthetic oligonucleotide
cgagcugccuucagauguc

SEQ ID NO: 2011643 - RNA, 19 nt, Artificial Sequence
  Description of Artificial Sequence: Synthetic oligonucleotide
caguguggguucuccuccu

SEQ ID NO: 2011644 - RNA, 19 nt, Artificial Sequence
  Description of Artificial Sequence: Synthetic oligonucleotide
ggacagcaagaggaaaccu

SEQ ID NO: 2011645 - RNA, 19 nt, Artificial Sequence
  Description of Artificial Sequence: Synthetic oligonucleotide
guccaccagcgagcucccg

SEQ ID NO: 2011646 - RNA, 19 nt, Artificial Sequence
  Description of Artificial Sequence: Synthetic oligonucleotide
caaagcguucagucauguu

SEQ ID NO: 2011647 - RNA, 19 nt, Artificial Sequence
  Description of Artificial Sequence: Synthetic oligonucleotide
ccagaacacagcacugccu

SEQ ID NO: 2011648 - RNA, 19 nt, Artificial Sequence
  Description of Artificial Sequence: Synthetic oligonucleotide
ggguacgcuggccaccggu

SEQ ID NO: 2011649 - RNA, 19 nt, Artificial Sequence
  Description of Artificial Sequence: Synthetic oligonucleotide
gccagugccgguccuugua

SEQ ID NO: 2011650 - RNA, 19 nt, Artificial Sequence
  Description of Artificial Sequence: Synthetic oligonucleotide
gcacagcccugcucggguc

SEQ ID NO: 2011651 - RNA, 19 nt, Artificial Sequence
  Description of Artificial Sequence: Synthetic oligonucleotide
cggugucucuccacgcgug

SEQ ID NO: 2011652 - RNA, 19 nt, Artificial Sequence
  Description of Artificial Sequence: Synthetic oligonucleotide
cagcccugcucgggucugc

SEQ ID NO: 2011653 - RNA, 19 nt, Artificial Sequence
  Description of Artificial Sequence: Synthetic oligonucleotide
gccgggucuccgccccacg

SEQ ID NO: 2011654 - RNA, 19 nt, Artificial Sequence
  Description of Artificial Sequence: Synthetic oligonucleotide
ccucgccccaccagggaca

SEQ ID NO: 2011655 - RNA, 19 nt, Artificial Sequence
  Description of Artificial Sequence: Synthetic oligonucleotide
ggucuccgccccacgguca

SEQ ID NO: 2011656 - RNA, 19 nt, Artificial Sequence
  Description of Artificial Sequence: Synthetic oligonucleotide
gcugcuucuugcaggcagu

SEQ ID NO: 2011657 - RNA, 19 nt, Artificial Sequence
  Description of Artificial Sequence: Synthetic oligonucleotide
uggcggcaaagggcuuguc

SEQ ID NO: 2011658 - RNA, 19 nt, Artificial Sequence
  Description of Artificial Sequence: Synthetic oligonucleotide
gcucgggucugccgggucu

SEQ ID NO: 2011659 - RNA, 19 nt, Artificial Sequence
  Description of Artificial Sequence: Synthetic oligonucleotide
cacagucggggcagaggau

SEQ ID NO: 2011660 - RNA, 19 nt, Artificial Sequence
  Description of Artificial Sequence: Synthetic oligonucleotide
cguuggaauagcagucggu

SEQ ID NO: 2011661 - RNA, 19 nt, Artificial Sequence
  Description of Artificial Sequence: Synthetic oligonucleotide
ccacgcgugcuagggcagc

SEQ ID NO: 2011662 - RNA, 19 nt, Artificial Sequence
  Description of Artificial Sequence: Synthetic oligonucleotide
ggcguacaacucacagaaa

SEQ ID NO: 2011663 - RNA, 19 nt, Artificial Sequence
  Description of Artificial Sequence: Synthetic oligonucleotide
cccgcaccuggagcagugg

SEQ ID NO: 2011664 - RNA, 19 nt, Artificial Sequence
  Description of Artificial Sequence: Synthetic oligonucleotide
ccgcaccuggagcagugga

SEQ ID NO: 2011665 - RNA, 19 nt, Artificial Sequence
  Description of Artificial Sequence: Synthetic oligonucleotide
ggcagcgcuggcaggugaa

SEQ ID NO: 2011666 - RNA, 19 nt, Artificial Sequence
  Description of Artificial Sequence: Synthetic oligonucleotide
ggccaccggugucucucca

SEQ ID NO: 2011667 - RNA, 19 nt, Artificial Sequence
  Description of Artificial Sequence: Synthetic oligonucleotide
ccgguaagugacaccuccu

SEQ ID NO: 2011668 - RNA, 19 nt, Artificial Sequence
  Description of Artificial Sequence: Synthetic oligonucleotide
gcgugcuagggcagcuguc

SEQ ID NO: 2011669 - RNA, 19 nt, Artificial Sequence
  Description of Artificial Sequence: Synthetic oligonucleotide
cggggcagaggaugucauc

SEQ ID NO: 2011670 - RNA, 19 nt, Artificial Sequence
  Description of Artificial Sequence: Synthetic oligonucleotide
gccccacggucaggguacg

SEQ ID NO: 2011671 - RNA, 19 nt, Artificial Sequence
  Description of Artificial Sequence: Synthetic oligonucleotide
gccgguccuuguaggacaa

SEQ ID NO: 2011672 - RNA, 19 nt, Artificial Sequence
  Description of Artificial Sequence: Synthetic oligonucleotide
cgugcuagggcagcugucu

SEQ ID NO: 2011673 - RNA, 19 nt, Artificial Sequence
  Description of Artificial Sequence: Synthetic oligonucleotide
gaccacugaugggguuggu

SEQ ID NO: 2011674 - RNA, 19 nt, Artificial Sequence
  Description of Artificial Sequence: Synthetic oligonucleotide
cacgcgugcuagggcagcu

SEQ ID NO: 2011675 - RNA, 19 nt, Artificial Sequence
  Description of Artificial Sequence: Synthetic oligonucleotide
ccgagaccacugauggggu

SEQ ID NO: 2011676 - RNA, 19 nt, Artificial Sequence
  Description of Artificial Sequence: Synthetic oligonucleotide
gcagcgcuggcaggugaaa

SEQ ID NO: 2011677 - RNA, 19 nt, Artificial Sequence
  Description of Artificial Sequence: Synthetic oligonucleotide
cccacggucaggguacgcu

SEQ ID NO: 2011678 - RNA, 19 nt, Artificial Sequence
  Description of Artificial Sequence: Synthetic oligonucleotide
ccgguccuuguaggacaag

SEQ ID NO: 2011679 - RNA, 19 nt, Artificial Sequence
  Description of Artificial Sequence: Synthetic oligonucleotide
ccggugucucuccacgcgu

SEQ ID NO: 2011680 - RNA, 19 nt, Artificial Sequence
  Description of Artificial Sequence: Synthetic oligonucleotide
ccgccccacggucagggua

SEQ ID NO: 2011681 - RNA, 19 nt, Artificial Sequence
  Description of Artificial Sequence: Synthetic oligonucleotide
cucccgcaccuggagcagu

SEQ ID NO: 2011682 - RNA, 19 nt, Artificial Sequence
  Description of Artificial Sequence: Synthetic oligonucleotide
ccccacggucaggguacgc

SEQ ID NO: 2011683 - RNA, 19 nt, Artificial Sequence
  Description of Artificial Sequence: Synthetic oligonucleotide
cugcucgggucugccgggu

SEQ ID NO: 2011684 - RNA, 19 nt, Artificial Sequence
  Description of Artificial Sequence: Synthetic oligonucleotide
cgcgugcuagggcagcugu

SEQ ID NO: 2011685 - RNA, 19 nt, Artificial Sequence
  Description of Artificial Sequence: Synthetic oligonucleotide
ccuuggguaugaagcucuu

SEQ ID NO: 2011686 - RNA, 19 nt, Artificial Sequence
  Description of Artificial Sequence: Synthetic oligonucleotide
ccuucgugccagugccggu

SEQ ID NO: 2011687 - RNA, 19 nt, Artificial Sequence
  Description of Artificial Sequence: Synthetic oligonucleotide
gccccaccagggacaggga

SEQ ID NO: 2011688 - RNA, 19 nt, Artificial Sequence
  Description of Artificial Sequence: Synthetic oligonucleotide
cgggucuccgccccacggu

SEQ ID NO: 2011689 - RNA, 19 nt, Artificial Sequence
  Description of Artificial Sequence: Synthetic oligonucleotide
aauuuauuacaccuugggc

SEQ ID NO: 2011690 - RNA, 19 nt, Artificial Sequence
  Description of Artificial Sequence: Synthetic oligonucleotide
aauagcaugacuuaaaaua

SEQ ID NO: 2011691 - RNA, 19 nt, Artificial Sequence
  Description of Artificial Sequence: Synthetic oligonucleotide
auauucguagccuaggucc

SEQ ID NO: 2011692 - RNA, 19 nt, Artificial Sequence
  Description of Artificial Sequence: Synthetic oligonucleotide
aguuaugucuacuugcugc

SEQ ID NO: 2011693 - RNA, 19 nt, Artificial Sequence
  Description of Artificial Sequence: Synthetic oligonucleotide
aacaagaauuuauuacacc

SEQ ID NO: 2011694 - RNA, 19 nt, Artificial Sequence
  Description of Artificial Sequence: Synthetic oligonucleotide
auuuauuacaccuugggca

SEQ ID NO: 2011695 - RNA, 19 nt, Artificial Sequence
  Description of Artificial Sequence: Synthetic oligonucleotide
uucgaauucauucacaagu

SEQ ID NO: 2011696 - RNA, 19 nt, Artificial Sequence
  Description of Artificial Sequence: Synthetic oligonucleotide
aaaguaacgugccaaaugu

SEQ ID NO: 2011697 - RNA, 19 nt, Artificial Sequence
  Description of Artificial Sequence: Synthetic oligonucleotide
aaaucuuccaguguuaaag

SEQ ID NO: 2011698 - RNA, 19 nt, Artificial Sequence
  Description of Artificial Sequence: Synthetic oligonucleotide
ucugagauagcauaaaagu

SEQ ID NO: 2011699 - RNA, 19 nt, Artificial Sequence
  Description of Artificial Sequence: Synthetic oligonucleotide
uuugaugccagcacgcucg

SEQ ID NO: 2011700 - RNA, 19 nt, Artificial Sequence
  Description of Artificial Sequence: Synthetic oligonucleotide
uuuaauacuuagaauauau

SEQ ID NO: 2011701 - RNA, 19 nt, Artificial Sequence
  Description of Artificial Sequence: Synthetic oligonucleotide
uauuuggaaggauacauag

SEQ ID NO: 2011702 - RNA, 19 nt, Artificial Sequence
  Description of Artificial Sequence: Synthetic oligonucleotide
uggaaggauacauagauca

SEQ ID NO: 2011703 - RNA, 19 nt, Artificial Sequence
  Description of Artificial Sequence: Synthetic oligonucleotide
ugagauagcauaaaaguaa

SEQ ID NO: 2011704 - RNA, 19 nt, Artificial Sequence
  Description of Artificial Sequence: Synthetic oligonucleotide
aauaaaaggcagcaacaag

SEQ ID NO: 2011705 - RNA, 19 nt, Artificial Sequence
  Description of Artificial Sequence: Synthetic oligonucleotide
aaauaaaagucucuuagua

SEQ ID NO: 2011706 - RNA, 19 nt, Artificial Sequence
  Description of Artificial Sequence: Synthetic oligonucleotide
uaauuggccuaauaaaagg

SEQ ID NO: 2011707 - RNA, 19 nt, Artificial Sequence
  Description of Artificial Sequence: Synthetic oligonucleotide
auagagggaagccauauuc

SEQ ID NO: 2011708 - RNA, 19 nt, Artificial Sequence
  Description of Artificial Sequence: Synthetic oligonucleotide
aauuggccuaauaaaaggc

SEQ ID NO: 2011709 - RNA, 19 nt, Artificial Sequence
  Description of Artificial Sequence: Synthetic oligonucleotide
uauauguaaacugauauuc

SEQ ID NO: 2011710 - RNA, 19 nt, Artificial Sequence
  Description of Artificial Sequence: Synthetic oligonucleotide
ugugaaaauagcaugacuu

SEQ ID NO: 2011711 - RNA, 19 nt, Artificial Sequence
  Description of Artificial Sequence: Synthetic oligonucleotide
acaagaauuuauuacaccu

SEQ ID NO: 2011712 - RNA, 19 nt, Artificial Sequence
  Description of Artificial Sequence: Synthetic oligonucleotide
ugucuuauacaguaauugg

SEQ ID NO: 2011713 - RNA, 19 nt, Artificial Sequence
  Description of Artificial Sequence: Synthetic oligonucleotide
uuuggaaggauacauagau

SEQ ID NO: 2011714 - RNA, 19 nt, Artificial Sequence
  Description of Artificial Sequence: Synthetic oligonucleotide
ugggauagaaugcacacag

SEQ ID NO: 2011715 - RNA, 19 nt, Artificial Sequence
  Description of Artificial Sequence: Synthetic oligonucleotide
gucauauacacacacagug

SEQ ID NO: 2011716 - RNA, 19 nt, Artificial Sequence
  Description of Artificial Sequence: Synthetic oligonucleotide
uguaaacugauauucuuug

SEQ ID NO: 2011717 - RNA, 19 nt, Artificial Sequence
  Description of Artificial Sequence: Synthetic oligonucleotide
aauagccugauccucaggu

SEQ ID NO: 2011718 - RNA, 19 nt, Artificial Sequence
  Description of Artificial Sequence: Synthetic oligonucleotide
uguauauuuugauauuuca

SEQ ID NO: 2011719 - RNA, 19 nt, Artificial Sequence
  Description of Artificial Sequence: Synthetic oligonucleotide
ugaccuaauacugucauag

SEQ ID NO: 2011720 - RNA, 19 nt, Artificial Sequence
  Description of Artificial Sequence: Synthetic oligonucleotide
aaucuuauuacacuugcua

SEQ ID NO: 2011721 - RNA, 19 nt, Artificial Sequence
  Description of Artificial Sequence: Synthetic oligonucleotide
ucgucuacaaauauuuccc

SEQ ID NO: 2011722 - RNA, 19 nt, Artificial Sequence
  Description of Artificial Sequence: Synthetic oligonucleotide
cacaugaucaccauaaauc

SEQ ID NO: 2011723 - RNA, 19 nt, Artificial Sequence
  Description of Artificial Sequence: Synthetic oligonucleotide
ugcuauauauguaaacuga

SEQ ID NO: 2011724 - RNA, 19 nt, Artificial Sequence
  Description of Artificial Sequence: Synthetic oligonucleotide
accuuuaugucugagauag

SEQ ID NO: 2011725 - RNA, 19 nt, Artificial Sequence
  Description of Artificial Sequence: Synthetic oligonucleotide
aguaugcugggauagaaug

SEQ ID NO: 2011726 - RNA, 19 nt, Artificial Sequence
  Description of Artificial Sequence: Synthetic oligonucleotide
auagcauaaaaguaacgug

SEQ ID NO: 2011727 - RNA, 19 nt, Artificial Sequence
  Description of Artificial Sequence: Synthetic oligonucleotide
uuacacuugcuauauaugu

SEQ ID NO: 2011728 - RNA, 19 nt, Artificial Sequence
  Description of Artificial Sequence: Synthetic oligonucleotide
caauacuccauguaaacac

SEQ ID NO: 2011729 - RNA, 19 nt, Artificial Sequence
  Description of Artificial Sequence: Synthetic oligonucleotide
ugucauagguuauuguucc

SEQ ID NO: 2011730 - RNA, 19 nt, Artificial Sequence
  Description of Artificial Sequence: Synthetic oligonucleotide
uucugauucuaagagaugc

SEQ ID NO: 2011731 - RNA, 19 nt, Artificial Sequence
  Description of Artificial Sequence: Synthetic oligonucleotide
ucacaagucaguuugcugu

SEQ ID NO: 2011732 - RNA, 19 nt, Artificial Sequence
  Description of Artificial Sequence: Synthetic oligonucleotide
uucuaagagaugcugcugc

SEQ ID NO: 2011733 - RNA, 19 nt, Artificial Sequence
  Description of Artificial Sequence: Synthetic oligonucleotide
cucgucuacaaauauuucc

SEQ ID NO: 2011734 - RNA, 19 nt, Artificial Sequence
  Description of Artificial Sequence: Synthetic oligonucleotide
acuugcuauauauguaaac

SEQ ID NO: 2011735 - RNA, 19 nt, Artificial Sequence
  Description of Artificial Sequence: Synthetic oligonucleotide
uuugcuguugucauauaca

SEQ ID NO: 2011736 - RNA, 19 nt, Artificial Sequence
  Description of Artificial Sequence: Synthetic oligonucleotide
acaugaucaccauaaaucu

SEQ ID NO: 2011737 - RNA, 19 nt, Artificial Sequence
  Description of Artificial Sequence: Synthetic oligonucleotide
aucaccauaaaucugugaa

SEQ ID NO: 2011738 - RNA, 19 nt, Artificial Sequence
  Description of Artificial Sequence: Synthetic oligonucleotide
uugcuauauauguaaacug

SEQ ID NO: 2011739 - RNA, 19 nt, Artificial Sequence
  Description of Artificial Sequence: Synthetic oligonucleotide
aaucuugcauuuaugcagg

SEQ ID NO: 2011740 - RNA, 19 nt, Artificial Sequence
  Description of Artificial Sequence: Synthetic oligonucleotide
uuaguacucugccaacagg

SEQ ID NO: 2011741 - RNA, 19 nt, Artificial Sequence
  Description of Artificial Sequence: Synthetic oligonucleotide
uuggccuaauaaaaggcag

SEQ ID NO: 2011742 - RNA, 19 nt, Artificial Sequence
  Description of Artificial Sequence: Synthetic oligonucleotide
auaaucuugcauuuaugca

SEQ ID NO: 2011743 - RNA, 19 nt, Artificial Sequence
  Description of Artificial Sequence: Synthetic oligonucleotide
ugcugauucgaauucauuc

SEQ ID NO: 2011744 - RNA, 19 nt, Artificial Sequence
  Description of Artificial Sequence: Synthetic oligonucleotide
agcauaaaaguaacgugcc

SEQ ID NO: 2011745 - RNA, 19 nt, Artificial Sequence
  Description of Artificial Sequence: Synthetic oligonucleotide
ucucuuaguacucugccaa

SEQ ID NO: 2011746 - RNA, 19 nt, Artificial Sequence
  Description of Artificial Sequence: Synthetic oligonucleotide
uguauuuggaaggauacau

SEQ ID NO: 2011747 - RNA, 19 nt, Artificial Sequence
  Description of Artificial Sequence: Synthetic oligonucleotide
aauugcuaaucacucaauu

SEQ ID NO: 2011748 - RNA, 19 nt, Artificial Sequence
  Description of Artificial Sequence: Synthetic oligonucleotide
gaaggauacauagaucagc

SEQ ID NO: 2011749 - RNA, 19 nt, Artificial Sequence
  Description of Artificial Sequence: Synthetic oligonucleotide
uagagucacaugaucacca

SEQ ID NO: 2011750 - RNA, 19 nt, Artificial Sequence
  Description of Artificial Sequence: Synthetic oligonucleotide
gaugccagcacgcucguug

SEQ ID NO: 2011751 - RNA, 19 nt, Artificial Sequence
  Description of Artificial Sequence: Synthetic oligonucleotide
uagguuauuguuccaccag

SEQ ID NO: 2011752 - RNA, 19 nt, Artificial Sequence
  Description of Artificial Sequence: Synthetic oligonucleotide
aaauguagcucgucuacaa

SEQ ID NO: 2011753 - RNA, 19 nt, Artificial Sequence
  Description of Artificial Sequence: Synthetic oligonucleotide
ucguugcccauacagagca

SEQ ID NO: 2011754 - RNA, 19 nt, Artificial Sequence
  Description of Artificial Sequence: Synthetic oligonucleotide
ucggcuucugaccuaauac

SEQ ID NO: 2011755 - RNA, 19 nt, Artificial Sequence
  Description of Artificial Sequence: Synthetic oligonucleotide
accuaauacugucauaggu

SEQ ID NO: 2011756 - RNA, 19 nt, Artificial Sequence
  Description of Artificial Sequence: Synthetic oligonucleotide
guaauuggccuaauaaaag

SEQ ID NO: 2011757 - RNA, 19 nt, Artificial Sequence
  Description of Artificial Sequence: Synthetic oligonucleotide
aaacucaaaugucagucuu

SEQ ID NO: 2011758 - RNA, 19 nt, Artificial Sequence
  Description of Artificial Sequence: Synthetic oligonucleotide
uugcuguugucauauacac

SEQ ID NO: 2011759 - RNA, 19 nt, Artificial Sequence
  Description of Artificial Sequence: Synthetic oligonucleotide
uggaaucuuauuacacuug

SEQ ID NO: 2011760 - RNA, 19 nt, Artificial Sequence
  Description of Artificial Sequence: Synthetic oligonucleotide
ucuuauuacacuugcuaua

SEQ ID NO: 2011761 - RNA, 19 nt, Artificial Sequence
  Description of Artificial Sequence: Synthetic oligonucleotide
ucccuuuacugucuuauac

SEQ ID NO: 2011762 - RNA, 19 nt, Artificial Sequence
  Description of Artificial Sequence: Synthetic oligonucleotide
ucuuccaguguuaaagcaa

SEQ ID NO: 2011763 - RNA, 19 nt, Artificial Sequence
  Description of Artificial Sequence: Synthetic oligonucleotide
cacucaauuucccugcugc

SEQ ID NO: 2011764 - RNA, 19 nt, Artificial Sequence
  Description of Artificial Sequence: Synthetic oligonucleotide
gauucgaauucauucacaa

SEQ ID NO: 2011765 - RNA, 19 nt, Artificial Sequence
  Description of Artificial Sequence: Synthetic oligonucleotide
cauagaucagcaucccuag

SEQ ID NO: 2011766 - RNA, 19 nt, Artificial Sequence
  Description of Artificial Sequence: Synthetic oligonucleotide
uucuuugaugccagcacgc

SEQ ID NO: 2011767 - RNA, 19 nt, Artificial Sequence
  Description of Artificial Sequence: Synthetic oligonucleotide
gucuuauacaguaauuggc

SEQ ID NO: 2011768 - RNA, 19 nt, Artificial Sequence
  Description of Artificial Sequence: Synthetic oligonucleotide
cauagguuauuguuccacc

SEQ ID NO: 2011769 - RNA, 19 nt, Artificial Sequence
  Description of Artificial Sequence: Synthetic oligonucleotide
acugugaagaaaucucugu

SEQ ID NO: 2011770 - RNA, 19 nt, Artificial Sequence
  Description of Artificial Sequence: Synthetic oligonucleotide
aguaauuggccuaauaaaa

SEQ ID NO: 2011771 - RNA, 19 nt, Artificial Sequence
  Description of Artificial Sequence: Synthetic oligonucleotide
ucgaauucauucacaaguc

SEQ ID NO: 2011772 - RNA, 19 nt, Artificial Sequence
  Description of Artificial Sequence: Synthetic oligonucleotide
cuuccaguguuaaagcaac

SEQ ID NO: 2011773 - RNA, 19 nt, Artificial Sequence
  Description of Artificial Sequence: Synthetic oligonucleotide
acacuugcuauauauguaa

SEQ ID NO: 2011774 - RNA, 19 nt, Artificial Sequence
  Description of Artificial Sequence: Synthetic oligonucleotide
gcaacaagaauuuauuaca

SEQ ID NO: 2011775 - RNA, 19 nt, Artificial Sequence
  Description of Artificial Sequence: Synthetic oligonucleotide
ucugaccuaauacugucau

SEQ ID NO: 2011776 - RNA, 19 nt, Artificial Sequence
  Description of Artificial Sequence: Synthetic oligonucleotide
uccgugacugugaagaaau

SEQ ID NO: 2011777 - RNA, 19 nt, Artificial Sequence
  Description of Artificial Sequence: Synthetic oligonucleotide
ucuuugcugauucgaauuc

SEQ ID NO: 2011778 - RNA, 19 nt, Artificial Sequence
  Description of Artificial Sequence: Synthetic oligonucleotide
ucuuacaauacuccaugua

SEQ ID NO: 2011779 - RNA, 19 nt, Artificial Sequence
  Description of Artificial Sequence: Synthetic oligonucleotide
auagguuauuguuccacca

SEQ ID NO: 2011780 - RNA, 19 nt, Artificial Sequence
  Description of Artificial Sequence: Synthetic oligonucleotide
auucgaauucauucacaag

SEQ ID NO: 2011781 - RNA, 19 nt, Artificial Sequence
  Description of Artificial Sequence: Synthetic oligonucleotide
guguuaaagcaacagaaaa

SEQ ID NO: 2011782 - RNA, 19 nt, Artificial Sequence
  Description of Artificial Sequence: Synthetic oligonucleotide
ucuacuugcugcuguauau

SEQ ID NO: 2011783 - RNA, 19 nt, Artificial Sequence
  Description of Artificial Sequence: Synthetic oligonucleotide
uggccuaauaaaaggcagc

SEQ ID NO: 2011784 - RNA, 19 nt, Artificial Sequence
  Description of Artificial Sequence: Synthetic oligonucleotide
uacugucuuauacaguaau

SEQ ID NO: 2011785 - RNA, 19 nt, Artificial Sequence
  Description of Artificial Sequence: Synthetic oligonucleotide
cacaguggcaugcagguug

SEQ ID NO: 2011786 - RNA, 19 nt, Artificial Sequence
  Description of Artificial Sequence: Synthetic oligonucleotide
aguagggugaagaauucag

SEQ ID NO: 2011787 - RNA, 19 nt, Artificial Sequence
  Description of Artificial Sequence: Synthetic oligonucleotide
gauagaaugcacacaguuc

SEQ ID NO: 2011788 - RNA, 19 nt, Artificial Sequence
  Description of Artificial Sequence: Synthetic oligonucleotide
cugucauagguuauuguuc

SEQ ID NO: 2011789 - RNA, 19 nt, Artificial Sequence
  Description of Artificial Sequence: Synthetic oligonucleotide
acgugccaaauguagcucg

SEQ ID NO: 2011790 - RNA, 19 nt, Artificial Sequence
  Description of Artificial Sequence: Synthetic oligonucleotide
uucacaagucaguuugcug

SEQ ID NO: 2011791 - RNA, 19 nt, Artificial Sequence
  Description of Artificial Sequence: Synthetic oligonucleotide
uuaagcugcuggcuuggcc

SEQ ID NO: 2011792 - RNA, 19 nt, Artificial Sequence
  Description of Artificial Sequence: Synthetic oligonucleotide
gucugagauagcauaaaag

SEQ ID NO: 2011793 - RNA, 19 nt, Artificial Sequence
  Description of Artificial Sequence: Synthetic oligonucleotide
uggaacucggcuucugacc

SEQ ID NO: 2011794 - RNA, 19 nt, Artificial Sequence
  Description of Artificial Sequence: Synthetic oligonucleotide
gagauagcauaaaaguaac

SEQ ID NO: 2011795 - RNA, 19 nt, Artificial Sequence
  Description of Artificial Sequence: Synthetic oligonucleotide
guagccuagguccagacaa

SEQ ID NO: 2011796 - RNA, 19 nt, Artificial Sequence
  Description of Artificial Sequence: Synthetic oligonucleotide
uuguccuuaagcugcuggc

SEQ ID NO: 2011797 - RNA, 19 nt, Artificial Sequence
  Description of Artificial Sequence: Synthetic oligonucleotide
uauucguagccuaggucca

SEQ ID NO: 2011798 - RNA, 19 nt, Artificial Sequence
  Description of Artificial Sequence: Synthetic oligonucleotide
ucaauagccugauccucag

SEQ ID NO: 2011799 - RNA, 19 nt, Artificial Sequence
  Description of Artificial Sequence: Synthetic oligonucleotide
gaccuaauacugucauagg

SEQ ID NO: 2011800 - RNA, 19 nt, Artificial Sequence
  Description of Artificial Sequence: Synthetic oligonucleotide
ugccaaauguagcucgucu

SEQ ID NO: 2011801 - RNA, 19 nt, Artificial Sequence
  Description of Artificial Sequence: Synthetic oligonucleotide
caugaucaccauaaaucug

SEQ ID NO: 2011802 - RNA, 19 nt, Artificial Sequence
  Description of Artificial Sequence: Synthetic oligonucleotide
cuugggcaguacuugaaac

SEQ ID NO: 2011803 - RNA, 19 nt, Artificial Sequence
  Description of Artificial Sequence: Synthetic oligonucleotide
acuuuauucucaggaacag

SEQ ID NO: 2011804 - RNA, 19 nt, Artificial Sequence
  Description of Artificial Sequence: Synthetic oligonucleotide
uguagcucgucuacaaaua

SEQ ID NO: 2011805 - RNA, 19 nt, Artificial Sequence
  Description of Artificial Sequence: Synthetic oligonucleotide
uacacuugcuauauaugua

SEQ ID NO: 2011806 - RNA, 19 nt, Artificial Sequence
  Description of Artificial Sequence: Synthetic oligonucleotide
auuucauuuaauacuuaga

SEQ ID NO: 2011807 - RNA, 19 nt, Artificial Sequence
  Description of Artificial Sequence: Synthetic oligonucleotide
ucauagguuauuguuccac

SEQ ID NO: 2011808 - RNA, 19 nt, Artificial Sequence
  Description of Artificial Sequence: Synthetic oligonucleotide
aacgugccaaauguagcuc

SEQ ID NO: 2011809 - RNA, 19 nt, Artificial Sequence
  Description of Artificial Sequence: Synthetic oligonucleotide
cugauucgaauucauucac

SEQ ID NO: 2011810 - RNA, 19 nt, Artificial Sequence
  Description of Artificial Sequence: Synthetic oligonucleotide
uugucaguguuucuccccu

SEQ ID NO: 2011811 - RNA, 19 nt, Artificial Sequence
  Description of Artificial Sequence: Synthetic oligonucleotide
cuaauacugucauagguua

SEQ ID NO: 2011812 - RNA, 19 nt, Artificial Sequence
  Description of Artificial Sequence: Synthetic oligonucleotide
auagccugauccucagguc

SEQ ID NO: 2011813 - RNA, 19 nt, Artificial Sequence
  Description of Artificial Sequence: Synthetic oligonucleotide
auauuuccccaacggcugg

SEQ ID NO: 2011814 - RNA, 19 nt, Artificial Sequence
  Description of Artificial Sequence: Synthetic oligonucleotide
agguccgugacugugaaga

SEQ ID NO: 2011815 - RNA, 19 nt, Artificial Sequence
  Description of Artificial Sequence: Synthetic oligonucleotide
acgcucguugcccauacag

SEQ ID NO: 2011816 - RNA, 19 nt, Artificial Sequence
  Description of Artificial Sequence: Synthetic oligonucleotide
ucuuaguacucugccaaca

SEQ ID NO: 2011817 - RNA, 19 nt, Artificial Sequence
  Description of Artificial Sequence: Synthetic oligonucleotide
uugcauuuaugcaggaauu

SEQ ID NO: 2011818 - RNA, 19 nt, Artificial Sequence
  Description of Artificial Sequence: Synthetic oligonucleotide
acucaaaugucagucuuug

SEQ ID NO: 2011819 - RNA, 19 nt, Artificial Sequence
  Description of Artificial Sequence: Synthetic oligonucleotide
cuacaaauauuuccccaac

SEQ ID NO: 2011820 - RNA, 19 nt, Artificial Sequence
  Description of Artificial Sequence: Synthetic oligonucleotide
auuacacuugcuauauaug

SEQ ID NO: 2011821 - RNA, 19 nt, Artificial Sequence
  Description of Artificial Sequence: Synthetic oligonucleotide
gaaaauagcaugacuuaaa

SEQ ID NO: 2011822 - RNA, 19 nt, Artificial Sequence
  Description of Artificial Sequence: Synthetic oligonucleotide
agauagcauaaaaguaacg

SEQ ID NO: 2011823 - RNA, 19 nt, Artificial Sequence
  Description of Artificial Sequence: Synthetic oligonucleotide
uuggaaggauacauagauc

SEQ ID NO: 2011824 - RNA, 19 nt, Artificial Sequence
  Description of Artificial Sequence: Synthetic oligonucleotide
ucuaagagaugcugcugcu

SEQ ID NO: 2011825 - RNA, 19 nt, Artificial Sequence
  Description of Artificial Sequence: Synthetic oligonucleotide
augccagcacgcucguugc

SEQ ID NO: 2011826 - RNA, 19 nt, Artificial Sequence
  Description of Artificial Sequence: Synthetic oligonucleotide
cugauucuaagagaugcug

SEQ ID NO: 2011827 - RNA, 19 nt, Artificial Sequence
  Description of Artificial Sequence: Synthetic oligonucleotide
aucugugaaaauagcauga

SEQ ID NO: 2011828 - RNA, 19 nt, Artificial Sequence
  Description of Artificial Sequence: Synthetic oligonucleotide
uccuuaagcugcuggcuug

SEQ ID NO: 2011829 - RNA, 19 nt, Artificial Sequence
  Description of Artificial Sequence: Synthetic oligonucleotide
auuggccuaauaaaaggca

SEQ ID NO: 2011830 - RNA, 19 nt, Artificial Sequence
  Description of Artificial Sequence: Synthetic oligonucleotide
cauauucguagccuagguc

SEQ ID NO: 2011831 - RNA, 19 nt, Artificial Sequence
  Description of Artificial Sequence: Synthetic oligonucleotide
ucaguguuucuccccugcc

SEQ ID NO: 2011832 - RNA, 19 nt, Artificial Sequence
  Description of Artificial Sequence: Synthetic oligonucleotide
uuggcauaaucuugcauuu

SEQ ID NO: 2011833 - RNA, 19 nt, Artificial Sequence
  Description of Artificial Sequence: Synthetic oligonucleotide
ucagcaucccuagagucac

SEQ ID NO: 2011834 - RNA, 19 nt, Artificial Sequence
  Description of Artificial Sequence: Synthetic oligonucleotide
cuugcuauauauguaaacu

SEQ ID NO: 2011835 - RNA, 19 nt, Artificial Sequence
  Description of Artificial Sequence: Synthetic oligonucleotide
uuugcaccuuccucgcacc

SEQ ID NO: 2011836 - RNA, 19 nt, Artificial Sequence
  Description of Artificial Sequence: Synthetic oligonucleotide
uaaaaguaacgugccaaau

SEQ ID NO: 2011837 - RNA, 19 nt, Artificial Sequence
  Description of Artificial Sequence: Synthetic oligonucleotide
uacaguaauuggccuaaua

SEQ ID NO: 2011838 - RNA, 19 nt, Artificial Sequence
  Description of Artificial Sequence: Synthetic oligonucleotide
guaugcugggauagaaugc

SEQ ID NO: 2011839 - RNA, 19 nt, Artificial Sequence
  Description of Artificial Sequence: Synthetic oligonucleotide
agcaugacuuaaaauaaaa

SEQ ID NO: 2011840 - RNA, 19 nt, Artificial Sequence
  Description of Artificial Sequence: Synthetic oligonucleotide
cucaaaugucagucuuugc

SEQ ID NO: 2011841 - RNA, 19 nt, Artificial Sequence
  Description of Artificial Sequence: Synthetic oligonucleotide
cuugguuguauccagcugu

SEQ ID NO: 2011842 - RNA, 19 nt, Artificial Sequence
  Description of Artificial Sequence: Synthetic oligonucleotide
uggcaguaugcugggauag

SEQ ID NO: 2011843 - RNA, 19 nt, Artificial Sequence
  Description of Artificial Sequence: Synthetic oligonucleotide
acauagaucagcaucccua

SEQ ID NO: 2011844 - RNA, 19 nt, Artificial Sequence
  Description of Artificial Sequence: Synthetic oligonucleotide
ugcugacacacuugucacc

SEQ ID NO: 2011845 - RNA, 19 nt, Artificial Sequence
  Description of Artificial Sequence: Synthetic oligonucleotide
ugcccauacagagcaaucu

SEQ ID NO: 2011846 - RNA, 19 nt, Artificial Sequence
  Description of Artificial Sequence: Synthetic oligonucleotide
cuugcauuuaugcaggaau

SEQ ID NO: 2011847 - RNA, 19 nt, Artificial Sequence
  Description of Artificial Sequence: Synthetic oligonucleotide
agcucgucuacaaauauuu

SEQ ID NO: 2011848 - RNA, 19 nt, Artificial Sequence
  Description of Artificial Sequence: Synthetic oligonucleotide
caacggcuggucucaauag

SEQ ID NO: 2011849 - RNA, 19 nt, Artificial Sequence
  Description of Artificial Sequence: Synthetic oligonucleotide
uugguuguauccagcuguc

SEQ ID NO: 2011850 - RNA, 19 nt, Artificial Sequence
  Description of Artificial Sequence: Synthetic oligonucleotide
gaucaccauaaaucuguga

SEQ ID NO: 2011851 - RNA, 19 nt, Artificial Sequence
  Description of Artificial Sequence: Synthetic oligonucleotide
uguccuuaagcugcuggcu

SEQ ID NO: 2011852 - RNA, 19 nt, Artificial Sequence
  Description of Artificial Sequence: Synthetic oligonucleotide
auucacaagucaguuugcu

SEQ ID NO: 2011853 - RNA, 19 nt, Artificial Sequence
  Description of Artificial Sequence: Synthetic oligonucleotide
ucucaauagccugauccuc

SEQ ID NO: 2011854 - RNA, 19 nt, Artificial Sequence
  Description of Artificial Sequence: Synthetic oligonucleotide
uccucgcaccuuuaugucu

SEQ ID NO: 2011855 - RNA, 19 nt, Artificial Sequence
  Description of Artificial Sequence: Synthetic oligonucleotide
gguuguauccagcugucca

SEQ ID NO: 2011856 - RNA, 19 nt, Artificial Sequence
  Description of Artificial Sequence: Synthetic oligonucleotide
acucaauuucccugcugcu

SEQ ID NO: 2011857 - RNA, 19 nt, Artificial Sequence
  Description of Artificial Sequence: Synthetic oligonucleotide
ggcaguacuugaaacagac

SEQ ID NO: 2011858 - RNA, 19 nt, Artificial Sequence
  Description of Artificial Sequence: Synthetic oligonucleotide
uuauuacacuugcuauaua

SEQ ID NO: 2011859 - RNA, 19 nt, Artificial Sequence
  Description of Artificial Sequence: Synthetic oligonucleotide
ugugggguggcaguaugcu

SEQ ID NO: 2011860 - RNA, 19 nt, Artificial Sequence
  Description of Artificial Sequence: Synthetic oligonucleotide
cuuugaugccagcacgcuc

SEQ ID NO: 2011861 - RNA, 19 nt, Artificial Sequence
  Description of Artificial Sequence: Synthetic oligonucleotide
cuuauacaguaauuggccu

SEQ ID NO: 2011862 - RNA, 19 nt, Artificial Sequence
  Description of Artificial Sequence: Synthetic oligonucleotide
aguacuugaaacagacuuu

SEQ ID NO: 2011863 - RNA, 19 nt, Artificial Sequence
  Description of Artificial Sequence: Synthetic oligonucleotide
cuuccucgcaccuuuaugu

SEQ ID NO: 2011864 - RNA, 19 nt, Artificial Sequence
  Description of Artificial Sequence: Synthetic oligonucleotide
gcugggauagaaugcacac

SEQ ID NO: 2011865 - RNA, 19 nt, Artificial Sequence
  Description of Artificial Sequence: Synthetic oligonucleotide
cucuuaguacucugccaac

SEQ ID NO: 2011866 - RNA, 19 nt, Artificial Sequence
  Description of Artificial Sequence: Synthetic oligonucleotide
auauacacacacaguggca

SEQ ID NO: 2011867 - RNA, 19 nt, Artificial Sequence
  Description of Artificial Sequence: Synthetic oligonucleotide
uugcccauacagagcaauc

SEQ ID NO: 2011868 - RNA, 19 nt, Artificial Sequence
  Description of Artificial Sequence: Synthetic oligonucleotide
ggaagccauauucguagcc

SEQ ID NO: 2011869 - RNA, 19 nt, Artificial Sequence
  Description of Artificial Sequence: Synthetic oligonucleotide
auagaucagcaucccuaga

SEQ ID NO: 2011870 - RNA, 19 nt, Artificial Sequence
  Description of Artificial Sequence: Synthetic oligonucleotide
uagcucgucuacaaauauu

SEQ ID NO: 2011871 - RNA, 19 nt, Artificial Sequence
  Description of Artificial Sequence: Synthetic oligonucleotide
cagacuuuauucucaggaa

SEQ ID NO: 2011872 - RNA, 19 nt, Artificial Sequence
  Description of Artificial Sequence: Synthetic oligonucleotide
cuaagagaugcugcugcug

SEQ ID NO: 2011873 - RNA, 19 nt, Artificial Sequence
  Description of Artificial Sequence: Synthetic oligonucleotide
ucuugcauuuaugcaggaa

SEQ ID NO: 2011874 - RNA, 19 nt, Artificial Sequence
  Description of Artificial Sequence: Synthetic oligonucleotide
gaagccauauucguagccu

SEQ ID NO: 2011875 - RNA, 19 nt, Artificial Sequence
  Description of Artificial Sequence: Synthetic oligonucleotide
uauuacaccuugggcagua

SEQ ID NO: 2011876 - RNA, 19 nt, Artificial Sequence
  Description of Artificial Sequence: Synthetic oligonucleotide
caguuaugucuacuugcug

SEQ ID NO: 2011877 - RNA, 19 nt, Artificial Sequence
  Description of Artificial Sequence: Synthetic oligonucleotide
uuccucgcaccuuuauguc

SEQ ID NO: 2011878 - RNA, 19 nt, Artificial Sequence
  Description of Artificial Sequence: Synthetic oligonucleotide
uugcugauucgaauucauu

SEQ ID NO: 2011879 - RNA, 19 nt, Artificial Sequence
  Description of Artificial Sequence: Synthetic oligonucleotide
ugucaguguuucuccccug

SEQ ID NO: 2011880 - RNA, 19 nt, Artificial Sequence
  Description of Artificial Sequence: Synthetic oligonucleotide
ggaaggauacauagaucag

SEQ ID NO: 2011881 - RNA, 19 nt, Artificial Sequence
  Description of Artificial Sequence: Synthetic oligonucleotide
gguggaaucuuauuacacu

SEQ ID NO: 2011882 - RNA, 19 nt, Artificial Sequence
  Description of Artificial Sequence: Synthetic oligonucleotide
aacucggcuucugaccuaa

SEQ ID NO: 2011883 - RNA, 19 nt, Artificial Sequence
  Description of Artificial Sequence: Synthetic oligonucleotide
auuacaccuugggcaguac

SEQ ID NO: 2011884 - RNA, 19 nt, Artificial Sequence
  Description of Artificial Sequence: Synthetic oligonucleotide
uuccccaacggcuggucuc

SEQ ID NO: 2011885 - RNA, 19 nt, Artificial Sequence
  Description of Artificial Sequence: Synthetic oligonucleotide
gcuaaucacucaauuuccc

SEQ ID NO: 2011886 - RNA, 19 nt, Artificial Sequence
  Description of Artificial Sequence: Synthetic oligonucleotide
guggccucuuacaauacuc

SEQ ID NO: 2011887 - RNA, 19 nt, Artificial Sequence
  Description of Artificial Sequence: Synthetic oligonucleotide
aguacucugccaacaggcu

SEQ ID NO: 2011888 - RNA, 19 nt, Artificial Sequence
  Description of Artificial Sequence: Synthetic oligonucleotide
ucguagccuagguccagac

SEQ ID NO: 2011889 - RNA, 19 nt, Artificial Sequence
  Description of Artificial Sequence: Synthetic oligonucleotide
agccauauucguagccuag

SEQ ID NO: 2011890 - RNA, 19 nt, Artificial Sequence
  Description of Artificial Sequence: Synthetic oligonucleotide
ggauagaaugcacacaguu

SEQ ID NO: 2011891 - RNA, 19 nt, Artificial Sequence
  Description of Artificial Sequence: Synthetic oligonucleotide
cagguggccucuuacaaua

SEQ ID NO: 2011892 - RNA, 19 nt, Artificial Sequence
  Description of Artificial Sequence: Synthetic oligonucleotide
uuauuacaccuugggcagu

SEQ ID NO: 2011893 - RNA, 19 nt, Artificial Sequence
  Description of Artificial Sequence: Synthetic oligonucleotide
acugucuuauacaguaauu

SEQ ID NO: 2011894 - RNA, 19 nt, Artificial Sequence
  Description of Artificial Sequence: Synthetic oligonucleotide
uagccuagguccagacaaa

SEQ ID NO: 2011895 - RNA, 19 nt, Artificial Sequence
  Description of Artificial Sequence: Synthetic oligonucleotide
ugguuguauccagcugucc

SEQ ID NO: 2011896 - RNA, 19 nt, Artificial Sequence
  Description of Artificial Sequence: Synthetic oligonucleotide
aaguaacgugccaaaugua

SEQ ID NO: 2011897 - RNA, 19 nt, Artificial Sequence
  Description of Artificial Sequence: Synthetic oligonucleotide
gcauuugcaccuuccucgc

SEQ ID NO: 2011898 - RNA, 19 nt, Artificial Sequence
  Description of Artificial Sequence: Synthetic oligonucleotide
guauuuggaaggauacaua

SEQ ID NO: 2011899 - RNA, 19 nt, Artificial Sequence
  Description of Artificial Sequence: Synthetic oligonucleotide
gcaugcagguugcauuugc

SEQ ID NO: 2011900 - RNA, 19 nt, Artificial Sequence
  Description of Artificial Sequence: Synthetic oligonucleotide
uucguagccuagguccaga

SEQ ID NO: 2011901 - RNA, 19 nt, Artificial Sequence
  Description of Artificial Sequence: Synthetic oligonucleotide
uggcaguagggugaagaau

SEQ ID NO: 2011902 - RNA, 19 nt, Artificial Sequence
  Description of Artificial Sequence: Synthetic oligonucleotide
ggccuaauaaaaggcagca

SEQ ID NO: 2011903 - RNA, 19 nt, Artificial Sequence
  Description of Artificial Sequence: Synthetic oligonucleotide
cuccauguaaacacuguau

SEQ ID NO: 2011904 - RNA, 19 nt, Artificial Sequence
  Description of Artificial Sequence: Synthetic oligonucleotide
auucguagccuagguccag

SEQ ID NO: 2011905 - RNA, 19 nt, Artificial Sequence
  Description of Artificial Sequence: Synthetic oligonucleotide
uccccaacggcuggucuca

SEQ ID NO: 2011906 - RNA, 19 nt, Artificial Sequence
  Description of Artificial Sequence: Synthetic oligonucleotide
cacuugcuauauauguaaa

SEQ ID NO: 2011907 - RNA, 19 nt, Artificial Sequence
  Description of Artificial Sequence: Synthetic oligonucleotide
aguggcaugcagguugcau

SEQ ID NO: 2011908 - RNA, 19 nt, Artificial Sequence
  Description of Artificial Sequence: Synthetic oligonucleotide
ccauaaaucugugaaaaua

SEQ ID NO: 2011909 - RNA, 19 nt, Artificial Sequence
  Description of Artificial Sequence: Synthetic oligonucleotide
ccucgcaccuuuaugucug

SEQ ID NO: 2011910 - RNA, 19 nt, Artificial Sequence
  Description of Artificial Sequence: Synthetic oligonucleotide
cuguugucauauacacaca

SEQ ID NO: 2011911 - RNA, 19 nt, Artificial Sequence
  Description of Artificial Sequence: Synthetic oligonucleotide
ccaguguuaaagcaacaga

SEQ ID NO: 2011912 - RNA, 19 nt, Artificial Sequence
  Description of Artificial Sequence: Synthetic oligonucleotide
agcaucccuagagucacau

SEQ ID NO: 2011913 - RNA, 19 nt, Artificial Sequence
  Description of Artificial Sequence: Synthetic oligonucleotide
cuguauuuggaaggauaca

SEQ ID NO: 2011914 - RNA, 19 nt, Artificial Sequence
  Description of Artificial Sequence: Synthetic oligonucleotide
cucagguccgugacuguga

SEQ ID NO: 2011915 - RNA, 19 nt, Artificial Sequence
  Description of Artificial Sequence: Synthetic oligonucleotide
ugucuacuugcugcuguau

SEQ ID NO: 2011916 - RNA, 19 nt, Artificial Sequence
  Description of Artificial Sequence: Synthetic oligonucleotide
guagcucgucuacaaauau

SEQ ID NO: 2011917 - RNA, 19 nt, Artificial Sequence
  Description of Artificial Sequence: Synthetic oligonucleotide
agguggccucuuacaauac

SEQ ID NO: 2011918 - RNA, 19 nt, Artificial Sequence
  Description of Artificial Sequence: Synthetic oligonucleotide
ucgcaccuuuaugucugag

SEQ ID NO: 2011919 - RNA, 19 nt, Artificial Sequence
  Description of Artificial Sequence: Synthetic oligonucleotide
auaggacuucauuguccuu

SEQ ID NO: 2011920 - RNA, 19 nt, Artificial Sequence
  Description of Artificial Sequence: Synthetic oligonucleotide
guggcaguaugcugggaua

SEQ ID NO: 2011921 - RNA, 19 nt, Artificial Sequence
  Description of Artificial Sequence: Synthetic oligonucleotide
cucuuacaauacuccaugu

SEQ ID NO: 2011922 - RNA, 19 nt, Artificial Sequence
  Description of Artificial Sequence: Synthetic oligonucleotide
accuuccucgcaccuuuau

SEQ ID NO: 2011923 - RNA, 19 nt, Artificial Sequence
  Description of Artificial Sequence: Synthetic oligonucleotide
caagucaguuugcuguugu

SEQ ID NO: 2011924 - RNA, 19 nt, Artificial Sequence
  Description of Artificial Sequence: Synthetic oligonucleotide
caggucacauaggacuuca

SEQ ID NO: 2011925 - RNA, 19 nt, Artificial Sequence
  Description of Artificial Sequence: Synthetic oligonucleotide
ccuaauacugucauagguu

SEQ ID NO: 2011926 - RNA, 19 nt, Artificial Sequence
  Description of Artificial Sequence: Synthetic oligonucleotide
agccuagguccagacaaaa

SEQ ID NO: 2011927 - RNA, 19 nt, Artificial Sequence
  Description of Artificial Sequence: Synthetic oligonucleotide
caguagggugaagaauuca

SEQ ID NO: 2011928 - RNA, 19 nt, Artificial Sequence
  Description of Artificial Sequence: Synthetic oligonucleotide
ggcaguagggugaagaauu

SEQ ID NO: 2011929 - RNA, 19 nt, Artificial Sequence
  Description of Artificial Sequence: Synthetic oligonucleotide
ccuuccucgcaccuuuaug

SEQ ID NO: 2011930 - RNA, 19 nt, Artificial Sequence
  Description of Artificial Sequence: Synthetic oligonucleotide
gccaaauguagcucgucua

SEQ ID NO: 2011931 - RNA, 19 nt, Artificial Sequence
  Description of Artificial Sequence: Synthetic oligonucleotide
cugaccuaauacugucaua

SEQ ID NO: 2011932 - RNA, 19 nt, Artificial Sequence
  Description of Artificial Sequence: Synthetic oligonucleotide
cucggcuucugaccuaaua

SEQ ID NO: 2011933 - RNA, 19 nt, Artificial Sequence
  Description of Artificial Sequence: Synthetic oligonucleotide
caccuuuaugucugagaua

SEQ ID NO: 2011934 - RNA, 19 nt, Artificial Sequence
  Description of Artificial Sequence: Synthetic oligonucleotide
ggacuucauuguccuuaag

SEQ ID NO: 2011935 - RNA, 19 nt, Artificial Sequence
  Description of Artificial Sequence: Synthetic oligonucleotide
gcuguauauuuugauauuu

SEQ ID NO: 2011936 - RNA, 19 nt, Artificial Sequence
  Description of Artificial Sequence: Synthetic oligonucleotide
gcaguuaugucuacuugcu

SEQ ID NO: 2011937 - RNA, 19 nt, Artificial Sequence
  Description of Artificial Sequence: Synthetic oligonucleotide
guugcccauacagagcaau

SEQ ID NO: 2011938 - RNA, 19 nt, Artificial Sequence
  Description of Artificial Sequence: Synthetic oligonucleotide
cauuugcaccuuccucgca

SEQ ID NO: 2011939 - RNA, 19 nt, Artificial Sequence
  Description of Artificial Sequence: Synthetic oligonucleotide
guccuuaagcugcuggcuu

SEQ ID NO: 2011940 - RNA, 19 nt, Artificial Sequence
  Description of Artificial Sequence: Synthetic oligonucleotide
gccagcacgcucguugccc

SEQ ID NO: 2011941 - RNA, 19 nt, Artificial Sequence
  Description of Artificial Sequence: Synthetic oligonucleotide
accuugggcaguacuugaa

SEQ ID NO: 2011942 - RNA, 19 nt, Artificial Sequence
  Description of Artificial Sequence: Synthetic oligonucleotide
gaacucggcuucugaccua

SEQ ID NO: 2011943 - RNA, 19 nt, Artificial Sequence
  Description of Artificial Sequence: Synthetic oligonucleotide
agacuggcaguagggugaa

SEQ ID NO: 2011944 - RNA, 19 nt, Artificial Sequence
  Description of Artificial Sequence: Synthetic oligonucleotide
caguaugcugggauagaau

SEQ ID NO: 2011945 - RNA, 19 nt, Artificial Sequence
  Description of Artificial Sequence: Synthetic oligonucleotide
cacuugucaccuguggggu

SEQ ID NO: 2011946 - RNA, 19 nt, Artificial Sequence
  Description of Artificial Sequence: Synthetic oligonucleotide
gcuucugaccuaauacugu

SEQ ID NO: 2011947 - RNA, 19 nt, Artificial Sequence
  Description of Artificial Sequence: Synthetic oligonucleotide
ccaacggcuggucucaaua

SEQ ID NO: 2011948 - RNA, 19 nt, Artificial Sequence
  Description of Artificial Sequence: Synthetic oligonucleotide
gcucgucuacaaauauuuc

SEQ ID NO: 2011949 - RNA, 19 nt, Artificial Sequence
  Description of Artificial Sequence: Synthetic oligonucleotide
gcacgcucguugcccauac

SEQ ID NO: 2011950 - RNA, 19 nt, Artificial Sequence
  Description of Artificial Sequence: Synthetic oligonucleotide
cucgcaccuuuaugucuga

SEQ ID NO: 2011951 - RNA, 19 nt, Artificial Sequence
  Description of Artificial Sequence: Synthetic oligonucleotide
gguggccucuuacaauacu

SEQ ID NO: 2011952 - RNA, 19 nt, Artificial Sequence
  Description of Artificial Sequence: Synthetic oligonucleotide
ccucagguccgugacugug

SEQ ID NO: 2011953 - RNA, 19 nt, Artificial Sequence
  Description of Artificial Sequence: Synthetic oligonucleotide
gacuggcaguagggugaag

SEQ ID NO: 2011954 - RNA, 19 nt, Artificial Sequence
  Description of Artificial Sequence: Synthetic oligonucleotide
gccuaauaaaaggcagcaa

SEQ ID NO: 2011955 - RNA, 19 nt, Artificial Sequence
  Description of Artificial Sequence: Synthetic oligonucleotide
ggcaguaugcugggauaga

SEQ ID NO: 2011956 - RNA, 19 nt, Artificial Sequence
  Description of Artificial Sequence: Synthetic oligonucleotide
cgcaccuuuaugucugaga

SEQ ID NO: 2011957 - RNA, 19 nt, Artificial Sequence
  Description of Artificial Sequence: Synthetic oligonucleotide
ccauauucguagccuaggu

SEQ ID NO: 2011958 - RNA, 19 nt, Artificial Sequence
  Description of Artificial Sequence: Synthetic oligonucleotide
agcacgcucguugcccaua

SEQ ID NO: 2011959 - RNA, 19 nt, Artificial Sequence
  Description of Artificial Sequence: Synthetic oligonucleotide
gccucuuacaauacuccau

SEQ ID NO: 2011960 - RNA, 19 nt, Artificial Sequence
  Description of Artificial Sequence: Synthetic oligonucleotide
cagcaucccuagagucaca

SEQ ID NO: 2011961 - RNA, 19 nt, Artificial Sequence
  Description of Artificial Sequence: Synthetic oligonucleotide
ccaggucacauaggacuuc

SEQ ID NO: 2011962 - RNA, 19 nt, Artificial Sequence
  Description of Artificial Sequence: Synthetic oligonucleotide
cgcucguugcccauacaga

SEQ ID NO: 2011963 - RNA, 19 nt, Artificial Sequence
  Description of Artificial Sequence: Synthetic oligonucleotide
ccagcacgcucguugccca

SEQ ID NO: 2011964 - RNA, 19 nt, Artificial Sequence
  Description of Artificial Sequence: Synthetic oligonucleotide
cacgcucguugcccauaca

SEQ ID NO: 2011965 - RNA, 19 nt, Artificial Sequence
  Description of Artificial Sequence: Synthetic oligonucleotide
gggauagaaugcacacagu

SEQ ID NO: 2011966 - RNA, 19 nt, Artificial Sequence
  Description of Artificial Sequence: Synthetic oligonucleotide
cguagccuagguccagaca

SEQ ID NO: 2011967 - RNA, 19 nt, Artificial Sequence
  Description of Artificial Sequence: Synthetic oligonucleotide
ccauagagggaagccauau

SEQ ID NO: 2011968 - RNA, 19 nt, Artificial Sequence
  Description of Artificial Sequence: Synthetic oligonucleotide
caccugugggguggcagua

SEQ ID NO: 2011969 - RNA, 19 nt, Artificial Sequence
  Description of Artificial Sequence: Synthetic oligonucleotide
caccuuccucgcaccuuua

SEQ ID NO: 2011970 - RNA, 19 nt, Artificial Sequence
  Description of Artificial Sequence: Synthetic oligonucleotide
acucggcuucugaccuaau

SEQ ID NO: 2011971 - RNA, 19 nt, Artificial Sequence
  Description of Artificial Sequence: Synthetic oligonucleotide
caguggcaugcagguugca

SEQ ID NO: 2011972 - RNA, 19 nt, Artificial Sequence
  Description of Artificial Sequence: Synthetic oligonucleotide
cgugccaaauguagcucgu

SEQ ID NO: 2011973 - RNA, 19 nt, Artificial Sequence
  Description of Artificial Sequence: Synthetic oligonucleotide
gcccuuccuguuguuuugu

SEQ ID NO: 2011974 - RNA, 19 nt, Artificial Sequence
  Description of Artificial Sequence: Synthetic oligonucleotide
cagcacgcucguugcccau

SEQ ID NO: 2011975 - RNA, 19 nt, Artificial Sequence
  Description of Artificial Sequence: Synthetic oligonucleotide
cguugcccauacagagcaa

SEQ ID NO: 2011976 - RNA, 19 nt, Artificial Sequence
  Description of Artificial Sequence: Synthetic oligonucleotide
guuccccagguggccucuu

SEQ ID NO: 2011977 - RNA, 19 nt, Artificial Sequence
  Description of Artificial Sequence: Synthetic oligonucleotide
cccaacggcuggucucaau

SEQ ID NO: 2011978 - RNA, 19 nt, Artificial Sequence
  Description of Artificial Sequence: Synthetic oligonucleotide
ccccaacggcuggucucaa

SEQ ID NO: 2011979 - RNA, 19 nt, Artificial Sequence
  Description of Artificial Sequence: Synthetic oligonucleotide
auaaauuuaaugcauagcc

SEQ ID NO: 2011980 - RNA, 19 nt, Artificial Sequence
  Description of Artificial Sequence: Synthetic oligonucleotide
aaauuuaaugcauagccuc

SEQ ID NO: 2011981 - RNA, 19 nt, Artificial Sequence
  Description of Artificial Sequence: Synthetic oligonucleotide
uauauuaagaauacaauca

SEQ ID NO: 2011982 - RNA, 19 nt, Artificial Sequence
  Description of Artificial Sequence: Synthetic oligonucleotide
aauacaaucacacagugaa

SEQ ID NO: 2011983 - RNA, 19 nt, Artificial Sequence
  Description of Artificial Sequence: Synthetic oligonucleotide
aauuuugugaguucagcac

SEQ ID NO: 2011984 - RNA, 19 nt, Artificial Sequence
  Description of Artificial Sequence: Synthetic oligonucleotide
ugaugagucuccuagaggg

SEQ ID NO: 2011985 - RNA, 19 nt, Artificial Sequence
  Description of Artificial Sequence: Synthetic oligonucleotide
auauuaagaauacaaucac

SEQ ID NO: 2011986 - RNA, 19 nt, Artificial Sequence
  Description of Artificial Sequence: Synthetic oligonucleotide
uuaacaaauuauauuaaga

SEQ ID NO: 2011987 - RNA, 19 nt, Artificial Sequence
  Description of Artificial Sequence: Synthetic oligonucleotide
aauaaauguguacugggga

SEQ ID NO: 2011988 - RNA, 19 nt, Artificial Sequence
  Description of Artificial Sequence: Synthetic oligonucleotide
uuugaaggggcacaaagcc

SEQ ID NO: 2011989 - RNA, 19 nt, Artificial Sequence
  Description of Artificial Sequence: Synthetic oligonucleotide
aacaaauuauauuaagaau

SEQ ID NO: 2011990 - RNA, 19 nt, Artificial Sequence
  Description of Artificial Sequence: Synthetic oligonucleotide
aaugcauagccucuucuuc

SEQ ID NO: 2011991 - RNA, 19 nt, Artificial Sequence
  Description of Artificial Sequence: Synthetic oligonucleotide
agugaaaccucccuuugcc

SEQ ID NO: 2011992 - RNA, 19 nt, Artificial Sequence
  Description of Artificial Sequence: Synthetic oligonucleotide
gagguuuacacccagagca

SEQ ID NO: 2011993 - RNA, 19 nt, Artificial Sequence
  Description of Artificial Sequence: Synthetic oligonucleotide
acaucgaugagcuucaugu

SEQ ID NO: 2011994 - RNA, 19 nt, Artificial Sequence
  Description of Artificial Sequence: Synthetic oligonucleotide
uuggacuugaauaagccgu

SEQ ID NO: 2011995 - RNA, 19 nt, Artificial Sequence
  Description of Artificial Sequence: Synthetic oligonucleotide
aaaacgaucucgugaaaca

SEQ ID NO: 2011996 - RNA, 19 nt, Artificial Sequence
  Description of Artificial Sequence: Synthetic oligonucleotide
auaaauguguacuggggag

SEQ ID NO: 2011997 - RNA, 19 nt, Artificial Sequence
  Description of Artificial Sequence: Synthetic oligonucleotide
uauuaagaauacaaucaca

SEQ ID NO: 2011998 - RNA, 19 nt, Artificial Sequence
  Description of Artificial Sequence: Synthetic oligonucleotide
uuggaaaacgaucucguga

SEQ ID NO: 2011999 - RNA, 19 nt, Artificial Sequence
  Description of Artificial Sequence: Synthetic oligonucleotide
uaucugguaaccuuggacu

SEQ ID NO: 2012000 - RNA, 19 nt, Artificial Sequence
  Description of Artificial Sequence: Synthetic oligonucleotide
ugcaaaccaauuuugugag

SEQ ID NO: 2012001 - RNA, 19 nt, Artificial Sequence
  Description of Artificial Sequence: Synthetic oligonucleotide
cuucaguugaaucucgggg

SEQ ID NO: 2012002 - RNA, 19 nt, Artificial Sequence
  Description of Artificial Sequence: Synthetic oligonucleotide
caauaaauguguacugggg

SEQ ID NO: 2012003 - RNA, 19 nt, Artificial Sequence
  Description of Artificial Sequence: Synthetic oligonucleotide
gaguucuuugacuucaggc

SEQ ID NO: 2012004 - RNA, 19 nt, Artificial Sequence
  Description of Artificial Sequence: Synthetic oligonucleotide
augcaaaccaauuuuguga

SEQ ID NO: 2012005 - RNA, 19 nt, Artificial Sequence
  Description of Artificial Sequence: Synthetic oligonucleotide
ucucgugaaacacagguau

SEQ ID NO: 2012006 - RNA, 19 nt, Artificial Sequence
  Description of Artificial Sequence: Synthetic oligonucleotide
caauguguccuugacaucg

SEQ ID NO: 2012007 - RNA, 19 nt, Artificial Sequence
  Description of Artificial Sequence: Synthetic oligonucleotide
ucggggaauaaauuuaaug

SEQ ID NO: 2012008 - RNA, 19 nt, Artificial Sequence
  Description of Artificial Sequence: Synthetic oligonucleotide
aaacgaucucgugaaacac

SEQ ID NO: 2012009 - RNA, 19 nt, Artificial Sequence
  Description of Artificial Sequence: Synthetic oligonucleotide
caagugacuauuuucuuug

SEQ ID NO: 2012010 - RNA, 19 nt, Artificial Sequence
  Description of Artificial Sequence: Synthetic oligonucleotide
agaauacaaucacacagug

SEQ ID NO: 2012011 - RNA, 19 nt, Artificial Sequence
  Description of Artificial Sequence: Synthetic oligonucleotide
auagggaugaagcccacag

SEQ ID NO: 2012012 - RNA, 19 nt, Artificial Sequence
  Description of Artificial Sequence: Synthetic oligonucleotide
uacaaucacacagugaaac

SEQ ID NO: 2012013 - RNA, 19 nt, Artificial Sequence
  Description of Artificial Sequence: Synthetic oligonucleotide
agagguuuacacccagagc

SEQ ID NO: 2012014 - RNA, 19 nt, Artificial Sequence
  Description of Artificial Sequence: Synthetic oligonucleotide
caugaugcgaaugucacag

SEQ ID NO: 2012015 - RNA, 19 nt, Artificial Sequence
  Description of Artificial Sequence: Synthetic oligonucleotide
aacgagugcugauggcugc

SEQ ID NO: 2012016 - RNA, 19 nt, Artificial Sequence
  Description of Artificial Sequence: Synthetic oligonucleotide
auuuugugaguucagcacu

SEQ ID NO: 2012017 - RNA, 19 nt, Artificial Sequence
  Description of Artificial Sequence: Synthetic oligonucleotide
gaauaagccguccuuccag

SEQ ID NO: 2012018 - RNA, 19 nt, Artificial Sequence
  Description of Artificial Sequence: Synthetic oligonucleotide
cagcugaugacugugaggg

SEQ ID NO: 2012019 - RNA, 19 nt, Artificial Sequence
  Description of Artificial Sequence: Synthetic oligonucleotide
cuuggacuugaauaagccg

SEQ ID NO: 2012020 - RNA, 19 nt, Artificial Sequence
  Description of Artificial Sequence: Synthetic oligonucleotide
cucgaugcauacaaggccc

SEQ ID NO: 2012021 - RNA, 19 nt, Artificial Sequence
  Description of Artificial Sequence: Synthetic oligonucleotide
uaaauguguacuggggagg

SEQ ID NO: 2012022 - RNA, 19 nt, Artificial Sequence
  Description of Artificial Sequence: Synthetic oligonucleotide
uugccaagcagucaccuug

SEQ ID NO: 2012023 - RNA, 19 nt, Artificial Sequence
  Description of Artificial Sequence: Synthetic oligonucleotide
ugaaucucggggaauaaau

SEQ ID NO: 2012024 - RNA, 19 nt, Artificial Sequence
  Description of Artificial Sequence: Synthetic oligonucleotide
uggaaaacgaucucgugaa

SEQ ID NO: 2012025 - RNA, 19 nt, Artificial Sequence
  Description of Artificial Sequence: Synthetic oligonucleotide
cuuugaaggggcacaaagc

SEQ ID NO: 2012026 - RNA, 19 nt, Artificial Sequence
  Description of Artificial Sequence: Synthetic oligonucleotide
uaaccuuggacuugaauaa

SEQ ID NO: 2012027 - RNA, 19 nt, Artificial Sequence
  Description of Artificial Sequence: Synthetic oligonucleotide
guaaccuuggacuugaaua

SEQ ID NO: 2012028 - RNA, 19 nt, Artificial Sequence
  Description of Artificial Sequence: Synthetic oligonucleotide
aaucacacagugaaaccuc

SEQ ID NO: 2012029 - RNA, 19 nt, Artificial Sequence
  Description of Artificial Sequence: Synthetic oligonucleotide
caagcagucaccuugaaua

SEQ ID NO: 2012030 - RNA, 19 nt, Artificial Sequence
  Description of Artificial Sequence: Synthetic oligonucleotide
uccaccgucuccuggauag

SEQ ID NO: 2012031 - RNA, 19 nt, Artificial Sequence
  Description of Artificial Sequence: Synthetic oligonucleotide
cuugacaucgaugagcuuc

SEQ ID NO: 2012032 - RNA, 19 nt, Artificial Sequence
  Description of Artificial Sequence: Synthetic oligonucleotide
uggauagggaugaagccca

SEQ ID NO: 2012033 - RNA, 19 nt, Artificial Sequence
  Description of Artificial Sequence: Synthetic oligonucleotide
ucaguuccccaauaaaugu

SEQ ID NO: 2012034 - RNA, 19 nt, Artificial Sequence
  Description of Artificial Sequence: Synthetic oligonucleotide
uccuugacaucgaugagcu

SEQ ID NO: 2012035 - RNA, 19 nt, Artificial Sequence
  Description of Artificial Sequence: Synthetic oligonucleotide
aagugacuauuuucuuugg

SEQ ID NO: 2012036 - RNA, 19 nt, Artificial Sequence
  Description of Artificial Sequence: Synthetic oligonucleotide
agaagcagcuucucaucgc

SEQ ID NO: 2012037 - RNA, 19 nt, Artificial Sequence
  Description of Artificial Sequence: Synthetic oligonucleotide
aaauuauauuaagaauaca

SEQ ID NO: 2012038 - RNA, 19 nt, Artificial Sequence
  Description of Artificial Sequence: Synthetic oligonucleotide
uugaauaagccguccuucc

SEQ ID NO: 2012039 - RNA, 19 nt, Artificial Sequence
  Description of Artificial Sequence: Synthetic oligonucleotide
auguguacuggggaggugc

SEQ ID NO: 2012040 - RNA, 19 nt, Artificial Sequence
  Description of Artificial Sequence: Synthetic oligonucleotide
uucagcacuucauggcucg

SEQ ID NO: 2012041 - RNA, 19 nt, Artificial Sequence
  Description of Artificial Sequence: Synthetic oligonucleotide
cugugcaaccacaucauag

SEQ ID NO: 2012042 - RNA, 19 nt, Artificial Sequence
  Description of Artificial Sequence: Synthetic oligonucleotide
aauuuaaugcauagccucu

SEQ ID NO: 2012043 - RNA, 19 nt, Artificial Sequence
  Description of Artificial Sequence: Synthetic oligonucleotide
aaugucacagauggcagcu

SEQ ID NO: 2012044 - RNA, 19 nt, Artificial Sequence
  Description of Artificial Sequence: Synthetic oligonucleotide
cacaucauagccuguuggg

SEQ ID NO: 2012045 - RNA, 19 nt, Artificial Sequence
  Description of Artificial Sequence: Synthetic oligonucleotide
cuggcaaggcuucugagag

SEQ ID NO: 2012046 - RNA, 19 nt, Artificial Sequence
  Description of Artificial Sequence: Synthetic oligonucleotide
gaaaacgaucucgugaaac

SEQ ID NO: 2012047 - RNA, 19 nt, Artificial Sequence
  Description of Artificial Sequence: Synthetic oligonucleotide
gaguucagcacuucauggc

SEQ ID NO: 2012048 - RNA, 19 nt, Artificial Sequence
  Description of Artificial Sequence: Synthetic oligonucleotide
uuacacccagagcagagga

SEQ ID NO: 2012049 - RNA, 19 nt, Artificial Sequence
  Description of Artificial Sequence: Synthetic oligonucleotide
agucgugguuucuuggcac

SEQ ID NO: 2012050 - RNA, 19 nt, Artificial Sequence
  Description of Artificial Sequence: Synthetic oligonucleotide
aagguuuggggcuggggug

SEQ ID NO: 2012051 - RNA, 19 nt, Artificial Sequence
  Description of Artificial Sequence: Synthetic oligonucleotide
aaccaauuuugugaguuca

SEQ ID NO: 2012052 - RNA, 19 nt, Artificial Sequence
  Description of Artificial Sequence: Synthetic oligonucleotide
acccugaugagucuccuag

SEQ ID NO: 2012053 - RNA, 19 nt, Artificial Sequence
  Description of Artificial Sequence: Synthetic oligonucleotide
ucuuugacuucaggcaugg

SEQ ID NO: 2012054 - RNA, 19 nt, Artificial Sequence
  Description of Artificial Sequence: Synthetic oligonucleotide
ugcucaggagccuuugaag

SEQ ID NO: 2012055 - RNA, 19 nt, Artificial Sequence
  Description of Artificial Sequence: Synthetic oligonucleotide
aguucagcacuucauggcu

SEQ ID NO: 2012056 - RNA, 19 nt, Artificial Sequence
  Description of Artificial Sequence: Synthetic oligonucleotide
aagguccucgucccagcgc

SEQ ID NO: 2012057 - RNA, 19 nt, Artificial Sequence
  Description of Artificial Sequence: Synthetic oligonucleotide
cggggaauaaauuuaaugc

SEQ ID NO: 2012058 - RNA, 19 nt, Artificial Sequence
  Description of Artificial Sequence: Synthetic oligonucleotide
gaucucgugaaacacaggu

SEQ ID NO: 2012059 - RNA, 19 nt, Artificial Sequence
  Description of Artificial Sequence: Synthetic oligonucleotide
cuccgucucacgcagaagc

SEQ ID NO: 2012060 - RNA, 19 nt, Artificial Sequence
  Description of Artificial Sequence: Synthetic oligonucleotide
ucaggaugcaaaccaauuu

SEQ ID NO: 2012061 - RNA, 19 nt, Artificial Sequence
  Description of Artificial Sequence: Synthetic oligonucleotide
uugacaucgaugagcuuca

SEQ ID NO: 2012062 - RNA, 19 nt, Artificial Sequence
  Description of Artificial Sequence: Synthetic oligonucleotide
cuaaaggccaccuccugug

SEQ ID NO: 2012063 - RNA, 19 nt, Artificial Sequence
  Description of Artificial Sequence: Synthetic oligonucleotide
aaaccucccuuugccaagc

SEQ ID NO: 2012064 - RNA, 19 nt, Artificial Sequence
  Description of Artificial Sequence: Synthetic oligonucleotide
ugaauaagccguccuucca

SEQ ID NO: 2012065 - RNA, 19 nt, Artificial Sequence
  Description of Artificial Sequence: Synthetic oligonucleotide
uuuacacccagagcagagg

SEQ ID NO: 2012066 - RNA, 19 nt, Artificial Sequence
  Description of Artificial Sequence: Synthetic oligonucleotide
ugaugcgaaugucacagau

SEQ ID NO: 2012067 - RNA, 19 nt, Artificial Sequence
  Description of Artificial Sequence: Synthetic oligonucleotide
ugugaguucagcacuucau

SEQ ID NO: 2012068 - RNA, 19 nt, Artificial Sequence
  Description of Artificial Sequence: Synthetic oligonucleotide
ccaauaaauguguacuggg

SEQ ID NO: 2012069 - RNA, 19 nt, Artificial Sequence
  Description of Artificial Sequence: Synthetic oligonucleotide
auaccagaugcccaugcug

SEQ ID NO: 2012070 - RNA, 19 nt, Artificial Sequence
  Description of Artificial Sequence: Synthetic oligonucleotide
uuuaaugcauagccucuuc

SEQ ID NO: 2012071 - RNA, 19 nt, Artificial Sequence
  Description of Artificial Sequence: Synthetic oligonucleotide
ugaacgagugcugauggcu

SEQ ID NO: 2012072 - RNA, 19 nt, Artificial Sequence
  Description of Artificial Sequence: Synthetic oligonucleotide
acuccgacucccgugaugg

SEQ ID NO: 2012073 - RNA, 19 nt, Artificial Sequence
  Description of Artificial Sequence: Synthetic oligonucleotide
cucaggagccuuugaaggg

SEQ ID NO: 2012074 - RNA, 19 nt, Artificial Sequence
  Description of Artificial Sequence: Synthetic oligonucleotide
cuggauagggaugaagccc

SEQ ID NO: 2012075 - RNA, 19 nt, Artificial Sequence
  Description of Artificial Sequence: Synthetic oligonucleotide
agaguucuuugacuucagg

SEQ ID NO: 2012076 - RNA, 19 nt, Artificial Sequence
  Description of Artificial Sequence: Synthetic oligonucleotide
cacaaagccugaacgagug

SEQ ID NO: 2012077 - RNA, 19 nt, Artificial Sequence
  Description of Artificial Sequence: Synthetic oligonucleotide
uaagguccucgucccagcg

SEQ ID NO: 2012078 - RNA, 19 nt, Artificial Sequence
  Description of Artificial Sequence: Synthetic oligonucleotide
ucgugaaacacagguaucu

SEQ ID NO: 2012079 - RNA, 19 nt, Artificial Sequence
  Description of Artificial Sequence: Synthetic oligonucleotide
ucucggggaauaaauuuaa

SEQ ID NO: 2012080 - RNA, 19 nt, Artificial Sequence
  Description of Artificial Sequence: Synthetic oligonucleotide
aaauguguacuggggaggu

SEQ ID NO: 2012081 - RNA, 19 nt, Artificial Sequence
  Description of Artificial Sequence: Synthetic oligonucleotide
accuuggacuugaauaagc

SEQ ID NO: 2012082 - RNA, 19 nt, Artificial Sequence
  Description of Artificial Sequence: Synthetic oligonucleotide
gugccuaagguccucgucc

SEQ ID NO: 2012083 - RNA, 19 nt, Artificial Sequence
  Description of Artificial Sequence: Synthetic oligonucleotide
uucugagaguucuuugacu

SEQ ID NO: 2012084 - RNA, 19 nt, Artificial Sequence
  Description of Artificial Sequence: Synthetic oligonucleotide
ucaguugaaucucggggaa

SEQ ID NO: 2012085 - RNA, 19 nt, Artificial Sequence
  Description of Artificial Sequence: Synthetic oligonucleotide
ggggaauaaauuuaaugca

SEQ ID NO: 2012086 - RNA, 19 nt, Artificial Sequence
  Description of Artificial Sequence: Synthetic oligonucleotide
ggggcacaaagccugaacg

SEQ ID NO: 2012087 - RNA, 19 nt, Artificial Sequence
  Description of Artificial Sequence: Synthetic oligonucleotide
aucacacagugaaaccucc

SEQ ID NO: 2012088 - RNA, 19 nt, Artificial Sequence
  Description of Artificial Sequence: Synthetic oligonucleotide
acacagguaucugguaacc

SEQ ID NO: 2012089 - RNA, 19 nt, Artificial Sequence
  Description of Artificial Sequence: Synthetic oligonucleotide
acuacuccgacucccguga

SEQ ID NO: 2012090 - RNA, 19 nt, Artificial Sequence
  Description of Artificial Sequence: Synthetic oligonucleotide
ucuccuagagggagcuggg

SEQ ID NO: 2012091 - RNA, 19 nt, Artificial Sequence
  Description of Artificial Sequence: Synthetic oligonucleotide
cagguaucugguaaccuug

SEQ ID NO: 2012092 - RNA, 19 nt, Artificial Sequence
  Description of Artificial Sequence: Synthetic oligonucleotide
cuugaauaagccguccuuc

SEQ ID NO: 2012093 - RNA, 19 nt, Artificial Sequence
  Description of Artificial Sequence: Synthetic oligonucleotide
uccgggaagccacuacucc

SEQ ID NO: 2012094 - RNA, 19 nt, Artificial Sequence
  Description of Artificial Sequence: Synthetic oligonucleotide
uuggucuguuccccgcugg

SEQ ID NO: 2012095 - RNA, 19 nt, Artificial Sequence
  Description of Artificial Sequence: Synthetic oligonucleotide
uuccccaauaaauguguac

SEQ ID NO: 2012096 - RNA, 19 nt, Artificial Sequence
  Description of Artificial Sequence: Synthetic oligonucleotide
aggaagaaagcugggccac

SEQ ID NO: 2012097 - RNA, 19 nt, Artificial Sequence
  Description of Artificial Sequence: Synthetic oligonucleotide
uuuugugaguucagcacuu

SEQ ID NO: 2012098 - RNA, 19 nt, Artificial Sequence
  Description of Artificial Sequence: Synthetic oligonucleotide
uaaugcauagccucuucuu

SEQ ID NO: 2012099 - RNA, 19 nt, Artificial Sequence
  Description of Artificial Sequence: Synthetic oligonucleotide
acagugaaaccucccuuug

SEQ ID NO: 2012100 - RNA, 19 nt, Artificial Sequence
  Description of Artificial Sequence: Synthetic oligonucleotide
ugggccacccugaugaguc

SEQ ID NO: 2012101 - RNA, 19 nt, Artificial Sequence
  Description of Artificial Sequence: Synthetic oligonucleotide
uuccuaaaggccaccuccu

SEQ ID NO: 2012102 - RNA, 19 nt, Artificial Sequence
  Description of Artificial Sequence: Synthetic oligonucleotide
gaugcgaaugucacagaug

SEQ ID NO: 2012103 - RNA, 19 nt, Artificial Sequence
  Description of Artificial Sequence: Synthetic oligonucleotide
aaccuuggacuugaauaag

SEQ ID NO: 2012104 - RNA, 19 nt, Artificial Sequence
  Description of Artificial Sequence: Synthetic oligonucleotide
aagcccacaggcaaugugu

SEQ ID NO: 2012105 - RNA, 19 nt, Artificial Sequence
  Description of Artificial Sequence: Synthetic oligonucleotide
gguggguugagacgagucg

SEQ ID NO: 2012106 - RNA, 19 nt, Artificial Sequence
  Description of Artificial Sequence: Synthetic oligonucleotide
acgagucgugguuucuugg

SEQ ID NO: 2012107 - RNA, 19 nt, Artificial Sequence
  Description of Artificial Sequence: Synthetic oligonucleotide
acgaucucgugaaacacag

SEQ ID NO: 2012108 - RNA, 19 nt, Artificial Sequence
  Description of Artificial Sequence: Synthetic oligonucleotide
gcugaugacugugagggcg

SEQ ID NO: 2012109 - RNA, 19 nt, Artificial Sequence
  Description of Artificial Sequence: Synthetic oligonucleotide
acagguaucugguaaccuu

SEQ ID NO: 2012110 - RNA, 19 nt, Artificial Sequence
  Description of Artificial Sequence: Synthetic oligonucleotide
uguguacuggggaggugcc

SEQ ID NO: 2012111 - RNA, 19 nt, Artificial Sequence
  Description of Artificial Sequence: Synthetic oligonucleotide
guccuugacaucgaugagc

SEQ ID NO: 2012112 - RNA, 19 nt, Artificial Sequence
  Description of Artificial Sequence: Synthetic oligonucleotide
acuugaauaagccguccuu

SEQ ID NO: 2012113 - RNA, 19 nt, Artificial Sequence
  Description of Artificial Sequence: Synthetic oligonucleotide
gcagcugugccuaaggucc

SEQ ID NO: 2012114 - RNA, 19 nt, Artificial Sequence
  Description of Artificial Sequence: Synthetic oligonucleotide
uccgacucccgugaugggg

SEQ ID NO: 2012115 - RNA, 19 nt, Artificial Sequence
  Description of Artificial Sequence: Synthetic oligonucleotide
uccuguguguccaccgucu

SEQ ID NO: 2012116 - RNA, 19 nt, Artificial Sequence
  Description of Artificial Sequence: Synthetic oligonucleotide
caguuccccaauaaaugug

SEQ ID NO: 2012117 - RNA, 19 nt, Artificial Sequence
  Description of Artificial Sequence: Synthetic oligonucleotide
ugcgauaccagaugcccau

SEQ ID NO: 2012118 - RNA, 19 nt, Artificial Sequence
  Description of Artificial Sequence: Synthetic oligonucleotide
cuugguccggcccaugaug

SEQ ID NO: 2012119 - RNA, 19 nt, Artificial Sequence
  Description of Artificial Sequence: Synthetic oligonucleotide
uacaaggcccuuucuggga

SEQ ID NO: 2012120 - RNA, 19 nt, Artificial Sequence
  Description of Artificial Sequence: Synthetic oligonucleotide
gaagguuuggggcuggggu

SEQ ID NO: 2012121 - RNA, 19 nt, Artificial Sequence
  Description of Artificial Sequence: Synthetic oligonucleotide
gacaucgaugagcuucaug

SEQ ID NO: 2012122 - RNA, 19 nt, Artificial Sequence
  Description of Artificial Sequence: Synthetic oligonucleotide
aggcaugguggcuuggucu

SEQ ID NO: 2012123 - RNA, 19 nt, Artificial Sequence
  Description of Artificial Sequence: Synthetic oligonucleotide
uggguugagacgagucgug

SEQ ID NO: 2012124 - RNA, 19 nt, Artificial Sequence
  Description of Artificial Sequence: Synthetic oligonucleotide
ugcauagccucuucuuccu

SEQ ID NO: 2012125 - RNA, 19 nt, Artificial Sequence
  Description of Artificial Sequence: Synthetic oligonucleotide
gacgagucgugguuucuug

SEQ ID NO: 2012126 - RNA, 19 nt, Artificial Sequence
  Description of Artificial Sequence: Synthetic oligonucleotide
aggaugcaaaccaauuuug

SEQ ID NO: 2012127 - RNA, 19 nt, Artificial Sequence
  Description of Artificial Sequence: Synthetic oligonucleotide
ucacgcagaagcagcuucu

SEQ ID NO: 2012128 - RNA, 19 nt, Artificial Sequence
  Description of Artificial Sequence: Synthetic oligonucleotide
ugggagucaggaugcaaac

SEQ ID NO: 2012129 - RNA, 19 nt, Artificial Sequence
  Description of Artificial Sequence: Synthetic oligonucleotide
uggcacucugcccaugcga

SEQ ID NO: 2012130 - RNA, 19 nt, Artificial Sequence
  Description of Artificial Sequence: Synthetic oligonucleotide
cagggagaagcccagcuuc

SEQ ID NO: 2012131 - RNA, 19 nt, Artificial Sequence
  Description of Artificial Sequence: Synthetic oligonucleotide
agccacuacuccgacuccc

SEQ ID NO: 2012132 - RNA, 19 nt, Artificial Sequence
  Description of Artificial Sequence: Synthetic oligonucleotide
cauggcucgaugcauacaa

SEQ ID NO: 2012133 - RNA, 19 nt, Artificial Sequence
  Description of Artificial Sequence: Synthetic oligonucleotide
uccuagagggagcugggua

SEQ ID NO: 2012134 - RNA, 19 nt, Artificial Sequence
  Description of Artificial Sequence: Synthetic oligonucleotide
ccuuugaaggggcacaaag

SEQ ID NO: 2012135 - RNA, 19 nt, Artificial Sequence
  Description of Artificial Sequence: Synthetic oligonucleotide
gcucgaugcauacaaggcc

SEQ ID NO: 2012136 - RNA, 19 nt, Artificial Sequence
  Description of Artificial Sequence: Synthetic oligonucleotide
ucgucccagcgccacacag

SEQ ID NO: 2012137 - RNA, 19 nt, Artificial Sequence
  Description of Artificial Sequence: Synthetic oligonucleotide
accuccuguguguccaccg

SEQ ID NO: 2012138 - RNA, 19 nt, Artificial Sequence
  Description of Artificial Sequence: Synthetic oligonucleotide
gaugggguccauugguguc

SEQ ID NO: 2012139 - RNA, 19 nt, Artificial Sequence
  Description of Artificial Sequence: Synthetic oligonucleotide
gaacgagugcugauggcug

SEQ ID NO: 2012140 - RNA, 19 nt, Artificial Sequence
  Description of Artificial Sequence: Synthetic oligonucleotide
ugugccuaagguccucguc

SEQ ID NO: 2012141 - RNA, 19 nt, Artificial Sequence
  Description of Artificial Sequence: Synthetic oligonucleotide
ucugcccaugcgauaccag

SEQ ID NO: 2012142 - RNA, 19 nt, Artificial Sequence
  Description of Artificial Sequence: Synthetic oligonucleotide
ggcccaacugcucaggagc

SEQ ID NO: 2012143 - RNA, 19 nt, Artificial Sequence
  Description of Artificial Sequence: Synthetic oligonucleotide
uccgucucacgcagaagca

SEQ ID NO: 2012144 - RNA, 19 nt, Artificial Sequence
  Description of Artificial Sequence: Synthetic oligonucleotide
gguccauuggugucucugg

SEQ ID NO: 2012145 - RNA, 19 nt, Artificial Sequence
  Description of Artificial Sequence: Synthetic oligonucleotide
cagaggaagaaagcugggc

SEQ ID NO: 2012146 - RNA, 19 nt, Artificial Sequence
  Description of Artificial Sequence: Synthetic oligonucleotide
gcauacaaggcccuuucug

SEQ ID NO: 2012147 - RNA, 19 nt, Artificial Sequence
  Description of Artificial Sequence: Synthetic oligonucleotide
cuaagguccucgucccagc

SEQ ID NO: 2012148 - RNA, 19 nt, Artificial Sequence
  Description of Artificial Sequence: Synthetic oligonucleotide
cucacgcagaagcagcuuc

SEQ ID NO: 2012149 - RNA, 19 nt, Artificial Sequence
  Description of Artificial Sequence: Synthetic oligonucleotide
cagugaaaccucccuuugc

SEQ ID NO: 2012150 - RNA, 19 nt, Artificial Sequence
  Description of Artificial Sequence: Synthetic oligonucleotide
ccugaacgagugcugaugg

SEQ ID NO: 2012151 - RNA, 19 nt, Artificial Sequence
  Description of Artificial Sequence: Synthetic oligonucleotide
cucagagguuuacacccag

SEQ ID NO: 2012152 - RNA, 19 nt, Artificial Sequence
  Description of Artificial Sequence: Synthetic oligonucleotide
ugcccaugcgauaccagau

SEQ ID NO: 2012153 - RNA, 19 nt, Artificial Sequence
  Description of Artificial Sequence: Synthetic oligonucleotide
aggcaauguguccuugaca

SEQ ID NO: 2012154 - RNA, 19 nt, Artificial Sequence
  Description of Artificial Sequence: Synthetic oligonucleotide
ugcgaaugucacagauggc

SEQ ID NO: 2012155 - RNA, 19 nt, Artificial Sequence
  Description of Artificial Sequence: Synthetic oligonucleotide
ugcuugguccggcccauga

SEQ ID NO: 2012156 - RNA, 19 nt, Artificial Sequence
  Description of Artificial Sequence: Synthetic oligonucleotide
cuuuggaaaacgaucucgu

SEQ ID NO: 2012157 - RNA, 19 nt, Artificial Sequence
  Description of Artificial Sequence: Synthetic oligonucleotide
ucgaugcauacaaggcccu

SEQ ID NO: 2012158 - RNA, 19 nt, Artificial Sequence
  Description of Artificial Sequence: Synthetic oligonucleotide
uugaaucucggggaauaaa

SEQ ID NO: 2012159 - RNA, 19 nt, Artificial Sequence
  Description of Artificial Sequence: Synthetic oligonucleotide
ggcacaaagccugaacgag

SEQ ID NO: 2012160 - RNA, 19 nt, Artificial Sequence
  Description of Artificial Sequence: Synthetic oligonucleotide
aaccacaucauagccuguu

SEQ ID NO: 2012161 - RNA, 19 nt, Artificial Sequence
  Description of Artificial Sequence: Synthetic oligonucleotide
caucgaugagcuucauguc

SEQ ID NO: 2012162 - RNA, 19 nt, Artificial Sequence
  Description of Artificial Sequence: Synthetic oligonucleotide
acaggcaauguguccuuga

SEQ ID NO: 2012163 - RNA, 19 nt, Artificial Sequence
  Description of Artificial Sequence: Synthetic oligonucleotide
uggcccaacugcucaggag

SEQ ID NO: 2012164 - RNA, 19 nt, Artificial Sequence
  Description of Artificial Sequence: Synthetic oligonucleotide
cugaacgagugcugauggc

SEQ ID NO: 2012165 - RNA, 19 nt, Artificial Sequence
  Description of Artificial Sequence: Synthetic oligonucleotide
agguaucugguaaccuugg

SEQ ID NO: 2012166 - RNA, 19 nt, Artificial Sequence
  Description of Artificial Sequence: Synthetic oligonucleotide
gcgaaugucacagauggca

SEQ ID NO: 2012167 - RNA, 19 nt, Artificial Sequence
  Description of Artificial Sequence: Synthetic oligonucleotide
aauguguacuggggaggug

SEQ ID NO: 2012168 - RNA, 19 nt, Artificial Sequence
  Description of Artificial Sequence: Synthetic oligonucleotide
uuccgggaagccacuacuc

SEQ ID NO: 2012169 - RNA, 19 nt, Artificial Sequence
  Description of Artificial Sequence: Synthetic oligonucleotide
ugagacgagucgugguuuc

SEQ ID NO: 2012170 - RNA, 19 nt, Artificial Sequence
  Description of Artificial Sequence: Synthetic oligonucleotide
accaauuuugugaguucag

SEQ ID NO: 2012171 - RNA, 19 nt, Artificial Sequence
  Description of Artificial Sequence: Synthetic oligonucleotide
cucgugaaacacagguauc

SEQ ID NO: 2012172 - RNA, 19 nt, Artificial Sequence
  Description of Artificial Sequence: Synthetic oligonucleotide
aguugaaucucggggaaua

SEQ ID NO: 2012173 - RNA, 19 nt, Artificial Sequence
  Description of Artificial Sequence: Synthetic oligonucleotide
cacucugcccaugcgauac

SEQ ID NO: 2012174 - RNA, 19 nt, Artificial Sequence
  Description of Artificial Sequence: Synthetic oligonucleotide
ccugaugagucuccuagag

SEQ ID NO: 2012175 - RNA, 19 nt, Artificial Sequence
  Description of Artificial Sequence: Synthetic oligonucleotide
caggcaauguguccuugac

SEQ ID NO: 2012176 - RNA, 19 nt, Artificial Sequence
  Description of Artificial Sequence: Synthetic oligonucleotide
uacuccgacucccgugaug

SEQ ID NO: 2012177 - RNA, 19 nt, Artificial Sequence
  Description of Artificial Sequence: Synthetic oligonucleotide
augacugugagggcguggu

SEQ ID NO: 2012178 - RNA, 19 nt, Artificial Sequence
  Description of Artificial Sequence: Synthetic oligonucleotide
ucugugcaaccacaucaua

SEQ ID NO: 2012179 - RNA, 19 nt, Artificial Sequence
  Description of Artificial Sequence: Synthetic oligonucleotide
uggcuuggucuguuccccg

SEQ ID NO: 2012180 - RNA, 19 nt, Artificial Sequence
  Description of Artificial Sequence: Synthetic oligonucleotide
cacuacuccgacucccgug

SEQ ID NO: 2012181 - RNA, 19 nt, Artificial Sequence
  Description of Artificial Sequence: Synthetic oligonucleotide
uuccccaagugacuauuuu

SEQ ID NO: 2012182 - RNA, 19 nt, Artificial Sequence
  Description of Artificial Sequence: Synthetic oligonucleotide
agguuuacacccagagcag

SEQ ID NO: 2012183 - RNA, 19 nt, Artificial Sequence
  Description of Artificial Sequence: Synthetic oligonucleotide
auuuaaugcauagccucuu

SEQ ID NO: 2012184 - RNA, 19 nt, Artificial Sequence
  Description of Artificial Sequence: Synthetic oligonucleotide
uucuuccuaaaggccaccu

SEQ ID NO: 2012185 - RNA, 19 nt, Artificial Sequence
  Description of Artificial Sequence: Synthetic oligonucleotide
auagccucuucuuccuaaa

SEQ ID NO: 2012186 - RNA, 19 nt, Artificial Sequence
  Description of Artificial Sequence: Synthetic oligonucleotide
aacugcucaggagccuuug

SEQ ID NO: 2012187 - RNA, 19 nt, Artificial Sequence
  Description of Artificial Sequence: Synthetic oligonucleotide
agcuucaguugaaucucgg

SEQ ID NO: 2012188 - RNA, 19 nt, Artificial Sequence
  Description of Artificial Sequence: Synthetic oligonucleotide
uccagaggucagcauccac

SEQ ID NO: 2012189 - RNA, 19 nt, Artificial Sequence
  Description of Artificial Sequence: Synthetic oligonucleotide
guuggggcucgguuccggg

SEQ ID NO: 2012190 - RNA, 19 nt, Artificial Sequence
  Description of Artificial Sequence: Synthetic oligonucleotide
ggagaagcccagcuucucc

SEQ ID NO: 2012191 - RNA, 19 nt, Artificial Sequence
  Description of Artificial Sequence: Synthetic oligonucleotide
ccaauuuugugaguucagc

SEQ ID NO: 2012192 - RNA, 19 nt, Artificial Sequence
  Description of Artificial Sequence: Synthetic oligonucleotide
ggaugaagcccacaggcaa

SEQ ID NO: 2012193 - RNA, 19 nt, Artificial Sequence
  Description of Artificial Sequence: Synthetic oligonucleotide
caggagccuuugaaggggc

SEQ ID NO: 2012194 - RNA, 19 nt, Artificial Sequence
  Description of Artificial Sequence: Synthetic oligonucleotide
guucaguuccccaauaaau

SEQ ID NO: 2012195 - RNA, 19 nt, Artificial Sequence
  Description of Artificial Sequence: Synthetic oligonucleotide
gacuugaauaagccguccu

SEQ ID NO: 2012196 - RNA, 19 nt, Artificial Sequence
  Description of Artificial Sequence: Synthetic oligonucleotide
uggggcucgguuccgggaa

SEQ ID NO: 2012197 - RNA, 19 nt, Artificial Sequence
  Description of Artificial Sequence: Synthetic oligonucleotide
cccaugaugcgaaugucac

SEQ ID NO: 2012198 - RNA, 19 nt, Artificial Sequence
  Description of Artificial Sequence: Synthetic oligonucleotide
ucaucgcccgggcggcgcg

SEQ ID NO: 2012199 - RNA, 19 nt, Artificial Sequence
  Description of Artificial Sequence: Synthetic oligonucleotide
ugguccggcccaugaugcg

SEQ ID NO: 2012200 - RNA, 19 nt, Artificial Sequence
  Description of Artificial Sequence: Synthetic oligonucleotide
gugaaaccucccuuugcca

SEQ ID NO: 2012201 - RNA, 19 nt, Artificial Sequence
  Description of Artificial Sequence: Synthetic oligonucleotide
gcacuucauggcucgaugc

SEQ ID NO: 2012202 - RNA, 19 nt, Artificial Sequence
  Description of Artificial Sequence: Synthetic oligonucleotide
ucccggcuccgucucacgc

SEQ ID NO: 2012203 - RNA, 19 nt, Artificial Sequence
  Description of Artificial Sequence: Synthetic oligonucleotide
gauaccagaugcccaugcu

SEQ ID NO: 2012204 - RNA, 19 nt, Artificial Sequence
  Description of Artificial Sequence: Synthetic oligonucleotide
acuucauggcucgaugcau

SEQ ID NO: 2012205 - RNA, 19 nt, Artificial Sequence
  Description of Artificial Sequence: Synthetic oligonucleotide
acagggagaagcccagcuu

SEQ ID NO: 2012206 - RNA, 19 nt, Artificial Sequence
  Description of Artificial Sequence: Synthetic oligonucleotide
ggcgugguggguugagacg

SEQ ID NO: 2012207 - RNA, 19 nt, Artificial Sequence
  Description of Artificial Sequence: Synthetic oligonucleotide
gaugagucuccuagaggga

SEQ ID NO: 2012208 - RNA, 19 nt, Artificial Sequence
  Description of Artificial Sequence: Synthetic oligonucleotide
acgcagaagcagcuucuca

SEQ ID NO: 2012209 - RNA, 19 nt, Artificial Sequence
  Description of Artificial Sequence: Synthetic oligonucleotide
ugacugugagggcguggug

SEQ ID NO: 2012210 - RNA, 19 nt, Artificial Sequence
  Description of Artificial Sequence: Synthetic oligonucleotide
cccaugcgauaccagaugc

SEQ ID NO: 2012211 - RNA, 19 nt, Artificial Sequence
  Description of Artificial Sequence: Synthetic oligonucleotide
cuucaggcaugguggcuug

SEQ ID NO: 2012212 - RNA, 19 nt, Artificial Sequence
  Description of Artificial Sequence: Synthetic oligonucleotide
cagaugcccaugcuguuca

SEQ ID NO: 2012213 - RNA, 19 nt, Artificial Sequence
  Description of Artificial Sequence: Synthetic oligonucleotide
caccgucuccuggauaggg

SEQ ID NO: 2012214 - RNA, 19 nt, Artificial Sequence
  Description of Artificial Sequence: Synthetic oligonucleotide
uugagacgagucgugguuu

SEQ ID NO: 2012215 - RNA, 19 nt, Artificial Sequence
  Description of Artificial Sequence: Synthetic oligonucleotide
augaugcgaaugucacaga

SEQ ID NO: 2012216 - RNA, 19 nt, Artificial Sequence
  Description of Artificial Sequence: Synthetic oligonucleotide
agcccacaggcaauguguc

SEQ ID NO: 2012217 - RNA, 19 nt, Artificial Sequence
  Description of Artificial Sequence: Synthetic oligonucleotide
ccgggaagccacuacuccg

SEQ ID NO: 2012218 - RNA, 19 nt, Artificial Sequence
  Description of Artificial Sequence: Synthetic oligonucleotide
cugcccaugcgauaccaga

SEQ ID NO: 2012219 - RNA, 19 nt, Artificial Sequence
  Description of Artificial Sequence: Synthetic oligonucleotide
ugcccaugcuguucaguuc

SEQ ID NO: 2012220 - RNA, 19 nt, Artificial Sequence
  Description of Artificial Sequence: Synthetic oligonucleotide
uuggggcucgguuccggga

SEQ ID NO: 2012221 - RNA, 19 nt, Artificial Sequence
  Description of Artificial Sequence: Synthetic oligonucleotide
cgaaugucacagauggcag

SEQ ID NO: 2012222 - RNA, 19 nt, Artificial Sequence
  Description of Artificial Sequence: Synthetic oligonucleotide
gagccuuugaaggggcaca

SEQ ID NO: 2012223 - RNA, 19 nt, Artificial Sequence
  Description of Artificial Sequence: Synthetic oligonucleotide
uagagggagcuggguacag

SEQ ID NO: 2012224 - RNA, 19 nt, Artificial Sequence
  Description of Artificial Sequence: Synthetic oligonucleotide
cacaguggcccaacugcuc

SEQ ID NO: 2012225 - RNA, 19 nt, Artificial Sequence
  Description of Artificial Sequence: Synthetic oligonucleotide
caaggcccuuucugggaag

SEQ ID NO: 2012226 - RNA, 19 nt, Artificial Sequence
  Description of Artificial Sequence: Synthetic oligonucleotide
cauagccuguuggggcucg

SEQ ID NO: 2012227 - RNA, 19 nt, Artificial Sequence
  Description of Artificial Sequence: Synthetic oligonucleotide
cuucauggcucgaugcaua

SEQ ID NO: 2012228 - RNA, 19 nt, Artificial Sequence
  Description of Artificial Sequence: Synthetic oligonucleotide
ugugagggcgugguggguu

SEQ ID NO: 2012229 - RNA, 19 nt, Artificial Sequence
  Description of Artificial Sequence: Synthetic oligonucleotide
cuucuuccuaaaggccacc

SEQ ID NO: 2012230 - RNA, 19 nt, Artificial Sequence
  Description of Artificial Sequence: Synthetic oligonucleotide
caggaugcaaaccaauuuu

SEQ ID NO: 2012231 - RNA, 19 nt, Artificial Sequence
  Description of Artificial Sequence: Synthetic oligonucleotide
cugguaaccuuggacuuga

SEQ ID NO: 2012232 - RNA, 19 nt, Artificial Sequence
  Description of Artificial Sequence: Synthetic oligonucleotide
ugaugacugugagggcgug

SEQ ID NO: 2012233 - RNA, 19 nt, Artificial Sequence
  Description of Artificial Sequence: Synthetic oligonucleotide
agcgccacacaguggccca

SEQ ID NO: 2012234 - RNA, 19 nt, Artificial Sequence
  Description of Artificial Sequence: Synthetic oligonucleotide
cuguucaguuccccaauaa

SEQ ID NO: 2012235 - RNA, 19 nt, Artificial Sequence
  Description of Artificial Sequence: Synthetic oligonucleotide
guugagacgagucgugguu

SEQ ID NO: 2012236 - RNA, 19 nt, Artificial Sequence
  Description of Artificial Sequence: Synthetic oligonucleotide
guucagcacuucauggcuc

SEQ ID NO: 2012237 - RNA, 19 nt, Artificial Sequence
  Description of Artificial Sequence: Synthetic oligonucleotide
gggcacaaagccugaacga

SEQ ID NO: 2012238 - RNA, 19 nt, Artificial Sequence
  Description of Artificial Sequence: Synthetic oligonucleotide
ggguugagacgagucgugg

SEQ ID NO: 2012239 - RNA, 19 nt, Artificial Sequence
  Description of Artificial Sequence: Synthetic oligonucleotide
gcuucucaucgcccgggcg

SEQ ID NO: 2012240 - RNA, 19 nt, Artificial Sequence
  Description of Artificial Sequence: Synthetic oligonucleotide
ccaugcgauaccagaugcc

SEQ ID NO: 2012241 - RNA, 19 nt, Artificial Sequence
  Description of Artificial Sequence: Synthetic oligonucleotide
auguguccuugacaucgau

SEQ ID NO: 2012242 - RNA, 19 nt, Artificial Sequence
  Description of Artificial Sequence: Synthetic oligonucleotide
ggaagguuuggggcugggg

SEQ ID NO: 2012243 - RNA, 19 nt, Artificial Sequence
  Description of Artificial Sequence: Synthetic oligonucleotide
cugcucaggagccuuugaa

SEQ ID NO: 2012244 - RNA, 19 nt, Artificial Sequence
  Description of Artificial Sequence: Synthetic oligonucleotide
gaaucucggggaauaaauu

SEQ ID NO: 2012245 - RNA, 19 nt, Artificial Sequence
  Description of Artificial Sequence: Synthetic oligonucleotide
agcagucaccuugaauaaa

SEQ ID NO: 2012246 - RNA, 19 nt, Artificial Sequence
  Description of Artificial Sequence: Synthetic oligonucleotide
augcgauaccagaugccca

SEQ ID NO: 2012247 - RNA, 19 nt, Artificial Sequence
  Description of Artificial Sequence: Synthetic oligonucleotide
ggacuugaauaagccgucc

SEQ ID NO: 2012248 - RNA, 19 nt, Artificial Sequence
  Description of Artificial Sequence: Synthetic oligonucleotide
aucucgugaaacacaggua

SEQ ID NO: 2012249 - RNA, 19 nt, Artificial Sequence
  Description of Artificial Sequence: Synthetic oligonucleotide
caggcaugguggcuugguc

SEQ ID NO: 2012250 - RNA, 19 nt, Artificial Sequence
  Description of Artificial Sequence: Synthetic oligonucleotide
gggcgugguggguugagac

SEQ ID NO: 2012251 - RNA, 19 nt, Artificial Sequence
  Description of Artificial Sequence: Synthetic oligonucleotide
gcccaugcgauaccagaug

SEQ ID NO: 2012252 - RNA, 19 nt, Artificial Sequence
  Description of Artificial Sequence: Synthetic oligonucleotide
gguaucugguaaccuugga

SEQ ID NO: 2012253 - RNA, 19 nt, Artificial Sequence
  Description of Artificial Sequence: Synthetic oligonucleotide
guugaaucucggggaauaa

SEQ ID NO: 2012254 - RNA, 19 nt, Artificial Sequence
  Description of Artificial Sequence: Synthetic oligonucleotide
ucgugguuucuuggcacuc

SEQ ID NO: 2012255 - RNA, 19 nt, Artificial Sequence
  Description of Artificial Sequence: Synthetic oligonucleotide
acccagagcagaggaagaa

SEQ ID NO: 2012256 - RNA, 19 nt, Artificial Sequence
  Description of Artificial Sequence: Synthetic oligonucleotide
cgagucgugguuucuuggc

SEQ ID NO: 2012257 - RNA, 19 nt, Artificial Sequence
  Description of Artificial Sequence: Synthetic oligonucleotide
ccuaagguccucgucccag

SEQ ID NO: 2012258 - RNA, 19 nt, Artificial Sequence
  Description of Artificial Sequence: Synthetic oligonucleotide
ggguccauuggugucucug

SEQ ID NO: 2012259 - RNA, 19 nt, Artificial Sequence
  Description of Artificial Sequence: Synthetic oligonucleotide
agccugaacgagugcugau

SEQ ID NO: 2012260 - RNA, 19 nt, Artificial Sequence
  Description of Artificial Sequence: Synthetic oligonucleotide
uccucgucccagcgccaca

SEQ ID NO: 2012261 - RNA, 19 nt, Artificial Sequence
  Description of Artificial Sequence: Synthetic oligonucleotide
gguuccgggaagccacuac

SEQ ID NO: 2012262 - RNA, 19 nt, Artificial Sequence
  Description of Artificial Sequence: Synthetic oligonucleotide
ucauagccuguuggggcuc

SEQ ID NO: 2012263 - RNA, 19 nt, Artificial Sequence
  Description of Artificial Sequence: Synthetic oligonucleotide
gacucccgugauggggucc

SEQ ID NO: 2012264 - RNA, 19 nt, Artificial Sequence
  Description of Artificial Sequence: Synthetic oligonucleotide
cacauuccccaagugacua

SEQ ID NO: 2012265 - RNA, 19 nt, Artificial Sequence
  Description of Artificial Sequence: Synthetic oligonucleotide
ggcuuggucuguuccccgc

SEQ ID NO: 2012266 - RNA, 19 nt, Artificial Sequence
  Description of Artificial Sequence: Synthetic oligonucleotide
gguuuacacccagagcaga

SEQ ID NO: 2012267 - RNA, 19 nt, Artificial Sequence
  Description of Artificial Sequence: Synthetic oligonucleotide
cacccagagcagaggaaga

SEQ ID NO: 2012268 - RNA, 19 nt, Artificial Sequence
  Description of Artificial Sequence: Synthetic oligonucleotide
gaaggggcacaaagccuga

SEQ ID NO: 2012269 - RNA, 19 nt, Artificial Sequence
  Description of Artificial Sequence: Synthetic oligonucleotide
guggguugagacgagucgu

SEQ ID NO: 2012270 - RNA, 19 nt, Artificial Sequence
  Description of Artificial Sequence: Synthetic oligonucleotide
ucucaucgcccgggcggcg

SEQ ID NO: 2012271 - RNA, 19 nt, Artificial Sequence
  Description of Artificial Sequence: Synthetic oligonucleotide
cuccgacucccgugauggg

SEQ ID NO: 2012272 - RNA, 19 nt, Artificial Sequence
  Description of Artificial Sequence: Synthetic oligonucleotide
gcugugccuaagguccucg

SEQ ID NO: 2012273 - RNA, 19 nt, Artificial Sequence
  Description of Artificial Sequence: Synthetic oligonucleotide
aaggggcacaaagccugaa

SEQ ID NO: 2012274 - RNA, 19 nt, Artificial Sequence
  Description of Artificial Sequence: Synthetic oligonucleotide
cgauaccagaugcccaugc

SEQ ID NO: 2012275 - RNA, 19 nt, Artificial Sequence
  Description of Artificial Sequence: Synthetic oligonucleotide
ugucucuggcaaggcuucu

SEQ ID NO: 2012276 - RNA, 19 nt, Artificial Sequence
  Description of Artificial Sequence: Synthetic oligonucleotide
guacagggagaagcccagc

SEQ ID NO: 2012277 - RNA, 19 nt, Artificial Sequence
  Description of Artificial Sequence: Synthetic oligonucleotide
gccacuacuccgacucccg

SEQ ID NO: 2012278 - RNA, 19 nt, Artificial Sequence
  Description of Artificial Sequence: Synthetic oligonucleotide
cagucaccuugaauaaaua

SEQ ID NO: 2012279 - RNA, 19 nt, Artificial Sequence
  Description of Artificial Sequence: Synthetic oligonucleotide
gagggcgugguggguugag

SEQ ID NO: 2012280 - RNA, 19 nt, Artificial Sequence
  Description of Artificial Sequence: Synthetic oligonucleotide
gugccugcuugguccggcc

SEQ ID NO: 2012281 - RNA, 19 nt, Artificial Sequence
  Description of Artificial Sequence: Synthetic oligonucleotide
agacgagucgugguuucuu

SEQ ID NO: 2012282 - RNA, 19 nt, Artificial Sequence
  Description of Artificial Sequence: Synthetic oligonucleotide
cugaugacugugagggcgu

SEQ ID NO: 2012283 - RNA, 19 nt, Artificial Sequence
  Description of Artificial Sequence: Synthetic oligonucleotide
auagccuguuggggcucgg

SEQ ID NO: 2012284 - RNA, 19 nt, Artificial Sequence
  Description of Artificial Sequence: Synthetic oligonucleotide
gucgugguuucuuggcacu

SEQ ID NO: 2012285 - RNA, 19 nt, Artificial Sequence
  Description of Artificial Sequence: Synthetic oligonucleotide
cacgcagaagcagcuucuc

SEQ ID NO: 2012286 - RNA, 19 nt, Artificial Sequence
  Description of Artificial Sequence: Synthetic oligonucleotide
ccauuggugucucuggcaa

SEQ ID NO: 2012287 - RNA, 19 nt, Artificial Sequence
  Description of Artificial Sequence: Synthetic oligonucleotide
gcgugguggguugagacga

SEQ ID NO: 2012288 - RNA, 19 nt, Artificial Sequence
  Description of Artificial Sequence: Synthetic oligonucleotide
cucaucgcccgggcggcgc

SEQ ID NO: 2012289 - RNA, 19 nt, Artificial Sequence
  Description of Artificial Sequence: Synthetic oligonucleotide
ccgugaugggguccauugg

SEQ ID NO: 2012290 - RNA, 19 nt, Artificial Sequence
  Description of Artificial Sequence: Synthetic oligonucleotide
caggcggcugcagccggcg

SEQ ID NO: 2012291 - RNA, 19 nt, Artificial Sequence
  Description of Artificial Sequence: Synthetic oligonucleotide
gguugagacgagucguggu

SEQ ID NO: 2012292 - RNA, 19 nt, Artificial Sequence
  Description of Artificial Sequence: Synthetic oligonucleotide
gucaggaugcaaaccaauu

SEQ ID NO: 2012293 - RNA, 19 nt, Artificial Sequence
  Description of Artificial Sequence: Synthetic oligonucleotide
auuccccaagugacuauuu

SEQ ID NO: 2012294 - RNA, 19 nt, Artificial Sequence
  Description of Artificial Sequence: Synthetic oligonucleotide
ggaaaacgaucucgugaaa

SEQ ID NO: 2012295 - RNA, 19 nt, Artificial Sequence
  Description of Artificial Sequence: Synthetic oligonucleotide
gguaaccuuggacuugaau

SEQ ID NO: 2012296 - RNA, 19 nt, Artificial Sequence
  Description of Artificial Sequence: Synthetic oligonucleotide
uagccuguuggggcucggu

SEQ ID NO: 2012297 - RNA, 19 nt, Artificial Sequence
  Description of Artificial Sequence: Synthetic oligonucleotide
gcagucaccuugaauaaau

SEQ ID NO: 2012298 - RNA, 19 nt, Artificial Sequence
  Description of Artificial Sequence: Synthetic oligonucleotide
agucuccuagagggagcug

SEQ ID NO: 2012299 - RNA, 19 nt, Artificial Sequence
  Description of Artificial Sequence: Synthetic oligonucleotide
ggugccugcuugguccggc

SEQ ID NO: 2012300 - RNA, 19 nt, Artificial Sequence
  Description of Artificial Sequence: Synthetic oligonucleotide
ccgucucacgcagaagcag

SEQ ID NO: 2012301 - RNA, 19 nt, Artificial Sequence
  Description of Artificial Sequence: Synthetic oligonucleotide
ggcuccgucucacgcagaa

SEQ ID NO: 2012302 - RNA, 19 nt, Artificial Sequence
  Description of Artificial Sequence: Synthetic oligonucleotide
cgaucucgugaaacacagg

SEQ ID NO: 2012303 - RNA, 19 nt, Artificial Sequence
  Description of Artificial Sequence: Synthetic oligonucleotide
cucggggaauaaauuuaau

SEQ ID NO: 2012304 - RNA, 19 nt, Artificial Sequence
  Description of Artificial Sequence: Synthetic oligonucleotide
aggugccugcuugguccgg

SEQ ID NO: 2012305 - RNA, 19 nt, Artificial Sequence
  Description of Artificial Sequence: Synthetic oligonucleotide
ccaagugacuauuuucuuu

SEQ ID NO: 2012306 - RNA, 19 nt, Artificial Sequence
  Description of Artificial Sequence: Synthetic oligonucleotide
agggcgugguggguugaga

SEQ ID NO: 2012307 - RNA, 19 nt, Artificial Sequence
  Description of Artificial Sequence: Synthetic oligonucleotide
ugacaucgaugagcuucau

SEQ ID NO: 2012308 - RNA, 19 nt, Artificial Sequence
  Description of Artificial Sequence: Synthetic oligonucleotide
ggggcucgguuccgggaag

SEQ ID NO: 2012309 - RNA, 19 nt, Artificial Sequence
  Description of Artificial Sequence: Synthetic oligonucleotide
guccucgucccagcgccac

SEQ ID NO: 2012310 - RNA, 19 nt, Artificial Sequence
  Description of Artificial Sequence: Synthetic oligonucleotide
augucacagauggcagcuu

SEQ ID NO: 2012311 - RNA, 19 nt, Artificial Sequence
  Description of Artificial Sequence: Synthetic oligonucleotide
ccaugcuguucaguucccc

SEQ ID NO: 2012312 - RNA, 19 nt, Artificial Sequence
  Description of Artificial Sequence: Synthetic oligonucleotide
cacagguaucugguaaccu

SEQ ID NO: 2012313 - RNA, 19 nt, Artificial Sequence
  Description of Artificial Sequence: Synthetic oligonucleotide
gagacgagucgugguuucu

SEQ ID NO: 2012314 - RNA, 19 nt, Artificial Sequence
  Description of Artificial Sequence: Synthetic oligonucleotide
aucgcccgggcggcgcggg

SEQ ID NO: 2012315 - RNA, 19 nt, Artificial Sequence
  Description of Artificial Sequence: Synthetic oligonucleotide
ccuaaaggccaccuccugu

SEQ ID NO: 2012316 - RNA, 19 nt, Artificial Sequence
  Description of Artificial Sequence: Synthetic oligonucleotide
gcacaaagccugaacgagu

SEQ ID NO: 2012317 - RNA, 19 nt, Artificial Sequence
  Description of Artificial Sequence: Synthetic oligonucleotide
cguccuuccagaggucagc

SEQ ID NO: 2012318 - RNA, 19 nt, Artificial Sequence
  Description of Artificial Sequence: Synthetic oligonucleotide
cauuccccaagugacuauu

SEQ ID NO: 2012319 - RNA, 19 nt, Artificial Sequence
  Description of Artificial Sequence: Synthetic oligonucleotide
ggcucgguuccgggaagcc

SEQ ID NO: 2012320 - RNA, 19 nt, Artificial Sequence
  Description of Artificial Sequence: Synthetic oligonucleotide
gcucagagguuuacaccca

SEQ ID NO: 2012321 - RNA, 19 nt, Artificial Sequence
  Description of Artificial Sequence: Synthetic oligonucleotide
gggagaagcccagcuucuc

SEQ ID NO: 2012322 - RNA, 19 nt, Artificial Sequence
  Description of Artificial Sequence: Synthetic oligonucleotide
cgggaagccacuacuccga

SEQ ID NO: 2012323 - RNA, 19 nt, Artificial Sequence
  Description of Artificial Sequence: Synthetic oligonucleotide
cccugaugagucuccuaga

SEQ ID NO: 2012324 - RNA, 19 nt, Artificial Sequence
  Description of Artificial Sequence: Synthetic oligonucleotide
caucgcccgggcggcgcgg

SEQ ID NO: 2012325 - RNA, 19 nt, Artificial Sequence
  Description of Artificial Sequence: Synthetic oligonucleotide
cacccugaugagucuccua

SEQ ID NO: 2012326 - RNA, 19 nt, Artificial Sequence
  Description of Artificial Sequence: Synthetic oligonucleotide
gcucgguuccgggaagcca

SEQ ID NO: 2012327 - RNA, 19 nt, Artificial Sequence
  Description of Artificial Sequence: Synthetic oligonucleotide
cugugccuaagguccucgu

SEQ ID NO: 2012328 - RNA, 19 nt, Artificial Sequence
  Description of Artificial Sequence: Synthetic oligonucleotide
cgugaugggguccauuggu

SEQ ID NO: 2012329 - RNA, 19 nt, Artificial Sequence
  Description of Artificial Sequence: Synthetic oligonucleotide
gggcucgguuccgggaagc

SEQ ID NO: 2012330 - RNA, 19 nt, Artificial Sequence
  Description of Artificial Sequence: Synthetic oligonucleotide
caaccacaucauagccugu

SEQ ID NO: 2012331 - RNA, 19 nt, Artificial Sequence
  Description of Artificial Sequence: Synthetic oligonucleotide
gcuuggucuguuccccgcu

SEQ ID NO: 2012332 - RNA, 19 nt, Artificial Sequence
  Description of Artificial Sequence: Synthetic oligonucleotide
ggccacccugaugagucuc

SEQ ID NO: 2012333 - RNA, 19 nt, Artificial Sequence
  Description of Artificial Sequence: Synthetic oligonucleotide
cgugguggguugagacgag

SEQ ID NO: 2012334 - RNA, 19 nt, Artificial Sequence
  Description of Artificial Sequence: Synthetic oligonucleotide
ggcggcgcgggaggagccg

SEQ ID NO: 2012335 - RNA, 19 nt, Artificial Sequence
  Description of Artificial Sequence: Synthetic oligonucleotide
guuccccgcuggggcggcg

SEQ ID NO: 2012336 - RNA, 19 nt, Artificial Sequence
  Description of Artificial Sequence: Synthetic oligonucleotide
gccuaagguccucguccca

SEQ ID NO: 2012337 - RNA, 19 nt, Artificial Sequence
  Description of Artificial Sequence: Synthetic oligonucleotide
ccaccgucuccuggauagg

SEQ ID NO: 2012338 - RNA, 19 nt, Artificial Sequence
  Description of Artificial Sequence: Synthetic oligonucleotide
ggcgggucccggcuccguc

SEQ ID NO: 2012339 - RNA, 19 nt, Artificial Sequence
  Description of Artificial Sequence: Synthetic oligonucleotide
gcggcgcgggaggagccgg

SEQ ID NO: 2012340 - RNA, 19 nt, Artificial Sequence
  Description of Artificial Sequence: Synthetic oligonucleotide
ccaagcagucaccuugaau

SEQ ID NO: 2012341 - RNA, 19 nt, Artificial Sequence
  Description of Artificial Sequence: Synthetic oligonucleotide
ccgacucccgugauggggu

SEQ ID NO: 2012342 - RNA, 19 nt, Artificial Sequence
  Description of Artificial Sequence: Synthetic oligonucleotide
gcccuuucugggaagguuu

SEQ ID NO: 2012343 - RNA, 19 nt, Artificial Sequence
  Description of Artificial Sequence: Synthetic oligonucleotide
gcuugguccggcccaugau

SEQ ID NO: 2012344 - RNA, 19 nt, Artificial Sequence
  Description of Artificial Sequence: Synthetic oligonucleotide
cugggccacccugaugagu

SEQ ID NO: 2012345 - RNA, 19 nt, Artificial Sequence
  Description of Artificial Sequence: Synthetic oligonucleotide
cagcacuucauggcucgau

SEQ ID NO: 2012346 - RNA, 19 nt, Artificial Sequence
  Description of Artificial Sequence: Synthetic oligonucleotide
gccggcgccgcagcucgag

SEQ ID NO: 2012347 - RNA, 19 nt, Artificial Sequence
  Description of Artificial Sequence: Synthetic oligonucleotide
ccgucuccuggauagggau

SEQ ID NO: 2012348 - RNA, 19 nt, Artificial Sequence
  Description of Artificial Sequence: Synthetic oligonucleotide
gcagcugcucagagguuua

SEQ ID NO: 2012349 - RNA, 19 nt, Artificial Sequence
  Description of Artificial Sequence: Synthetic oligonucleotide
cuuugacuucaggcauggu

SEQ ID NO: 2012350 - RNA, 19 nt, Artificial Sequence
  Description of Artificial Sequence: Synthetic oligonucleotide
gccuuugaaggggcacaaa

SEQ ID NO: 2012351 - RNA, 19 nt, Artificial Sequence
  Description of Artificial Sequence: Synthetic oligonucleotide
cuacuccgacucccgugau

SEQ ID NO: 2012352 - RNA, 19 nt, Artificial Sequence
  Description of Artificial Sequence: Synthetic oligonucleotide
ccuccuguguguccaccgu

SEQ ID NO: 2012353 - RNA, 19 nt, Artificial Sequence
  Description of Artificial Sequence: Synthetic oligonucleotide
cgacucccgugaugggguc

SEQ ID NO: 2012354 - RNA, 19 nt, Artificial Sequence
  Description of Artificial Sequence: Synthetic oligonucleotide
ggggaggugccugcuuggu

SEQ ID NO: 2012355 - RNA, 19 nt, Artificial Sequence
  Description of Artificial Sequence: Synthetic oligonucleotide
gggccacccugaugagucu

SEQ ID NO: 2012356 - RNA, 19 nt, Artificial Sequence
  Description of Artificial Sequence: Synthetic oligonucleotide
gcggcgggucccggcuccg

SEQ ID NO: 2012357 - RNA, 19 nt, Artificial Sequence
  Description of Artificial Sequence: Synthetic oligonucleotide
ccacuacuccgacucccgu

SEQ ID NO: 2012358 - RNA, 19 nt, Artificial Sequence
  Description of Artificial Sequence: Synthetic oligonucleotide
gggguccauuggugucucu

SEQ ID NO: 2012359 - RNA, 19 nt, Artificial Sequence
  Description of Artificial Sequence: Synthetic oligonucleotide
gcgccacacaguggcccaa

SEQ ID NO: 2012360 - RNA, 19 nt, Artificial Sequence
  Description of Artificial Sequence: Synthetic oligonucleotide
ccuugacaucgaugagcuu

SEQ ID NO: 2012361 - RNA, 19 nt, Artificial Sequence
  Description of Artificial Sequence: Synthetic oligonucleotide
cgaugcauacaaggcccuu

SEQ ID NO: 2012362 - RNA, 19 nt, Artificial Sequence
  Description of Artificial Sequence: Synthetic oligonucleotide
cggcuccgucucacgcaga

SEQ ID NO: 2012363 - RNA, 19 nt, Artificial Sequence
  Description of Artificial Sequence: Synthetic oligonucleotide
cgguuccgggaagccacua

SEQ ID NO: 2012364 - RNA, 19 nt, Artificial Sequence
  Description of Artificial Sequence: Synthetic oligonucleotide
cggcgggucccggcuccgu

SEQ ID NO: 2012365 - RNA, 19 nt, Artificial Sequence
  Description of Artificial Sequence: Synthetic oligonucleotide
aaugauuugacauuccgcc

SEQ ID NO: 2012366 - RNA, 19 nt, Artificial Sequence
  Description of Artificial Sequence: Synthetic oligonucleotide
ugauuguaaaacaagaagg

SEQ ID NO: 2012367 - RNA, 19 nt, Artificial Sequence
  Description of Artificial Sequence: Synthetic oligonucleotide
aaggcaauacaucugaagg

SEQ ID NO: 2012368 - RNA, 19 nt, Artificial Sequence
  Description of Artificial Sequence: Synthetic oligonucleotide
ucgaauuaaauuuagagcu

SEQ ID NO: 2012369 - RNA, 19 nt, Artificial Sequence
  Description of Artificial Sequence: Synthetic oligonucleotide
aagaaaucuuaccagcacc

SEQ ID NO: 2012370 - RNA, 19 nt, Artificial Sequence
  Description of Artificial Sequence: Synthetic oligonucleotide
aaauugauguuauaauguc

SEQ ID NO: 2012371 - RNA, 19 nt, Artificial Sequence
  Description of Artificial Sequence: Synthetic oligonucleotide
aaauaacacugguaaaggc

SEQ ID NO: 2012372 - RNA, 19 nt, Artificial Sequence
  Description of Artificial Sequence: Synthetic oligonucleotide
uaaaauugauguuauaaug

SEQ ID NO: 2012373 - RNA, 19 nt, Artificial Sequence
  Description of Artificial Sequence: Synthetic oligonucleotide
aaagaaaacagcuucucgu

SEQ ID NO: 2012374 - RNA, 19 nt, Artificial Sequence
  Description of Artificial Sequence: Synthetic oligonucleotide
aucacagacauuucaaccc

SEQ ID NO: 2012375 - RNA, 19 nt, Artificial Sequence
  Description of Artificial Sequence: Synthetic oligonucleotide
auaaguaguaaugaacucc

SEQ ID NO: 2012376 - RNA, 19 nt, Artificial Sequence
  Description of Artificial Sequence: Synthetic oligonucleotide
aaaucacagacauuucaac

SEQ ID NO: 2012377 - RNA, 19 nt, Artificial Sequence
  Description of Artificial Sequence: Synthetic oligonucleotide
aagaaaagcugccagaggu

SEQ ID NO: 2012378 - RNA, 19 nt, Artificial Sequence
  Description of Artificial Sequence: Synthetic oligonucleotide
cuuaccagcaccuuuacag

SEQ ID NO: 2012379 - RNA, 19 nt, Artificial Sequence
  Description of Artificial Sequence: Synthetic oligonucleotide
aaagccucgaauuaaauuu

SEQ ID NO: 2012380 - RNA, 19 nt, Artificial Sequence
  Description of Artificial Sequence: Synthetic oligonucleotide
uuuucagugcacaacauca

SEQ ID NO: 2012381 - RNA, 19 nt, Artificial Sequence
  Description of Artificial Sequence: Synthetic oligonucleotide
ugucaguuaauauaugucc

SEQ ID NO: 2012382 - RNA, 19 nt, Artificial Sequence
  Description of Artificial Sequence: Synthetic oligonucleotide
auuauuauaucgcugcuug

SEQ ID NO: 2012383 - RNA, 19 nt, Artificial Sequence
  Description of Artificial Sequence: Synthetic oligonucleotide
aauugauguuauaaugucc

SEQ ID NO: 2012384 - RNA, 19 nt, Artificial Sequence
  Description of Artificial Sequence: Synthetic oligonucleotide
aauauauguccucuccuuc

SEQ ID NO: 2012385 - RNA, 19 nt, Artificial Sequence
  Description of Artificial Sequence: Synthetic oligonucleotide
ucaguguacaucuaucagg

SEQ ID NO: 2012386 - RNA, 19 nt, Artificial Sequence
  Description of Artificial Sequence: Synthetic oligonucleotide
uauaauguccaauuuucag

SEQ ID NO: 2012387 - RNA, 19 nt, Artificial Sequence
  Description of Artificial Sequence: Synthetic oligonucleotide
aaucgguagaugcugacag

SEQ ID NO: 2012388 - RNA, 19 nt, Artificial Sequence
  Description of Artificial Sequence: Synthetic oligonucleotide
ugugcucuguucauaaucg

SEQ ID NO: 2012389 - RNA, 19 nt, Artificial Sequence
  Description of Artificial Sequence: Synthetic oligonucleotide
cucgaauuaaauuuagagc

SEQ ID NO: 2012390 - RNA, 19 nt, Artificial Sequence
  Description of Artificial Sequence: Synthetic oligonucleotide
aaaauugauguuauaaugu

SEQ ID NO: 2012391 - RNA, 19 nt, Artificial Sequence
  Description of Artificial Sequence: Synthetic oligonucleotide
uuaaauuuagagcuccaca

SEQ ID NO: 2012392 - RNA, 19 nt, Artificial Sequence
  Description of Artificial Sequence: Synthetic oligonucleotide
aaaugauuugacauuccgc

SEQ ID NO: 2012393 - RNA, 19 nt, Artificial Sequence
  Description of Artificial Sequence: Synthetic oligonucleotide
uuuguugaaagagaccugg

SEQ ID NO: 2012394 - RNA, 19 nt, Artificial Sequence
  Description of Artificial Sequence: Synthetic oligonucleotide
ugcacagacagauuaagcc

SEQ ID NO: 2012395 - RNA, 19 nt, Artificial Sequence
  Description of Artificial Sequence: Synthetic oligonucleotide
aaaggcaauacaucugaag

SEQ ID NO: 2012396 - RNA, 19 nt, Artificial Sequence
  Description of Artificial Sequence: Synthetic oligonucleotide
uguacaucuaucaggaagu

SEQ ID NO: 2012397 - RNA, 19 nt, Artificial Sequence
  Description of Artificial Sequence: Synthetic oligonucleotide
uaaauaacacugguaaagg

SEQ ID NO: 2012398 - RNA, 19 nt, Artificial Sequence
  Description of Artificial Sequence: Synthetic oligonucleotide
aguaguaaugaacuccuuc

SEQ ID NO: 2012399 - RNA, 19 nt, Artificial Sequence
  Description of Artificial Sequence: Synthetic oligonucleotide
guaauugagaucuucacca

SEQ ID NO: 2012400 - RNA, 19 nt, Artificial Sequence
  Description of Artificial Sequence: Synthetic oligonucleotide
ucucugacacgaaugacgg

SEQ ID NO: 2012401 - RNA, 19 nt, Artificial Sequence
  Description of Artificial Sequence: Synthetic oligonucleotide
guaaauaacacugguaaag

SEQ ID NO: 2012402 - RNA, 19 nt, Artificial Sequence
  Description of Artificial Sequence: Synthetic oligonucleotide
aaaaugcagaugugacucc

SEQ ID NO: 2012403 - RNA, 19 nt, Artificial Sequence
  Description of Artificial Sequence: Synthetic oligonucleotide
uagagcuccacauaaaaga

SEQ ID NO: 2012404 - RNA, 19 nt, Artificial Sequence
  Description of Artificial Sequence: Synthetic oligonucleotide
uaauguccaauuuucagug

SEQ ID NO: 2012405 - RNA, 19 nt, Artificial Sequence
  Description of Artificial Sequence: Synthetic oligonucleotide
guucauaaucgguagaugc

SEQ ID NO: 2012406 - RNA, 19 nt, Artificial Sequence
  Description of Artificial Sequence: Synthetic oligonucleotide
uaaauuuagagcuccacau

SEQ ID NO: 2012407 - RNA, 19 nt, Artificial Sequence
  Description of Artificial Sequence: Synthetic oligonucleotide
uaaguaguaaugaacuccu

SEQ ID NO: 2012408 - RNA, 19 nt, Artificial Sequence
  Description of Artificial Sequence: Synthetic oligonucleotide
ugauuugacauuccgccag

SEQ ID NO: 2012409 - RNA, 19 nt, Artificial Sequence
  Description of Artificial Sequence: Synthetic oligonucleotide
auaauguccaauuuucagu

SEQ ID NO: 2012410 - RNA, 19 nt, Artificial Sequence
  Description of Artificial Sequence: Synthetic oligonucleotide
cagagagcuaauaaaauug

SEQ ID NO: 2012411 - RNA, 19 nt, Artificial Sequence
  Description of Artificial Sequence: Synthetic oligonucleotide
gagcuaauaaaauugaugu

SEQ ID NO: 2012412 - RNA, 19 nt, Artificial Sequence
  Description of Artificial Sequence: Synthetic oligonucleotide
auauauguccucuccuucg

SEQ ID NO: 2012413 - RNA, 19 nt, Artificial Sequence
  Description of Artificial Sequence: Synthetic oligonucleotide
ucugacacgaaugacggag

SEQ ID NO: 2012414 - RNA, 19 nt, Artificial Sequence
  Description of Artificial Sequence: Synthetic oligonucleotide
aggauaaaugccacaaucc

SEQ ID NO: 2012415 - RNA, 19 nt, Artificial Sequence
  Description of Artificial Sequence: Synthetic oligonucleotide
uuagagcuccacauaaaag

SEQ ID NO: 2012416 - RNA, 19 nt, Artificial Sequence
  Description of Artificial Sequence: Synthetic oligonucleotide
gaaaaugcagaugugacuc

SEQ ID NO: 2012417 - RNA, 19 nt, Artificial Sequence
  Description of Artificial Sequence: Synthetic oligonucleotide
uccacauaaaagacugagg

SEQ ID NO: 2012418 - RNA, 19 nt, Artificial Sequence
  Description of Artificial Sequence: Synthetic oligonucleotide
gaauuaaauuuagagcucc

SEQ ID NO: 2012419 - RNA, 19 nt, Artificial Sequence
  Description of Artificial Sequence: Synthetic oligonucleotide
aacacugguaaaggcaggc

SEQ ID NO: 2012420 - RNA, 19 nt, Artificial Sequence
  Description of Artificial Sequence: Synthetic oligonucleotide
uguuauaauguccaauuuu

SEQ ID NO: 2012421 - RNA, 19 nt, Artificial Sequence
  Description of Artificial Sequence: Synthetic oligonucleotide
aaggccagaacauuugggu

SEQ ID NO: 2012422 - RNA, 19 nt, Artificial Sequence
  Description of Artificial Sequence: Synthetic oligonucleotide
aggaaguugagcaaguuuc

SEQ ID NO: 2012423 - RNA, 19 nt, Artificial Sequence
  Description of Artificial Sequence: Synthetic oligonucleotide
guguacaucuaucaggaag

SEQ ID NO: 2012424 - RNA, 19 nt, Artificial Sequence
  Description of Artificial Sequence: Synthetic oligonucleotide
ugaagcucauccaggaaag

SEQ ID NO: 2012425 - RNA, 19 nt, Artificial Sequence
  Description of Artificial Sequence: Synthetic oligonucleotide
auuuucagugcacaacauc

SEQ ID NO: 2012426 - RNA, 19 nt, Artificial Sequence
  Description of Artificial Sequence: Synthetic oligonucleotide
uucaguguacaucuaucag

SEQ ID NO: 2012427 - RNA, 19 nt, Artificial Sequence
  Description of Artificial Sequence: Synthetic oligonucleotide
acacaaguaaauaacacug

SEQ ID NO: 2012428 - RNA, 19 nt, Artificial Sequence
  Description of Artificial Sequence: Synthetic oligonucleotide
auuaaauuuagagcuccac

SEQ ID NO: 2012429 - RNA, 19 nt, Artificial Sequence
  Description of Artificial Sequence: Synthetic oligonucleotide
auuauaucgcugcuugguc

SEQ ID NO: 2012430 - RNA, 19 nt, Artificial Sequence
  Description of Artificial Sequence: Synthetic oligonucleotide
cacaacaucauguagcuca

SEQ ID NO: 2012431 - RNA, 19 nt, Artificial Sequence
  Description of Artificial Sequence: Synthetic oligonucleotide
uuucaguguacaucuauca

SEQ ID NO: 2012432 - RNA, 19 nt, Artificial Sequence
  Description of Artificial Sequence: Synthetic oligonucleotide
aggcaauacaucugaaggg

SEQ ID NO: 2012433 - RNA, 19 nt, Artificial Sequence
  Description of Artificial Sequence: Synthetic oligonucleotide
aguugagcaaguuuccuug

SEQ ID NO: 2012434 - RNA, 19 nt, Artificial Sequence
  Description of Artificial Sequence: Synthetic oligonucleotide
gaggauaaaugccacaauc

SEQ ID NO: 2012435 - RNA, 19 nt, Artificial Sequence
  Description of Artificial Sequence: Synthetic oligonucleotide
uuauaucgcugcuuggucc

SEQ ID NO: 2012436 - RNA, 19 nt, Artificial Sequence
  Description of Artificial Sequence: Synthetic oligonucleotide
gauuguaaaacaagaagga

SEQ ID NO: 2012437 - RNA, 19 nt, Artificial Sequence
  Description of Artificial Sequence: Synthetic oligonucleotide
aguugcugguuccagucgc

SEQ ID NO: 2012438 - RNA, 19 nt, Artificial Sequence
  Description of Artificial Sequence: Synthetic oligonucleotide
accugggauuauuauaucg

SEQ ID NO: 2012439 - RNA, 19 nt, Artificial Sequence
  Description of Artificial Sequence: Synthetic oligonucleotide
ucauguuauaaguaguaau

SEQ ID NO: 2012440 - RNA, 19 nt, Artificial Sequence
  Description of Artificial Sequence: Synthetic oligonucleotide
gacagauuaagccaaaagu

SEQ ID NO: 2012441 - RNA, 19 nt, Artificial Sequence
  Description of Artificial Sequence: Synthetic oligonucleotide
gaugugacuccauuggcug

SEQ ID NO: 2012442 - RNA, 19 nt, Artificial Sequence
  Description of Artificial Sequence: Synthetic oligonucleotide
acaucuaucaggaaguuga

SEQ ID NO: 2012443 - RNA, 19 nt, Artificial Sequence
  Description of Artificial Sequence: Synthetic oligonucleotide
uguugaaagagaccuggga

SEQ ID NO: 2012444 - RNA, 19 nt, Artificial Sequence
  Description of Artificial Sequence: Synthetic oligonucleotide
cacaaguaaauaacacugg

SEQ ID NO: 2012445 - RNA, 19 nt, Artificial Sequence
  Description of Artificial Sequence: Synthetic oligonucleotide
ugaaagaaaagcugccaga

SEQ ID NO: 2012446 - RNA, 19 nt, Artificial Sequence
  Description of Artificial Sequence: Synthetic oligonucleotide
guagcucacucccagagag

SEQ ID NO: 2012447 - RNA, 19 nt, Artificial Sequence
  Description of Artificial Sequence: Synthetic oligonucleotide
caugggaauuugauaaggg

SEQ ID NO: 2012448 - RNA, 19 nt, Artificial Sequence
  Description of Artificial Sequence: Synthetic oligonucleotide
ucaucauguuauaaguagu

SEQ ID NO: 2012449 - RNA, 19 nt, Artificial Sequence
  Description of Artificial Sequence: Synthetic oligonucleotide
uugaaguacuuucugcacu

SEQ ID NO: 2012450 - RNA, 19 nt, Artificial Sequence
  Description of Artificial Sequence: Synthetic oligonucleotide
ugguguaguacacaaguaa

SEQ ID NO: 2012451 - RNA, 19 nt, Artificial Sequence
  Description of Artificial Sequence: Synthetic oligonucleotide
uuauuauaucgcugcuugg

SEQ ID NO: 2012452 - RNA, 19 nt, Artificial Sequence
  Description of Artificial Sequence: Synthetic oligonucleotide
auaaaugccacaaucccug

SEQ ID NO: 2012453 - RNA, 19 nt, Artificial Sequence
  Description of Artificial Sequence: Synthetic oligonucleotide
aguaaugaacuccuucuga

SEQ ID NO: 2012454 - RNA, 19 nt, Artificial Sequence
  Description of Artificial Sequence: Synthetic oligonucleotide
cuugagagcauuuugaagu

SEQ ID NO: 2012455 - RNA, 19 nt, Artificial Sequence
  Description of Artificial Sequence: Synthetic oligonucleotide
agagcuaauaaaauugaug

SEQ ID NO: 2012456 - RNA, 19 nt, Artificial Sequence
  Description of Artificial Sequence: Synthetic oligonucleotide
gggauuauuauaucgcugc

SEQ ID NO: 2012457 - RNA, 19 nt, Artificial Sequence
  Description of Artificial Sequence: Synthetic oligonucleotide
ucaaugaaacaguaugguc

SEQ ID NO: 2012458 - RNA, 19 nt, Artificial Sequence
  Description of Artificial Sequence: Synthetic oligonucleotide
gaagaaaucuuaccagcac

SEQ ID NO: 2012459 - RNA, 19 nt, Artificial Sequence
  Description of Artificial Sequence: Synthetic oligonucleotide
acaugaaagaaaagcugcc

SEQ ID NO: 2012460 - RNA, 19 nt, Artificial Sequence
  Description of Artificial Sequence: Synthetic oligonucleotide
agaaaaugcagaugugacu

SEQ ID NO: 2012461 - RNA, 19 nt, Artificial Sequence
  Description of Artificial Sequence: Synthetic oligonucleotide
uauuauaucgcugcuuggu

SEQ ID NO: 2012462 - RNA, 19 nt, Artificial Sequence
  Description of Artificial Sequence: Synthetic oligonucleotide
uuuucaguguacaucuauc

SEQ ID NO: 2012463 - RNA, 19 nt, Artificial Sequence
  Description of Artificial Sequence: Synthetic oligonucleotide
aucucugacacgaaugacg

SEQ ID NO: 2012464 - RNA, 19 nt, Artificial Sequence
  Description of Artificial Sequence: Synthetic oligonucleotide
aaauuuagagcuccacaua

SEQ ID NO: 2012465 - RNA, 19 nt, Artificial Sequence
  Description of Artificial Sequence: Synthetic oligonucleotide
uuuggguaauuuucagugc

SEQ ID NO: 2012466 - RNA, 19 nt, Artificial Sequence
  Description of Artificial Sequence: Synthetic oligonucleotide
gagguugcgcaguucauag

SEQ ID NO: 2012467 - RNA, 19 nt, Artificial Sequence
  Description of Artificial Sequence: Synthetic oligonucleotide
gacggaggcagauaaaauc

SEQ ID NO: 2012468 - RNA, 19 nt, Artificial Sequence
  Description of Artificial Sequence: Synthetic oligonucleotide
ucucguguguggcaacugg

SEQ ID NO: 2012469 - RNA, 19 nt, Artificial Sequence
  Description of Artificial Sequence: Synthetic oligonucleotide
aaaacagcuucucgugugu

SEQ ID NO: 2012470 - RNA, 19 nt, Artificial Sequence
  Description of Artificial Sequence: Synthetic oligonucleotide
aauacaucugaagggagau

SEQ ID NO: 2012471 - RNA, 19 nt, Artificial Sequence
  Description of Artificial Sequence: Synthetic oligonucleotide
ugggauuauuauaucgcug

SEQ ID NO: 2012472 - RNA, 19 nt, Artificial Sequence
  Description of Artificial Sequence: Synthetic oligonucleotide
ucauaaucgguagaugcug

SEQ ID NO: 2012473 - RNA, 19 nt, Artificial Sequence
  Description of Artificial Sequence: Synthetic oligonucleotide
uucagugcacaacaucaug

SEQ ID NO: 2012474 - RNA, 19 nt, Artificial Sequence
  Description of Artificial Sequence: Synthetic oligonucleotide
auaaucgguagaugcugac

SEQ ID NO: 2012475 - RNA, 19 nt, Artificial Sequence
  Description of Artificial Sequence: Synthetic oligonucleotide
aaagcugccagagguugcg

SEQ ID NO: 2012476 - RNA, 19 nt, Artificial Sequence
  Description of Artificial Sequence: Synthetic oligonucleotide
ccucgaauuaaauuuagag

SEQ ID NO: 2012477 - RNA, 19 nt, Artificial Sequence
  Description of Artificial Sequence: Synthetic oligonucleotide
acacgaaugacggaggcag

SEQ ID NO: 2012478 - RNA, 19 nt, Artificial Sequence
  Description of Artificial Sequence: Synthetic oligonucleotide
caaugaaacaguauggucu

SEQ ID NO: 2012479 - RNA, 19 nt, Artificial Sequence
  Description of Artificial Sequence: Synthetic oligonucleotide
ggauaaaugccacaauccc

SEQ ID NO: 2012480 - RNA, 19 nt, Artificial Sequence
  Description of Artificial Sequence: Synthetic oligonucleotide
aggcaaaggcaauacaucu

SEQ ID NO: 2012481 - RNA, 19 nt, Artificial Sequence
  Description of Artificial Sequence: Synthetic oligonucleotide
agugcacaacaucauguag

SEQ ID NO: 2012482 - RNA, 19 nt, Artificial Sequence
  Description of Artificial Sequence: Synthetic oligonucleotide
gauggggacagaaagaaaa

SEQ ID NO: 2012483 - RNA, 19 nt, Artificial Sequence
  Description of Artificial Sequence: Synthetic oligonucleotide
uuguugaaagagaccuggg

SEQ ID NO: 2012484 - RNA, 19 nt, Artificial Sequence
  Description of Artificial Sequence: Synthetic oligonucleotide
aagcucauccaggaaagag

SEQ ID NO: 2012485 - RNA, 19 nt, Artificial Sequence
  Description of Artificial Sequence: Synthetic oligonucleotide
ucuauggcaugaaagccuc

SEQ ID NO: 2012486 - RNA, 19 nt, Artificial Sequence
  Description of Artificial Sequence: Synthetic oligonucleotide
ucaguuaauauauguccuc

SEQ ID NO: 2012487 - RNA, 19 nt, Artificial Sequence
  Description of Artificial Sequence: Synthetic oligonucleotide
uguaguacacaaguaaaua

SEQ ID NO: 2012488 - RNA, 19 nt, Artificial Sequence
  Description of Artificial Sequence: Synthetic oligonucleotide
ugaaguacuuucugcacuc

SEQ ID NO: 2012489 - RNA, 19 nt, Artificial Sequence
  Description of Artificial Sequence: Synthetic oligonucleotide
ggagaugucagacaucaug

SEQ ID NO: 2012490 - RNA, 19 nt, Artificial Sequence
  Description of Artificial Sequence: Synthetic oligonucleotide
aaugcucccacagucacau

SEQ ID NO: 2012491 - RNA, 19 nt, Artificial Sequence
  Description of Artificial Sequence: Synthetic oligonucleotide
ugguuccagucgcugaugg

SEQ ID NO: 2012492 - RNA, 19 nt, Artificial Sequence
  Description of Artificial Sequence: Synthetic oligonucleotide
caguguaacaaaugcuccc

SEQ ID NO: 2012493 - RNA, 19 nt, Artificial Sequence
  Description of Artificial Sequence: Synthetic oligonucleotide
uugaaagagaccugggauu

SEQ ID NO: 2012494 - RNA, 19 nt, Artificial Sequence
  Description of Artificial Sequence: Synthetic oligonucleotide
gcagaugugacuccauugg

SEQ ID NO: 2012495 - RNA, 19 nt, Artificial Sequence
  Description of Artificial Sequence: Synthetic oligonucleotide
uugagcaaguuuccuugag

SEQ ID NO: 2012496 - RNA, 19 nt, Artificial Sequence
  Description of Artificial Sequence: Synthetic oligonucleotide
ugaugggcagaagaaaucu

SEQ ID NO: 2012497 - RNA, 19 nt, Artificial Sequence
  Description of Artificial Sequence: Synthetic oligonucleotide
acaagaaggaagaugggga

SEQ ID NO: 2012498 - RNA, 19 nt, Artificial Sequence
  Description of Artificial Sequence: Synthetic oligonucleotide
uguccaauuuucaguguac

SEQ ID NO: 2012499 - RNA, 19 nt, Artificial Sequence
  Description of Artificial Sequence: Synthetic oligonucleotide
aaguacuuucugcacuccu

SEQ ID NO: 2012500 - RNA, 19 nt, Artificial Sequence
  Description of Artificial Sequence: Synthetic oligonucleotide
uauauguccucuccuucgu

SEQ ID NO: 2012501 - RNA, 19 nt, Artificial Sequence
  Description of Artificial Sequence: Synthetic oligonucleotide
aaacaagaaggaagauggg

SEQ ID NO: 2012502 - RNA, 19 nt, Artificial Sequence
  Description of Artificial Sequence: Synthetic oligonucleotide
cuccacauaaaagacugag

SEQ ID NO: 2012503 - RNA, 19 nt, Artificial Sequence
  Description of Artificial Sequence: Synthetic oligonucleotide
gguugcgcaguucauagag

SEQ ID NO: 2012504 - RNA, 19 nt, Artificial Sequence
  Description of Artificial Sequence: Synthetic oligonucleotide
guaguaaugaacuccuucu

SEQ ID NO: 2012505 - RNA, 19 nt, Artificial Sequence
  Description of Artificial Sequence: Synthetic oligonucleotide
aaguugagcaaguuuccuu

SEQ ID NO: 2012506 - RNA, 19 nt, Artificial Sequence
  Description of Artificial Sequence: Synthetic oligonucleotide
aucuaucaggaaguugagc

SEQ ID NO: 2012507 - RNA, 19 nt, Artificial Sequence
  Description of Artificial Sequence: Synthetic oligonucleotide
gaaugacggaggcagauaa

SEQ ID NO: 2012508 - RNA, 19 nt, Artificial Sequence
  Description of Artificial Sequence: Synthetic oligonucleotide
ugggcagaagaaaucuuac

SEQ ID NO: 2012509 - RNA, 19 nt, Artificial Sequence
  Description of Artificial Sequence: Synthetic oligonucleotide
gaaggccagaacauuuggg

SEQ ID NO: 2012510 - RNA, 19 nt, Artificial Sequence
  Description of Artificial Sequence: Synthetic oligonucleotide
ucgguagaugcugacagug

SEQ ID NO: 2012511 - RNA, 19 nt, Artificial Sequence
  Description of Artificial Sequence: Synthetic oligonucleotide
agggagaugucagacauca

SEQ ID NO: 2012512 - RNA, 19 nt, Artificial Sequence
  Description of Artificial Sequence: Synthetic oligonucleotide
caguguacaucuaucagga

SEQ ID NO: 2012513 - RNA, 19 nt, Artificial Sequence
  Description of Artificial Sequence: Synthetic oligonucleotide
auuguaaaacaagaaggaa

SEQ ID NO: 2012514 - RNA, 19 nt, Artificial Sequence
  Description of Artificial Sequence: Synthetic oligonucleotide
ugacacgaaugacggaggc

SEQ ID NO: 2012515 - RNA, 19 nt, Artificial Sequence
  Description of Artificial Sequence: Synthetic oligonucleotide
aauuaaauuuagagcucca

SEQ ID NO: 2012516 - RNA, 19 nt, Artificial Sequence
  Description of Artificial Sequence: Synthetic oligonucleotide
guaaugaacuccuucugaa

SEQ ID NO: 2012517 - RNA, 19 nt, Artificial Sequence
  Description of Artificial Sequence: Synthetic oligonucleotide
ugaaacaguauggucugac

SEQ ID NO: 2012518 - RNA, 19 nt, Artificial Sequence
  Description of Artificial Sequence: Synthetic oligonucleotide
agaaaucuuaccagcaccu

SEQ ID NO: 2012519 - RNA, 19 nt, Artificial Sequence
  Description of Artificial Sequence: Synthetic oligonucleotide
gauuugacauuccgccagc

SEQ ID NO: 2012520 - RNA, 19 nt, Artificial Sequence
  Description of Artificial Sequence: Synthetic oligonucleotide
guacacaaguaaauaacac

SEQ ID NO: 2012521 - RNA, 19 nt, Artificial Sequence
  Description of Artificial Sequence: Synthetic oligonucleotide
aaucuuaccagcaccuuua

SEQ ID NO: 2012522 - RNA, 19 nt, Artificial Sequence
  Description of Artificial Sequence: Synthetic oligonucleotide
uuaccagcaccuuuacagu

SEQ ID NO: 2012523 - RNA, 19 nt, Artificial Sequence
  Description of Artificial Sequence: Synthetic oligonucleotide
caguucauagagauacaug

SEQ ID NO: 2012524 - RNA, 19 nt, Artificial Sequence
  Description of Artificial Sequence: Synthetic oligonucleotide
uguucauaaucgguagaug

SEQ ID NO: 2012525 - RNA, 19 nt, Artificial Sequence
  Description of Artificial Sequence: Synthetic oligonucleotide
ugauguuauaauguccaau

SEQ ID NO: 2012526 - RNA, 19 nt, Artificial Sequence
  Description of Artificial Sequence: Synthetic oligonucleotide
uugcgcaguucauagagau

SEQ ID NO: 2012527 - RNA, 19 nt, Artificial Sequence
  Description of Artificial Sequence: Synthetic oligonucleotide
augccacaaucccugacag

SEQ ID NO: 2012528 - RNA, 19 nt, Artificial Sequence
  Description of Artificial Sequence: Synthetic oligonucleotide
guuccagucgcugaugggc

SEQ ID NO: 2012529 - RNA, 19 nt, Artificial Sequence
  Description of Artificial Sequence: Synthetic oligonucleotide
agaagaaaucuuaccagca

SEQ ID NO: 2012530 - RNA, 19 nt, Artificial Sequence
  Description of Artificial Sequence: Synthetic oligonucleotide
aaaaugcaaugauguaauu

SEQ ID NO: 2012531 - RNA, 19 nt, Artificial Sequence
  Description of Artificial Sequence: Synthetic oligonucleotide
ccugggauuauuauaucgc

SEQ ID NO: 2012532 - RNA, 19 nt, Artificial Sequence
  Description of Artificial Sequence: Synthetic oligonucleotide
ugaaagagaccugggauua

SEQ ID NO: 2012533 - RNA, 19 nt, Artificial Sequence
  Description of Artificial Sequence: Synthetic oligonucleotide
augauuugacauuccgcca

SEQ ID NO: 2012534 - RNA, 19 nt, Artificial Sequence
  Description of Artificial Sequence: Synthetic oligonucleotide
agagagcuaauaaaauuga

SEQ ID NO: 2012535 - RNA, 19 nt, Artificial Sequence
  Description of Artificial Sequence: Synthetic oligonucleotide
uggcaugaaagccucgaau

SEQ ID NO: 2012536 - RNA, 19 nt, Artificial Sequence
  Description of Artificial Sequence: Synthetic oligonucleotide
cacagugucaguuaauaua

SEQ ID NO: 2012537 - RNA, 19 nt, Artificial Sequence
  Description of Artificial Sequence: Synthetic oligonucleotide
uccuugagagcauuuugaa

SEQ ID NO: 2012538 - RNA, 19 nt, Artificial Sequence
  Description of Artificial Sequence: Synthetic oligonucleotide
aucuuaccagcaccuuuac

SEQ ID NO: 2012539 - RNA, 19 nt, Artificial Sequence
  Description of Artificial Sequence: Synthetic oligonucleotide
uguagcucacucccagaga

SEQ ID NO: 2012540 - RNA, 19 nt, Artificial Sequence
  Description of Artificial Sequence: Synthetic oligonucleotide
uccaauuuucaguguacau

SEQ ID NO: 2012541 - RNA, 19 nt, Artificial Sequence
  Description of Artificial Sequence: Synthetic oligonucleotide
agaccugggauuauuauau

SEQ ID NO: 2012542 - RNA, 19 nt, Artificial Sequence
  Description of Artificial Sequence: Synthetic oligonucleotide
uuucagugcacaacaucau

SEQ ID NO: 2012543 - RNA, 19 nt, Artificial Sequence
  Description of Artificial Sequence: Synthetic oligonucleotide
gacuccauuggcugauccc

SEQ ID NO: 2012544 - RNA, 19 nt, Artificial Sequence
  Description of Artificial Sequence: Synthetic oligonucleotide
ucugcaggaggcuuucuau

SEQ ID NO: 2012545 - RNA, 19 nt, Artificial Sequence
  Description of Artificial Sequence: Synthetic oligonucleotide
uccuucguccccugaaggc

SEQ ID NO: 2012546 - RNA, 19 nt, Artificial Sequence
  Description of Artificial Sequence: Synthetic oligonucleotide
cugacacgaaugacggagg

SEQ ID NO: 2012547 - RNA, 19 nt, Artificial Sequence
  Description of Artificial Sequence: Synthetic oligonucleotide
cugugcucuguucauaauc

SEQ ID NO: 2012548 - RNA, 19 nt, Artificial Sequence
  Description of Artificial Sequence: Synthetic oligonucleotide
agacugaggauaaaugcca

SEQ ID NO: 2012549 - RNA, 19 nt, Artificial Sequence
  Description of Artificial Sequence: Synthetic oligonucleotide
cacaugggaauuugauaag

SEQ ID NO: 2012550 - RNA, 19 nt, Artificial Sequence
  Description of Artificial Sequence: Synthetic oligonucleotide
agcuaauaaaauugauguu

SEQ ID NO: 2012551 - RNA, 19 nt, Artificial Sequence
  Description of Artificial Sequence: Synthetic oligonucleotide
acggaggcagauaaaauca

SEQ ID NO: 2012552 - RNA, 19 nt, Artificial Sequence
  Description of Artificial Sequence: Synthetic oligonucleotide
guauuugucuucaucaugu

SEQ ID NO: 2012553 - RNA, 19 nt, Artificial Sequence
  Description of Artificial Sequence: Synthetic oligonucleotide
ugaggauaaaugccacaau

SEQ ID NO: 2012554 - RNA, 19 nt, Artificial Sequence
  Description of Artificial Sequence: Synthetic oligonucleotide
ucuuaccagcaccuuuaca

SEQ ID NO: 2012555 - RNA, 19 nt, Artificial Sequence
  Description of Artificial Sequence: Synthetic oligonucleotide
guccccugaaggcaaaggc

SEQ ID NO: 2012556 - RNA, 19 nt, Artificial Sequence
  Description of Artificial Sequence: Synthetic oligonucleotide
uaaucgguagaugcugaca

SEQ ID NO: 2012557 - RNA, 19 nt, Artificial Sequence
  Description of Artificial Sequence: Synthetic oligonucleotide
ugcacacaugggaauuuga

SEQ ID NO: 2012558 - RNA, 19 nt, Artificial Sequence
  Description of Artificial Sequence: Synthetic oligonucleotide
uacaucuaucaggaaguug

SEQ ID NO: 2012559 - RNA, 19 nt, Artificial Sequence
  Description of Artificial Sequence: Synthetic oligonucleotide
caauacaucugaagggaga

SEQ ID NO: 2012560 - RNA, 19 nt, Artificial Sequence
  Description of Artificial Sequence: Synthetic oligonucleotide
cagaugugacuccauuggc

SEQ ID NO: 2012561 - RNA, 19 nt, Artificial Sequence
  Description of Artificial Sequence: Synthetic oligonucleotide
gagaaggccagaacauuug

SEQ ID NO: 2012562 - RNA, 19 nt, Artificial Sequence
  Description of Artificial Sequence: Synthetic oligonucleotide
caucuaucaggaaguugag

SEQ ID NO: 2012563 - RNA, 19 nt, Artificial Sequence
  Description of Artificial Sequence: Synthetic oligonucleotide
auguccaauuuucagugua

SEQ ID NO: 2012564 - RNA, 19 nt, Artificial Sequence
  Description of Artificial Sequence: Synthetic oligonucleotide
gauaaaugccacaaucccu

SEQ ID NO: 2012565 - RNA, 19 nt, Artificial Sequence
  Description of Artificial Sequence: Synthetic oligonucleotide
uggcaguccaucucugaca

SEQ ID NO: 2012566 - RNA, 19 nt, Artificial Sequence
  Description of Artificial Sequence: Synthetic oligonucleotide
ucugcacuccugcauuccu

SEQ ID NO: 2012567 - RNA, 19 nt, Artificial Sequence
  Description of Artificial Sequence: Synthetic oligonucleotide
caucauguuauaaguagua

SEQ ID NO: 2012568 - RNA, 19 nt, Artificial Sequence
  Description of Artificial Sequence: Synthetic oligonucleotide
cugacagaguugcugguuc

SEQ ID NO: 2012569 - RNA, 19 nt, Artificial Sequence
  Description of Artificial Sequence: Synthetic oligonucleotide
gagaccugggauuauuaua

SEQ ID NO: 2012570 - RNA, 19 nt, Artificial Sequence
  Description of Artificial Sequence: Synthetic oligonucleotide
caccuuuacagucaacaga

SEQ ID NO: 2012571 - RNA, 19 nt, Artificial Sequence
  Description of Artificial Sequence: Synthetic oligonucleotide
aucauguuauaaguaguaa

SEQ ID NO: 2012572 - RNA, 19 nt, Artificial Sequence
  Description of Artificial Sequence: Synthetic oligonucleotide
agaugugacuccauuggcu

SEQ ID NO: 2012573 - RNA, 19 nt, Artificial Sequence
  Description of Artificial Sequence: Synthetic oligonucleotide
uaaaugccacaaucccuga

SEQ ID NO: 2012574 - RNA, 19 nt, Artificial Sequence
  Description of Artificial Sequence: Synthetic oligonucleotide
ugacggaggcagauaaaau

SEQ ID NO: 2012575 - RNA, 19 nt, Artificial Sequence
  Description of Artificial Sequence: Synthetic oligonucleotide
gauuaagccaaaagucaaa

SEQ ID NO: 2012576 - RNA, 19 nt, Artificial Sequence
  Description of Artificial Sequence: Synthetic oligonucleotide
uaccagcaccuuuacaguc

SEQ ID NO: 2012577 - RNA, 19 nt, Artificial Sequence
  Description of Artificial Sequence: Synthetic oligonucleotide
augacggaggcagauaaaa

SEQ ID NO: 2012578 - RNA, 19 nt, Artificial Sequence
  Description of Artificial Sequence: Synthetic oligonucleotide
aaagagaccugggauuauu

SEQ ID NO: 2012579 - RNA, 19 nt, Artificial Sequence
  Description of Artificial Sequence: Synthetic oligonucleotide
aggcugauuguaaaacaag

SEQ ID NO: 2012580 - RNA, 19 nt, Artificial Sequence
  Description of Artificial Sequence: Synthetic oligonucleotide
cauaaucgguagaugcuga

SEQ ID NO: 2012581 - RNA, 19 nt, Artificial Sequence
  Description of Artificial Sequence: Synthetic oligonucleotide
uauggucugacagcaguau

SEQ ID NO: 2012582 - RNA, 19 nt, Artificial Sequence
  Description of Artificial Sequence: Synthetic oligonucleotide
gcgcaguucauagagauac

SEQ ID NO: 2012583 - RNA, 19 nt, Artificial Sequence
  Description of Artificial Sequence: Synthetic oligonucleotide
ugcaugucagacagauuua

SEQ ID NO: 2012584 - RNA, 19 nt, Artificial Sequence
  Description of Artificial Sequence: Synthetic oligonucleotide
cuucaucauguuauaagua

SEQ ID NO: 2012585 - RNA, 19 nt, Artificial Sequence
  Description of Artificial Sequence: Synthetic oligonucleotide
uacuuucugcacuccugca

SEQ ID NO: 2012586 - RNA, 19 nt, Artificial Sequence
  Description of Artificial Sequence: Synthetic oligonucleotide
gcacagacagauuaagcca

SEQ ID NO: 2012587 - RNA, 19 nt, Artificial Sequence
  Description of Artificial Sequence: Synthetic oligonucleotide
cugcaggaggcuuucuaug

SEQ ID NO: 2012588 - RNA, 19 nt, Artificial Sequence
  Description of Artificial Sequence: Synthetic oligonucleotide
guguguggcaacugguuuc

SEQ ID NO: 2012589 - RNA, 19 nt, Artificial Sequence
  Description of Artificial Sequence: Synthetic oligonucleotide
gaaguacuuucugcacucc

SEQ ID NO: 2012590 - RNA, 19 nt, Artificial Sequence
  Description of Artificial Sequence: Synthetic oligonucleotide
caggcugauuguaaaacaa

SEQ ID NO: 2012591 - RNA, 19 nt, Artificial Sequence
  Description of Artificial Sequence: Synthetic oligonucleotide
cuauggcaugaaagccucg

SEQ ID NO: 2012592 - RNA, 19 nt, Artificial Sequence
  Description of Artificial Sequence: Synthetic oligonucleotide
uggcugaucccagugcaca

SEQ ID NO: 2012593 - RNA, 19 nt, Artificial Sequence
  Description of Artificial Sequence: Synthetic oligonucleotide
ccuugagagcauuuugaag

SEQ ID NO: 2012594 - RNA, 19 nt, Artificial Sequence
  Description of Artificial Sequence: Synthetic oligonucleotide
uuggcugaucccagugcac

SEQ ID NO: 2012595 - RNA, 19 nt, Artificial Sequence
  Description of Artificial Sequence: Synthetic oligonucleotide
gggcagaagaaaucuuacc

SEQ ID NO: 2012596 - RNA, 19 nt, Artificial Sequence
  Description of Artificial Sequence: Synthetic oligonucleotide
uagcucacucccagagagc

SEQ ID NO: 2012597 - RNA, 19 nt, Artificial Sequence
  Description of Artificial Sequence: Synthetic oligonucleotide
ugugacuccauuggcugau

SEQ ID NO: 2012598 - RNA, 19 nt, Artificial Sequence
  Description of Artificial Sequence: Synthetic oligonucleotide
aguggcaguccaucucuga

SEQ ID NO: 2012599 - RNA, 19 nt, Artificial Sequence
  Description of Artificial Sequence: Synthetic oligonucleotide
ggaaguugagcaaguuucc

SEQ ID NO: 2012600 - RNA, 19 nt, Artificial Sequence
  Description of Artificial Sequence: Synthetic oligonucleotide
uccauuggcugaucccagu

SEQ ID NO: 2012601 - RNA, 19 nt, Artificial Sequence
  Description of Artificial Sequence: Synthetic oligonucleotide
ggcugauuguaaaacaaga

SEQ ID NO: 2012602 - RNA, 19 nt, Artificial Sequence
  Description of Artificial Sequence: Synthetic oligonucleotide
uccagucgcugaugggcag

SEQ ID NO: 2012603 - RNA, 19 nt, Artificial Sequence
  Description of Artificial Sequence: Synthetic oligonucleotide
caugaaagccucgaauuaa

SEQ ID NO: 2012604 - RNA, 19 nt, Artificial Sequence
  Description of Artificial Sequence: Synthetic oligonucleotide
aucugcaguguaacaaaug

SEQ ID NO: 2012605 - RNA, 19 nt, Artificial Sequence
  Description of Artificial Sequence: Synthetic oligonucleotide
guugagcaaguuuccuuga

SEQ ID NO: 2012606 - RNA, 19 nt, Artificial Sequence
  Description of Artificial Sequence: Synthetic oligonucleotide
augugacuccauuggcuga

SEQ ID NO: 2012607 - RNA, 19 nt, Artificial Sequence
  Description of Artificial Sequence: Synthetic oligonucleotide
cacacaugggaauuugaua

SEQ ID NO: 2012608 - RNA, 19 nt, Artificial Sequence
  Description of Artificial Sequence: Synthetic oligonucleotide
cuccauuggcugaucccag

SEQ ID NO: 2012609 - RNA, 19 nt, Artificial Sequence
  Description of Artificial Sequence: Synthetic oligonucleotide
aggccagaacauuugggua

SEQ ID NO: 2012610 - RNA, 19 nt, Artificial Sequence
  Description of Artificial Sequence: Synthetic oligonucleotide
agccucgaauuaaauuuag

SEQ ID NO: 2012611 - RNA, 19 nt, Artificial Sequence
  Description of Artificial Sequence: Synthetic oligonucleotide
gguguaguacacaaguaaa

SEQ ID NO: 2012612 - RNA, 19 nt, Artificial Sequence
  Description of Artificial Sequence: Synthetic oligonucleotide
cagugucaguuaauauaug

SEQ ID NO: 2012613 - RNA, 19 nt, Artificial Sequence
  Description of Artificial Sequence: Synthetic oligonucleotide
aagagaccugggauuauua

SEQ ID NO: 2012614 - RNA, 19 nt, Artificial Sequence
  Description of Artificial Sequence: Synthetic oligonucleotide
gcuugccucagccagaucu

SEQ ID NO: 2012615 - RNA, 19 nt, Artificial Sequence
  Description of Artificial Sequence: Synthetic oligonucleotide
acaucugaagggagauguc

SEQ ID NO: 2012616 - RNA, 19 nt, Artificial Sequence
  Description of Artificial Sequence: Synthetic oligonucleotide
augaaagccucgaauuaaa

SEQ ID NO: 2012617 - RNA, 19 nt, Artificial Sequence
  Description of Artificial Sequence: Synthetic oligonucleotide
gguaaaggcaggcugcugu

SEQ ID NO: 2012618 - RNA, 19 nt, Artificial Sequence
  Description of Artificial Sequence: Synthetic oligonucleotide
auacaucugaagggagaug

SEQ ID NO: 2012619 - RNA, 19 nt, Artificial Sequence
  Description of Artificial Sequence: Synthetic oligonucleotide
guccaauuuucaguguaca

SEQ ID NO: 2012620 - RNA, 19 nt, Artificial Sequence
  Description of Artificial Sequence: Synthetic oligonucleotide
gauuauuauaucgcugcuu

SEQ ID NO: 2012621 - RNA, 19 nt, Artificial Sequence
  Description of Artificial Sequence: Synthetic oligonucleotide
aaugacggaggcagauaaa

SEQ ID NO: 2012622 - RNA, 19 nt, Artificial Sequence
  Description of Artificial Sequence: Synthetic oligonucleotide
auggcaugaaagccucgaa

SEQ ID NO: 2012623 - RNA, 19 nt, Artificial Sequence
  Description of Artificial Sequence: Synthetic oligonucleotide
ucacucugcaggaggcuuu

SEQ ID NO: 2012624 - RNA, 19 nt, Artificial Sequence
  Description of Artificial Sequence: Synthetic oligonucleotide
caggaggcuuucuauggca

SEQ ID NO: 2012625 - RNA, 19 nt, Artificial Sequence
  Description of Artificial Sequence: Synthetic oligonucleotide
gaccugggauuauuauauc

SEQ ID NO: 2012626 - RNA, 19 nt, Artificial Sequence
  Description of Artificial Sequence: Synthetic oligonucleotide
ugcgcaguucauagagaua

SEQ ID NO: 2012627 - RNA, 19 nt, Artificial Sequence
  Description of Artificial Sequence: Synthetic oligonucleotide
ggccagaacauuuggguaa

SEQ ID NO: 2012628 - RNA, 19 nt, Artificial Sequence
  Description of Artificial Sequence: Synthetic oligonucleotide
ggcaaaggcaauacaucug

SEQ ID NO: 2012629 - RNA, 19 nt, Artificial Sequence
  Description of Artificial Sequence: Synthetic oligonucleotide
gacacgaaugacggaggca

SEQ ID NO: 2012630 - RNA, 19 nt, Artificial Sequence
  Description of Artificial Sequence: Synthetic oligonucleotide
ccaucacucugcaggaggc

SEQ ID NO: 2012631 - RNA, 19 nt, Artificial Sequence
  Description of Artificial Sequence: Synthetic oligonucleotide
auggucugacagcaguauu

SEQ ID NO: 2012632 - RNA, 19 nt, Artificial Sequence
  Description of Artificial Sequence: Synthetic oligonucleotide
aguguacaucuaucaggaa

SEQ ID NO: 2012633 - RNA, 19 nt, Artificial Sequence
  Description of Artificial Sequence: Synthetic oligonucleotide
cgaauuaaauuuagagcuc

SEQ ID NO: 2012634 - RNA, 19 nt, Artificial Sequence
  Description of Artificial Sequence: Synthetic oligonucleotide
uucucguguguggcaacug

SEQ ID NO: 2012635 - RNA, 19 nt, Artificial Sequence
  Description of Artificial Sequence: Synthetic oligonucleotide
acgaaugacggaggcagau

SEQ ID NO: 2012636 - RNA, 19 nt, Artificial Sequence
  Description of Artificial Sequence: Synthetic oligonucleotide
aaguuuccuugagagcauu

SEQ ID NO: 2012637 - RNA, 19 nt, Artificial Sequence
  Description of Artificial Sequence: Synthetic oligonucleotide
agagguugcgcaguucaua

SEQ ID NO: 2012638 - RNA, 19 nt, Artificial Sequence
  Description of Artificial Sequence: Synthetic oligonucleotide
ggaggcuuucuauggcaug

SEQ ID NO: 2012639 - RNA, 19 nt, Artificial Sequence
  Description of Artificial Sequence: Synthetic oligonucleotide
cauuccgccagcuggugua

SEQ ID NO: 2012640 - RNA, 19 nt, Artificial Sequence
  Description of Artificial Sequence: Synthetic oligonucleotide
ugguaaaggcaggcugcug

SEQ ID NO: 2012641 - RNA, 19 nt, Artificial Sequence
  Description of Artificial Sequence: Synthetic oligonucleotide
agguugcgcaguucauaga

SEQ ID NO: 2012642 - RNA, 19 nt, Artificial Sequence
  Description of Artificial Sequence: Synthetic oligonucleotide
cagcugguguaguacacaa

SEQ ID NO: 2012643 - RNA, 19 nt, Artificial Sequence
  Description of Artificial Sequence: Synthetic oligonucleotide
cagugcacaacaucaugua

SEQ ID NO: 2012644 - RNA, 19 nt, Artificial Sequence
  Description of Artificial Sequence: Synthetic oligonucleotide
aucgcugcuugguccucug

SEQ ID NO: 2012645 - RNA, 19 nt, Artificial Sequence
  Description of Artificial Sequence: Synthetic oligonucleotide
caaaggcaauacaucugaa

SEQ ID NO: 2012646 - RNA, 19 nt, Artificial Sequence
  Description of Artificial Sequence: Synthetic oligonucleotide
agauaaaaucacagacauu

SEQ ID NO: 2012647 - RNA, 19 nt, Artificial Sequence
  Description of Artificial Sequence: Synthetic oligonucleotide
gacauuccgccagcuggug

SEQ ID NO: 2012648 - RNA, 19 nt, Artificial Sequence
  Description of Artificial Sequence: Synthetic oligonucleotide
gagagcuaauaaaauugau

SEQ ID NO: 2012649 - RNA, 19 nt, Artificial Sequence
  Description of Artificial Sequence: Synthetic oligonucleotide
uaucgcugcuugguccucu

SEQ ID NO: 2012650 - RNA, 19 nt, Artificial Sequence
  Description of Artificial Sequence: Synthetic oligonucleotide
gaagcucauccaggaaaga

SEQ ID NO: 2012651 - RNA, 19 nt, Artificial Sequence
  Description of Artificial Sequence: Synthetic oligonucleotide
ggguaauuuucagugcaca

SEQ ID NO: 2012652 - RNA, 19 nt, Artificial Sequence
  Description of Artificial Sequence: Synthetic oligonucleotide
agcuucucguguguggcaa

SEQ ID NO: 2012653 - RNA, 19 nt, Artificial Sequence
  Description of Artificial Sequence: Synthetic oligonucleotide
cugguguaguacacaagua

SEQ ID NO: 2012654 - RNA, 19 nt, Artificial Sequence
  Description of Artificial Sequence: Synthetic oligonucleotide
acaaucccugacagaguug

SEQ ID NO: 2012655 - RNA, 19 nt, Artificial Sequence
  Description of Artificial Sequence: Synthetic oligonucleotide
uccgccagcugguguagua

SEQ ID NO: 2012656 - RNA, 19 nt, Artificial Sequence
  Description of Artificial Sequence: Synthetic oligonucleotide
cuugggcuugccucagcca

SEQ ID NO: 2012657 - RNA, 19 nt, Artificial Sequence
  Description of Artificial Sequence: Synthetic oligonucleotide
guguaguacacaaguaaau

SEQ ID NO: 2012658 - RNA, 19 nt, Artificial Sequence
  Description of Artificial Sequence: Synthetic oligonucleotide
gagccuugccuugggcuug

SEQ ID NO: 2012659 - RNA, 19 nt, Artificial Sequence
  Description of Artificial Sequence: Synthetic oligonucleotide
auaucgcugcuugguccuc

SEQ ID NO: 2012660 - RNA, 19 nt, Artificial Sequence
  Description of Artificial Sequence: Synthetic oligonucleotide
aaucccugacagaguugcu

SEQ ID NO: 2012661 - RNA, 19 nt, Artificial Sequence
  Description of Artificial Sequence: Synthetic oligonucleotide
agccuugccuugggcuugc

SEQ ID NO: 2012662 - RNA, 19 nt, Artificial Sequence
  Description of Artificial Sequence: Synthetic oligonucleotide
guugcgcaguucauagaga

SEQ ID NO: 2012663 - RNA, 19 nt, Artificial Sequence
  Description of Artificial Sequence: Synthetic oligonucleotide
cuucguccccugaaggcaa

SEQ ID NO: 2012664 - RNA, 19 nt, Artificial Sequence
  Description of Artificial Sequence: Synthetic oligonucleotide
augaaacaguauggucuga

SEQ ID NO: 2012665 - RNA, 19 nt, Artificial Sequence
  Description of Artificial Sequence: Synthetic oligonucleotide
cuguucauaaucgguagau

SEQ ID NO: 2012666 - RNA, 19 nt, Artificial Sequence
  Description of Artificial Sequence: Synthetic oligonucleotide
ggauuauuauaucgcugcu

SEQ ID NO: 2012667 - RNA, 19 nt, Artificial Sequence
  Description of Artificial Sequence: Synthetic oligonucleotide
uucguccccugaaggcaaa

SEQ ID NO: 2012668 - RNA, 19 nt, Artificial Sequence
  Description of Artificial Sequence: Synthetic oligonucleotide
ucgcugcuugguccucuga

SEQ ID NO: 2012669 - RNA, 19 nt, Artificial Sequence
  Description of Artificial Sequence: Synthetic oligonucleotide
ucguccccugaaggcaaag

SEQ ID NO: 2012670 - RNA, 19 nt, Artificial Sequence
  Description of Artificial Sequence: Synthetic oligonucleotide
guauggucugacagcagua

SEQ ID NO: 2012671 - RNA, 19 nt, Artificial Sequence
  Description of Artificial Sequence: Synthetic oligonucleotide
aggaggcuuucuauggcau

SEQ ID NO: 2012672 - RNA, 19 nt, Artificial Sequence
  Description of Artificial Sequence: Synthetic oligonucleotide
ugccagagguugcgcaguu

SEQ ID NO: 2012673 - RNA, 19 nt, Artificial Sequence
  Description of Artificial Sequence: Synthetic oligonucleotide
gcucuguucauaaucggua

SEQ ID NO: 2012674 - RNA, 19 nt, Artificial Sequence
  Description of Artificial Sequence: Synthetic oligonucleotide
agauggggacagaaagaaa

SEQ ID NO: 2012675 - RNA, 19 nt, Artificial Sequence
  Description of Artificial Sequence: Synthetic oligonucleotide
gcauuuugaaguacuuucu

SEQ ID NO: 2012676 - RNA, 19 nt, Artificial Sequence
  Description of Artificial Sequence: Synthetic oligonucleotide
cccagaagaccugucgcgc

SEQ ID NO: 2012677 - RNA, 19 nt, Artificial Sequence
  Description of Artificial Sequence: Synthetic oligonucleotide
guucauagagauacauguu

SEQ ID NO: 2012678 - RNA, 19 nt, Artificial Sequence
  Description of Artificial Sequence: Synthetic oligonucleotide
agccagaucugcaguguaa

SEQ ID NO: 2012679 - RNA, 19 nt, Artificial Sequence
  Description of Artificial Sequence: Synthetic oligonucleotide
cugguuccagucgcugaug

SEQ ID NO: 2012680 - RNA, 19 nt, Artificial Sequence
  Description of Artificial Sequence: Synthetic oligonucleotide
cucguguguggcaacuggu

SEQ ID NO: 2012681 - RNA, 19 nt, Artificial Sequence
  Description of Artificial Sequence: Synthetic oligonucleotide
cacgaaugacggaggcaga

SEQ ID NO: 2012682 - RNA, 19 nt, Artificial Sequence
  Description of Artificial Sequence: Synthetic oligonucleotide
gaaaucuuaccagcaccuu

SEQ ID NO: 2012683 - RNA, 19 nt, Artificial Sequence
  Description of Artificial Sequence: Synthetic oligonucleotide
caggaaguugagcaaguuu

SEQ ID NO: 2012684 - RNA, 19 nt, Artificial Sequence
  Description of Artificial Sequence: Synthetic oligonucleotide
cucugacacgaaugacgga

SEQ ID NO: 2012685 - RNA, 19 nt, Artificial Sequence
  Description of Artificial Sequence: Synthetic oligonucleotide
cagacagauuaagccaaaa

SEQ ID NO: 2012686 - RNA, 19 nt, Artificial Sequence
  Description of Artificial Sequence: Synthetic oligonucleotide
ggcuuucuauggcaugaaa

SEQ ID NO: 2012687 - RNA, 19 nt, Artificial Sequence
  Description of Artificial Sequence: Synthetic oligonucleotide
gaugggcagaagaaaucuu

SEQ ID NO: 2012688 - RNA, 19 nt, Artificial Sequence
  Description of Artificial Sequence: Synthetic oligonucleotide
cagaguugcugguuccagu

SEQ ID NO: 2012689 - RNA, 19 nt, Artificial Sequence
  Description of Artificial Sequence: Synthetic oligonucleotide
caaguuuccuugagagcau

SEQ ID NO: 2012690 - RNA, 19 nt, Artificial Sequence
  Description of Artificial Sequence: Synthetic oligonucleotide
cugaucccagugcacacau

SEQ ID NO: 2012691 - RNA, 19 nt, Artificial Sequence
  Description of Artificial Sequence: Synthetic oligonucleotide
gcaguucauagagauacau

SEQ ID NO: 2012692 - RNA, 19 nt, Artificial Sequence
  Description of Artificial Sequence: Synthetic oligonucleotide
gccucgaauuaaauuuaga

SEQ ID NO: 2012693 - RNA, 19 nt, Artificial Sequence
  Description of Artificial Sequence: Synthetic oligonucleotide
augcucccacagucacaug

SEQ ID NO: 2012694 - RNA, 19 nt, Artificial Sequence
  Description of Artificial Sequence: Synthetic oligonucleotide
gaaagagaccugggauuau

SEQ ID NO: 2012695 - RNA, 19 nt, Artificial Sequence
  Description of Artificial Sequence: Synthetic oligonucleotide
ccuucguccccugaaggca

SEQ ID NO: 2012696 - RNA, 19 nt, Artificial Sequence
  Description of Artificial Sequence: Synthetic oligonucleotide
cuucucguguguggcaacu

SEQ ID NO: 2012697 - RNA, 19 nt, Artificial Sequence
  Description of Artificial Sequence: Synthetic oligonucleotide
cugguaaaggcaggcugcu

SEQ ID NO: 2012698 - RNA, 19 nt, Artificial Sequence
  Description of Artificial Sequence: Synthetic oligonucleotide
acucugcaggaggcuuucu

SEQ ID NO: 2012699 - RNA, 19 nt, Artificial Sequence
  Description of Artificial Sequence: Synthetic oligonucleotide
gcugcuugguccucugaau

SEQ ID NO: 2012700 - RNA, 19 nt, Artificial Sequence
  Description of Artificial Sequence: Synthetic oligonucleotide
guacaucuaucaggaaguu

SEQ ID NO: 2012701 - RNA, 19 nt, Artificial Sequence
  Description of Artificial Sequence: Synthetic oligonucleotide
ccuuuacagucaacagaaa

SEQ ID NO: 2012702 - RNA, 19 nt, Artificial Sequence
  Description of Artificial Sequence: Synthetic oligonucleotide
cagucgcugaugggcagaa

SEQ ID NO: 2012703 - RNA, 19 nt, Artificial Sequence
  Description of Artificial Sequence: Synthetic oligonucleotide
gcacaacaucauguagcuc

SEQ ID NO: 2012704 - RNA, 19 nt, Artificial Sequence
  Description of Artificial Sequence: Synthetic oligonucleotide
cagagguugcgcaguucau

SEQ ID NO: 2012705 - RNA, 19 nt, Artificial Sequence
  Description of Artificial Sequence: Synthetic oligonucleotide
ccagcugguguaguacaca

SEQ ID NO: 2012706 - RNA, 19 nt, Artificial Sequence
  Description of Artificial Sequence: Synthetic oligonucleotide
cugcauuccugugcucugu

SEQ ID NO: 2012707 - RNA, 19 nt, Artificial Sequence
  Description of Artificial Sequence: Synthetic oligonucleotide
gccuugggcuugccucagc

SEQ ID NO: 2012708 - RNA, 19 nt, Artificial Sequence
  Description of Artificial Sequence: Synthetic oligonucleotide
ccagaagaccugucgcgcu

SEQ ID NO: 2012709 - RNA, 19 nt, Artificial Sequence
  Description of Artificial Sequence: Synthetic oligonucleotide
gccagaacauuuggguaau

SEQ ID NO: 2012710 - RNA, 19 nt, Artificial Sequence
  Description of Artificial Sequence: Synthetic oligonucleotide
gccagagguugcgcaguuc

SEQ ID NO: 2012711 - RNA, 19 nt, Artificial Sequence
  Description of Artificial Sequence: Synthetic oligonucleotide
cagcaguauuugucuucau

SEQ ID NO: 2012712 - RNA, 19 nt, Artificial Sequence
  Description of Artificial Sequence: Synthetic oligonucleotide
ccacaaucccugacagagu

SEQ ID NO: 2012713 - RNA, 19 nt, Artificial Sequence
  Description of Artificial Sequence: Synthetic oligonucleotide
gcugacaguggcaguccau

SEQ ID NO: 2012714 - RNA, 19 nt, Artificial Sequence
  Description of Artificial Sequence: Synthetic oligonucleotide
cguguguggcaacugguuu

SEQ ID NO: 2012715 - RNA, 19 nt, Artificial Sequence
  Description of Artificial Sequence: Synthetic oligonucleotide
gggcuugccucagccagau

SEQ ID NO: 2012716 - RNA, 19 nt, Artificial Sequence
  Description of Artificial Sequence: Synthetic oligonucleotide
cgaaugacggaggcagaua

SEQ ID NO: 2012717 - RNA, 19 nt, Artificial Sequence
  Description of Artificial Sequence: Synthetic oligonucleotide
ccugugcucuguucauaau

SEQ ID NO: 2012718 - RNA, 19 nt, Artificial Sequence
  Description of Artificial Sequence: Synthetic oligonucleotide
ccuugccuugggcuugccu

SEQ ID NO: 2012719 - RNA, 19 nt, Artificial Sequence
  Description of Artificial Sequence: Synthetic oligonucleotide
uuaaugaugagugugagca

SEQ ID NO: 2012720 - RNA, 19 nt, Artificial Sequence
  Description of Artificial Sequence: Synthetic oligonucleotide
aagacuuucucuuugguca

SEQ ID NO: 2012721 - RNA, 19 nt, Artificial Sequence
  Description of Artificial Sequence: Synthetic oligonucleotide
aacauguggaucauuagcc

SEQ ID NO: 2012722 - RNA, 19 nt, Artificial Sequence
  Description of Artificial Sequence: Synthetic oligonucleotide
augauccuaaucuggaugc

SEQ ID NO: 2012723 - RNA, 19 nt, Artificial Sequence
  Description of Artificial Sequence: Synthetic oligonucleotide
gaacagauuggauaggugc

SEQ ID NO: 2012724 - RNA, 19 nt, Artificial Sequence
  Description of Artificial Sequence: Synthetic oligonucleotide
uggcagacgacaaagacgc

SEQ ID NO: 2012725 - RNA, 19 nt, Artificial Sequence
  Description of Artificial Sequence: Synthetic oligonucleotide
aggauuuagaagcugcugg

SEQ ID NO: 2012726 - RNA, 19 nt, Artificial Sequence
  Description of Artificial Sequence: Synthetic oligonucleotide
accaagaacaggucgaacg

SEQ ID NO: 2012727 - RNA, 19 nt, Artificial Sequence
  Description of Artificial Sequence: Synthetic oligonucleotide
aaugaugagugugagcagg

SEQ ID NO: 2012728 - RNA, 19 nt, Artificial Sequence
  Description of Artificial Sequence: Synthetic oligonucleotide
ugugaaaccagcaccagcu

SEQ ID NO: 2012729 - RNA, 19 nt, Artificial Sequence
  Description of Artificial Sequence: Synthetic oligonucleotide
uagggguuaaugaugagug

SEQ ID NO: 2012730 - RNA, 19 nt, Artificial Sequence
  Description of Artificial Sequence: Synthetic oligonucleotide
aaaaugcucucugccaugc

SEQ ID NO: 2012731 - RNA, 19 nt, Artificial Sequence
  Description of Artificial Sequence: Synthetic oligonucleotide
aagaacaggucgaacgucc

SEQ ID NO: 2012732 - RNA, 19 nt, Artificial Sequence
  Description of Artificial Sequence: Synthetic oligonucleotide
gacaaccaagaacaggucg

SEQ ID NO: 2012733 - RNA, 19 nt, Artificial Sequence
  Description of Artificial Sequence: Synthetic oligonucleotide
gaacauguggaucauuagc

SEQ ID NO: 2012734 - RNA, 19 nt, Artificial Sequence
  Description of Artificial Sequence: Synthetic oligonucleotide
ucagauugacggcugaacc

SEQ ID NO: 2012735 - RNA, 19 nt, Artificial Sequence
  Description of Artificial Sequence: Synthetic oligonucleotide
agugaagcugucuugagga

SEQ ID NO: 2012736 - RNA, 19 nt, Artificial Sequence
  Description of Artificial Sequence: Synthetic oligonucleotide
caggcugucgacuagggcg

SEQ ID NO: 2012737 - RNA, 19 nt, Artificial Sequence
  Description of Artificial Sequence: Synthetic oligonucleotide
aacucggcgucccaggacg

SEQ ID NO: 2012738 - RNA, 19 nt, Artificial Sequence
  Description of Artificial Sequence: Synthetic oligonucleotide
auuuagaagcugcuggguc

SEQ ID NO: 2012739 - RNA, 19 nt, Artificial Sequence
  Description of Artificial Sequence: Synthetic oligonucleotide
ggaagaacagauuggauag

SEQ ID NO: 2012740 - RNA, 19 nt, Artificial Sequence
  Description of Artificial Sequence: Synthetic oligonucleotide
cuuuggucagcagagagcg

SEQ ID NO: 2012741 - RNA, 19 nt, Artificial Sequence
  Description of Artificial Sequence: Synthetic oligonucleotide
gaaguuccaauccacagga

SEQ ID NO: 2012742 - RNA, 19 nt, Artificial Sequence
  Description of Artificial Sequence: Synthetic oligonucleotide
uggaucauuagccacuggu

SEQ ID NO: 2012743 - RNA, 19 nt, Artificial Sequence
  Description of Artificial Sequence: Synthetic oligonucleotide
gacggcugaacccagaaac

SEQ ID NO: 2012744 - RNA, 19 nt, Artificial Sequence
  Description of Artificial Sequence: Synthetic oligonucleotide
aggaaaugcaggugaaagg

SEQ ID NO: 2012745 - RNA, 19 nt, Artificial Sequence
  Description of Artificial Sequence: Synthetic oligonucleotide
ugguugaccuuccaaaaca

SEQ ID NO: 2012746 - RNA, 19 nt, Artificial Sequence
  Description of Artificial Sequence: Synthetic oligonucleotide
gagcgaaucuuccaggaag

SEQ ID NO: 2012747 - RNA, 19 nt, Artificial Sequence
  Description of Artificial Sequence: Synthetic oligonucleotide
gaacagugcaaagugaggc

SEQ ID NO: 2012748 - RNA, 19 nt, Artificial Sequence
  Description of Artificial Sequence: Synthetic oligonucleotide
ucgaacguccggaagaaca

SEQ ID NO: 2012749 - RNA, 19 nt, Artificial Sequence
  Description of Artificial Sequence: Synthetic oligonucleotide
gugaugugaaaccagcacc

SEQ ID NO: 2012750 - RNA, 19 nt, Artificial Sequence
  Description of Artificial Sequence: Synthetic oligonucleotide
aagacgcccagguaaaaga

SEQ ID NO: 2012751 - RNA, 19 nt, Artificial Sequence
  Description of Artificial Sequence: Synthetic oligonucleotide
augugaaaccagcaccagc

SEQ ID NO: 2012752 - RNA, 19 nt, Artificial Sequence
  Description of Artificial Sequence: Synthetic oligonucleotide
ccagguaaaagacaaagcc

SEQ ID NO: 2012753 - RNA, 19 nt, Artificial Sequence
  Description of Artificial Sequence: Synthetic oligonucleotide
uaggugaggaucauucggc

SEQ ID NO: 2012754 - RNA, 19 nt, Artificial Sequence
  Description of Artificial Sequence: Synthetic oligonucleotide
ucuuuggucagcagagagc

SEQ ID NO: 2012755 - RNA, 19 nt, Artificial Sequence
  Description of Artificial Sequence: Synthetic oligonucleotide
uguggugaugugaaaccag

SEQ ID NO: 2012756 - RNA, 19 nt, Artificial Sequence
  Description of Artificial Sequence: Synthetic oligonucleotide
gacaccgaagacugcacgg

SEQ ID NO: 2012757 - RNA, 19 nt, Artificial Sequence
  Description of Artificial Sequence: Synthetic oligonucleotide
ugcccaagagcuuugucag

SEQ ID NO: 2012758 - RNA, 19 nt, Artificial Sequence
  Description of Artificial Sequence: Synthetic oligonucleotide
aaaugcaggugaaaggugu

SEQ ID NO: 2012759 - RNA, 19 nt, Artificial Sequence
  Description of Artificial Sequence: Synthetic oligonucleotide
caugauccuaaucuggaug

SEQ ID NO: 2012760 - RNA, 19 nt, Artificial Sequence
  Description of Artificial Sequence: Synthetic oligonucleotide
aaaugcucucugccaugcc

SEQ ID NO: 2012761 - RNA, 19 nt, Artificial Sequence
  Description of Artificial Sequence: Synthetic oligonucleotide
ugaccuuccaaaacaggga

SEQ ID NO: 2012762 - RNA, 19 nt, Artificial Sequence
  Description of Artificial Sequence: Synthetic oligonucleotide
uggaacauguggaucauua

SEQ ID NO: 2012763 - RNA, 19 nt, Artificial Sequence
  Description of Artificial Sequence: Synthetic oligonucleotide
gacaucagucuccucacgc

SEQ ID NO: 2012764 - RNA, 19 nt, Artificial Sequence
  Description of Artificial Sequence: Synthetic oligonucleotide
acggguagcugccagguuc

SEQ ID NO: 2012765 - RNA, 19 nt, Artificial Sequence
  Description of Artificial Sequence: Synthetic oligonucleotide
ggaagcauaguccagguca

SEQ ID NO: 2012766 - RNA, 19 nt, Artificial Sequence
  Description of Artificial Sequence: Synthetic oligonucleotide
ucaaacucggcgucccagg

SEQ ID NO: 2012767 - RNA, 19 nt, Artificial Sequence
  Description of Artificial Sequence: Synthetic oligonucleotide
aaagacgcccagguaaaag

SEQ ID NO: 2012768 - RNA, 19 nt, Artificial Sequence
  Description of Artificial Sequence: Synthetic oligonucleotide
uuccaaaacagggagucug

SEQ ID NO: 2012769 - RNA, 19 nt, Artificial Sequence
  Description of Artificial Sequence: Synthetic oligonucleotide
ccagcucucagauugacgg

SEQ ID NO: 2012770 - RNA, 19 nt, Artificial Sequence
  Description of Artificial Sequence: Synthetic oligonucleotide
cagauugacggcugaaccc

SEQ ID NO: 2012771 - RNA, 19 nt, Artificial Sequence
  Description of Artificial Sequence: Synthetic oligonucleotide
uugguuucggacuggguga

SEQ ID NO: 2012772 - RNA, 19 nt, Artificial Sequence
  Description of Artificial Sequence: Synthetic oligonucleotide
aaacucggcgucccaggac

SEQ ID NO: 2012773 - RNA, 19 nt, Artificial Sequence
  Description of Artificial Sequence: Synthetic oligonucleotide
agugugagcagggccagcc

SEQ ID NO: 2012774 - RNA, 19 nt, Artificial Sequence
  Description of Artificial Sequence: Synthetic oligonucleotide
uuguguguccaguaggggu

SEQ ID NO: 2012775 - RNA, 19 nt, Artificial Sequence
  Description of Artificial Sequence: Synthetic oligonucleotide
gagucaugauccuaaucug

SEQ ID NO: 2012776 - RNA, 19 nt, Artificial Sequence
  Description of Artificial Sequence: Synthetic oligonucleotide
agacugcacggguagcugc

SEQ ID NO: 2012777 - RNA, 19 nt, Artificial Sequence
  Description of Artificial Sequence: Synthetic oligonucleotide
uccaguagggguuaaugau

SEQ ID NO: 2012778 - RNA, 19 nt, Artificial Sequence
  Description of Artificial Sequence: Synthetic oligonucleotide
gaucauucggcaguggaac

SEQ ID NO: 2012779 - RNA, 19 nt, Artificial Sequence
  Description of Artificial Sequence: Synthetic oligonucleotide
cuaaucuggaugccagagg

SEQ ID NO: 2012780 - RNA, 19 nt, Artificial Sequence
  Description of Artificial Sequence: Synthetic oligonucleotide
acgacaaagacgcccaggu

SEQ ID NO: 2012781 - RNA, 19 nt, Artificial Sequence
  Description of Artificial Sequence: Synthetic oligonucleotide
uccauccucaaucugcauc

SEQ ID NO: 2012782 - RNA, 19 nt, Artificial Sequence
  Description of Artificial Sequence: Synthetic oligonucleotide
guuaaugaugagugugagc

SEQ ID NO: 2012783 - RNA, 19 nt, Artificial Sequence
  Description of Artificial Sequence: Synthetic oligonucleotide
aucauuagccacugguuga

SEQ ID NO: 2012784 - RNA, 19 nt, Artificial Sequence
  Description of Artificial Sequence: Synthetic oligonucleotide
agucaugauccuaaucugg

SEQ ID NO: 2012785 - RNA, 19 nt, Artificial Sequence
  Description of Artificial Sequence: Synthetic oligonucleotide
gaucuucgggcauccaucc

SEQ ID NO: 2012786 - RNA, 19 nt, Artificial Sequence
  Description of Artificial Sequence: Synthetic oligonucleotide
aagagcuuugucagcgugg

SEQ ID NO: 2012787 - RNA, 19 nt, Artificial Sequence
  Description of Artificial Sequence: Synthetic oligonucleotide
ugugcucaucuccaagagc

SEQ ID NO: 2012788 - RNA, 19 nt, Artificial Sequence
  Description of Artificial Sequence: Synthetic oligonucleotide
caggaaaugcaggugaaag

SEQ ID NO: 2012789 - RNA, 19 nt, Artificial Sequence
  Description of Artificial Sequence: Synthetic oligonucleotide
cauguggaucauuagccac

SEQ ID NO: 2012790 - RNA, 19 nt, Artificial Sequence
  Description of Artificial Sequence: Synthetic oligonucleotide
gacaguugguggcagacga

SEQ ID NO: 2012791 - RNA, 19 nt, Artificial Sequence
  Description of Artificial Sequence: Synthetic oligonucleotide
cagguaaaagacaaagcca

SEQ ID NO: 2012792 - RNA, 19 nt, Artificial Sequence
  Description of Artificial Sequence: Synthetic oligonucleotide
gaugccagagguguccccg

SEQ ID NO: 2012793 - RNA, 19 nt, Artificial Sequence
  Description of Artificial Sequence: Synthetic oligonucleotide
cagaagacuuucucuuugg

SEQ ID NO: 2012794 - RNA, 19 nt, Artificial Sequence
  Description of Artificial Sequence: Synthetic oligonucleotide
ugggugaaguuccaaucca

SEQ ID NO: 2012795 - RNA, 19 nt, Artificial Sequence
  Description of Artificial Sequence: Synthetic oligonucleotide
uaaugaugagugugagcag

SEQ ID NO: 2012796 - RNA, 19 nt, Artificial Sequence
  Description of Artificial Sequence: Synthetic oligonucleotide
gauaguggccagcucucag

SEQ ID NO: 2012797 - RNA, 19 nt, Artificial Sequence
  Description of Artificial Sequence: Synthetic oligonucleotide
guggcagacgacaaagacg

SEQ ID NO: 2012798 - RNA, 19 nt, Artificial Sequence
  Description of Artificial Sequence: Synthetic oligonucleotide
uaggaacagugcaaaguga

SEQ ID NO: 2012799 - RNA, 19 nt, Artificial Sequence
  Description of Artificial Sequence: Synthetic oligonucleotide
agggagucugaccagccag

SEQ ID NO: 2012800 - RNA, 19 nt, Artificial Sequence
  Description of Artificial Sequence: Synthetic oligonucleotide
uccaaaacagggagucuga

SEQ ID NO: 2012801 - RNA, 19 nt, Artificial Sequence
  Description of Artificial Sequence: Synthetic oligonucleotide
acguucucaaagaagaaga

SEQ ID NO: 2012802 - RNA, 19 nt, Artificial Sequence
  Description of Artificial Sequence: Synthetic oligonucleotide
ggagucaugauccuaaucu

SEQ ID NO: 2012803 - RNA, 19 nt, Artificial Sequence
  Description of Artificial Sequence: Synthetic oligonucleotide
uccggaagaacagauugga

SEQ ID NO: 2012804 - RNA, 19 nt, Artificial Sequence
  Description of Artificial Sequence: Synthetic oligonucleotide
aaaguggucauggccagau

SEQ ID NO: 2012805 - RNA, 19 nt, Artificial Sequence
  Description of Artificial Sequence: Synthetic oligonucleotide
acauguggaucauuagcca

SEQ ID NO: 2012806 - RNA, 19 nt, Artificial Sequence
  Description of Artificial Sequence: Synthetic oligonucleotide
aggagucaugauccuaauc

SEQ ID NO: 2012807 - RNA, 19 nt, Artificial Sequence
  Description of Artificial Sequence: Synthetic oligonucleotide
uguccaguagggguuaaug

SEQ ID NO: 2012808 - RNA, 19 nt, Artificial Sequence
  Description of Artificial Sequence: Synthetic oligonucleotide
caaucugcauccaggugag

SEQ ID NO: 2012809 - RNA, 19 nt, Artificial Sequence
  Description of Artificial Sequence: Synthetic oligonucleotide
aacaggucgaacguccgga

SEQ ID NO: 2012810 - RNA, 19 nt, Artificial Sequence
  Description of Artificial Sequence: Synthetic oligonucleotide
gaacaggucgaacguccgg

SEQ ID NO: 2012811 - RNA, 19 nt, Artificial Sequence
  Description of Artificial Sequence: Synthetic oligonucleotide
acauaggaacagugcaaag

SEQ ID NO: 2012812 - RNA, 19 nt, Artificial Sequence
  Description of Artificial Sequence: Synthetic oligonucleotide
gugguggacaaccaagaac

SEQ ID NO: 2012813 - RNA, 19 nt, Artificial Sequence
  Description of Artificial Sequence: Synthetic oligonucleotide
aaccaagaacaggucgaac

SEQ ID NO: 2012814 - RNA, 19 nt, Artificial Sequence
  Description of Artificial Sequence: Synthetic oligonucleotide
gauuggauaggugcacagc

SEQ ID NO: 2012815 - RNA, 19 nt, Artificial Sequence
  Description of Artificial Sequence: Synthetic oligonucleotide
cacguucucaaagaagaag

SEQ ID NO: 2012816 - RNA, 19 nt, Artificial Sequence
  Description of Artificial Sequence: Synthetic oligonucleotide
acuagggcgccccagugcu

SEQ ID NO: 2012817 - RNA, 19 nt, Artificial Sequence
  Description of Artificial Sequence: Synthetic oligonucleotide
uuugucagcguggacgcac

SEQ ID NO: 2012818 - RNA, 19 nt, Artificial Sequence
  Description of Artificial Sequence: Synthetic oligonucleotide
ucgagcgaaucuuccagga

SEQ ID NO: 2012819 - RNA, 19 nt, Artificial Sequence
  Description of Artificial Sequence: Synthetic oligonucleotide
agauugacggcugaaccca

SEQ ID NO: 2012820 - RNA, 19 nt, Artificial Sequence
  Description of Artificial Sequence: Synthetic oligonucleotide
aucuggaugccagaggugu

SEQ ID NO: 2012821 - RNA, 19 nt, Artificial Sequence
  Description of Artificial Sequence: Synthetic oligonucleotide
gucgagcgaaucuuccagg

SEQ ID NO: 2012822 - RNA, 19 nt, Artificial Sequence
  Description of Artificial Sequence: Synthetic oligonucleotide
agggccagcccacauagga

SEQ ID NO: 2012823 - RNA, 19 nt, Artificial Sequence
  Description of Artificial Sequence: Synthetic oligonucleotide
acaaccaagaacaggucga

SEQ ID NO: 2012824 - RNA, 19 nt, Artificial Sequence
  Description of Artificial Sequence: Synthetic oligonucleotide
uguggaucauuagccacug

SEQ ID NO: 2012825 - RNA, 19 nt, Artificial Sequence
  Description of Artificial Sequence: Synthetic oligonucleotide
gugagcagaaguggggacg

SEQ ID NO: 2012826 - RNA, 19 nt, Artificial Sequence
  Description of Artificial Sequence: Synthetic oligonucleotide
agagcgguagguggcauuc

SEQ ID NO: 2012827 - RNA, 19 nt, Artificial Sequence
  Description of Artificial Sequence: Synthetic oligonucleotide
uagguggcauucaggggag

SEQ ID NO: 2012828 - RNA, 19 nt, Artificial Sequence
  Description of Artificial Sequence: Synthetic oligonucleotide
ugagcagaaguggggacgc

SEQ ID NO: 2012829 - RNA, 19 nt, Artificial Sequence
  Description of Artificial Sequence: Synthetic oligonucleotide
gacgacaaagacgcccagg

SEQ ID NO: 2012830 - RNA, 19 nt, Artificial Sequence
  Description of Artificial Sequence: Synthetic oligonucleotide
acggcugaacccagaaacc

SEQ ID NO: 2012831 - RNA, 19 nt, Artificial Sequence
  Description of Artificial Sequence: Synthetic oligonucleotide
agacaucagucuccucacg

SEQ ID NO: 2012832 - RNA, 19 nt, Artificial Sequence
  Description of Artificial Sequence: Synthetic oligonucleotide
ucauuagccacugguugac

SEQ ID NO: 2012833 - RNA, 19 nt, Artificial Sequence
  Description of Artificial Sequence: Synthetic oligonucleotide
agacgcccagguaaaagac

SEQ ID NO: 2012834 - RNA, 19 nt, Artificial Sequence
  Description of Artificial Sequence: Synthetic oligonucleotide
cagaaacccaagaaaggca

SEQ ID NO: 2012835 - RNA, 19 nt, Artificial Sequence
  Description of Artificial Sequence: Synthetic oligonucleotide
gacgccgccucuuagccca

SEQ ID NO: 2012836 - RNA, 19 nt, Artificial Sequence
  Description of Artificial Sequence: Synthetic oligonucleotide
acaccgaagacugcacggg

SEQ ID NO: 2012837 - RNA, 19 nt, Artificial Sequence
  Description of Artificial Sequence: Synthetic oligonucleotide
ucacgcuagagccucuuuu

SEQ ID NO: 2012838 - RNA, 19 nt, Artificial Sequence
  Description of Artificial Sequence: Synthetic oligonucleotide
agcguggacgcacagccgu

SEQ ID NO: 2012839 - RNA, 19 nt, Artificial Sequence
  Description of Artificial Sequence: Synthetic oligonucleotide
agcagaaguggggacgccg

SEQ ID NO: 2012840 - RNA, 19 nt, Artificial Sequence
  Description of Artificial Sequence: Synthetic oligonucleotide
caguagggguuaaugauga

SEQ ID NO: 2012841 - RNA, 19 nt, Artificial Sequence
  Description of Artificial Sequence: Synthetic oligonucleotide
auccuaaucuggaugccag

SEQ ID NO: 2012842 - RNA, 19 nt, Artificial Sequence
  Description of Artificial Sequence: Synthetic oligonucleotide
ugaggaucauucggcagug

SEQ ID NO: 2012843 - RNA, 19 nt, Artificial Sequence
  Description of Artificial Sequence: Synthetic oligonucleotide
aggcugucgacuagggcgc

SEQ ID NO: 2012844 - RNA, 19 nt, Artificial Sequence
  Description of Artificial Sequence: Synthetic oligonucleotide
caucuccaagagcaaagug

SEQ ID NO: 2012845 - RNA, 19 nt, Artificial Sequence
  Description of Artificial Sequence: Synthetic oligonucleotide
guggugaugugaaaccagc

SEQ ID NO: 2012846 - RNA, 19 nt, Artificial Sequence
  Description of Artificial Sequence: Synthetic oligonucleotide
aagacugcacggguagcug

SEQ ID NO: 2012847 - RNA, 19 nt, Artificial Sequence
  Description of Artificial Sequence: Synthetic oligonucleotide
caccacaugugguagguga

SEQ ID NO: 2012848 - RNA, 19 nt, Artificial Sequence
  Description of Artificial Sequence: Synthetic oligonucleotide
ggucgagcgaaucuuccag

SEQ ID NO: 2012849 - RNA, 19 nt, Artificial Sequence
  Description of Artificial Sequence: Synthetic oligonucleotide
augguugcucacaggaguc

SEQ ID NO: 2012850 - RNA, 19 nt, Artificial Sequence
  Description of Artificial Sequence: Synthetic oligonucleotide
auccucaaucugcauccag

SEQ ID NO: 2012851 - RNA, 19 nt, Artificial Sequence
  Description of Artificial Sequence: Synthetic oligonucleotide
ugcucuggacaccgaagac

SEQ ID NO: 2012852 - RNA, 19 nt, Artificial Sequence
  Description of Artificial Sequence: Synthetic oligonucleotide
ugcuggaagcacacccacc

SEQ ID NO: 2012853 - RNA, 19 nt, Artificial Sequence
  Description of Artificial Sequence: Synthetic oligonucleotide
gacuagggcgccccagugc

SEQ ID NO: 2012854 - RNA, 19 nt, Artificial Sequence
  Description of Artificial Sequence: Synthetic oligonucleotide
aggugugcucaucuccaag

SEQ ID NO: 2012855 - RNA, 19 nt, Artificial Sequence
  Description of Artificial Sequence: Synthetic oligonucleotide
uggccauuugguccuuucu

SEQ ID NO: 2012856 - RNA, 19 nt, Artificial Sequence
  Description of Artificial Sequence: Synthetic oligonucleotide
cucagauugacggcugaac

SEQ ID NO: 2012857 - RNA, 19 nt, Artificial Sequence
  Description of Artificial Sequence: Synthetic oligonucleotide
aguagggguuaaugaugag

SEQ ID NO: 2012858 - RNA, 19 nt, Artificial Sequence
  Description of Artificial Sequence: Synthetic oligonucleotide
gguuaaugaugagugugag

SEQ ID NO: 2012859 - RNA, 19 nt, Artificial Sequence
  Description of Artificial Sequence: Synthetic oligonucleotide
aucauucggcaguggaaca

SEQ ID NO: 2012860 - RNA, 19 nt, Artificial Sequence
  Description of Artificial Sequence: Synthetic oligonucleotide
aggugaggaucauucggca

SEQ ID NO: 2012861 - RNA, 19 nt, Artificial Sequence
  Description of Artificial Sequence: Synthetic oligonucleotide
cccagaaacccaagaaagg

SEQ ID NO: 2012862 - RNA, 19 nt, Artificial Sequence
  Description of Artificial Sequence: Synthetic oligonucleotide
ucagucuccucacgcuaga

SEQ ID NO: 2012863 - RNA, 19 nt, Artificial Sequence
  Description of Artificial Sequence: Synthetic oligonucleotide
gcauccauccucaaucugc

SEQ ID NO: 2012864 - RNA, 19 nt, Artificial Sequence
  Description of Artificial Sequence: Synthetic oligonucleotide
guccggaagaacagauugg

SEQ ID NO: 2012865 - RNA, 19 nt, Artificial Sequence
  Description of Artificial Sequence: Synthetic oligonucleotide
agggucgagcgaaucuucc

SEQ ID NO: 2012866 - RNA, 19 nt, Artificial Sequence
  Description of Artificial Sequence: Synthetic oligonucleotide
agcucucagauugacggcu

SEQ ID NO: 2012867 - RNA, 19 nt, Artificial Sequence
  Description of Artificial Sequence: Synthetic oligonucleotide
uccuaaucuggaugccaga

SEQ ID NO: 2012868 - RNA, 19 nt, Artificial Sequence
  Description of Artificial Sequence: Synthetic oligonucleotide
agagcuuugucagcgugga

SEQ ID NO: 2012869 - RNA, 19 nt, Artificial Sequence
  Description of Artificial Sequence: Synthetic oligonucleotide
aacguccggaagaacagau

SEQ ID NO: 2012870 - RNA, 19 nt, Artificial Sequence
  Description of Artificial Sequence: Synthetic oligonucleotide
ugauccuaaucuggaugcc

SEQ ID NO: 2012871 - RNA, 19 nt, Artificial Sequence
  Description of Artificial Sequence: Synthetic oligonucleotide
aaucuggaugccagaggug

SEQ ID NO: 2012872 - RNA, 19 nt, Artificial Sequence
  Description of Artificial Sequence: Synthetic oligonucleotide
uagggcgccccagugcugg

SEQ ID NO: 2012873 - RNA, 19 nt, Artificial Sequence
  Description of Artificial Sequence: Synthetic oligonucleotide
agaacaggucgaacguccg

SEQ ID NO: 2012874 - RNA, 19 nt, Artificial Sequence
  Description of Artificial Sequence: Synthetic oligonucleotide
cauccauccucaaucugca

SEQ ID NO: 2012875 - RNA, 19 nt, Artificial Sequence
  Description of Artificial Sequence: Synthetic oligonucleotide
ucgacuagggcgccccagu

SEQ ID NO: 2012876 - RNA, 19 nt, Artificial Sequence
  Description of Artificial Sequence: Synthetic oligonucleotide
cagacgacaaagacgccca

SEQ ID NO: 2012877 - RNA, 19 nt, Artificial Sequence
  Description of Artificial Sequence: Synthetic oligonucleotide
cacugguugaccuuccaaa

SEQ ID NO: 2012878 - RNA, 19 nt, Artificial Sequence
  Description of Artificial Sequence: Synthetic oligonucleotide
guuccagaagacuuucucu

SEQ ID NO: 2012879 - RNA, 19 nt, Artificial Sequence
  Description of Artificial Sequence: Synthetic oligonucleotide
acaggagucaugauccuaa

SEQ ID NO: 2012880 - RNA, 19 nt, Artificial Sequence
  Description of Artificial Sequence: Synthetic oligonucleotide
ugagugugagcagggccag

SEQ ID NO: 2012881 - RNA, 19 nt, Artificial Sequence
  Description of Artificial Sequence: Synthetic oligonucleotide
ggaacagugcaaagugagg

SEQ ID NO: 2012882 - RNA, 19 nt, Artificial Sequence
  Description of Artificial Sequence: Synthetic oligonucleotide
ggugaggaucauucggcag

SEQ ID NO: 2012883 - RNA, 19 nt, Artificial Sequence
  Description of Artificial Sequence: Synthetic oligonucleotide
caggauuuagaagcugcug

SEQ ID NO: 2012884 - RNA, 19 nt, Artificial Sequence
  Description of Artificial Sequence: Synthetic oligonucleotide
ugccagagguguccccggg

SEQ ID NO: 2012885 - RNA, 19 nt, Artificial Sequence
  Description of Artificial Sequence: Synthetic oligonucleotide
gcccagguaaaagacaaag

SEQ ID NO: 2012886 - RNA, 19 nt, Artificial Sequence
  Description of Artificial Sequence: Synthetic oligonucleotide
auguggaucauuagccacu

SEQ ID NO: 2012887 - RNA, 19 nt, Artificial Sequence
  Description of Artificial Sequence: Synthetic oligonucleotide
auccaggugagcagaagug

SEQ ID NO: 2012888 - RNA, 19 nt, Artificial Sequence
  Description of Artificial Sequence: Synthetic oligonucleotide
agaggugguggacaaccaa

SEQ ID NO: 2012889 - RNA, 19 nt, Artificial Sequence
  Description of Artificial Sequence: Synthetic oligonucleotide
ugccaugguugcucacagg

SEQ ID NO: 2012890 - RNA, 19 nt, Artificial Sequence
  Description of Artificial Sequence: Synthetic oligonucleotide
ggacaccgaagacugcacg

SEQ ID NO: 2012891 - RNA, 19 nt, Artificial Sequence
  Description of Artificial Sequence: Synthetic oligonucleotide
gccaugguugcucacagga

SEQ ID NO: 2012892 - RNA, 19 nt, Artificial Sequence
  Description of Artificial Sequence: Synthetic oligonucleotide
uugucagcguggacgcaca

SEQ ID NO: 2012893 - RNA, 19 nt, Artificial Sequence
  Description of Artificial Sequence: Synthetic oligonucleotide
gcucacaggagucaugauc

SEQ ID NO: 2012894 - RNA, 19 nt, Artificial Sequence
  Description of Artificial Sequence: Synthetic oligonucleotide
ccaguagggguuaaugaug

SEQ ID NO: 2012895 - RNA, 19 nt, Artificial Sequence
  Description of Artificial Sequence: Synthetic oligonucleotide
aaggugugcucaucuccaa

SEQ ID NO: 2012896 - RNA, 19 nt, Artificial Sequence
  Description of Artificial Sequence: Synthetic oligonucleotide
uucggacugggugaaguuc

SEQ ID NO: 2012897 - RNA, 19 nt, Artificial Sequence
  Description of Artificial Sequence: Synthetic oligonucleotide
agcauaguccaggucaaaa

SEQ ID NO: 2012898 - RNA, 19 nt, Artificial Sequence
  Description of Artificial Sequence: Synthetic oligonucleotide
gguugaccuuccaaaacag

SEQ ID NO: 2012899 - RNA, 19 nt, Artificial Sequence
  Description of Artificial Sequence: Synthetic oligonucleotide
ucuggacaccgaagacugc

SEQ ID NO: 2012900 - RNA, 19 nt, Artificial Sequence
  Description of Artificial Sequence: Synthetic oligonucleotide
caggggaggaugacaguug

SEQ ID NO: 2012901 - RNA, 19 nt, Artificial Sequence
  Description of Artificial Sequence: Synthetic oligonucleotide
gaagaacccaguggcugug

SEQ ID NO: 2012902 - RNA, 19 nt, Artificial Sequence
  Description of Artificial Sequence: Synthetic oligonucleotide
ucauucggcaguggaacau

SEQ ID NO: 2012903 - RNA, 19 nt, Artificial Sequence
  Description of Artificial Sequence: Synthetic oligonucleotide
gauaggugcacagccacgu

SEQ ID NO: 2012904 - RNA, 19 nt, Artificial Sequence
  Description of Artificial Sequence: Synthetic oligonucleotide
ucuugccuggcaccuuggu

SEQ ID NO: 2012905 - RNA, 19 nt, Artificial Sequence
  Description of Artificial Sequence: Synthetic oligonucleotide
gaaguggggacgccgccuc

SEQ ID NO: 2012906 - RNA, 19 nt, Artificial Sequence
  Description of Artificial Sequence: Synthetic oligonucleotide
gcagggccagcccacauag

SEQ ID NO: 2012907 - RNA, 19 nt, Artificial Sequence
  Description of Artificial Sequence: Synthetic oligonucleotide
cccaagagcuuugucagcg

SEQ ID NO: 2012908 - RNA, 19 nt, Artificial Sequence
  Description of Artificial Sequence: Synthetic oligonucleotide
acccaccacaugugguagg

SEQ ID NO: 2012909 - RNA, 19 nt, Artificial Sequence
  Description of Artificial Sequence: Synthetic oligonucleotide
cugaacccagaaacccaag

SEQ ID NO: 2012910 - RNA, 19 nt, Artificial Sequence
  Description of Artificial Sequence: Synthetic oligonucleotide
ugacggcugaacccagaaa

SEQ ID NO: 2012911 - RNA, 19 nt, Artificial Sequence
  Description of Artificial Sequence: Synthetic oligonucleotide
uggacgcacagccgucccc

SEQ ID NO: 2012912 - RNA, 19 nt, Artificial Sequence
  Description of Artificial Sequence: Synthetic oligonucleotide
gauugacggcugaacccag

SEQ ID NO: 2012913 - RNA, 19 nt, Artificial Sequence
  Description of Artificial Sequence: Synthetic oligonucleotide
gaagcauaguccaggucaa

SEQ ID NO: 2012914 - RNA, 19 nt, Artificial Sequence
  Description of Artificial Sequence: Synthetic oligonucleotide
agccacguucucaaagaag

SEQ ID NO: 2012915 - RNA, 19 nt, Artificial Sequence
  Description of Artificial Sequence: Synthetic oligonucleotide
agugcuggaagcacaccca

SEQ ID NO: 2012916 - RNA, 19 nt, Artificial Sequence
  Description of Artificial Sequence: Synthetic oligonucleotide
ggucauggccagauagugg

SEQ ID NO: 2012917 - RNA, 19 nt, Artificial Sequence
  Description of Artificial Sequence: Synthetic oligonucleotide
ucacaggagucaugauccu

SEQ ID NO: 2012918 - RNA, 19 nt, Artificial Sequence
  Description of Artificial Sequence: Synthetic oligonucleotide
cagcucucagauugacggc

SEQ ID NO: 2012919 - RNA, 19 nt, Artificial Sequence
  Description of Artificial Sequence: Synthetic oligonucleotide
acaguugguggcagacgac

SEQ ID NO: 2012920 - RNA, 19 nt, Artificial Sequence
  Description of Artificial Sequence: Synthetic oligonucleotide
uggcaccuugguuucggac

SEQ ID NO: 2012921 - RNA, 19 nt, Artificial Sequence
  Description of Artificial Sequence: Synthetic oligonucleotide
ggagcauccaggaaaugca

SEQ ID NO: 2012922 - RNA, 19 nt, Artificial Sequence
  Description of Artificial Sequence: Synthetic oligonucleotide
agacgacaaagacgcccag

SEQ ID NO: 2012923 - RNA, 19 nt, Artificial Sequence
  Description of Artificial Sequence: Synthetic oligonucleotide
cacauaggaacagugcaaa

SEQ ID NO: 2012924 - RNA, 19 nt, Artificial Sequence
  Description of Artificial Sequence: Synthetic oligonucleotide
ccuaaucuggaugccagag

SEQ ID NO: 2012925 - RNA, 19 nt, Artificial Sequence
  Description of Artificial Sequence: Synthetic oligonucleotide
cucuuagcccauccagcug

SEQ ID NO: 2012926 - RNA, 19 nt, Artificial Sequence
  Description of Artificial Sequence: Synthetic oligonucleotide
cauucggcaguggaacaug

SEQ ID NO: 2012927 - RNA, 19 nt, Artificial Sequence
  Description of Artificial Sequence: Synthetic oligonucleotide
agguacaggcugucgacua

SEQ ID NO: 2012928 - RNA, 19 nt, Artificial Sequence
  Description of Artificial Sequence: Synthetic oligonucleotide
gauuuagaagcugcugggu

SEQ ID NO: 2012929 - RNA, 19 nt, Artificial Sequence
  Description of Artificial Sequence: Synthetic oligonucleotide
ccagaagacuuucucuuug

SEQ ID NO: 2012930 - RNA, 19 nt, Artificial Sequence
  Description of Artificial Sequence: Synthetic oligonucleotide
gguacaggcugucgacuag

SEQ ID NO: 2012931 - RNA, 19 nt, Artificial Sequence
  Description of Artificial Sequence: Synthetic oligonucleotide
ugcauccaggugagcagaa

SEQ ID NO: 2012932 - RNA, 19 nt, Artificial Sequence
  Description of Artificial Sequence: Synthetic oligonucleotide
cguccggaagaacagauug

SEQ ID NO: 2012933 - RNA, 19 nt, Artificial Sequence
  Description of Artificial Sequence: Synthetic oligonucleotide
guagggguuaaugaugagu

SEQ ID NO: 2012934 - RNA, 19 nt, Artificial Sequence
  Description of Artificial Sequence: Synthetic oligonucleotide
acaaagacgcccagguaaa

SEQ ID NO: 2012935 - RNA, 19 nt, Artificial Sequence
  Description of Artificial Sequence: Synthetic oligonucleotide
uucaggggaggaugacagu

SEQ ID NO: 2012936 - RNA, 19 nt, Artificial Sequence
  Description of Artificial Sequence: Synthetic oligonucleotide
ggccagcccacauaggaac

SEQ ID NO: 2012937 - RNA, 19 nt, Artificial Sequence
  Description of Artificial Sequence: Synthetic oligonucleotide
caggucgaacguccggaag

SEQ ID NO: 2012938 - RNA, 19 nt, Artificial Sequence
  Description of Artificial Sequence: Synthetic oligonucleotide
ucucagauugacggcugaa

SEQ ID NO: 2012939 - RNA, 19 nt, Artificial Sequence
  Description of Artificial Sequence: Synthetic oligonucleotide
gugcuggaagcacacccac

SEQ ID NO: 2012940 - RNA, 19 nt, Artificial Sequence
  Description of Artificial Sequence: Synthetic oligonucleotide
uguccccggggccaacacu

SEQ ID NO: 2012941 - RNA, 19 nt, Artificial Sequence
  Description of Artificial Sequence: Synthetic oligonucleotide
cuucgggcauccauccuca

SEQ ID NO: 2012942 - RNA, 19 nt, Artificial Sequence
  Description of Artificial Sequence: Synthetic oligonucleotide
cuggacaccgaagacugca

SEQ ID NO: 2012943 - RNA, 19 nt, Artificial Sequence
  Description of Artificial Sequence: Synthetic oligonucleotide
guggaucauuagccacugg

SEQ ID NO: 2012944 - RNA, 19 nt, Artificial Sequence
  Description of Artificial Sequence: Synthetic oligonucleotide
cagaaguggggacgccgcc

SEQ ID NO: 2012945 - RNA, 19 nt, Artificial Sequence
  Description of Artificial Sequence: Synthetic oligonucleotide
acgcccagguaaaagacaa

SEQ ID NO: 2012946 - RNA, 19 nt, Artificial Sequence
  Description of Artificial Sequence: Synthetic oligonucleotide
guccccggggccaacacug

SEQ ID NO: 2012947 - RNA, 19 nt, Artificial Sequence
  Description of Artificial Sequence: Synthetic oligonucleotide
gaggaucauucggcagugg

SEQ ID NO: 2012948 - RNA, 19 nt, Artificial Sequence
  Description of Artificial Sequence: Synthetic oligonucleotide
gacgcccagguaaaagaca

SEQ ID NO: 2012949 - RNA, 19 nt, Artificial Sequence
  Description of Artificial Sequence: Synthetic oligonucleotide
agagguguccccggggcca

SEQ ID NO: 2012950 - RNA, 19 nt, Artificial Sequence
  Description of Artificial Sequence: Synthetic oligonucleotide
gaagacugcacggguagcu

SEQ ID NO: 2012951 - RNA, 19 nt, Artificial Sequence
  Description of Artificial Sequence: Synthetic oligonucleotide
ugacacugcuccucacuuu

SEQ ID NO: 2012952 - RNA, 19 nt, Artificial Sequence
  Description of Artificial Sequence: Synthetic oligonucleotide
gacgcugccgcgccgugga

SEQ ID NO: 2012953 - RNA, 19 nt, Artificial Sequence
  Description of Artificial Sequence: Synthetic oligonucleotide
agcacacccaccacaugug

SEQ ID NO: 2012954 - RNA, 19 nt, Artificial Sequence
  Description of Artificial Sequence: Synthetic oligonucleotide
gcacacccaccacaugugg

SEQ ID NO: 2012955 - RNA, 19 nt, Artificial Sequence
  Description of Artificial Sequence: Synthetic oligonucleotide
cacaugugguaggugagga

SEQ ID NO: 2012956 - RNA, 19 nt, Artificial Sequence
  Description of Artificial Sequence: Synthetic oligonucleotide
cuggccauuugguccuuuc

SEQ ID NO: 2012957 - RNA, 19 nt, Artificial Sequence
  Description of Artificial Sequence: Synthetic oligonucleotide
cugucgacuagggcgcccc

SEQ ID NO: 2012958 - RNA, 19 nt, Artificial Sequence
  Description of Artificial Sequence: Synthetic oligonucleotide
cagggucgagcgaaucuuc

SEQ ID NO: 2012959 - RNA, 19 nt, Artificial Sequence
  Description of Artificial Sequence: Synthetic oligonucleotide
cauccaggugagcagaagu

SEQ ID NO: 2012960 - RNA, 19 nt, Artificial Sequence
  Description of Artificial Sequence: Synthetic oligonucleotide
guugguggcagacgacaaa

SEQ ID NO: 2012961 - RNA, 19 nt, Artificial Sequence
  Description of Artificial Sequence: Synthetic oligonucleotide
guggcuguggugaugugaa

SEQ ID NO: 2012962 - RNA, 19 nt, Artificial Sequence
  Description of Artificial Sequence: Synthetic oligonucleotide
ggauaggugcacagccacg

SEQ ID NO: 2012963 - RNA, 19 nt, Artificial Sequence
  Description of Artificial Sequence: Synthetic oligonucleotide
ggugagcagaaguggggac

SEQ ID NO: 2012964 - RNA, 19 nt, Artificial Sequence
  Description of Artificial Sequence: Synthetic oligonucleotide
ggaucuucgggcauccauc

SEQ ID NO: 2012965 - RNA, 19 nt, Artificial Sequence
  Description of Artificial Sequence: Synthetic oligonucleotide
gaagaagaacccaguggcu

SEQ ID NO: 2012966 - RNA, 19 nt, Artificial Sequence
  Description of Artificial Sequence: Synthetic oligonucleotide
cagagguguccccggggcc

SEQ ID NO: 2012967 - RNA, 19 nt, Artificial Sequence
  Description of Artificial Sequence: Synthetic oligonucleotide
ccgaagacugcacggguag

SEQ ID NO: 2012968 - RNA, 19 nt, Artificial Sequence
  Description of Artificial Sequence: Synthetic oligonucleotide
caacacugggcagcugggc

SEQ ID NO: 2012969 - RNA, 19 nt, Artificial Sequence
  Description of Artificial Sequence: Synthetic oligonucleotide
gggacgccgccucuuagcc

SEQ ID NO: 2012970 - RNA, 19 nt, Artificial Sequence
  Description of Artificial Sequence: Synthetic oligonucleotide
gaacguccggaagaacaga

SEQ ID NO: 2012971 - RNA, 19 nt, Artificial Sequence
  Description of Artificial Sequence: Synthetic oligonucleotide
caguugguggcagacgaca

SEQ ID NO: 2012972 - RNA, 19 nt, Artificial Sequence
  Description of Artificial Sequence: Synthetic oligonucleotide
cuguggugaugugaaacca

SEQ ID NO: 2012973 - RNA, 19 nt, Artificial Sequence
  Description of Artificial Sequence: Synthetic oligonucleotide
ugguccuuucuugccuggc

SEQ ID NO: 2012974 - RNA, 19 nt, Artificial Sequence
  Description of Artificial Sequence: Synthetic oligonucleotide
auucggcaguggaacaugu

SEQ ID NO: 2012975 - RNA, 19 nt, Artificial Sequence
  Description of Artificial Sequence: Synthetic oligonucleotide
aaguggucauggccagaua

SEQ ID NO: 2012976 - RNA, 19 nt, Artificial Sequence
  Description of Artificial Sequence: Synthetic oligonucleotide
cgaacguccggaagaacag

SEQ ID NO: 2012977 - RNA, 19 nt, Artificial Sequence
  Description of Artificial Sequence: Synthetic oligonucleotide
caaacucggcgucccagga

SEQ ID NO: 2012978 - RNA, 19 nt, Artificial Sequence
  Description of Artificial Sequence: Synthetic oligonucleotide
agauaguggccagcucuca

SEQ ID NO: 2012979 - RNA, 19 nt, Artificial Sequence
  Description of Artificial Sequence: Synthetic oligonucleotide
cacccaccacaugugguag

SEQ ID NO: 2012980 - RNA, 19 nt, Artificial Sequence
  Description of Artificial Sequence: Synthetic oligonucleotide
cuccucacgcuagagccuc

SEQ ID NO: 2012981 - RNA, 19 nt, Artificial Sequence
  Description of Artificial Sequence: Synthetic oligonucleotide
ggcaaagaggugguggaca

SEQ ID NO: 2012982 - RNA, 19 nt, Artificial Sequence
  Description of Artificial Sequence: Synthetic oligonucleotide
ugguuucggacugggugaa

SEQ ID NO: 2012983 - RNA, 19 nt, Artificial Sequence
  Description of Artificial Sequence: Synthetic oligonucleotide
gcauccaggaaaugcaggu

SEQ ID NO: 2012984 - RNA, 19 nt, Artificial Sequence
  Description of Artificial Sequence: Synthetic oligonucleotide
ucggcgucccaggacgcug

SEQ ID NO: 2012985 - RNA, 19 nt, Artificial Sequence
  Description of Artificial Sequence: Synthetic oligonucleotide
ugucgacuagggcgcccca

SEQ ID NO: 2012986 - RNA, 19 nt, Artificial Sequence
  Description of Artificial Sequence: Synthetic oligonucleotide
accagcucugcugcccaag

SEQ ID NO: 2012987 - RNA, 19 nt, Artificial Sequence
  Description of Artificial Sequence: Synthetic oligonucleotide
ugugguaggugaggaucau

SEQ ID NO: 2012988 - RNA, 19 nt, Artificial Sequence
  Description of Artificial Sequence: Synthetic oligonucleotide
ucugaccagccagccuuca

SEQ ID NO: 2012989 - RNA, 19 nt, Artificial Sequence
  Description of Artificial Sequence: Synthetic oligonucleotide
cugcacggguagcugccag

SEQ ID NO: 2012990 - RNA, 19 nt, Artificial Sequence
  Description of Artificial Sequence: Synthetic oligonucleotide
aagcauaguccaggucaaa

SEQ ID NO: 2012991 - RNA, 19 nt, Artificial Sequence
  Description of Artificial Sequence: Synthetic oligonucleotide
gcagagagcgguagguggc

SEQ ID NO: 2012992 - RNA, 19 nt, Artificial Sequence
  Description of Artificial Sequence: Synthetic oligonucleotide
auaggugcacagccacguu

SEQ ID NO: 2012993 - RNA, 19 nt, Artificial Sequence
  Description of Artificial Sequence: Synthetic oligonucleotide
guuucggacugggugaagu

SEQ ID NO: 2012994 - RNA, 19 nt, Artificial Sequence
  Description of Artificial Sequence: Synthetic oligonucleotide
agcagggccagcccacaua

SEQ ID NO: 2012995 - RNA, 19 nt, Artificial Sequence
  Description of Artificial Sequence: Synthetic oligonucleotide
acucggcgucccaggacgc

SEQ ID NO: 2012996 - RNA, 19 nt, Artificial Sequence
  Description of Artificial Sequence: Synthetic oligonucleotide
cggaagaacagauuggaua

SEQ ID NO: 2012997 - RNA, 19 nt, Artificial Sequence
  Description of Artificial Sequence: Synthetic oligonucleotide
gucccaggacgcugccgcg

SEQ ID NO: 2012998 - RNA, 19 nt, Artificial Sequence
  Description of Artificial Sequence: Synthetic oligonucleotide
ggcauccauccucaaucug

SEQ ID NO: 2012999 - RNA, 19 nt, Artificial Sequence
  Description of Artificial Sequence: Synthetic oligonucleotide
aaguuccaauccacaggau

SEQ ID NO: 2013000 - RNA, 19 nt, Artificial Sequence
  Description of Artificial Sequence: Synthetic oligonucleotide
gguccuuucuugccuggca

SEQ ID NO: 2013001 - RNA, 19 nt, Artificial Sequence
  Description of Artificial Sequence: Synthetic oligonucleotide
ucccaggacgcugccgcgc

SEQ ID NO: 2013002 - RNA, 19 nt, Artificial Sequence
  Description of Artificial Sequence: Synthetic oligonucleotide
gggugaaguuccaauccac

SEQ ID NO: 2013003 - RNA, 19 nt, Artificial Sequence
  Description of Artificial Sequence: Synthetic oligonucleotide
gucgacuagggcgccccag

SEQ ID NO: 2013004 - RNA, 19 nt, Artificial Sequence
  Description of Artificial Sequence: Synthetic oligonucleotide
gagcuuugucagcguggac

SEQ ID NO: 2013005 - RNA, 19 nt, Artificial Sequence
  Description of Artificial Sequence: Synthetic oligonucleotide
ggggacgccgccucuuagc

SEQ ID NO: 2013006 - RNA, 19 nt, Artificial Sequence
  Description of Artificial Sequence: Synthetic oligonucleotide
auugacggcugaacccaga

SEQ ID NO: 2013007 - RNA, 19 nt, Artificial Sequence
  Description of Artificial Sequence: Synthetic oligonucleotide
ggugguggacaaccaagaa

SEQ ID NO: 2013008 - RNA, 19 nt, Artificial Sequence
  Description of Artificial Sequence: Synthetic oligonucleotide
gcagaaguggggacgccgc

SEQ ID NO: 2013009 - RNA, 19 nt, Artificial Sequence
  Description of Artificial Sequence: Synthetic oligonucleotide
cucucagauugacggcuga

SEQ ID NO: 2013010 - RNA, 19 nt, Artificial Sequence
  Description of Artificial Sequence: Synthetic oligonucleotide
cagucuccucacgcuagag

SEQ ID NO: 2013011 - RNA, 19 nt, Artificial Sequence
  Description of Artificial Sequence: Synthetic oligonucleotide
gggagucugaccagccagc

SEQ ID NO: 2013012 - RNA, 19 nt, Artificial Sequence
  Description of Artificial Sequence: Synthetic oligonucleotide
ggaucauucggcaguggaa

SEQ ID NO: 2013013 - RNA, 19 nt, Artificial Sequence
  Description of Artificial Sequence: Synthetic oligonucleotide
cacaggccagcagcugugc

SEQ ID NO: 2013014 - RNA, 19 nt, Artificial Sequence
  Description of Artificial Sequence: Synthetic oligonucleotide
cugcauccaggugagcaga

SEQ ID NO: 2013015 - RNA, 19 nt, Artificial Sequence
  Description of Artificial Sequence: Synthetic oligonucleotide
cugugcucuggacaccgaa

SEQ ID NO: 2013016 - RNA, 19 nt, Artificial Sequence
  Description of Artificial Sequence: Synthetic oligonucleotide
uccucacgcuagagccucu

SEQ ID NO: 2013017 - RNA, 19 nt, Artificial Sequence
  Description of Artificial Sequence: Synthetic oligonucleotide
ggcgccccagugcuggaag

SEQ ID NO: 2013018 - RNA, 19 nt, Artificial Sequence
  Description of Artificial Sequence: Synthetic oligonucleotide
gggucgagcgaaucuucca

SEQ ID NO: 2013019 - RNA, 19 nt, Artificial Sequence
  Description of Artificial Sequence: Synthetic oligonucleotide
aggcaccuggccauuuggu

SEQ ID NO: 2013020 - RNA, 19 nt, Artificial Sequence
  Description of Artificial Sequence: Synthetic oligonucleotide
caccuugguuucggacugg

SEQ ID NO: 2013021 - RNA, 19 nt, Artificial Sequence
  Description of Artificial Sequence: Synthetic oligonucleotide
gagcagaaguggggacgcc

SEQ ID NO: 2013022 - RNA, 19 nt, Artificial Sequence
  Description of Artificial Sequence: Synthetic oligonucleotide
accgaagacugcacgggua

SEQ ID NO: 2013023 - RNA, 19 nt, Artificial Sequence
  Description of Artificial Sequence: Synthetic oligonucleotide
cuagggcgccccagugcug

SEQ ID NO: 2013024 - RNA, 19 nt, Artificial Sequence
  Description of Artificial Sequence: Synthetic oligonucleotide
ggaugccagaggugucccc

SEQ ID NO: 2013025 - RNA, 19 nt, Artificial Sequence
  Description of Artificial Sequence: Synthetic oligonucleotide
cgccucuuagcccauccag

SEQ ID NO: 2013026 - RNA, 19 nt, Artificial Sequence
  Description of Artificial Sequence: Synthetic oligonucleotide
ugccgcgccguggaccaca

SEQ ID NO: 2013027 - RNA, 19 nt, Artificial Sequence
  Description of Artificial Sequence: Synthetic oligonucleotide
gccgccucuuagcccaucc

SEQ ID NO: 2013028 - RNA, 19 nt, Artificial Sequence
  Description of Artificial Sequence: Synthetic oligonucleotide
ccaagaacaggucgaacgu

SEQ ID NO: 2013029 - RNA, 19 nt, Artificial Sequence
  Description of Artificial Sequence: Synthetic oligonucleotide
cggcugaacccagaaaccc

SEQ ID NO: 2013030 - RNA, 19 nt, Artificial Sequence
  Description of Artificial Sequence: Synthetic oligonucleotide
ugccagggucgagcgaauc

SEQ ID NO: 2013031 - RNA, 19 nt, Artificial Sequence
  Description of Artificial Sequence: Synthetic oligonucleotide
guguccccggggccaacac

SEQ ID NO: 2013032 - RNA, 19 nt, Artificial Sequence
  Description of Artificial Sequence: Synthetic oligonucleotide
gucgaacguccggaagaac

SEQ ID NO: 2013033 - RNA, 19 nt, Artificial Sequence
  Description of Artificial Sequence: Synthetic oligonucleotide
ggcaguggaacauguggau

SEQ ID NO: 2013034 - RNA, 19 nt, Artificial Sequence
  Description of Artificial Sequence: Synthetic oligonucleotide
gcugccgcgccguggacca

SEQ ID NO: 2013035 - RNA, 19 nt, Artificial Sequence
  Description of Artificial Sequence: Synthetic oligonucleotide
cagagagcgguagguggca

SEQ ID NO: 2013036 - RNA, 19 nt, Artificial Sequence
  Description of Artificial Sequence: Synthetic oligonucleotide
cguucucaaagaagaagaa

SEQ ID NO: 2013037 - RNA, 19 nt, Artificial Sequence
  Description of Artificial Sequence: Synthetic oligonucleotide
gugaagcugucuugaggau

SEQ ID NO: 2013038 - RNA, 19 nt, Artificial Sequence
  Description of Artificial Sequence: Synthetic oligonucleotide
aggacgcugccgcgccgug

SEQ ID NO: 2013039 - RNA, 19 nt, Artificial Sequence
  Description of Artificial Sequence: Synthetic oligonucleotide
gccaugccaugguugcuca

SEQ ID NO: 2013040 - RNA, 19 nt, Artificial Sequence
  Description of Artificial Sequence: Synthetic oligonucleotide
ggaucauuagccacugguu

SEQ ID NO: 2013041 - RNA, 19 nt, Artificial Sequence
  Description of Artificial Sequence: Synthetic oligonucleotide
cuugaggaucuucgggcau

SEQ ID NO: 2013042 - RNA, 19 nt, Artificial Sequence
  Description of Artificial Sequence: Synthetic oligonucleotide
gcucaucuccaagagcaaa

SEQ ID NO: 2013043 - RNA, 19 nt, Artificial Sequence
  Description of Artificial Sequence: Synthetic oligonucleotide
ggucgaacguccggaagaa

SEQ ID NO: 2013044 - RNA, 19 nt, Artificial Sequence
  Description of Artificial Sequence: Synthetic oligonucleotide
cacaggagucaugauccua

SEQ ID NO: 2013045 - RNA, 19 nt, Artificial Sequence
  Description of Artificial Sequence: Synthetic oligonucleotide
ccucuuagcccauccagcu

SEQ ID NO: 2013046 - RNA, 19 nt, Artificial Sequence
  Description of Artificial Sequence: Synthetic oligonucleotide
cuugccuggcaccuugguu

SEQ ID NO: 2013047 - RNA, 19 nt, Artificial Sequence
  Description of Artificial Sequence: Synthetic oligonucleotide
gagcgguagguggcauuca

SEQ ID NO: 2013048 - RNA, 19 nt, Artificial Sequence
  Description of Artificial Sequence: Synthetic oligonucleotide
acguccggaagaacagauu

SEQ ID NO: 2013049 - RNA, 19 nt, Artificial Sequence
  Description of Artificial Sequence: Synthetic oligonucleotide
caaagacgcccagguaaaa

SEQ ID NO: 2013050 - RNA, 19 nt, Artificial Sequence
  Description of Artificial Sequence: Synthetic oligonucleotide
aguggggacgccgccucuu

SEQ ID NO: 2013051 - RNA, 19 nt, Artificial Sequence
  Description of Artificial Sequence: Synthetic oligonucleotide
cauccucaaucugcaucca

SEQ ID NO: 2013052 - RNA, 19 nt, Artificial Sequence
  Description of Artificial Sequence: Synthetic oligonucleotide
ccacaggauuuagaagcug

SEQ ID NO: 2013053 - RNA, 19 nt, Artificial Sequence
  Description of Artificial Sequence: Synthetic oligonucleotide
gagagcgguagguggcauu

SEQ ID NO: 2013054 - RNA, 19 nt, Artificial Sequence
  Description of Artificial Sequence: Synthetic oligonucleotide
caccgaagacugcacgggu

SEQ ID NO: 2013055 - RNA, 19 nt, Artificial Sequence
  Description of Artificial Sequence: Synthetic oligonucleotide
gguuucggacugggugaag

SEQ ID NO: 2013056 - RNA, 19 nt, Artificial Sequence
  Description of Artificial Sequence: Synthetic oligonucleotide
cuuugucagcguggacgca

SEQ ID NO: 2013057 - RNA, 19 nt, Artificial Sequence
  Description of Artificial Sequence: Synthetic oligonucleotide
gccagauaguggccagcuc

SEQ ID NO: 2013058 - RNA, 19 nt, Artificial Sequence
  Description of Artificial Sequence: Synthetic oligonucleotide
gccagggucgagcgaaucu

SEQ ID NO: 2013059 - RNA, 19 nt, Artificial Sequence
  Description of Artificial Sequence: Synthetic oligonucleotide
ggacgcugccgcgccgugg

SEQ ID NO: 2013060 - RNA, 19 nt, Artificial Sequence
  Description of Artificial Sequence: Synthetic oligonucleotide
ggccagcucucagauugac

SEQ ID NO: 2013061 - RNA, 19 nt, Artificial Sequence
  Description of Artificial Sequence: Synthetic oligonucleotide
ccacguucucaaagaagaa

SEQ ID NO: 2013062 - RNA, 19 nt, Artificial Sequence
  Description of Artificial Sequence: Synthetic oligonucleotide
cagguacaggcugucgacu

SEQ ID NO: 2013063 - RNA, 19 nt, Artificial Sequence
  Description of Artificial Sequence: Synthetic oligonucleotide
guguguccaguagggguua

SEQ ID NO: 2013064 - RNA, 19 nt, Artificial Sequence
  Description of Artificial Sequence: Synthetic oligonucleotide
gcgccccagugcuggaagc

SEQ ID NO: 2013065 - RNA, 19 nt, Artificial Sequence
  Description of Artificial Sequence: Synthetic oligonucleotide
ccagugcuggaagcacacc

SEQ ID NO: 2013066 - RNA, 19 nt, Artificial Sequence
  Description of Artificial Sequence: Synthetic oligonucleotide
gccacugguugaccuucca

SEQ ID NO: 2013067 - RNA, 19 nt, Artificial Sequence
  Description of Artificial Sequence: Synthetic oligonucleotide
guggggacgccgccucuua

SEQ ID NO: 2013068 - RNA, 19 nt, Artificial Sequence
  Description of Artificial Sequence: Synthetic oligonucleotide
gccagcccacauaggaaca

SEQ ID NO: 2013069 - RNA, 19 nt, Artificial Sequence
  Description of Artificial Sequence: Synthetic oligonucleotide
cguggacgcacagccgucc

SEQ ID NO: 2013070 - RNA, 19 nt, Artificial Sequence
  Description of Artificial Sequence: Synthetic oligonucleotide
gagguguccccggggccaa

SEQ ID NO: 2013071 - RNA, 19 nt, Artificial Sequence
  Description of Artificial Sequence: Synthetic oligonucleotide
ggcagacgacaaagacgcc

SEQ ID NO: 2013072 - RNA, 19 nt, Artificial Sequence
  Description of Artificial Sequence: Synthetic oligonucleotide
ggcgucccaggacgcugcc

SEQ ID NO: 2013073 - RNA, 19 nt, Artificial Sequence
  Description of Artificial Sequence: Synthetic oligonucleotide
gugcaaagugaggcaggua

SEQ ID NO: 2013074 - RNA, 19 nt, Artificial Sequence
  Description of Artificial Sequence: Synthetic oligonucleotide
ccacugguugaccuuccaa

SEQ ID NO: 2013075 - RNA, 19 nt, Artificial Sequence
  Description of Artificial Sequence: Synthetic oligonucleotide
agggcgccccagugcugga

SEQ ID NO: 2013076 - RNA, 19 nt, Artificial Sequence
  Description of Artificial Sequence: Synthetic oligonucleotide
ccaugccaugguugcucac

SEQ ID NO: 2013077 - RNA, 19 nt, Artificial Sequence
  Description of Artificial Sequence: Synthetic oligonucleotide
ccugacacugcuccucacu

SEQ ID NO: 2013078 - RNA, 19 nt, Artificial Sequence
  Description of Artificial Sequence: Synthetic oligonucleotide
cgaagacugcacggguagc

SEQ ID NO: 2013079 - RNA, 19 nt, Artificial Sequence
  Description of Artificial Sequence: Synthetic oligonucleotide
gggccagcccacauaggaa

SEQ ID NO: 2013080 - RNA, 19 nt, Artificial Sequence
  Description of Artificial Sequence: Synthetic oligonucleotide
cgacuagggcgccccagug

SEQ ID NO: 2013081 - RNA, 19 nt, Artificial Sequence
  Description of Artificial Sequence: Synthetic oligonucleotide
gguguccccggggccaaca

SEQ ID NO: 2013082 - RNA, 19 nt, Artificial Sequence
  Description of Artificial Sequence: Synthetic oligonucleotide
ccaggaaaugcaggugaaa

SEQ ID NO: 2013083 - RNA, 19 nt, Artificial Sequence
  Description of Artificial Sequence: Synthetic oligonucleotide
ccaccacaugugguaggug

SEQ ID NO: 2013084 - RNA, 19 nt, Artificial Sequence
  Description of Artificial Sequence: Synthetic oligonucleotide
gcacggguagcugccaggu

SEQ ID NO: 2013085 - RNA, 19 nt, Artificial Sequence
  Description of Artificial Sequence: Synthetic oligonucleotide
caccagcucugcugcccaa

SEQ ID NO: 2013086 - RNA, 19 nt, Artificial Sequence
  Description of Artificial Sequence: Synthetic oligonucleotide
cucacgcuagagccucuuu

SEQ ID NO: 2013087 - RNA, 19 nt, Artificial Sequence
  Description of Artificial Sequence: Synthetic oligonucleotide
cgagcgaaucuuccaggaa

SEQ ID NO: 2013088 - RNA, 19 nt, Artificial Sequence
  Description of Artificial Sequence: Synthetic oligonucleotide
ccaagagcuuugucagcgu

SEQ ID NO: 2013089 - RNA, 19 nt, Artificial Sequence
  Description of Artificial Sequence: Synthetic oligonucleotide
ccggaagaacagauuggau

SEQ ID NO: 2013090 - RNA, 19 nt, Artificial Sequence
  Description of Artificial Sequence: Synthetic oligonucleotide
guguccaguagggguuaau

SEQ ID NO: 2013091 - RNA, 19 nt, Artificial Sequence
  Description of Artificial Sequence: Synthetic oligonucleotide
caggacgcugccgcgccgu

SEQ ID NO: 2013092 - RNA, 19 nt, Artificial Sequence
  Description of Artificial Sequence: Synthetic oligonucleotide
ccgccucuuagcccaucca

SEQ ID NO: 2013093 - RNA, 19 nt, Artificial Sequence
  Description of Artificial Sequence: Synthetic oligonucleotide
gcguggacgcacagccguc

SEQ ID NO: 2013094 - RNA, 19 nt, Artificial Sequence
  Description of Artificial Sequence: Synthetic oligonucleotide
cgaaucuuccaggaagcau

SEQ ID NO: 2013095 - RNA, 19 nt, Artificial Sequence
  Description of Artificial Sequence: Synthetic oligonucleotide
gggccaacacugggcagcu

SEQ ID NO: 2013096 - RNA, 19 nt, Artificial Sequence
  Description of Artificial Sequence: Synthetic oligonucleotide
cucggcgucccaggacgcu

SEQ ID NO: 2013097 - RNA, 19 nt, Artificial Sequence
  Description of Artificial Sequence: Synthetic oligonucleotide
ccagggucgagcgaaucuu

SEQ ID NO: 2013098 - RNA, 19 nt, Artificial Sequence
  Description of Artificial Sequence: Synthetic oligonucleotide
cacggguagcugccagguu

SEQ ID NO: 2013099 - RNA, 19 nt, Artificial Sequence
  Description of Artificial Sequence: Synthetic oligonucleotide
gccgcgccguggaccacac

SEQ ID NO: 2013100 - RNA, 19 nt, Artificial Sequence
  Description of Artificial Sequence: Synthetic oligonucleotide
cugccgcgccguggaccac

SEQ ID NO: 2013101 - RNA, 19 nt, Artificial Sequence
  Description of Artificial Sequence: Synthetic oligonucleotide
gggcgccccagugcuggaa

SEQ ID NO: 2013102 - RNA, 19 nt, Artificial Sequence
  Description of Artificial Sequence: Synthetic oligonucleotide
acgccgccucuuagcccau

SEQ ID NO: 2013103 - RNA, 19 nt, Artificial Sequence
  Description of Artificial Sequence: Synthetic oligonucleotide
ccucacgcuagagccucuu

SEQ ID NO: 2013104 - RNA, 19 nt, Artificial Sequence
  Description of Artificial Sequence: Synthetic oligonucleotide
cgccgccucuuagcccauc

SEQ ID NO: 2013105 - RNA, 19 nt, Artificial Sequence
  Description of Artificial Sequence: Synthetic oligonucleotide
aauggagugaucuauuugc

SEQ ID NO: 2013106 - RNA, 19 nt, Artificial Sequence
  Description of Artificial Sequence: Synthetic oligonucleotide
cauaauaucaugcacaagg

SEQ ID NO: 2013107 - RNA, 19 nt, Artificial Sequence
  Description of Artificial Sequence: Synthetic oligonucleotide
aaagguauaaaacucagcu

SEQ ID NO: 2013108 - RNA, 19 nt, Artificial Sequence
  Description of Artificial Sequence: Synthetic oligonucleotide
aacauuaaugcuuaaccac

SEQ ID NO: 2013109 - RNA, 19 nt, Artificial Sequence
  Description of Artificial Sequence: Synthetic oligonucleotide
aauacuagaaaugacaaca

SEQ ID NO: 2013110 - RNA, 19 nt, Artificial Sequence
  Description of Artificial Sequence: Synthetic oligonucleotide
uuugcuaggaauaaaauuc

SEQ ID NO: 2013111 - RNA, 19 nt, Artificial Sequence
  Description of Artificial Sequence: Synthetic oligonucleotide
aaugacaacaacucgauau

SEQ ID NO: 2013112 - RNA, 19 nt, Artificial Sequence
  Description of Artificial Sequence: Synthetic oligonucleotide
uauuacaauagcaagugcc

SEQ ID NO: 2013113 - RNA, 19 nt, Artificial Sequence
  Description of Artificial Sequence: Synthetic oligonucleotide
ucaaauuuaguacaaagaa

SEQ ID NO: 2013114 - RNA, 19 nt, Artificial Sequence
  Description of Artificial Sequence: Synthetic oligonucleotide
aacaacucgauauguacac

SEQ ID NO: 2013115 - RNA, 19 nt, Artificial Sequence
  Description of Artificial Sequence: Synthetic oligonucleotide
ugaaaacauaauaucaugc

SEQ ID NO: 2013116 - RNA, 19 nt, Artificial Sequence
  Description of Artificial Sequence: Synthetic oligonucleotide
gaagaaauaugccaguucc

SEQ ID NO: 2013117 - RNA, 19 nt, Artificial Sequence
  Description of Artificial Sequence: Synthetic oligonucleotide
uguacacuuauacauacag

SEQ ID NO: 2013118 - RNA, 19 nt, Artificial Sequence
  Description of Artificial Sequence: Synthetic oligonucleotide
aaauaugccaguucccgac

SEQ ID NO: 2013119 - RNA, 19 nt, Artificial Sequence
  Description of Artificial Sequence: Synthetic oligonucleotide
aaaaugcugguuaaaaugg

SEQ ID NO: 2013120 - RNA, 19 nt, Artificial Sequence
  Description of Artificial Sequence: Synthetic oligonucleotide
uaagaaaccaccauaugug

SEQ ID NO: 2013121 - RNA, 19 nt, Artificial Sequence
  Description of Artificial Sequence: Synthetic oligonucleotide
uggucuaugauauaaaggu

SEQ ID NO: 2013122 - RNA, 19 nt, Artificial Sequence
  Description of Artificial Sequence: Synthetic oligonucleotide
uguguaaugagucaaugga

SEQ ID NO: 2013123 - RNA, 19 nt, Artificial Sequence
  Description of Artificial Sequence: Synthetic oligonucleotide
uuuauuagaaccaccguga

SEQ ID NO: 2013124 - RNA, 19 nt, Artificial Sequence
  Description of Artificial Sequence: Synthetic oligonucleotide
ucaaauuuauuacaauagc

SEQ ID NO: 2013125 - RNA, 19 nt, Artificial Sequence
  Description of Artificial Sequence: Synthetic oligonucleotide
aaauacuagaaaugacaac

SEQ ID NO: 2013126 - RNA, 19 nt, Artificial Sequence
  Description of Artificial Sequence: Synthetic oligonucleotide
ucauaggugacccuuuugg

SEQ ID NO: 2013127 - RNA, 19 nt, Artificial Sequence
  Description of Artificial Sequence: Synthetic oligonucleotide
aacagaggccaguaaacgc

SEQ ID NO: 2013128 - RNA, 19 nt, Artificial Sequence
  Description of Artificial Sequence: Synthetic oligonucleotide
aaugcuuaaccaccgccgc

SEQ ID NO: 2013129 - RNA, 19 nt, Artificial Sequence
  Description of Artificial Sequence: Synthetic oligonucleotide
gaaacaacaaucccaguag

SEQ ID NO: 2013130 - RNA, 19 nt, Artificial Sequence
  Description of Artificial Sequence: Synthetic oligonucleotide
ugaucuguaagaaaccacc

SEQ ID NO: 2013131 - RNA, 19 nt, Artificial Sequence
  Description of Artificial Sequence: Synthetic oligonucleotide
aagaucaagacgaacagag

SEQ ID NO: 2013132 - RNA, 19 nt, Artificial Sequence
  Description of Artificial Sequence: Synthetic oligonucleotide
gaucaagacgaacagaggc

SEQ ID NO: 2013133 - RNA, 19 nt, Artificial Sequence
  Description of Artificial Sequence: Synthetic oligonucleotide
gauauaaagguauaaaacu

SEQ ID NO: 2013134 - RNA, 19 nt, Artificial Sequence
  Description of Artificial Sequence: Synthetic oligonucleotide
acaacaacucgauauguac

SEQ ID NO: 2013135 - RNA, 19 nt, Artificial Sequence
  Description of Artificial Sequence: Synthetic oligonucleotide
cuaaauaacuuuucuaaug

SEQ ID NO: 2013136 - RNA, 19 nt, Artificial Sequence
  Description of Artificial Sequence: Synthetic oligonucleotide
aauguaaauacuagaaaug

SEQ ID NO: 2013137 - RNA, 19 nt, Artificial Sequence
  Description of Artificial Sequence: Synthetic oligonucleotide
uagugaagaaauaugccag

SEQ ID NO: 2013138 - RNA, 19 nt, Artificial Sequence
  Description of Artificial Sequence: Synthetic oligonucleotide
aauaucaugcacaaggcca

SEQ ID NO: 2013139 - RNA, 19 nt, Artificial Sequence
  Description of Artificial Sequence: Synthetic oligonucleotide
uaaugcuuaaccaccgccg

SEQ ID NO: 2013140 - RNA, 19 nt, Artificial Sequence
  Description of Artificial Sequence: Synthetic oligonucleotide
auucugaucuguaagaaac

SEQ ID NO: 2013141 - RNA, 19 nt, Artificial Sequence
  Description of Artificial Sequence: Synthetic oligonucleotide
cuguuuauuagaaccaccg

SEQ ID NO: 2013142 - RNA, 19 nt, Artificial Sequence
  Description of Artificial Sequence: Synthetic oligonucleotide
aaagggcuaccacuguucc

SEQ ID NO: 2013143 - RNA, 19 nt, Artificial Sequence
  Description of Artificial Sequence: Synthetic oligonucleotide
cuagaaaugacaacaacuc

SEQ ID NO: 2013144 - RNA, 19 nt, Artificial Sequence
  Description of Artificial Sequence: Synthetic oligonucleotide
uacacuuauacauacagua

SEQ ID NO: 2013145 - RNA, 19 nt, Artificial Sequence
  Description of Artificial Sequence: Synthetic oligonucleotide
acucagcuuaauuauauuc

SEQ ID NO: 2013146 - RNA, 19 nt, Artificial Sequence
  Description of Artificial Sequence: Synthetic oligonucleotide
aucuaaauaacuuuucuaa

SEQ ID NO: 2013147 - RNA, 19 nt, Artificial Sequence
  Description of Artificial Sequence: Synthetic oligonucleotide
cuuuccaucagaguaaagg

SEQ ID NO: 2013148 - RNA, 19 nt, Artificial Sequence
  Description of Artificial Sequence: Synthetic oligonucleotide
auaaaauucaucuuuuguu

SEQ ID NO: 2013149 - RNA, 19 nt, Artificial Sequence
  Description of Artificial Sequence: Synthetic oligonucleotide
uguaaugagucaauggagu

SEQ ID NO: 2013150 - RNA, 19 nt, Artificial Sequence
  Description of Artificial Sequence: Synthetic oligonucleotide
auauaaagguauaaaacuc

SEQ ID NO: 2013151 - RNA, 19 nt, Artificial Sequence
  Description of Artificial Sequence: Synthetic oligonucleotide
aaaguaacauugcacgcug

SEQ ID NO: 2013152 - RNA, 19 nt, Artificial Sequence
  Description of Artificial Sequence: Synthetic oligonucleotide
guuuauuagaaccaccgug

SEQ ID NO: 2013153 - RNA, 19 nt, Artificial Sequence
  Description of Artificial Sequence: Synthetic oligonucleotide
aaaagccuugaauugugag

SEQ ID NO: 2013154 - RNA, 19 nt, Artificial Sequence
  Description of Artificial Sequence: Synthetic oligonucleotide
uuaauuauauucugaucug

SEQ ID NO: 2013155 - RNA, 19 nt, Artificial Sequence
  Description of Artificial Sequence: Synthetic oligonucleotide
auaaaacucagcuuaauua

SEQ ID NO: 2013156 - RNA, 19 nt, Artificial Sequence
  Description of Artificial Sequence: Synthetic oligonucleotide
gaaaagucagcccaauagc

SEQ ID NO: 2013157 - RNA, 19 nt, Artificial Sequence
  Description of Artificial Sequence: Synthetic oligonucleotide
cuuaauuauauucugaucu

SEQ ID NO: 2013158 - RNA, 19 nt, Artificial Sequence
  Description of Artificial Sequence: Synthetic oligonucleotide
acauuaaugcuuaaccacc

SEQ ID NO: 2013159 - RNA, 19 nt, Artificial Sequence
  Description of Artificial Sequence: Synthetic oligonucleotide
gacguagaagaucaagacg

SEQ ID NO: 2013160 - RNA, 19 nt, Artificial Sequence
  Description of Artificial Sequence: Synthetic oligonucleotide
uuaaugcuuaaccaccgcc

SEQ ID NO: 2013161 - RNA, 19 nt, Artificial Sequence
  Description of Artificial Sequence: Synthetic oligonucleotide
caaauuuaguacaaagaac

SEQ ID NO: 2013162 - RNA, 19 nt, Artificial Sequence
  Description of Artificial Sequence: Synthetic oligonucleotide
uuguguaaugagucaaugg

SEQ ID NO: 2013163 - RNA, 19 nt, Artificial Sequence
  Description of Artificial Sequence: Synthetic oligonucleotide
uggucaaguaucuaaauaa

SEQ ID NO: 2013164 - RNA, 19 nt, Artificial Sequence
  Description of Artificial Sequence: Synthetic oligonucleotide
guuaaaauggucaaguauc

SEQ ID NO: 2013165 - RNA, 19 nt, Artificial Sequence
  Description of Artificial Sequence: Synthetic oligonucleotide
aaagccuugaauugugaga

SEQ ID NO: 2013166 - RNA, 19 nt, Artificial Sequence
  Description of Artificial Sequence: Synthetic oligonucleotide
cauauguguacacuuauac

SEQ ID NO: 2013167 - RNA, 19 nt, Artificial Sequence
  Description of Artificial Sequence: Synthetic oligonucleotide
agguauaaaacucagcuua

SEQ ID NO: 2013168 - RNA, 19 nt, Artificial Sequence
  Description of Artificial Sequence: Synthetic oligonucleotide
ugaucuauuugcuaggaau

SEQ ID NO: 2013169 - RNA, 19 nt, Artificial Sequence
  Description of Artificial Sequence: Synthetic oligonucleotide
uuguuuacaacaucuuccc

SEQ ID NO: 2013170 - RNA, 19 nt, Artificial Sequence
  Description of Artificial Sequence: Synthetic oligonucleotide
auaauaucaugcacaaggc

SEQ ID NO: 2013171 - RNA, 19 nt, Artificial Sequence
  Description of Artificial Sequence: Synthetic oligonucleotide
uaauaucaugcacaaggcc

SEQ ID NO: 2013172 - RNA, 19 nt, Artificial Sequence
  Description of Artificial Sequence: Synthetic oligonucleotide
aguagugaagaaauaugcc

SEQ ID NO: 2013173 - RNA, 19 nt, Artificial Sequence
  Description of Artificial Sequence: Synthetic oligonucleotide
aaaaguaacauugcacgcu

SEQ ID NO: 2013174 - RNA, 19 nt, Artificial Sequence
  Description of Artificial Sequence: Synthetic oligonucleotide
agaaauaugccaguucccg

SEQ ID NO: 2013175 - RNA, 19 nt, Artificial Sequence
  Description of Artificial Sequence: Synthetic oligonucleotide
aaugacguagaagaucaag

SEQ ID NO: 2013176 - RNA, 19 nt, Artificial Sequence
  Description of Artificial Sequence: Synthetic oligonucleotide
caaauuuauuacaauagca

SEQ ID NO: 2013177 - RNA, 19 nt, Artificial Sequence
  Description of Artificial Sequence: Synthetic oligonucleotide
gaaaccaccauauguguac

SEQ ID NO: 2013178 - RNA, 19 nt, Artificial Sequence
  Description of Artificial Sequence: Synthetic oligonucleotide
gagaagagggcucuggacc

SEQ ID NO: 2013179 - RNA, 19 nt, Artificial Sequence
  Description of Artificial Sequence: Synthetic oligonucleotide
auuaaugcuuaaccaccgc

SEQ ID NO: 2013180 - RNA, 19 nt, Artificial Sequence
  Description of Artificial Sequence: Synthetic oligonucleotide
agucaaauuuauuacaaua

SEQ ID NO: 2013181 - RNA, 19 nt, Artificial Sequence
  Description of Artificial Sequence: Synthetic oligonucleotide
ucgauauguacacaaaaua

SEQ ID NO: 2013182 - RNA, 19 nt, Artificial Sequence
  Description of Artificial Sequence: Synthetic oligonucleotide
ucuguaagaaaccaccaua

SEQ ID NO: 2013183 - RNA, 19 nt, Artificial Sequence
  Description of Artificial Sequence: Synthetic oligonucleotide
cauuaaugcuuaaccaccg

SEQ ID NO: 2013184 - RNA, 19 nt, Artificial Sequence
  Description of Artificial Sequence: Synthetic oligonucleotide
aaaagugcaccauugugua

SEQ ID NO: 2013185 - RNA, 19 nt, Artificial Sequence
  Description of Artificial Sequence: Synthetic oligonucleotide
aagaaauaugccaguuccc

SEQ ID NO: 2013186 - RNA, 19 nt, Artificial Sequence
  Description of Artificial Sequence: Synthetic oligonucleotide
uccucuuccaaagacgagg

SEQ ID NO: 2013187 - RNA, 19 nt, Artificial Sequence
  Description of Artificial Sequence: Synthetic oligonucleotide
aagaaaccaccauaugugu

SEQ ID NO: 2013188 - RNA, 19 nt, Artificial Sequence
  Description of Artificial Sequence: Synthetic oligonucleotide
uaaagguauaaaacucagc

SEQ ID NO: 2013189 - RNA, 19 nt, Artificial Sequence
  Description of Artificial Sequence: Synthetic oligonucleotide
aauagcaagugccaugauu

SEQ ID NO: 2013190 - RNA, 19 nt, Artificial Sequence
  Description of Artificial Sequence: Synthetic oligonucleotide
ugcaccauuguguaaugag

SEQ ID NO: 2013191 - RNA, 19 nt, Artificial Sequence
  Description of Artificial Sequence: Synthetic oligonucleotide
agcacaaggccacaggcuc

SEQ ID NO: 2013192 - RNA, 19 nt, Artificial Sequence
  Description of Artificial Sequence: Synthetic oligonucleotide
aaugcugguuaaaaugguc

SEQ ID NO: 2013193 - RNA, 19 nt, Artificial Sequence
  Description of Artificial Sequence: Synthetic oligonucleotide
aguaacauugcacgcuguc

SEQ ID NO: 2013194 - RNA, 19 nt, Artificial Sequence
  Description of Artificial Sequence: Synthetic oligonucleotide
ucaccagcuaccaacauua

SEQ ID NO: 2013195 - RNA, 19 nt, Artificial Sequence
  Description of Artificial Sequence: Synthetic oligonucleotide
uaucuaaauaacuuuucua

SEQ ID NO: 2013196 - RNA, 19 nt, Artificial Sequence
  Description of Artificial Sequence: Synthetic oligonucleotide
auguaaauacuagaaauga

SEQ ID NO: 2013197 - RNA, 19 nt, Artificial Sequence
  Description of Artificial Sequence: Synthetic oligonucleotide
uuccaucagaguaaagggc

SEQ ID NO: 2013198 - RNA, 19 nt, Artificial Sequence
  Description of Artificial Sequence: Synthetic oligonucleotide
aucaagacgaacagaggcc

SEQ ID NO: 2013199 - RNA, 19 nt, Artificial Sequence
  Description of Artificial Sequence: Synthetic oligonucleotide
uugcuaggaauaaaauuca

SEQ ID NO: 2013200 - RNA, 19 nt, Artificial Sequence
  Description of Artificial Sequence: Synthetic oligonucleotide
caagaauaacaggaaaucc

SEQ ID NO: 2013201 - RNA, 19 nt, Artificial Sequence
  Description of Artificial Sequence: Synthetic oligonucleotide
ugagucaauggagugaucu

SEQ ID NO: 2013202 - RNA, 19 nt, Artificial Sequence
  Description of Artificial Sequence: Synthetic oligonucleotide
aaacaacaaucccaguagu

SEQ ID NO: 2013203 - RNA, 19 nt, Artificial Sequence
  Description of Artificial Sequence: Synthetic oligonucleotide
ggagugaucuauuugcuag

SEQ ID NO: 2013204 - RNA, 19 nt, Artificial Sequence
  Description of Artificial Sequence: Synthetic oligonucleotide
acguagaagaucaagacga

SEQ ID NO: 2013205 - RNA, 19 nt, Artificial Sequence
  Description of Artificial Sequence: Synthetic oligonucleotide
ccaacauuaaugcuuaacc

SEQ ID NO: 2013206 - RNA, 19 nt, Artificial Sequence
  Description of Artificial Sequence: Synthetic oligonucleotide
aagauggucuaugauauaa

SEQ ID NO: 2013207 - RNA, 19 nt, Artificial Sequence
  Description of Artificial Sequence: Synthetic oligonucleotide
uuaacgcccgccauguccc

SEQ ID NO: 2013208 - RNA, 19 nt, Artificial Sequence
  Description of Artificial Sequence: Synthetic oligonucleotide
aaugagucaauggagugau

SEQ ID NO: 2013209 - RNA, 19 nt, Artificial Sequence
  Description of Artificial Sequence: Synthetic oligonucleotide
agcuuaauuauauucugau

SEQ ID NO: 2013210 - RNA, 19 nt, Artificial Sequence
  Description of Artificial Sequence: Synthetic oligonucleotide
uugaucacagccacacgag

SEQ ID NO: 2013211 - RNA, 19 nt, Artificial Sequence
  Description of Artificial Sequence: Synthetic oligonucleotide
augacaacaacucgauaug

SEQ ID NO: 2013212 - RNA, 19 nt, Artificial Sequence
  Description of Artificial Sequence: Synthetic oligonucleotide
aguaucuaaauaacuuuuc

SEQ ID NO: 2013213 - RNA, 19 nt, Artificial Sequence
  Description of Artificial Sequence: Synthetic oligonucleotide
uccacuguccauucauccg

SEQ ID NO: 2013214 - RNA, 19 nt, Artificial Sequence
  Description of Artificial Sequence: Synthetic oligonucleotide
uacaauagcaagugccaug

SEQ ID NO: 2013215 - RNA, 19 nt, Artificial Sequence
  Description of Artificial Sequence: Synthetic oligonucleotide
aauggucaaguaucuaaau

SEQ ID NO: 2013216 - RNA, 19 nt, Artificial Sequence
  Description of Artificial Sequence: Synthetic oligonucleotide
uguuuauuagaaccaccgu

SEQ ID NO: 2013217 - RNA, 19 nt, Artificial Sequence
  Description of Artificial Sequence: Synthetic oligonucleotide
aaauaacuuuucuaaugua

SEQ ID NO: 2013218 - RNA, 19 nt, Artificial Sequence
  Description of Artificial Sequence: Synthetic oligonucleotide
ucauagguagcagauaaaa

SEQ ID NO: 2013219 - RNA, 19 nt, Artificial Sequence
  Description of Artificial Sequence: Synthetic oligonucleotide
uucugaucuguaagaaacc

SEQ ID NO: 2013220 - RNA, 19 nt, Artificial Sequence
  Description of Artificial Sequence: Synthetic oligonucleotide
auugaaaacauaauaucau

SEQ ID NO: 2013221 - RNA, 19 nt, Artificial Sequence
  Description of Artificial Sequence: Synthetic oligonucleotide
aagguauaaaacucagcuu

SEQ ID NO: 2013222 - RNA, 19 nt, Artificial Sequence
  Description of Artificial Sequence: Synthetic oligonucleotide
gaacagaggccaguaaacg

SEQ ID NO: 2013223 - RNA, 19 nt, Artificial Sequence
  Description of Artificial Sequence: Synthetic oligonucleotide
gagugaucuauuugcuagg

SEQ ID NO: 2013224 - RNA, 19 nt, Artificial Sequence
  Description of Artificial Sequence: Synthetic oligonucleotide
ugaaggauagugccaccag

SEQ ID NO: 2013225 - RNA, 19 nt, Artificial Sequence
  Description of Artificial Sequence: Synthetic oligonucleotide
uacuagaaaugacaacaac

SEQ ID NO: 2013226 - RNA, 19 nt, Artificial Sequence
  Description of Artificial Sequence: Synthetic oligonucleotide
aggauagugccaccagagc

SEQ ID NO: 2013227 - RNA, 19 nt, Artificial Sequence
  Description of Artificial Sequence: Synthetic oligonucleotide
auaggugacccuuuuggca

SEQ ID NO: 2013228 - RNA, 19 nt, Artificial Sequence
  Description of Artificial Sequence: Synthetic oligonucleotide
guaaugagucaauggagug

SEQ ID NO: 2013229 - RNA, 19 nt, Artificial Sequence
  Description of Artificial Sequence: Synthetic oligonucleotide
acgagcaagaauaacagga

SEQ ID NO: 2013230 - RNA, 19 nt, Artificial Sequence
  Description of Artificial Sequence: Synthetic oligonucleotide
aaaacucaaugcuuuccau

SEQ ID NO: 2013231 - RNA, 19 nt, Artificial Sequence
  Description of Artificial Sequence: Synthetic oligonucleotide
ucugaucuguaagaaacca

SEQ ID NO: 2013232 - RNA, 19 nt, Artificial Sequence
  Description of Artificial Sequence: Synthetic oligonucleotide
ucuaugauauaaagguaua

SEQ ID NO: 2013233 - RNA, 19 nt, Artificial Sequence
  Description of Artificial Sequence: Synthetic oligonucleotide
auggucuaugauauaaagg

SEQ ID NO: 2013234 - RNA, 19 nt, Artificial Sequence
  Description of Artificial Sequence: Synthetic oligonucleotide
uuaaccaccgccgccgccg

SEQ ID NO: 2013235 - RNA, 19 nt, Artificial Sequence
  Description of Artificial Sequence: Synthetic oligonucleotide
uacauacaguacaaauucu

SEQ ID NO: 2013236 - RNA, 19 nt, Artificial Sequence
  Description of Artificial Sequence: Synthetic oligonucleotide
accaacauuaaugcuuaac

SEQ ID NO: 2013237 - RNA, 19 nt, Artificial Sequence
  Description of Artificial Sequence: Synthetic oligonucleotide
acacuuauacauacaguac

SEQ ID NO: 2013238 - RNA, 19 nt, Artificial Sequence
  Description of Artificial Sequence: Synthetic oligonucleotide
uaauuauauucugaucugu

SEQ ID NO: 2013239 - RNA, 19 nt, Artificial Sequence
  Description of Artificial Sequence: Synthetic oligonucleotide
uuauuagaaccaccgugac

SEQ ID NO: 2013240 - RNA, 19 nt, Artificial Sequence
  Description of Artificial Sequence: Synthetic oligonucleotide
aaccaccauauguguacac

SEQ ID NO: 2013241 - RNA, 19 nt, Artificial Sequence
  Description of Artificial Sequence: Synthetic oligonucleotide
uaaugagucaauggaguga

SEQ ID NO: 2013242 - RNA, 19 nt, Artificial Sequence
  Description of Artificial Sequence: Synthetic oligonucleotide
aauaugccaguucccgaca

SEQ ID NO: 2013243 - RNA, 19 nt, Artificial Sequence
  Description of Artificial Sequence: Synthetic oligonucleotide
agugaagaaauaugccagu

SEQ ID NO: 2013244 - RNA, 19 nt, Artificial Sequence
  Description of Artificial Sequence: Synthetic oligonucleotide
guaaacgccauaguccucc

SEQ ID NO: 2013245 - RNA, 19 nt, Artificial Sequence
  Description of Artificial Sequence: Synthetic oligonucleotide
ccaguaaacgccauagucc

SEQ ID NO: 2013246 - RNA, 19 nt, Artificial Sequence
  Description of Artificial Sequence: Synthetic oligonucleotide
cauaggugacccuuuuggc

SEQ ID NO: 2013247 - RNA, 19 nt, Artificial Sequence
  Description of Artificial Sequence: Synthetic oligonucleotide
auagcaagugccaugauua

SEQ ID NO: 2013248 - RNA, 19 nt, Artificial Sequence
  Description of Artificial Sequence: Synthetic oligonucleotide
gaguaaagggcuaccacug

SEQ ID NO: 2013249 - RNA, 19 nt, Artificial Sequence
  Description of Artificial Sequence: Synthetic oligonucleotide
cuaauguaaauacuagaaa

SEQ ID NO: 2013250 - RNA, 19 nt, Artificial Sequence
  Description of Artificial Sequence: Synthetic oligonucleotide
aauuauauucugaucugua

SEQ ID NO: 2013251 - RNA, 19 nt, Artificial Sequence
  Description of Artificial Sequence: Synthetic oligonucleotide
aauuuaguacaaagaacaa

SEQ ID NO: 2013252 - RNA, 19 nt, Artificial Sequence
  Description of Artificial Sequence: Synthetic oligonucleotide
caccauuguguaaugaguc

SEQ ID NO: 2013253 - RNA, 19 nt, Artificial Sequence
  Description of Artificial Sequence: Synthetic oligonucleotide
aagugcaccauuguguaau

SEQ ID NO: 2013254 - RNA, 19 nt, Artificial Sequence
  Description of Artificial Sequence: Synthetic oligonucleotide
guguaaugagucaauggag

SEQ ID NO: 2013255 - RNA, 19 nt, Artificial Sequence
  Description of Artificial Sequence: Synthetic oligonucleotide
cagcauaagaaaagucagc

SEQ ID NO: 2013256 - RNA, 19 nt, Artificial Sequence
  Description of Artificial Sequence: Synthetic oligonucleotide
acucgauauguacacaaaa

SEQ ID NO: 2013257 - RNA, 19 nt, Artificial Sequence
  Description of Artificial Sequence: Synthetic oligonucleotide
augccaguucccgacaggc

SEQ ID NO: 2013258 - RNA, 19 nt, Artificial Sequence
  Description of Artificial Sequence: Synthetic oligonucleotide
aucggagucauaggugacc

SEQ ID NO: 2013259 - RNA, 19 nt, Artificial Sequence
  Description of Artificial Sequence: Synthetic oligonucleotide
auuguguaaugagucaaug

SEQ ID NO: 2013260 - RNA, 19 nt, Artificial Sequence
  Description of Artificial Sequence: Synthetic oligonucleotide
aaucccaguagugaagaaa

SEQ ID NO: 2013261 - RNA, 19 nt, Artificial Sequence
  Description of Artificial Sequence: Synthetic oligonucleotide
ucgcaucggagucauaggu

SEQ ID NO: 2013262 - RNA, 19 nt, Artificial Sequence
  Description of Artificial Sequence: Synthetic oligonucleotide
uaugccaguucccgacagg

SEQ ID NO: 2013263 - RNA, 19 nt, Artificial Sequence
  Description of Artificial Sequence: Synthetic oligonucleotide
uguccauucauccgccggu

SEQ ID NO: 2013264 - RNA, 19 nt, Artificial Sequence
  Description of Artificial Sequence: Synthetic oligonucleotide
aucagaguaaagggcuacc

SEQ ID NO: 2013265 - RNA, 19 nt, Artificial Sequence
  Description of Artificial Sequence: Synthetic oligonucleotide
acacgagcaagaauaacag

SEQ ID NO: 2013266 - RNA, 19 nt, Artificial Sequence
  Description of Artificial Sequence: Synthetic oligonucleotide
ucuccucauagguagcaga

SEQ ID NO: 2013267 - RNA, 19 nt, Artificial Sequence
  Description of Artificial Sequence: Synthetic oligonucleotide
uucccaacugaagucaucu

SEQ ID NO: 2013268 - RNA, 19 nt, Artificial Sequence
  Description of Artificial Sequence: Synthetic oligonucleotide
uaggaauaaaauucaucuu

SEQ ID NO: 2013269 - RNA, 19 nt, Artificial Sequence
  Description of Artificial Sequence: Synthetic oligonucleotide
caacauccugaugaggugg

SEQ ID NO: 2013270 - RNA, 19 nt, Artificial Sequence
  Description of Artificial Sequence: Synthetic oligonucleotide
gaaauaugccaguucccga

SEQ ID NO: 2013271 - RNA, 19 nt, Artificial Sequence
  Description of Artificial Sequence: Synthetic oligonucleotide
acucccuucuccucauagg

SEQ ID NO: 2013272 - RNA, 19 nt, Artificial Sequence
  Description of Artificial Sequence: Synthetic oligonucleotide
gccgacaacauccugauga

SEQ ID NO: 2013273 - RNA, 19 nt, Artificial Sequence
  Description of Artificial Sequence: Synthetic oligonucleotide
augacguagaagaucaaga

SEQ ID NO: 2013274 - RNA, 19 nt, Artificial Sequence
  Description of Artificial Sequence: Synthetic oligonucleotide
acgccauaguccuccaagg

SEQ ID NO: 2013275 - RNA, 19 nt, Artificial Sequence
  Description of Artificial Sequence: Synthetic oligonucleotide
acgaacagaggccaguaaa

SEQ ID NO: 2013276 - RNA, 19 nt, Artificial Sequence
  Description of Artificial Sequence: Synthetic oligonucleotide
auggucaaguaucuaaaua

SEQ ID NO: 2013277 - RNA, 19 nt, Artificial Sequence
  Description of Artificial Sequence: Synthetic oligonucleotide
cacgagcaagaauaacagg

SEQ ID NO: 2013278 - RNA, 19 nt, Artificial Sequence
  Description of Artificial Sequence: Synthetic oligonucleotide
ucagaguaaagggcuacca

SEQ ID NO: 2013279 - RNA, 19 nt, Artificial Sequence
  Description of Artificial Sequence: Synthetic oligonucleotide
aaaugcugguuaaaauggu

SEQ ID NO: 2013280 - RNA, 19 nt, Artificial Sequence
  Description of Artificial Sequence: Synthetic oligonucleotide
cacuugaucacagccacac

SEQ ID NO: 2013281 - RNA, 19 nt, Artificial Sequence
  Description of Artificial Sequence: Synthetic oligonucleotide
guaucuaaauaacuuuucu

SEQ ID NO: 2013282 - RNA, 19 nt, Artificial Sequence
  Description of Artificial Sequence: Synthetic oligonucleotide
ugcugguuaaaauggucaa

SEQ ID NO: 2013283 - RNA, 19 nt, Artificial Sequence
  Description of Artificial Sequence: Synthetic oligonucleotide
ucaauggagugaucuauuu

SEQ ID NO: 2013284 - RNA, 19 nt, Artificial Sequence
  Description of Artificial Sequence: Synthetic oligonucleotide
ucccgacaggcacugcugg

SEQ ID NO: 2013285 - RNA, 19 nt, Artificial Sequence
  Description of Artificial Sequence: Synthetic oligonucleotide
gacaacauccugaugaggu

SEQ ID NO: 2013286 - RNA, 19 nt, Artificial Sequence
  Description of Artificial Sequence: Synthetic oligonucleotide
auaugccaguucccgacag

SEQ ID NO: 2013287 - RNA, 19 nt, Artificial Sequence
  Description of Artificial Sequence: Synthetic oligonucleotide
aucuguaagaaaccaccau

SEQ ID NO: 2013288 - RNA, 19 nt, Artificial Sequence
  Description of Artificial Sequence: Synthetic oligonucleotide
augagguggcuguuuucac

SEQ ID NO: 2013289 - RNA, 19 nt, Artificial Sequence
  Description of Artificial Sequence: Synthetic oligonucleotide
accauauguguacacuuau

SEQ ID NO: 2013290 - RNA, 19 nt, Artificial Sequence
  Description of Artificial Sequence: Synthetic oligonucleotide
agcuuuaacgcccgccaug

SEQ ID NO: 2013291 - RNA, 19 nt, Artificial Sequence
  Description of Artificial Sequence: Synthetic oligonucleotide
aaaugacaacaacucgaua

SEQ ID NO: 2013292 - RNA, 19 nt, Artificial Sequence
  Description of Artificial Sequence: Synthetic oligonucleotide
ugacaacaacucgauaugu

SEQ ID NO: 2013293 - RNA, 19 nt, Artificial Sequence
  Description of Artificial Sequence: Synthetic oligonucleotide
caacaacucgauauguaca

SEQ ID NO: 2013294 - RNA, 19 nt, Artificial Sequence
  Description of Artificial Sequence: Synthetic oligonucleotide
aauagccccgcugaaggau

SEQ ID NO: 2013295 - RNA, 19 nt, Artificial Sequence
  Description of Artificial Sequence: Synthetic oligonucleotide
ccaauagccccgcugaagg

SEQ ID NO: 2013296 - RNA, 19 nt, Artificial Sequence
  Description of Artificial Sequence: Synthetic oligonucleotide
acauggguccccguguuuc

SEQ ID NO: 2013297 - RNA, 19 nt, Artificial Sequence
  Description of Artificial Sequence: Synthetic oligonucleotide
agggcuaccacuguuccca

SEQ ID NO: 2013298 - RNA, 19 nt, Artificial Sequence
  Description of Artificial Sequence: Synthetic oligonucleotide
uggacccucaccagcuacc

SEQ ID NO: 2013299 - RNA, 19 nt, Artificial Sequence
  Description of Artificial Sequence: Synthetic oligonucleotide
cuguccauucauccgccgg

SEQ ID NO: 2013300 - RNA, 19 nt, Artificial Sequence
  Description of Artificial Sequence: Synthetic oligonucleotide
agaucaagacgaacagagg

SEQ ID NO: 2013301 - RNA, 19 nt, Artificial Sequence
  Description of Artificial Sequence: Synthetic oligonucleotide
augcugguuaaaaugguca

SEQ ID NO: 2013302 - RNA, 19 nt, Artificial Sequence
  Description of Artificial Sequence: Synthetic oligonucleotide
agucaauggagugaucuau

SEQ ID NO: 2013303 - RNA, 19 nt, Artificial Sequence
  Description of Artificial Sequence: Synthetic oligonucleotide
agcuucagagaagagggcu

SEQ ID NO: 2013304 - RNA, 19 nt, Artificial Sequence
  Description of Artificial Sequence: Synthetic oligonucleotide
gaucuguaagaaaccacca

SEQ ID NO: 2013305 - RNA, 19 nt, Artificial Sequence
  Description of Artificial Sequence: Synthetic oligonucleotide
agccacacgagcaagaaua

SEQ ID NO: 2013306 - RNA, 19 nt, Artificial Sequence
  Description of Artificial Sequence: Synthetic oligonucleotide
aguaaagggcuaccacugu

SEQ ID NO: 2013307 - RNA, 19 nt, Artificial Sequence
  Description of Artificial Sequence: Synthetic oligonucleotide
agaaccaccgugacauggg

SEQ ID NO: 2013308 - RNA, 19 nt, Artificial Sequence
  Description of Artificial Sequence: Synthetic oligonucleotide
ucccuaagauggucuauga

SEQ ID NO: 2013309 - RNA, 19 nt, Artificial Sequence
  Description of Artificial Sequence: Synthetic oligonucleotide
gaagaucaagacgaacaga

SEQ ID NO: 2013310 - RNA, 19 nt, Artificial Sequence
  Description of Artificial Sequence: Synthetic oligonucleotide
aaaccaccauauguguaca

SEQ ID NO: 2013311 - RNA, 19 nt, Artificial Sequence
  Description of Artificial Sequence: Synthetic oligonucleotide
cccaacugaagucaucucc

SEQ ID NO: 2013312 - RNA, 19 nt, Artificial Sequence
  Description of Artificial Sequence: Synthetic oligonucleotide
aucccaguagugaagaaau

SEQ ID NO: 2013313 - RNA, 19 nt, Artificial Sequence
  Description of Artificial Sequence: Synthetic oligonucleotide
aggaaauccaaaggcagaa

SEQ ID NO: 2013314 - RNA, 19 nt, Artificial Sequence
  Description of Artificial Sequence: Synthetic oligonucleotide
uuuucacucccuucuccuc

SEQ ID NO: 2013315 - RNA, 19 nt, Artificial Sequence
  Description of Artificial Sequence: Synthetic oligonucleotide
ggucgcaucggagucauag

SEQ ID NO: 2013316 - RNA, 19 nt, Artificial Sequence
  Description of Artificial Sequence: Synthetic oligonucleotide
cuaccaacauuaaugcuua

SEQ ID NO: 2013317 - RNA, 19 nt, Artificial Sequence
  Description of Artificial Sequence: Synthetic oligonucleotide
caacucgauauguacacaa

SEQ ID NO: 2013318 - RNA, 19 nt, Artificial Sequence
  Description of Artificial Sequence: Synthetic oligonucleotide
agugaucuauuugcuagga

SEQ ID NO: 2013319 - RNA, 19 nt, Artificial Sequence
  Description of Artificial Sequence: Synthetic oligonucleotide
uucccgacaggcacugcug

SEQ ID NO: 2013320 - RNA, 19 nt, Artificial Sequence
  Description of Artificial Sequence: Synthetic oligonucleotide
cccagcauaagaaaaguca

SEQ ID NO: 2013321 - RNA, 19 nt, Artificial Sequence
  Description of Artificial Sequence: Synthetic oligonucleotide
agcuaccaacauuaaugcu

SEQ ID NO: 2013322 - RNA, 19 nt, Artificial Sequence
  Description of Artificial Sequence: Synthetic oligonucleotide
uggagugaucuauuugcua

SEQ ID NO: 2013323 - RNA, 19 nt, Artificial Sequence
  Description of Artificial Sequence: Synthetic oligonucleotide
aucuauuugcuaggaauaa

SEQ ID NO: 2013324 - RNA, 19 nt, Artificial Sequence
  Description of Artificial Sequence: Synthetic oligonucleotide
acauaauaucaugcacaag

SEQ ID NO: 2013325 - RNA, 19 nt, Artificial Sequence
  Description of Artificial Sequence: Synthetic oligonucleotide
agugcaccauuguguaaug

SEQ ID NO: 2013326 - RNA, 19 nt, Artificial Sequence
  Description of Artificial Sequence: Synthetic oligonucleotide
cucaaugcuuuccaucaga

SEQ ID NO: 2013327 - RNA, 19 nt, Artificial Sequence
  Description of Artificial Sequence: Synthetic oligonucleotide
caggcuccccacuugauca

SEQ ID NO: 2013328 - RNA, 19 nt, Artificial Sequence
  Description of Artificial Sequence: Synthetic oligonucleotide
aaccaccgugacauggguc

SEQ ID NO: 2013329 - RNA, 19 nt, Artificial Sequence
  Description of Artificial Sequence: Synthetic oligonucleotide
auaucaugcacaaggccaa

SEQ ID NO: 2013330 - RNA, 19 nt, Artificial Sequence
  Description of Artificial Sequence: Synthetic oligonucleotide
gguuaaaauggucaaguau

SEQ ID NO: 2013331 - RNA, 19 nt, Artificial Sequence
  Description of Artificial Sequence: Synthetic oligonucleotide
gaaaugacaacaacucgau

SEQ ID NO: 2013332 - RNA, 19 nt, Artificial Sequence
  Description of Artificial Sequence: Synthetic oligonucleotide
cccgcugaaggauagugcc

SEQ ID NO: 2013333 - RNA, 19 nt, Artificial Sequence
  Description of Artificial Sequence: Synthetic oligonucleotide
caguaaacgccauaguccu

SEQ ID NO: 2013334 - RNA, 19 nt, Artificial Sequence
  Description of Artificial Sequence: Synthetic oligonucleotide
auacuagaaaugacaacaa

SEQ ID NO: 2013335 - RNA, 19 nt, Artificial Sequence
  Description of Artificial Sequence: Synthetic oligonucleotide
ugcuggucgcaucggaguc

SEQ ID NO: 2013336 - RNA, 19 nt, Artificial Sequence
  Description of Artificial Sequence: Synthetic oligonucleotide
cuguaagaaaccaccauau

SEQ ID NO: 2013337 - RNA, 19 nt, Artificial Sequence
  Description of Artificial Sequence: Synthetic oligonucleotide
aacucgauauguacacaaa

SEQ ID NO: 2013338 - RNA, 19 nt, Artificial Sequence
  Description of Artificial Sequence: Synthetic oligonucleotide
caagacgaacagaggccag

SEQ ID NO: 2013339 - RNA, 19 nt, Artificial Sequence
  Description of Artificial Sequence: Synthetic oligonucleotide
uuagaaccaccgugacaug

SEQ ID NO: 2013340 - RNA, 19 nt, Artificial Sequence
  Description of Artificial Sequence: Synthetic oligonucleotide
gugugcuggucccucagac

SEQ ID NO: 2013341 - RNA, 19 nt, Artificial Sequence
  Description of Artificial Sequence: Synthetic oligonucleotide
cucgauauguacacaaaau

SEQ ID NO: 2013342 - RNA, 19 nt, Artificial Sequence
  Description of Artificial Sequence: Synthetic oligonucleotide
cauggguccccguguuucc

SEQ ID NO: 2013343 - RNA, 19 nt, Artificial Sequence
  Description of Artificial Sequence: Synthetic oligonucleotide
ggcacaucccagcauaaga

SEQ ID NO: 2013344 - RNA, 19 nt, Artificial Sequence
  Description of Artificial Sequence: Synthetic oligonucleotide
gcuaggaauaaaauucauc

SEQ ID NO: 2013345 - RNA, 19 nt, Artificial Sequence
  Description of Artificial Sequence: Synthetic oligonucleotide
uaagauggucuaugauaua

SEQ ID NO: 2013346 - RNA, 19 nt, Artificial Sequence
  Description of Artificial Sequence: Synthetic oligonucleotide
ggauagugccaccagagcu

SEQ ID NO: 2013347 - RNA, 19 nt, Artificial Sequence
  Description of Artificial Sequence: Synthetic oligonucleotide
aggcuccccacuugaucac

SEQ ID NO: 2013348 - RNA, 19 nt, Artificial Sequence
  Description of Artificial Sequence: Synthetic oligonucleotide
gacaacaacucgauaugua

SEQ ID NO: 2013349 - RNA, 19 nt, Artificial Sequence
  Description of Artificial Sequence: Synthetic oligonucleotide
uaaacgccauaguccucca

SEQ ID NO: 2013350 - RNA, 19 nt, Artificial Sequence
  Description of Artificial Sequence: Synthetic oligonucleotide
cauccugaugagguggcug

SEQ ID NO: 2013351 - RNA, 19 nt, Artificial Sequence
  Description of Artificial Sequence: Synthetic oligonucleotide
uagccccgcugaaggauag

SEQ ID NO: 2013352 - RNA, 19 nt, Artificial Sequence
  Description of Artificial Sequence: Synthetic oligonucleotide
agugccaccagagcuuuaa

SEQ ID NO: 2013353 - RNA, 19 nt, Artificial Sequence
  Description of Artificial Sequence: Synthetic oligonucleotide
gagucaauggagugaucua

SEQ ID NO: 2013354 - RNA, 19 nt, Artificial Sequence
  Description of Artificial Sequence: Synthetic oligonucleotide
auggagugaucuauuugcu

SEQ ID NO: 2013355 - RNA, 19 nt, Artificial Sequence
  Description of Artificial Sequence: Synthetic oligonucleotide
agucauaggugacccuuuu

SEQ ID NO: 2013356 - RNA, 19 nt, Artificial Sequence
  Description of Artificial Sequence: Synthetic oligonucleotide
caucuuuuguuuacaacau

SEQ ID NO: 2013357 - RNA, 19 nt, Artificial Sequence
  Description of Artificial Sequence: Synthetic oligonucleotide
ucccucagaccacaagcuu

SEQ ID NO: 2013358 - RNA, 19 nt, Artificial Sequence
  Description of Artificial Sequence: Synthetic oligonucleotide
accagagcuuuaacgcccg

SEQ ID NO: 2013359 - RNA, 19 nt, Artificial Sequence
  Description of Artificial Sequence: Synthetic oligonucleotide
aaguaacauugcacgcugu

SEQ ID NO: 2013360 - RNA, 19 nt, Artificial Sequence
  Description of Artificial Sequence: Synthetic oligonucleotide
caucggagucauaggugac

SEQ ID NO: 2013361 - RNA, 19 nt, Artificial Sequence
  Description of Artificial Sequence: Synthetic oligonucleotide
acgcccgccaugucccugg

SEQ ID NO: 2013362 - RNA, 19 nt, Artificial Sequence
  Description of Artificial Sequence: Synthetic oligonucleotide
gccauaguccuccaaggca

SEQ ID NO: 2013363 - RNA, 19 nt, Artificial Sequence
  Description of Artificial Sequence: Synthetic oligonucleotide
acaacucgauauguacaca

SEQ ID NO: 2013364 - RNA, 19 nt, Artificial Sequence
  Description of Artificial Sequence: Synthetic oligonucleotide
ccaccagagcuuuaacgcc

SEQ ID NO: 2013365 - RNA, 19 nt, Artificial Sequence
  Description of Artificial Sequence: Synthetic oligonucleotide
aguaaacgccauaguccuc

SEQ ID NO: 2013366 - RNA, 19 nt, Artificial Sequence
  Description of Artificial Sequence: Synthetic oligonucleotide
ucccaguagugaagaaaua

SEQ ID NO: 2013367 - RNA, 19 nt, Artificial Sequence
  Description of Artificial Sequence: Synthetic oligonucleotide
uucauccgccgguugcagu

SEQ ID NO: 2013368 - RNA, 19 nt, Artificial Sequence
  Description of Artificial Sequence: Synthetic oligonucleotide
augcuuuccaucagaguaa

SEQ ID NO: 2013369 - RNA, 19 nt, Artificial Sequence
  Description of Artificial Sequence: Synthetic oligonucleotide
agauggucuaugauauaaa

SEQ ID NO: 2013370 - RNA, 19 nt, Artificial Sequence
  Description of Artificial Sequence: Synthetic oligonucleotide
auguguacacuuauacaua

SEQ ID NO: 2013371 - RNA, 19 nt, Artificial Sequence
  Description of Artificial Sequence: Synthetic oligonucleotide
agucagcccaauagccccg

SEQ ID NO: 2013372 - RNA, 19 nt, Artificial Sequence
  Description of Artificial Sequence: Synthetic oligonucleotide
cuggacccucaccagcuac

SEQ ID NO: 2013373 - RNA, 19 nt, Artificial Sequence
  Description of Artificial Sequence: Synthetic oligonucleotide
auugcacgcuguccacugu

SEQ ID NO: 2013374 - RNA, 19 nt, Artificial Sequence
  Description of Artificial Sequence: Synthetic oligonucleotide
gguugcagugucacuguag

SEQ ID NO: 2013375 - RNA, 19 nt, Artificial Sequence
  Description of Artificial Sequence: Synthetic oligonucleotide
cgaacagaggccaguaaac

SEQ ID NO: 2013376 - RNA, 19 nt, Artificial Sequence
  Description of Artificial Sequence: Synthetic oligonucleotide
ccucauagguagcagauaa

SEQ ID NO: 2013377 - RNA, 19 nt, Artificial Sequence
  Description of Artificial Sequence: Synthetic oligonucleotide
ccauucauccgccgguugc

SEQ ID NO: 2013378 - RNA, 19 nt, Artificial Sequence
  Description of Artificial Sequence: Synthetic oligonucleotide
auucauccgccgguugcag

SEQ ID NO: 2013379 - RNA, 19 nt, Artificial Sequence
  Description of Artificial Sequence: Synthetic oligonucleotide
accgugacauggguccccg

SEQ ID NO: 2013380 - RNA, 19 nt, Artificial Sequence
  Description of Artificial Sequence: Synthetic oligonucleotide
gauagugccaccagagcuu

SEQ ID NO: 2013381 - RNA, 19 nt, Artificial Sequence
  Description of Artificial Sequence: Synthetic oligonucleotide
gccgguugcagugucacug

SEQ ID NO: 2013382 - RNA, 19 nt, Artificial Sequence
  Description of Artificial Sequence: Synthetic oligonucleotide
gacgaacagaggccaguaa

SEQ ID NO: 2013383 - RNA, 19 nt, Artificial Sequence
  Description of Artificial Sequence: Synthetic oligonucleotide
acaucuucccuaagauggu

SEQ ID NO: 2013384 - RNA, 19 nt, Artificial Sequence
  Description of Artificial Sequence: Synthetic oligonucleotide
caccauauguguacacuua

SEQ ID NO: 2013385 - RNA, 19 nt, Artificial Sequence
  Description of Artificial Sequence: Synthetic oligonucleotide
cucauagguagcagauaaa

SEQ ID NO: 2013386 - RNA, 19 nt, Artificial Sequence
  Description of Artificial Sequence: Synthetic oligonucleotide
gguauaaaacucagcuuaa

SEQ ID NO: 2013387 - RNA, 19 nt, Artificial Sequence
  Description of Artificial Sequence: Synthetic oligonucleotide
aaaugacguagaagaucaa

SEQ ID NO: 2013388 - RNA, 19 nt, Artificial Sequence
  Description of Artificial Sequence: Synthetic oligonucleotide
gcuaccaacauuaaugcuu

SEQ ID NO: 2013389 - RNA, 19 nt, Artificial Sequence
  Description of Artificial Sequence: Synthetic oligonucleotide
ccgacaacauccugaugag

SEQ ID NO: 2013390 - RNA, 19 nt, Artificial Sequence
  Description of Artificial Sequence: Synthetic oligonucleotide
uaucaugcacaaggccaaa

SEQ ID NO: 2013391 - RNA, 19 nt, Artificial Sequence
  Description of Artificial Sequence: Synthetic oligonucleotide
ucuggacccucaccagcua

SEQ ID NO: 2013392 - RNA, 19 nt, Artificial Sequence
  Description of Artificial Sequence: Synthetic oligonucleotide
auccgccgguugcaguguc

SEQ ID NO: 2013393 - RNA, 19 nt, Artificial Sequence
  Description of Artificial Sequence: Synthetic oligonucleotide
guucccgacaggcacugcu

SEQ ID NO: 2013394 - RNA, 19 nt, Artificial Sequence
  Description of Artificial Sequence: Synthetic oligonucleotide
uccgccgguugcaguguca

SEQ ID NO: 2013395 - RNA, 19 nt, Artificial Sequence
  Description of Artificial Sequence: Synthetic oligonucleotide
cauuguguaaugagucaau

SEQ ID NO: 2013396 - RNA, 19 nt, Artificial Sequence
  Description of Artificial Sequence: Synthetic oligonucleotide
caauagccccgcugaagga

SEQ ID NO: 2013397 - RNA, 19 nt, Artificial Sequence
  Description of Artificial Sequence: Synthetic oligonucleotide
cauucauccgccgguugca

SEQ ID NO: 2013398 - RNA, 19 nt, Artificial Sequence
  Description of Artificial Sequence: Synthetic oligonucleotide
uaccaacauuaaugcuuaa

SEQ ID NO: 2013399 - RNA, 19 nt, Artificial Sequence
  Description of Artificial Sequence: Synthetic oligonucleotide
cgauauguacacaaaauau

SEQ ID NO: 2013400 - RNA, 19 nt, Artificial Sequence
  Description of Artificial Sequence: Synthetic oligonucleotide
gaaccaccgugacaugggu

SEQ ID NO: 2013401 - RNA, 19 nt, Artificial Sequence
  Description of Artificial Sequence: Synthetic oligonucleotide
gccuugaauugugagaaaa

SEQ ID NO: 2013402 - RNA, 19 nt, Artificial Sequence
  Description of Artificial Sequence: Synthetic oligonucleotide
cccguguuuccuguggagg

SEQ ID NO: 2013403 - RNA, 19 nt, Artificial Sequence
  Description of Artificial Sequence: Synthetic oligonucleotide
gugacauggguccccgugu

SEQ ID NO: 2013404 - RNA, 19 nt, Artificial Sequence
  Description of Artificial Sequence: Synthetic oligonucleotide
ggucuaugauauaaaggua

SEQ ID NO: 2013405 - RNA, 19 nt, Artificial Sequence
  Description of Artificial Sequence: Synthetic oligonucleotide
aacgcccgccaugucccug

SEQ ID NO: 2013406 - RNA, 19 nt, Artificial Sequence
  Description of Artificial Sequence: Synthetic oligonucleotide
cuuuaacgcccgccauguc

SEQ ID NO: 2013407 - RNA, 19 nt, Artificial Sequence
  Description of Artificial Sequence: Synthetic oligonucleotide
agggugugcuggucccuca

SEQ ID NO: 2013408 - RNA, 19 nt, Artificial Sequence
  Description of Artificial Sequence: Synthetic oligonucleotide
auaguccuccaaggcacau

SEQ ID NO: 2013409 - RNA, 19 nt, Artificial Sequence
  Description of Artificial Sequence: Synthetic oligonucleotide
ccucuuccaaagacgagga

SEQ ID NO: 2013410 - RNA, 19 nt, Artificial Sequence
  Description of Artificial Sequence: Synthetic oligonucleotide
aggugacccuuuuggcaau

SEQ ID NO: 2013411 - RNA, 19 nt, Artificial Sequence
  Description of Artificial Sequence: Synthetic oligonucleotide
guucccaacugaagucauc

SEQ ID NO: 2013412 - RNA, 19 nt, Artificial Sequence
  Description of Artificial Sequence: Synthetic oligonucleotide
ccaacugaagucaucuccu

SEQ ID NO: 2013413 - RNA, 19 nt, Artificial Sequence
  Description of Artificial Sequence: Synthetic oligonucleotide
ccccgcugaaggauagugc

SEQ ID NO: 2013414 - RNA, 19 nt, Artificial Sequence
  Description of Artificial Sequence: Synthetic oligonucleotide
gugaagaaauaugccaguu

SEQ ID NO: 2013415 - RNA, 19 nt, Artificial Sequence
  Description of Artificial Sequence: Synthetic oligonucleotide
caccgugacaugggucccc

SEQ ID NO: 2013416 - RNA, 19 nt, Artificial Sequence
  Description of Artificial Sequence: Synthetic oligonucleotide
gggugugcuggucccucag

SEQ ID NO: 2013417 - RNA, 19 nt, Artificial Sequence
  Description of Artificial Sequence: Synthetic oligonucleotide
gucagcccaauagccccgc

SEQ ID NO: 2013418 - RNA, 19 nt, Artificial Sequence
  Description of Artificial Sequence: Synthetic oligonucleotide
guuuccuguggaggugaca

SEQ ID NO: 2013419 - RNA, 19 nt, Artificial Sequence
  Description of Artificial Sequence: Synthetic oligonucleotide
cucagaccacaagcuucag

SEQ ID NO: 2013420 - RNA, 19 nt, Artificial Sequence
  Description of Artificial Sequence: Synthetic oligonucleotide
cgcaucggagucauaggug

SEQ ID NO: 2013421 - RNA, 19 nt, Artificial Sequence
  Description of Artificial Sequence: Synthetic oligonucleotide
cagcacaaggccacaggcu

SEQ ID NO: 2013422 - RNA, 19 nt, Artificial Sequence
  Description of Artificial Sequence: Synthetic oligonucleotide
uaacgcccgccaugucccu

SEQ ID NO: 2013423 - RNA, 19 nt, Artificial Sequence
  Description of Artificial Sequence: Synthetic oligonucleotide
cugcuggucgcaucggagu

SEQ ID NO: 2013424 - RNA, 19 nt, Artificial Sequence
  Description of Artificial Sequence: Synthetic oligonucleotide
gucccucagaccacaagcu

SEQ ID NO: 2013425 - RNA, 19 nt, Artificial Sequence
  Description of Artificial Sequence: Synthetic oligonucleotide
ccauuguguaaugagucaa

SEQ ID NO: 2013426 - RNA, 19 nt, Artificial Sequence
  Description of Artificial Sequence: Synthetic oligonucleotide
gugcaccauuguguaauga

SEQ ID NO: 2013427 - RNA, 19 nt, Artificial Sequence
  Description of Artificial Sequence: Synthetic oligonucleotide
cgccauaguccuccaaggc

SEQ ID NO: 2013428 - RNA, 19 nt, Artificial Sequence
  Description of Artificial Sequence: Synthetic oligonucleotide
gcuuuaacgcccgccaugu

SEQ ID NO: 2013429 - RNA, 19 nt, Artificial Sequence
  Description of Artificial Sequence: Synthetic oligonucleotide
ccauauguguacacuuaua

SEQ ID NO: 2013430 - RNA, 19 nt, Artificial Sequence
  Description of Artificial Sequence: Synthetic oligonucleotide
ggugacccuuuuggcaaug

SEQ ID NO: 2013431 - RNA, 19 nt, Artificial Sequence
  Description of Artificial Sequence: Synthetic oligonucleotide
uagugccaccagagcuuua

SEQ ID NO: 2013432 - RNA, 19 nt, Artificial Sequence
  Description of Artificial Sequence: Synthetic oligonucleotide
ccccguguuuccuguggag

SEQ ID NO: 2013433 - RNA, 19 nt, Artificial Sequence
  Description of Artificial Sequence: Synthetic oligonucleotide
cgacaacauccugaugagg

SEQ ID NO: 2013434 - RNA, 19 nt, Artificial Sequence
  Description of Artificial Sequence: Synthetic oligonucleotide
ccacacgagcaagaauaac

SEQ ID NO: 2013435 - RNA, 19 nt, Artificial Sequence
  Description of Artificial Sequence: Synthetic oligonucleotide
gcacgcuguccacugucca

SEQ ID NO: 2013436 - RNA, 19 nt, Artificial Sequence
  Description of Artificial Sequence: Synthetic oligonucleotide
gaagagggcucuggacccu

SEQ ID NO: 2013437 - RNA, 19 nt, Artificial Sequence
  Description of Artificial Sequence: Synthetic oligonucleotide
ggacccucaccagcuacca

SEQ ID NO: 2013438 - RNA, 19 nt, Artificial Sequence
  Description of Artificial Sequence: Synthetic oligonucleotide
gagucauaggugacccuuu

SEQ ID NO: 2013439 - RNA, 19 nt, Artificial Sequence
  Description of Artificial Sequence: Synthetic oligonucleotide
cccaguagugaagaaauau

SEQ ID NO: 2013440 - RNA, 19 nt, Artificial Sequence
  Description of Artificial Sequence: Synthetic oligonucleotide
gacauggguccccguguuu

SEQ ID NO: 2013441 - RNA, 19 nt, Artificial Sequence
  Description of Artificial Sequence: Synthetic oligonucleotide
gggaaaugacguagaagau

SEQ ID NO: 2013442 - RNA, 19 nt, Artificial Sequence
  Description of Artificial Sequence: Synthetic oligonucleotide
ccaucagaguaaagggcua

SEQ ID NO: 2013443 - RNA, 19 nt, Artificial Sequence
  Description of Artificial Sequence: Synthetic oligonucleotide
ccaccauauguguacacuu

SEQ ID NO: 2013444 - RNA, 19 nt, Artificial Sequence
  Description of Artificial Sequence: Synthetic oligonucleotide
gcuggucgcaucggaguca

SEQ ID NO: 2013445 - RNA, 19 nt, Artificial Sequence
  Description of Artificial Sequence: Synthetic oligonucleotide
ccaugucccuggaccugag

SEQ ID NO: 2013446 - RNA, 19 nt, Artificial Sequence
  Description of Artificial Sequence: Synthetic oligonucleotide
gccacacgagcaagaauaa

SEQ ID NO: 2013447 - RNA, 19 nt, Artificial Sequence
  Description of Artificial Sequence: Synthetic oligonucleotide
ccagagcuuuaacgcccgc

SEQ ID NO: 2013448 - RNA, 19 nt, Artificial Sequence
  Description of Artificial Sequence: Synthetic oligonucleotide
ccgcugaaggauagugcca

SEQ ID NO: 2013449 - RNA, 19 nt, Artificial Sequence
  Description of Artificial Sequence: Synthetic oligonucleotide
caauagcaagugccaugau

SEQ ID NO: 2013450 - RNA, 19 nt, Artificial Sequence
  Description of Artificial Sequence: Synthetic oligonucleotide
uggucgcaucggagucaua

SEQ ID NO: 2013451 - RNA, 19 nt, Artificial Sequence
  Description of Artificial Sequence: Synthetic oligonucleotide
ccaccgugacauggguccc

SEQ ID NO: 2013452 - RNA, 19 nt, Artificial Sequence
  Description of Artificial Sequence: Synthetic oligonucleotide
ccgccgguugcagugucac

SEQ ID NO: 2013453 - RNA, 19 nt, Artificial Sequence
  Description of Artificial Sequence: Synthetic oligonucleotide
ggcuccccacuugaucaca

SEQ ID NO: 2013454 - RNA, 19 nt, Artificial Sequence
  Description of Artificial Sequence: Synthetic oligonucleotide
cagccacacgagcaagaau

SEQ ID NO: 2013455 - RNA, 19 nt, Artificial Sequence
  Description of Artificial Sequence: Synthetic oligonucleotide
cuggucgcaucggagucau

SEQ ID NO: 2013456 - RNA, 19 nt, Artificial Sequence
  Description of Artificial Sequence: Synthetic oligonucleotide
guccauucauccgccgguu

SEQ ID NO: 2013457 - RNA, 19 nt, Artificial Sequence
  Description of Artificial Sequence: Synthetic oligonucleotide
cccuaagauggucuaugau

SEQ ID NO: 2013458 - RNA, 19 nt, Artificial Sequence
  Description of Artificial Sequence: Synthetic oligonucleotide
gggcuaccacuguucccaa

SEQ ID NO: 2013459 - RNA, 19 nt, Artificial Sequence
  Description of Artificial Sequence: Synthetic oligonucleotide
cauccgccgguugcagugu

SEQ ID NO: 2013460 - RNA, 19 nt, Artificial Sequence
  Description of Artificial Sequence: Synthetic oligonucleotide
ccgguugcagugucacugu

SEQ ID NO: 2013461 - RNA, 19 nt, Artificial Sequence
  Description of Artificial Sequence: Synthetic oligonucleotide
ccgccgacaacauccugau

SEQ ID NO: 2013462 - RNA, 19 nt, Artificial Sequence
  Description of Artificial Sequence: Synthetic oligonucleotide
gcccgccaugucccuggac

SEQ ID NO: 2013463 - RNA, 19 nt, Artificial Sequence
  Description of Artificial Sequence: Synthetic oligonucleotide
cgccgacaacauccugaug

SEQ ID NO: 2013464 - RNA, 19 nt, Artificial Sequence
  Description of Artificial Sequence: Synthetic oligonucleotide
cgccgccgacaacauccug

SEQ ID NO: 2013465 - RNA, 19 nt, Artificial Sequence
  Description of Artificial Sequence: Synthetic oligonucleotide
cgguugcagugucacugua

SEQ ID NO: 2013466 - RNA, 19 nt, Artificial Sequence
  Description of Artificial Sequence: Synthetic oligonucleotide
ccgugacauggguccccgu

SEQ ID NO: 2013467 - RNA, 19 nt, Artificial Sequence
  Description of Artificial Sequence: Synthetic oligonucleotide
cgccgguugcagugucacu

SEQ ID NO: 2013468 - RNA, 19 nt, Artificial Sequence
  Description of Artificial Sequence: Synthetic oligonucleotide
aaaacugcagaaaugaugg

SEQ ID NO: 2013469 - RNA, 19 nt, Artificial Sequence
  Description of Artificial Sequence: Synthetic oligonucleotide
auuuugaauguccaguucc

SEQ ID NO: 2013470 - RNA, 19 nt, Artificial Sequence
  Description of Artificial Sequence: Synthetic oligonucleotide
auaucaaagugucuuaagc

SEQ ID NO: 2013471 - RNA, 19 nt, Artificial Sequence
  Description of Artificial Sequence: Synthetic oligonucleotide
ugacaauuggaacagagcc

SEQ ID NO: 2013472 - RNA, 19 nt, Artificial Sequence
  Description of Artificial Sequence: Synthetic oligonucleotide
ugaauuuucugagugaugg

SEQ ID NO: 2013473 - RNA, 19 nt, Artificial Sequence
  Description of Artificial Sequence: Synthetic oligonucleotide
ugccacauaauuuugagag

SEQ ID NO: 2013474 - RNA, 19 nt, Artificial Sequence
  Description of Artificial Sequence: Synthetic oligonucleotide
gaauuauugaucuccacag

SEQ ID NO: 2013475 - RNA, 19 nt, Artificial Sequence
  Description of Artificial Sequence: Synthetic oligonucleotide
gaagauucuaaucuguucc

SEQ ID NO: 2013476 - RNA, 19 nt, Artificial Sequence
  Description of Artificial Sequence: Synthetic oligonucleotide
ugcugaaacaaucaugagg

SEQ ID NO: 2013477 - RNA, 19 nt, Artificial Sequence
  Description of Artificial Sequence: Synthetic oligonucleotide
acauauuugagugaacucc

SEQ ID NO: 2013478 - RNA, 19 nt, Artificial Sequence
  Description of Artificial Sequence: Synthetic oligonucleotide
ugagugauggugaagaagc

SEQ ID NO: 2013479 - RNA, 19 nt, Artificial Sequence
  Description of Artificial Sequence: Synthetic oligonucleotide
acaguugcaguacacaggc

SEQ ID NO: 2013480 - RNA, 19 nt, Artificial Sequence
  Description of Artificial Sequence: Synthetic oligonucleotide
cuaacaguuugauaaaggg

SEQ ID NO: 2013481 - RNA, 19 nt, Artificial Sequence
  Description of Artificial Sequence: Synthetic oligonucleotide
aacaguuugauaaagggcu

SEQ ID NO: 2013482 - RNA, 19 nt, Artificial Sequence
  Description of Artificial Sequence: Synthetic oligonucleotide
acaaucaugaggaaguagc

SEQ ID NO: 2013483 - RNA, 19 nt, Artificial Sequence
  Description of Artificial Sequence: Synthetic oligonucleotide
uuauugaucuccacagugg

SEQ ID NO: 2013484 - RNA, 19 nt, Artificial Sequence
  Description of Artificial Sequence: Synthetic oligonucleotide
cuugcuaacaguuugauaa

SEQ ID NO: 2013485 - RNA, 19 nt, Artificial Sequence
  Description of Artificial Sequence: Synthetic oligonucleotide
uaucaaagugucuuaagcc

SEQ ID NO: 2013486 - RNA, 19 nt, Artificial Sequence
  Description of Artificial Sequence: Synthetic oligonucleotide
auuugagugaacuccaaag

SEQ ID NO: 2013487 - RNA, 19 nt, Artificial Sequence
  Description of Artificial Sequence: Synthetic oligonucleotide
uucuggaagauucuaaucu

SEQ ID NO: 2013488 - RNA, 19 nt, Artificial Sequence
  Description of Artificial Sequence: Synthetic oligonucleotide
gauguuuguguccagagac

SEQ ID NO: 2013489 - RNA, 19 nt, Artificial Sequence
  Description of Artificial Sequence: Synthetic oligonucleotide
uuugagugaacuccaaagc

SEQ ID NO: 2013490 - RNA, 19 nt, Artificial Sequence
  Description of Artificial Sequence: Synthetic oligonucleotide
uucaccaacgucuaccagg

SEQ ID NO: 2013491 - RNA, 19 nt, Artificial Sequence
  Description of Artificial Sequence: Synthetic oligonucleotide
auuauugaucuccacagug

SEQ ID NO: 2013492 - RNA, 19 nt, Artificial Sequence
  Description of Artificial Sequence: Synthetic oligonucleotide
ucuaaucuguuccaugaag

SEQ ID NO: 2013493 - RNA, 19 nt, Artificial Sequence
  Description of Artificial Sequence: Synthetic oligonucleotide
auuugugauguuugugucc

SEQ ID NO: 2013494 - RNA, 19 nt, Artificial Sequence
  Description of Artificial Sequence: Synthetic oligonucleotide
uugauaaagggcuugucug

SEQ ID NO: 2013495 - RNA, 19 nt, Artificial Sequence
  Description of Artificial Sequence: Synthetic oligonucleotide
uaugacauauuguagugcu

SEQ ID NO: 2013496 - RNA, 19 nt, Artificial Sequence
  Description of Artificial Sequence: Synthetic oligonucleotide
uaacaguuugauaaagggc

SEQ ID NO: 2013497 - RNA, 19 nt, Artificial Sequence
  Description of Artificial Sequence: Synthetic oligonucleotide
agcaggauuauugagcagc

SEQ ID NO: 2013498 - RNA, 19 nt, Artificial Sequence
  Description of Artificial Sequence: Synthetic oligonucleotide
ugagugaacuccaaagcag

SEQ ID NO: 2013499 - RNA, 19 nt, Artificial Sequence
  Description of Artificial Sequence: Synthetic oligonucleotide
agaauuauugaucuccaca

SEQ ID NO: 2013500 - RNA, 19 nt, Artificial Sequence
  Description of Artificial Sequence: Synthetic oligonucleotide
aagugucuuaagccuaggc

SEQ ID NO: 2013501 - RNA, 19 nt, Artificial Sequence
  Description of Artificial Sequence: Synthetic oligonucleotide
ugauuugugauguuugugu

SEQ ID NO: 2013502 - RNA, 19 nt, Artificial Sequence
  Description of Artificial Sequence: Synthetic oligonucleotide
caaagcaggauuauugagc

SEQ ID NO: 2013503 - RNA, 19 nt, Artificial Sequence
  Description of Artificial Sequence: Synthetic oligonucleotide
aggauuauugagcagcaag

SEQ ID NO: 2013504 - RNA, 19 nt, Artificial Sequence
  Description of Artificial Sequence: Synthetic oligonucleotide
acaauuggaacagagccac

SEQ ID NO: 2013505 - RNA, 19 nt, Artificial Sequence
  Description of Artificial Sequence: Synthetic oligonucleotide
uugagugaacuccaaagca

SEQ ID NO: 2013506 - RNA, 19 nt, Artificial Sequence
  Description of Artificial Sequence: Synthetic oligonucleotide
uaugggauaucaaaguguc

SEQ ID NO: 2013507 - RNA, 19 nt, Artificial Sequence
  Description of Artificial Sequence: Synthetic oligonucleotide
auaacagccagaauuauug

SEQ ID NO: 2013508 - RNA, 19 nt, Artificial Sequence
  Description of Artificial Sequence: Synthetic oligonucleotide
auggugagaacaaaguccc

SEQ ID NO: 2013509 - RNA, 19 nt, Artificial Sequence
  Description of Artificial Sequence: Synthetic oligonucleotide
aauguccaguuccaugcac

SEQ ID NO: 2013510 - RNA, 19 nt, Artificial Sequence
  Description of Artificial Sequence: Synthetic oligonucleotide
agagaauucaccaacgucu

SEQ ID NO: 2013511 - RNA, 19 nt, Artificial Sequence
  Description of Artificial Sequence: Synthetic oligonucleotide
agaaauuacagcuguggca

SEQ ID NO: 2013512 - RNA, 19 nt, Artificial Sequence
  Description of Artificial Sequence: Synthetic oligonucleotide
uuauucaccugauuuguga

SEQ ID NO: 2013513 - RNA, 19 nt, Artificial Sequence
  Description of Artificial Sequence: Synthetic oligonucleotide
gauaucaaagugucuuaag

SEQ ID NO: 2013514 - RNA, 19 nt, Artificial Sequence
  Description of Artificial Sequence: Synthetic oligonucleotide
aauucaccaacgucuacca

SEQ ID NO: 2013515 - RNA, 19 nt, Artificial Sequence
  Description of Artificial Sequence: Synthetic oligonucleotide
cagggaacaucucugaggg

SEQ ID NO: 2013516 - RNA, 19 nt, Artificial Sequence
  Description of Artificial Sequence: Synthetic oligonucleotide
acagggaacaucucugagg

SEQ ID NO: 2013517 - RNA, 19 nt, Artificial Sequence
  Description of Artificial Sequence: Synthetic oligonucleotide
aaucaugaggaaguagcuc

SEQ ID NO: 2013518 - RNA, 19 nt, Artificial Sequence
  Description of Artificial Sequence: Synthetic oligonucleotide
auaccuugcacacauauuu

SEQ ID NO: 2013519 - RNA, 19 nt, Artificial Sequence
  Description of Artificial Sequence: Synthetic oligonucleotide
agugucuuaagccuaggcu

SEQ ID NO: 2013520 - RNA, 19 nt, Artificial Sequence
  Description of Artificial Sequence: Synthetic oligonucleotide
cauaccacggcacuuuagg

SEQ ID NO: 2013521 - RNA, 19 nt, Artificial Sequence
  Description of Artificial Sequence: Synthetic oligonucleotide
aauuggaacagagccacug

SEQ ID NO: 2013522 - RNA, 19 nt, Artificial Sequence
  Description of Artificial Sequence: Synthetic oligonucleotide
agguaugacauauuguagu

SEQ ID NO: 2013523 - RNA, 19 nt, Artificial Sequence
  Description of Artificial Sequence: Synthetic oligonucleotide
aauuauugaucuccacagu

SEQ ID NO: 2013524 - RNA, 19 nt, Artificial Sequence
  Description of Artificial Sequence: Synthetic oligonucleotide
acaagaggcugccuguggc

SEQ ID NO: 2013525 - RNA, 19 nt, Artificial Sequence
  Description of Artificial Sequence: Synthetic oligonucleotide
gaauucaccaacgucuacc

SEQ ID NO: 2013526 - RNA, 19 nt, Artificial Sequence
  Description of Artificial Sequence: Synthetic oligonucleotide
gaaauuacagcuguggcaa

SEQ ID NO: 2013527 - RNA, 19 nt, Artificial Sequence
  Description of Artificial Sequence: Synthetic oligonucleotide
accacggcacuuuaggcac

SEQ ID NO: 2013528 - RNA, 19 nt, Artificial Sequence
  Description of Artificial Sequence: Synthetic oligonucleotide
acagccacgauguaugcug

SEQ ID NO: 2013529 - RNA, 19 nt, Artificial Sequence
  Description of Artificial Sequence: Synthetic oligonucleotide
uuugugauguuugugucca

SEQ ID NO: 2013530 - RNA, 19 nt, Artificial Sequence
  Description of Artificial Sequence: Synthetic oligonucleotide
ugcuaugguacacagccac

SEQ ID NO: 2013531 - RNA, 19 nt, Artificial Sequence
  Description of Artificial Sequence: Synthetic oligonucleotide
ucuguagcagccaugcuau

SEQ ID NO: 2013532 - RNA, 19 nt, Artificial Sequence
  Description of Artificial Sequence: Synthetic oligonucleotide
ugucuuaagccuaggcuug

SEQ ID NO: 2013533 - RNA, 19 nt, Artificial Sequence
  Description of Artificial Sequence: Synthetic oligonucleotide
auaccacggcacuuuaggc

SEQ ID NO: 2013534 - RNA, 19 nt, Artificial Sequence
  Description of Artificial Sequence: Synthetic oligonucleotide
gacauauuguagugcuugg

SEQ ID NO: 2013535 - RNA, 19 nt, Artificial Sequence
  Description of Artificial Sequence: Synthetic oligonucleotide
ugugaaggccaucaguuuc

SEQ ID NO: 2013536 - RNA, 19 nt, Artificial Sequence
  Description of Artificial Sequence: Synthetic oligonucleotide
ugcuauggucuccuggagg

SEQ ID NO: 2013537 - RNA, 19 nt, Artificial Sequence
  Description of Artificial Sequence: Synthetic oligonucleotide
caagugugaaccagggagg

SEQ ID NO: 2013538 - RNA, 19 nt, Artificial Sequence
  Description of Artificial Sequence: Synthetic oligonucleotide
gaaucuuugcacaagucca

SEQ ID NO: 2013539 - RNA, 19 nt, Artificial Sequence
  Description of Artificial Sequence: Synthetic oligonucleotide
uguagcagccaugcuaugg

SEQ ID NO: 2013540 - RNA, 19 nt, Artificial Sequence
  Description of Artificial Sequence: Synthetic oligonucleotide
uucugagugauggugaaga

SEQ ID NO: 2013541 - RNA, 19 nt, Artificial Sequence
  Description of Artificial Sequence: Synthetic oligonucleotide
uucaugcuaugguacacag

SEQ ID NO: 2013542 - RNA, 19 nt, Artificial Sequence
  Description of Artificial Sequence: Synthetic oligonucleotide
uccaugaaguccuuugugu

SEQ ID NO: 2013543 - RNA, 19 nt, Artificial Sequence
  Description of Artificial Sequence: Synthetic oligonucleotide
ugugucucaacucauucuu

SEQ ID NO: 2013544 - RNA, 19 nt, Artificial Sequence
  Description of Artificial Sequence: Synthetic oligonucleotide
uguaugcugaaacaaucau

SEQ ID NO: 2013545 - RNA, 19 nt, Artificial Sequence
  Description of Artificial Sequence: Synthetic oligonucleotide
uggcaaaucaccucaggga

SEQ ID NO: 2013546 - RNA, 19 nt, Artificial Sequence
  Description of Artificial Sequence: Synthetic oligonucleotide
gauuauugagcagcaagug

SEQ ID NO: 2013547 - RNA, 19 nt, Artificial Sequence
  Description of Artificial Sequence: Synthetic oligonucleotide
uugacugccagauuuugaa

SEQ ID NO: 2013548 - RNA, 19 nt, Artificial Sequence
  Description of Artificial Sequence: Synthetic oligonucleotide
ugccccuuuagccucuugg

SEQ ID NO: 2013549 - RNA, 19 nt, Artificial Sequence
  Description of Artificial Sequence: Synthetic oligonucleotide
uguguggauggugagaaca

SEQ ID NO: 2013550 - RNA, 19 nt, Artificial Sequence
  Description of Artificial Sequence: Synthetic oligonucleotide
acuuuaggcacaccagguc

SEQ ID NO: 2013551 - RNA, 19 nt, Artificial Sequence
  Description of Artificial Sequence: Synthetic oligonucleotide
aguacacaggcauaugggu

SEQ ID NO: 2013552 - RNA, 19 nt, Artificial Sequence
  Description of Artificial Sequence: Synthetic oligonucleotide
uacacaggcauaugggucu

SEQ ID NO: 2013553 - RNA, 19 nt, Artificial Sequence
  Description of Artificial Sequence: Synthetic oligonucleotide
agcuccgagagccugugac

SEQ ID NO: 2013554 - RNA, 19 nt, Artificial Sequence
  Description of Artificial Sequence: Synthetic oligonucleotide
gagugaacuccaaagcagg

SEQ ID NO: 2013555 - RNA, 19 nt, Artificial Sequence
  Description of Artificial Sequence: Synthetic oligonucleotide
cucuguucagcuuauucac

SEQ ID NO: 2013556 - RNA, 19 nt, Artificial Sequence
  Description of Artificial Sequence: Synthetic oligonucleotide
uuuguguccagagacaaua

SEQ ID NO: 2013557 - RNA, 19 nt, Artificial Sequence
  Description of Artificial Sequence: Synthetic oligonucleotide
uguggcaaaucaccucagg

SEQ ID NO: 2013558 - RNA, 19 nt, Artificial Sequence
  Description of Artificial Sequence: Synthetic oligonucleotide
ugccagauuuugaaugucc

SEQ ID NO: 2013559 - RNA, 19 nt, Artificial Sequence
  Description of Artificial Sequence: Synthetic oligonucleotide
aggcagaauggccccaucc

SEQ ID NO: 2013560 - RNA, 19 nt, Artificial Sequence
  Description of Artificial Sequence: Synthetic oligonucleotide
cugacaauuggaacagagc

SEQ ID NO: 2013561 - RNA, 19 nt, Artificial Sequence
  Description of Artificial Sequence: Synthetic oligonucleotide
auucuucaugcuaugguac

SEQ ID NO: 2013562 - RNA, 19 nt, Artificial Sequence
  Description of Artificial Sequence: Synthetic oligonucleotide
cagaaauuacagcuguggc

SEQ ID NO: 2013563 - RNA, 19 nt, Artificial Sequence
  Description of Artificial Sequence: Synthetic oligonucleotide
caguacacaggcauauggg

SEQ ID NO: 2013564 - RNA, 19 nt, Artificial Sequence
  Description of Artificial Sequence: Synthetic oligonucleotide
ugagugagcucauuugcca

SEQ ID NO: 2013565 - RNA, 19 nt, Artificial Sequence
  Description of Artificial Sequence: Synthetic oligonucleotide
agggcuugucuguagcagc

SEQ ID NO: 2013566 - RNA, 19 nt, Artificial Sequence
  Description of Artificial Sequence: Synthetic oligonucleotide
ucuucacaggaguacuucc

SEQ ID NO: 2013567 - RNA, 19 nt, Artificial Sequence
  Description of Artificial Sequence: Synthetic oligonucleotide
aguggcucggucaucaaac

SEQ ID NO: 2013568 - RNA, 19 nt, Artificial Sequence
  Description of Artificial Sequence: Synthetic oligonucleotide
acaguggaauaacagccag

SEQ ID NO: 2013569 - RNA, 19 nt, Artificial Sequence
  Description of Artificial Sequence: Synthetic oligonucleotide
gauguaugcugaaacaauc

SEQ ID NO: 2013570 - RNA, 19 nt, Artificial Sequence
  Description of Artificial Sequence: Synthetic oligonucleotide
agguccugcagugugaagg

SEQ ID NO: 2013571 - RNA, 19 nt, Artificial Sequence
  Description of Artificial Sequence: Synthetic oligonucleotide
uuaagccuaggcuugcuaa

SEQ ID NO: 2013572 - RNA, 19 nt, Artificial Sequence
  Description of Artificial Sequence: Synthetic oligonucleotide
acacauauuugagugaacu

SEQ ID NO: 2013573 - RNA, 19 nt, Artificial Sequence
  Description of Artificial Sequence: Synthetic oligonucleotide
ugaggaaguagcucugaca

SEQ ID NO: 2013574 - RNA, 19 nt, Artificial Sequence
  Description of Artificial Sequence: Synthetic oligonucleotide
auuuugagagaaggugacc

SEQ ID NO: 2013575 - RNA, 19 nt, Artificial Sequence
  Description of Artificial Sequence: Synthetic oligonucleotide
ucuguucagcuuauucacc

SEQ ID NO: 2013576 - RNA, 19 nt, Artificial Sequence
  Description of Artificial Sequence: Synthetic oligonucleotide
ucagagaauucaccaacgu

SEQ ID NO: 2013577 - RNA, 19 nt, Artificial Sequence
  Description of Artificial Sequence: Synthetic oligonucleotide
ugagaacaaaguccccugc

SEQ ID NO: 2013578 - RNA, 19 nt, Artificial Sequence
  Description of Artificial Sequence: Synthetic oligonucleotide
uucacaggaguacuuccug

SEQ ID NO: 2013579 - RNA, 19 nt, Artificial Sequence
  Description of Artificial Sequence: Synthetic oligonucleotide
ucuuucauaccacggcacu

SEQ ID NO: 2013580 - RNA, 19 nt, Artificial Sequence
  Description of Artificial Sequence: Synthetic oligonucleotide
ucugaauuuucugagugau

SEQ ID NO: 2013581 - RNA, 19 nt, Artificial Sequence
  Description of Artificial Sequence: Synthetic oligonucleotide
ugauguuuguguccagaga

SEQ ID NO: 2013582 - RNA, 19 nt, Artificial Sequence
  Description of Artificial Sequence: Synthetic oligonucleotide
ggcaaaucaccucagggag

SEQ ID NO: 2013583 - RNA, 19 nt, Artificial Sequence
  Description of Artificial Sequence: Synthetic oligonucleotide
ugugaaccagggaggacag

SEQ ID NO: 2013584 - RNA, 19 nt, Artificial Sequence
  Description of Artificial Sequence: Synthetic oligonucleotide
gaagcucugagugagcuca

SEQ ID NO: 2013585 - RNA, 19 nt, Artificial Sequence
  Description of Artificial Sequence: Synthetic oligonucleotide
cuggagguaugacauauug

SEQ ID NO: 2013586 - RNA, 19 nt, Artificial Sequence
  Description of Artificial Sequence: Synthetic oligonucleotide
cucaguggagcuccgagag

SEQ ID NO: 2013587 - RNA, 19 nt, Artificial Sequence
  Description of Artificial Sequence: Synthetic oligonucleotide
auauuguagugcuuggcaa

SEQ ID NO: 2013588 - RNA, 19 nt, Artificial Sequence
  Description of Artificial Sequence: Synthetic oligonucleotide
ugggauaucaaagugucuu

SEQ ID NO: 2013589 - RNA, 19 nt, Artificial Sequence
  Description of Artificial Sequence: Synthetic oligonucleotide
uucugaauuuucugaguga

SEQ ID NO: 2013590 - RNA, 19 nt, Artificial Sequence
  Description of Artificial Sequence: Synthetic oligonucleotide
gacaaggcgguuaucauca

SEQ ID NO: 2013591 - RNA, 19 nt, Artificial Sequence
  Description of Artificial Sequence: Synthetic oligonucleotide
ugcagaaaugaugggacug

SEQ ID NO: 2013592 - RNA, 19 nt, Artificial Sequence
  Description of Artificial Sequence: Synthetic oligonucleotide
accaacgucuaccaggcga

SEQ ID NO: 2013593 - RNA, 19 nt, Artificial Sequence
  Description of Artificial Sequence: Synthetic oligonucleotide
aaagggcuugucuguagca

SEQ ID NO: 2013594 - RNA, 19 nt, Artificial Sequence
  Description of Artificial Sequence: Synthetic oligonucleotide
agauuuugaauguccaguu

SEQ ID NO: 2013595 - RNA, 19 nt, Artificial Sequence
  Description of Artificial Sequence: Synthetic oligonucleotide
uuuaggcacaccagguccu

SEQ ID NO: 2013596 - RNA, 19 nt, Artificial Sequence
  Description of Artificial Sequence: Synthetic oligonucleotide
caaagugucuuaagccuag

SEQ ID NO: 2013597 - RNA, 19 nt, Artificial Sequence
  Description of Artificial Sequence: Synthetic oligonucleotide
gguaugacauauuguagug

SEQ ID NO: 2013598 - RNA, 19 nt, Artificial Sequence
  Description of Artificial Sequence: Synthetic oligonucleotide
cauauuguagugcuuggca

SEQ ID NO: 2013599 - RNA, 19 nt, Artificial Sequence
  Description of Artificial Sequence: Synthetic oligonucleotide
uaccacggcacuuuaggca

SEQ ID NO: 2013600 - RNA, 19 nt, Artificial Sequence
  Description of Artificial Sequence: Synthetic oligonucleotide
ugauucaaucacagcugag

SEQ ID NO: 2013601 - RNA, 19 nt, Artificial Sequence
  Description of Artificial Sequence: Synthetic oligonucleotide
gcaguacacaggcauaugg

SEQ ID NO: 2013602 - RNA, 19 nt, Artificial Sequence
  Description of Artificial Sequence: Synthetic oligonucleotide
cacaggaguacuuccuggg

SEQ ID NO: 2013603 - RNA, 19 nt, Artificial Sequence
  Description of Artificial Sequence: Synthetic oligonucleotide
gaaggugaccauuccagga

SEQ ID NO: 2013604 - RNA, 19 nt, Artificial Sequence
  Description of Artificial Sequence: Synthetic oligonucleotide
augggucucuuucauacca

SEQ ID NO: 2013605 - RNA, 19 nt, Artificial Sequence
  Description of Artificial Sequence: Synthetic oligonucleotide
agaauucaccaacgucuac

SEQ ID NO: 2013606 - RNA, 19 nt, Artificial Sequence
  Description of Artificial Sequence: Synthetic oligonucleotide
agaauggccccauccugcg

SEQ ID NO: 2013607 - RNA, 19 nt, Artificial Sequence
  Description of Artificial Sequence: Synthetic oligonucleotide
auaaagggcuugucuguag

SEQ ID NO: 2013608 - RNA, 19 nt, Artificial Sequence
  Description of Artificial Sequence: Synthetic oligonucleotide
uggagguaugacauauugu

SEQ ID NO: 2013609 - RNA, 19 nt, Artificial Sequence
  Description of Artificial Sequence: Synthetic oligonucleotide
uauucaccugauuugugau

SEQ ID NO: 2013610 - RNA, 19 nt, Artificial Sequence
  Description of Artificial Sequence: Synthetic oligonucleotide
ugaugggacuggaggaugc

SEQ ID NO: 2013611 - RNA, 19 nt, Artificial Sequence
  Description of Artificial Sequence: Synthetic oligonucleotide
ggagguaugacauauugua

SEQ ID NO: 2013612 - RNA, 19 nt, Artificial Sequence
  Description of Artificial Sequence: Synthetic oligonucleotide
gaacaaaguccccugcaca

SEQ ID NO: 2013613 - RNA, 19 nt, Artificial Sequence
  Description of Artificial Sequence: Synthetic oligonucleotide
auuacagcuguggcaaauc

SEQ ID NO: 2013614 - RNA, 19 nt, Artificial Sequence
  Description of Artificial Sequence: Synthetic oligonucleotide
aaugaugggacuggaggau

SEQ ID NO: 2013615 - RNA, 19 nt, Artificial Sequence
  Description of Artificial Sequence: Synthetic oligonucleotide
agcucugacaagaggcugc

SEQ ID NO: 2013616 - RNA, 19 nt, Artificial Sequence
  Description of Artificial Sequence: Synthetic oligonucleotide
auucaccugauuugugaug

SEQ ID NO: 2013617 - RNA, 19 nt, Artificial Sequence
  Description of Artificial Sequence: Synthetic oligonucleotide
gacaauaccuugcacacau

SEQ ID NO: 2013618 - RNA, 19 nt, Artificial Sequence
  Description of Artificial Sequence: Synthetic oligonucleotide
uguuuguguccagagacaa

SEQ ID NO: 2013619 - RNA, 19 nt, Artificial Sequence
  Description of Artificial Sequence: Synthetic oligonucleotide
cuuugcacaaguccagguc

SEQ ID NO: 2013620 - RNA, 19 nt, Artificial Sequence
  Description of Artificial Sequence: Synthetic oligonucleotide
ucuuugcacaaguccaggu

SEQ ID NO: 2013621 - RNA, 19 nt, Artificial Sequence
  Description of Artificial Sequence: Synthetic oligonucleotide
uacagcuguggcaaaucac

SEQ ID NO: 2013622 - RNA, 19 nt, Artificial Sequence
  Description of Artificial Sequence: Synthetic oligonucleotide
ugacaaggcgguuaucauc

SEQ ID NO: 2013623 - RNA, 19 nt, Artificial Sequence
  Description of Artificial Sequence: Synthetic oligonucleotide
uugccacauaauuuugaga

SEQ ID NO: 2013624 - RNA, 19 nt, Artificial Sequence
  Description of Artificial Sequence: Synthetic oligonucleotide
accuugcacacauauuuga

SEQ ID NO: 2013625 - RNA, 19 nt, Artificial Sequence
  Description of Artificial Sequence: Synthetic oligonucleotide
caugcuauggucuccugga

SEQ ID NO: 2013626 - RNA, 19 nt, Artificial Sequence
  Description of Artificial Sequence: Synthetic oligonucleotide
aggcugauucaaucacagc

SEQ ID NO: 2013627 - RNA, 19 nt, Artificial Sequence
  Description of Artificial Sequence: Synthetic oligonucleotide
agcuguggcaaaucaccuc

SEQ ID NO: 2013628 - RNA, 19 nt, Artificial Sequence
  Description of Artificial Sequence: Synthetic oligonucleotide
ucaugcuaugguacacagc

SEQ ID NO: 2013629 - RNA, 19 nt, Artificial Sequence
  Description of Artificial Sequence: Synthetic oligonucleotide
ugaucuccacaguggcucg

SEQ ID NO: 2013630 - RNA, 19 nt, Artificial Sequence
  Description of Artificial Sequence: Synthetic oligonucleotide
gccagaauuauugaucucc

SEQ ID NO: 2013631 - RNA, 19 nt, Artificial Sequence
  Description of Artificial Sequence: Synthetic oligonucleotide
ugggagaacuggcuagccc

SEQ ID NO: 2013632 - RNA, 19 nt, Artificial Sequence
  Description of Artificial Sequence: Synthetic oligonucleotide
uaagccuaggcuugcuaac

SEQ ID NO: 2013633 - RNA, 19 nt, Artificial Sequence
  Description of Artificial Sequence: Synthetic oligonucleotide
aauguucuggaagauucua

SEQ ID NO: 2013634 - RNA, 19 nt, Artificial Sequence
  Description of Artificial Sequence: Synthetic oligonucleotide
uggaagauucuaaucuguu

SEQ ID NO: 2013635 - RNA, 19 nt, Artificial Sequence
  Description of Artificial Sequence: Synthetic oligonucleotide
cagagaauucaccaacguc

SEQ ID NO: 2013636 - RNA, 19 nt, Artificial Sequence
  Description of Artificial Sequence: Synthetic oligonucleotide
agcacguaggaguggcagg

SEQ ID NO: 2013637 - RNA, 19 nt, Artificial Sequence
  Description of Artificial Sequence: Synthetic oligonucleotide
acacagccacgauguaugc

SEQ ID NO: 2013638 - RNA, 19 nt, Artificial Sequence
  Description of Artificial Sequence: Synthetic oligonucleotide
uaugggucucuuucauacc

SEQ ID NO: 2013639 - RNA, 19 nt, Artificial Sequence
  Description of Artificial Sequence: Synthetic oligonucleotide
cucggcagaaauuacagcu

SEQ ID NO: 2013640 - RNA, 19 nt, Artificial Sequence
  Description of Artificial Sequence: Synthetic oligonucleotide
guaugacauauuguagugc

SEQ ID NO: 2013641 - RNA, 19 nt, Artificial Sequence
  Description of Artificial Sequence: Synthetic oligonucleotide
uccaugacaaggcgguuau

SEQ ID NO: 2013642 - RNA, 19 nt, Artificial Sequence
  Description of Artificial Sequence: Synthetic oligonucleotide
gcacuuuaggcacaccagg

SEQ ID NO: 2013643 - RNA, 19 nt, Artificial Sequence
  Description of Artificial Sequence: Synthetic oligonucleotide
gauucaaucacagcugagu

SEQ ID NO: 2013644 - RNA, 19 nt, Artificial Sequence
  Description of Artificial Sequence: Synthetic oligonucleotide
cucuuucauaccacggcac

SEQ ID NO: 2013645 - RNA, 19 nt, Artificial Sequence
  Description of Artificial Sequence: Synthetic oligonucleotide
gaugcuguugacugccaga

SEQ ID NO: 2013646 - RNA, 19 nt, Artificial Sequence
  Description of Artificial Sequence: Synthetic oligonucleotide
caugacaaggcgguuauca

SEQ ID NO: 2013647 - RNA, 19 nt, Artificial Sequence
  Description of Artificial Sequence: Synthetic oligonucleotide
agugugaaggccaucaguu

SEQ ID NO: 2013648 - RNA, 19 nt, Artificial Sequence
  Description of Artificial Sequence: Synthetic oligonucleotide
uuugagagaaggugaccau

SEQ ID NO: 2013649 - RNA, 19 nt, Artificial Sequence
  Description of Artificial Sequence: Synthetic oligonucleotide
agugagcucauuugccaca

SEQ ID NO: 2013650 - RNA, 19 nt, Artificial Sequence
  Description of Artificial Sequence: Synthetic oligonucleotide
cuaaucuguuccaugaagu

SEQ ID NO: 2013651 - RNA, 19 nt, Artificial Sequence
  Description of Artificial Sequence: Synthetic oligonucleotide
gagugagcucauuugccac

SEQ ID NO: 2013652 - RNA, 19 nt, Artificial Sequence
  Description of Artificial Sequence: Synthetic oligonucleotide
uguccaguuccaugcacac

SEQ ID NO: 2013653 - RNA, 19 nt, Artificial Sequence
  Description of Artificial Sequence: Synthetic oligonucleotide
cauccugcgagaaggagga

SEQ ID NO: 2013654 - RNA, 19 nt, Artificial Sequence
  Description of Artificial Sequence: Synthetic oligonucleotide
uguugacugccagauuuug

SEQ ID NO: 2013655 - RNA, 19 nt, Artificial Sequence
  Description of Artificial Sequence: Synthetic oligonucleotide
cauaauuuugagagaaggu

SEQ ID NO: 2013656 - RNA, 19 nt, Artificial Sequence
  Description of Artificial Sequence: Synthetic oligonucleotide
uccaccaaggcugauucaa

SEQ ID NO: 2013657 - RNA, 19 nt, Artificial Sequence
  Description of Artificial Sequence: Synthetic oligonucleotide
aaguccaggucucggcaga

SEQ ID NO: 2013658 - RNA, 19 nt, Artificial Sequence
  Description of Artificial Sequence: Synthetic oligonucleotide
aagugugaaccagggagga

SEQ ID NO: 2013659 - RNA, 19 nt, Artificial Sequence
  Description of Artificial Sequence: Synthetic oligonucleotide
guccagagacaauaccuug

SEQ ID NO: 2013660 - RNA, 19 nt, Artificial Sequence
  Description of Artificial Sequence: Synthetic oligonucleotide
gaaguaggucucuguucag

SEQ ID NO: 2013661 - RNA, 19 nt, Artificial Sequence
  Description of Artificial Sequence: Synthetic oligonucleotide
uggcaggggucccugaacu

SEQ ID NO: 2013662 - RNA, 19 nt, Artificial Sequence
  Description of Artificial Sequence: Synthetic oligonucleotide
gugaccauuccaggaaggg

SEQ ID NO: 2013663 - RNA, 19 nt, Artificial Sequence
  Description of Artificial Sequence: Synthetic oligonucleotide
aguuugauaaagggcuugu

SEQ ID NO: 2013664 - RNA, 19 nt, Artificial Sequence
  Description of Artificial Sequence: Synthetic oligonucleotide
uucagcuuauucaccugau

SEQ ID NO: 2013665 - RNA, 19 nt, Artificial Sequence
  Description of Artificial Sequence: Synthetic oligonucleotide
aggaaguagcucugacaag

SEQ ID NO: 2013666 - RNA, 19 nt, Artificial Sequence
  Description of Artificial Sequence: Synthetic oligonucleotide
augcugaaacaaucaugag

SEQ ID NO: 2013667 - RNA, 19 nt, Artificial Sequence
  Description of Artificial Sequence: Synthetic oligonucleotide
acgauguaugcugaaacaa

SEQ ID NO: 2013668 - RNA, 19 nt, Artificial Sequence
  Description of Artificial Sequence: Synthetic oligonucleotide
uguagugcuuggcaauguu

SEQ ID NO: 2013669 - RNA, 19 nt, Artificial Sequence
  Description of Artificial Sequence: Synthetic oligonucleotide
gagcacguaggaguggcag

SEQ ID NO: 2013670 - RNA, 19 nt, Artificial Sequence
  Description of Artificial Sequence: Synthetic oligonucleotide
cugauucaaucacagcuga

SEQ ID NO: 2013671 - RNA, 19 nt, Artificial Sequence
  Description of Artificial Sequence: Synthetic oligonucleotide
aagccuaggcuugcuaaca

SEQ ID NO: 2013672 - RNA, 19 nt, Artificial Sequence
  Description of Artificial Sequence: Synthetic oligonucleotide
gucuguagcagccaugcua

SEQ ID NO: 2013673 - RNA, 19 nt, Artificial Sequence
  Description of Artificial Sequence: Synthetic oligonucleotide
uuucauaccacggcacuuu

SEQ ID NO: 2013674 - RNA, 19 nt, Artificial Sequence
  Description of Artificial Sequence: Synthetic oligonucleotide
guaggaguggcaggggucc

SEQ ID NO: 2013675 - RNA, 19 nt, Artificial Sequence
  Description of Artificial Sequence: Synthetic oligonucleotide
ggauggugagaacaaaguc

SEQ ID NO: 2013676 - RNA, 19 nt, Artificial Sequence
  Description of Artificial Sequence: Synthetic oligonucleotide
cacgauguaugcugaaaca

SEQ ID NO: 2013677 - RNA, 19 nt, Artificial Sequence
  Description of Artificial Sequence: Synthetic oligonucleotide
agggaacaucucugagggc

SEQ ID NO: 2013678 - RNA, 19 nt, Artificial Sequence
  Description of Artificial Sequence: Synthetic oligonucleotide
auuugccacauaauuuuga

SEQ ID NO: 2013679 - RNA, 19 nt, Artificial Sequence
  Description of Artificial Sequence: Synthetic oligonucleotide
accugauuugugauguuug

SEQ ID NO: 2013680 - RNA, 19 nt, Artificial Sequence
  Description of Artificial Sequence: Synthetic oligonucleotide
agccuaggcuugcuaacag

SEQ ID NO: 2013681 - RNA, 19 nt, Artificial Sequence
  Description of Artificial Sequence: Synthetic oligonucleotide
uccuggagguaugacauau

SEQ ID NO: 2013682 - RNA, 19 nt, Artificial Sequence
  Description of Artificial Sequence: Synthetic oligonucleotide
aggaaucuuugcacaaguc

SEQ ID NO: 2013683 - RNA, 19 nt, Artificial Sequence
  Description of Artificial Sequence: Synthetic oligonucleotide
gugugaaccagggaggaca

SEQ ID NO: 2013684 - RNA, 19 nt, Artificial Sequence
  Description of Artificial Sequence: Synthetic oligonucleotide
ggcucggucaucaaacucc

SEQ ID NO: 2013685 - RNA, 19 nt, Artificial Sequence
  Description of Artificial Sequence: Synthetic oligonucleotide
auucaccaacgucuaccag

SEQ ID NO: 2013686 - RNA, 19 nt, Artificial Sequence
  Description of Artificial Sequence: Synthetic oligonucleotide
aacgucuaccaggcgaagu

SEQ ID NO: 2013687 - RNA, 19 nt, Artificial Sequence
  Description of Artificial Sequence: Synthetic oligonucleotide
ucaguggagcuccgagagc

SEQ ID NO: 2013688 - RNA, 19 nt, Artificial Sequence
  Description of Artificial Sequence: Synthetic oligonucleotide
uauggucuccuggagguau

SEQ ID NO: 2013689 - RNA, 19 nt, Artificial Sequence
  Description of Artificial Sequence: Synthetic oligonucleotide
caaggcgguuaucaucagc

SEQ ID NO: 2013690 - RNA, 19 nt, Artificial Sequence
  Description of Artificial Sequence: Synthetic oligonucleotide
caguuccaugcacacagug

SEQ ID NO: 2013691 - RNA, 19 nt, Artificial Sequence
  Description of Artificial Sequence: Synthetic oligonucleotide
gggucucuuucauaccacg

SEQ ID NO: 2013692 - RNA, 19 nt, Artificial Sequence
  Description of Artificial Sequence: Synthetic oligonucleotide
caccaaggcugauucaauc

SEQ ID NO: 2013693 - RNA, 19 nt, Artificial Sequence
  Description of Artificial Sequence: Synthetic oligonucleotide
cccuuuagccucuugggag

SEQ ID NO: 2013694 - RNA, 19 nt, Artificial Sequence
  Description of Artificial Sequence: Synthetic oligonucleotide
acugggccuccucagagaa

SEQ ID NO: 2013695 - RNA, 19 nt, Artificial Sequence
  Description of Artificial Sequence: Synthetic oligonucleotide
gcugauucaaucacagcug

SEQ ID NO: 2013696 - RNA, 19 nt, Artificial Sequence
  Description of Artificial Sequence: Synthetic oligonucleotide
augcuauggucuccuggag

SEQ ID NO: 2013697 - RNA, 19 nt, Artificial Sequence
  Description of Artificial Sequence: Synthetic oligonucleotide
augacaaggcgguuaucau

SEQ ID NO: 2013698 - RNA, 19 nt, Artificial Sequence
  Description of Artificial Sequence: Synthetic oligonucleotide
gcuguggcaaaucaccuca

SEQ ID NO: 2013699 - RNA, 19 nt, Artificial Sequence
  Description of Artificial Sequence: Synthetic oligonucleotide
uuugaauguccaguuccau

SEQ ID NO: 2013700 - RNA, 19 nt, Artificial Sequence
  Description of Artificial Sequence: Synthetic oligonucleotide
acgucuaccaggcgaagua

SEQ ID NO: 2013701 - RNA, 19 nt, Artificial Sequence
  Description of Artificial Sequence: Synthetic oligonucleotide
uugcaguacacaggcauau

SEQ ID NO: 2013702 - RNA, 19 nt, Artificial Sequence
  Description of Artificial Sequence: Synthetic oligonucleotide
aggaggaaucuuugcacaa

SEQ ID NO: 2013703 - RNA, 19 nt, Artificial Sequence
  Description of Artificial Sequence: Synthetic oligonucleotide
gugucuuaagccuaggcuu

SEQ ID NO: 2013704 - RNA, 19 nt, Artificial Sequence
  Description of Artificial Sequence: Synthetic oligonucleotide
aacuccaaagcaggauuau

SEQ ID NO: 2013705 - RNA, 19 nt, Artificial Sequence
  Description of Artificial Sequence: Synthetic oligonucleotide
agugugaaccagggaggac

SEQ ID NO: 2013706 - RNA, 19 nt, Artificial Sequence
  Description of Artificial Sequence: Synthetic oligonucleotide
ugacugccagauuuugaau

SEQ ID NO: 2013707 - RNA, 19 nt, Artificial Sequence
  Description of Artificial Sequence: Synthetic oligonucleotide
gggccugacaauuggaaca

SEQ ID NO: 2013708 - RNA, 19 nt, Artificial Sequence
  Description of Artificial Sequence: Synthetic oligonucleotide
ccuugcacacauauuugag

SEQ ID NO: 2013709 - RNA, 19 nt, Artificial Sequence
  Description of Artificial Sequence: Synthetic oligonucleotide
agcaagugugaaccaggga

SEQ ID NO: 2013710 - RNA, 19 nt, Artificial Sequence
  Description of Artificial Sequence: Synthetic oligonucleotide
uucauaccacggcacuuua

SEQ ID NO: 2013711 - RNA, 19 nt, Artificial Sequence
  Description of Artificial Sequence: Synthetic oligonucleotide
ggaauaacagccagaauua

SEQ ID NO: 2013712 - RNA, 19 nt, Artificial Sequence
  Description of Artificial Sequence: Synthetic oligonucleotide
uugagagaaggugaccauu

SEQ ID NO: 2013713 - RNA, 19 nt, Artificial Sequence
  Description of Artificial Sequence: Synthetic oligonucleotide
cuaugguacacagccacga

SEQ ID NO: 2013714 - RNA, 19 nt, Artificial Sequence
  Description of Artificial Sequence: Synthetic oligonucleotide
caguuugauaaagggcuug

SEQ ID NO: 2013715 - RNA, 19 nt, Artificial Sequence
  Description of Artificial Sequence: Synthetic oligonucleotide
acguaggaguggcaggggu

SEQ ID NO: 2013716 - RNA, 19 nt, Artificial Sequence
  Description of Artificial Sequence: Synthetic oligonucleotide
uggcucggucaucaaacuc

SEQ ID NO: 2013717 - RNA, 19 nt, Artificial Sequence
  Description of Artificial Sequence: Synthetic oligonucleotide
cagaugccccuuuagccuc

SEQ ID NO: 2013718 - RNA, 19 nt, Artificial Sequence
  Description of Artificial Sequence: Synthetic oligonucleotide
guaugggauaucaaagugu

SEQ ID NO: 2013719 - RNA, 19 nt, Artificial Sequence
  Description of Artificial Sequence: Synthetic oligonucleotide
uguggauggugagaacaaa

SEQ ID NO: 2013720 - RNA, 19 nt, Artificial Sequence
  Description of Artificial Sequence: Synthetic oligonucleotide
uccugcgagaaggaggaau

SEQ ID NO: 2013721 - RNA, 19 nt, Artificial Sequence
  Description of Artificial Sequence: Synthetic oligonucleotide
cucuucacaggaguacuuc

SEQ ID NO: 2013722 - RNA, 19 nt, Artificial Sequence
  Description of Artificial Sequence: Synthetic oligonucleotide
aaaucaccucagggagcac

SEQ ID NO: 2013723 - RNA, 19 nt, Artificial Sequence
  Description of Artificial Sequence: Synthetic oligonucleotide
gaagaagcucugagugagc

SEQ ID NO: 2013724 - RNA, 19 nt, Artificial Sequence
  Description of Artificial Sequence: Synthetic oligonucleotide
aaaguccccugcacaguug

SEQ ID NO: 2013725 - RNA, 19 nt, Artificial Sequence
  Description of Artificial Sequence: Synthetic oligonucleotide
gcagcaagugugaaccagg

SEQ ID NO: 2013726 - RNA, 19 nt, Artificial Sequence
  Description of Artificial Sequence: Synthetic oligonucleotide
gauaaagggcuugucugua

SEQ ID NO: 2013727 - RNA, 19 nt, Artificial Sequence
  Description of Artificial Sequence: Synthetic oligonucleotide
gaauuuucugagugauggu

SEQ ID NO: 2013728 - RNA, 19 nt, Artificial Sequence
  Description of Artificial Sequence: Synthetic oligonucleotide
cagauuuugaauguccagu

SEQ ID NO: 2013729 - RNA, 19 nt, Artificial Sequence
  Description of Artificial Sequence: Synthetic oligonucleotide
uugggagaacuggcuagcc

SEQ ID NO: 2013730 - RNA, 19 nt, Artificial Sequence
  Description of Artificial Sequence: Synthetic oligonucleotide
gguccugcagugugaaggc

SEQ ID NO: 2013731 - RNA, 19 nt, Artificial Sequence
  Description of Artificial Sequence: Synthetic oligonucleotide
agugaacuccaaagcagga

SEQ ID NO: 2013732 - RNA, 19 nt, Artificial Sequence
  Description of Artificial Sequence: Synthetic oligonucleotide
ccacgauguaugcugaaac

SEQ ID NO: 2013733 - RNA, 19 nt, Artificial Sequence
  Description of Artificial Sequence: Synthetic oligonucleotide
gagaauucaccaacgucua

SEQ ID NO: 2013734 - RNA, 19 nt, Artificial Sequence
  Description of Artificial Sequence: Synthetic oligonucleotide
cuguggcaaaucaccucag

SEQ ID NO: 2013735 - RNA, 19 nt, Artificial Sequence
  Description of Artificial Sequence: Synthetic oligonucleotide
uuaggcacaccagguccug

SEQ ID NO: 2013736 - RNA, 19 nt, Artificial Sequence
  Description of Artificial Sequence: Synthetic oligonucleotide
ugucuguagcagccaugcu

SEQ ID NO: 2013737 - RNA, 19 nt, Artificial Sequence
  Description of Artificial Sequence: Synthetic oligonucleotide
caccagguccugcagugug

SEQ ID NO: 2013738 - RNA, 19 nt, Artificial Sequence
  Description of Artificial Sequence: Synthetic oligonucleotide
ggaggaaucuuugcacaag

SEQ ID NO: 2013739 - RNA, 19 nt, Artificial Sequence
  Description of Artificial Sequence: Synthetic oligonucleotide
caaucaugaggaaguagcu

SEQ ID NO: 2013740 - RNA, 19 nt, Artificial Sequence
  Description of Artificial Sequence: Synthetic oligonucleotide
guuugauaaagggcuuguc

SEQ ID NO: 2013741 - RNA, 19 nt, Artificial Sequence
  Description of Artificial Sequence: Synthetic oligonucleotide
ggucaucaaacuccaugac

SEQ ID NO: 2013742 - RNA, 19 nt, Artificial Sequence
  Description of Artificial Sequence: Synthetic oligonucleotide
gaacuccaaagcaggauua

SEQ ID NO: 2013743 - RNA, 19 nt, Artificial Sequence
  Description of Artificial Sequence: Synthetic oligonucleotide
ccaugcuauggucuccugg

SEQ ID NO: 2013744 - RNA, 19 nt, Artificial Sequence
  Description of Artificial Sequence: Synthetic oligonucleotide
cugcacaguugcaguacac

SEQ ID NO: 2013745 - RNA, 19 nt, Artificial Sequence
  Description of Artificial Sequence: Synthetic oligonucleotide
ucuuaagccuaggcuugcu

SEQ ID NO: 2013746 - RNA, 19 nt, Artificial Sequence
  Description of Artificial Sequence: Synthetic oligonucleotide
ggugaccauuccaggaagg

SEQ ID NO: 2013747 - RNA, 19 nt, Artificial Sequence
  Description of Artificial Sequence: Synthetic oligonucleotide
ggcucaguggagcuccgag

SEQ ID NO: 2013748 - RNA, 19 nt, Artificial Sequence
  Description of Artificial Sequence: Synthetic oligonucleotide
cuuuguguggauggugaga

SEQ ID NO: 2013749 - RNA, 19 nt, Artificial Sequence
  Description of Artificial Sequence: Synthetic oligonucleotide
ccugcgagaaggaggaauc

SEQ ID NO: 2013750 - RNA, 19 nt, Artificial Sequence
  Description of Artificial Sequence: Synthetic oligonucleotide
guugacugccagauuuuga

SEQ ID NO: 2013751 - RNA, 19 nt, Artificial Sequence
  Description of Artificial Sequence: Synthetic oligonucleotide
guuccaugaaguccuuugu

SEQ ID NO: 2013752 - RNA, 19 nt, Artificial Sequence
  Description of Artificial Sequence: Synthetic oligonucleotide
ggauuauugagcagcaagu

SEQ ID NO: 2013753 - RNA, 19 nt, Artificial Sequence
  Description of Artificial Sequence: Synthetic oligonucleotide
aggcgaaguaggucucugu

SEQ ID NO: 2013754 - RNA, 19 nt, Artificial Sequence
  Description of Artificial Sequence: Synthetic oligonucleotide
aggucucggcagaaauuac

SEQ ID NO: 2013755 - RNA, 19 nt, Artificial Sequence
  Description of Artificial Sequence: Synthetic oligonucleotide
ggccugacaauuggaacag

SEQ ID NO: 2013756 - RNA, 19 nt, Artificial Sequence
  Description of Artificial Sequence: Synthetic oligonucleotide
uuguguggauggugagaac

SEQ ID NO: 2013757 - RNA, 19 nt, Artificial Sequence
  Description of Artificial Sequence: Synthetic oligonucleotide
agacaauaccuugcacaca

SEQ ID NO: 2013758 - RNA, 19 nt, Artificial Sequence
  Description of Artificial Sequence: Synthetic oligonucleotide
cuaccaggcgaaguagguc

SEQ ID NO: 2013759 - RNA, 19 nt, Artificial Sequence
  Description of Artificial Sequence: Synthetic oligonucleotide
gcuaugguacacagccacg

SEQ ID NO: 2013760 - RNA, 19 nt, Artificial Sequence
  Description of Artificial Sequence: Synthetic oligonucleotide
caguggaauaacagccaga

SEQ ID NO: 2013761 - RNA, 19 nt, Artificial Sequence
  Description of Artificial Sequence: Synthetic oligonucleotide
gcuguugacugccagauuu

SEQ ID NO: 2013762 - RNA, 19 nt, Artificial Sequence
  Description of Artificial Sequence: Synthetic oligonucleotide
gggaacaucucugagggcu

SEQ ID NO: 2013763 - RNA, 19 nt, Artificial Sequence
  Description of Artificial Sequence: Synthetic oligonucleotide
uggggcacugugucucaac

SEQ ID NO: 2013764 - RNA, 19 nt, Artificial Sequence
  Description of Artificial Sequence: Synthetic oligonucleotide
gcuauggucuccuggaggu

SEQ ID NO: 2013765 - RNA, 19 nt, Artificial Sequence
  Description of Artificial Sequence: Synthetic oligonucleotide
gucuuaagccuaggcuugc

SEQ ID NO: 2013766 - RNA, 19 nt, Artificial Sequence
  Description of Artificial Sequence: Synthetic oligonucleotide
ccacauaauuuugagagaa

SEQ ID NO: 2013767 - RNA, 19 nt, Artificial Sequence
  Description of Artificial Sequence: Synthetic oligonucleotide
cacuuuaggcacaccaggu

SEQ ID NO: 2013768 - RNA, 19 nt, Artificial Sequence
  Description of Artificial Sequence: Synthetic oligonucleotide
cgaaguaggucucuguuca

SEQ ID NO: 2013769 - RNA, 19 nt, Artificial Sequence
  Description of Artificial Sequence: Synthetic oligonucleotide
ggauaucaaagugucuuaa

SEQ ID NO: 2013770 - RNA, 19 nt, Artificial Sequence
  Description of Artificial Sequence: Synthetic oligonucleotide
cauaugggucucuuucaua

SEQ ID NO: 2013771 - RNA, 19 nt, Artificial Sequence
  Description of Artificial Sequence: Synthetic oligonucleotide
aucaccucagggagcacgu

SEQ ID NO: 2013772 - RNA, 19 nt, Artificial Sequence
  Description of Artificial Sequence: Synthetic oligonucleotide
cacaguggcucggucauca

SEQ ID NO: 2013773 - RNA, 19 nt, Artificial Sequence
  Description of Artificial Sequence: Synthetic oligonucleotide
caugcacacaguggaauaa

SEQ ID NO: 2013774 - RNA, 19 nt, Artificial Sequence
  Description of Artificial Sequence: Synthetic oligonucleotide
gcgaaguaggucucuguuc

SEQ ID NO: 2013775 - RNA, 19 nt, Artificial Sequence
  Description of Artificial Sequence: Synthetic oligonucleotide
caggucucggcagaaauua

SEQ ID NO: 2013776 - RNA, 19 nt, Artificial Sequence
  Description of Artificial Sequence: Synthetic oligonucleotide
uuuagccucuugggagaac

SEQ ID NO: 2013777 - RNA, 19 nt, Artificial Sequence
  Description of Artificial Sequence: Synthetic oligonucleotide
cuuaagccuaggcuugcua

SEQ ID NO: 2013778 - RNA, 19 nt, Artificial Sequence
  Description of Artificial Sequence: Synthetic oligonucleotide
uggucuccuggagguauga

SEQ ID NO: 2013779 - RNA, 19 nt, Artificial Sequence
  Description of Artificial Sequence: Synthetic oligonucleotide
acuccaaagcaggauuauu

SEQ ID NO: 2013780 - RNA, 19 nt, Artificial Sequence
  Description of Artificial Sequence: Synthetic oligonucleotide
guggcaggggucccugaac

SEQ ID NO: 2013781 - RNA, 19 nt, Artificial Sequence
  Description of Artificial Sequence: Synthetic oligonucleotide
gccacauaauuuugagaga

SEQ ID NO: 2013782 - RNA, 19 nt, Artificial Sequence
  Description of Artificial Sequence: Synthetic oligonucleotide
gagcagcaagugugaacca

SEQ ID NO: 2013783 - RNA, 19 nt, Artificial Sequence
  Description of Artificial Sequence: Synthetic oligonucleotide
augggauaucaaagugucu

SEQ ID NO: 2013784 - RNA, 19 nt, Artificial Sequence
  Description of Artificial Sequence: Synthetic oligonucleotide
accaggcgaaguaggucuc

SEQ ID NO: 2013785 - RNA, 19 nt, Artificial Sequence
  Description of Artificial Sequence: Synthetic oligonucleotide
gggagcacguaggaguggc

SEQ ID NO: 2013786 - RNA, 19 nt, Artificial Sequence
  Description of Artificial Sequence: Synthetic oligonucleotide
ccuuuguguggauggugag

SEQ ID NO: 2013787 - RNA, 19 nt, Artificial Sequence
  Description of Artificial Sequence: Synthetic oligonucleotide
gcagccaugcuauggucuc

SEQ ID NO: 2013788 - RNA, 19 nt, Artificial Sequence
  Description of Artificial Sequence: Synthetic oligonucleotide
guagcucugacaagaggcu

SEQ ID NO: 2013789 - RNA, 19 nt, Artificial Sequence
  Description of Artificial Sequence: Synthetic oligonucleotide
caugaggaaguagcucuga

SEQ ID NO: 2013790 - RNA, 19 nt, Artificial Sequence
  Description of Artificial Sequence: Synthetic oligonucleotide
guugcaguacacaggcaua

SEQ ID NO: 2013791 - RNA, 19 nt, Artificial Sequence
  Description of Artificial Sequence: Synthetic oligonucleotide
gggauaucaaagugucuua

SEQ ID NO: 2013792 - RNA, 19 nt, Artificial Sequence
  Description of Artificial Sequence: Synthetic oligonucleotide
ugcuguugacugccagauu

SEQ ID NO: 2013793 - RNA, 19 nt, Artificial Sequence
  Description of Artificial Sequence: Synthetic oligonucleotide
gaauggccccauccugcga

SEQ ID NO: 2013794 - RNA, 19 nt, Artificial Sequence
  Description of Artificial Sequence: Synthetic oligonucleotide
gggcuugucuguagcagcc

SEQ ID NO: 2013795 - RNA, 19 nt, Artificial Sequence
  Description of Artificial Sequence: Synthetic oligonucleotide
gcuuauucaccugauuugu

SEQ ID NO: 2013796 - RNA, 19 nt, Artificial Sequence
  Description of Artificial Sequence: Synthetic oligonucleotide
cggucaucaaacuccauga

SEQ ID NO: 2013797 - RNA, 19 nt, Artificial Sequence
  Description of Artificial Sequence: Synthetic oligonucleotide
agaggcugccuguggcaaa

SEQ ID NO: 2013798 - RNA, 19 nt, Artificial Sequence
  Description of Artificial Sequence: Synthetic oligonucleotide
gggaggacagggaacaucu

SEQ ID NO: 2013799 - RNA, 19 nt, Artificial Sequence
  Description of Artificial Sequence: Synthetic oligonucleotide
ucaccugauuugugauguu

SEQ ID NO: 2013800 - RNA, 19 nt, Artificial Sequence
  Description of Artificial Sequence: Synthetic oligonucleotide
cagugugaaggccaucagu

SEQ ID NO: 2013801 - RNA, 19 nt, Artificial Sequence
  Description of Artificial Sequence: Synthetic oligonucleotide
aggcgguuaucaucagcuu

SEQ ID NO: 2013802 - RNA, 19 nt, Artificial Sequence
  Description of Artificial Sequence: Synthetic oligonucleotide
cacggcacuuuaggcacac

SEQ ID NO: 2013803 - RNA, 19 nt, Artificial Sequence
  Description of Artificial Sequence: Synthetic oligonucleotide
acaggcauaugggucucuu

SEQ ID NO: 2013804 - RNA, 19 nt, Artificial Sequence
  Description of Artificial Sequence: Synthetic oligonucleotide
augacauauuguagugcuu

SEQ ID NO: 2013805 - RNA, 19 nt, Artificial Sequence
  Description of Artificial Sequence: Synthetic oligonucleotide
uccgagagccugugacuuu

SEQ ID NO: 2013806 - RNA, 19 nt, Artificial Sequence
  Description of Artificial Sequence: Synthetic oligonucleotide
caccaacgucuaccaggcg

SEQ ID NO: 2013807 - RNA, 19 nt, Artificial Sequence
  Description of Artificial Sequence: Synthetic oligonucleotide
gcucaguggagcuccgaga

SEQ ID NO: 2013808 - RNA, 19 nt, Artificial Sequence
  Description of Artificial Sequence: Synthetic oligonucleotide
cauuccaggaagggcucca

SEQ ID NO: 2013809 - RNA, 19 nt, Artificial Sequence
  Description of Artificial Sequence: Synthetic oligonucleotide
agccacgauguaugcugaa

SEQ ID NO: 2013810 - RNA, 19 nt, Artificial Sequence
  Description of Artificial Sequence: Synthetic oligonucleotide
cagccacgauguaugcuga

SEQ ID NO: 2013811 - RNA, 19 nt, Artificial Sequence
  Description of Artificial Sequence: Synthetic oligonucleotide
auggccccauccugcgaga

SEQ ID NO: 2013812 - RNA, 19 nt, Artificial Sequence
  Description of Artificial Sequence: Synthetic oligonucleotide
caacgucuaccaggcgaag

SEQ ID NO: 2013813 - RNA, 19 nt, Artificial Sequence
  Description of Artificial Sequence: Synthetic oligonucleotide
ggcaggggucccugaacug

SEQ ID NO: 2013814 - RNA, 19 nt, Artificial Sequence
  Description of Artificial Sequence: Synthetic oligonucleotide
ccaacgucuaccaggcgaa

SEQ ID NO: 2013815 - RNA, 19 nt, Artificial Sequence
  Description of Artificial Sequence: Synthetic oligonucleotide
gugaacuccaaagcaggau

SEQ ID NO: 2013816 - RNA, 19 nt, Artificial Sequence
  Description of Artificial Sequence: Synthetic oligonucleotide
gggcacugugucucaacuc

SEQ ID NO: 2013817 - RNA, 19 nt, Artificial Sequence
  Description of Artificial Sequence: Synthetic oligonucleotide
caguggcucggucaucaaa

SEQ ID NO: 2013818 - RNA, 19 nt, Artificial Sequence
  Description of Artificial Sequence: Synthetic oligonucleotide
gcuugcuaacaguuugaua

SEQ ID NO: 2013819 - RNA, 19 nt, Artificial Sequence
  Description of Artificial Sequence: Synthetic oligonucleotide
cuaggcuugcuaacaguuu

SEQ ID NO: 2013820 - RNA, 19 nt, Artificial Sequence
  Description of Artificial Sequence: Synthetic oligonucleotide
guggcucggucaucaaacu

SEQ ID NO: 2013821 - RNA, 19 nt, Artificial Sequence
  Description of Artificial Sequence: Synthetic oligonucleotide
cuuuagccucuugggagaa

SEQ ID NO: 2013822 - RNA, 19 nt, Artificial Sequence
  Description of Artificial Sequence: Synthetic oligonucleotide
caguugcaguacacaggca

SEQ ID NO: 2013823 - RNA, 19 nt, Artificial Sequence
  Description of Artificial Sequence: Synthetic oligonucleotide
gugugaaggccaucaguuu

SEQ ID NO: 2013824 - RNA, 19 nt, Artificial Sequence
  Description of Artificial Sequence: Synthetic oligonucleotide
cguaggaguggcagggguc

SEQ ID NO: 2013825 - RNA, 19 nt, Artificial Sequence
  Description of Artificial Sequence: Synthetic oligonucleotide
cugagggcucaguggagcu

SEQ ID NO: 2013826 - RNA, 19 nt, Artificial Sequence
  Description of Artificial Sequence: Synthetic oligonucleotide
ggcgaaguaggucucuguu

SEQ ID NO: 2013827 - RNA, 19 nt, Artificial Sequence
  Description of Artificial Sequence: Synthetic oligonucleotide
ucccugaacugggccuccu

SEQ ID NO: 2013828 - RNA, 19 nt, Artificial Sequence
  Description of Artificial Sequence: Synthetic oligonucleotide
acaauaccuugcacacaua

SEQ ID NO: 2013829 - RNA, 19 nt, Artificial Sequence
  Description of Artificial Sequence: Synthetic oligonucleotide
ccugcacaguugcaguaca

SEQ ID NO: 2013830 - RNA, 19 nt, Artificial Sequence
  Description of Artificial Sequence: Synthetic oligonucleotide
cuguugacugccagauuuu

SEQ ID NO: 2013831 - RNA, 19 nt, Artificial Sequence
  Description of Artificial Sequence: Synthetic oligonucleotide
ccccuuuagccucuuggga

SEQ ID NO: 2013832 - RNA, 19 nt, Artificial Sequence
  Description of Artificial Sequence: Synthetic oligonucleotide
caauuggaacagagccacu

SEQ ID NO: 2013833 - RNA, 19 nt, Artificial Sequence
  Description of Artificial Sequence: Synthetic oligonucleotide
ccgagagccugugacuuuc

SEQ ID NO: 2013834 - RNA, 19 nt, Artificial Sequence
  Description of Artificial Sequence: Synthetic oligonucleotide
gugagcucauuugccacau

SEQ ID NO: 2013835 - RNA, 19 nt, Artificial Sequence
  Description of Artificial Sequence: Synthetic oligonucleotide
agcucugagugagcucauu

SEQ ID NO: 2013836 - RNA, 19 nt, Artificial Sequence
  Description of Artificial Sequence: Synthetic oligonucleotide
ccauuccaggaagggcucc

SEQ ID NO: 2013837 - RNA, 19 nt, Artificial Sequence
  Description of Artificial Sequence: Synthetic oligonucleotide
gccacgauguaugcugaaa

SEQ ID NO: 2013838 - RNA, 19 nt, Artificial Sequence
  Description of Artificial Sequence: Synthetic oligonucleotide
gcucugagugagcucauuu

SEQ ID NO: 2013839 - RNA, 19 nt, Artificial Sequence
  Description of Artificial Sequence: Synthetic oligonucleotide
cuccuggagguaugacaua

SEQ ID NO: 2013840 - RNA, 19 nt, Artificial Sequence
  Description of Artificial Sequence: Synthetic oligonucleotide
gccaugcuauggucuccug

SEQ ID NO: 2013841 - RNA, 19 nt, Artificial Sequence
  Description of Artificial Sequence: Synthetic oligonucleotide
gguacacagccacgaugua

SEQ ID NO: 2013842 - RNA, 19 nt, Artificial Sequence
  Description of Artificial Sequence: Synthetic oligonucleotide
cgauguaugcugaaacaau

SEQ ID NO: 2013843 - RNA, 19 nt, Artificial Sequence
  Description of Artificial Sequence: Synthetic oligonucleotide
cuccgagagccugugacuu

SEQ ID NO: 2013844 - RNA, 19 nt, Artificial Sequence
  Description of Artificial Sequence: Synthetic oligonucleotide
gccuaggcuugcuaacagu

SEQ ID NO: 2013845 - RNA, 19 nt, Artificial Sequence
  Description of Artificial Sequence: Synthetic oligonucleotide
cugcgagaaggaggaaucu

SEQ ID NO: 2013846 - RNA, 19 nt, Artificial Sequence
  Description of Artificial Sequence: Synthetic oligonucleotide
cuauggucuccuggaggua

SEQ ID NO: 2013847 - RNA, 19 nt, Artificial Sequence
  Description of Artificial Sequence: Synthetic oligonucleotide
ggaggacagggaacaucuc

SEQ ID NO: 2013848 - RNA, 19 nt, Artificial Sequence
  Description of Artificial Sequence: Synthetic oligonucleotide
ggagcacguaggaguggca

SEQ ID NO: 2013849 - RNA, 19 nt, Artificial Sequence
  Description of Artificial Sequence: Synthetic oligonucleotide
ggcuugcuaacaguuugau

SEQ ID NO: 2013850 - RNA, 19 nt, Artificial Sequence
  Description of Artificial Sequence: Synthetic oligonucleotide
gguuaucaucagcuuccuu

SEQ ID NO: 2013851 - RNA, 19 nt, Artificial Sequence
  Description of Artificial Sequence: Synthetic oligonucleotide
auccugcgagaaggaggaa

SEQ ID NO: 2013852 - RNA, 19 nt, Artificial Sequence
  Description of Artificial Sequence: Synthetic oligonucleotide
cucggucaucaaacuccau

SEQ ID NO: 2013853 - RNA, 19 nt, Artificial Sequence
  Description of Artificial Sequence: Synthetic oligonucleotide
ccccauccugcgagaagga

SEQ ID NO: 2013854 - RNA, 19 nt, Artificial Sequence
  Description of Artificial Sequence: Synthetic oligonucleotide
ccaugacaaggcgguuauc

SEQ ID NO: 2013855 - RNA, 19 nt, Artificial Sequence
  Description of Artificial Sequence: Synthetic oligonucleotide
guacuuccuggggcacugu

SEQ ID NO: 2013856 - RNA, 19 nt, Artificial Sequence
  Description of Artificial Sequence: Synthetic oligonucleotide
ccccugcacaguugcagua

SEQ ID NO: 2013857 - RNA, 19 nt, Artificial Sequence
  Description of Artificial Sequence: Synthetic oligonucleotide
cugggccuccucagagaau

SEQ ID NO: 2013858 - RNA, 19 nt, Artificial Sequence
  Description of Artificial Sequence: Synthetic oligonucleotide
gggccuccucagagaauuc

SEQ ID NO: 2013859 - RNA, 19 nt, Artificial Sequence
  Description of Artificial Sequence: Synthetic oligonucleotide
cacaggcauaugggucucu

SEQ ID NO: 2013860 - RNA, 19 nt, Artificial Sequence
  Description of Artificial Sequence: Synthetic oligonucleotide
gaugccccuuuagccucuu

SEQ ID NO: 2013861 - RNA, 19 nt, Artificial Sequence
  Description of Artificial Sequence: Synthetic oligonucleotide
gggcucaguggagcuccga

SEQ ID NO: 2013862 - RNA, 19 nt, Artificial Sequence
  Description of Artificial Sequence: Synthetic oligonucleotide
ccuggagguaugacauauu

SEQ ID NO: 2013863 - RNA, 19 nt, Artificial Sequence
  Description of Artificial Sequence: Synthetic oligonucleotide
ccaggcgaaguaggucucu

SEQ ID NO: 2013864 - RNA, 19 nt, Artificial Sequence
  Description of Artificial Sequence: Synthetic oligonucleotide
ggucucuguucagcuuauu

SEQ ID NO: 2013865 - RNA, 19 nt, Artificial Sequence
  Description of Artificial Sequence: Synthetic oligonucleotide
cgguuaucaucagcuuccu

SEQ ID NO: 2013866 - RNA, 19 nt, Artificial Sequence
  Description of Artificial Sequence: Synthetic oligonucleotide
uguaaaauaacuuccgggg

SEQ ID NO: 2013867 - RNA, 19 nt, Artificial Sequence
  Description of Artificial Sequence: Synthetic oligonucleotide
ucuacaaacacaaacagac

SEQ ID NO: 2013868 - RNA, 19 nt, Artificial Sequence
  Description of Artificial Sequence: Synthetic oligonucleotide
aaauacauaagcagaggcc

SEQ ID NO: 2013869 - RNA, 19 nt, Artificial Sequence
  Description of Artificial Sequence: Synthetic oligonucleotide
uuuagcugaaacccaaagg

SEQ ID NO: 2013870 - RNA, 19 nt, Artificial Sequence
  Description of Artificial Sequence: Synthetic oligonucleotide
aaacaaauaauggaaaaga

SEQ ID NO: 2013871 - RNA, 19 nt, Artificial Sequence
  Description of Artificial Sequence: Synthetic oligonucleotide
auguaaaauaacuuccggg

SEQ ID NO: 2013872 - RNA, 19 nt, Artificial Sequence
  Description of Artificial Sequence: Synthetic oligonucleotide
agagcauaugcucaucugc

SEQ ID NO: 2013873 - RNA, 19 nt, Artificial Sequence
  Description of Artificial Sequence: Synthetic oligonucleotide
aauacauaagcagaggccu

SEQ ID NO: 2013874 - RNA, 19 nt, Artificial Sequence
  Description of Artificial Sequence: Synthetic oligonucleotide
guaguuguaauauggcugg

SEQ ID NO: 2013875 - RNA, 19 nt, Artificial Sequence
  Description of Artificial Sequence: Synthetic oligonucleotide
ugucuacaaacacaaacag

SEQ ID NO: 2013876 - RNA, 19 nt, Artificial Sequence
  Description of Artificial Sequence: Synthetic oligonucleotide
agcauguaaaauaacuucc

SEQ ID NO: 2013877 - RNA, 19 nt, Artificial Sequence
  Description of Artificial Sequence: Synthetic oligonucleotide
uauuauggucagcuuaggg

SEQ ID NO: 2013878 - RNA, 19 nt, Artificial Sequence
  Description of Artificial Sequence: Synthetic oligonucleotide
aacccaaaggcacccaaac

SEQ ID NO: 2013879 - RNA, 19 nt, Artificial Sequence
  Description of Artificial Sequence: Synthetic oligonucleotide
aaggggucaacccaaacca

SEQ ID NO: 2013880 - RNA, 19 nt, Artificial Sequence
  Description of Artificial Sequence: Synthetic oligonucleotide
auuauggucagcuuaggga

SEQ ID NO: 2013881 - RNA, 19 nt, Artificial Sequence
  Description of Artificial Sequence: Synthetic oligonucleotide
agugaaacggcccuucagg

SEQ ID NO: 2013882 - RNA, 19 nt, Artificial Sequence
  Description of Artificial Sequence: Synthetic oligonucleotide
uguacugcgagggacacgg

SEQ ID NO: 2013883 - RNA, 19 nt, Artificial Sequence
  Description of Artificial Sequence: Synthetic oligonucleotide
caaauacauaagcagaggc

SEQ ID NO: 2013884 - RNA, 19 nt, Artificial Sequence
  Description of Artificial Sequence: Synthetic oligonucleotide
uuuuagcugaaacccaaag

SEQ ID NO: 2013885 - RNA, 19 nt, Artificial Sequence
  Description of Artificial Sequence: Synthetic oligonucleotide
uaucccacuucuuacagcc

SEQ ID NO: 2013886 - RNA, 19 nt, Artificial Sequence
  Description of Artificial Sequence: Synthetic oligonucleotide
uuuucacagacucuggaac

SEQ ID NO: 2013887 - RNA, 19 nt, Artificial Sequence
  Description of Artificial Sequence: Synthetic oligonucleotide
cucgcaaauacauaagcag

SEQ ID NO: 2013888 - RNA, 19 nt, Artificial Sequence
  Description of Artificial Sequence: Synthetic oligonucleotide
uaauauggcugguugauga

SEQ ID NO: 2013889 - RNA, 19 nt, Artificial Sequence
  Description of Artificial Sequence: Synthetic oligonucleotide
aaaauaacuuccggggcac

SEQ ID NO: 2013890 - RNA, 19 nt, Artificial Sequence
  Description of Artificial Sequence: Synthetic oligonucleotide
uaagcgaucccaauaagaa

SEQ ID NO: 2013891 - RNA, 19 nt, Artificial Sequence
  Description of Artificial Sequence: Synthetic oligonucleotide
cucguaauuccucagugcg

SEQ ID NO: 2013892 - RNA, 19 nt, Artificial Sequence
  Description of Artificial Sequence: Synthetic oligonucleotide
ucuuugauagcgcuguacu

SEQ ID NO: 2013893 - RNA, 19 nt, Artificial Sequence
  Description of Artificial Sequence: Synthetic oligonucleotide
uuugauagcgcuguacugc

SEQ ID NO: 2013894 - RNA, 19 nt, Artificial Sequence
  Description of Artificial Sequence: Synthetic oligonucleotide
aaagaaccaaguccuccgg

SEQ ID NO: 2013895 - RNA, 19 nt, Artificial Sequence
  Description of Artificial Sequence: Synthetic oligonucleotide
uuauggucagcuuagggaa

SEQ ID NO: 2013896 - RNA, 19 nt, Artificial Sequence
  Description of Artificial Sequence: Synthetic oligonucleotide
uugcuaugggaccuggugg

SEQ ID NO: 2013897 - RNA, 19 nt, Artificial Sequence
  Description of Artificial Sequence: Synthetic oligonucleotide
ucauaagcgaucccaauaa

SEQ ID NO: 2013898 - RNA, 19 nt, Artificial Sequence
  Description of Artificial Sequence: Synthetic oligonucleotide
gaaacggcccuucagggag

SEQ ID NO: 2013899 - RNA, 19 nt, Artificial Sequence
  Description of Artificial Sequence: Synthetic oligonucleotide
guuguaauauggcugguug

SEQ ID NO: 2013900 - RNA, 19 nt, Artificial Sequence
  Description of Artificial Sequence: Synthetic oligonucleotide
ucgcaaauacauaagcaga

SEQ ID NO: 2013901 - RNA, 19 nt, Artificial Sequence
  Description of Artificial Sequence: Synthetic oligonucleotide
cauguaaaauaacuuccgg

SEQ ID NO: 2013902 - RNA, 19 nt, Artificial Sequence
  Description of Artificial Sequence: Synthetic oligonucleotide
ugaucuuguuuccugcucc

SEQ ID NO: 2013903 - RNA, 19 nt, Artificial Sequence
  Description of Artificial Sequence: Synthetic oligonucleotide
ucagcuuagggaacuugcg

SEQ ID NO: 2013904 - RNA, 19 nt, Artificial Sequence
  Description of Artificial Sequence: Synthetic oligonucleotide
uugucaagaagaccuucgg

SEQ ID NO: 2013905 - RNA, 19 nt, Artificial Sequence
  Description of Artificial Sequence: Synthetic oligonucleotide
aacgcagucugugaccagc

SEQ ID NO: 2013906 - RNA, 19 nt, Artificial Sequence
  Description of Artificial Sequence: Synthetic oligonucleotide
aagaaccaaguccuccggg

SEQ ID NO: 2013907 - RNA, 19 nt, Artificial Sequence
  Description of Artificial Sequence: Synthetic oligonucleotide
uugauagcgcuguacugcg

SEQ ID NO: 2013908 - RNA, 19 nt, Artificial Sequence
  Description of Artificial Sequence: Synthetic oligonucleotide
gacucgcaaauacauaagc

SEQ ID NO: 2013909 - RNA, 19 nt, Artificial Sequence
  Description of Artificial Sequence: Synthetic oligonucleotide
agucacauugucaagaaga

SEQ ID NO: 2013910 - RNA, 19 nt, Artificial Sequence
  Description of Artificial Sequence: Synthetic oligonucleotide
gacucuggaacucggcugg

SEQ ID NO: 2013911 - RNA, 19 nt, Artificial Sequence
  Description of Artificial Sequence: Synthetic oligonucleotide
uacucguaauuccucagug

SEQ ID NO: 2013912 - RNA, 19 nt, Artificial Sequence
  Description of Artificial Sequence: Synthetic oligonucleotide
gauagcgcuguacugcgag

SEQ ID NO: 2013913 - RNA, 19 nt, Artificial Sequence
  Description of Artificial Sequence: Synthetic oligonucleotide
uuuccuucauaagcgaucc

SEQ ID NO: 2013914 - RNA, 19 nt, Artificial Sequence
  Description of Artificial Sequence: Synthetic oligonucleotide
auggcugaaacgcagucug

SEQ ID NO: 2013915 - RNA, 19 nt, Artificial Sequence
  Description of Artificial Sequence: Synthetic oligonucleotide
cagcauguaaaauaacuuc

SEQ ID NO: 2013916 - RNA, 19 nt, Artificial Sequence
  Description of Artificial Sequence: Synthetic oligonucleotide
guugugaugaugugcuucc

SEQ ID NO: 2013917 - RNA, 19 nt, Artificial Sequence
  Description of Artificial Sequence: Synthetic oligonucleotide
aagagcauaugcucaucug

SEQ ID NO: 2013918 - RNA, 19 nt, Artificial Sequence
  Description of Artificial Sequence: Synthetic oligonucleotide
aaaccacaaggucuuccuc

SEQ ID NO: 2013919 - RNA, 19 nt, Artificial Sequence
  Description of Artificial Sequence: Synthetic oligonucleotide
uucauaagcgaucccaaua

SEQ ID NO: 2013920 - RNA, 19 nt, Artificial Sequence
  Description of Artificial Sequence: Synthetic oligonucleotide
aaguaucccacuucuuaca

SEQ ID NO: 2013921 - RNA, 19 nt, Artificial Sequence
  Description of Artificial Sequence: Synthetic oligonucleotide
uucgguguauuccuuggug

SEQ ID NO: 2013922 - RNA, 19 nt, Artificial Sequence
  Description of Artificial Sequence: Synthetic oligonucleotide
aguaucccacuucuuacag

SEQ ID NO: 2013923 - RNA, 19 nt, Artificial Sequence
  Description of Artificial Sequence: Synthetic oligonucleotide
ucguaauuccucagugcgg

SEQ ID NO: 2013924 - RNA, 19 nt, Artificial Sequence
  Description of Artificial Sequence: Synthetic oligonucleotide
aggacucgcaaauacauaa

SEQ ID NO: 2013925 - RNA, 19 nt, Artificial Sequence
  Description of Artificial Sequence: Synthetic oligonucleotide
agcuuagggaacuugcgug

SEQ ID NO: 2013926 - RNA, 19 nt, Artificial Sequence
  Description of Artificial Sequence: Synthetic oligonucleotide
ugguaguuguaauauggcu

SEQ ID NO: 2013927 - RNA, 19 nt, Artificial Sequence
  Description of Artificial Sequence: Synthetic oligonucleotide
acguugucgggguucaugg

SEQ ID NO: 2013928 - RNA, 19 nt, Artificial Sequence
  Description of Artificial Sequence: Synthetic oligonucleotide
aauuccucagugcggccag

SEQ ID NO: 2013929 - RNA, 19 nt, Artificial Sequence
  Description of Artificial Sequence: Synthetic oligonucleotide
ugagugagugaaacggccc

SEQ ID NO: 2013930 - RNA, 19 nt, Artificial Sequence
  Description of Artificial Sequence: Synthetic oligonucleotide
caaacagacaagugccggg

SEQ ID NO: 2013931 - RNA, 19 nt, Artificial Sequence
  Description of Artificial Sequence: Synthetic oligonucleotide
ugaaacgcagucugugacc

SEQ ID NO: 2013932 - RNA, 19 nt, Artificial Sequence
  Description of Artificial Sequence: Synthetic oligonucleotide
acccaaaggcacccaaacc

SEQ ID NO: 2013933 - RNA, 19 nt, Artificial Sequence
  Description of Artificial Sequence: Synthetic oligonucleotide
ccugguaguuguaauaugg

SEQ ID NO: 2013934 - RNA, 19 nt, Artificial Sequence
  Description of Artificial Sequence: Synthetic oligonucleotide
agcauaugcucaucugcac

SEQ ID NO: 2013935 - RNA, 19 nt, Artificial Sequence
  Description of Artificial Sequence: Synthetic oligonucleotide
cucagugcggccaggaccc

SEQ ID NO: 2013936 - RNA, 19 nt, Artificial Sequence
  Description of Artificial Sequence: Synthetic oligonucleotide
ugugaugaugugcuuccca

SEQ ID NO: 2013937 - RNA, 19 nt, Artificial Sequence
  Description of Artificial Sequence: Synthetic oligonucleotide
guugcuaugggaccuggug

SEQ ID NO: 2013938 - RNA, 19 nt, Artificial Sequence
  Description of Artificial Sequence: Synthetic oligonucleotide
acaaauaauggaaaagaaa

SEQ ID NO: 2013939 - RNA, 19 nt, Artificial Sequence
  Description of Artificial Sequence: Synthetic oligonucleotide
agccaggacucgcaaauac

SEQ ID NO: 2013940 - RNA, 19 nt, Artificial Sequence
  Description of Artificial Sequence: Synthetic oligonucleotide
agaacuccccagauggucc

SEQ ID NO: 2013941 - RNA, 19 nt, Artificial Sequence
  Description of Artificial Sequence: Synthetic oligonucleotide
cugucuugaaaacaaauaa

SEQ ID NO: 2013942 - RNA, 19 nt, Artificial Sequence
  Description of Artificial Sequence: Synthetic oligonucleotide
augaucuuguuuccugcuc

SEQ ID NO: 2013943 - RNA, 19 nt, Artificial Sequence
  Description of Artificial Sequence: Synthetic oligonucleotide
uuguaauauggcugguuga

SEQ ID NO: 2013944 - RNA, 19 nt, Artificial Sequence
  Description of Artificial Sequence: Synthetic oligonucleotide
uguaauauggcugguugau

SEQ ID NO: 2013945 - RNA, 19 nt, Artificial Sequence
  Description of Artificial Sequence: Synthetic oligonucleotide
aguacucguaauuccucag

SEQ ID NO: 2013946 - RNA, 19 nt, Artificial Sequence
  Description of Artificial Sequence: Synthetic oligonucleotide
gguaguuguaauauggcug

SEQ ID NO: 2013947 - RNA, 19 nt, Artificial Sequence
  Description of Artificial Sequence: Synthetic oligonucleotide
acagccucggauccuacag

SEQ ID NO: 2013948 - RNA, 19 nt, Artificial Sequence
  Description of Artificial Sequence: Synthetic oligonucleotide
aaucagcuggaugaucuug

SEQ ID NO: 2013949 - RNA, 19 nt, Artificial Sequence
  Description of Artificial Sequence: Synthetic oligonucleotide
ucggauccuacagagaaac

SEQ ID NO: 2013950 - RNA, 19 nt, Artificial Sequence
  Description of Artificial Sequence: Synthetic oligonucleotide
uaguacucguaauuccuca

SEQ ID NO: 2013951 - RNA, 19 nt, Artificial Sequence
  Description of Artificial Sequence: Synthetic oligonucleotide
ucccacagcauguaaaaua

SEQ ID NO: 2013952 - RNA, 19 nt, Artificial Sequence
  Description of Artificial Sequence: Synthetic oligonucleotide
aauauggcugguugaugau

SEQ ID NO: 2013953 - RNA, 19 nt, Artificial Sequence
  Description of Artificial Sequence: Synthetic oligonucleotide
ugucugucagcuucccucc

SEQ ID NO: 2013954 - RNA, 19 nt, Artificial Sequence
  Description of Artificial Sequence: Synthetic oligonucleotide
cuuugauagcgcuguacug

SEQ ID NO: 2013955 - RNA, 19 nt, Artificial Sequence
  Description of Artificial Sequence: Synthetic oligonucleotide
aacucggcuggcguaguac

SEQ ID NO: 2013956 - RNA, 19 nt, Artificial Sequence
  Description of Artificial Sequence: Synthetic oligonucleotide
cccagaacuccccagaugg

SEQ ID NO: 2013957 - RNA, 19 nt, Artificial Sequence
  Description of Artificial Sequence: Synthetic oligonucleotide
agaaccaaguccuccgggu

SEQ ID NO: 2013958 - RNA, 19 nt, Artificial Sequence
  Description of Artificial Sequence: Synthetic oligonucleotide
ggauccuacagagaaaccc

SEQ ID NO: 2013959 - RNA, 19 nt, Artificial Sequence
  Description of Artificial Sequence: Synthetic oligonucleotide
ugccucuuuuagcugaaac

SEQ ID NO: 2013960 - RNA, 19 nt, Artificial Sequence
  Description of Artificial Sequence: Synthetic oligonucleotide
agacucuggaacucggcug

SEQ ID NO: 2013961 - RNA, 19 nt, Artificial Sequence
  Description of Artificial Sequence: Synthetic oligonucleotide
gggugagugagugaaacgg

SEQ ID NO: 2013962 - RNA, 19 nt, Artificial Sequence
  Description of Artificial Sequence: Synthetic oligonucleotide
uuccggggcacaaguaucc

SEQ ID NO: 2013963 - RNA, 19 nt, Artificial Sequence
  Description of Artificial Sequence: Synthetic oligonucleotide
uaacuuccggggcacaagu

SEQ ID NO: 2013964 - RNA, 19 nt, Artificial Sequence
  Description of Artificial Sequence: Synthetic oligonucleotide
ccuauuauggucagcuuag

SEQ ID NO: 2013965 - RNA, 19 nt, Artificial Sequence
  Description of Artificial Sequence: Synthetic oligonucleotide
auaagaacagucacauugu

SEQ ID NO: 2013966 - RNA, 19 nt, Artificial Sequence
  Description of Artificial Sequence: Synthetic oligonucleotide
ugcuaugggaccugguggu

SEQ ID NO: 2013967 - RNA, 19 nt, Artificial Sequence
  Description of Artificial Sequence: Synthetic oligonucleotide
auaagcgaucccaauaaga

SEQ ID NO: 2013968 - RNA, 19 nt, Artificial Sequence
  Description of Artificial Sequence: Synthetic oligonucleotide
aacagacaagugccgggug

SEQ ID NO: 2013969 - RNA, 19 nt, Artificial Sequence
  Description of Artificial Sequence: Synthetic oligonucleotide
ucuggaacucggcuggcgu

SEQ ID NO: 2013970 - RNA, 19 nt, Artificial Sequence
  Description of Artificial Sequence: Synthetic oligonucleotide
agccucggauccuacagag

SEQ ID NO: 2013971 - RNA, 19 nt, Artificial Sequence
  Description of Artificial Sequence: Synthetic oligonucleotide
uguacugcagggcguuccc

SEQ ID NO: 2013972 - RNA, 19 nt, Artificial Sequence
  Description of Artificial Sequence: Synthetic oligonucleotide
cauaugcucaucugcacca

SEQ ID NO: 2013973 - RNA, 19 nt, Artificial Sequence
  Description of Artificial Sequence: Synthetic oligonucleotide
gcauguaaaauaacuuccg

SEQ ID NO: 2013974 - RNA, 19 nt, Artificial Sequence
  Description of Artificial Sequence: Synthetic oligonucleotide
ugcgugccagggaagagca

SEQ ID NO: 2013975 - RNA, 19 nt, Artificial Sequence
  Description of Artificial Sequence: Synthetic oligonucleotide
uugucgggguucauggcug

SEQ ID NO: 2013976 - RNA, 19 nt, Artificial Sequence
  Description of Artificial Sequence: Synthetic oligonucleotide
ucacagacucuggaacucg

SEQ ID NO: 2013977 - RNA, 19 nt, Artificial Sequence
  Description of Artificial Sequence: Synthetic oligonucleotide
gaacagucacauugucaag

SEQ ID NO: 2013978 - RNA, 19 nt, Artificial Sequence
  Description of Artificial Sequence: Synthetic oligonucleotide
ugaaacggcccuucaggga

SEQ ID NO: 2013979 - RNA, 19 nt, Artificial Sequence
  Description of Artificial Sequence: Synthetic oligonucleotide
gaaccaaguccuccgggug

SEQ ID NO: 2013980 - RNA, 19 nt, Artificial Sequence
  Description of Artificial Sequence: Synthetic oligonucleotide
uggaugucugucagcuucc

SEQ ID NO: 2013981 - RNA, 19 nt, Artificial Sequence
  Description of Artificial Sequence: Synthetic oligonucleotide
cauaagcgaucccaauaag

SEQ ID NO: 2013982 - RNA, 19 nt, Artificial Sequence
  Description of Artificial Sequence: Synthetic oligonucleotide
uagcgcuguacugcgaggg

SEQ ID NO: 2013983 - RNA, 19 nt, Artificial Sequence
  Description of Artificial Sequence: Synthetic oligonucleotide
gccucuuuuagcugaaacc

SEQ ID NO: 2013984 - RNA, 19 nt, Artificial Sequence
  Description of Artificial Sequence: Synthetic oligonucleotide
ggguucauggcugaaacgc

SEQ ID NO: 2013985 - RNA, 19 nt, Artificial Sequence
  Description of Artificial Sequence: Synthetic oligonucleotide
gaaacgcagucugugacca

SEQ ID NO: 2013986 - RNA, 19 nt, Artificial Sequence
  Description of Artificial Sequence: Synthetic oligonucleotide
uacugcgagggacacggcu

SEQ ID NO: 2013987 - RNA, 19 nt, Artificial Sequence
  Description of Artificial Sequence: Synthetic oligonucleotide
aauaacuuccggggcacaa

SEQ ID NO: 2013988 - RNA, 19 nt, Artificial Sequence
  Description of Artificial Sequence: Synthetic oligonucleotide
uauggucagcuuagggaac

SEQ ID NO: 2013989 - RNA, 19 nt, Artificial Sequence
  Description of Artificial Sequence: Synthetic oligonucleotide
uuggugccgucuaaggggu

SEQ ID NO: 2013990 - RNA, 19 nt, Artificial Sequence
  Description of Artificial Sequence: Synthetic oligonucleotide
gaacuugcgugccagggaa

SEQ ID NO: 2013991 - RNA, 19 nt, Artificial Sequence
  Description of Artificial Sequence: Synthetic oligonucleotide
gacaagugccggguguugg

SEQ ID NO: 2013992 - RNA, 19 nt, Artificial Sequence
  Description of Artificial Sequence: Synthetic oligonucleotide
ucauggcugaaacgcaguc

SEQ ID NO: 2013993 - RNA, 19 nt, Artificial Sequence
  Description of Artificial Sequence: Synthetic oligonucleotide
gucagggccugccugguag

SEQ ID NO: 2013994 - RNA, 19 nt, Artificial Sequence
  Description of Artificial Sequence: Synthetic oligonucleotide
acucgcaaauacauaagca

SEQ ID NO: 2013995 - RNA, 19 nt, Artificial Sequence
  Description of Artificial Sequence: Synthetic oligonucleotide
gucagcuuagggaacuugc

SEQ ID NO: 2013996 - RNA, 19 nt, Artificial Sequence
  Description of Artificial Sequence: Synthetic oligonucleotide
auagcgcuguacugcgagg

SEQ ID NO: 2013997 - RNA, 19 nt, Artificial Sequence
  Description of Artificial Sequence: Synthetic oligonucleotide
acagucacauugucaagaa

SEQ ID NO: 2013998 - RNA, 19 nt, Artificial Sequence
  Description of Artificial Sequence: Synthetic oligonucleotide
uuagggaacuugcgugcca

SEQ ID NO: 2013999 - RNA, 19 nt, Artificial Sequence
  Description of Artificial Sequence: Synthetic oligonucleotide
acuuccggggcacaaguau

SEQ ID NO: 2014000 - RNA, 19 nt, Artificial Sequence
  Description of Artificial Sequence: Synthetic oligonucleotide
caagcggucugcuuugguc

SEQ ID NO: 2014001 - RNA, 19 nt, Artificial Sequence
  Description of Artificial Sequence: Synthetic oligonucleotide
ucuuacagccaggacucgc

SEQ ID NO: 2014002 - RNA, 19 nt, Artificial Sequence
  Description of Artificial Sequence: Synthetic oligonucleotide
ugcccgucuucaaucagcu

SEQ ID NO: 2014003 - RNA, 19 nt, Artificial Sequence
  Description of Artificial Sequence: Synthetic oligonucleotide
caacccaaaccacaagguc

SEQ ID NO: 2014004 - RNA, 19 nt, Artificial Sequence
  Description of Artificial Sequence: Synthetic oligonucleotide
accccagcagaguucaugu

SEQ ID NO: 2014005 - RNA, 19 nt, Artificial Sequence
  Description of Artificial Sequence: Synthetic oligonucleotide
gagcauaugcucaucugca

SEQ ID NO: 2014006 - RNA, 19 nt, Artificial Sequence
  Description of Artificial Sequence: Synthetic oligonucleotide
gaagagcauaugcucaucu

SEQ ID NO: 2014007 - RNA, 19 nt, Artificial Sequence
  Description of Artificial Sequence: Synthetic oligonucleotide
uuguuguacugcagggcgu

SEQ ID NO: 2014008 - RNA, 19 nt, Artificial Sequence
  Description of Artificial Sequence: Synthetic oligonucleotide
aacccagaacuccccagau

SEQ ID NO: 2014009 - RNA, 19 nt, Artificial Sequence
  Description of Artificial Sequence: Synthetic oligonucleotide
auauggcugguugaugaug

SEQ ID NO: 2014010 - RNA, 19 nt, Artificial Sequence
  Description of Artificial Sequence: Synthetic oligonucleotide
cugcccgucuucaaucagc

SEQ ID NO: 2014011 - RNA, 19 nt, Artificial Sequence
  Description of Artificial Sequence: Synthetic oligonucleotide
auaacuuccggggcacaag

SEQ ID NO: 2014012 - RNA, 19 nt, Artificial Sequence
  Description of Artificial Sequence: Synthetic oligonucleotide
acagacucuggaacucggc

SEQ ID NO: 2014013 - RNA, 19 nt, Artificial Sequence
  Description of Artificial Sequence: Synthetic oligonucleotide
guaucccacuucuuacagc

SEQ ID NO: 2014014 - RNA, 19 nt, Artificial Sequence
  Description of Artificial Sequence: Synthetic oligonucleotide
cauaagcagaggccuugcc

SEQ ID NO: 2014015 - RNA, 19 nt, Artificial Sequence
  Description of Artificial Sequence: Synthetic oligonucleotide
uggaacucggcuggcguag

SEQ ID NO: 2014016 - RNA, 19 nt, Artificial Sequence
  Description of Artificial Sequence: Synthetic oligonucleotide
cuauuauggucagcuuagg

SEQ ID NO: 2014017 - RNA, 19 nt, Artificial Sequence
  Description of Artificial Sequence: Synthetic oligonucleotide
cuuacagccaggacucgca

SEQ ID NO: 2014018 - RNA, 19 nt, Artificial Sequence
  Description of Artificial Sequence: Synthetic oligonucleotide
ugugcuucaccuccuuguu

SEQ ID NO: 2014019 - RNA, 19 nt, Artificial Sequence
  Description of Artificial Sequence: Synthetic oligonucleotide
uggcguaguacucguaauu

SEQ ID NO: 2014020 - RNA, 19 nt, Artificial Sequence
  Description of Artificial Sequence: Synthetic oligonucleotide
ucuaaggggucaacccaaa

SEQ ID NO: 2014021 - RNA, 19 nt, Artificial Sequence
  Description of Artificial Sequence: Synthetic oligonucleotide
ugccugguaguuguaauau

SEQ ID NO: 2014022 - RNA, 19 nt, Artificial Sequence
  Description of Artificial Sequence: Synthetic oligonucleotide
aagaagaccuucgguguau

SEQ ID NO: 2014023 - RNA, 19 nt, Artificial Sequence
  Description of Artificial Sequence: Synthetic oligonucleotide
cuuagggaacuugcgugcc

SEQ ID NO: 2014024 - RNA, 19 nt, Artificial Sequence
  Description of Artificial Sequence: Synthetic oligonucleotide
aaacgcagucugugaccag

SEQ ID NO: 2014025 - RNA, 19 nt, Artificial Sequence
  Description of Artificial Sequence: Synthetic oligonucleotide
gaaacccaaaggcacccaa

SEQ ID NO: 2014026 - RNA, 19 nt, Artificial Sequence
  Description of Artificial Sequence: Synthetic oligonucleotide
uugcgugccagggaagagc

SEQ ID NO: 2014027 - RNA, 19 nt, Artificial Sequence
  Description of Artificial Sequence: Synthetic oligonucleotide
agcucuugguccacuuccc

SEQ ID NO: 2014028 - RNA, 19 nt, Artificial Sequence
  Description of Artificial Sequence: Synthetic oligonucleotide
cucuuuuagcugaaaccca

SEQ ID NO: 2014029 - RNA, 19 nt, Artificial Sequence
  Description of Artificial Sequence: Synthetic oligonucleotide
gcuuagggaacuugcgugc

SEQ ID NO: 2014030 - RNA, 19 nt, Artificial Sequence
  Description of Artificial Sequence: Synthetic oligonucleotide
uuguugcuaugggaccugg

SEQ ID NO: 2014031 - RNA, 19 nt, Artificial Sequence
  Description of Artificial Sequence: Synthetic oligonucleotide
aguccuccgggugagugag

SEQ ID NO: 2014032 - RNA, 19 nt, Artificial Sequence
  Description of Artificial Sequence: Synthetic oligonucleotide
gcucaucugcaccaagcgg

SEQ ID NO: 2014033 - RNA, 19 nt, Artificial Sequence
  Description of Artificial Sequence: Synthetic oligonucleotide
gauccuacagagaaacccu

SEQ ID NO: 2014034 - RNA, 19 nt, Artificial Sequence
  Description of Artificial Sequence: Synthetic oligonucleotide
cucuuugauagcgcuguac

SEQ ID NO: 2014035 - RNA, 19 nt, Artificial Sequence
  Description of Artificial Sequence: Synthetic oligonucleotide
aggcacccaaacccagaac

SEQ ID NO: 2014036 - RNA, 19 nt, Artificial Sequence
  Description of Artificial Sequence: Synthetic oligonucleotide
uuacagccaggacucgcaa

SEQ ID NO: 2014037 - RNA, 19 nt, Artificial Sequence
  Description of Artificial Sequence: Synthetic oligonucleotide
cuaaggggucaacccaaac

SEQ ID NO: 2014038 - RNA, 19 nt, Artificial Sequence
  Description of Artificial Sequence: Synthetic oligonucleotide
auuuccucccacugcccgu

SEQ ID NO: 2014039 - RNA, 19 nt, Artificial Sequence
  Description of Artificial Sequence: Synthetic oligonucleotide
acaagugccggguguuggu

SEQ ID NO: 2014040 - RNA, 19 nt, Artificial Sequence
  Description of Artificial Sequence: Synthetic oligonucleotide
gguguauuccuuggugccg

SEQ ID NO: 2014041 - RNA, 19 nt, Artificial Sequence
  Description of Artificial Sequence: Synthetic oligonucleotide
cagucacauugucaagaag

SEQ ID NO: 2014042 - RNA, 19 nt, Artificial Sequence
  Description of Artificial Sequence: Synthetic oligonucleotide
uguugcuaugggaccuggu

SEQ ID NO: 2014043 - RNA, 19 nt, Artificial Sequence
  Description of Artificial Sequence: Synthetic oligonucleotide
uccuccgggugagugagug

SEQ ID NO: 2014044 - RNA, 19 nt, Artificial Sequence
  Description of Artificial Sequence: Synthetic oligonucleotide
gacucgcagcacguugucg

SEQ ID NO: 2014045 - RNA, 19 nt, Artificial Sequence
  Description of Artificial Sequence: Synthetic oligonucleotide
cucgcagcacguugucggg

SEQ ID NO: 2014046 - RNA, 19 nt, Artificial Sequence
  Description of Artificial Sequence: Synthetic oligonucleotide
guaguacucguaauuccuc

SEQ ID NO: 2014047 - RNA, 19 nt, Artificial Sequence
  Description of Artificial Sequence: Synthetic oligonucleotide
gaccccagcagaguucaug

SEQ ID NO: 2014048 - RNA, 19 nt, Artificial Sequence
  Description of Artificial Sequence: Synthetic oligonucleotide
gcguaguacucguaauucc

SEQ ID NO: 2014049 - RNA, 19 nt, Artificial Sequence
  Description of Artificial Sequence: Synthetic oligonucleotide
acugcccgucuucaaucag

SEQ ID NO: 2014050 - RNA, 19 nt, Artificial Sequence
  Description of Artificial Sequence: Synthetic oligonucleotide
uggugguugugaugaugug

SEQ ID NO: 2014051 - RNA, 19 nt, Artificial Sequence
  Description of Artificial Sequence: Synthetic oligonucleotide
aaauaacuuccggggcaca

SEQ ID NO: 2014052 - RNA, 19 nt, Artificial Sequence
  Description of Artificial Sequence: Synthetic oligonucleotide
acugcgagggacacggcug

SEQ ID NO: 2014053 - RNA, 19 nt, Artificial Sequence
  Description of Artificial Sequence: Synthetic oligonucleotide
ugcagggcguucccgugga

SEQ ID NO: 2014054 - RNA, 19 nt, Artificial Sequence
  Description of Artificial Sequence: Synthetic oligonucleotide
caugugcuucaccuccuug

SEQ ID NO: 2014055 - RNA, 19 nt, Artificial Sequence
  Description of Artificial Sequence: Synthetic oligonucleotide
ucugcaccaagcggucugc

SEQ ID NO: 2014056 - RNA, 19 nt, Artificial Sequence
  Description of Artificial Sequence: Synthetic oligonucleotide
ugauagcgcuguacugcga

SEQ ID NO: 2014057 - RNA, 19 nt, Artificial Sequence
  Description of Artificial Sequence: Synthetic oligonucleotide
agggaacuugcgugccagg

SEQ ID NO: 2014058 - RNA, 19 nt, Artificial Sequence
  Description of Artificial Sequence: Synthetic oligonucleotide
ccuuggugccgucuaaggg

SEQ ID NO: 2014059 - RNA, 19 nt, Artificial Sequence
  Description of Artificial Sequence: Synthetic oligonucleotide
uucuuacagccaggacucg

SEQ ID NO: 2014060 - RNA, 19 nt, Artificial Sequence
  Description of Artificial Sequence: Synthetic oligonucleotide
ugaccagcuuguugcuaug

SEQ ID NO: 2014061 - RNA, 19 nt, Artificial Sequence
  Description of Artificial Sequence: Synthetic oligonucleotide
guugucgggguucauggcu

SEQ ID NO: 2014062 - RNA, 19 nt, Artificial Sequence
  Description of Artificial Sequence: Synthetic oligonucleotide
cagccggugccucuuuuag

SEQ ID NO: 2014063 - RNA, 19 nt, Artificial Sequence
  Description of Artificial Sequence: Synthetic oligonucleotide
ccuucgguguauuccuugg

SEQ ID NO: 2014064 - RNA, 19 nt, Artificial Sequence
  Description of Artificial Sequence: Synthetic oligonucleotide
auggucagcuuagggaacu

SEQ ID NO: 2014065 - RNA, 19 nt, Artificial Sequence
  Description of Artificial Sequence: Synthetic oligonucleotide
aggggucaacccaaaccac

SEQ ID NO: 2014066 - RNA, 19 nt, Artificial Sequence
  Description of Artificial Sequence: Synthetic oligonucleotide
gagugagugaaacggcccu

SEQ ID NO: 2014067 - RNA, 19 nt, Artificial Sequence
  Description of Artificial Sequence: Synthetic oligonucleotide
ggcacccaaacccagaacu

SEQ ID NO: 2014068 - RNA, 19 nt, Artificial Sequence
  Description of Artificial Sequence: Synthetic oligonucleotide
ccgucuaaggggucaaccc

SEQ ID NO: 2014069 - RNA, 19 nt, Artificial Sequence
  Description of Artificial Sequence: Synthetic oligonucleotide
ggugagugagugaaacggc

SEQ ID NO: 2014070 - RNA, 19 nt, Artificial Sequence
  Description of Artificial Sequence: Synthetic oligonucleotide
uacagccaggacucgcaaa

SEQ ID NO: 2014071 - RNA, 19 nt, Artificial Sequence
  Description of Artificial Sequence: Synthetic oligonucleotide
ugaaacccaaaggcaccca

SEQ ID NO: 2014072 - RNA, 19 nt, Artificial Sequence
  Description of Artificial Sequence: Synthetic oligonucleotide
cugcgagggacacggcugc

SEQ ID NO: 2014073 - RNA, 19 nt, Artificial Sequence
  Description of Artificial Sequence: Synthetic oligonucleotide
auccuacagagaaacccug

SEQ ID NO: 2014074 - RNA, 19 nt, Artificial Sequence
  Description of Artificial Sequence: Synthetic oligonucleotide
ggcacaaguaucccacuuc

SEQ ID NO: 2014075 - RNA, 19 nt, Artificial Sequence
  Description of Artificial Sequence: Synthetic oligonucleotide
uugugaugaugugcuuccc

SEQ ID NO: 2014076 - RNA, 19 nt, Artificial Sequence
  Description of Artificial Sequence: Synthetic oligonucleotide
caaguccuccgggugagug

SEQ ID NO: 2014077 - RNA, 19 nt, Artificial Sequence
  Description of Artificial Sequence: Synthetic oligonucleotide
cuuuuagcugaaacccaaa

SEQ ID NO: 2014078 - RNA, 19 nt, Artificial Sequence
  Description of Artificial Sequence: Synthetic oligonucleotide
cccaauaagaacagucaca

SEQ ID NO: 2014079 - RNA, 19 nt, Artificial Sequence
  Description of Artificial Sequence: Synthetic oligonucleotide
aacuugcgugccagggaag

SEQ ID NO: 2014080 - RNA, 19 nt, Artificial Sequence
  Description of Artificial Sequence: Synthetic oligonucleotide
agggacacggcugcuucag

SEQ ID NO: 2014081 - RNA, 19 nt, Artificial Sequence
  Description of Artificial Sequence: Synthetic oligonucleotide
ggucaacccaaaccacaag

SEQ ID NO: 2014082 - RNA, 19 nt, Artificial Sequence
  Description of Artificial Sequence: Synthetic oligonucleotide
ugucgggguucauggcuga

SEQ ID NO: 2014083 - RNA, 19 nt, Artificial Sequence
  Description of Artificial Sequence: Synthetic oligonucleotide
cacguugucgggguucaug

SEQ ID NO: 2014084 - RNA, 19 nt, Artificial Sequence
  Description of Artificial Sequence: Synthetic oligonucleotide
gacagccucggauccuaca

SEQ ID NO: 2014085 - RNA, 19 nt, Artificial Sequence
  Description of Artificial Sequence: Synthetic oligonucleotide
ggcguaguacucguaauuc

SEQ ID NO: 2014086 - RNA, 19 nt, Artificial Sequence
  Description of Artificial Sequence: Synthetic oligonucleotide
acucuggaacucggcuggc

SEQ ID NO: 2014087 - RNA, 19 nt, Artificial Sequence
  Description of Artificial Sequence: Synthetic oligonucleotide
ggacucgcaaauacauaag

SEQ ID NO: 2014088 - RNA, 19 nt, Artificial Sequence
  Description of Artificial Sequence: Synthetic oligonucleotide
ggcugaaacgcagucugug

SEQ ID NO: 2014089 - RNA, 19 nt, Artificial Sequence
  Description of Artificial Sequence: Synthetic oligonucleotide
cucuggaacucggcuggcg

SEQ ID NO: 2014090 - RNA, 19 nt, Artificial Sequence
  Description of Artificial Sequence: Synthetic oligonucleotide
guacucguaauuccucagu

SEQ ID NO: 2014091 - RNA, 19 nt, Artificial Sequence
  Description of Artificial Sequence: Synthetic oligonucleotide
cccacagcauguaaaauaa

SEQ ID NO: 2014092 - RNA, 19 nt, Artificial Sequence
  Description of Artificial Sequence: Synthetic oligonucleotide
ccugucuugaaaacaaaua

SEQ ID NO: 2014093 - RNA, 19 nt, Artificial Sequence
  Description of Artificial Sequence: Synthetic oligonucleotide
gcugaaacgcagucuguga

SEQ ID NO: 2014094 - RNA, 19 nt, Artificial Sequence
  Description of Artificial Sequence: Synthetic oligonucleotide
acacggcugcuucaggauu

SEQ ID NO: 2014095 - RNA, 19 nt, Artificial Sequence
  Description of Artificial Sequence: Synthetic oligonucleotide
guucccguggaugucuguc

SEQ ID NO: 2014096 - RNA, 19 nt, Artificial Sequence
  Description of Artificial Sequence: Synthetic oligonucleotide
uaguuguaauauggcuggu

SEQ ID NO: 2014097 - RNA, 19 nt, Artificial Sequence
  Description of Artificial Sequence: Synthetic oligonucleotide
agcgcuguacugcgaggga

SEQ ID NO: 2014098 - RNA, 19 nt, Artificial Sequence
  Description of Artificial Sequence: Synthetic oligonucleotide
uguauuccuuggugccguc

SEQ ID NO: 2014099 - RNA, 19 nt, Artificial Sequence
  Description of Artificial Sequence: Synthetic oligonucleotide
gccuucaaucagcuggaug

SEQ ID NO: 2014100 - RNA, 19 nt, Artificial Sequence
  Description of Artificial Sequence: Synthetic oligonucleotide
guacugcagggcguucccg

SEQ ID NO: 2014101 - RNA, 19 nt, Artificial Sequence
  Description of Artificial Sequence: Synthetic oligonucleotide
ggacacggcugcuucagga

SEQ ID NO: 2014102 - RNA, 19 nt, Artificial Sequence
  Description of Artificial Sequence: Synthetic oligonucleotide
ccucggauccuacagagaa

SEQ ID NO: 2014103 - RNA, 19 nt, Artificial Sequence
  Description of Artificial Sequence: Synthetic oligonucleotide
gcugguugaugaugccugc

SEQ ID NO: 2014104 - RNA, 19 nt, Artificial Sequence
  Description of Artificial Sequence: Synthetic oligonucleotide
uccggggcacaaguauccc

SEQ ID NO: 2014105 - RNA, 19 nt, Artificial Sequence
  Description of Artificial Sequence: Synthetic oligonucleotide
agugcggccaggaccccag

SEQ ID NO: 2014106 - RNA, 19 nt, Artificial Sequence
  Description of Artificial Sequence: Synthetic oligonucleotide
gugaccagcuuguugcuau

SEQ ID NO: 2014107 - RNA, 19 nt, Artificial Sequence
  Description of Artificial Sequence: Synthetic oligonucleotide
agcacguugucgggguuca

SEQ ID NO: 2014108 - RNA, 19 nt, Artificial Sequence
  Description of Artificial Sequence: Synthetic oligonucleotide
caagugccggguguuggug

SEQ ID NO: 2014109 - RNA, 19 nt, Artificial Sequence
  Description of Artificial Sequence: Synthetic oligonucleotide
gcuggcguaguacucguaa

SEQ ID NO: 2014110 - RNA, 19 nt, Artificial Sequence
  Description of Artificial Sequence: Synthetic oligonucleotide
caagaagaccuucggugua

SEQ ID NO: 2014111 - RNA, 19 nt, Artificial Sequence
  Description of Artificial Sequence: Synthetic oligonucleotide
cuccccagaugguccugcc

SEQ ID NO: 2014112 - RNA, 19 nt, Artificial Sequence
  Description of Artificial Sequence: Synthetic oligonucleotide
gagggacacggcugcuuca

SEQ ID NO: 2014113 - RNA, 19 nt, Artificial Sequence
  Description of Artificial Sequence: Synthetic oligonucleotide
uccgggugagugagugaaa

SEQ ID NO: 2014114 - RNA, 19 nt, Artificial Sequence
  Description of Artificial Sequence: Synthetic oligonucleotide
gccugguaguuguaauaug

SEQ ID NO: 2014115 - RNA, 19 nt, Artificial Sequence
  Description of Artificial Sequence: Synthetic oligonucleotide
cccaaacccagaacucccc

SEQ ID NO: 2014116 - RNA, 19 nt, Artificial Sequence
  Description of Artificial Sequence: Synthetic oligonucleotide
cacugcccgucuucaauca

SEQ ID NO: 2014117 - RNA, 19 nt, Artificial Sequence
  Description of Artificial Sequence: Synthetic oligonucleotide
acauugucaagaagaccuu

SEQ ID NO: 2014118 - RNA, 19 nt, Artificial Sequence
  Description of Artificial Sequence: Synthetic oligonucleotide
cugccugguaguuguaaua

SEQ ID NO: 2014119 - RNA, 19 nt, Artificial Sequence
  Description of Artificial Sequence: Synthetic oligonucleotide
ggccuugccuucaaucagc

SEQ ID NO: 2014120 - RNA, 19 nt, Artificial Sequence
  Description of Artificial Sequence: Synthetic oligonucleotide
cuguacugcgagggacacg

SEQ ID NO: 2014121 - RNA, 19 nt, Artificial Sequence
  Description of Artificial Sequence: Synthetic oligonucleotide
auaugcucaucugcaccaa

SEQ ID NO: 2014122 - RNA, 19 nt, Artificial Sequence
  Description of Artificial Sequence: Synthetic oligonucleotide
gaacuccccagaugguccu

SEQ ID NO: 2014123 - RNA, 19 nt, Artificial Sequence
  Description of Artificial Sequence: Synthetic oligonucleotide
cagacucuggaacucggcu

SEQ ID NO: 2014124 - RNA, 19 nt, Artificial Sequence
  Description of Artificial Sequence: Synthetic oligonucleotide
gacacggcugcuucaggau

SEQ ID NO: 2014125 - RNA, 19 nt, Artificial Sequence
  Description of Artificial Sequence: Synthetic oligonucleotide
gcgaucccaauaagaacag

SEQ ID NO: 2014126 - RNA, 19 nt, Artificial Sequence
  Description of Artificial Sequence: Synthetic oligonucleotide
ucagggagucagugcguuu

SEQ ID NO: 2014127 - RNA, 19 nt, Artificial Sequence
  Description of Artificial Sequence: Synthetic oligonucleotide
gcucuugguccacuucccc

SEQ ID NO: 2014128 - RNA, 19 nt, Artificial Sequence
  Description of Artificial Sequence: Synthetic oligonucleotide
agugagugaaacggcccuu

SEQ ID NO: 2014129 - RNA, 19 nt, Artificial Sequence
  Description of Artificial Sequence: Synthetic oligonucleotide
acggcugcuucaggauuuc

SEQ ID NO: 2014130 - RNA, 19 nt, Artificial Sequence
  Description of Artificial Sequence: Synthetic oligonucleotide
cuccgggugagugagugaa

SEQ ID NO: 2014131 - RNA, 19 nt, Artificial Sequence
  Description of Artificial Sequence: Synthetic oligonucleotide
aaacggcccuucagggagu

SEQ ID NO: 2014132 - RNA, 19 nt, Artificial Sequence
  Description of Artificial Sequence: Synthetic oligonucleotide
cuucauaagcgaucccaau

SEQ ID NO: 2014133 - RNA, 19 nt, Artificial Sequence
  Description of Artificial Sequence: Synthetic oligonucleotide
gccgucuaaggggucaacc

SEQ ID NO: 2014134 - RNA, 19 nt, Artificial Sequence
  Description of Artificial Sequence: Synthetic oligonucleotide
aacuuccggggcacaagua

SEQ ID NO: 2014135 - RNA, 19 nt, Artificial Sequence
  Description of Artificial Sequence: Synthetic oligonucleotide
ggucagcuuagggaacuug

SEQ ID NO: 2014136 - RNA, 19 nt, Artificial Sequence
  Description of Artificial Sequence: Synthetic oligonucleotide
cucggauccuacagagaaa

SEQ ID NO: 2014137 - RNA, 19 nt, Artificial Sequence
  Description of Artificial Sequence: Synthetic oligonucleotide
ggggucaacccaaaccaca

SEQ ID NO: 2014138 - RNA, 19 nt, Artificial Sequence
  Description of Artificial Sequence: Synthetic oligonucleotide
cccuauuauggucagcuua

SEQ ID NO: 2014139 - RNA, 19 nt, Artificial Sequence
  Description of Artificial Sequence: Synthetic oligonucleotide
cagcuuagggaacuugcgu

SEQ ID NO: 2014140 - RNA, 19 nt, Artificial Sequence
  Description of Artificial Sequence: Synthetic oligonucleotide
ugccugcaauggccuuucc

SEQ ID NO: 2014141 - RNA, 19 nt, Artificial Sequence
  Description of Artificial Sequence: Synthetic oligonucleotide
agggccugccugguaguug

SEQ ID NO: 2014142 - RNA, 19 nt, Artificial Sequence
  Description of Artificial Sequence: Synthetic oligonucleotide
cggggcacaaguaucccac

SEQ ID NO: 2014143 - RNA, 19 nt, Artificial Sequence
  Description of Artificial Sequence: Synthetic oligonucleotide
agaagaccuucgguguauu

SEQ ID NO: 2014144 - RNA, 19 nt, Artificial Sequence
  Description of Artificial Sequence: Synthetic oligonucleotide
guguauuccuuggugccgu

SEQ ID NO: 2014145 - RNA, 19 nt, Artificial Sequence
  Description of Artificial Sequence: Synthetic oligonucleotide
cagccucggauccuacaga

SEQ ID NO: 2014146 - RNA, 19 nt, Artificial Sequence
  Description of Artificial Sequence: Synthetic oligonucleotide
aggacagccucggauccua

SEQ ID NO: 2014147 - RNA, 19 nt, Artificial Sequence
  Description of Artificial Sequence: Synthetic oligonucleotide
cgggugagugagugaaacg

SEQ ID NO: 2014148 - RNA, 19 nt, Artificial Sequence
  Description of Artificial Sequence: Synthetic oligonucleotide
ccgggugagugagugaaac

SEQ ID NO: 2014149 - RNA, 19 nt, Artificial Sequence
  Description of Artificial Sequence: Synthetic oligonucleotide
cgggguucauggcugaaac

SEQ ID NO: 2014150 - RNA, 19 nt, Artificial Sequence
  Description of Artificial Sequence: Synthetic oligonucleotide
cuggaacucggcuggcgua

SEQ ID NO: 2014151 - RNA, 19 nt, Artificial Sequence
  Description of Artificial Sequence: Synthetic oligonucleotide
gguugaugaugccugcaau

SEQ ID NO: 2014152 - RNA, 19 nt, Artificial Sequence
  Description of Artificial Sequence: Synthetic oligonucleotide
acgcagucugugaccagcu

SEQ ID NO: 2014153 - RNA, 19 nt, Artificial Sequence
  Description of Artificial Sequence: Synthetic oligonucleotide
gaacucggcuggcguagua

SEQ ID NO: 2014154 - RNA, 19 nt, Artificial Sequence
  Description of Artificial Sequence: Synthetic oligonucleotide
gggucaacccaaaccacaa

SEQ ID NO: 2014155 - RNA, 19 nt, Artificial Sequence
  Description of Artificial Sequence: Synthetic oligonucleotide
ccccagaugguccugccca

SEQ ID NO: 2014156 - RNA, 19 nt, Artificial Sequence
  Description of Artificial Sequence: Synthetic oligonucleotide
cccgacucgcagcacguug

SEQ ID NO: 2014157 - RNA, 19 nt, Artificial Sequence
  Description of Artificial Sequence: Synthetic oligonucleotide
ccugcaauggccuuuccuu

SEQ ID NO: 2014158 - RNA, 19 nt, Artificial Sequence
  Description of Artificial Sequence: Synthetic oligonucleotide
cuucgguguauuccuuggu

SEQ ID NO: 2014159 - RNA, 19 nt, Artificial Sequence
  Description of Artificial Sequence: Synthetic oligonucleotide
gccaggacucgcaaauaca

SEQ ID NO: 2014160 - RNA, 19 nt, Artificial Sequence
  Description of Artificial Sequence: Synthetic oligonucleotide
ccaggacucgcaaauacau

SEQ ID NO: 2014161 - RNA, 19 nt, Artificial Sequence
  Description of Artificial Sequence: Synthetic oligonucleotide
gcuguacugcgagggacac

SEQ ID NO: 2014162 - RNA, 19 nt, Artificial Sequence
  Description of Artificial Sequence: Synthetic oligonucleotide
gcacccaaacccagaacuc

SEQ ID NO: 2014163 - RNA, 19 nt, Artificial Sequence
  Description of Artificial Sequence: Synthetic oligonucleotide
cgucuaaggggucaaccca

SEQ ID NO: 2014164 - RNA, 19 nt, Artificial Sequence
  Description of Artificial Sequence: Synthetic oligonucleotide
cuucagggagucagugcgu

SEQ ID NO: 2014165 - RNA, 19 nt, Artificial Sequence
  Description of Artificial Sequence: Synthetic oligonucleotide
cccagaugguccugcccag

SEQ ID NO: 2014166 - RNA, 19 nt, Artificial Sequence
  Description of Artificial Sequence: Synthetic oligonucleotide
ugccgucuaaggggucaac

SEQ ID NO: 2014167 - RNA, 19 nt, Artificial Sequence
  Description of Artificial Sequence: Synthetic oligonucleotide
ucagugcggccaggacccc

SEQ ID NO: 2014168 - RNA, 19 nt, Artificial Sequence
  Description of Artificial Sequence: Synthetic oligonucleotide
ugcgagggacacggcugcu

SEQ ID NO: 2014169 - RNA, 19 nt, Artificial Sequence
  Description of Artificial Sequence: Synthetic oligonucleotide
ccaaacccagaacucccca

SEQ ID NO: 2014170 - RNA, 19 nt, Artificial Sequence
  Description of Artificial Sequence: Synthetic oligonucleotide
cuggcguaguacucguaau

SEQ ID NO: 2014171 - RNA, 19 nt, Artificial Sequence
  Description of Artificial Sequence: Synthetic oligonucleotide
gcaccaagcggucugcuuu

SEQ ID NO: 2014172 - RNA, 19 nt, Artificial Sequence
  Description of Artificial Sequence: Synthetic oligonucleotide
gcgcuguacugcgagggac

SEQ ID NO: 2014173 - RNA, 19 nt, Artificial Sequence
  Description of Artificial Sequence: Synthetic oligonucleotide
guauuccuuggugccgucu

SEQ ID NO: 2014174 - RNA, 19 nt, Artificial Sequence
  Description of Artificial Sequence: Synthetic oligonucleotide
cggauccuacagagaaacc

SEQ ID NO: 2014175 - RNA, 19 nt, Artificial Sequence
  Description of Artificial Sequence: Synthetic oligonucleotide
cguugucgggguucauggc

SEQ ID NO: 2014176 - RNA, 19 nt, Artificial Sequence
  Description of Artificial Sequence: Synthetic oligonucleotide
cacggcugcuucaggauuu

SEQ ID NO: 2014177 - RNA, 19 nt, Artificial Sequence
  Description of Artificial Sequence: Synthetic oligonucleotide
gggccugccugguaguugu

SEQ ID NO: 2014178 - RNA, 19 nt, Artificial Sequence
  Description of Artificial Sequence: Synthetic oligonucleotide
augggaccuggugguugug

SEQ ID NO: 2014179 - RNA, 19 nt, Artificial Sequence
  Description of Artificial Sequence: Synthetic oligonucleotide
cugugaccagcuuguugcu

SEQ ID NO: 2014180 - RNA, 19 nt, Artificial Sequence
  Description of Artificial Sequence: Synthetic oligonucleotide
caaucagcuggaugaucuu

SEQ ID NO: 2014181 - RNA, 19 nt, Artificial Sequence
  Description of Artificial Sequence: Synthetic oligonucleotide
guacugcgagggacacggc

SEQ ID NO: 2014182 - RNA, 19 nt, Artificial Sequence
  Description of Artificial Sequence: Synthetic oligonucleotide
cggcccuucagggagucag

SEQ ID NO: 2014183 - RNA, 19 nt, Artificial Sequence
  Description of Artificial Sequence: Synthetic oligonucleotide
cccucccacagcauguaaa

SEQ ID NO: 2014184 - RNA, 19 nt, Artificial Sequence
  Description of Artificial Sequence: Synthetic oligonucleotide
gugccagggaagagcauau

SEQ ID NO: 2014185 - RNA, 19 nt, Artificial Sequence
  Description of Artificial Sequence: Synthetic oligonucleotide
cggugccucuuuuagcuga

SEQ ID NO: 2014186 - RNA, 19 nt, Artificial Sequence
  Description of Artificial Sequence: Synthetic oligonucleotide
ccggugccucuuuuagcug

SEQ ID NO: 2014187 - RNA, 19 nt, Artificial Sequence
  Description of Artificial Sequence: Synthetic oligonucleotide
ggugccucuuuuagcugaa

SEQ ID NO: 2014188 - RNA, 19 nt, Artificial Sequence
  Description of Artificial Sequence: Synthetic oligonucleotide
gugccgucuaaggggucaa

SEQ ID NO: 2014189 - RNA, 19 nt, Artificial Sequence
  Description of Artificial Sequence: Synthetic oligonucleotide
ggcguucccguggaugucu

SEQ ID NO: 2014190 - RNA, 19 nt, Artificial Sequence
  Description of Artificial Sequence: Synthetic oligonucleotide
agcuucccucccacagcau

SEQ ID NO: 2014191 - RNA, 19 nt, Artificial Sequence
  Description of Artificial Sequence: Synthetic oligonucleotide
ccgacucgcagcacguugu

SEQ ID NO: 2014192 - RNA, 19 nt, Artificial Sequence
  Description of Artificial Sequence: Synthetic oligonucleotide
gucgggguucauggcugaa

SEQ ID NO: 2014193 - RNA, 19 nt, Artificial Sequence
  Description of Artificial Sequence: Synthetic oligonucleotide
cgugccagggaagagcaua

SEQ ID NO: 2014194 - RNA, 19 nt, Artificial Sequence
  Description of Artificial Sequence: Synthetic oligonucleotide
acggcccuucagggaguca

SEQ ID NO: 2014195 - RNA, 19 nt, Artificial Sequence
  Description of Artificial Sequence: Synthetic oligonucleotide
gccugccugguaguuguaa

SEQ ID NO: 2014196 - RNA, 19 nt, Artificial Sequence
  Description of Artificial Sequence: Synthetic oligonucleotide
ccugcccagcacagcguca

SEQ ID NO: 2014197 - RNA, 19 nt, Artificial Sequence
  Description of Artificial Sequence: Synthetic oligonucleotide
gccuugccuucaaucagcu

SEQ ID NO: 2014198 - RNA, 19 nt, Artificial Sequence
  Description of Artificial Sequence: Synthetic oligonucleotide
guccugcccagcacagcgu

SEQ ID NO: 2014199 - RNA, 19 nt, Artificial Sequence
  Description of Artificial Sequence: Synthetic oligonucleotide
cgacucgcagcacguuguc

SEQ ID NO: 2014200 - RNA, 19 nt, Artificial Sequence
  Description of Artificial Sequence: Synthetic oligonucleotide
ccagaacuccccagauggu

SEQ ID NO: 2014201 - RNA, 19 nt, Artificial Sequence
  Description of Artificial Sequence: Synthetic oligonucleotide
ccuccgggugagugaguga

SEQ ID NO: 2014202 - RNA, 19 nt, Artificial Sequence
  Description of Artificial Sequence: Synthetic oligonucleotide
cccacugcccgucuucaau

SEQ ID NO: 2014203 - RNA, 19 nt, Artificial Sequence
  Description of Artificial Sequence: Synthetic oligonucleotide
ccaagcggucugcuuuggu

SEQ ID NO: 2014204 - RNA, 19 nt, Artificial Sequence
  Description of Artificial Sequence: Synthetic oligonucleotide
gcuaugggaccuggugguu

SEQ ID NO: 2014205 - RNA, 19 nt, Artificial Sequence
  Description of Artificial Sequence: Synthetic oligonucleotide
ccccuauuauggucagcuu

SEQ ID NO: 2014206 - RNA, 19 nt, Artificial Sequence
  Description of Artificial Sequence: Synthetic oligonucleotide
gcgagggacacggcugcuu

SEQ ID NO: 2014207 - RNA, 19 nt, Artificial Sequence
  Description of Artificial Sequence: Synthetic oligonucleotide
cgaucccaauaagaacagu

SEQ ID NO: 2014208 - RNA, 19 nt, Artificial Sequence
  Description of Artificial Sequence: Synthetic oligonucleotide
gcgucagggccugccuggu

SEQ ID NO: 2014209 - RNA, 19 nt, Artificial Sequence
  Description of Artificial Sequence: Synthetic oligonucleotide
ggccugccugguaguugua

SEQ ID NO: 2014210 - RNA, 19 nt, Artificial Sequence
  Description of Artificial Sequence: Synthetic oligonucleotide
gcagggcguucccguggau

SEQ ID NO: 2014211 - RNA, 19 nt, Artificial Sequence
  Description of Artificial Sequence: Synthetic oligonucleotide
cguucccguggaugucugu

SEQ ID NO: 2014212 - RNA, 19 nt, Artificial Sequence
  Description of Artificial Sequence: Synthetic oligonucleotide
cgucagggccugccuggua

SEQ ID NO: 2014213 - RNA, 19 nt, Artificial Sequence
  Description of Artificial Sequence: Synthetic oligonucleotide
cccagccggugccucuuuu

SEQ ID NO: 2014214 - RNA, 19 nt, Artificial Sequence
  Description of Artificial Sequence: Synthetic oligonucleotide
gcgugccagggaagagcau

SEQ ID NO: 2014215 - RNA, 19 nt, Artificial Sequence
  Description of Artificial Sequence: Synthetic oligonucleotide
ccccgacucgcagcacguu

SEQ ID NO: 2014216 - RNA, 19 nt, Artificial Sequence
  Description of Artificial Sequence: Synthetic oligonucleotide
ugugguacaacucauacug

SEQ ID NO: 2014217 - RNA, 19 nt, Artificial Sequence
  Description of Artificial Sequence: Synthetic oligonucleotide
agaacugucagcaaaaccc

SEQ ID NO: 2014218 - RNA, 19 nt, Artificial Sequence
  Description of Artificial Sequence: Synthetic oligonucleotide
aaugugaagggcuucgagg

SEQ ID NO: 2014219 - RNA, 19 nt, Artificial Sequence
  Description of Artificial Sequence: Synthetic oligonucleotide
uguguuauaggccuggcug

SEQ ID NO: 2014220 - RNA, 19 nt, Artificial Sequence
  Description of Artificial Sequence: Synthetic oligonucleotide
agaaggguagagcugaggc

SEQ ID NO: 2014221 - RNA, 19 nt, Artificial Sequence
  Description of Artificial Sequence: Synthetic oligonucleotide
guucccaacaccuagcugg

SEQ ID NO: 2014222 - RNA, 19 nt, Artificial Sequence
  Description of Artificial Sequence: Synthetic oligonucleotide
uuuguuuucguuucaagac

SEQ ID NO: 2014223 - RNA, 19 nt, Artificial Sequence
  Description of Artificial Sequence: Synthetic oligonucleotide
aagguuaggguuuccuccc

SEQ ID NO: 2014224 - RNA, 19 nt, Artificial Sequence
  Description of Artificial Sequence: Synthetic oligonucleotide
uaggcugagaaacuaaagc

SEQ ID NO: 2014225 - RNA, 19 nt, Artificial Sequence
  Description of Artificial Sequence: Synthetic oligonucleotide
ucuacucuaugcuaggcag

SEQ ID NO: 2014226 - RNA, 19 nt, Artificial Sequence
  Description of Artificial Sequence: Synthetic oligonucleotide
aguaugaacauuauggucu

SEQ ID NO: 2014227 - RNA, 19 nt, Artificial Sequence
  Description of Artificial Sequence: Synthetic oligonucleotide
auggucuucagucuguuuc

SEQ ID NO: 2014228 - RNA, 19 nt, Artificial Sequence
  Description of Artificial Sequence: Synthetic oligonucleotide
uguuuucguuucaagacag

SEQ ID NO: 2014229 - RNA, 19 nt, Artificial Sequence
  Description of Artificial Sequence: Synthetic oligonucleotide
uuuucguuucaagacaggg

SEQ ID NO: 2014230 - RNA, 19 nt, Artificial Sequence
  Description of Artificial Sequence: Synthetic oligonucleotide
agaaacuaaagcccugggg

SEQ ID NO: 2014231 - RNA, 19 nt, Artificial Sequence
  Description of Artificial Sequence: Synthetic oligonucleotide
uucacuagaucugagcucc

SEQ ID NO: 2014232 - RNA, 19 nt, Artificial Sequence
  Description of Artificial Sequence: Synthetic oligonucleotide
gauucgagcagagcuaucg

SEQ ID NO: 2014233 - RNA, 19 nt, Artificial Sequence
  Description of Artificial Sequence: Synthetic oligonucleotide
uccccuauuccaaagggcc

SEQ ID NO: 2014234 - RNA, 19 nt, Artificial Sequence
  Description of Artificial Sequence: Synthetic oligonucleotide
uucuaagccaggcaggcca

SEQ ID NO: 2014235 - RNA, 19 nt, Artificial Sequence
  Description of Artificial Sequence: Synthetic oligonucleotide
uguuugaccagaucagagc

SEQ ID NO: 2014236 - RNA, 19 nt, Artificial Sequence
  Description of Artificial Sequence: Synthetic oligonucleotide
uucguuucaagacaggguu

SEQ ID NO: 2014237 - RNA, 19 nt, Artificial Sequence
  Description of Artificial Sequence: Synthetic oligonucleotide
gacuauggguacuggaccg

SEQ ID NO: 2014238 - RNA, 19 nt, Artificial Sequence
  Description of Artificial Sequence: Synthetic oligonucleotide
aaacuaaagcccuggggcu

SEQ ID NO: 2014239 - RNA, 19 nt, Artificial Sequence
  Description of Artificial Sequence: Synthetic oligonucleotide
caucacuggaaugugaagg

SEQ ID NO: 2014240 - RNA, 19 nt, Artificial Sequence
  Description of Artificial Sequence: Synthetic oligonucleotide
uguaugcacacgauggugu

SEQ ID NO: 2014241 - RNA, 19 nt, Artificial Sequence
  Description of Artificial Sequence: Synthetic oligonucleotide
acucauacuggcaagguuc

SEQ ID NO: 2014242 - RNA, 19 nt, Artificial Sequence
  Description of Artificial Sequence: Synthetic oligonucleotide
uguuucacuagaucugagc

SEQ ID NO: 2014243 - RNA, 19 nt, Artificial Sequence
  Description of Artificial Sequence: Synthetic oligonucleotide
cuugaacucuacucuaugc

SEQ ID NO: 2014244 - RNA, 19 nt, Artificial Sequence
  Description of Artificial Sequence: Synthetic oligonucleotide
aacucuacucuaugcuagg

SEQ ID NO: 2014245 - RNA, 19 nt, Artificial Sequence
  Description of Artificial Sequence: Synthetic oligonucleotide
aaaccacacacaugaagcu

SEQ ID NO: 2014246 - RNA, 19 nt, Artificial Sequence
  Description of Artificial Sequence: Synthetic oligonucleotide
cuaucuguucucauccucc

SEQ ID NO: 2014247 - RNA, 19 nt, Artificial Sequence
  Description of Artificial Sequence: Synthetic oligonucleotide
guagagcugaggcuaaagg

SEQ ID NO: 2014248 - RNA, 19 nt, Artificial Sequence
  Description of Artificial Sequence: Synthetic oligonucleotide
gauggugguggucuggugc

SEQ ID NO: 2014249 - RNA, 19 nt, Artificial Sequence
  Description of Artificial Sequence: Synthetic oligonucleotide
uccaaagggccuuaagacc

SEQ ID NO: 2014250 - RNA, 19 nt, Artificial Sequence
  Description of Artificial Sequence: Synthetic oligonucleotide
ggugcgcucacccugaugg

SEQ ID NO: 2014251 - RNA, 19 nt, Artificial Sequence
  Description of Artificial Sequence: Synthetic oligonucleotide
uuauguggccgcaggagag

SEQ ID NO: 2014252 - RNA, 19 nt, Artificial Sequence
  Description of Artificial Sequence: Synthetic oligonucleotide
ugguacaacucauacuggc

SEQ ID NO: 2014253 - RNA, 19 nt, Artificial Sequence
  Description of Artificial Sequence: Synthetic oligonucleotide
uuucguuucaagacagggu

SEQ ID NO: 2014254 - RNA, 19 nt, Artificial Sequence
  Description of Artificial Sequence: Synthetic oligonucleotide
cacacgaugguguuugacc

SEQ ID NO: 2014255 - RNA, 19 nt, Artificial Sequence
  Description of Artificial Sequence: Synthetic oligonucleotide
agccugugggcccacaggc

SEQ ID NO: 2014256 - RNA, 19 nt, Artificial Sequence
  Description of Artificial Sequence: Synthetic oligonucleotide
uggacuguccaucacucca

SEQ ID NO: 2014257 - RNA, 19 nt, Artificial Sequence
  Description of Artificial Sequence: Synthetic oligonucleotide
gaccggguggguuaugugg

SEQ ID NO: 2014258 - RNA, 19 nt, Artificial Sequence
  Description of Artificial Sequence: Synthetic oligonucleotide
ugaacauuauggucuucag

SEQ ID NO: 2014259 - RNA, 19 nt, Artificial Sequence
  Description of Artificial Sequence: Synthetic oligonucleotide
cugguucuaagccaggcag

SEQ ID NO: 2014260 - RNA, 19 nt, Artificial Sequence
  Description of Artificial Sequence: Synthetic oligonucleotide
auucgagcagagcuaucgc

SEQ ID NO: 2014261 - RNA, 19 nt, Artificial Sequence
  Description of Artificial Sequence: Synthetic oligonucleotide
uauuccaaagggccuuaag

SEQ ID NO: 2014262 - RNA, 19 nt, Artificial Sequence
  Description of Artificial Sequence: Synthetic oligonucleotide
ucgagcagagcuaucgcug

SEQ ID NO: 2014263 - RNA, 19 nt, Artificial Sequence
  Description of Artificial Sequence: Synthetic oligonucleotide
aagccaggcaggccaaagg

SEQ ID NO: 2014264 - RNA, 19 nt, Artificial Sequence
  Description of Artificial Sequence: Synthetic oligonucleotide
gaaugugaagggcuucgag

SEQ ID NO: 2014265 - RNA, 19 nt, Artificial Sequence
  Description of Artificial Sequence: Synthetic oligonucleotide
ugguucuaagccaggcagg

SEQ ID NO: 2014266 - RNA, 19 nt, Artificial Sequence
  Description of Artificial Sequence: Synthetic oligonucleotide
uacaacucauacuggcaag

SEQ ID NO: 2014267 - RNA, 19 nt, Artificial Sequence
  Description of Artificial Sequence: Synthetic oligonucleotide
uggguuauguggccgcagg

SEQ ID NO: 2014268 - RNA, 19 nt, Artificial Sequence
  Description of Artificial Sequence: Synthetic oligonucleotide
uggaaugugaagggcuucg

SEQ ID NO: 2014269 - RNA, 19 nt, Artificial Sequence
  Description of Artificial Sequence: Synthetic oligonucleotide
uggccuugaacucuacucu

SEQ ID NO: 2014270 - RNA, 19 nt, Artificial Sequence
  Description of Artificial Sequence: Synthetic oligonucleotide
uguccaucacuccauucca

SEQ ID NO: 2014271 - RNA, 19 nt, Artificial Sequence
  Description of Artificial Sequence: Synthetic oligonucleotide
uguucuagaagcuguggua

SEQ ID NO: 2014272 - RNA, 19 nt, Artificial Sequence
  Description of Artificial Sequence: Synthetic oligonucleotide
aagguucccaacaccuagc

SEQ ID NO: 2014273 - RNA, 19 nt, Artificial Sequence
  Description of Artificial Sequence: Synthetic oligonucleotide
aggcuaaagguacgguuac

SEQ ID NO: 2014274 - RNA, 19 nt, Artificial Sequence
  Description of Artificial Sequence: Synthetic oligonucleotide
uucgaggggucagugaggg

SEQ ID NO: 2014275 - RNA, 19 nt, Artificial Sequence
  Description of Artificial Sequence: Synthetic oligonucleotide
aacuaaagcccuggggcuc

SEQ ID NO: 2014276 - RNA, 19 nt, Artificial Sequence
  Description of Artificial Sequence: Synthetic oligonucleotide
acacgaugguguuugacca

SEQ ID NO: 2014277 - RNA, 19 nt, Artificial Sequence
  Description of Artificial Sequence: Synthetic oligonucleotide
cauuauggucuucagucug

SEQ ID NO: 2014278 - RNA, 19 nt, Artificial Sequence
  Description of Artificial Sequence: Synthetic oligonucleotide
caagguucccaacaccuag

SEQ ID NO: 2014279 - RNA, 19 nt, Artificial Sequence
  Description of Artificial Sequence: Synthetic oligonucleotide
acugagggacuauggguac

SEQ ID NO: 2014280 - RNA, 19 nt, Artificial Sequence
  Description of Artificial Sequence: Synthetic oligonucleotide
acaacucauacuggcaagg

SEQ ID NO: 2014281 - RNA, 19 nt, Artificial Sequence
  Description of Artificial Sequence: Synthetic oligonucleotide
auguguacgccuguguuuc

SEQ ID NO: 2014282 - RNA, 19 nt, Artificial Sequence
  Description of Artificial Sequence: Synthetic oligonucleotide
cauccccuauuccaaaggg

SEQ ID NO: 2014283 - RNA, 19 nt, Artificial Sequence
  Description of Artificial Sequence: Synthetic oligonucleotide
agacugagggacuaugggu

SEQ ID NO: 2014284 - RNA, 19 nt, Artificial Sequence
  Description of Artificial Sequence: Synthetic oligonucleotide
ggagcuacaggguaggcug

SEQ ID NO: 2014285 - RNA, 19 nt, Artificial Sequence
  Description of Artificial Sequence: Synthetic oligonucleotide
gacgaagaaggguagagcu

SEQ ID NO: 2014286 - RNA, 19 nt, Artificial Sequence
  Description of Artificial Sequence: Synthetic oligonucleotide
guuucuaucuguucucauc

SEQ ID NO: 2014287 - RNA, 19 nt, Artificial Sequence
  Description of Artificial Sequence: Synthetic oligonucleotide
uacuucugggcccucuacc

SEQ ID NO: 2014288 - RNA, 19 nt, Artificial Sequence
  Description of Artificial Sequence: Synthetic oligonucleotide
auggugguggucuggugcg

SEQ ID NO: 2014289 - RNA, 19 nt, Artificial Sequence
  Description of Artificial Sequence: Synthetic oligonucleotide
cucauacuggcaagguucc

SEQ ID NO: 2014290 - RNA, 19 nt, Artificial Sequence
  Description of Artificial Sequence: Synthetic oligonucleotide
acauggguaaggcggugac

SEQ ID NO: 2014291 - RNA, 19 nt, Artificial Sequence
  Description of Artificial Sequence: Synthetic oligonucleotide
uuucacuagaucugagcuc

SEQ ID NO: 2014292 - RNA, 19 nt, Artificial Sequence
  Description of Artificial Sequence: Synthetic oligonucleotide
uucccaacaccuagcuggg

SEQ ID NO: 2014293 - RNA, 19 nt, Artificial Sequence
  Description of Artificial Sequence: Synthetic oligonucleotide
aggugcuugacucgggcag

SEQ ID NO: 2014294 - RNA, 19 nt, Artificial Sequence
  Description of Artificial Sequence: Synthetic oligonucleotide
cuaggcaguguucuagaag

SEQ ID NO: 2014295 - RNA, 19 nt, Artificial Sequence
  Description of Artificial Sequence: Synthetic oligonucleotide
acauuauggucuucagucu

SEQ ID NO: 2014296 - RNA, 19 nt, Artificial Sequence
  Description of Artificial Sequence: Synthetic oligonucleotide
guuucacuagaucugagcu

SEQ ID NO: 2014297 - RNA, 19 nt, Artificial Sequence
  Description of Artificial Sequence: Synthetic oligonucleotide
aaggguagagcugaggcua

SEQ ID NO: 2014298 - RNA, 19 nt, Artificial Sequence
  Description of Artificial Sequence: Synthetic oligonucleotide
cuugacucgggcagaacug

SEQ ID NO: 2014299 - RNA, 19 nt, Artificial Sequence
  Description of Artificial Sequence: Synthetic oligonucleotide
acaugaagcuggcugggug

SEQ ID NO: 2014300 - RNA, 19 nt, Artificial Sequence
  Description of Artificial Sequence: Synthetic oligonucleotide
uuauaggccuggcuguccu

SEQ ID NO: 2014301 - RNA, 19 nt, Artificial Sequence
  Description of Artificial Sequence: Synthetic oligonucleotide
uggucuggugcgcucaccc

SEQ ID NO: 2014302 - RNA, 19 nt, Artificial Sequence
  Description of Artificial Sequence: Synthetic oligonucleotide
uucgagcagagcuaucgcu

SEQ ID NO: 2014303 - RNA, 19 nt, Artificial Sequence
  Description of Artificial Sequence: Synthetic oligonucleotide
uacucuaugcuaggcagug

SEQ ID NO: 2014304 - RNA, 19 nt, Artificial Sequence
  Description of Artificial Sequence: Synthetic oligonucleotide
uucggcgaagccuuugcca

SEQ ID NO: 2014305 - RNA, 19 nt, Artificial Sequence
  Description of Artificial Sequence: Synthetic oligonucleotide
auuucccaggccuuucucu

SEQ ID NO: 2014306 - RNA, 19 nt, Artificial Sequence
  Description of Artificial Sequence: Synthetic oligonucleotide
aacucauacuggcaagguu

SEQ ID NO: 2014307 - RNA, 19 nt, Artificial Sequence
  Description of Artificial Sequence: Synthetic oligonucleotide
ugaggcuaaagguacgguu

SEQ ID NO: 2014308 - RNA, 19 nt, Artificial Sequence
  Description of Artificial Sequence: Synthetic oligonucleotide
uaucgcugaagcccuugcc

SEQ ID NO: 2014309 - RNA, 19 nt, Artificial Sequence
  Description of Artificial Sequence: Synthetic oligonucleotide
cccuguaugcacacgaugg

SEQ ID NO: 2014310 - RNA, 19 nt, Artificial Sequence
  Description of Artificial Sequence: Synthetic oligonucleotide
aguguucuagaagcugugg

SEQ ID NO: 2014311 - RNA, 19 nt, Artificial Sequence
  Description of Artificial Sequence: Synthetic oligonucleotide
acuaaagcccuggggcucc

SEQ ID NO: 2014312 - RNA, 19 nt, Artificial Sequence
  Description of Artificial Sequence: Synthetic oligonucleotide
caaagguuaggguuuccuc

SEQ ID NO: 2014313 - RNA, 19 nt, Artificial Sequence
  Description of Artificial Sequence: Synthetic oligonucleotide
gaggcuugucaccugccag

SEQ ID NO: 2014314 - RNA, 19 nt, Artificial Sequence
  Description of Artificial Sequence: Synthetic oligonucleotide
aggggcuagugccaagagg

SEQ ID NO: 2014315 - RNA, 19 nt, Artificial Sequence
  Description of Artificial Sequence: Synthetic oligonucleotide
uggugaccccuccuggagg

SEQ ID NO: 2014316 - RNA, 19 nt, Artificial Sequence
  Description of Artificial Sequence: Synthetic oligonucleotide
aucagagcuucggcgaagc

SEQ ID NO: 2014317 - RNA, 19 nt, Artificial Sequence
  Description of Artificial Sequence: Synthetic oligonucleotide
gaccagaucagagcuucgg

SEQ ID NO: 2014318 - RNA, 19 nt, Artificial Sequence
  Description of Artificial Sequence: Synthetic oligonucleotide
uugaccagaucagagcuuc

SEQ ID NO: 2014319 - RNA, 19 nt, Artificial Sequence
  Description of Artificial Sequence: Synthetic oligonucleotide
ugucagcaaaacccuugcc

SEQ ID NO: 2014320 - RNA, 19 nt, Artificial Sequence
  Description of Artificial Sequence: Synthetic oligonucleotide
cacucaggacacuugugag

SEQ ID NO: 2014321 - RNA, 19 nt, Artificial Sequence
  Description of Artificial Sequence: Synthetic oligonucleotide
ugacgaagaaggguagagc

SEQ ID NO: 2014322 - RNA, 19 nt, Artificial Sequence
  Description of Artificial Sequence: Synthetic oligonucleotide
guuugaccagaucagagcu

SEQ ID NO: 2014323 - RNA, 19 nt, Artificial Sequence
  Description of Artificial Sequence: Synthetic oligonucleotide
uauguguacgccuguguuu

SEQ ID NO: 2014324 - RNA, 19 nt, Artificial Sequence
  Description of Artificial Sequence: Synthetic oligonucleotide
auccccuauuccaaagggc

SEQ ID NO: 2014325 - RNA, 19 nt, Artificial Sequence
  Description of Artificial Sequence: Synthetic oligonucleotide
guacaacucauacuggcaa

SEQ ID NO: 2014326 - RNA, 19 nt, Artificial Sequence
  Description of Artificial Sequence: Synthetic oligonucleotide
gggccuuaagaccaggugc

SEQ ID NO: 2014327 - RNA, 19 nt, Artificial Sequence
  Description of Artificial Sequence: Synthetic oligonucleotide
guuauguggccgcaggaga

SEQ ID NO: 2014328 - RNA, 19 nt, Artificial Sequence
  Description of Artificial Sequence: Synthetic oligonucleotide
uaagaccaggugcccacgc

SEQ ID NO: 2014329 - RNA, 19 nt, Artificial Sequence
  Description of Artificial Sequence: Synthetic oligonucleotide
agguuaggguuuccucccc

SEQ ID NO: 2014330 - RNA, 19 nt, Artificial Sequence
  Description of Artificial Sequence: Synthetic oligonucleotide
guguuugaccagaucagag

SEQ ID NO: 2014331 - RNA, 19 nt, Artificial Sequence
  Description of Artificial Sequence: Synthetic oligonucleotide
ucuaugcuaggcaguguuc

SEQ ID NO: 2014332 - RNA, 19 nt, Artificial Sequence
  Description of Artificial Sequence: Synthetic oligonucleotide
uacgccuguguuucacuag

SEQ ID NO: 2014333 - RNA, 19 nt, Artificial Sequence
  Description of Artificial Sequence: Synthetic oligonucleotide
agggccuuaagaccaggug

SEQ ID NO: 2014334 - RNA, 19 nt, Artificial Sequence
  Description of Artificial Sequence: Synthetic oligonucleotide
ccagaucagagcuucggcg

SEQ ID NO: 2014335 - RNA, 19 nt, Artificial Sequence
  Description of Artificial Sequence: Synthetic oligonucleotide
accgaccauccccuauucc

SEQ ID NO: 2014336 - RNA, 19 nt, Artificial Sequence
  Description of Artificial Sequence: Synthetic oligonucleotide
gugacgaagaaggguagag

SEQ ID NO: 2014337 - RNA, 19 nt, Artificial Sequence
  Description of Artificial Sequence: Synthetic oligonucleotide
guaggcugagaaacuaaag

SEQ ID NO: 2014338 - RNA, 19 nt, Artificial Sequence
  Description of Artificial Sequence: Synthetic oligonucleotide
uuaagaccaggugcccacg

SEQ ID NO: 2014339 - RNA, 19 nt, Artificial Sequence
  Description of Artificial Sequence: Synthetic oligonucleotide
ugcggaggugcuugacucg

SEQ ID NO: 2014340 - RNA, 19 nt, Artificial Sequence
  Description of Artificial Sequence: Synthetic oligonucleotide
uagugccaagaggaggugg

SEQ ID NO: 2014341 - RNA, 19 nt, Artificial Sequence
  Description of Artificial Sequence: Synthetic oligonucleotide
accggguggguuauguggc

SEQ ID NO: 2014342 - RNA, 19 nt, Artificial Sequence
  Description of Artificial Sequence: Synthetic oligonucleotide
ggacuauggguacuggacc

SEQ ID NO: 2014343 - RNA, 19 nt, Artificial Sequence
  Description of Artificial Sequence: Synthetic oligonucleotide
aagaccaggugcccacgcu

SEQ ID NO: 2014344 - RNA, 19 nt, Artificial Sequence
  Description of Artificial Sequence: Synthetic oligonucleotide
ugaccagaucagagcuucg

SEQ ID NO: 2014345 - RNA, 19 nt, Artificial Sequence
  Description of Artificial Sequence: Synthetic oligonucleotide
uggcaagguucccaacacc

SEQ ID NO: 2014346 - RNA, 19 nt, Artificial Sequence
  Description of Artificial Sequence: Synthetic oligonucleotide
agcuggugaccccuccugg

SEQ ID NO: 2014347 - RNA, 19 nt, Artificial Sequence
  Description of Artificial Sequence: Synthetic oligonucleotide
ucuggugcgcucacccuga

SEQ ID NO: 2014348 - RNA, 19 nt, Artificial Sequence
  Description of Artificial Sequence: Synthetic oligonucleotide
uucuaucuguucucauccu

SEQ ID NO: 2014349 - RNA, 19 nt, Artificial Sequence
  Description of Artificial Sequence: Synthetic oligonucleotide
ugagggacuauggguacug

SEQ ID NO: 2014350 - RNA, 19 nt, Artificial Sequence
  Description of Artificial Sequence: Synthetic oligonucleotide
ugcuaggcaguguucuaga

SEQ ID NO: 2014351 - RNA, 19 nt, Artificial Sequence
  Description of Artificial Sequence: Synthetic oligonucleotide
uugauucgagcagagcuau

SEQ ID NO: 2014352 - RNA, 19 nt, Artificial Sequence
  Description of Artificial Sequence: Synthetic oligonucleotide
gaugguguuugaccagauc

SEQ ID NO: 2014353 - RNA, 19 nt, Artificial Sequence
  Description of Artificial Sequence: Synthetic oligonucleotide
gcugugguacaacucauac

SEQ ID NO: 2014354 - RNA, 19 nt, Artificial Sequence
  Description of Artificial Sequence: Synthetic oligonucleotide
cucuguguuauaggccugg

SEQ ID NO: 2014355 - RNA, 19 nt, Artificial Sequence
  Description of Artificial Sequence: Synthetic oligonucleotide
guuaggguuuccuccccug

SEQ ID NO: 2014356 - RNA, 19 nt, Artificial Sequence
  Description of Artificial Sequence: Synthetic oligonucleotide
acuauggguacuggaccgg

SEQ ID NO: 2014357 - RNA, 19 nt, Artificial Sequence
  Description of Artificial Sequence: Synthetic oligonucleotide
uuugaccagaucagagcuu

SEQ ID NO: 2014358 - RNA, 19 nt, Artificial Sequence
  Description of Artificial Sequence: Synthetic oligonucleotide
uaagccaggcaggccaaag

SEQ ID NO: 2014359 - RNA, 19 nt, Artificial Sequence
  Description of Artificial Sequence: Synthetic oligonucleotide
augcuaggcaguguucuag

SEQ ID NO: 2014360 - RNA, 19 nt, Artificial Sequence
  Description of Artificial Sequence: Synthetic oligonucleotide
cuaucgcugaagcccuugc

SEQ ID NO: 2014361 - RNA, 19 nt, Artificial Sequence
  Description of Artificial Sequence: Synthetic oligonucleotide
cuugauucgagcagagcua

SEQ ID NO: 2014362 - RNA, 19 nt, Artificial Sequence
  Description of Artificial Sequence: Synthetic oligonucleotide
gcuugauucgagcagagcu

SEQ ID NO: 2014363 - RNA, 19 nt, Artificial Sequence
  Description of Artificial Sequence: Synthetic oligonucleotide
uguacgccuguguuucacu

SEQ ID NO: 2014364 - RNA, 19 nt, Artificial Sequence
  Description of Artificial Sequence: Synthetic oligonucleotide
cuguaugcacacgauggug

SEQ ID NO: 2014365 - RNA, 19 nt, Artificial Sequence
  Description of Artificial Sequence: Synthetic oligonucleotide
acgccuguguuucacuaga

SEQ ID NO: 2014366 - RNA, 19 nt, Artificial Sequence
  Description of Artificial Sequence: Synthetic oligonucleotide
acacaugaagcuggcuggg

SEQ ID NO: 2014367 - RNA, 19 nt, Artificial Sequence
  Description of Artificial Sequence: Synthetic oligonucleotide
agggacuauggguacugga

SEQ ID NO: 2014368 - RNA, 19 nt, Artificial Sequence
  Description of Artificial Sequence: Synthetic oligonucleotide
gaggcuaaagguacgguua

SEQ ID NO: 2014369 - RNA, 19 nt, Artificial Sequence
  Description of Artificial Sequence: Synthetic oligonucleotide
gacugagggacuaugggua

SEQ ID NO: 2014370 - RNA, 19 nt, Artificial Sequence
  Description of Artificial Sequence: Synthetic oligonucleotide
accuagcuggguuuccuga

SEQ ID NO: 2014371 - RNA, 19 nt, Artificial Sequence
  Description of Artificial Sequence: Synthetic oligonucleotide
auacuggcaagguucccaa

SEQ ID NO: 2014372 - RNA, 19 nt, Artificial Sequence
  Description of Artificial Sequence: Synthetic oligonucleotide
ugaggggcuagugccaaga

SEQ ID NO: 2014373 - RNA, 19 nt, Artificial Sequence
  Description of Artificial Sequence: Synthetic oligonucleotide
caggugcccacgcuggugc

SEQ ID NO: 2014374 - RNA, 19 nt, Artificial Sequence
  Description of Artificial Sequence: Synthetic oligonucleotide
ucuaagccaggcaggccaa

SEQ ID NO: 2014375 - RNA, 19 nt, Artificial Sequence
  Description of Artificial Sequence: Synthetic oligonucleotide
cuauggguacuggaccggg

SEQ ID NO: 2014376 - RNA, 19 nt, Artificial Sequence
  Description of Artificial Sequence: Synthetic oligonucleotide
auuauggucuucagucugu

SEQ ID NO: 2014377 - RNA, 19 nt, Artificial Sequence
  Description of Artificial Sequence: Synthetic oligonucleotide
uauggguacuggaccgggu

SEQ ID NO: 2014378 - RNA, 19 nt, Artificial Sequence
  Description of Artificial Sequence: Synthetic oligonucleotide
ucgagacugagggacuaug

SEQ ID NO: 2014379 - RNA, 19 nt, Artificial Sequence
  Description of Artificial Sequence: Synthetic oligonucleotide
ugaccgaccauccccuauu

SEQ ID NO: 2014380 - RNA, 19 nt, Artificial Sequence
  Description of Artificial Sequence: Synthetic oligonucleotide
uugacucgggcagaacugu

SEQ ID NO: 2014381 - RNA, 19 nt, Artificial Sequence
  Description of Artificial Sequence: Synthetic oligonucleotide
agcaaaacccuugccacau

SEQ ID NO: 2014382 - RNA, 19 nt, Artificial Sequence
  Description of Artificial Sequence: Synthetic oligonucleotide
guagauggugguggucugg

SEQ ID NO: 2014383 - RNA, 19 nt, Artificial Sequence
  Description of Artificial Sequence: Synthetic oligonucleotide
ggggcuagugccaagagga

SEQ ID NO: 2014384 - RNA, 19 nt, Artificial Sequence
  Description of Artificial Sequence: Synthetic oligonucleotide
agaguagaugguggugguc

SEQ ID NO: 2014385 - RNA, 19 nt, Artificial Sequence
  Description of Artificial Sequence: Synthetic oligonucleotide
gucuggugcgcucacccug

SEQ ID NO: 2014386 - RNA, 19 nt, Artificial Sequence
  Description of Artificial Sequence: Synthetic oligonucleotide
uguggccgcaggagaguag

SEQ ID NO: 2014387 - RNA, 19 nt, Artificial Sequence
  Description of Artificial Sequence: Synthetic oligonucleotide
gguuauguggccgcaggag

SEQ ID NO: 2014388 - RNA, 19 nt, Artificial Sequence
  Description of Artificial Sequence: Synthetic oligonucleotide
ccaaagggccuuaagacca

SEQ ID NO: 2014389 - RNA, 19 nt, Artificial Sequence
  Description of Artificial Sequence: Synthetic oligonucleotide
aagggcccaucacuggaau

SEQ ID NO: 2014390 - RNA, 19 nt, Artificial Sequence
  Description of Artificial Sequence: Synthetic oligonucleotide
gaggggagcuacaggguag

SEQ ID NO: 2014391 - RNA, 19 nt, Artificial Sequence
  Description of Artificial Sequence: Synthetic oligonucleotide
cucuacucuaugcuaggca

SEQ ID NO: 2014392 - RNA, 19 nt, Artificial Sequence
  Description of Artificial Sequence: Synthetic oligonucleotide
gaguagauggugguggucu

SEQ ID NO: 2014393 - RNA, 19 nt, Artificial Sequence
  Description of Artificial Sequence: Synthetic oligonucleotide
uccugaguaugaacauuau

SEQ ID NO: 2014394 - RNA, 19 nt, Artificial Sequence
  Description of Artificial Sequence: Synthetic oligonucleotide
caaagggccuuaagaccag

SEQ ID NO: 2014395 - RNA, 19 nt, Artificial Sequence
  Description of Artificial Sequence: Synthetic oligonucleotide
uagcuggguuuccugagua

SEQ ID NO: 2014396 - RNA, 19 nt, Artificial Sequence
  Description of Artificial Sequence: Synthetic oligonucleotide
gguuuccuccccuguaugc

SEQ ID NO: 2014397 - RNA, 19 nt, Artificial Sequence
  Description of Artificial Sequence: Synthetic oligonucleotide
cacgaugguguuugaccag

SEQ ID NO: 2014398 - RNA, 19 nt, Artificial Sequence
  Description of Artificial Sequence: Synthetic oligonucleotide
gaaggguagagcugaggcu

SEQ ID NO: 2014399 - RNA, 19 nt, Artificial Sequence
  Description of Artificial Sequence: Synthetic oligonucleotide
uguuauaggccuggcuguc

SEQ ID NO: 2014400 - RNA, 19 nt, Artificial Sequence
  Description of Artificial Sequence: Synthetic oligonucleotide
uggguuccccagccugugg

SEQ ID NO: 2014401 - RNA, 19 nt, Artificial Sequence
  Description of Artificial Sequence: Synthetic oligonucleotide
ucguuucaagacaggguuu

SEQ ID NO: 2014402 - RNA, 19 nt, Artificial Sequence
  Description of Artificial Sequence: Synthetic oligonucleotide
uaugcuaggcaguguucua

SEQ ID NO: 2014403 - RNA, 19 nt, Artificial Sequence
  Description of Artificial Sequence: Synthetic oligonucleotide
ucuguguuauaggccuggc

SEQ ID NO: 2014404 - RNA, 19 nt, Artificial Sequence
  Description of Artificial Sequence: Synthetic oligonucleotide
gaggggcuagugccaagag

SEQ ID NO: 2014405 - RNA, 19 nt, Artificial Sequence
  Description of Artificial Sequence: Synthetic oligonucleotide
cuggugaccccuccuggag

SEQ ID NO: 2014406 - RNA, 19 nt, Artificial Sequence
  Description of Artificial Sequence: Synthetic oligonucleotide
gguucuaagccaggcaggc

SEQ ID NO: 2014407 - RNA, 19 nt, Artificial Sequence
  Description of Artificial Sequence: Synthetic oligonucleotide
cuucggcgaagccuuugcc

SEQ ID NO: 2014408 - RNA, 19 nt, Artificial Sequence
  Description of Artificial Sequence: Synthetic oligonucleotide
cuggacuguccaucacucc

SEQ ID NO: 2014409 - RNA, 19 nt, Artificial Sequence
  Description of Artificial Sequence: Synthetic oligonucleotide
cuucagucuguuucuaucu

SEQ ID NO: 2014410 - RNA, 19 nt, Artificial Sequence
  Description of Artificial Sequence: Synthetic oligonucleotide
cauacuggcaagguuccca

SEQ ID NO: 2014411 - RNA, 19 nt, Artificial Sequence
  Description of Artificial Sequence: Synthetic oligonucleotide
gugcggaggugcuugacuc

SEQ ID NO: 2014412 - RNA, 19 nt, Artificial Sequence
  Description of Artificial Sequence: Synthetic oligonucleotide
cuggugcuugauucgagca

SEQ ID NO: 2014413 - RNA, 19 nt, Artificial Sequence
  Description of Artificial Sequence: Synthetic oligonucleotide
uugaccgaccauccccuau

SEQ ID NO: 2014414 - RNA, 19 nt, Artificial Sequence
  Description of Artificial Sequence: Synthetic oligonucleotide
agugccaagaggagguggu

SEQ ID NO: 2014415 - RNA, 19 nt, Artificial Sequence
  Description of Artificial Sequence: Synthetic oligonucleotide
uccauuccagcuggugacc

SEQ ID NO: 2014416 - RNA, 19 nt, Artificial Sequence
  Description of Artificial Sequence: Synthetic oligonucleotide
agagcuucggcgaagccuu

SEQ ID NO: 2014417 - RNA, 19 nt, Artificial Sequence
  Description of Artificial Sequence: Synthetic oligonucleotide
cacuagaucugagcuccgg

SEQ ID NO: 2014418 - RNA, 19 nt, Artificial Sequence
  Description of Artificial Sequence: Synthetic oligonucleotide
cuacaggguaggcugagaa

SEQ ID NO: 2014419 - RNA, 19 nt, Artificial Sequence
  Description of Artificial Sequence: Synthetic oligonucleotide
gaagaaggguagagcugag

SEQ ID NO: 2014420 - RNA, 19 nt, Artificial Sequence
  Description of Artificial Sequence: Synthetic oligonucleotide
gccuugaccgaccaucccc

SEQ ID NO: 2014421 - RNA, 19 nt, Artificial Sequence
  Description of Artificial Sequence: Synthetic oligonucleotide
guuauaggccuggcugucc

SEQ ID NO: 2014422 - RNA, 19 nt, Artificial Sequence
  Description of Artificial Sequence: Synthetic oligonucleotide
acgaagaaggguagagcug

SEQ ID NO: 2014423 - RNA, 19 nt, Artificial Sequence
  Description of Artificial Sequence: Synthetic oligonucleotide
uggggaugaggggagcuac

SEQ ID NO: 2014424 - RNA, 19 nt, Artificial Sequence
  Description of Artificial Sequence: Synthetic oligonucleotide
uacuggaccggguggguua

SEQ ID NO: 2014425 - RNA, 19 nt, Artificial Sequence
  Description of Artificial Sequence: Synthetic oligonucleotide
aggggagcuacaggguagg

SEQ ID NO: 2014426 - RNA, 19 nt, Artificial Sequence
  Description of Artificial Sequence: Synthetic oligonucleotide
gggacuauggguacuggac

SEQ ID NO: 2014427 - RNA, 19 nt, Artificial Sequence
  Description of Artificial Sequence: Synthetic oligonucleotide
ugcuugauucgagcagagc

SEQ ID NO: 2014428 - RNA, 19 nt, Artificial Sequence
  Description of Artificial Sequence: Synthetic oligonucleotide
ggcuagugccaagaggagg

SEQ ID NO: 2014429 - RNA, 19 nt, Artificial Sequence
  Description of Artificial Sequence: Synthetic oligonucleotide
gaccccuccuggaggaggg

SEQ ID NO: 2014430 - RNA, 19 nt, Artificial Sequence
  Description of Artificial Sequence: Synthetic oligonucleotide
acgaugguguuugaccaga

SEQ ID NO: 2014431 - RNA, 19 nt, Artificial Sequence
  Description of Artificial Sequence: Synthetic oligonucleotide
ccuguguuucacuagaucu

SEQ ID NO: 2014432 - RNA, 19 nt, Artificial Sequence
  Description of Artificial Sequence: Synthetic oligonucleotide
aagggccuuaagaccaggu

SEQ ID NO: 2014433 - RNA, 19 nt, Artificial Sequence
  Description of Artificial Sequence: Synthetic oligonucleotide
gaacugucagcaaaacccu

SEQ ID NO: 2014434 - RNA, 19 nt, Artificial Sequence
  Description of Artificial Sequence: Synthetic oligonucleotide
aggaggggccuugaccgac

SEQ ID NO: 2014435 - RNA, 19 nt, Artificial Sequence
  Description of Artificial Sequence: Synthetic oligonucleotide
guguucuagaagcuguggu

SEQ ID NO: 2014436 - RNA, 19 nt, Artificial Sequence
  Description of Artificial Sequence: Synthetic oligonucleotide
gcuggugcuugauucgagc

SEQ ID NO: 2014437 - RNA, 19 nt, Artificial Sequence
  Description of Artificial Sequence: Synthetic oligonucleotide
guacuucugggcccucuac

SEQ ID NO: 2014438 - RNA, 19 nt, Artificial Sequence
  Description of Artificial Sequence: Synthetic oligonucleotide
ucauacuggcaagguuccc

SEQ ID NO: 2014439 - RNA, 19 nt, Artificial Sequence
  Description of Artificial Sequence: Synthetic oligonucleotide
uguguacgccuguguuuca

SEQ ID NO: 2014440 - RNA, 19 nt, Artificial Sequence
  Description of Artificial Sequence: Synthetic oligonucleotide
gguagagcugaggcuaaag

SEQ ID NO: 2014441 - RNA, 19 nt, Artificial Sequence
  Description of Artificial Sequence: Synthetic oligonucleotide
ugcgcucacccugaugggu

SEQ ID NO: 2014442 - RNA, 19 nt, Artificial Sequence
  Description of Artificial Sequence: Synthetic oligonucleotide
cacuggaaugugaagggcu

SEQ ID NO: 2014443 - RNA, 19 nt, Artificial Sequence
  Description of Artificial Sequence: Synthetic oligonucleotide
agggcccaucacuggaaug

SEQ ID NO: 2014444 - RNA, 19 nt, Artificial Sequence
  Description of Artificial Sequence: Synthetic oligonucleotide
uggaccggguggguuaugu

SEQ ID NO: 2014445 - RNA, 19 nt, Artificial Sequence
  Description of Artificial Sequence: Synthetic oligonucleotide
ccauccccuauuccaaagg

SEQ ID NO: 2014446 - RNA, 19 nt, Artificial Sequence
  Description of Artificial Sequence: Synthetic oligonucleotide
ggugcuugauucgagcaga

SEQ ID NO: 2014447 - RNA, 19 nt, Artificial Sequence
  Description of Artificial Sequence: Synthetic oligonucleotide
uccccuguaugcacacgau

SEQ ID NO: 2014448 - RNA, 19 nt, Artificial Sequence
  Description of Artificial Sequence: Synthetic oligonucleotide
uacccucccuggacugucc

SEQ ID NO: 2014449 - RNA, 19 nt, Artificial Sequence
  Description of Artificial Sequence: Synthetic oligonucleotide
gcuggguuuccugaguaug

SEQ ID NO: 2014450 - RNA, 19 nt, Artificial Sequence
  Description of Artificial Sequence: Synthetic oligonucleotide
ggcaguguucuagaagcug

SEQ ID NO: 2014451 - RNA, 19 nt, Artificial Sequence
  Description of Artificial Sequence: Synthetic oligonucleotide
gagaguagauggugguggu

SEQ ID NO: 2014452 - RNA, 19 nt, Artificial Sequence
  Description of Artificial Sequence: Synthetic oligonucleotide
guucuaagccaggcaggcc

SEQ ID NO: 2014453 - RNA, 19 nt, Artificial Sequence
  Description of Artificial Sequence: Synthetic oligonucleotide
caguauguguacgccugug

SEQ ID NO: 2014454 - RNA, 19 nt, Artificial Sequence
  Description of Artificial Sequence: Synthetic oligonucleotide
caccuagcuggguuuccug

SEQ ID NO: 2014455 - RNA, 19 nt, Artificial Sequence
  Description of Artificial Sequence: Synthetic oligonucleotide
cuggccccgcccucgagac

SEQ ID NO: 2014456 - RNA, 19 nt, Artificial Sequence
  Description of Artificial Sequence: Synthetic oligonucleotide
uacuggcaagguucccaac

SEQ ID NO: 2014457 - RNA, 19 nt, Artificial Sequence
  Description of Artificial Sequence: Synthetic oligonucleotide
agcuacaggguaggcugag

SEQ ID NO: 2014458 - RNA, 19 nt, Artificial Sequence
  Description of Artificial Sequence: Synthetic oligonucleotide
gaccgaccauccccuauuc

SEQ ID NO: 2014459 - RNA, 19 nt, Artificial Sequence
  Description of Artificial Sequence: Synthetic oligonucleotide
uaugcacacgaugguguuu

SEQ ID NO: 2014460 - RNA, 19 nt, Artificial Sequence
  Description of Artificial Sequence: Synthetic oligonucleotide
uagaggccuggccccgccc

SEQ ID NO: 2014461 - RNA, 19 nt, Artificial Sequence
  Description of Artificial Sequence: Synthetic oligonucleotide
cuaugcuaggcaguguucu

SEQ ID NO: 2014462 - RNA, 19 nt, Artificial Sequence
  Description of Artificial Sequence: Synthetic oligonucleotide
gugcgcucacccugauggg

SEQ ID NO: 2014463 - RNA, 19 nt, Artificial Sequence
  Description of Artificial Sequence: Synthetic oligonucleotide
agcuggguuuccugaguau

SEQ ID NO: 2014464 - RNA, 19 nt, Artificial Sequence
  Description of Artificial Sequence: Synthetic oligonucleotide
ccacgcuggugcuugauuc

SEQ ID NO: 2014465 - RNA, 19 nt, Artificial Sequence
  Description of Artificial Sequence: Synthetic oligonucleotide
ggguuuccugaguaugaac

SEQ ID NO: 2014466 - RNA, 19 nt, Artificial Sequence
  Description of Artificial Sequence: Synthetic oligonucleotide
gugcuugauucgagcagag

SEQ ID NO: 2014467 - RNA, 19 nt, Artificial Sequence
  Description of Artificial Sequence: Synthetic oligonucleotide
gguucccaacaccuagcug

SEQ ID NO: 2014468 - RNA, 19 nt, Artificial Sequence
  Description of Artificial Sequence: Synthetic oligonucleotide
gcuucggcgaagccuuugc

SEQ ID NO: 2014469 - RNA, 19 nt, Artificial Sequence
  Description of Artificial Sequence: Synthetic oligonucleotide
ccgaccauccccuauucca

SEQ ID NO: 2014470 - RNA, 19 nt, Artificial Sequence
  Description of Artificial Sequence: Synthetic oligonucleotide
gaccauccccuauuccaaa

SEQ ID NO: 2014471 - RNA, 19 nt, Artificial Sequence
  Description of Artificial Sequence: Synthetic oligonucleotide
guacgccuguguuucacua

SEQ ID NO: 2014472 - RNA, 19 nt, Artificial Sequence
  Description of Artificial Sequence: Synthetic oligonucleotide
ccaucacuggaaugugaag

SEQ ID NO: 2014473 - RNA, 19 nt, Artificial Sequence
  Description of Artificial Sequence: Synthetic oligonucleotide
guagaggccuggccccgcc

SEQ ID NO: 2014474 - RNA, 19 nt, Artificial Sequence
  Description of Artificial Sequence: Synthetic oligonucleotide
cuggguguagaggccuggc

SEQ ID NO: 2014475 - RNA, 19 nt, Artificial Sequence
  Description of Artificial Sequence: Synthetic oligonucleotide
ucccucccaccauuuccca

SEQ ID NO: 2014476 - RNA, 19 nt, Artificial Sequence
  Description of Artificial Sequence: Synthetic oligonucleotide
guguagaggccuggccccg

SEQ ID NO: 2014477 - RNA, 19 nt, Artificial Sequence
  Description of Artificial Sequence: Synthetic oligonucleotide
cacuccauuccagcuggug

SEQ ID NO: 2014478 - RNA, 19 nt, Artificial Sequence
  Description of Artificial Sequence: Synthetic oligonucleotide
uguagaggccuggccccgc

SEQ ID NO: 2014479 - RNA, 19 nt, Artificial Sequence
  Description of Artificial Sequence: Synthetic oligonucleotide
gguaggcugagaaacuaaa

SEQ ID NO: 2014480 - RNA, 19 nt, Artificial Sequence
  Description of Artificial Sequence: Synthetic oligonucleotide
ugcacacgaugguguuuga

SEQ ID NO: 2014481 - RNA, 19 nt, Artificial Sequence
  Description of Artificial Sequence: Synthetic oligonucleotide
cugugguacaacucauacu

SEQ ID NO: 2014482 - RNA, 19 nt, Artificial Sequence
  Description of Artificial Sequence: Synthetic oligonucleotide
gcuugacucgggcagaacu

SEQ ID NO: 2014483 - RNA, 19 nt, Artificial Sequence
  Description of Artificial Sequence: Synthetic oligonucleotide
ucccaccauuucccaggcc

SEQ ID NO: 2014484 - RNA, 19 nt, Artificial Sequence
  Description of Artificial Sequence: Synthetic oligonucleotide
ggugaccccuccuggagga

SEQ ID NO: 2014485 - RNA, 19 nt, Artificial Sequence
  Description of Artificial Sequence: Synthetic oligonucleotide
augaggggagcuacagggu

SEQ ID NO: 2014486 - RNA, 19 nt, Artificial Sequence
  Description of Artificial Sequence: Synthetic oligonucleotide
cucccuggacuguccauca

SEQ ID NO: 2014487 - RNA, 19 nt, Artificial Sequence
  Description of Artificial Sequence: Synthetic oligonucleotide
uggguaaggcggugacgaa

SEQ ID NO: 2014488 - RNA, 19 nt, Artificial Sequence
  Description of Artificial Sequence: Synthetic oligonucleotide
cucuaugcuaggcaguguu

SEQ ID NO: 2014489 - RNA, 19 nt, Artificial Sequence
  Description of Artificial Sequence: Synthetic oligonucleotide
ugugggcccacaggcucug

SEQ ID NO: 2014490 - RNA, 19 nt, Artificial Sequence
  Description of Artificial Sequence: Synthetic oligonucleotide
ggguggguuauguggccgc

SEQ ID NO: 2014491 - RNA, 19 nt, Artificial Sequence
  Description of Artificial Sequence: Synthetic oligonucleotide
ggguuuccuccccuguaug

SEQ ID NO: 2014492 - RNA, 19 nt, Artificial Sequence
  Description of Artificial Sequence: Synthetic oligonucleotide
guguacgccuguguuucac

SEQ ID NO: 2014493 - RNA, 19 nt, Artificial Sequence
  Description of Artificial Sequence: Synthetic oligonucleotide
ggggccuugaccgaccauc

SEQ ID NO: 2014494 - RNA, 19 nt, Artificial Sequence
  Description of Artificial Sequence: Synthetic oligonucleotide
guggguuauguggccgcag

SEQ ID NO: 2014495 - RNA, 19 nt, Artificial Sequence
  Description of Artificial Sequence: Synthetic oligonucleotide
gccuguguuucacuagauc

SEQ ID NO: 2014496 - RNA, 19 nt, Artificial Sequence
  Description of Artificial Sequence: Synthetic oligonucleotide
ucacuccauuccagcuggu

SEQ ID NO: 2014497 - RNA, 19 nt, Artificial Sequence
  Description of Artificial Sequence: Synthetic oligonucleotide
acucuaugcuaggcagugu

SEQ ID NO: 2014498 - RNA, 19 nt, Artificial Sequence
  Description of Artificial Sequence: Synthetic oligonucleotide
gcuagugccaagaggaggu

SEQ ID NO: 2014499 - RNA, 19 nt, Artificial Sequence
  Description of Artificial Sequence: Synthetic oligonucleotide
gcccucgagacugagggac

SEQ ID NO: 2014500 - RNA, 19 nt, Artificial Sequence
  Description of Artificial Sequence: Synthetic oligonucleotide
gcggaggugcuugacucgg

SEQ ID NO: 2014501 - RNA, 19 nt, Artificial Sequence
  Description of Artificial Sequence: Synthetic oligonucleotide
cuacucuaugcuaggcagu

SEQ ID NO: 2014502 - RNA, 19 nt, Artificial Sequence
  Description of Artificial Sequence: Synthetic oligonucleotide
ggcaagguucccaacaccu

SEQ ID NO: 2014503 - RNA, 19 nt, Artificial Sequence
  Description of Artificial Sequence: Synthetic oligonucleotide
ugggcccucuacccucccu

SEQ ID NO: 2014504 - RNA, 19 nt, Artificial Sequence
  Description of Artificial Sequence: Synthetic oligonucleotide
cagugaggggcuagugcca

SEQ ID NO: 2014505 - RNA, 19 nt, Artificial Sequence
  Description of Artificial Sequence: Synthetic oligonucleotide
gggcccucuacccucccug

SEQ ID NO: 2014506 - RNA, 19 nt, Artificial Sequence
  Description of Artificial Sequence: Synthetic oligonucleotide
acgcuggugcuugauucga

SEQ ID NO: 2014507 - RNA, 19 nt, Artificial Sequence
  Description of Artificial Sequence: Synthetic oligonucleotide
gugcccacgcuggugcuug

SEQ ID NO: 2014508 - RNA, 19 nt, Artificial Sequence
  Description of Artificial Sequence: Synthetic oligonucleotide
agcuucggcgaagccuuug

SEQ ID NO: 2014509 - RNA, 19 nt, Artificial Sequence
  Description of Artificial Sequence: Synthetic oligonucleotide
uggugguggucuggugcgc

SEQ ID NO: 2014510 - RNA, 19 nt, Artificial Sequence
  Description of Artificial Sequence: Synthetic oligonucleotide
gcagaacugucagcaaaac

SEQ ID NO: 2014511 - RNA, 19 nt, Artificial Sequence
  Description of Artificial Sequence: Synthetic oligonucleotide
cgaagaaggguagagcuga

SEQ ID NO: 2014512 - RNA, 19 nt, Artificial Sequence
  Description of Artificial Sequence: Synthetic oligonucleotide
aggguuucucuguguuaua

SEQ ID NO: 2014513 - RNA, 19 nt, Artificial Sequence
  Description of Artificial Sequence: Synthetic oligonucleotide
ggguuauguggccgcagga

SEQ ID NO: 2014514 - RNA, 19 nt, Artificial Sequence
  Description of Artificial Sequence: Synthetic oligonucleotide
gagcuacaggguaggcuga

SEQ ID NO: 2014515 - RNA, 19 nt, Artificial Sequence
  Description of Artificial Sequence: Synthetic oligonucleotide
agggcuucgaggggucagu

SEQ ID NO: 2014516 - RNA, 19 nt, Artificial Sequence
  Description of Artificial Sequence: Synthetic oligonucleotide
cagaaaccacacacaugaa

SEQ ID NO: 2014517 - RNA, 19 nt, Artificial Sequence
  Description of Artificial Sequence: Synthetic oligonucleotide
guggguuccccagccugug

SEQ ID NO: 2014518 - RNA, 19 nt, Artificial Sequence
  Description of Artificial Sequence: Synthetic oligonucleotide
gcggugacgaagaagggua

SEQ ID NO: 2014519 - RNA, 19 nt, Artificial Sequence
  Description of Artificial Sequence: Synthetic oligonucleotide
ugcuugacucgggcagaac

SEQ ID NO: 2014520 - RNA, 19 nt, Artificial Sequence
  Description of Artificial Sequence: Synthetic oligonucleotide
cuguguuauaggccuggcu

SEQ ID NO: 2014521 - RNA, 19 nt, Artificial Sequence
  Description of Artificial Sequence: Synthetic oligonucleotide
guaaggcggugacgaagaa

SEQ ID NO: 2014522 - RNA, 19 nt, Artificial Sequence
  Description of Artificial Sequence: Synthetic oligonucleotide
ggcgaagccuuugccacac

SEQ ID NO: 2014523 - RNA, 19 nt, Artificial Sequence
  Description of Artificial Sequence: Synthetic oligonucleotide
cuagcuggguuuccugagu

SEQ ID NO: 2014524 - RNA, 19 nt, Artificial Sequence
  Description of Artificial Sequence: Synthetic oligonucleotide
ggacaaagguuaggguuuc

SEQ ID NO: 2014525 - RNA, 19 nt, Artificial Sequence
  Description of Artificial Sequence: Synthetic oligonucleotide
gaagggcuucgagggguca

SEQ ID NO: 2014526 - RNA, 19 nt, Artificial Sequence
  Description of Artificial Sequence: Synthetic oligonucleotide
ggccgcaggagaguagaug

SEQ ID NO: 2014527 - RNA, 19 nt, Artificial Sequence
  Description of Artificial Sequence: Synthetic oligonucleotide
guaugcacacgaugguguu

SEQ ID NO: 2014528 - RNA, 19 nt, Artificial Sequence
  Description of Artificial Sequence: Synthetic oligonucleotide
gcuggugaccccuccugga

SEQ ID NO: 2014529 - RNA, 19 nt, Artificial Sequence
  Description of Artificial Sequence: Synthetic oligonucleotide
ggugacgaagaaggguaga

SEQ ID NO: 2014530 - RNA, 19 nt, Artificial Sequence
  Description of Artificial Sequence: Synthetic oligonucleotide
ggccccgcccucgagacug

SEQ ID NO: 2014531 - RNA, 19 nt, Artificial Sequence
  Description of Artificial Sequence: Synthetic oligonucleotide
ccauuccagcuggugaccc

SEQ ID NO: 2014532 - RNA, 19 nt, Artificial Sequence
  Description of Artificial Sequence: Synthetic oligonucleotide
ggaccggguggguuaugug

SEQ ID NO: 2014533 - RNA, 19 nt, Artificial Sequence
  Description of Artificial Sequence: Synthetic oligonucleotide
uggccgcaggagaguagau

SEQ ID NO: 2014534 - RNA, 19 nt, Artificial Sequence
  Description of Artificial Sequence: Synthetic oligonucleotide
cccucuacccucccuggac

SEQ ID NO: 2014535 - RNA, 19 nt, Artificial Sequence
  Description of Artificial Sequence: Synthetic oligonucleotide
gcuaucgcugaagcccuug

SEQ ID NO: 2014536 - RNA, 19 nt, Artificial Sequence
  Description of Artificial Sequence: Synthetic oligonucleotide
agcugugguacaacucaua

SEQ ID NO: 2014537 - RNA, 19 nt, Artificial Sequence
  Description of Artificial Sequence: Synthetic oligonucleotide
gggccuugaccgaccaucc

SEQ ID NO: 2014538 - RNA, 19 nt, Artificial Sequence
  Description of Artificial Sequence: Synthetic oligonucleotide
acuggaccggguggguuau

SEQ ID NO: 2014539 - RNA, 19 nt, Artificial Sequence
  Description of Artificial Sequence: Synthetic oligonucleotide
auguggccgcaggagagua

SEQ ID NO: 2014540 - RNA, 19 nt, Artificial Sequence
  Description of Artificial Sequence: Synthetic oligonucleotide
gguacuucugggcccucua

SEQ ID NO: 2014541 - RNA, 19 nt, Artificial Sequence
  Description of Artificial Sequence: Synthetic oligonucleotide
gggcuagugccaagaggag

SEQ ID NO: 2014542 - RNA, 19 nt, Artificial Sequence
  Description of Artificial Sequence: Synthetic oligonucleotide
gggcccaucacuggaaugu

SEQ ID NO: 2014543 - RNA, 19 nt, Artificial Sequence
  Description of Artificial Sequence: Synthetic oligonucleotide
ggugcggaggugcuugacu

SEQ ID NO: 2014544 - RNA, 19 nt, Artificial Sequence
  Description of Artificial Sequence: Synthetic oligonucleotide
caacucauacuggcaaggu

SEQ ID NO: 2014545 - RNA, 19 nt, Artificial Sequence
  Description of Artificial Sequence: Synthetic oligonucleotide
guggucuggugcgcucacc

SEQ ID NO: 2014546 - RNA, 19 nt, Artificial Sequence
  Description of Artificial Sequence: Synthetic oligonucleotide
gccuuaagaccaggugccc

SEQ ID NO: 2014547 - RNA, 19 nt, Artificial Sequence
  Description of Artificial Sequence: Synthetic oligonucleotide
gguggucuggugcgcucac

SEQ ID NO: 2014548 - RNA, 19 nt, Artificial Sequence
  Description of Artificial Sequence: Synthetic oligonucleotide
aggguagagcugaggcuaa

SEQ ID NO: 2014549 - RNA, 19 nt, Artificial Sequence
  Description of Artificial Sequence: Synthetic oligonucleotide
gcacacgaugguguuugac

SEQ ID NO: 2014550 - RNA, 19 nt, Artificial Sequence
  Description of Artificial Sequence: Synthetic oligonucleotide
ggugcuugacucgggcaga

SEQ ID NO: 2014551 - RNA, 19 nt, Artificial Sequence
  Description of Artificial Sequence: Synthetic oligonucleotide
ggcccaucacuggaaugug

SEQ ID NO: 2014552 - RNA, 19 nt, Artificial Sequence
  Description of Artificial Sequence: Synthetic oligonucleotide
gcgcucacccugaugggug

SEQ ID NO: 2014553 - RNA, 19 nt, Artificial Sequence
  Description of Artificial Sequence: Synthetic oligonucleotide
ccggguggguuauguggcc

SEQ ID NO: 2014554 - RNA, 19 nt, Artificial Sequence
  Description of Artificial Sequence: Synthetic oligonucleotide
cggugacgaagaaggguag

SEQ ID NO: 2014555 - RNA, 19 nt, Artificial Sequence
  Description of Artificial Sequence: Synthetic oligonucleotide
gguuaggguuuccuccccu

SEQ ID NO: 2014556 - RNA, 19 nt, Artificial Sequence
  Description of Artificial Sequence: Synthetic oligonucleotide
gugaccccuccuggaggag

SEQ ID NO: 2014557 - RNA, 19 nt, Artificial Sequence
  Description of Artificial Sequence: Synthetic oligonucleotide
ccuuaagaccaggugccca

SEQ ID NO: 2014558 - RNA, 19 nt, Artificial Sequence
  Description of Artificial Sequence: Synthetic oligonucleotide
gcucacccugaugggugcg

SEQ ID NO: 2014559 - RNA, 19 nt, Artificial Sequence
  Description of Artificial Sequence: Synthetic oligonucleotide
ggcggugacgaagaagggu

SEQ ID NO: 2014560 - RNA, 19 nt, Artificial Sequence
  Description of Artificial Sequence: Synthetic oligonucleotide
cuugaccgaccauccccua

SEQ ID NO: 2014561 - RNA, 19 nt, Artificial Sequence
  Description of Artificial Sequence: Synthetic oligonucleotide
gguggguuauguggccgca

SEQ ID NO: 2014562 - RNA, 19 nt, Artificial Sequence
  Description of Artificial Sequence: Synthetic oligonucleotide
aggggccuugaccgaccau

SEQ ID NO: 2014563 - RNA, 19 nt, Artificial Sequence
  Description of Artificial Sequence: Synthetic oligonucleotide
gugcuugacucgggcagaa

SEQ ID NO: 2014564 - RNA, 19 nt, Artificial Sequence
  Description of Artificial Sequence: Synthetic oligonucleotide
gggagcuacaggguaggcu

SEQ ID NO: 2014565 - RNA, 19 nt, Artificial Sequence
  Description of Artificial Sequence: Synthetic oligonucleotide
ccuugaccgaccauccccu

SEQ ID NO: 2014566 - RNA, 19 nt, Artificial Sequence
  Description of Artificial Sequence: Synthetic oligonucleotide
gggcuucgaggggucagug

SEQ ID NO: 2014567 - RNA, 19 nt, Artificial Sequence
  Description of Artificial Sequence: Synthetic oligonucleotide
ggggcuccacauggguaag

SEQ ID NO: 2014568 - RNA, 19 nt, Artificial Sequence
  Description of Artificial Sequence: Synthetic oligonucleotide
ccuguaugcacacgauggu

SEQ ID NO: 2014569 - RNA, 19 nt, Artificial Sequence
  Description of Artificial Sequence: Synthetic oligonucleotide
gcaagguucccaacaccua

SEQ ID NO: 2014570 - RNA, 19 nt, Artificial Sequence
  Description of Artificial Sequence: Synthetic oligonucleotide
cggguggguuauguggccg

SEQ ID NO: 2014571 - RNA, 19 nt, Artificial Sequence
  Description of Artificial Sequence: Synthetic oligonucleotide
cuaagccaggcaggccaaa

SEQ ID NO: 2014572 - RNA, 19 nt, Artificial Sequence
  Description of Artificial Sequence: Synthetic oligonucleotide
cgaccauccccuauuccaa

SEQ ID NO: 2014573 - RNA, 19 nt, Artificial Sequence
  Description of Artificial Sequence: Synthetic oligonucleotide
ccaggugcccacgcuggug

SEQ ID NO: 2014574 - RNA, 19 nt, Artificial Sequence
  Description of Artificial Sequence: Synthetic oligonucleotide
cggaggugcuugacucggg

SEQ ID NO: 2014575 - RNA, 19 nt, Artificial Sequence
  Description of Artificial Sequence: Synthetic oligonucleotide
ggucuggugcgcucacccu

SEQ ID NO: 2014576 - RNA, 19 nt, Artificial Sequence
  Description of Artificial Sequence: Synthetic oligonucleotide
cuaaagcccuggggcucca

SEQ ID NO: 2014577 - RNA, 19 nt, Artificial Sequence
  Description of Artificial Sequence: Synthetic oligonucleotide
ccuccccuguaugcacacg

SEQ ID NO: 2014578 - RNA, 19 nt, Artificial Sequence
  Description of Artificial Sequence: Synthetic oligonucleotide
gcccucuacccucccugga

SEQ ID NO: 2014579 - RNA, 19 nt, Artificial Sequence
  Description of Artificial Sequence: Synthetic oligonucleotide
ccaacaccuagcuggguuu

SEQ ID NO: 2014580 - RNA, 19 nt, Artificial Sequence
  Description of Artificial Sequence: Synthetic oligonucleotide
ccuggccccgcccucgaga

SEQ ID NO: 2014581 - RNA, 19 nt, Artificial Sequence
  Description of Artificial Sequence: Synthetic oligonucleotide
cuggaccggguggguuaug

SEQ ID NO: 2014582 - RNA, 19 nt, Artificial Sequence
  Description of Artificial Sequence: Synthetic oligonucleotide
guacuggaccggguggguu

SEQ ID NO: 2014583 - RNA, 19 nt, Artificial Sequence
  Description of Artificial Sequence: Synthetic oligonucleotide
ggugguggucuggugcgcu

SEQ ID NO: 2014584 - RNA, 19 nt, Artificial Sequence
  Description of Artificial Sequence: Synthetic oligonucleotide
ccccuauuccaaagggccu

SEQ ID NO: 2014585 - RNA, 19 nt, Artificial Sequence
  Description of Artificial Sequence: Synthetic oligonucleotide
gccuugaacucuacucuau

SEQ ID NO: 2014586 - RNA, 19 nt, Artificial Sequence
  Description of Artificial Sequence: Synthetic oligonucleotide
ccucuacccucccuggacu

SEQ ID NO: 2014587 - RNA, 19 nt, Artificial Sequence
  Description of Artificial Sequence: Synthetic oligonucleotide
ccccaguauguguacgccu

SEQ ID NO: 2014588 - RNA, 19 nt, Artificial Sequence
  Description of Artificial Sequence: Synthetic oligonucleotide
gggugcggaggugcuugac

SEQ ID NO: 2014589 - RNA, 19 nt, Artificial Sequence
  Description of Artificial Sequence: Synthetic oligonucleotide
ccauuucccaggccuuucu

SEQ ID NO: 2014590 - RNA, 19 nt, Artificial Sequence
  Description of Artificial Sequence: Synthetic oligonucleotide
gguacuggaccgggugggu

SEQ ID NO: 2014591 - RNA, 19 nt, Artificial Sequence
  Description of Artificial Sequence: Synthetic oligonucleotide
cagguacuucugggcccuc
